United States Patent Application Publication US 2005/0228172 A9 - sequence listing, part 65

SEQ ID NO: 280794 - DNA, 521 bp, Homo sapiens
tgaatagaacagtacctcacatctcagtactaatgtttaatataaatgacstaaatgctccacttaaaagatacagaatggcagaatggatcaaaatccacaaaccaagtatctgctgtcttcaagagactcacctgacacataaggattcacataagcttaaggtaaaaggtggaaaaagacattccatgcaaatggacaccaaatgcaagcaggagtagctattcttacatcagacaaaacagaccttaaagaaacaatggttaaaaaagacaaagaaggacattatataatgataaaaggactagcccaacaggaaaatatcacaatcctaattatatatgcacctacaccagagctcccaaatgtacaaaacattactactagacctaagaaatgagatagctggtaacacaataatagtgggggacttcaatactccactgacagcactagaccagtcgtcaggagagaaagtcaacaaagaaacaatagacttaaactataccctacaacaaatg

SEQ ID NO: 280795 - DNA, 614 bp, Homo sapiens
cacctctacaaaaaataaaatacattagctgggtatgatggtacacacctgtggtcccacctacttgggaagctgaagtgagctataattgtttcactgcactccactctggatgacaggaaaacaccctgttacttaaagacaaaaatgaatcaagtggggttgttgtctagcaacatattctggtccttgaaactatgttaacgctggccctcttaaggctttcggggattccaaaatctactcasgtaccgccttctcactatttcttggagtcgctccttctctatcattctccattaatattaattgaagaagtgaaagctggaagaatcaccttctgtcctagattgtagttgtgttggaacactggaccaggagagccaggcccaactctgtcattaagtgttttagaacagacacctcagtcacacaaagtttctcttgtatgtgcccaccataaacagttactggaggatgactctcaaggccattctagtggctgctggcagtgcttttccagcctgctgcccataactaaggactcaaggcagggaagacacaggcacgggggttatctgaggagcggggactgcctcttgctatgcacaagg

SEQ ID NO: 280796 - DNA, 614 bp, Homo sapiens
cacctctacaaaaaataaaatacattagctgggtatgatggtacacacctgtggtcccacctacttgggaagctgaagtgagctataattgtttcactgcactccactctggatgacaggaaaacaccctgttacttaaagacaaaaatgaatcaagtggggttgttgtctagcaacatattctggtccttgaaactatgttaacgctggccctcttaaggctttcggggattccaaaatctactcacstaccgccttctcactatttcttggagtcgctccttctctatcattctccattaatattaattgaagaagtgaaagctggaagaatcaccttctgtcctagattgtagttgtgttggaacactggaccaggagagccaggcccaactctgtcattaagtgttttagaacagacacctcagtcacacaaagtttctcttgtatgtgcccaccataaacagttactggaggatgactctcaaggccattctagtggctgctggcagtgcttttccagcctgctgcccataactaaggactcaaggcagggaagacacaggcacgggggttatctgaggagcggggactgcctcttgctatgcacaagg

SEQ ID NO: 280797 - DNA, 614 bp, Homo sapiens
cacctctacaaaaaataaaatacattagctgggtatgatggtacacacctgtggtcccacctacttgggaagctgaagtgagctataattgtttcactgcactccactctggatgacaggaaaacaccctgttacttaaagacaaaaatgaatcaagtggggttgttgtctagcaacatattctggtccttgaaactatgttaacgctggccctcttaaggctttcggggattccaaaatctactcacgtaccgccttctcactatttcttggagtcgctccttctctatcattctccattaatattaattgaagaagtgaaagctggaagaatcaycttctgtcctagattgtagttgtgttggaacactggaccaggagagccaggcccaactctgtcattaagtgttttagaacagacacctcagtcacacaaagtttctcttgtatgtgcccaccataaacagttactggaggatgactctcaaggccattctagtggctgctggcagtgcttttccagcctgctgcccataactaaggactcaaggcagggaagacacaggcacgggggttatctgaggagcggggactgcctcttgctatgcacaagg

SEQ ID NO: 280798 - DNA, 614 bp, Homo sapiens
cacctctacaaaaaataaaatacattagctgggtatgatggtacacacctgtggtcccacctacttgggaagctgaagtgagctataattgtttcactgcactccactctggatgacaggaaaacaccctgttacttaaagacaaaaatgaatcaagtggggttgttgtctagcaacatattctggtccttgaaactatgttaacgctggccctcttaaggctttcggggattccaaaatctactcacgtaccgccttctcactatttcttggagtcgctccttctctatcattctccattaatattaattgaagaagtgaaagctggaagaatcaccttctgtcctagattgtagttgtgttggaacactggaccaggagagccaggcccaactctgtcattaagtgttttagaacagacacctcagtcacacaaagtttctcttgtatgtgcccaccataaacagttactggaggatgactctcaaggccattctagyggctgctggcagtgcttttccagcctgctgcccataactaaggactcaaggcagggaagacacaggcacgggggttatctgaggagcggggactgcctcttgctatgcacaagg

SEQ ID NO: 280799 - DNA, 345 bp, Homo sapiens
acagttgctaggtgagtttgagctgggattctctggcttcagagctaaggaaggccccaaaacatgcagggcgagaggcacactgaactctggaccttccacattagattcgtcagtgtctgaggcaaatcagggaggaagaaatagattgttataaaaattagtaatctgcagcatctatttgtgtgttactttgttgaatgtctgccccccacacccaccagcccccaactgtaagctctgtggatgaggcaaatacatatggtatatctggcatcaacactggatcagctacatagtgggggttcaataaayctggattgaatctctgaataacactctttt

SEQ ID NO: 280800 - DNA, 629 bp, Homo sapiens
ctacaaatgcttcagctttttggaaaagcagactggtaatgtttataaattgctttttataagcttctttctttggaaagaaaatagtaatttccttttcaggaatctagactgaagaatcattagacattttaagaaatgtatatttaatgaacatgattcagcacactaaaaaattagaagcaatgaaagtgtttaatattagaaaacagttattaaaatagtattttcaaagaatgttttatgaaattgtaaaagaagtcatataggaatttgtggaaaaaaaagtgtacagtctggctgggagcggtagctcacgcctgtaatcccagcactttgggagaccaaggcaggcggatcatgaggtcaggagatcgagatcatcctggctaacacggtgaaaccccrtctctactaaaaatacaaaaaattagctgggcgtggtggcacatgcctgtagtcccagctactcgggaggctgaggcaggagaaatgcttgaacccgggaggtggaggttgcagtgagccgagatcgtgccattgcactccagcctgggcaacaagagtgaaactcagtctcaaaaaaaaaaaaaaagtgtacaattgtgtatatgtatatatatgattca

SEQ ID NO: 280801 - DNA, 447 bp, Homo sapiens
tctgcccaagagaaatgaaaacttatgttgacataaaagcctgtttrtgaatgtgtgcagtggctttcttcataattgccaaaaacagtgaacaacttaaatgttctttgctggtgaatatagataaataaactatggttcatctatggaatattactgagcaataaaataattttctgatatacacagtaacacgaatgagtcttacatgcattattctaagtgaacaaaatctaaacttgaaagactacatactgtgtgcttccatttagatgatgttctggtaaaggcaaaattacaggaacagaaagcagattgttggttgcctaagggcaagtggcctaaaaaaattttggaagggtaatgaaaaagttctagagtttaatggtgtttatggttatagggtgtatgtgtttgtccaaattcatagaagtctacatttttaaa

SEQ ID NO: 280802 - DNA, 1261 bp, Homo sapiens
tgtgcaattcagtggtattaggtatactcacaatgttgtgcaaccatccccagtatccatttccattaccccgaacagaagctctgaactcatcatttagcaataactccacatccccccatttccccagcccctggtaacctctattctactttctgactctaagaatttgcctattctagatacctcacataaatgaatcacacagtattggtttcrttgcacctcgcttgtttcgctcagcacattttcagggttaatctatgtagcaacacgtatcagaatttcctttttttttttattttactttaagttctagggtacatgtgcacaacatgcaggtttgttacataggtatacatgtgccatgttggtttgctgcacccatcaacctgtcatctacattaggaatttctccttaatgctatccctcccccagccccctaccccctgacaggccccgtgtattatgttcctcaccctgtgtccatgtgttctcattgttcaactcccacttatggttgtgaagtggagcatctcacatttgttttgcccttgatccttcctctaaaatgtaacaagccaagataatgtggggggagggggtatgccaactaaagaaatgtgtggwtgtgcaattcagtggtattaggtatactcacaatgttgtgcaaccatccccagtatccatttccattaccccgaacagaagctctgaactcatcatttagcaataactccacatccccccatttccccagcccctggtaacctctattctactttctgactctaagaatttgcctattctagatacctcacataaatgaatcacacagtattggtttcattgcacctcgcttgtttcgctcagcacattttcagggttaatctatgtagcaacacgtatcagaatttcctttttttttttattttactttaagttctagggtacatgtgcacaacatgcaggtttgttacataggtatacatgtgccatgttggtttgctgcacccatcaacctgtcatctacattaggwatttctccttaatgctatccctcccccagccccctaccccctgacaggccccgtgtattatgttcctcaccctgtgtccatgtgttctcattgttcaactcccacttatggttgtgaagtggagcatctcacatttgttttgcccttgatccttcctctaaaatgtaacaagccaagataatgtggggggagggggtatgccaactaaagaaatgtgtgg

SEQ ID NO: 280803 - DNA, 609 bp, Homo sapiens
ggaaatatttatattgttacttgaaactgttatgggtatgttgtaggaaccacgatgtttagtatacaaaaagaggagagtacctaaagattctagattccggaatgatacaccaaccaagaaaactccacaaagtgtagtgggtcaccttcgcaaattgctrggatactacctcattactgtaaaaagtaaagtgaaagaattcagctttgatcatgcctttctagcacaaattgtatttgaagataatcaaatagttgatgagagaaagtcattaattatggagaaatcacaactaatacatgcaaaaggaatgaattagaaaatgagcgttataaaactcctgatgagacagcagagcaaaacagtcatcatcagtggtcgctaaatccatcaagtaacaggttgatggaaaactttctcatggacgaggctgacttgaatggaggaaatatggaaatgaatagagaaataaagcagtttgatacctttatcctattgagatgtgcctgagctggaaaatttgcaacaacaaaaaaaaaaaatagttcctacactctgttttccagcgcctgcccacagtgaacttggatgcatgcttgcaagagg

SEQ ID NO: 280804 - DNA, 609 bp, Homo sapiens
ggaaatatttatattgttacttgaaactgttatgggtatgttgtaggaaccacgatgtttagtatacaaaaagaggagagtacctaaagattctagattccggaatgatacaccaaccaagaaaactccacaaagtgtagtgggtcaccttcgcaaattgctaggatactacctcattactgtaaaaagtaaagtgaaagaattcagctttgatcatgcctttctagcacaaattgtatttgaagataatcaaatagttgatgagagaaagtcattaattatggagaaatcacaactaatacatgcaaaaggaatgaattagaaaatgagcgttataaaactcctgatgagacagcagagcaaaacagtcatcatcagtggtcgctaaatccatcaagtaacaggttgatggaaaactttctcatggacgaggctgacttgaatggaggaaatatggaaatgaatagagaaataaagcagtttgatacctttatcctattgagatgtgcctgagctggaaaatttgcaacaacaamaaaaaaaaatagttcctacactctgttttccagcgcctgcccacagtgaacttggatgcatgcttgcaagagg

SEQ ID NO: 280805 - DNA, 571 bp, Homo sapiens
atctgcacttcttactccctcactttcttcaaatatggtccaacatcattttctcaccttctcagtagggcctatcctgaccactctatccaaaactgacaccatcacttctcataagtacttcttgccctctctttagtatttctccccaggcatgcactacaatctagatgatacatcttacttttttgatgttgctagctatctctccttacataacacaaccataatgaggagtgtttattcattgttacatctccagcagccagaaaaaaatcaatagcaattaatgctcttggcactcaggttgtggcccctaagcattatttctaaggaaactggggtggtatgcaggccgggggagcaagatggttcttagagatgctggttccaggcctagggcaggaactgtatgagatgaatctggaagatcttggcataccacagaacaagaaaactattacaaactaccatggtcatgtcaaaaggtctgagaaagcagtatgaataggtcctcactggccaaagcggggcaacytgacaatcagtaagaaaataactgcaatggatt

SEQ ID NO: 280806 - DNA, 598 bp, Homo sapiens
gcaagatggttcttagagatgctggttccaggcctagggcaggaactgtatgagatgaatctggaagatcttggcataccacagaacaagaaaactattacaaactaccatggtcatgtcaaaaggtctgagaaagcagtatgaataggtcctcactggccaaagcggggcaacttgacaatcagtaagaaaataactgcaatggattgttcaaatgttttaatccattactacataaygataataaaaaacaaaaagcaagcaagcaaaaagaagaaaagctggaaattctaggaaatgaactgggaaataaatggtttcttctatgaatttcctcttagggtgatcacatacctgatgaagagtcacatctctgcacagaagtattcctgatatattaagaaggtacctttaatgaattaatgaacctgggcactgatcaatgattgctaacatcaaaaaaaaaaaaaaaagagagagagagagaaagagaaatcaggcattatgtgcctcccaactcaagtatataataccattatccatgaaataacttgcacaaacaatattaggcactattctgatcaaacctcagagctag

SEQ ID NO: 280807 - DNA, 618 bp, Homo sapiens
gcagttataatgagaatagttgtacagtatgttttaaaagtctcttttagagatacacattgaaacagatgatatgatgcttgagatttgtcctaaaataatgaagcagaggaggttataaatgaaatgagaccggctatggattgacaattgttgaatatggatcacgggcacacaggagtttgttaaactcttttgtagtacatgctggaaattttgcatattaaaaagtttaaaacataattttaaaagtatttttagggtcatacaatagaaattacatgagacgatatttaaatgtgtataaaaaacaaattggagatgacagcattgaagccccatcctgccacatgtgttccaagaagcagtcaaagaagtgttgatttgggttttggcaagtcttgtcctttgcccttctgakttttgtagagtggaggccagaacaagaagtctaaatataaatgttgtggtatataacattcataaacaggaagtgttgctaagaactttagtgggtgaggggctaaagggagaaactaacagatcagttaggctgactaacaaatactgttctgtaaactcaggatttttttttttttaaattcttttactaaggat

SEQ ID NO: 280808 - DNA, 391 bp, Homo sapiens
gttttacaaaacatctctactaatctcacattaacaatggtagggtgcactgggtccayacgtgcagctaattccagtgcaaacccaagtatcatgtccagaaatgaccaatcaagggaaaatactctcaccacaaataaatatgtatgtgaagtaatgcacatgttaattagcttgatttagccattccacaatgcagacccatatcaaaacaccaagttgtataccatgaatacatacaaacgttgtcaatttaaaaataggcattaagggaaacagctgaatttctatattaccagaagtcaaaggatctaaaattgcattacactggtaaatgagaaccagaaattgattctaattctaaaatggaacaatgttcccacatataatg

SEQ ID NO: 280809 - DNA, 586 bp, Homo sapiens
gacaccttgataataaggttttggtcctagagaaagtaggacagagagaatgtataaaagaagctgaaagccagaatatttcaaacacccacaagcacaacaaattcttgggtayggtttgaagaaaggctaaaagctatttaaattgtaagtctactgtgactgatccagagtgatatgaaacctacaagccattggcataaaatatacatgccaagcctgctaggtaatgtccttggctaggatgcctcttaaaaaccagattgtgccaggtgcagtagtgcatgcctacagtcccacctactgagaaggctgaggcaggaagactgcttgtgcccagtaggttgagaccagcctgggcaacatagcaagacatgttaaaaaacaaaaaatcaggctatcttacaacttaattccttagaacttctcccggcccttagcaggtattccttcatgtagaaaagaacatgctttgtgttaagaccatgtaaatttggataccaatactctgcttgtaaagttaagagactaatgtgcatattctgggatgttacaagtattcttataatcctggaatgctattcat

SEQ ID NO: 280810 - DNA, 586 bp, Homo sapiens
gacaccttgataataaggttttggtcctagagaaagtaggacagagagaatgtataaaagaagctgaaagccagaatatttcaaacacccacaagcacaacaaattcttgggtacggtttgaagaaaggctaaaagctatttaaattgtaagtctactgtgactgatccagagtgatatgaaacctacaagccattggcataaaatatacatgccaagcctgctaggtaatgtccttggctaggatgcctcttaaaaaccagattgtgccaggtgcagtagtgcatgcctacagtcccacctactgagaaggctgaggcaggaagactgcttgtgcccagtaggttgagaccagcctgggcaacatagcaagacatgttaaaamacaaaaaatcaggctatcttacaacttaattccttagaacttctcccggcccttagcaggtattccttcatgtagaaaagaacatgctttgtgttaagaccatgtaaatttggataccaatactctgcttgtaaagttaagagactaatgtgcatattctgggatgttacaagtattcttataatcctggaatgctattcat

SEQ ID NO: 280811 - DNA, 511 bp, Homo sapiens
accattaggaagctcctgctctgcatcttactcttattatacagctaacagaaacgagattgtcagagagaacttctaactatagggtgtggcctggacatgtggctcaggggtgggggagatctgactgctgcagatgaaatggaaggaaacagtgggaatgtactagtcccacgacatcccagctttatggaatatgaagaatccagggttgttatctaccagacttgtgatctctgatttgccctctcctatcagactttggagaggatgtgccggctctccagtggaaaacaaatgacctctgtcaggcsgtggttgggcataagatagcacagggagtccagatctttctgactgaggagaaaagtgccagaagacgcagatcaggatttctgcaggtttagtcagagaacccacagtgcctcctgacctctgaaaatcagggcctgccatgaagtgtggataccttcatcaactctaaatttcaaagaacagctttggaggaaat

SEQ ID NO: 280812 - DNA, 635 bp, Homo sapiens
gcttttgggggtggggtgggatagagctttgactggactatggggggtggagcaacaggggctcaagaccgggatgctggggtgaaaggaaaggaaggcagaaaatgaacattcctgatgctgatgcccagggcatccatgctacccgtagctcacatccatcttaccctgctggatggatggcatattcctacctaatgagtaagaaacctgaggctcactgaatgtaagttgcttacctgagaccacacagtgggcagaaccataaaaaaagcctttggccctttaacagtattaagcattggaatgccgggtgaagggcakggagagcaagagagagccctgcctccttcctccatccccctcctgacttgacagtcatttacccactgaccgataatcccccttgaggcagagaggatggggcctggtgtgtatttgccacctatcagcgataaaacaccccctttgtacagaggaagttgatagtggaagggtcaggctggttgcttctgggtttgattcctaatcacgttttaaatccctggtgccttgtgaaataaacatgattaactccaggagctggctcgccaagcctggcagagaggagtggcccagagcaccgggggacagct

SEQ ID NO: 280813 - DNA, 517 bp, Homo sapiens
cggatcctctgccgcccaaggcctgtccagcagcctgggccctgggagaaacacgtggggatggatggacgagtcaggaaccaccccctcgcagggtgcccgcagatgccccagcacctttggctcgacaactccaacgtgcacrgggacccagttttagaatattcagaaggcgaaaatgcacactttccaaccaaaaccttcaacaagatcatcattatcagtttatataaaacttttataaaattctgctttcaaaattctttttgtaacaaagatgctcttctacggcgcttaaagtggaagccaatgtctgacatttttatttacatcccagcctcgccgacagtgtatgaaccaaagctggactccctagaaggaggggactctggcgtgtggggctcacaggaggggtgaggctcagaggatgcactggtgctcactctacagctgacgcctcactgcagtcagacaccacagcagcttcctctggggcctgtcgcccgaggttgggcca

SEQ ID NO: 280814 - DNA, 517 bp, Homo sapiens
cggatcctctgccgcccaaggcctgtccagcagcctgggccctgggagaaacacgtggggatggatggacgagtcaggaaccaccccctcgcagggtgcccgcagatgccccagcacctttggctcgacaactccaacgtgcacagggacccagttttagaatattcagaaggcgaaaatgcacactttccaaccaaaaccttcaacaagatcatcattatcagtttatataaaacttttataaaattctgctttcaaaattctttttgtaacaaagatgctcttctayggcgcttaaagtggaagccaatgtctgacatttttatttacatcccagcctcgccgacagtgtatgaaccaaagctggactccctagaaggaggggactctggcgtgtggggctcacaggaggggtgaggctcagaggatgcactggtgctcactctacagctgacgcctcactgcagtcagacaccacagcagcttcctctggggcctgtcgcccgaggttgggcca

SEQ ID NO: 280815 - DNA, 517 bp, Homo sapiens
cggatcctctgccgcccaaggcctgtccagcagcctgggccctgggagaaacacgtggggatggatggacgagtcaggaaccaccccctcgcagggtgcccgcagatgccccagcacctttggctcgacaactccaacgtgcacagggacccagttttagaatattcagaaggcgaaaatgcacactttccaaccaaaaccttcaacaagatcatcattatcagtttatataaaacttttataaaattctgctttcaaaattctttttgtaacaaagatgctcttctacggcgcttaaagtggaagccaatgtctgacatttttrtttacatcccagcctcgccgacagtgtatgaaccaaagctggactccctagaaggaggggactctggcgtgtggggctcacaggaggggtgaggctcagaggatgcactggtgctcactctacagctgacgcctcactgcagtcagacaccacagcagcttcctctggggcctgtcgcccgaggttgggcca

SEQ ID NO: 280816 - DNA, 628 bp, Homo sapiens
aagtggcaatgggctgaattttacattcttaacacaggcagccagccgtggtatttctattgccagaaggactttagtttcttattggcaagcagtttccaggttctcttcacaaagttgcttccaggatttccaactaagagttcaaattcttttggggaaacttcatgattttagtgctgtsgtccaaaatgatccagtagtaatggcagtttcaggcctagggactaagaggaatctaggaagcggcacttaagtgtctctgcatctcaggagaaggggacgtgtgtgaagagtgcatatctctcccactgttttgcaaaaaaacccagtctgggcctcagctgggtaagcctcaactcttacttattagcctgttaggaaatgtgcttgttacttggaaacactttcaactttgagcacactgaactaaaaggtctctgaaatagatactagaattctaagatgcttcatatcttggagatttgcctgagaggatggggaaaaaatcaagtctgattacactccagagtctcagggactttatcaaccaggggcccaggacaaatccctaaaacagagtcagaatgactttaaggggctggtagtaagatctcaggcgcagttt

SEQ ID NO: 280817 - DNA, 578 bp, Homo sapiens
ttccagtcctttaatcaaattggaaagccatgtgtctgtggtgctctcactggctgctccctctcatccccactgttggtccagtgaggtggacaacaaagacgtgttaggtttgctcygatatgtagacaggagtaccaactttggggtctgccctggcaccagtacctcttttagcagagacagacagaagttcagagctaaggcaaacactctggagatcatgagtggggcaggctagtggtattttaacaaaactcttgaaaaaaatttttttttgagacagagtctcactgtgtcactcaggctggagtgtaatgccgcaatcttggcttactgcaacctccacctcacgggttcaagtgattctcctgcctcagcctcccgagtagctgggattacaggcgtgatggcccggctaatttttgtatttttagtagagatggggcttcaccaagttggcgagactggtctcgaactcctgacttcaggtgatccgcccgcctcagcctcccaaagttctgggattacaggcgtgagccaccacacctggcctgaaattttaaacatagtggttc

SEQ ID NO: 280818 - DNA, 545 bp, Homo sapiens
tgtattgcttctttaaactttattcccttcactttttccagktatctctttctggaacccctgtaatccagcttatttctcttgctttcatcctctagttttctttttctcttctgttttccagcttgttgactttttattctgccccctgggaggttccctcagctttgcacaccacctcacctagaaattgttttcatttcttctgtcgtatttttaaatttccaagtgttctttctgattccagcatcctatgcaatatcttctcttcactctcagaggatatttattacaggctcttatgaagttttcctttttttttttttttccattgactcgtttcctcttgagttttgtgtttgttttggcctcttttcaagttggaggctgagccacccctttgggtttgagacagacacaaacaaaatgcaagtggaagctccatgggaaggtggagtgtgttgtccgggggatctcattgcgaggtgactgggtggccaagtaactcttcactggggaccctcaaaaattagtccatgggtttg

SEQ ID NO: 280819 - DNA, 545 bp, Homo sapiens
tgtattgcttctttaaactttattcccttcactttttccagttatctctttctggaacccctgtaatccagcttatttctcttgctttcatcctctagttttctttttctcttctgttttccagcttgttgactttttrttctgccccctgggaggttccctcagctttgcacaccacctcacctagaaattgttttcatttcttctgtcgtatttttaaatttccaagtgttctttctgattccagcatcctatgcaatatcttctcttcactctcagaggatatttattacaggctcttatgaagttttcctttttttttttttttccattgactcgtttcctcttgagttttgtgtttgttttggcctcttttcaagttggaggctgagccacccctttgggtttgagacagacacaaacaaaatgcaagtggaagctccatgggaaggtggagtgtgttgtccgggggatctcattgcgaggtgactgggtggccaagtaactcttcactggggaccctcaaaaattagtccatgggtttg

SEQ ID NO: 280820 - DNA, 545 bp, Homo sapiens
tgtattgcttctttaaactttattcccttcactttttccagttatctctttctggaacccctgtaatccagcttatttctcttgctttcatcctctagttttctttttctcttctgttttccagcttgttgactttttattctgccccctgggaggttccctcagctttgcacaccacctcacctagaaattgttttcatttcttctgtcgtatttttaaatttccaagtgttctttctgattccagcatcctatgcaatatcttctcttcactctcagaggatatttattacaggctcttatgaagttttcctttttttttttttttccattgactcgtttcctcttgagttttgtgtttgttttggcctcttttcaagttggaggctgagccacccctttggrtttgagacagacacaaacaaaatgcaagtggaagctccatgggaaggtggagtgtgttgtccgggggatctcattgcgaggtgactgggtggccaagtaactcttcactggggaccctcaaaaattagtccatgggtttg

SEQ ID NO: 280821 - DNA, 545 bp, Homo sapiens
tgtattgcttctttaaactttattcccttcactttttccagttatctctttctggaacccctgtaatccagcttatttctcttgctttcatcctctagttttctttttctcttctgttttccagcttgttgactttttattctgccccctgggaggttccctcagctttgcacaccacctcacctagaaattgttttcatttcttctgtcgtatttttaaatttccaagtgttctttctgattccagcatcctatgcaatatcttctcttcactctcagaggatatttattacaggctcttatgaagttttcctttttttttttttttccattgactcgtttcctcttgagttttgtgtttgttttggcctcttttcaagttggaggctgagccacccctttgggtttgagacagacacaaacaaaatgcaagtggaagctccatgggaaggtggagygtgttgtccgggggatctcattgcgaggtgactgggtggccaagtaactcttcactggggaccctcaaaaattagtccatgggtttg

SEQ ID NO: 280822 - DNA, 570 bp, Homo sapiens
cttgtgaacacagaggttgcaaaatgacaatcccaggcaaaacctggctcagggagattctggccttcaggtgtaatattttattataatatcaatccaatcaagagagtagagaggggctaatgaagcaaccagccaaatctaaaatgtggaaatttctataccacaaatgatccagttgcttcagtaaataaatgggtttaaaaaaaaaatactcctacaaattagaagagttatcagtcctggaggttctagccaggcaatcagccaagagaatgaaatgaaaggaatccagaaaggaagaagtaaaactatgtgtatgacatgtttgcatacataaaaattttaaggaatccattaaaaaatctattagaactaatgatttctgcaaggttgcaggatacaagagcaatacacaaatatcaattgtattcccatacattagcaatgaaaaacctgaaaatgaaattaagaaaacaattccatktacgatagcatcaacaagaataaaatatttaggaataaatttgacaaaataagtgcaagactggaatgccaaaaactacaaaa

SEQ ID NO: 280823 - DNA, 622 bp, Homo sapiens
tatgacttgtgtgtcacaaatccctaacttacctgcrtctcagttccctcttctgtaaaatggggatatctatacctctcccacacaatttaagatatcaaatgagataatgaacatgacaagtgttctatggacttcaaggtaccatataaataagtaaaggcagattgcttagttaaaaaaaataaaggttttatagtctgagagaaacccagctttcaaccctattactgttcccagtttaatgtaagcttgagcaagagacttcatctctgaatctgcgtcctcttctgtaaacgggatcgacacttaaccctgcaagctgtagcaggaaattgataatgtaatatgacaaagtgtgtagtatttatagcctcttatagtgttcagttttcagtaaaaagtaatcatcaggccgggcgcggtggctcacgcctgtaatcccagcactttgggaggccgaggcgggcagatcacgaggtcaggagatcaacaccatcctggctaacatggtgaaaccccgtctctactaaaaatacaaaaaattagccaggcgcggtggcggccgcctgtagtcccagctactcgggaggctgaggcaggagaatggcatgaacccggg

SEQ ID NO: 280824 - DNA, 622 bp, Homo sapiens
tatgacttgtgtgtcacaaatccctaacttacctgcatctcagttccctcttctgtaaaatggggatatctatacctctcccacacaatttaagatatcaaatgagataatgaacatgacaagtgttctatggacttcaaggtaccatataaataagtaaaggcagattgcttagttaaaaaaaataaaggttttatagtctgagagaaacccagctttcaaccctaytactgttcccagtttaatgtaagcttgagcaagagacttcatctctgaatctgcgtcctcttctgtaaacgggatcgacacttaaccctgcaagctgtagcaggaaattgataatgtaatatgacaaagtgtgtagtatttatagcctcttatagtgttcagttttcagtaaaaagtaatcatcaggccgggcgcggtggctcacgcctgtaatcccagcactttgggaggccgaggcgggcagatcacgaggtcaggagatcaacaccatcctggctaacatggtgaaaccccgtctctactaaaaatacaaaaaattagccaggcgcggtggcggccgcctgtagtcccagctactcgggaggctgaggcaggagaatggcatgaacccggg

SEQ ID NO: 280825 - DNA, 563 bp, Homo sapiens
ggagcactttcatccaaagacgcgaactcagagcaaaatgaacatttccaaagcagccctgccacttcagctgacacacatttatgtgactggtagagagaaggttggttacttagtcctcaagaagaagaatcttaatttccctggaaagcccatctgataacacctctgttcctgcaaactgtatactctcctagtcttctgcactatatacctgttcctggagttttagatcctcctttgtaatgaaagggggaaaaccccatcttcctcatctacactggttaccaaagtagtcatcccaatacccaaacttttccaatcggctccccaattcttctgacacaactaggtcaactgactccttttccataatttctmatctttcagcatgcaattctttccatatggtactatatttccacagacacagagaacaacattctaagcctcctaaaaagattgttttctaaaagtcaaaattatatatctaaaaaaaatagattgttttctaaataaaattggcatggtttgtatgtatatcttaagcactgcagggtaat

SEQ ID NO: 280826 - DNA, 588 bp, Homo sapiens
gtatatatctctctaagtgtaaaaggtagcttcaatgttgatgggatactcttgaagaaatagggtacaatatttctagaagactgatktctccagactcacatattataaggagccaaaactagtatgtaaaatgattcaagagaaaccttacctcaaataacaaaatatacaaatgtggtccatatacgaatcatcatgacaacttgaaagggaaattagttcactattagattttacattgtcttctaacaaaaagcaaatataaaatgactgctaagtaattttacttgtcttgactaggttatgacttaattaatagtttaggcagaagttcaattacaaaagaattgtattttcactttttaagagagatagttttgcctaggaaggaattatttataattatatatgttcagatatttaattccacagataaatgatggaagtcttaatatagggaacaacatgtaatgtcagaataaaaggatctccttagtctaattgaatgttgtacttcactatgtctgtctgatagaaataattacataccttgctgggatttagctttcattttagcattgggtg

SEQ ID NO: 280827 - DNA, 588 bp, Homo sapiens
gtatatatctctctaagtgtaaaaggtagcttcaatgttgatgggatactcttgaagaaatagggtacaatatttctagaagactgatttctccagactcacatattataaggagccaaaactagtatgtaaaatgattcaagagaaaccttacctcaaataacaaaatatacaaatgtggtccatatacgaatcatcatgacaacttgaaagggaaattagttcactattagattttacattgtcttctaacaaaaagcaaatataaaatgactgctaagtaattttacttgtcttgactaggttatgacttaattaatagtttaggcagaagttcaattacaaaagaattgtattttcactttttaagagagatagttttgcctaggaaggaattatttataattatatatgttcagatatttaattccacagataaatgatggaagtcttaatayagggaacaacatgtaatgtcagaataaaaggatctccttagtctaattgaatgttgtacttcactatgtctgtctgatagaaataattacataccttgctgggatttagctttcattttagcattgggtg

SEQ ID NO: 280828 - DNA, 563 bp, Homo sapiens
ttcatggagggctcctggagtccccacagggactgcctcatggaggagggggctgaagaaatggggccacaggctttacacctgttactgctaaaggagctatgctttgtcattgttatgtttcagtgaactatttcctttgaagaaaaggttccatagaaaacaacagcaagtttgaaaaacactgatagtagtttgcttatttggagaaaaactgttcccaaattgctttggttcaaatatgatttgtccccaccaaaactcatgttgaggcttggttcccaatgtggtggtgttgggacgtggtgcctccaagggtagattattaggtcattaagagggagtaatgycttttttatgggagtgaagtcctagttactttgaggttgttacaaagtaaaactgcctgtcttgtcgggttttttttgtttttgtttttttttgcatgggccaggctcccctctcaccttcccaccctgttatgaagcagcatgagttcctcaccagatgcagccacccgtcttggacttcccagcctccataacacaaatgaatatgctgac

SEQ ID NO: 280829 - DNA, 1181 bp, Homo sapiens
tatcagcattacatagagcctgcagtttccctaagaaactgtcaactttggggacaaaaataaggaaagtttcttactcctctgtttctatcttttgatctttttaaaagacatytagtaacaaagttaggctaaaaggctaaaagctggtaagccaccaatctatatggggcatcaaaatatcactaaaataggctagtaatatgatgccaattaatcaagttttccctcatggtttcttaagatggtattgccctagatatgataaaatataacccaaaatagaagattcaaaaccatcaacaaacaaaaacagaaagcttgctttctggcatctacgttttgccgttgaatatttttgagatgtccacataagttccaaggagcagctgcagccacaccaccaccctgagcccagccagctgacagttgcctagagttggcagccacagctagctgaaatttggaaacccccaaatgcttagggttgagatgtgtccaattaccaaaattataaagccttcattaggcttttgaagaagttgtgtggtctgtagaattgcatgttttgaacataaagaggttagtwtgtgacagtcttccacaaacactcaaagtwctgggttttgctggaaattggggtactttgtttcccatgcattcacacaatccactttatccagggtcaatagatcagaagatacagaattgcatacaacaactaagaaaaaggccaaagaggtagcatttcgatactcagtgaggaaggctttctactgatggctctgtttaatagatacagtagtgaaatgcaagacagaggattataacagtgcttgatctagaagtggcaaggattccaaatccctatgatttgaatcttaaattgctatgatggatgccaattaagggaagcccagaaggtctctccaatccctgatgaggctaccctactcttttgacagactcaattataattttcaatcttacgaaaagaactgtgccatgtcctcctcattttatatatctaagtaactgggttggtatttatatgaattggaagcatgcttatgtgcccaagcctacataaagataggcagcctgacctatgatgacatggttttgctatcacggtcaggagtagtcttaataagtagctgtctgttactaactgctgccag

SEQ ID NO: 280830 - DNA, 627 bp, Homo sapiens
ctatactcattagaattaatcatgactaggagagttttcagtgcataagycaatcataatgagtccaccttcatgctataccttattacttttaaaaacatatacagtcatatttcattttattgcaggtcactttatttccattcacagatactgtaatttttttacaaattgaaggtttgtggcaaccctgcctcaagcaagtctatctgccatttttccaacaacatgtgctcacttcatgtctctgtgtcacattttgataattcccacaatatttcaaactcattattatcctattgattatggtgatctacaactagtagtctttgatgtggctattataattgttttggggtgccatgaactacactcatataagacagatattttaatcaatgttgtctgcattctgactgctccactgaccagccattcctccatttctctccctatcctccaacctccctattctctgagacacagtaatgttgaaattaggccaagtaataaccctacaatggcttctaagtgtttaagtgaaaggaaggatcctgtgtctctcactttaaataataattagaaatgattaagttaagaaacacatgttgaaagccaagacaggct

SEQ ID NO: 280831 - DNA, 574 bp, Homo sapiens
tttccagggctgaaaaccactatcagaaacactgtagatactcttccattttgccaactctcatactgtgtgcttacaggtgttctcacccaggaaaagagacttgactcagtttatgaatggcgcaccctaaactcagatgaaatatyctgaacagactgagtgtggtggctcacccctgtaatcccatcactttgggaggctgaagcaggagcatggcttgagagtccaggagtttgagaccagcccgagcaacatagagagactccatcttgacaaacaaacaaaaaaaaagaaaatcttgaatagtcatgcactggccctgtgatttgaggtgctcttaattggtggctgctttgatgttagcaagagttttatcctgtttaatttaaattaatgaaatggattacatcatgcctagtctctaactctctgcaaagggtcctgctcagggccgttctgccattgtaagctttctagcacagctgatgctttttcaacataccccattccaaaaagtaggtactacctgggccacacacacattcaccataaaaattaaattgaataggta

SEQ ID NO: 280832 - DNA, 574 bp, Homo sapiens
tttccagggctgaaaaccactatcagaaacactgtagatactcttccattttgccaactctcatactgtgtgcttacaggtgttctcacccaggaaaagagacttgactcagtttatgaatggcgcaccctaaactcagatgaaatattctgaacagactgagtgtggtggctcacccctgtaatcccakcactttgggaggctgaagcaggagcatggcttgagagtccaggagtttgagaccagcccgagcaacatagagagactccatcttgacaaacaaacaaaaaaaaagaaaatcttgaatagtcatgcactggccctgtgatttgaggtgctcttaattggtggctgctttgatgttagcaagagttttatcctgtttaatttaaattaatgaaatggattacatcatgcctagtctctaactctctgcaaagggtcctgctcagggccgttctgccattgtaagctttctagcacagctgatgctttttcaacataccccattccaaaaagtaggtactacctgggccacacacacattcaccataaaaattaaattgaataggta

SEQ ID NO: 280833 - DNA, 606 bp, Homo sapiens
gactcatttcgccctcgccgtaacgcgtccgccgaagttggagccctgcaaagcggggttcccttctcttaccctttctgccggccgcgtggtgcgcgcagaccccggcccgagagcaggcgccgcagtcgtggagtgcggcgggcagttctcgggcggctgaaaggcggctctgtgtgcaccctgcaggatgcggcgcgtggccaggcgctcccgccccgcccccaaggggctgccccgccccgccccgccccgccgcctcctaccggggaccggagcttccccagttgsggtcctaggggacttattccacgcttcagcggaccagcctccccgcgctcccggagaagggggtcggcgacgcggaggcggggtgggggccgtaggggatggaaccgaggcgcgcgcgagaagagccgaggaagtaagcagtcccaaaagggggcggcggtggggcccccagggaggcgtggggcacgccaagggcgccgtggggcactgacctgtggtgcggcccccaggacaggcccgaggcgcggttgcacaccggcaggtccagcacctccatgcctcgaggcatggcgcggccagggagcggcaggagga

SEQ ID NO: 280834 - DNA, 469 bp, Homo sapiens
atttcaggaacatccaaaaaattcattgaaatagataacaattggaagattttgtctgaaaacaactccaagattctttgaaactgcctycccaatcctcaccttgccatgtccatcagtcctaaattattatgtcatcatccttacctaattctaatcaagctcccctcacattaaagaactccctcctcacccaaggcaagatggcctctgatcaatatagcatctcccttaccactctaagtaataagctcagctttgctcatcaacatgttttttgtgtggtattctcagggagctagcatttgatattacacatttcacttctttttgtctagctcttcgttccagaattaagctctataaaggaaggcgctttgtctgttttattcactgatgcatcctcaatgtctggaataacacctgctacatattagatacttcaatatttattgagtgaatgaaaaag

SEQ ID NO: 280835 - DNA, 939 bp, Homo sapiens
atttcaggaacatccaaaaaattcattgaaatagataacaattggaagattttgtctgaaaacaactccaagattctttgaaactgcctccccaatcctcaccttgccatgtccatcagtcctaaattattatrtcatcatccttacctaattctaatcaagctcccctcacattaaagaactccctcctcacccaaggcaagatggcctctgatcaatatagcatctcccttaccactctaagtaataagctcagctttgctcatcaacatgttttttgtgtggtattctcagggagctagcatttgatattacacatttcacttctttttgtctagctcttcgttccagaattaagctctataaaggaaggcgctttgtctgttttattcactgatgcatcctcaatgtctggaataacacctgctacatattagatacttcaatatttattgagtgaatgaaaaagwatttcaggaacatccaaaaaattcattgaaatagataacaattggaagattttgtctgaaaacaactccaagattctttgaaactgcctccccaatcctcaccttgccatgtccatcagtcctaaattattatgtcatcatccttacctaattctaatcaagctcccctcacattaaagaactccctcctcacccaaggcaagatggcctctgatcaatatagcatctcccttaccactctaagtaataagctcagctttgctcatcaacatgttttttgtgtggtattctcagggagctagcatttgatattacacatttcacttctttttgtctagctcttcgttccagaattaagctctataaaggaaggcgctttgtctgttttattcactgatgcatcctcaatgwctggaataacacctgctacatattagatacttcaatatttattgagtgaatgaaaaag

SEQ ID NO: 280836 - DNA, 565 bp, Homo sapiens
aacactaagctaactgttagctgtcagcagcactggtaatacagtcacagttgtattcccaacagaaggcccacaatatgagatgcttcacatttatttttcattaactaaagagtctgtgctagagagaagatagtgagtatgggaaaacataaatagatgcagttttgaaggaagaatcaataagatttagtaggtatcaggaaaaagaaggtaaatccaagatggtgatatggtttatatttgtgtccctggccaaatctcaagtcgaattgtaatccccaatgttgcaggaggggcctcctggtgacaggtgactagatcatgggggtagaactcccccttgctgttctcatgatagtgagtgagttctcatgagatctggttgtttaaaagtgtgtatcaccttcccctttgctctctctcatgctctgccatacgaagatgtgcctgcttcctcctcgccttcccccatgattgtaagtttcctgrggcctcaccagccatgcttcttgtacagcctgcagaactaagtcaattaaatatcttttcttcataaattacc

SEQ ID NO: 280837 - DNA, 537 bp, Homo sapiens
cctctactggagcaagtgctggtatccatggctgagagacctgaagacagatcacatcacaggactctttgcagacactccccagtaccagcccggagcccaagctccattaggtggctagacccacaacagcaataacaatcactgtctagctctcaggaagccccatccctagaggaagggtgagagtaccacatcaagggatcaccccatggcacaaaataatctgaacagcagcccttgagtcccagatctttcttctgacatagtctacccaaatgagaaggaaccagaaaaacaattctggtaacatgacaaagcaaggttcttcaacactctcaaaagatcacactagctcaccagcaatggatccaaaccaagaagaratctctgaatttccaaagaaagaattcagaaggtcaattgttaagctactcaaggaggcaccagaaaaatgtgaaagccaatttaaagaaatttaaacaatcatacaggatatggacaaaaaatctccagaaaaataacacaaataaaata

SEQ ID NO: 280838 - DNA, 535 bp, Homo sapiens
tcaagaccagcctggacaatatagtgagactctgtctccacaaaaactttttaaaatcagcccagtgtggtggtggatgcctatagtcccagctactcgggagacagaggtagtagattcgcttaagcataggagttcaaggctgcagtgagctatgattttgccactgcactccagcctggacaacagaaagagatcctgtctcaagtaaataaaacaaaacaaaacatcaggtgcctgtgtttcacttaggtatgtgagacatcctggggraattgtcaagtttcccaaattagggggttcatggtggtacccccattgattttcagcatattcccaccagttatggtttatgtgggcccacttaagcatttttagaatgtatcatctagtttccgtggaaataacccttgcgaaataggcaaaggacataaagattcttgcaaaagcccagaaggtggagcaagatggcagaagagaagcctccactgatcatcccctcacaagaggacatcaatttaacaactatctatgt

SEQ ID NO: 280839 - DNA, 561 bp, Homo sapiens
aaaaacttttattctagaatagtatgtctggtgaaaacattcttcaaacatgaaaaagaaataaagattttcccagacaaggtcgggtgcagtggctcacacctgtaatcccagcattttgggaggccgaggtgggtggatcacgatgtcaggagttcragaccagtctgaccaacatgatgaaaccccgtctctactaaaaatataaaaattagccaggcatggtggcgcaggcctgtaatcccagctactggggaggctgaggcaggagaattgcttgaactcaggaggcggaggttgcagtgagcagagatcatgccactgcactccagcctgggtgacagaccaagactccatctcaaaaaaaagattttcccagacaaacaaaagctgagggatttcatcaacaccagacctgtcctacaaaaaatgctgaagagagtacttcaatcagaaagaaaaggacattaatgagcaataagtaatcacctgaaggtacaaaactcactggtatcagaaagtacacagaaaaacaaaaaatattataaccctgtaactgcc

SEQ ID NO: 280840 - DNA, 459 bp, Homo sapiens
aacaaagtggcaagagtaggtccttaattatcaataataacattgatgtaaatggactaaactctccaatcaaaagacatagactggctaaatggatgaaaaaaaacccactgatctgttgcctacaaaaaatacacttcacctataaagacacacatagactgaaaataaagggatggagaaagaaattccatgccaatggaaaccaaaaaaragcaggagtagctatgcttttgtcagacaaaacagattttaagacaacaactataagaagagacaaaaaagttcactatataatgataaaggggtcaattcagcaagaggatataagaattttaaatatatatgtacccaacattggagcacccagatatataaagcaaatattattagagctaataagagagataggccccaataaaataacagctggagacttaaacaccccactttcagcat

SEQ ID NO: 280841 - DNA, 478 bp, Homo sapiens
accaggaaaaaaggggctgaggcccaagctcaaaacagagtagmaagctcagctataggcaggctgagaagaacgggaagaaaaaaaaattcagatgattgccaaagcaaacaaataaacaaaccaaaaacatggctgtaaacatttaatactgaacagaacattgtagtttgataagatgaagtctggaaataaaattacaggcacacctcagagatattgcaagtttggttccagatcaccacaataaagcaaatactgcagtaaagcaagtcacacaaattttttggttttccagtgcatataaaagttatgtttacactataccatagtctattaagtctgcaatagcattatgtctaaaaaaaccaccttaatttaaaagtacttcatactaaaaaatgctaacaatcatctgaaccttcagcaagctgtaatctttttgctggtggagggtcttgcctccttgttgatggct

SEQ ID NO: 280842 - DNA, 553 bp, Homo sapiens
agctctgaacttgatatattttggtgtcttcataacctatgatgcagaagctctaagaaatatgcattaaaattccacaattcctttagatttctactgaccacactctttattcattaaatataggacttgggtttatttttatctataatcaattaatatttgtatacatatactgaacattagcaatttattttcaaatagtcactttataaaagtttatttggaaatttttttacaagattattcttcctatattttgaagtaatatgtcgtgacatttgtgacagtagccttgaaaatggatttaytaacccaatattttccatagtatatagttgcactgtggactttgttcaggtatacataacttctaattgtttttattattcttataataatatgttgttggtggttgttactatggtgtggtgtgtatgtgtgtgttttgtgtgtgtgtgtgtgcacatgcatttacatttctcataatctgaccgaaacctgggcttttaacttcaaaggaaagatgaatgcttgcccaattatagatttt

SEQ ID NO: 280843 - DNA, 636 bp, Homo sapiens
taattttaatgaatgcatattctgtatatattcattcaatgtctgaatgtctgctctgaccacagtacattaccgagcactaaaggagaagattctctatgacagtttagggttaggattagggttggtggcctagtatggcatatattcaaagtatgataaaaaattatataagccttgaaataattaaatataaaaatgagtttggggctcacagttagtgttggaagagctaataggatgctgtcgccaccagtgaaacttccatggaggacccctggactgcacctataaagaagatagctttgcatagatggggtgaccagacaacctgtctggcccagccaagcctcattttttgaaactttttcaggaatgatcattttcttttttccactctcaaaagttgtatggtcagcccatgaataggctaaagggcactcattccacctgcaagatttagcttggatggaggagggggcaggtatacaggcaaaagactgaacaagcacagtgggaattgagcctgagtcggtgggcccagagatttggcaacagggcacygtgtttgggaaggatcctgaccaccaagatataggagtctgtgattccttctcattccttctcctgttcact

SEQ ID NO: 280844 - DNA, 564 bp, Homo sapiens
ctactatccagtctggattttccttctgctgtaagtgctgctatgtttttcctcttattagttccttgtttatacctaaagaacaaaagaaaacaaaaactggccctgtagagcatttaatgtttatttcttcattgttgtaagtttgtgttaactgaaggaagatgtagaaagaaagaaattaacattgactgagcgttgactgagtgccaagcattgagctttaccaaccagcacagtttggtctcaggaytcttaaaataagcatggtggctgatgcctgtaatcccagcaccttgagagactgaggcagaagaatagcttgaggccagaagtttgagaccagcctgcacaaatgtgaaacctcatctctacacacacacacacacacacacacacacacacacaattagccaggcgtggtggcatctgcctgtagtcccagctactcaggaggctgaggcatcaaggctgaagcaagccttgatcgtaccacctcacgtcaacctgggagacagagtaagacatcgtctcaaaaaaaaaaaaaaaaaaaagactattata

SEQ ID NO: 280845 - DNA, 667 bp, Homo sapiens
aagaaatgaaacacaaaatgatacattctgtttatagagttgaaaaatacggagtgtttaaggatgcttgctgcagaggtaataaatactataaagaaaaacaagaagtacaaatggggttttttttgggaggagggaggtgataatggggacttttgaatgcttgtgatgttttcattctcaacatgattggtgcctacacaagcaatcactttgcaacaaatcatcatgctaaatatttttgtttcatgagtttatctttaggagcacaaaattttataaagattaaaaaataaaacactaaactcaacatgagagctcagttgatacatacaaggaagtctatgtctaactgtgtgagaagcctataagagaaacagaacrgaaactaacagccatcctatctaagaggagtgtgacaagttggctcagcaagcatggacctttcaagcaaggcaggaggccagaacatctcttatatgaaaatatgatgcttccaatcagagctagagccatattttaggtgtgagacagagttctagacattcttgtccaaatagtcaactcagggggaacctgagggaagtattcacagcaaaagtgggaaatcaatgtctttggaaactaaataaagtgatgccaaggaaggacaagctaaaattaatag

SEQ ID NO: 280846 - DNA, 571 bp, Homo sapiens
ctttggagtacagtcaaactcctaactcacaaagctgattcaagtcaagttgtatgacaaactagagagaatcttgcctgattctacctactttctataaagctggtattagagaccatcttatttatccatattttaattgaggacaaagaatcaggaggaccagcctaaacacaggcatgatggcattgagagaaaactaaataaaaattaaaactcgaagaataagggaaaggactttgagatctgaccctgtgtgacaaatggttaggcttcctrtagtgaacacttctggagcaagagatggcctatgtcaacatatacttttctatgtgcttggttcatcagacactgctatggggccacaggtagatagattgtttttaagtgaggactcccaataatttgtgacaacacaaatgtcagaaaagtagagctggactttgaatttgggagttatctctagtttatcacacagcttagtttaggagaatgacctattagcaagtatcttttctcaaataaggcttacaatactgattgcaattatctggttatacctgtaaaatta

SEQ ID NO: 280847 - DNA, 1205 bp, Homo sapiens
tcctggtcttgctgtatttttttctttgtttcttagcatttatcatttacaataggactgccatcaaaattggatggtttaaagctacagaaatgtatctcatttctgaatgctagaatttcaaaatgaaggmgtttctacttcctctgaagcctctgagagaggacccttccttatctcttccatttcttggtagcttcaggtcttctctggcttgtggaagccaatccaatttctggctctgttttcgtgtgtttgtgtgtctctgggtcatcacataacattcttcctgtgtgtctgcctctatgtgtccaaatttctctcttcttataaggacaccagtcatactggataaaggcccaccttccttaatggccttagcttagcttaattaaatctgcaaagaccctattttcaaacaaggtcacatttacaggtacttgaagttaggacttcagacttcaatgcctctttttatttaatttgttgagcgggacataattcaacccataacctatagttgacttatttattatgtccactgtttattgtctatctccactagctaagaattagtatttttcagggcagagatctttgtatcttttgttcattgawtaattaacagcaatgttattggaatttcttccactaatattttattgttacttcttcatattttaagtcctagacgtaaaatgtgttttcaacagcactaacgcattttaaagtttattgtatttattattttctcttacttaggtagtaaaagttatccttaacagtattattaaaatttccaaaaactaatggcctcactagatttgtttgtattttaaagtcgtaactataaaatgaattcaccatttattgaattggcaaagatatcacatttctgtgaacatcgaataaagtaaataaggtctccctctaatcacataaatgtctacaaaawagctgtgtttttgctttttctgcccaaaggaaaactaaatgctgaatgggctcagcatttcaagtcaaactgagccagccagtttgtgtcctcttctgtaatctactacctgtgtggttgtgatgcacaggatgtcattcctgaccctcagattttcctgtcaaaataacctgtagcagcctttgtcatacacggcacatattaggcactcaataactgcattttcttttttttttaaattgattttcta

SEQ ID NO: 280848 - DNA, 630 bp, Homo sapiens
tcccatggggtaaagcatgcggttttcccaccaccgggaatgccattttctcatgtcagtctgattcctatcatctttcaggtttcatatacaatgttacttcatgtggaaagtgggttttgaccctagtgtagattgctcctttctgctaaaggctcccgtgacccctctgtacttacattatctcactctagtataattatttgttggattaattctttttatttttgtaggtcctcgtttgtgttgttcactgttgtaatcccccagtacctctctatagtggatacgccacatatattgaagagctgaatggtttgagtacatggagaattatgcagactaccttttaaaaagcagccagggtaggggaaagtacagacactgaggataaataaaagcagttagaattcaggcagaaaaacagcagttactgaatgttctgttttagagttgaacaaataaatggccagagattgaagtagacagttaagaagctgataaacaagatamacattaaaaaatatatacacataacactggtatcatacctgattcagaccttgagccattcagctaattctgactgattccaattggtctggccagttttctgtgtgatgcaaaggt

SEQ ID NO: 280849 - DNA, 327 bp, Homo sapiens
ctttttttttgaaggttgggggacatggcattttctgccaataagtaagatacataatttcaactatactttttaatcgttgtgttttcagaaaaagtgttaaggcttgagaaaagtgggaatggagaacacactgttcaattatctttttcttgagaaagctttggtgtttgcygaagttagaacttgtattttccatagttagactatactttcctatcatttaaaagcctaagtgacttgatattactcaattctattaattgaaataacagtattacatttacttttaactataaataaaattagtgcatatagcctggatat

SEQ ID NO: 280850 - DNA, 621 bp, Homo sapiens
ataatttcaactatactttttaatcgttgtgttttcagaaaaagtgttaaggcttgagaaaagtgggaatggagaacacactgttcaattatctttttcttgagaaagctttggtgtttgccgaagttagaacttgtattttmcatagttagactatactttcctatcatttaaaagcctaagtgacttgatattactcaattctattaattgaaataacagtattacatttacttttaactataaataaaattagtgcatatagcctggatatatacagtcatattggagaaggaggaataaacaataaaaccaaagaaaaagggagtacacaagtggagcaaggaggcagaatagaaagctctaccaattgtcctcccaccctccccaccctcttcaagaacgcttttaactatctgcatacacaaacgcacatttacaagaaccaaacatcaggcgagaatcacactacctatatctttcttcatatggttggaagaggcattgaagagactaggagagtcagtcttgaatcattggcactacccctttctaccccctggcagtggctgtgtggcaccaagagagaatctgtatacctcagggagacagagcgcagca

SEQ ID NO: 280851 - DNA, 1759 bp, Homo sapiens
tctctggccctgcttagggtctgggggaacttgccaccctgaatggaaaggcacaaacctgkctgacttcactatctgctgattgtagatccctagggacttgaataaacataggtggtagccaggtagtgattacagcaggactcaagtgagacccagtgctgtgctggcttcaggtctgaaccaggataatttcagtggtggtggccataggagtgcatgcatcaccctacccctagctccaggcagctcatcacagagggacatgctatttgtttaggagaaagtaaggaagagaacaagatcctgtgcctgataatccagagaattctttcagatcttatccaagatcaccaagctgtgggatttcttcaacaccagaactgttctacaagaaatgctaaagggagttcctcaatctgaaagaaaaggatgttaatgagtgataagaaattatttgaggtacaaaactaactgggaatagtaagcgcacagagaaacacagaatattataacagtgtaattgtcgtatataaactattcttaagtagaacgactaaagtatgaaccawagaactatagtaaccaaaaccagcatggtactggaataaaagcagacacatagaccaatggaacagaatagagaacccagaaatgaattcatacatctatagtgaactcatttttgacaaagttgccaaggacatacattggagaaaagccagtctcttcaataaatggtgctgggaaaactggacatccacatgcagaaaagtgaaactagatctctatccctcaccatacgcaaaaaatccaatcaaaatgaattaaagccttaacttaaagacctcatactatgaaactcctacaagaaaacattggagaaactccccaggatattggtctgggcaaagatttctatagwaatacttcacaaacacagggaaccaaagcaaaaatgaacaaatggtatcatatcatgtttaaaagcttctacacagcaaatgaaacaattaacaaagtgaagagacaaccctcaaagtgtgacaacatatttgcaaactacccatctgacaagggattaataaccagtacatataaggagctcaaacaatcccataggaaagattgactgagatctgaatagactttwttttttctgacctttctcaaaataaaaaaagaaccaattactctttgggggaggwtattgcttttctttaataaaaataggaataaataaaacttgcaaagcacttcctgagggcaaatattttcatgggattatattgattactttagctgctgctgaagataagaccattgatttttctcattatctatgagactctaatcaataccaagtatttattgactagctcttttatgttttataagattctaaaggctaaggtaactaaagaagaaacaaacatatgcttccttcttttatgttacttaccttgtgtttgaacacacggttttcatggaagaagtaatgataaataatataagacaatgggattggagcactggcttgcattagacatattacataatcacaaatgatagctttaaaaaaagaagaaggaagtaggtattgattgtctaccattgtattagccatgatacgagaaacttttttgttatctttaaggaaaactttttcaaaccattattatcagccataatttttacctgttagaaatctgagactttgagaagctgaacaactagattaatgctgcacagtaactga

SEQ ID NO: 280852 - DNA, 486 bp, Homo sapiens
tctttctatctgagtgacagccatatggggttgttactatagttctcagsaacttagaaatgaataaaaaataaaatcaacctacatggcagggtagagaagatgggaaaggaagttaggggcttctcaaatggctaatggatcagaacacagccacaagagcctgttgggtttcctacgtaagagatatggaagccagggtaactggtgcaaggtcacacagctagaagggatgtgccatggggtctgtgaacacggtctttccactccctctgtctatttgttcttccccgattacctgtctcggtgggcattttctgcccttttcctattcctgttctcttttcaccaatcatttttctactacccacagttacctttcaccatagaggcagccaggcagccatatgcaatgggaaaggctgacacagctcaccgtggcccatggccgccaccttggctgtctctatcacacttaaccaaatg

SEQ ID NO: 280853 - DNA, 520 bp, Homo sapiens
gtagtaacttttttgtagtgcagatttaagggaggaaaccacattgctttcaaaatggaaacttcaagcaaagccagtgttgcttgtattgacctttaggggaggaaggtagttagcattttttgttgttcaatttcatgtaaaatgaggagccctgagagctagcatttctgtcctgaagcatcttcatgtagatcagattcacacccccatgcctgactcctcaaagcatgctaatcccatcttgacatttgcagtaaatgaaaactctctgtcagtaggtagatacaggctttccttctaagggtctcctatgatgacaatttgatataaacgaattaggtatttctatagccctattctccagggctggaggcagcatgtcaccttcctcaytgcaatgttggtggggtggagggtcagtgtggtgtggcccaaatatcaaacactgatgggtgggatatatttgctttgatctgatacttccagttcctcatgatctcatttctaggcttcagtt

SEQ ID NO: 280854 - DNA, 562 bp, Homo sapiens
ccctcaggttcccacttcagtgcacacctgctgtgtatcattttctcctgagtgtgagaaaatgtgtgtgactgtggtgggacattattcatgtaattaggttacaaaggtattggctttctgtttatcataagagagattatctttattacaccaaacttaatcagacatgtttttaagaaaaagagcacatcatagaaaaacacccctgcttccctgaaattaatcaaacttctaggtaagccaggttgtaagctgcttatggtggccacatggcaagggatatatttgtatattgtctctatttttgccttcaacatgttactttcagaaggaagaataggaggatctcatggcagaggaaaaagaagagatcttattaatacaagaaataatcactcctcatctgggacagcttaagaaaaacagagaccagaacatgaccacatcaatgggaaacaaaggcaacttggttgmaagggctcactggcattaggaagcaatgtttacacagccgaagtaaatgatcagcctctgggataccaatagtctaccaacagtc

SEQ ID NO: 280855 - DNA, 606 bp, Homo sapiens
gtaacacatttcttctatattataaagaaattttatgaatcttactctgcctcagaaaggcttttagtaaaagattgctcatgtataacactctgtttggattcatrgacattttcaatattccatttaagtcagagacactgaaatgtcaaccaaatttcataaaacatatttgaatgagatgatgttagctaagaattttatttcatcagtaaatttagaggtacataagaaatgtgtgtactttgggccaaatcacagtgtttgccacatgggaacaattcagacaagtgctcttcatcattactcttaaagtagcactagcaaaacacccatttcctggcattagctggcttgtttttcactgatgtgaagtgcagaaggcattgaaacagtgaagaaggatgatatacatggaataattatatgaagtacaattgtgaataaaaagtagcatttgatattgtacaactatagataagatgactagtatgagataaaaatatttttaattctattgacagaataacttcattcacaatattactatttcaaataatttttttgctttttatccaatattacctgagctccataggaatcaac

SEQ ID NO: 280856 - DNA, 554 bp, Homo sapiens
gggagtctcattcctgggccttcctgcaggtgtctgtgacatgcacttctacgtagaaacttcgtaatttgatagtccttctgggctcaacacacagatatcttgtgacttatacctgggccaagcacctaggtgatgtgactattttgcctggccacttccctcaaaggaattgtaattgtaatatatctctttactgagcacctaggtgacataaatctctccttcctggatcctgcccacaagtaaggttatgacatatctagcattaagtctagcacttaatgatgtgactgtcctatcttgtttgtgccctgccctgaggaagcactgtgacattactggcctaagtaaaaaggtaattcaggtcttctgcctgggacatgtgcagagggggggattgtgaaatctcttggcttatcatcatgatgatgtgattctcctctcttgtctggaamctttttccagttgggatcacaacatattgctgggcccagaactgggtgatgttattcttctcccagggcccagcctacaaatggcattgtggcatc

SEQ ID NO: 280857 - DNA, 528 bp, Homo sapiens
gaagtctgggcaggaaccaggaagaaaaatcatatcatctaggtgtcccctgtgggagaggtccaggtaggagagtaacatcttcttggtgctgagccaagtgaaatgttccaatgccctctgtgggcagggcccaggyagaagagtagagtcacatcacctagatgctgagttcaccaacatgtaaaaatatccccttagggcaaggctcatgcaggagtgtcacgtcatccaggtgtttggtccaggcatatgtcataatccctcctgaaggcagcacctgggcacaaaaggagaattacaccacctaagggatgggcccagagatgtcacagtgcctctgtgggcagggcccaggcaggagagtcacatcacatgaatatagggcccagagatatttacaatccccactggggcagggcccagggaaaacgacatgagccacatcaccaggtgctgggcccggtgatatattacaatcccctctgaggacagcaccaaggcaagagttacatcacctaggtgcct

SEQ ID NO: 280858 - DNA, 528 bp, Homo sapiens
gaagtctgggcaggaaccaggaagaaaaatcatatcatctaggtgtcccctgtgggagaggtccaggtaggagagtaacatcttcttggtgctgagccaagtgaaatgttccaatgccctctgtgggcagggcccaggcagaagagtagagtcacatcacctagaygctgagttcaccaacatgtaaaaatatccccttagggcaaggctcatgcaggagtgtcacgtcatccaggtgtttggtccaggcatatgtcataatccctcctgaaggcagcacctgggcacaaaaggagaattacaccacctaagggatgggcccagagatgtcacagtgcctctgtgggcagggcccaggcaggagagtcacatcacatgaatatagggcccagagatatttacaatccccactggggcagggcccagggaaaacgacatgagccacatcaccaggtgctgggcccggtgatatattacaatcccctctgaggacagcaccaaggcaagagttacatcacctaggtgcct

SEQ ID NO: 280859 - DNA, 528 bp, Homo sapiens
gaagtctgggcaggaaccaggaagaaaaatcatatcatctaggtgtcccctgtgggagaggtccaggtaggagagtaacatcttcttggtgctgagccaagtgaaatgttccaatgccctctgtgggcagggcccaggcagaagagtagagtcacatcacctagatgctgagttcaccaacatgtaaaaatatccccttagggcaaggctcatgcaggagtgtcacgtcatccaggtgtttggtccaggcatatgtcayaatccctcctgaaggcagcacctgggcacaaaaggagaattacaccacctaagggatgggcccagagatgtcacagtgcctctgtgggcagggcccaggcaggagagtcacatcacatgaatatagggcccagagatatttacaatccccactggggcagggcccagggaaaacgacatgagccacatcaccaggtgctgggcccggtgatatattacaatcccctctgaggacagcaccaaggcaagagttacatcacctaggtgcct

SEQ ID NO: 280860 - DNA, 572 bp, Homo sapiens
ggcccaggtaaaaaaagagggtcatgtggcctaaggactgggcccagggatatgtcacaattttcctcgtggggagggcccagtcaggagagtcacagcacttgggtgctgaacttagaaatatgtcacaccaggcacgggggctcacacctgtaatcccagcactttgggaggctgaggatggcagatcattgaggtcaggagttcaagaccagcctggacaacatggtgaaatcccgtctctactaaaaatacaaaaaaattagctaggcgtggtggtgcatacctgtagtcccaactacttgggaggctgaggcaggagaaccacttgaatctgggagatggaggttgcagtgagctgagattgcatcattgcattccagcctgggcaacagagcaagactccatctgggaaaataaaaaggaaatatgtcacaatgtcctttrttgacaaatcccagacaagagagtcacatcacctaatagttggggccagtgatatgttacaattatccatgtgggcagggcccaggaagaaaaatgatagtcacatcacccattgatatgtcaca

SEQ ID NO: 280861 - DNA, 552 bp, Homo sapiens
attacctgtggcctaagcctggctacagaaatcaaaatatctcccactggctgtgtccaggtaagagagtcattcttgtgcctctgagctggacccaggtatatgycacaattttacatttggacaggaacaaggcattaaagtcacatcacctgggtgctagacccagtgatatgtcacaatgcccactgtactcagggcacaggcaggagagtcacatcatctgagttcttggttgagcaatatgtcacaatcccttctgtatgtagaacccaggctgcaagaagagtcacattacctaggtgctgagcctggcaatatgtcacaatgctccctgctagcggggcccaggaaagagcacagagtcataccacatacctgactggcccagaaatttgtcataatcttcactgggacagaacacaggaagaaaaggagagtcacattacctaggttataggcccagtgatatgtcacagtccctactgagaccagggtccagaaatgagagaaaagccataccacttctgtgatgtgcccagagataggtca

SEQ ID NO: 280862 - DNA, 552 bp, Homo sapiens
attacctgtggcctaagcctggctacagaaatcaaaatatctcccactggctgtgtccaggtaagagagtcattcttgtgcctctgagctggacccaggtatatgccacaattttacatttggacaggaacaaggcattaaagtcacatcacctgggtgctagacccagtgatatgtcacaatgcccactgtactcagggcacaggcaggagagtcacatcatctgagttcttggttgagcaatatgtcacaatcccttctgtatgtagaacccaggctgcaagaagagtcacattacctaggtgctgagcctggcaatatgtcacaatgctccctgctagcggggcccaggaaagagcacagagtcataccacatacctgaytggcccagaaatttgtcataatcttcactgggacagaacacaggaagaaaaggagagtcacattacctaggttataggcccagtgatatgtcacagtccctactgagaccagggtccagaaatgagagaaaagccataccacttctgtgatgtgcccagagataggtca

SEQ ID NO: 280863 - DNA, 528 bp, Homo sapiens
aagtatacgccacaatcacacctgcgggaaggaccaggaataaatttcacagttctacatatttcccagctttaggtctgacagtcaacacctcttgtgagttgcatccaaatacacgagacacagtcttaacattggacaggatccgtccatgagagctctatctccactgcaaacagtgttcccataagataggcacagcctcaccagggtgctgaatcttggtctcagagtcactatcctacctgttgaccagatgcatgtacgtgagtcaaactttcaacttttcattgcctctgggcgtgagattcagaacctcaacagtgagctgtgtctatatgggagagtgaccatcyttattgttggctgggtatgcataggagattcacaatttcctctgtgtttctggctgtgttatgacactctctgtaccatctgagattttcacataatatgcttgagagtggaattctgctctgtgaactttgtttgtatggctctaagatcttacctgttaccctaagccca

SEQ ID NO: 280864 - DNA, 552 bp, Homo sapiens
agaaacatcagttttaagcaaaatttaagctacaaatatctctcatgttctgtaatctctaatggtgtatataaataagtctttctcttttttagttaaacttttttttaaaagctttaagttctgggatacatgtgcagaacacgtgggtttgttacataggtatacatgtgtcaaggtggtttgctgcacctatcaacctgtcgtcgaggttttaagctctacatgtgttaggtatttgtcctaatgctctccctccccttgcccccaatcccctgacaggtctcagtgtgagatgttcccctccctgtgtccacrtgttctcattgttcgactcccacttatgagtgagaacatgcggtgtttggttttctgttcctgtgttagtttgctgagaatgatggtttccagattcatccatatcccagcaaagaacatgaactcattcttttttatggctgcatagtattccatggtgtttatgtgccacattttctttatccagtctatcactgatgggcatttgggttggttccatgcctttgctattgt

SEQ ID NO: 280865 - DNA, 514 bp, Homo sapiens
ttggctatatgcacttttttggttccatataaaatttaaagtacttttttctaattctgcaaagaaagttaatggtaacttgaygggaatagcattgaatctataaattactttggacagtatggccattttcatgatactgattcttcctatccatgagcatgaatttttttttcaatttgtttgtgtcctctcttatttccttgctttagcatcctagagaggaagtctcttctaattattttttattcagaactttctgacttatcctgggcaataaagaccattctcattaaatgtgcatttttataagcagttttgcacagatttaatggaagctaaacagaacatggtctccttcttcagtgataaccaaggacctgatacaatctcaaacaggaatcttgggcatccacacctttccatgttcaacagccacaaaaggaacatttgtaatgctgcaggttataaattcatggtgacaattttttcacggcttattaaaagctacaat

SEQ ID NO: 280866 - DNA, 514 bp, Homo sapiens
ttggctatatgcacttttttggttccatataaaatttaaagtacttttttctaattctgcaaagaaagttaatggtaacttgacgggaatagcattgaatctataaattactttggacagtatggccattttcatgatactgattcttcctatccatgagcatgaatttttttttcaatttgtttgtgtcctctcttatttccttgctttagcatcctagagaggaagtctcttctaattattttttattcagaactttctgacttatcctgggcaataaagaccattctcattaaatgtgcatttttataagcagttttgcacagatttaatggaagctaaacagaacatggtctccttcttcagtgataaccaaggacctgatacaatctcaaacaggaatcttgggcatccacacctttccatgttcaacagccacaaaaggaacatttgtaatgctgcaggttataaattcayggtgacaattttttcacggcttattaaaagctacaat

SEQ ID NO: 280867 - DNA, 593 bp, Homo sapiens
atttgtaatgctgcaggttataaattcatggtgacaattttttcacggcttattaaaagctacaatgtggaaaataaagagaaggctctggtacacaagaaagaagtatttctcagagccccttgactatcaggagaataaaaagtggaaaaggagttaaactgattaggcaagaacatcacaagtggagaagttaacatttgcaagttctacacacgtgatatttcagaagaaaaagtggacacagtctctgacttcagacacattcacctcagaataagccatttctttatttttcttctccttctctgtgatcccttccaggtgtgattatctgcacaaattaaacctgtttcttgagaatatgcctttgaagcatgagcaaaactccttcccttgaaatcaccacaytcacaggcagaaggccctagaattgcagataaagtctgcctttgtttgtcttttatcacaggggaggtttggaaccagtaaactcctaaataaaaaccaaaatatgagtttcccctttccaacactcagttgcccttctctgccacagatgccagaaatttctactgcagcaatgagaatat

SEQ ID NO: 280868 - DNA, 593 bp, Homo sapiens
atttgtaatgctgcaggttataaattcatggtgacaattttttcacggcttattaaaagctacaatgtggaaaataaagagaaggctctggtacacaagaaagaagtatttctcagagccccttgactatcaggagaataaaaagtggaaaaggagttaaactgattaggcaagaacatcacaagtggagaagttaacatttgcaagttctacacacgtgatatttcagaagaaaaagtggacacagtctctgacttcagacacattcacctcagaataagccatttctttatttttcttctccttctctgtgatcccttccaggtgtgattatctgcacaaattaaacctgtttcttgagaatatgcctttgaagcatgagcaaaactccttcccttgaaatcaccacactcacaggcagaaggycctagaattgcagataaagtctgcctttgtttgtcttttatcacaggggaggtttggaaccagtaaactcctaaataaaaaccaaaatatgagtttcccctttccaacactcagttgcccttctctgccacagatgccagaaatttctactgcagcaatgagaatat

SEQ ID NO: 280869 - DNA, 593 bp, Homo sapiens
atttgtaatgctgcaggttataaattcatggtgacaattttttcacggcttattaaaagctacaatgtggaaaataaagagaaggctctggtacacaagaaagaagtatttctcagagccccttgactatcaggagaataaaaagtggaaaaggagttaaactgattaggcaagaacatcacaagtggagaagttaacatttgcaagttctacacacgtgatatttcagaagaaaaagtggacacagtctctgacttcagacacattcacctcagaataagccatttctttatttttcttctccttctctgtgatcccttccaggtgtgattatctgcacaaattaaacctgtttcttgagaatatgcctttgaagcatgagcaaaactccttcccttgaaatcaccacactcacaggcagaaggccctagaattgcagataaagtctgcctttgtttgtcttttatcacaggggaggtttggaaccagtaaactcctaaataaaaaccaaaatrtgagtttcccctttccaacactcagttgcccttctctgccacagatgccagaaatttctactgcagcaatgagaatat

SEQ ID NO: 280870 - DNA, 511 bp, Homo sapiens
gaacccactgccctgaagcaaaagaagcaggcccagcagagttcaccacaagctgacacaagatcccttgggtcctcactggatatcagcagtagcctggaagtacttactgtgggctctgggtggtggtgacaatggggartggcttcttacgcttgagaaaggagagaaaagagtaggaaggatattgtctcatggcttcggtgccagctaagccacagcagaatagggcaccaagtagattcctaaggcttctgactccatgttcttcctaccaaattgcattttgctacccccagcccagggtgggtaagagctcactgccctgaaggaaaggatatgagcctggcttgatccaccaactactgactgaagagaacttggttcttgagtgaacatcagtagtagctaggtcactgtgggccttatgtgagagccagtcctgtgctggctttgggtctgacttagtgtagtcctagtgatggtggccacaggggtgctagtgttacac

SEQ ID NO: 280871 - DNA, 511 bp, Homo sapiens
gaacccactgccctgaagcaaaagaagcaggcccagcagagttcaccacaagctgacacaagatcccttgggtcctcactggatatcagcagtagcctggaagtacttactgtgggctctgggtggtggtgacaatggggaatggcttcttaygcttgagaaaggagagaaaagagtaggaaggatattgtctcatggcttcggtgccagctaagccacagcagaatagggcaccaagtagattcctaaggcttctgactccatgttcttcctaccaaattgcattttgctacccccagcccagggtgggtaagagctcactgccctgaaggaaaggatatgagcctggcttgatccaccaactactgactgaagagaacttggttcttgagtgaacatcagtagtagctaggtcactgtgggccttatgtgagagccagtcctgtgctggctttgggtctgacttagtgtagtcctagtgatggtggccacaggggtgctagtgttacac

SEQ ID NO: 280872 - DNA, 564 bp, Homo sapiens
tactgtgggctctgggtggtggtgacaatggggaatggcttcttacgcttgagaaaggagagaaaagagtaggaaggatattgtctcatggcttcggtgccagctaagccacagcagaatagggcaccaagtagattcctaaggcttctgactccatgttcttcctaccaaattgcattttgctacccccagcccagggtgggtaagagctcactgccctgaaggaaaggatatgagcctggcttgatccaccaactactgactgaagagaacttggttcttgagtgaacatcagtagtagctaggtcactgtgggccttatgtgagagccagtcctgtgctggctttgggtctgacttagtgtagtcctagtgatggtggccacaggggtgctagtgttacacccactccagctccaggcagctcagcatgcagagagagagarattccatttatttggcagaatgtaaaaaaatagaaaaagagtctgcctggtaacccagagactctcttggatcttacctatgaccaccaaagtggtacctctacaagtctgcaagcatc

SEQ ID NO: 280873 - DNA, 513 bp, Homo sapiens
gacatagacagcataataagatataaatagaaacgacaaaatgttaaaaagttgggagataaagttaagctgtattttttattagttttctctttgcttgtttgttcatttttataagtgttaagttgccatcagtttaaaataatgggttataagatgttatttgcaagcctcatggtaacctcaaataaaaaaacttataatagayacacatacataaaatcaaaaaataaaaaataaaacacaccactagataaatcatctttactaaaataaagacaggataaatgggagagagaaaaggagagaaaaagagagagaagatactacaaaacaagaaatcagataacagaatggcagatgtgtctttatttattaataataacactgaatgtaaattaagttaactcctcaatcaaaagacacagattggccaaatgggtaaaaataaaaacgagacccaacaatctgtttcctacaagatacatacttcaccaataaagacacagaaag

SEQ ID NO: 280874 - DNA, 567 bp, Homo sapiens
atcctgttatggaaataagttagtgatatgtgtattgtctgaaagtgataaatacttttgcttttctcattgagctataaaatgtaagcaccttaaatttttttcccttgcataaacactgcgtttcagtaatttttctggatttatcaccacttagtttctaaaactaaatgaacatctctgacttggaaattaaagcctgagccctgtgactccaagctaagggcaatatggagcctgcaaaaggaggttattgaagaccttgaagacctagtcagttctttctagggagcctctcctgcagatgtcccaacctgctcaccccagccatggaagaagtatttttactgagataagcaacagagtccaggaaagctggggacccacaggcagatgcagttagagttagaatagatgggaattgggaggatcttactgaaaataaaggtgttgctgttttggggcagtttctagactttgtaaaataaaacaaattcagatttaggtaagaagttctgaatcccaacaacagaaaaaagtgycaagtataagatttttaaggatatc

SEQ ID NO: 280875 - DNA, 629 bp, Homo sapiens
tgaatagtttagcaccattcctcttggtattgacctctcgatagtgactgagttccctgaagttcttatttaaaagtgtatagcaacccccttgccttcttttcaagctcctgcttcaccttgcaccaggattttaagcttcctgggtggggcccccccagaagcagatgctggtgttatgctttctgtacagcctgtggaaccatgagccagttaatcctctttcttataaattacccagtctgaggcatttatagtaatgccagaaccgattaatacaaacagtttatttgcacaaacagcaatttatgaatcagagaatayccaactatggtttgggggctcaaaggagagacttggaacaaaaggcttttgtaagaggtatgaggaagcaaaccagattcagtatttgattggttacagttatgtattgcatttgcacccatccggtggaaatgtcctggttatgtacttagagctttattggcagcttgtggttggttaagcctaagttttgtgttttttttttttttctcaaagttagtaatttgtaagaaattctttcgacgtagttaggtttccttaggcagaatcccagagcatcatggccatttcagcctaattgccag

SEQ ID NO: 280876 - DNA, 629 bp, Homo sapiens
tgaatagtttagcaccattcctcttggtattgacctctcgatagtgactgagttccctgaagttcttatttaaaagtgtatagcaacccccttgccttcttttcaagctcctgcttcaccttgcaccaggattttaagcttcctgggtggggcccccccagaagcagatgctggtgttatgctttctgtacagcctgtggaaccatgagccagttaatcctctttcttataaattacccagtctgaggcatttatagtaatgccagaaccgattaatacaaacagtttatttgcacaaacagcaatttatgaatcagagaatatccaactatggtttgggggctcaaaggagagacttggaacaaaaggcttttgtaagaggtatgaggaagcaaaccagattcagtatttgattggttacagttatgtattgcatttgcacccatccggtggaaatgtcctggttatgtacttagagctttattggcagcttgtggttggttaagcctaagttttgtgtttyttttttttttctcaaagttagtaatttgtaagaaattctttcgacgtagttaggtttccttaggcagaatcccagagcatcatggccatttcagcctaattgccag

SEQ ID NO: 280877 - DNA, 565 bp, Homo sapiens
ttttcaggtcgtattttctagtatctcagcttctcagcttaccatctgcccacaaaggccagacacaagattttaagaaatggttggtaaaacaggagaaaaaaagctgtctatgggagtagacaagtttacaaatgtgtactccaaaagatcaagagtaataataaaataataaaaacaaatacattattaattaattattatgtgggtaatgttttttgcctaagctagagatattcactgarataaaattttgaggtttggtctaaaaaacttcaatttttttttcccaatttgatcttagctggaatgctgttttgctaattctctggatgttaacatttcaaatacatggtaagatttacgtctcctagagactgagaaaagactggaaaaagttaaagtatgtattgtaaaatgtactttgaaatctcttactagaatttagccaggcaaaacagaaagaaggcctttcattaaatttcattctaaaacctgccttttccaattgtgcatggaaatatattgatttagaactgtcaaaagaccttcatttttgtcattg

SEQ ID NO: 280878 - DNA, 1225 bp, Homo sapiens
agagaatgaaatgtttgtgtctgcatgattcatggatgtttttcaatatcatgcaatgctccaactaatgagcaatagctgagaagcaatagaaggcattaactgttccatrttattaatgccctgcttgagaatgaagacaggtctgttccatgctgcttataaacagcttgcagtgctcctggagcttgtcctgggccctattcctccctctaagctactcttctcataaagcttttctacattaaacccaaaactttcaaagggagattaaatggctcctcaaaaaaatgtttcctctggctaaatgatgccagcacagacataattaaaatatatttgccacatttgtttaaaagtgttcactccagagaacaaagtttccccaacaaatgatctttgtacactcagtacagtcactgaatcacatgtggtttgttgggtggggaaatttctgtcattcggtcagttaagttatgatgaatcaaagaaataaacaacccaagagggagaactaaatgatagcaaggctaatactctatcttccacaaaggatggctaaagttgagttttctcttaagtgtaattatcgacttcatgtaggtgcctaccwagagaatgaaatgtttgtgtctgcatgattcatggatgtttttcaatatcatgcaatgctccaactaatgagcaatagctgagaagcaatagaaggcattaactgttccatattattaatgccctgcttgagaatgaagacaggtctgttccatgctgcttataaacagcttgcagtgctcctggagcttgtcctgggccctattcctccctctaagctactcttctcataaagcttttctacattaaacccaaaactttcaaagggagattaaatggctcctcaaaaaaatgtttcctctggctaaatgatgccagcacagacataattaaaatatatttgccacatttgtttaaaagtgttcactccagagaacaaagtttccccaacaaatgatctttgtacactcagtacagtcactgaatcacatgtggtttgttgggtggggaaatttctgtcattcggtcagttaagttatgatgaatcaaagaaataaacaacccaagagggagaactaaatgatagcaaggctaatactcwatcttccacaaaggatggctaaagttgagttttctcttaagtgtaattatcgacttcatgtaggtgcctacc

SEQ ID NO: 280879 - DNA, 428 bp, Homo sapiens
agtcttcctccatcccctactcacagatacttacctatctctgtgtgcaacctcttctaccccaacctcacctgctctgtttctactcctcctttagattgcacctgaaggattaccttggggaaaactatccaaagcagtttagactgaaccctcagtctaagtcagccctattggttattgttctcaaagaaccacaattattgttctaaaaccgaattccagtttgcaattaaacattccccactatgatgaggtggattaatatcttccccttttgccaccacgtaaagttgcctgaaagaagggaatacatatcttttggccccttttttcagcattgtatctttagaacttacactggtacttgaccttaaataattgttgaaaggataacttctattrgtagtggttagatattaacacct

SEQ ID NO: 280880 - DNA, 564 bp, Homo sapiens
gaatgcaggggacttatgaattataggaactctgtggctgttcaggactgagattggtagaggattcctatgagaggacaggctggcttctaggaggtgagcagcatgcccatctgttcagttatttagaggctgaactctggtgaatgcttggaagcagctctttacacatccctacctgtttcttgccccagcaccctacacttgaaggcaaatgagctctgtagactggctcagcccctttcttcatttgcttctgagggtgcttttcagctgtaaccacaaggaggagagcaagatatgaaaaactttcagtggcagcgcagtccaatgtcagtgaaaaaaatatttgggagagctgtggaaygagggaacaaaatatagatgtatcagaaagcacgttttcttttctggtatctaccttttctgacacatttccaaattgtagttactcacttcctatattagtttcccaggctgctgtaataaattaccaccactgaggaggcttgaaacagcagaagtttattttccaacagttctggggtagaagtctgaaatcca

SEQ ID NO: 280881 - DNA, 577 bp, Homo sapiens
accaagtcatgttaacaccaagacaatcctcaaaatccagtgtgaattcttagtctcactgacaactcttacaataaaacaaagccttccttcaagatagaccagattgtatcatggttgttttgtttagtttataatttaagttagcagacttttcatttatgtattaagtggcaatacatatattactgtttatgactttagcttctcttttcattagaggtacagtgtttggcaatggaaccatatactgttaagagtaaatataggggaatttatgttctaraaaggtgatatgctcaatattatgtatctcaattactagtttgctactgaaatacaacacagtaaaatactggagactaaaattatcttgaatatatttatgacacttcactgataactcagagtgatctgttagggactgccattcggaaacacacaatagaagtaagtccattagtggtgcattccagagaacagagcgctagatcaccacattttaaagcacttttcttttactattttcattttaggttcaggggctatgtgtgcagatttgttatatggttaaatt

SEQ ID NO: 280882 - DNA, 623 bp, Homo sapiens
taacgatttattagaaattctgtgtaactttctgcctcaggcttgagacatagtaggctcacttgttctatgtgtttccacaccaccaaatggcagggataaagctctccaaagcctgtatgagcaaacttttaacagttagaaaagaaaaatgctgcaatccagtactgaagatgtttctgtaaactacgttgatatttctgaactccaaagacaaaatttctctaagtctttcattccaaaaacacatcatgttctccaaagacttgccctttatttcactcagaaaattttctaaaaccctcttctacaatgcctagtttgaaatgtaatttaaataaactcaatagctaagaattaggagctgcagtgtaattcaacyaatagagcctaaaatccctaatgatctaattaaaagcaggttaaagaatgttgtacttgactttttgcttcctcagatacctcacacttgatcaaaaagcatagaatgtttaatgttattaacacatttcaataccatcagtttcagactgatattgaaaagcatttaaaataaaacccaaattaaagatcaggactcaatgctgatttctccttatgagacagctatatttctttaagta

SEQ ID NO: 280883 - DNA, 403 bp, Homo sapiens
cttttttggttttcactccatcaatactgctgcagggtgatggtggaggaagtggggatagttaatgggtataaaaatgtagttaaagaatgaataagatttagtatttgatagcataacaatgtgaactatggtgaacactattgtatattttaaaataactaaaagaatggaattggaatgttcttaacacaaagaaataataaatgcttgagatgatgggtatcccagtaagctgatgggattattacacattgtaagcatgtatcaaaacatcacatgtactccataaacatatgtacctcttatgtrcccataataattaaaaacaaaaaaattaaaagaaaaaaaaaatcattgctgtaaatttgtgtttatttcccagtgtttcctgattcagtaa

SEQ ID NO: 280884 - DNA, 588 bp, Homo sapiens
ctcagctggatgctgagctgcagataagctctattactgcttgtaggagttgtagaaattaagctgtctcagaaaagggatacttgacaacaggatgaacagcacaggctgggtgcagtggctcatgactataatctcaccactttgggaggctaaggcaggaagattacttgaggtcaggagttagagaccagcctgggcaacatagtgagaccccatctctacaaaaacatttaaaaattagccaggcttgatggcatgtgcctgtagttctagcttcttgggaggccgaggcagtagtattgcttgagctcaggagttttaagctgtagttagctatgatcgcaccactgcactccaacttgggtgacagagagagacccaatctctaaagtgtgtgtgtgtgtgcatgtgtgtgtgcctgagtgtrtgtatatgtatatatatgaccagcagagtctttccatatcctgcttgggaactgagcagcctaagtgcagtcagtgcttccaggctctgatcttttgtttttgttttccatcaaacacactttgatttggtggctatttgtgcattcacataggactc

SEQ ID NO: 280885 - DNA, 588 bp, Homo sapiens
ctcagctggatgctgagctgcagataagctctattactgcttgtaggagttgtagaaattaagctgtctcagaaaagggatacttgacaacaggatgaacagcacaggctgggtgcagtggctcatgactataatctcaccactttgggaggctaaggcaggaagattacttgaggtcaggagttagagaccagcctgggcaacatagtgagaccccatctctacaaaaacatttaaaaattagccaggcttgatggcatgtgcctgtagttctagcttcttgggaggccgaggcagtagtattgcttgagctcaggagttttaagctgtagttagctatgatcgcaccactgcactccaacttgggtgacagagagagacccaatctctaaagtgtgtgtgtgtgtgcatgtgtgtgtgcctgagtgtgtgtatatgtatatatatgaccagcagagtctttycatatcctgcttgggaactgagcagcctaagtgcagtcagtgcttccaggctctgatcttttgtttttgttttccatcaaacacactttgatttggtggctatttgtgcattcacataggactc

SEQ ID NO: 280886 - DNA, 468 bp, Homo sapiens
ttaagaccattagggcaatagcgagaggggattggttaggaagggcaggagtgacatggccatgtgtgtgctaagaggatcatgaaataactcagaggaaagaattatactrggcctgttttttgtttgtttgttttgttttgttttgttttgtttgttttgttttatagagacagaatctcactccatctttcagactggagtgaagtggcatgattatagctcactgtggcttccaactcctgggcccacacgattctcctgtctcagcctcccaagtagctgggactacaggcatgcgcccccaagcctattttgttgttgttgttgttgttttcctggttttgtttgtttgtttgtttgtttttgagagatgagggtctcactgtgtggcccaagctggtatcaaactcctggcctgaagagatcctcccactttggcctccccaaatcctggaattacaagca

SEQ ID NO: 280887 - DNA, 506 bp, Homo sapiens
taagtgattattgtcttgtagatttttgctcttctgagtataacctcatcctgaaagagaatcagcagttggtagtgacaattgaaggtagaaggcacaaaaaaagaagcaggtggcagtggccctgagacaccagcacccatgagtgaatacaatcgacggaaaagttaagaccattagggcaatagcgagaggggattggttaggaagggcaggagtgacatggccatgtgtgtgctaagaggatcatgaaataactcagaggaaagaattatactgggcctgttttttgtttgtttgttttgttttgttttgttttgtttgttttgttttatagagacagaatctcactccatctttcagactggagtgaagtggcatgattatagctcactgtggcttccaactcctgggcccacacgattctcctgtctcagcctcccaagtagctgggactacagrcatgcgcccccaagcctattttgttgttgttgttgttgttttcc

SEQ ID NO: 280888 - DNA, 598 bp, Homo sapiens
agtcaagtcctgtttcccagctctgccttggagaacccaagggaggtaatgcatctatttttcaatacctgaggccattttgtttccaccctaaattgcatttaggtattgttttggggtataatatctccactcatcttgttcttgtttccacaattctactattaatacagagcttaggaaacataattgcagtgtgcggcagatagtgattttcattaactacacagaagaaaactgtttagggagagacatttctttcacattgattcaatcaaaatgacttggaagaaaargttgtgctattaagttctttacaaaaaagtaactgctaaaatttaaatcctttctcaacagcatatttttaaaaatcggtatataatatactcagatttggtcatttatgaattttttgttttgctcagtttctttgaaatatgtcttttattggctttcttttttttttttaaggaagtagagaggaggagatttctacatggaggtagagaatgtaataaaaaacgctatccacatgacatggagttgcctagcaatgctaggggaattaaaagggggaagcaataacaaaacagaatgt

SEQ ID NO: 280889 - DNA, 605 bp, Homo sapiens
taacaaattccaaagtgatattcatgctcctggtctatggaccacactttgagtagcaaggagcttgagcatagtttccttgcctattaagaaaaatgaaaataacaggatcatcctttctgtgaggatgaaataagagagtccatataggctgggcgcggtggctcacgcctgtaatcccagcactttaagaggctgaggtgggcagatcacgaggtcaggagattgagaccatcctggccaacatggtgaaaccccgtctctactaaaaatacaaaaaaaaaaaaattagccgggcatggtggtgtgcacctgtagtcccagctactcaggaggcggaggcaggggaatcgcttgaacctgggaggcagaggttgcagtgagccaagatcgcaccactgcactctagcctgggcaacagagcaakattccatctcaaaaaagaaaacaaacaaacaaaaaaacgaagagaatccatgcaaaatccttagtacacagccttagaaagaactcaaatccatttgagatattttatttgaaataattttagttaggaagaattggcaggactgaagtccagggagctcccatggtcatctgggata

SEQ ID NO: 280890 - DNA, 529 bp, Homo sapiens
gtacccaaagatcagatatatcaaaggatgacacttactgaaacacactgggtatttctakgccattttttttttaatgaggggaggcatttgaatactcggaggaaactagcatatatgagataagcatgtatccctcctggttaattgatctcatttcttagatggcagaaaatagattttctcaagatgcggaaaacaatgaactctttatctctcaatatttaaagtgcttggaaataattttgaagagattaaaatgttagcattgcagaaacacaaaaacaaaaagaaaaaaaagaaacaattcacaggtcttccattttaccctgtgaatgtagtccctacctctaacccacacaaatcccagataaaacgattatgacaactacaacaactcaggtggaagaggccactgatctaggaatctgcctggctttcaaggtactaaatgcttttgaggcagtgactgtgtggagaacaggcgagatggatgaggtgagttcccactattattatagctgcagtg

SEQ ID NO: 280891 - DNA, 539 bp, Homo sapiens
agggcagcaaaaggagatcaatatcttttttgtttgacattcaataaaaaatttttaaataagcattttcctttctaatcattttacatcatgcatggagtgttcactttaattttcaagtccgtttacttcatttctgtgagccatttgagctttgaatagtgtccacccagcatgctttctaaatatgcaagtatgtgtgttttttcattcccctttattttatctccttttttgtcctgccaattacaaaatcccaattttactaaaatatgaagcaaagsctcctggttttttctttttctttgtatatctgcttctccatgaataaacaatagctctaaacactgtttcctagcttcccatagaagagtcaaacctggaccatgtgctgctgaactcaggcctgtgaaaggaaaataaaccttggggcccccaaatcactaagctaaagggaaaagtcaagctgggaaccgcttagggccaacctgcctcccattcaattcaaagtcacccctctgctcactgagataaatgca

SEQ ID NO: 280892 - DNA, 593 bp, Homo sapiens
caatgcaatatgtattacaagtacatagaagtatgctaagatatataaataaaatggaaggatattaaatcactgagaggagctgcttttaagaaaatggggaaggaaaagaaagtggaaagaggtgtgaaagaaaaggcactttaatgttatcaataatgcttatttctcttgttaaaaatacattagtggatatgaaaaacagtgctacktgataataaataattgttgtcaaggttaaagatacacaagtgctttttttttcagtattttaaaaagttctcaggcaaaaagttttccacatctctgattaatccattgcaacaatgtttatgccccccccaaaattcatgttgaaatcttaatcccaaaggtgataataagaggggatgggggcctccgggaagtgctctgccttcatgaatgagactagtgcccttatgaaaggggcacctgtgagatcccttgttccttccactatgtgatgttacagttagaagacagctgtctatgaggaagtggtcctgcaccagacactgaaactgctagcactttgatcttggacttcccaagctccagaactacaagaaata

SEQ ID NO: 280893 - DNA, 281 bp, Homo sapiens
aacatgcctttctaggtcctttctccagtctcaatctgaaagcctggggtgaaagctaggactctgaatatttaacttaataccccatggaaatccatttcagtgaatacatgcattatataaatttttttgttcatattatttccctttaaaatcaaatgatctgaaagtggtattattccaatgagcttcctggtgtttttgtaaacattggctaaggtgatcmtgtcaagaccctacgtgtcaatggatccctcagctgaattgtcccagatgccata

SEQ ID NO: 280894 - DNA, 360 bp, Homo sapiens
gccaagcatcctactacagagaacttccaaatgattgaagcagtaaggctgagtggagargcaagcatttgagaactgtgtcaaattcctccccaagtgcccattaccaggtgtgtttgagaactggctggaaacagtaaccacagcaggatgctgctgatggctttgtcagtgcaataatgagtggtggataaaaagctcagggccaggtgttggtaggcaccgggctggggttggcatggtactgaatgttaactactattccagaattctctattttgtccagaacaagttaggatcctagactatgaccatcacccttttatttaaagttgaccagaaataaagcattttatttat

SEQ ID NO: 280895 - DNA, 535 bp, Homo sapiens
gggaggggtacaatctaagttcctcctcttgttagctgtgtgttaagctaattctataacttctctgaacataagggtcttcatatgaaaaaacagaataaaatgcccttaaggatgctttggagattaatttaaataagataatgtctttttaacatataccttggttcttggcacattaaatgtttgttgttagtagtattagataataaaatctaataagactttttttatgttattgtttgtccacagcattccattcacgtgtggaaaaatagttctgcttctgtgtttattctcaccttgtaatatgttgttgaagtgaggtcatgttgaaattttcacttattcttctctcttcctacaataatttggtcaaactktttacctatcctacttagcctgtaatagctcatcctattccagtcagagctaatgcattctttctgaatgatcatgatctctctcagttttaggagtgtagctaccgttgaactcatgttttctcagtgacaaagccatttactttcattgt

SEQ ID NO: 280896 - DNA, 1088 bp, Homo sapiens
caaatgcttaaagcctgatatatagtgagtggtcaatatgcattagctagtataatcataatttccatcatcaccacttatcagccaaatttgccaataatttactaataatgtaaagatggtcccacaattctttcatactggagatcctgctaggatatggtaatctaatttgggatctgccattacaccatagtcaaaaaaaaaaaaaaaaaaggactcagaaaccaccaaatgtggagaataaagtgcaaagaataaaatctaggaaagattaaagaaactcaaatcatgctgcttaacarggggtttgatgcaagatttaatatttgtcctcaaaaatattcagaattctgcaaacaaaaacagtgactccctggtttatttccagtgataatattaattttcatacaaaatttggtgtttaaagttatctacagcaagaaaaaaatgcctctgcatcatatcggaagggactaccaaggcagctgtagggtcatttgaagaaaaggattgcatcttatatgctgggagtgatgtaactatgaccwaacaatccaattaaaccttttatcataaaatgtacaataatgttgactgtggtcaccctgttttgctatcaaagaataaatcttattcattttatctaagtatatttgtgtacccattaaccatcccagtccccctgcwcctccaactacacttcccagcctctgttaaccatcattctactctcttatctccatgagttcaattgttttaatttgtagctcccacaaataagcgagaacatgggatgtttgtctttctgtgccttatttcacttaacataatatcctccagttccatccatgttgttatatgacagaatttcattctttcttatggctgaatagtaccccattgtatatatataccacattttctttatccattcatgtgtaggtggacacttggattgcttctagatcttggctactgtgaatagtgcagcactaaacatgggcgtgcagatatctccttgatatattgatttcctttattttgggtatatacctagcagtgggattgctggattgtgtggtagc

SEQ ID NO: 280897 - DNA, 543 bp, Homo sapiens
actggtgtttcggtaacattattgttccataaaattgctatggtcaatttaaatgaaagaacatgaaacaacaggaaaaatataaaattgggcctcagtactggtgggggcaagtgaggcaggcacttttatacattgtgggatgggattataaattggttggccatatatgtcatgcaccttaagaacttccaggaagtaacttctaaggaaaatagcaaaagatatgcacaacaattaggtattagtgtttttttaaatgcattcattattgtaactaactttctcccaaaatagatttatagcatttaataattaaaacacatacaaccaaaacattgkgtagatataaacatatttaaaaaattactagtaagtatgaaaatcaaaaacacaattcctaaggtggtgttttattttccctccattactggctctttccccatttggaagcttccttcatgttttttgaagctgagcaaggatgacatgactcatgtcatgtatattatacaatgtaaagaacaaaactggctgtgcggt

SEQ ID NO: 280898 - DNA, 388 bp, Homo sapiens
acaataaaataaataaaaataaagaattcagccttttcaggagaatcgcttaaacccaggatgcasaggttgcaatgagtcgagatcatgctactgcactccagtctgagtgacacagcgagactctgtcttaaaaacaacaacaaaaaaattcagccttttgtattatttgagtgtttggttatgctctcatgaaataaaaagattatgaagaatgggaagttggtttatggaaatctagtgaaatgcatggcatgtaggctttgaaatcaggtggaggttccgatcctaactatgttacttggcaagtttgtgaactcttctgagcctccttgactaaaatgctgataatacctgctgcatagacttcttataggattaaacaaac

SEQ ID NO: 280899 - DNA, 401 bp, Homo sapiens
gttctcccatgtgaggacacagcaacaaggcaccatcttggaaggagagagaagccctcaccagacaacagtgcacatgccttgatcttagacttcccagcctccagagctataataaatacatttctgttctttataaattacttggtctctggtattttgttayagaagcactaatggactaagacaaaaagattccattatgaaagtgaaaaggcaaccgcagagtggcagaagcttttggagatgatgaatatgtttacttcctggattgcggtgatgataccatgagtgtatacatatgtgtgtatacataatgtatacaaattgtgttcattgattatgtacagtttctttgtataccaattataccttaataaagctaaggaaaaaaaaaagaa

SEQ ID NO: 280900 - DNA, 461 bp, Homo sapiens
gaaagaaactcttcacttcccccactgtcctaattctcagatatacccagacaaatcttgaaaggatgaagctaccacctgtgttggaagcctcagttcatatcacccaaaaatctgtaccttctaaatctacaaagctgtctgccttcaccatttcttcctgcaatgaacagaaaacagaaataggttttagagagagactacccaactcttgttcacattttcctcccttccctgaatcaatcagaaccaccaagggtcaccactgatatttgagattgttttatagatagagcaaaccaaatgtgcaattatttagattcataaattaaatttatggcaaattattcacttttaaaagagatctttcccttaagaaaaaaaaaaactggctggggggatgatcacaaagaatcctggtataaytgaaatatgatttaacttacaaaaagtttttttca

SEQ ID NO: 280901 - DNA, 602 bp, Homo sapiens
ggcctggagatggaaactgttacaagctgctgaggcctacgtatagctgagcctgaaaccactggtcagagtcagcttgtctaggcactgcagtcctaagaagcacttgaaggctatctcaagaattcctttgtccagttggcactgagtgctacaatttgagggaaattcagaggattttaaattatttcatttaaaaaagaaaaatcaaacacataaatgaaaaaaaaaatacccacaaggttctcttagataccatcaacaggaaatattttccaaactccagctgtttggaaatatgccacrttcttatttccttatactgttgttttcaatagaatcaaagctagagattccatggattttggcattgtgtctttgttctacggcctctactatggagtaatggggagagactttgccgagatctgctcagactacatggcttccactataggggtaagtgttgctttcattttctgaaaccatgtatgacacaaagagaaatggtctcatcttacatgtctgcatccattttcagaaacaaataagtctttctccatatactgattattgtttcctttggaactcttttggttcac

SEQ ID NO: 280902 - DNA, 554 bp, Homo sapiens
atggaatactatgcagccataataaagaatgagataatgtcctttgcagggacttggatggagctggaagccattatcctcagcaaactaacacaggaacagaaaaccgaagactgcctattctcacttgtacatgggagctgaacaatgagaacacatggacacagagaggggaacaacacacactggggcctatcgggagygggagggagagcatcaggaaaaatagctaatgcatgtgggtcttagtacctagctgatgggttgacaggtgcagcaaaccaccatggtacatgtttacctatgcaacaaacctgcatgtgtatcctggaattttaaattaaatttaatttttttaaaaaaagaaaaaaacagtgtaagtagcaagaaaagggtgaacttctggactgctccctccatttctggagcaggacctaagtggctatgaccttgacttcctccccacagcaattgtccatcccctccaccataggctctatcttactcttttcctaaagcctgcagcccaaattctgtggtgaaatgctggtaca

SEQ ID NO: 280903 - DNA, 1213 bp, Homo sapiens
atggtgatggaggtggtgatgatggtggagtcaatggcaatgatgaggcgatggtggtgatgatattggaggtactggtgatgatggagggaatgtggtaggaagtagcattcacaacagagggaacartatattcaaagaatcagtagtggtggaacctctgcatgtctgagaagctgaaggactagtgtggctggcatgtggttggtgagagagaaggagcagagaccaaaaggaaagcagaaaccacaccacagaccctagagggccttgtagaatatgttaagcatttggatcctagtcctaagaacaactagatgccacagaaaagcttaaacatggggcgaggtgaggtgatcagatttgcattgtgaaaagatcattctaattctttatggttcaataatggtagctactagctacacatggctactgaacactgaaatattgctagttttagtagagatgtaaaatagacactggatttcaaagacttagtataaaaaatgtaaaatatctcattaatttaaaaatattaattatatcttgaaaaagtatttcagattaaatgtaattaaaatcaattttaaaattatttttaaaaacwatggtgatggaggtggtgatgatggtggagtcaatggcaatgatgaggcgatggtggtgatgatattggaggtactggtgatgatggagggaatgtggtaggaagtagcattcacaacagagggaacaatatattcaaagaatcagtagtggtggaacctctgcatgtctgagaagctgaaggactagtgtggctggcatgtggttggtgagagagaaggagcagagaccaaaaggaaagcagaawccacaccacagaccctagagggccttgtagaatatgttaagcatttggatcctagtcctaagaacaactagatgccacagaaaagcttaaacatggggcgaggtgaggtgatcagatttgcattgtgaaaagatcattctaattctttatggttcaataatggtagctactagctacacatggctactgaacactgaaatattgctagttttagtagagatgtaaaatagacactggatttcaaagacttagtataaaaaatgtaaaatatctcattaatttaaaaatattaattatatcttgaaaaagtatttcagattaaatgtaattaaaatcaattttaaaattatttttaaaaac

SEQ ID NO: 280904 - DNA, 606 bp, Homo sapiens
atggtgatggaggtggtgatgatggtggagtcaatggcaatgatgaggcgatggtggtgatgatattggaggtactggtgatgatggagggaatgtggtaggaagtagcattcacaacagagggaacaatatattcaaagaatcagtagtggtggaacctctgcatgtctgagaagctgaaggactagtgtggctggcatgtggttggtgagagagaaggagcagagaccaaaaggaaagcagaaaccacaccacagaccctagagggccttgtagaatatgttaagcatttggatcctagtcctaagaacaactagatgccacagaaaagcttaaacatggggcgaggtgaggtgatcagatttgcattgtgaaaagatcattctaattctttatggtycaataatggtagctactagctacacatggctactgaacactgaaatattgctagttttagtagagatgtaaaatagacactggatttcaaagacttagtataaaaaatgtaaaatatctcattaatttaaaaatattaattatatcttgaaaaagtatttcagattaaatgtaattaaaatcaattttaaaattatttttaaaaac

SEQ ID NO: 280905 - DNA, 571 bp, Homo sapiens
aatgttttttgtgtaagtctttgaaattcagtatgtattttacacttagagtacatcttatttcatattttaggtgttcagtagtcacatgagctagtggctactatactggacaacataattctagaggttttagataagaagatatatataaaaggagatctaggtacttgagaattttgtagaagagaaattagttcagtaagaattactctagcacaattgtaggtccactgttaatagyaatcttttaaatttgcagaccaaatataaattctccttaaagctcctaattttaaaaaattattttgtagggtgcttctttcttccctttctattggttttccccagagaagactacgtgtggatatctactataaaacatgtgtgcatggaaaattgtagggccagatgcttctggattaagagaacatgaccaggtgagtgcgccaagcaagtgcttggagatattaatgtcttaattggagatacttacttgaaaaacagattgaatccacacattgtaaacatgatcgccaagtaacccacaacaccaaatgcatagctgagt

SEQ ID NO: 280906 - DNA, 563 bp, Homo sapiens
tttcctagaagcaaaccagacagcttggggatctgagatactggggaagacgtggagcagggtgttcagcaycagagtgaagtaaagtccagatttttgctgaccacatcaggaagagaaggctgagggccatttccacattgtccaaatgtagtgcatctttgttggaactttgaagaatatagtactccatggcattaaaaaggaagacagaaagagaaagtaacatgagagagaaaaagagaggcagggagggagcttagggagggagaaagggagggagggaagggggaaggaaggaaggcaggaagggagagagggagggaaggagggaggggaggaagggagggaaagaaggactttctctggttagtgtccaaaacacacctaattgcctcatgtttttgtcataaactgacttggccagtgtgaaaagtagccccagtatttgcaaagtggcatttctcaggaagtcgggagacatctgagacaatgcatctagtctcttctctcaccccctgaacacacagagcctttattgccatgctgtaaattctgcagca

SEQ ID NO: 280907 - DNA, 563 bp, Homo sapiens
tttcctagaagcaaaccagacagcttggggatctgagatactggggaagacgtggagcagggtgttcagcatcagagtgaagtaaagtccagatttttgctgaccacatcaggaagagaaggctgagggccatttccacattgtccaaatgtagtgcatctttgttggaactttgaagaatatagtactccatggcattaaaaaggaagacagaaagagaaagtaacatgagagagaaaaagagaggcagggagggagcttagggagggagaaagggagggagggaagggggaaggaaggaaggcaggaagggagagagggagggaaggagggaggggaggaagggagggaaagaaggactttctctggttagtgtccaaaacacacctaattgcctcatgtttttgtcataaactgacttggccagtgtgaaaagyagccccagtatttgcaaagtggcatttctcaggaagtcgggagacatctgagacaatgcatctagtctcttctctcaccccctgaacacacagagcctttattgccatgctgtaaattctgcagca

SEQ ID NO: 280908 - DNA, 563 bp, Homo sapiens
tttcctagaagcaaaccagacagcttggggatctgagatactggggaagacgtggagcagggtgttcagcatcagagtgaagtaaagtccagatttttgctgaccacatcaggaagagaaggctgagggccatttccacattgtccaaatgtagtgcatctttgttggaactttgaagaatatagtactccatggcattaaaaaggaagacagaaagagaaagtaacatgagagagaaaaagagaggcagggagggagcttagggagggagaaagggagggagggaagggggaaggaaggaaggcaggaagggagagagggagggaaggagggaggggaggaagggagggaaagaaggactttctctggttagtgtccaaaacacacctaattgcctcatgtttttgtcataaactgacttggccagtgtgaaaagtagccccagtatttgcaaagtggcatttctcaggaagtcrggagacatctgagacaatgcatctagtctcttctctcaccccctgaacacacagagcctttattgccatgctgtaaattctgcagca

SEQ ID NO: 280909 - DNA, 508 bp, Homo sapiens
tgacctcagcccttgtccatcccctcttctcccctccctacatcttggcagactccccataccttggacagtgatggtcacaggcttggatgagaacagcgtgtagcctatgtttcctgtgcagtggtaatcaccactgtgactgtggtttgcttgtgggatggagaaggtgggatccaaaygggagaatttctgggattttccattctggaagaatgtgaccttgaccagaggcttgtccttccagctgtggcacctcagcatgatggtttctccctcctggaactccaggtgaggggtctggagcaccagccattctgaaagacacaaatatgataagaaaaagttgtaaggatagattccaagggtttttcagtctcagaggtacgttactcacagaacttgacatgatgtctggcagacagaaatgaagatgcttcatgacagatgtgagcattctcttataggcaatatatggtattatatctgtgggacttctaaaagcaga

SEQ ID NO: 280910 - DNA, 570 bp, Homo sapiens
ttcccctattcctccttttccctccttcctcccaccggcctgcgcccaccgcccaccgccttgaatcgccgctgcgctgcccagaggcgtcctggcctgaacagcccgcccggtttcaccctccaacttctgaccgctgagcagcagcgagcgactcgctcgtggagccgcacacacgtctcccaccagaggcacgccatccarcatcctgtcctttcctccgacccctcggaccccggccgcgcattccattctgccgacaccctagccaggtcgccgatcccacctcgctacctgtgctcccttcccgctaacacctgcctgccggcccacctgcagcccggacgcctgccggccagaggcagcgggaaccctgcacacagcctggcaggcgagtccaaacccggaaagacagcccaagaggaatcacgagcggaagccctagatccccgtcacccgcccacaaacgcctggccccgccgggaccagctctgcgccacagcgcatccccacgcgggaagccgcggcctgggccgtcccagccacacccagcgcgccttctccagggtc

SEQ ID NO: 280911 - DNA, 570 bp, Homo sapiens
ttcccctattcctccttttccctccttcctcccaccggcctgcgcccaccgcccaccgccttgaatcgccgctgcgctgcccagaggcgtcctggcctgaacagcccgcccggtttcaccctccaacttctgaccgctgagcagcagcgagcgactcgctcgtggagccgcacacacgtctcccaccagaggcacgccatccaacatcctgtcctttcctccgacccctcggaccccggccgcgcattccattctgccgacaccctagccaggtcgccgatcccacctcgctacctgtgctcccttcccgctaacacctgcctgccggcccacctgcagcccggacgcctgccggccagaggcagcgggaaccctgcacacagcckggcaggcgagtccaaacccggaaagacagcccaagaggaatcacgagcggaagccctagatccccgtcacccgcccacaaacgcctggccccgccgggaccagctctgcgccacagcgcatccccacgcgggaagccgcggcctgggccgtcccagccacacccagcgcgccttctccagggtc

SEQ ID NO: 280912 - DNA, 372 bp, Homo sapiens
tgggtggcgtgagacaaaggtgggggagggagggctgagcctgaaggctggtgggaacagtacattttcagccggttggtctgggcaggaacgaagtctgtgtggtcaaaggggacccgcgccggcgagactgggatgctgyttgggctgggcggtcagagtatggagtggggctggggtgaggtggcaagcaccccagggtgggagagacatcgtgacagagcgactggaggccacgtcccacgtcccaaaagggtagggaatgcaactggacccgagacataaataagccgtcttcaggacgcacattcacgtctcaggcatgtgtctggggctgagatgaaaagaggtccgagggggagaaacaaggca

SEQ ID NO: 280913 - DNA, 372 bp, Homo sapiens
tgggtggcgtgagacaaaggtgggggagggagggctgagcctgaaggctggtgggaacagtacattttcagccggttggtctgggcaggaacgaagtctgtgtggtcaaaggggacccgcgccggcgagactgggatgctgtttgggctgggcggtcagagtatggagtggggctggggtgaggtggcaagcascccagggtgggagagacatcgtgacagagcgactggaggccacgtcccacgtcccaaaagggtagggaatgcaactggacccgagacataaataagccgtcttcaggacgcacattcacgtctcaggcatgtgtctggggctgagatgaaaagaggtccgagggggagaaacaaggca

SEQ ID NO: 280914 - DNA, 498 bp, Homo sapiens
tgattttctgtccttgtgatagtttgttcagactgatggtttccagcttcatctatgtccctacaaaggacatgaactcatccttttttatggctgcatagtattccatagtgtatatgtgccacattttcttaatccagtctatcattgatggacatttgggttggttccaagtctttgctattgtgaatagttccrcaataaacatacgtgtgcatggtagggaacatcacacaccgggacctgtcgtgggtgggggaaggagggagggataacattaggagaaacacctaatgtagatgacgagttaatgggtgcagcacaccaacatggcacatgtatatgtaacgaacctgcaccttgtgcacatgtagcctagaacttaaagtatatatatatatgaataaagtatatatacatatgaattaaagaaaaaaaaaaagcctttttagacccagcactgacgaggttccctaggtcgatggtggtggaattagg

SEQ ID NO: 280915 - DNA, 544 bp, Homo sapiens
cttaccaagtatttcaggaccctttgtttcaccctttattggtgattttcctcttccccttcatcaactcaccgatatggacttctagctgcaccgggtcactgagggtggagaggtttgtctggcacctgtactctccactgtcgtygactgtggcagcgtcaatgaagtagctcgaggcctggcttgagatgaggctctcattgtgaaaccactgtgtggaattgtcctcaggggagtaggctccctggcacttcagagtcacactgtccttctcgagcaccctgtaccattgaggctccaggaacaccacagcctttgggagatcttctgaggagccaagataatgtggggtgaggacagggagaggagcaggctctacactgccattcccagggagcctcaaagccagaatgagctcattgcaaacccatgcttggtggctcagtcttagagcatcttggccccatttttggcctgttcagtatcttaaggaaagctggccagagaagcacagggccaagttgtgctgtgttggaggaac

SEQ ID NO: 280916 - DNA, 544 bp, Homo sapiens
cttaccaagtatttcaggaccctttgtttcaccctttattggtgattttcctcttccccttcatcaactcaccgatatggacttctagctgcaccgggtcactgagggtggagaggtttgtctggcacctgtactctccactgtcgtcgactgtggcagcgtcaatgaagtagctcgaggcctggcttgagatgaggctctcattgtgaaaccactgtgtggaattgtcctcaggggagtaggctccctggcacttcagagtcacactgtccttctcragcaccctgtaccattgaggctccaggaacaccacagcctttgggagatcttctgaggagccaagataatgtggggtgaggacagggagaggagcaggctctacactgccattcccagggagcctcaaagccagaatgagctcattgcaaacccatgcttggtggctcagtcttagagcatcttggccccatttttggcctgttcagtatcttaaggaaagctggccagagaagcacagggccaagttgtgctgtgttggaggaac

SEQ ID NO: 280917 - DNA, 544 bp, Homo sapiens
cttaccaagtatttcaggaccctttgtttcaccctttattggtgattttcctcttccccttcatcaactcaccgatatggacttctagctgcaccgggtcactgagggtggagaggtttgtctggcacctgtactctccactgtcgtcgactgtggcagcgtcaatgaagtagctcgaggcctggcttgagatgaggctctcattgtgaaaccactgtgtggaattgtcctcaggggagtaggctccctggcacttcagagtcacactgtccttctcgagcacsctgtaccattgaggctccaggaacaccacagcctttgggagatcttctgaggagccaagataatgtggggtgaggacagggagaggagcaggctctacactgccattcccagggagcctcaaagccagaatgagctcattgcaaacccatgcttggtggctcagtcttagagcatcttggccccatttttggcctgttcagtatcttaaggaaagctggccagagaagcacagggccaagttgtgctgtgttggaggaac

SEQ ID NO: 280918 - DNA, 484 bp, Homo sapiens
tttgcttttctttcttctccttccctttttcttccttcccctcctcttctctccttttctcattggaaggccaggcacagcagaagtttctgactatggaattcagtygattgtcatcctctaggacttacagtttcttagggggagaacatcagataagtatttgaagtgctagagggactgtgacagtatttatgaaatgctgtgtatgcacaaagaagacagtggctaattctatctgagggaggagtgtacatggaagagagaacactttaattagatcgcaaaatattcagcaggaagatttttgagagaaataggcattccaggcaagaggagcagcatgagcaaagacttggagtgaagtagactgtcatgtttgcagagctggctgtagttccacaagtgtagttggatgtagttccacaagtgtagtgagtactacaaaggagaagcacaggttccaaaaggattaagatgtctg

SEQ ID NO: 280919 - DNA, 608 bp, Homo sapiens
tgacaactccatggatattcaaatagttgttccatagtacataattggcctttttctctggcttctttcaaatttttttaaaaaggagtatcacatgacaagttggttttatttttcaatatatcctgttttgcatgtgctgtgctgattgtttctgtacattcatgtctttcagaaaatatgaaagagttttggtcattacttcatttttcccttactctcttgtgccaatcctgataacatttaaaatgattgttaatatgtttggattaaaaatctaccaaacacttcatgtgatttaaatttaagacattagtaagaaatcctactagtcctcaatttcacctagtctttgaccactgtttccamgatgatcagtcagagtcaactgcatgcaaatccagcaggtaagaaataatgaatataaattgcttccttctgatagtctcattagtttaagaggtgttagagctgtagtgaaaaaaagggttctgcttattctagtttagtatgatttaaatgaaggggatatcaagggaggctgctgcattactcagttgtgtgcataatgcaaactctcaaaaaagtcaacaaacagttcaactttc

SEQ ID NO: 280920 - DNA, 487 bp, Homo sapiens
ttataaacatgtacaactattatgtaaccataataatttttaaaaaatatttttcccataaagcacactctagaaaaataatgtattgataaagaatctgcctttagtaratacatctttaattttaaaatagattttatttttcgtggtgttctgaatacagaaatattataagaaactctcaggtaatactttatccaattccagattcacgaggctgccatattgcctcttggcagccatcacactcccttagaactgctgatccaaatcttaatttattgcaaggagaaatggctttagacaattttgttcactcacttgttttttaacatttctggggagtggtttaatttactctagaacacaatcttgtccattgtgcagtaacatgaatatttgatattctacataaacaaagaacttttagctatgttgcctgaatatctcatttaactaatcaaataaaaatatcataaatttggca

SEQ ID NO: 280921 - DNA, 634 bp, Homo sapiens
tgcttttgcccacaagagactctcgtcttatgatttgagttctctgttagcacacatagcagatttgggaggaggagaaaggggcagagagagagagagaacagagctaagcaatgacaagggagaaaaatcatgtcataagcacaaggggcaagaaaggtttggatcaagttttgaatatgaaataatgatattggttattttgtgagtctagtgatttttttctgaggtagttacaaaaatgttttaagaaatggtagcacaaatgaatcatgttgtttctcctctgggcctttctttatgttttttttcttgaaattctcctcatcccacccacaatttggccggctaaccctgatgcatgctttagctttcagctttagaactcatttccattaggaagccttcctgtggctctaagacttggctgatgttcccttatgtatctccgtagttacttcacttaatatgtatcrccataattctcttctcagaaagtttattcagtcaggctgttaggatcaacagctataggagaaaggaaggatgccagattgggaagaagagagggactatggtgccgtcacaacaaggtcagtgagcccttgagagttgtgctgagttgaggtgaggg

SEQ ID NO: 280922 - DNA, 586 bp, Homo sapiens
aaaactaatatgtcaaaagaaaataattattaaatagttataacattatgttaagttggatgtgatctaggttttgtgtttttctgctttagcaagatataaacttcaaaaattagcaggcaagcatatgttttttagcctatgatatatctaattatttctttttaaaattaagtaggagttcttgataagaaatgtggtcttgtgagaaaataaaacctgacataatttaagstaacaatgttataataaaaatgacaacatttgcaagcatttactaagtacttattgtgtattcctgtattatgttaaggggttttcgtattacctagatgaattcctagatggattcttgtatgtactcagtcattgaaattatgatatatagcacagtaaatatgaataaatgttttgaagacagttaaaatgatttggataaaagaagagttggtcatactcatttgttcaaccgagaaataaatcctattatacatgctaatgattttaaaatgaaatgatttttatttctttggaaaatagtagtcctttcatgcaatgatttattttatcactaacattagtttcc

SEQ ID NO: 280923 - DNA, 586 bp, Homo sapiens
aaaactaatatgtcaaaagaaaataattattaaatagttataacattatgttaagttggatgtgatctaggttttgtgtttttctgctttagcaagatataaacttcaaaaattagcaggcaagcatatgttttttagcctatgatatatctaattatttctttttaaaattaagtaggagttcttgataagaaatgtggtcttgtgagaaaataaaacctgacataatttaagctaacaatgttataataaaaatgacaacatttgcaagcatttactaagtacttattgtgtattcctgtattatgytaaggggttttcgtattacctagatgaattcctagatggattcttgtatgtactcagtcattgaaattatgatatatagcacagtaaatatgaataaatgttttgaagacagttaaaatgatttggataaaagaagagttggtcatactcatttgttcaaccgagaaataaatcctattatacatgctaatgattttaaaatgaaatgatttttatttctttggaaaatagtagtcctttcatgcaatgatttattttatcactaacattagtttcc

SEQ ID NO: 280924 - DNA, 586 bp, Homo sapiens
aaaactaatatgtcaaaagaaaataattattaaatagttataacattatgttaagttggatgtgatctaggttttgtgtttttctgctttagcaagatataaacttcaaaaattagcaggcaagcatatgttttttagcctatgatatatctaattatttctttttaaaattaagtaggagttcttgataagaaatgtggtcttgtgagaaaataaaacctgacataatttaagctaacaatgttataataaaaatgacaacatttgcaagcatttactaagtacttattgtgtattcctgtattatgttaaggggttttcgtattacctagatgaattcctagatggattcttgtatgtactcagtcattgaaattatgatatatagcacagtaaatatgaataaatgttttgaagacagttaaaatgatttggataaaagaagagttggtcatactcatttgttcaaccgagaaataaatcctattatasatgctaatgattttaaaatgaaatgatttttatttctttggaaaatagtagtcctttcatgcaatgatttattttatcactaacattagtttcc

SEQ ID NO: 280925 - DNA, 601 bp, Homo sapiens
tgacagtgatgtacacatttttttctttgcttttgtgctttcacaaaaaggatgatgacatgcagggaatttttaaagagcgtatggcagcaaagtctcccaaaataaataactatttattctaaccccttctatgtgaagggatartagcaggataagaacattccaatagctcattgctgatgcataaacatttagaagggatgcatttcatttacacagaaattctctgaggtaaagagccattcgtgttggaaaaataggcttactccttgttacagaaactgagttctcagggcctgtttattggcttgaaataattttataaaggaagaagaaagccactctgattaattgaaagagaatctgaagctccagaggagaacccaaagggtagcgagtaagcagaagagaagagtaaagaagaaatgtcagaatattttatactatggaatataaattttcatcagaatacctacatatttttaattaaaaataaaatctaaagaaccaaaaattatgaggcaatagagcaattctaagttttcttcaatgtctgagaggtatggaggtccctgtggcgattttggttatcctgagt

SEQ ID NO: 280926 - DNA, 601 bp, Homo sapiens
tgacagtgatgtacacatttttttctttgcttttgtgctttcacaaaaaggatgatgacatgcagggaatttttaaagagcgtatggcagcaaagtctcccaaaataaataactatttattctaaccccttctatgtgaagggataatagcaggataagaacattccaatagctcattgctgatgcataaacatttagaagggatgcatttcatttacacagaaattctctgaggtaaagagccattcgtgttggaaaaataggcttactccttgttacagaaactgagttctcagggcctgtttattggcttgaaataattttataaaggaagaagaaagccactctgattaattgaaagagaatctgaagctccagaggagaacccaaagggtagcgagtaagcagaagagaagrgtaaagaagaaatgtcagaatattttatactatggaatataaattttcatcagaatacctacatatttttaattaaaaataaaatctaaagaaccaaaaattatgaggcaatagagcaattctaagttttcttcaatgtctgagaggtatggaggtccctgtggcgattttggttatcctgagt

SEQ ID NO: 280927 - DNA, 628 bp, Homo sapiens
atataacctctgtactttgatatccaggattagggccacctatgctgtggcctgcaaagggaaagagaaaaatatagggaggagtgtgtgagttacatcatttttgtctttttagtttgaaaaaaattcaaactcacagaaaaagttgaaagactattacaaagaattttttcttcttaaccattttgcagtaaattgccaacataatgcttcatacctttcagtacttgggttagtattttctacaaaaagacggaaattttccaattatcacaatctaaccatcaaaatcagaaaatttatactgatatatttctaccatatcaaccacagacccagtcagcttttgccaattgtcccaaaaatgcccttcatagccaaataatccagttgaggatcgtgaattgcattttgctgtgataccttttagcctcctgcaatccggaatgcttttctgatcttctcttgattttcatgactttggaacttttgaagactagaggttaattattttgaagaatgtccctcagtgtgaatttgtctgatactttctcatagttagattcaggttctgcatctttggcgraagtgtcacagacgtgatgcagtgttctgcttatttagtcct

SEQ ID NO: 280928 - DNA, 642 bp, Homo sapiens
cttctctcacaaaaatactcactcttaaaaagcttaattatgacatatttgacttgctgaactgaaaattaataaaacagacatattaaaacaattttaacctgtcctaaaatagttagcagaatttaaaatcttagaacaataagattttgtgtttcccacacagtattttttttaaatctgaaagttaaaatctasgtcaactatcaactcatttctgaagcctcctgattcctttagagagagctggatgctatttcctcggtgcttctgcttatgtcattaaatcacctacattcaacatcataaagctatatttaatagttgcagaaagacagggtgacctaagaagtacactgattaatctttattaaccaataaaaccaaagaacaaaagtaagatgccatcagaaatcaaagattctaaacacagtttcagctattccgctgtggattcatttattcaattgctgcacaaaagattttatcctcatctgttacataagctaatatttctgagctaccaatattaagcattcttcattgttttataaaaaacgaggatataggatcagaaaaaaatagagcagtgtctattaattcactattacatggaggtttgccacatgggcaattttatgt

SEQ ID NO: 280929 - DNA, 563 bp, Homo sapiens
tttttcatatgtttgttggctgcataaatgtcttcttttgagaagtgtctgttcatatccttcacccacattttgatggggttgagagtcattctttccttagacagagaagggtcttgttgtatccatcttacagatatgacttactgatttatgttctctaaacataaacccgaggcgtctcttcccaccaaccttttctattacctttgtcattgaatttcttaatctattataacttgagatagaatatgagaatacttcctctttgaacttttactttataacatagaacatacycatatagtcaagtagtaagtgactaatttagagttaacaatacagaacttctaaataatggaattattcttgatacccaactaaatccttgatgaacatttttccagtcaactccttgttatgacactgtattaaaccacataattgcttttttctaaagatacttttgatgatgctttgtcagttcttcctatatggtgcagaagagctctgaggcttaattataggaaaacatttccagttcaatttaaaaggtgaaagag

SEQ ID NO: 280930 - DNA, 580 bp, Homo sapiens
ttgcactcctatatttgttgcaacactattcacaatagccaggaattagaagaaacctaagtgttcatcaagagataaatggttaaagaaaatgtggtacatatacacaatggagtactattcagccattaaaaaatgaggtcctgtcatttaaaacaacatggatagaactggcgatcatgatgttacatgaaatatgccaggcacagaaagataaacatcaygtgttctcacttatttgtgggatataaacatcaaaacaaatgaactcatggacatagcatgtagaagaatggtttccagaggctaggaaggatactggcaggcctgggggcaggtggggattgttaatgggtacaaaaaaatccagaaagaatgagtaagttctagtatttgatatcacaacggggtgactatagtcaataaaaacttaattgtacattttaaaataactaaaagagtataattggattgttcataacataaaggataaatgtttgaggataccccattcaccatgatgtaatcccatttgtcagtttttgctttcattgtttgtgctgctgggttattgttcaaa

SEQ ID NO: 280931 - DNA, 580 bp, Homo sapiens
ttgcactcctatatttgttgcaacactattcacaatagccaggaattagaagaaacctaagtgttcatcaagagataaatggttaaagaaaatgtggtacatatacacaatggagtactattcagccattaaaaaatgaggtcctgtcatttaaaacaacatggatagaactggcgatcatgatgttacatgaaatatgccaggcacagaaagataaacatcatgtgttctcacttatttgtgggatataaacatcaaaacaaatgaactcatggacatagcatgtagaagaatggttkccagaggctaggaaggatactggcaggcctgggggcaggtggggattgttaatgggtacaaaaaaatccagaaagaatgagtaagttctagtatttgatatcacaacggggtgactatagtcaataaaaacttaattgtacattttaaaataactaaaagagtataattggattgttcataacataaaggataaatgtttgaggataccccattcaccatgatgtaatcccatttgtcagtttttgctttcattgtttgtgctgctgggttattgttcaaa

SEQ ID NO: 280932 - DNA, 616 bp, Homo sapiens
gcaacttagacttgcgattggcatctgaagtagagagcatcttttgagactgagctattaacctgtaggatctgacactgtctctaggatattattatgattgagttaaattgctgaacacccagttggtatccaytgagaactggagaattgcttagtatgggaaaaaacccacgtatttggtgaccagaagtgaagtggtggtgtgagtgttgaatgagactatagagaaaaacagtttttcctcatgcagacaaagatgtttcaccttctgctgtagagaatcacaaaacattgatgcatctgagcagagaaataatacaaccagctatttctggcagaaatgcagaaggaaaattggattagagtagggttctaatgaaatgatacagatgaaagaactgaacataaagctatgagatgaagagaagaagatggaaattacagatatccaggaaatagaattcgcaagatttaattatcaaggaagatggggataggattcttgaggaaatgagaggtctatcatgtcacgtaagtttttagcttgagcgattgactgatatttgcaaaacttgagataggaaatgaggaaggtggattaggttagagggaa

SEQ ID NO: 280933 - DNA, 616 bp, Homo sapiens
gcaacttagacttgcgattggcatctgaagtagagagcatcttttgagactgagctattaacctgtaggatctgacactgtctctaggatattattatgattgagttaaattgctgaacacccagttggtatccactgagaactggagaattgcttagtatgggaaaaaacccacgtatttggtgaccagaagtgaagtggtggtgtgagtgttgaatgagactatagagaaaaacagtttttcctcatgcagacaaagatgtttcaccttctgctgtaragaatcacaaaacattgatgcatctgagcagagaaataatacaaccagctatttctggcagaaatgcagaaggaaaattggattagagtagggttctaatgaaatgatacagatgaaagaactgaacataaagctatgagatgaagagaagaagatggaaattacagatatccaggaaatagaattcgcaagatttaattatcaaggaagatggggataggattcttgaggaaatgagaggtctatcatgtcacgtaagtttttagcttgagcgattgactgatatttgcaaaacttgagataggaaatgaggaaggtggattaggttagagggaa

SEQ ID NO: 280934 - DNA, 1213 bp, Homo sapiens
gcaacttagacttgcgattggcatctgaagtagagagcatcttttgagactgagctattaacctgtaggatctgacactgtctctaggatattattatgattgagttaaattgctgaacacccagttggtatccactgagaactggagaattgcttagtatgggaaaaaacccacgtatttggtgaccagaagtgaagtggtggtgtgagtgttgaatgagactatagagaaaaacagtttttcctcatgcagacaaagatgtttcaccttctgctgtagagaatcacaaaacattgatgcatctgagcagagaaataatacaaccagctatttctggcagaaatgcagaaggaaaattggattagagtagggttctaatgaaatgatacagatgaaagaactgaacataaagctatgagatgaagagaagaagatggaaattacagatatccaggaaatagaattcgcaagatttaattatcaaggaagatggggataggattcttgaggaaatgagaggtctatcatgtcacgtaagtktttagcttgagcgattgactgatatttgcaaaacttgagataggaaatgaggaaggtggattaggttagagggaawttcaaagacgtttatcaaacagattccagaagcaaagcatgatgcttgcatcagatgcacaagatacaaacaaagcaatagtccctaccatcaaaaagcttacacgtaatagaaaaagtaatccaacaatcacatcatttccaatgtggtaatgattaagcttgagataggcatagggttccagggagaagagaagggcataatatttttaaagtattgttaataattaccacttaggttaatctgcccccaaattactagaaaatgaawaaaaacagattttgaaattagatcaacctaacagtatgaaccgtactatcaaatagtcattttccaaaattatcaattgccataaaattaatattttttgattccaaagccatgaaatatacttgaagaggggatacaagatttaatagtgagcctttattgcatcttgctggtttcaaccaagttttccaatcatttcaagtacaaactctgttgctttttatctgagcaatctctttccatttaaaacccacattctatgacaatcatatttttctttaattttgaaactttgctcttccaaggagaaagtaataaagtaatat

SEQ ID NO: 280935 - DNA, 596 bp, Homo sapiens
ttcaaagacgtttatcaaacagattccagaagcaaagcatgatgcttgcatcagatgcacaagatacaaacaaagcaatagtccctaccatcaaaaagcttacacgtaatagaaaaagtaatccaacaatcacatcatttccaatgtggtaatgattaagcttgagataggcatagggttccagggagaagagaagggcataatatttttaaagtattgttaataattaccacttaggttaatctgcccccaaattactagaaaatgaaaaaaaacagattttgaaattagatcaacctaacagtatgaaccgtactatcaaatagtcattttccaaaattatcaattgccataaaattaatattttttgattccaaagccatraaatatacttgaagaggggatacaagatttaatagtgagcctttattgcatcttgctggtttcaaccaagttttccaatcatttcaagtacaaactctgttgctttttatctgagcaatctctttccatttaaaacccacattctatgacaatcatatttttctttaattttgaaactttgctcttccaaggagaaagtaataaagtaatat

SEQ ID NO: 280936 - DNA, 1248 bp, Homo sapiens
ttattgcatcattccatggcagaggtgaagggcaagagaacatgaatgagagagatcaagagaggcccaaactcactttactaattcactcttgagataacaaacccacacccacattacctactcactttttaagggctccattgcttaacactattgcattgagaattaagtttycaagacataaagttgggagatacattcaaactatagtattgggtgacagcagaaagtctagatgaacagctggggcatcagcagaatttggaggcagagagtactactagaaaaataaaattaaaaagaaaattcctcccaactcagaaaatctctccagaaagataaaagtgaaaaaaaatatatattgagtaagaattaaacaaaaatgtgatgtgtatcacaggcaaactactaagagactgcaaagagggaaagaaatctcacccttcacacaacaaagcagatacaactcattacatcttcttgaggcagataataaattgtccagaaaaaagaggacttgatagcacccatttgttatacaaattcccacctaaaattatctggtgatggggtgaccatctgtgtaatttaacagawtgtcttcttttcaaaattttaatttaaagccatctttattactctaaatcttttttaaaattattcatttttattttataaaagatgctcttaatttttatttcattcatcatcatttcaaaaacagaatcatttgcttttctatctttatagttcttcacccattgtttcatccacctattctcttgcaaacagaattgaaaaaagatgcaaaattttcacctattttttcaatttccactgcttccttctccgaaacttagtagaggtttattcctgactcctttggacttcataatttttccccacatgatttgctgagaaatgtatgcttctgtaatgactatcaagtacctcatgaattgaagacacaaatttagtttggwcaacctgttcttcaccgggaattggcaggctgttatattccactgaagagggaaattcaccaaacacacattaccaacgtttcattctttgctgtgtcaaatgtcctcttaacttccaggatctgtgaatccatttcttactgtttcacttgagatgactgttccttcaaattctttagaatcattctcttcctgatataggatacagatgtcagaaaactgctcactatgtctatgtaataaaattgagaccataataata

SEQ ID NO: 280937 - DNA, 605 bp, Homo sapiens
tcaactgtctatccactgtaaaagggaatgcagagtaatatggggacacatgaaggtaggtctgttagtgggagaatgtggatgttgtcctctgaaggctatttttttcatgtattaagtagttagggyattgttgaagggaagaagtagaaaagattagttagaaactttagaaaagtattattgaaattgtcactttctagagtggaaaagtgaattaaacagataatttattaggattccagttaatctccaggaccccacttgaggtttataagcttacatttaaagtgagacagaatagcatgttttattagttttttctcgcattgctatatagaattatctgagactgggtaatttataaagaaaacagatttaattggctcacagctctgcaaactgtacagaaagcatgatgctggcatctgcccagcttctggggagaccgcaggagacctacaatcattgtagagggcaaagaaggagtaggcacatcacatgaccagagcaggagcaagagaaagacagggaggggctctatacacttttaaacaaccacatctcatgagagctcactattataagaacagcaaggaggggat

SEQ ID NO: 280938 - DNA, 583 bp, Homo sapiens
agggaagtgctgaacactgaacactgaagtctaatgtttataagcacaagaaggctgtgatatgccttgcagagaaaatatgtattttagataagctatgttcaggcatgagttacagtgctatctatcatgaattcaatgttaatgaatcagcaatatatttttaataggtatcaacagaaacacacataaagcaaagttacmtttagatcaattgatgaaaacgttctaatcagagactcacaggaacctagtgctgtatttcccctgggagcaataattcagtgttccctaactcagcatttatgtgatgactttacaaaacaaaaataccaccaataaggagaatcaattgtcttttatatcaggccaatattttctttgattattaaggccatgaagatacagttttaaacatataagtactcagaaaatgcagtaccaactagcccttctttagcagtctactagatatgaatttataagcttcgtctaaataagacataactgagaagagatcagcaaatcattgatggtgcacatttagtgtattaagtgtagatctaagattaaagcaaaagca

SEQ ID NO: 280939 - DNA, 1051 bp, Homo sapiens
ggcaaattattgcttctcggttattctaatttaagtcaaatgctcatcgtttctaatctgttatcttaaaattgtcctataatttgcttctataaactcagtctgtatttgaatatgtattagtcaagattctccagagaatccatatctgtgtctatatctacctattgacacagatatggatataaatatacaaatggagctttattgtgggaattcactcatgcaattagagaggtcartaagtcacctgatatgttgtctgtaagacagagaaccaggaaagtcaatggtgtaattcagtctgactttgaaggtgtgagaaccaggagctccaatatctgaagtcaggagttgtttcggctcaagaagagagagaagacacacacctggcctacttcattcagcccttttgttctatttgggccctcaatgggwaggctagcaattcagatccccagggtaatgatcattatttttccatagtttcattgtactagtcagcatttattttgttgcaaatgcagatcaactgaagaaaataaggcaaacaaaaccaactaggatttgcatgaagccagggtctaaaagctattaatctatcaccaggtccttcttactctctcattctcttgagtccatttctctttacggactggtatcattccttttgaaatagaagactcatgttgttgatattagcaaaaaagaaaaatataaaaacttattctcataaaaagatcaataatgaaaaaacaggaatgacctctaatacataattgtaggccgaatctggatatttcgtcaataagcatgttgtgagttgatcatatcgtaaaawctgaatctagacttgaggttctactagacctataacttagataagttaataaacttcactcagatttagttccttcatatataaaatgaatatagaggtactttgaaaagttgttagcattaatgaaataaagtataagtgacatactgtggacacacagtagttgctcaataaatagttgaaaggatcaattagtacatataacagtat

SEQ ID NO: 280940 - DNA, 491 bp, Homo sapiens
actgtggacacacagtagttgctcaataaatagttgaaaggatcaattagtacatataacagtattcccaggccacaccaaaaagggttaacaattgtaacggtatttattctgatccctcaatcagtatttcagaaactagaaccacaactcactgagaactttccttttgtaatgggtctttgcaagcttattttcgttttatgcctttgtcaactgctccttttggtaatgcagatatcaagaatggcacacaggctcctttctgccactgtagtactattggctcttctcactgcagccaatgctggtgtttcaaagcaggtttctccctaagttattacaattctcatacattacaaaaagaagtcttccttttttgtttcctagttttatctttcttacaacttgaaaaatgtttcacaggaactggggcagarttaagaaactcccttttgtggcagaatcaggaatttttgtcctcaccaata

SEQ ID NO: 280941 - DNA, 547 bp, Homo sapiens
gttgatcagtgttcaatcgggtaaagagaatattgtatgtatacaccatagaatactacacagcmataaaaaagaatgaaatcttgtcatttgcagcaacgtggttggagccggaggccattatcctaaggaaaataactcagaaacaggaaatcaaatgctgcatgttctcacttataagtgggagctaaaaaatgggtacacatggataaaaagatggaaataatagacattggggactccaaaatgggggaggatggaggatgtgggcagcagttgaaatacttcacaatgggtactatgttcactgtttctgtaataggttcactggaatcccaaatctcagcattctgcaatatatccatataaccaacttgcatatgtacccccaaacgtaaaatgaaacaaatagtcttacaaaccaaatcaacaacaacaaaagccaaacaaattacaaggaaaaaaaccccacaaagctgtagttatggcttatagaacaggaggtaagtgagtcagtgtcttgcagtggatgagctgcaattatttt

SEQ ID NO: 280942 - DNA, 547 bp, Homo sapiens
gttgatcagtgttcaatcgggtaaagagaatattgtatgtatacaccatagaatactacacagcaataaaaaagaatgaaatcttgtcatttgcagcaacgtggttggagccggaggccattatcctaaggaaaataactcagaaacagraaatcaaatgctgcatgttctcacttataagtgggagctaaaaaatgggtacacatggataaaaagatggaaataatagacattggggactccaaaatgggggaggatggaggatgtgggcagcagttgaaatacttcacaatgggtactatgttcactgtttctgtaataggttcactggaatcccaaatctcagcattctgcaatatatccatataaccaacttgcatatgtacccccaaacgtaaaatgaaacaaatagtcttacaaaccaaatcaacaacaacaaaagccaaacaaattacaaggaaaaaaaccccacaaagctgtagttatggcttatagaacaggaggtaagtgagtcagtgtcttgcagtggatgagctgcaattatttt

SEQ ID NO: 280943 - DNA, 547 bp, Homo sapiens
gttgatcagtgttcaatcgggtaaagagaatattgtatgtatacaccatagaatactacacagcaataaaaaagaatgaaatcttgtcatttgcagcaacgtggttggagccggaggccattatcctaaggaaaataactcagaaacaggaaatcaaatgctgcatgttctcacttataagtgggagctaaaaaatgggtacacatggataaaaagatggaaataatagacaytggggactccaaaatgggggaggatggaggatgtgggcagcagttgaaatacttcacaatgggtactatgttcactgtttctgtaataggttcactggaatcccaaatctcagcattctgcaatatatccatataaccaacttgcatatgtacccccaaacgtaaaatgaaacaaatagtcttacaaaccaaatcaacaacaacaaaagccaaacaaattacaaggaaaaaaaccccacaaagctgtagttatggcttatagaacaggaggtaagtgagtcagtgtcttgcagtggatgagctgcaattatttt

SEQ ID NO: 280944 - DNA, 547 bp, Homo sapiens
gttgatcagtgttcaatcgggtaaagagaatattgtatgtatacaccatagaatactacacagcaataaaaaagaatgaaatcttgtcatttgcagcaacgtggttggagccggaggccattatcctaaggaaaataactcagaaacaggaaatcaaatgctgcatgttctcacttataagtgggagctaaaaaatgggtacacatggataaaaagatggaaataatagacattggggactccaaaatgggggaggatggaggatgtgggcagcagttgaaatacttcacaatgggtactaygttcactgtttctgtaataggttcactggaatcccaaatctcagcattctgcaatatatccatataaccaacttgcatatgtacccccaaacgtaaaatgaaacaaatagtcttacaaaccaaatcaacaacaacaaaagccaaacaaattacaaggaaaaaaaccccacaaagctgtagttatggcttatagaacaggaggtaagtgagtcagtgtcttgcagtggatgagctgcaattatttt

SEQ ID NO: 280945 - DNA, 589 bp, Homo sapiens
tcaagtagccccaaattgatctttagattaaatgcaaaaccaagtaaaatctcagaattatcgtatagaaaatgacgagcaaattctaaattttaagaaaatggaaggatcaatgatatccaaggcaatcataaattttaaaagttggggacrtacactaacacttgttgatttatatttcaaagccatagatattaaggcattgtgatattgacacagcgcagacgaatagatccatggagcattataaaggttctagaaataggcatacatatattgccaaggaataatttatgacaagcatatcactgcagtgtaatataaaaagtccattcttcttagtaaatggcaccagatagtcattttgaaaacaatgtatgttgccactatctcataaaatacaagaaattaaactccagatacagtatatatctaaatttaaaggtgaaataataaagctttttgaagtaaatacaggtgactagcttcattgcactggactagacaaagacactataaataggatacagcaatcactaaccataaagaaaaaaaattccaaaagttgaaaaaacaagccagagtagaa

SEQ ID NO: 280946 - DNA, 599 bp, Homo sapiens
ttcatacaagcagagagtagaatggtggtttctaggggttgtagggaagtagaaacagatgttggacgaggagtacaaagtttcagttatgcaagatgaataagctctggaagtctaatgtacagcaatgtgactatagttaataatagaacattatatacgtacttgaaatttgctgtaagggtagatcctgagttttcttccttgttttattcactggtaactattgccttgtctactggaaaaatgccttggattcttaaaaggtgggaaaggttcttgtaagattccttttttcatttctcaatcagatatatccctcaataacagaagcatcattcctaagacccttgtaatggtgaatccagaaagacaaaatcaggcagagyagcataattggaaaacttccttgcaaacctttttaagccttgccaaggtttgaatccttgccatttgtaactaaaacaagaggaacttggtttcagtttatatgaaataatggcatgaaatttgaggtgagacattaggaaactattaaaatgagaatcttccaataaaccaaaagaagctccacaatttgggtagaacttaaactcatg

SEQ ID NO: 280947 - DNA, 618 bp, Homo sapiens
taccatctcccaccagtcagaatggctattattaaaaagtcaaaacataacagatgctggtaaggttatggagaaaaagaaatggttttacgccgttggtaggaatgtaaattagttcaactacggtggaagactgcagactgcttttaatttgtataattcattgcaaccaacccagatttccaccaatgaaagctattagtgttctttatgtcagttatcaacaaattgcctcttagcgacaaatccatcctttattgcctgctttgtgatactggatccacatcctgtaaacataggtcttttgccagctggtgtgatgttaaactgtaattgttggtagaggatgctggagggacactacagaggaaggggcttctctttctggtttcgctgtattcctcttttcttactgctgcagtgctgatctctatgcagggcacctggtgatgtttacctctctgtgagttgccctgaaaccccatagatctgtcagcatcctagggggctttttagggaggtcagtctaatttcagcaggtagctttctcaacaaattccacaaataccacagccagtttcccaggaartttagtgcaaattccacagtaggatttcc

SEQ ID NO: 280948 - DNA, 567 bp, Homo sapiens
ctactccataggcagagcagcggtatgggccactggttgcccatttttatggatatttcctgatcacatgcaaagagtgcattattcatgcactttttagaccatatagggtaagttcttcaaattgtcatggcatttgtaaactgacatggcactggtgagagtgtagcagtgaggacaaccagcagtgaaggcagggaaggcatagtggatgctgtggtgtagcaaccagatatacccttcaggactaagactattactcacctaactgctgggagtattggcaaccagcagctcayagctgataccaaatttgagaattgcccttaaccaaagggaacttaccttgtttaaattaacaatcctcttcctggggcagatcggtgtggagtaggcgggtgaaaagacctggccctttgcatcaatcactggcctttgcaatttcctataggattatctgaggcctctgatgcaatggcatcacagcgcaacctctgcccaattctacttctctcataccttttcagacttgatcctcagagcattcttttgttatcgttgtttttt

SEQ ID NO: 280949 - DNA, 567 bp, Homo sapiens
ctactccataggcagagcagcggtatgggccactggttgcccatttttatggatatttcctgatcacatgcaaagagtgcattattcatgcactttttagaccatatagggtaagttcttcaaattgtcatggcatttgtaaactgacatggcactggtgagagtgtagcagtgaggacaaccagcagtgaaggcagggaaggcatagtggatgctgtggtgtagcaaccagatatacccttcaggactaagactattactcacctaactgctgggagtattggcaaccagcagctcatagctgataccaaatttgagaattgcccttaaccaaagggaacttaccttgtytaaattaacaatcctcttcctggggcagatcggtgtggagtaggcgggtgaaaagacctggccctttgcatcaatcactggcctttgcaatttcctataggattatctgaggcctctgatgcaatggcatcacagcgcaacctctgcccaattctacttctctcataccttttcagacttgatcctcagagcattcttttgttatcgttgtttttt

SEQ ID NO: 280950 - DNA, 426 bp, Homo sapiens
acagactcaaatgaattttgtgtctctatatcatataaaaataagatgcccaaagtctataaacttaaactggtgcttactagtraatgtttccatagtttatcttacttagaaattattaaccaatgtctattactttgcttagcctagcataactaaggttcctgaaaactaaaaatggttttgaaaactgttttcaggcagacatactatagcaccaaacaatgctaaccattgtctcaagttattttccttttttaaccttatttgtctagtaaacccaaatagactataaatgcatgcttgtattatacttagttctaataactcagaagacatagctattttttaaacaacaatatgaaattaatcctacttaccaaagttatactcaacccatgcacatttggaaaacacctagtttat

SEQ ID NO: 280951 - DNA, 1052 bp, Homo sapiens
ctgtagccctacacaatgataaacatgggaaataccccatgtctaatgggaaaatacaaccaatctcattaaaattagctgagagaagaggtaaaattcacccatgtaagcttatagaaaacagggaagaagtagagatgaccttatctctgtacctgagccaagctgacttggctgaattcagcccactgcatcttgaactgagcctataatacaaattctggtttttgtttagttgcctcaggagacaatgtcaaaacccagaaatcactaaatacagtaattccaattccacctatgatatagaaagctaaaaatggtgttgcttccatcataataataagaaaaagccagataatctacaaaattataattatttttgaactcatcagatagctgaggtctcaaaacaaccaagtgtcctgaaatctgggaaaagacaggtcactccaaagagacaagaagcactaacttctctgcagaaaaccacaaggatgaggttacaagtggmagacaagcagataagatttcagctaaaatatttatcwgtattgatcagagcccccaagtttatagagcacaatttggaaaacaatagttgagggaataattttaattacaaaatttcctggactaaaaattgaaaagtagttgcatatttgagataatattgctaatttttttgtgaaatatattttatacttcactaacttaagtaaaatttggaactaataagactcattcatgcaactatctttgttttgtttttattaagctgtttttaactaagtaaattacttagagatwccaagaattatttacctttatctgaaaataaaaagaaaaacaaattaatatttttactaaataattctcatgcttatttctcaaaaatgaatatttatgtacataatgttaatagtctttcttaatattgtccattgaaaatgatgctacataatacagtgattttatatagaaatattttctagggtttcctaaattactttttatatgaaaaatactatttgaatgagtacattaatacattt

SEQ ID NO: 280952 - DNA, 658 bp, Homo sapiens
tggcgataatttagaaatttaaacctccaggcctcatgttgaaatctgatttctactgtcggagatggagcacaatgggaggtgtctggctcgggggttggatgcctcatcactggcgtggtacctttctcgaggtactgagtgagttctccacctaatagttgctaccagagctggttattagaaagagcctggcacctctgtcccttatctcttgcttccattctctcaccaagtggtatctaacactggcttcccttcacttyctgccatgaatggatagcctgaggccctcatcagaagcagatgtaggtgccatgcttcttgtacagcttccagaacaatgagccaaataaaccatttttctttctaaattacccagtctcaggtattcctttatagcaagacaaccagaataagacacctatataattagatttttaaaattcagacaatggttgcttgtttgtcttgcttccaacattttatcccttcagggagaaaataatgtaaaatagtcactgagaagaatatacaataaagcagtcatttcttttagatttataattttctaataaactatggggttttcactgtatactattattgatcctaatggaataccttctgactccaagatttgataaaaatacaattt

SEQ ID NO: 280953 - DNA, 518 bp, Homo sapiens
catttttatattgagttgttcatctctattattttataagccttctttaataaaagataggggggcattgaactgtcataatgtttgcacttccccgcccggcccccccgaygcttcattttgctttttgctgcttctggaaaaatcttgtctactttcataattctgtcattattttttatgtaaacttctagaactcagtcttcctcgaacagtaaaataattcctaaaattatttctaacttcttttcttgcgctattaaaagagattgtcttgttgcttagagataaaactgacacaactgttattaccacctttgtgtttgaggatgtggacccagtccttgtatcaatctgctcagatactctcaaattctatattctacagtaacaaagggtcttcaagtaaaataatttatatattttacgtatcctattctcatctacaacctcacatgtccaaaactgtagaattacccctgaagtacagaatcccctttattgcagagaggtcatga

SEQ ID NO: 280954 - DNA, 534 bp, Homo sapiens
ggaggtgattggatcatgaaggtggaattcccctttggtgctgttctccagacagtgagtgagttatcacgagatctggttatttgaaagcgtgtagcacctctcctcaatctcttcctcctgctccagccaygtaagatgaacctgcttccccttcaccttccattatgattgtaagtttcctgaggtctctgcagccatgcttcttgtatagcctgtggaaccaaactgtgagccaatcaaaactcttttctttataaatttcccactcttaggtagttcattatagcgatgtgagaaccaactaatacacacatttacttgatagaaggaaaagaaataactgaaactctattttaattttatgaaggactgatgactaatctccaggtctatgttactgagtatctcctttcagtctttaactccctcacttgaactccttgcttcattctctatgaacgaacactgctacctgttaggtatgcatccttttttcactttctccgggtatttacatacttttggatattc

SEQ ID NO: 280955 - DNA, 534 bp, Homo sapiens
ggaggtgattggatcatgaaggtggaattcccctttggtgctgttctccagacagtgagtgagttatcacgagatctggttatttgaaagcgtgtagcacctctcctcaatctcttcctcctgctccagccatgtaagatgaacctgcttccccttcaccttccattatgattgtaagtttcctgaggtctctgcagccatgcttcttgtatrgcctgtggaaccaaactgtgagccaatcaaaactcttttctttataaatttcccactcttaggtagttcattatagcgatgtgagaaccaactaatacacacatttacttgatagaaggaaaagaaataactgaaactctattttaattttatgaaggactgatgactaatctccaggtctatgttactgagtatctcctttcagtctttaactccctcacttgaactccttgcttcattctctatgaacgaacactgctacctgttaggtatgcatccttttttcactttctccgggtatttacatacttttggatattc

SEQ ID NO: 280956 - DNA, 688 bp, Homo sapiens
atataatgatatggtaataaggtagtagatgtgacaatatagataagctaaaagcataggaaatgttagtcaaaaagtggaatggataaaattgaaggcactattattattggagtcaataatattttttaattaataatactagtcaaggaattggtagtgactgatgtatacaaaaatagatgcaaacaattttttgcagtagattgtgataaaaactcttgtaaagggttactgtataaatgagagtgaagtggagatrttactgaattccaagctttacatatatttgtcttaagaccttgtttggcatataagaagatgtgtcttctgttgaaagtgcatttttagccaacacttaatataattgtggggctaagtatataataaaattttagcatttgttattgaaaacaagtatttatatgggtttatcaattcacagtaaacattcatatacatacatgcattatttactttaagcacattattttctctaaacaatatatccactttagaataatattttttttctatttttctggactttactaagtaatttctcacatgcatccatacacaaaaacaaaccacactcaaaactaagactaactggtcttctccagtgctggaacttattaatctgccagcacattttacagataagaaagacctaaggagtttctac

SEQ ID NO: 280957 - DNA, 673 bp, Homo sapiens
ctaggtatatgcaaaataggtgaagcatggggatcaatcagaggaaagcatggcaatcagaaagacaggttctcaatccagtctgtgggtttcatttgtagcatggctttcaggttataaattgtcttcagcttagaggtggggtttcactggggacccgtccctatttgcctaggcatttgcctgcctcctgtcgctatcgctaaaatgtgagttggtgttggttctgctcagattaacaaaataagaagaggaaatcctccctcaactttgtaaaaaagttattgcccccattttagtcatgagaaaaatatataaactcttctacataatcaatggatttttaaaaaccatgtgctatagtcacagartatgaagactcatcatgagagctaagactctgggatcttcttatttaggtcatatctgtacactttccactgtgagcttgtttgttcactgaaagcactcatcataagcctcatcaatataaaaactcttggtaggaccaagggcaaactaagctgaagatcatgtttgcatagttcacctgcaacttaccaacgtagttcagaatagagtatgtcaaaccaccttataaaaactggggcatctgaaggcataaaagtgttcattgagataacctttaggaatgaatcatccctatgaggat

SEQ ID NO: 280958 - DNA, 673 bp, Homo sapiens
ctaggtatatgcaaaataggtgaagcatggggatcaatcagaggaaagcatggcaatcagaaagacaggttctcaatccagtctgtgggtttcatttgtagcatggctttcaggttataaattgtcttcagcttagaggtggggtttcactggggacccgtccctatttgcctaggcatttgcctgcctcctgtcgctatcgctaaaatgtgagttggtgttggttctgctcagattaacaaaataagaagaggaaatcctccctcaactttgtaaaaaagttattgcccccattttagtcatgagaaaaatatataaactcttctacataatcaatggatttttaaaaaccatgtgctatagtcacagaatatgaagactcatcatgagagctaagactctgggatcttcttatttaggtcatatctgtacactttccactgtgagcttgtttgttcactgaaagcactcatcataagcctcatyaatataaaaactcttggtaggaccaagggcaaactaagctgaagatcatgtttgcatagttcacctgcaacttaccaacgtagttcagaatagagtatgtcaaaccaccttataaaaactggggcatctgaaggcataaaagtgttcattgagataacctttaggaatgaatcatccctatgaggat

SEQ ID NO: 280959 - DNA, 594 bp, Homo sapiens
gattctgttcttggttagggctcctttcatggtttgcagacagctattttctttattgcasagatgacagggagtagagggaaaagcaaaatgtcacatgttcttatgttataaggtaatgaatcctattataagggctccacccttctaacctaattacttcctaaaggctccatctccaaataccatcacaatggggattagggctttgacatatgaatttgaaggagggagcacaaacatgtagttcatgatagtcatgttaagataattctctgtcgtaatttccaaagagcttaatgataaacaaataattaataagcatgtgttttttagaggggtagggtgcaaaatattatgttatgaataataagatagaaaaggtgtgcatagatagcccctacccttgacaagcccaatcgtacgaatgctagctcaattccgattattcatcacacaaagaatttgctctttcttttaaagtatgattaatgagatgaataaattgtgaacagacatctatttaggccacagtgtaatgggattggaaagatattgcaagcttgtgccaaatccatgtaaatgttatggctg

SEQ ID NO: 280960 - DNA, 594 bp, Homo sapiens
gattctgttcttggttagggctcctttcatggtttgcagacagctattttctttattgcacagatgacagggagtagagggaaaagcaaaatgtcacatgttcttatgttataaggtaatgaatccyattataagggctccacccttctaacctaattacttcctaaaggctccatctccaaataccatcacaatggggattagggctttgacatatgaatttgaaggagggagcacaaacatgtagttcatgatagtcatgttaagataattctctgtcgtaatttccaaagagcttaatgataaacaaataattaataagcatgtgttttttagaggggtagggtgcaaaatattatgttatgaataataagatagaaaaggtgtgcatagatagcccctacccttgacaagcccaatcgtacgaatgctagctcaattccgattattcatcacacaaagaatttgctctttcttttaaagtatgattaatgagatgaataaattgtgaacagacatctatttaggccacagtgtaatgggattggaaagatattgcaagcttgtgccaaatccatgtaaatgttatggctg

SEQ ID NO: 280961 - DNA, 545 bp, Homo sapiens
tacacagctttcaagaggtaggtcctgtgacagattcataatgataaattagtcatgtcccttacctgcaaggagcttagaatctagtgaggaagacagacatgtgaacaaataggttcaatagatgacagacatatgtgcaaggttcaccgcagccttatgttggaatggttacggttacctggayctgagactacaaaaaggtattatatagagcagtgctggccaagagaacattctgcaatgataaaaatgtcctctatgtgtattgtttaatatggtagccctgtatgtttactgaatatatagaggaggaaatatttcttttcctcatccatcacttggatcatgtatggaggaccctataacaaaagacagattaacaagggaaaggcatgcaaacttatttaaaataagttttgcatgtcacggaagctttcataaggacatgaaaacccaaagaaagaggttaacagggtatttttatgatcgggtttgatgaatcaatgcatagtcatggagaagtatgattggacaaatgaggt

SEQ ID NO: 280962 - DNA, 1648 bp, Homo sapiens
gacttataattgttctaaatagtaagaaaacaggctcagcagcaagctaacatgggtttatattctggctgtgcagctaactaggtttatggccacgtgtctagaaagtttctttgtgactcagtggtctcttctgcaatatgggaataatagcagtacctatctttcastgttgttttgaggattaaatagcatacacagtcaaacacatgaagcatagataacaatatctcacatgaactgaacattcactagacatcagctatgattattttatgcataggctttatgagattctttcatccattcactcaaaatattttcttgagtacctattacataggtactcaaataggtaataatagcctattattaaataggctttaatttagttattaaagccttaagtacaggctttactctggacactaggcatagagtatgaacaaaatagatgatttctttcctcaaggagcttgtttatattctagatgttaaaagaacaataaaaaatataaataaaacaaatttaacattgctttgaggccctgagtttagtcacwgacttataattgttctaaatagtaagaaaacaggctcagcagcaagctaacatgggtttatattctggctgtgcagctaactaggtttatggccacgtgtctagaaagtttctttgtgactcagtggtctcttctgcaatatgggaataatagcagtacctatctttcagtgttgttttgaggattaaatagcatacacagtcaaacacatgaagcatagataacaatatctcacatgaactgaacattcactagacatcagctatgattattttatgcataggctttatgagattctttcatccattcactcaaaatattttcttgagtacctattacataggtactcaaataggtaataatagcctattattaaatwggctttaatttagttattaaagccttaagtacaggctttactctggacactaggcatagagtatgaacaaaatagatgatttctttcctcaaggagcttgtttatattctagatgttaaaagaacaataaaaaatataaataaaacaaatttaacattgctttgaggccctgagtttagtcacwatatgggccctgtattgtgatattaatgaggaaaaaatgttttatccataaatcttattgtccataaacttacagtccatatggaaaaattaaacaacaggaaaatttaggtaacagtgaatcactgggctgcatctcatgttaaatgtctcaggaggacagaggtgcccagggcaggtttactggaagagatgaggcttcaattccacctggaggttaggcatcaggggttaagggaggwaagtggtccagtcaaatgcgcagagggcaggaagggcaatgaaaaccttgaggaaggcgaagcagacataaaagtagatgccaccagttcaaaggtcacgtttgtgagttatttcaaataagaaaccatgagtaatgcatgtgtctgtgacagtctgctcaataactggtgcaaagtagaagctaaagtatacatggtaagttgacgaattgatgaatgaacaaaaagaaagctgaatttatttcattttgatgtatgcaccacttcatcctttccttaaa

SEQ ID NO: 280963 - DNA, 580 bp, Homo sapiens
ccatgacctttgttcttgactggtcctctttttctttgactggaccacttccacctcttggtacccattgtactttgtcttcaagatcatactgggaaagccatgctttgcttcctgttacagttcttcaaagaaatgcttcaggatcttgatcccacttacttaacatattcattaaaagctctgctctcgtctgtagctcatctgggtgtaatggttttggcacccattgagtagaaagtttgctcaacttgaatttctcagtcagaattttgtgagtttaaccaattgagatgttgtggtgctggctatcgtttctgcttctattcatcagtcttcttcaattagggcrcacacaagatgaatgttttcctcacaaattgatgtagatggtctgtcatcacagacttcatctttaacatcactgtatccattcttaaaatgaatcgcccatttgtaaactgctgatttatttgagacactgtccccataaactgtttataaagcatcaaagatttcaccattcttctgctgccgggataagtcccacccacctcagggagggcaatctactttcctt

SEQ ID NO: 280964 - DNA, 1179 bp, Homo sapiens
aagtatggaaaaacaaagcgcaagccagttccgcttgagaaagaaaagaatcaattgactcaagactacccacaagtggcagggtgccgtgactcatgcctataatcctagcactttgggaggccaaggtgggtggatcacttgaggccatgaatttgagaccagtctggccaacatagtgaaaccccatctccactaaaaatacaaaaattagccaggtgtggtggcacacacctgtagtcccagccacttgggaggctgaggcaggagaatcacctgaaccggagaggtagaggatgcagtgagccaagatcacactactgctctactgcactccagcacaggcaacagagtgaggctstgtctccaaaaaaaaaaaaaaaaaaaaagcaaacaaaacaaaacaaaaagtatccacaagcaaagaaagagttgtccctagggacatatgaataggaggatcacttaatattatcctatttgcactctcaaggttggaagtcaagatgtagccatgacacattgatggacgaatgtttaactgatgacttatggaaattactcagatggatataawggaaccagcatgaggttggagagcaagaggagaaaagtattgggatttatttccccttttatttttacctaaaatcttgggatttatttcccctactcccttaataaagggctgttgtctatggtgaatgtctattcagaactagaagaactagaagtaactttatatttcccatatgcttgttatgatattaatcccatgcaatgcaacaggcatgtgtgaaaacactttcaaaaatcagatctaccatttttccctgcctgaaagttgaaggggaggaataaatgtggctttctcactagcctaacagctttatatcagcagtccctaatctttttggcaccagggactggtttcctgtaaggatattttcatagaccagggcagcggggcatggtggttttgagawaatttaagcacattgcatttattgtgcactttatttctattattattacattgtagtatgtaatgaaatacttatacaactcaccataatgtagaataagcatgagccctgagcttgttttcctgcaactagacagtcccatctgggggtgatgggagacagcgagagatcatcaggcattagattctcgtaa

SEQ ID NO: 280965 - DNA, 588 bp, Homo sapiens
ccccatgatattcatattataagttacaaattataacagacagctttggtgggtaactgcttaggctatacttctcttaagagaattgctcctggtcatgcttggtgaaatggagcagccaggtcagaactggatgacccatctctcccaccatcgcagattgaactatttacccagttttgcctaaaagactgtatctcccaggaagttaaaattggaactcagagaatgtagtcaatttctgtcagacacttgaacttggaatatgtgcaatattggggctgggacagtctggtaaaggctgaagcagcaaagtagaaaaggcaggttggccgagaataatgaaaaactgaagtcatgtctggagccaggcagctgggaccaagtcaggactctactttttgttatttgccagtttgtgtgaccttaagcaagtgacataacttctcyctactcagtttattctctcattgtgatgactgaatgagtcaggataggtgaagcacctggaaggggactcaggaacctggtacaggctctagagtgttatctcatctctaattatgggtctcctcttattctactgtc

SEQ ID NO: 280966 - DNA, 533 bp, Homo sapiens
agcattgcaaaatagatatttcattttttttgtatacaatataaatgcactttgctagaacctaaaagaaaatctgtttgtaaaatgtatgcaaactcttcccataaatctaaatcagggatgatttctggctttgaagctatgttgtaatgtgcaatgcattgcaatatgagatgttggtgaaacaaggaataaaatcaattaagaaaatttagtctgcactgtaaagcctaactaagcaaataaaaaaaacaaagttctttgtaaaacctttagagacaagctgatcattgcatttgcggcactattattaaaagcatttatttcattgtaagtacttcttcatgccacccagacaggtgccttagccacaatttatgagcagttatacaagytgagctcactgtcatgagccaattacaatacctttttcacaaatgtataacatgccacggtgttattcacatggcattcaccagccatgctcaccaatgagtaccaagctcccagggtcaatggcacctgatatatct

SEQ ID NO: 280967 - DNA, 533 bp, Homo sapiens
agcattgcaaaatagatatttcattttttttgtatacaatataaatgcactttgctagaacctaaaagaaaatctgtttgtaaaatgtatgcaaactcttcccataaatctaaatcagggatgatttctggctttgaagctatgttgtaatgtgcaatgcattgcaatatgagatgttggtgaaacaaggaataaaatcaattaagaaaatttagtctgcactgtaaagcctaactaagcaaataaaaaaaacaaagttctttgtaaaacctttagagacaagctgatcattgcatttgcggcactattattaaaagcatttatttcattgtaagtacttcttcatgccacccagacaggtgccttagccacaatttatgagcagttatacaagttgagctcactgtcatgagccaattacaatacctttttcacaaatrtataacatgccacggtgttattcacatggcattcaccagccatgctcaccaatgagtaccaagctcccagggtcaatggcacctgatatatct

SEQ ID NO: 280968 - DNA, 594 bp, Homo sapiens
ttcttcatgccacccagacaggtgccttagccacaatttatgagcagttatacaagttgagctcactgtcatgagccaattacaatacctttttcacaaatgtataacatgccacggtgttattcacatggcattcaccagccatgctcaccaatgagtaccaagctcccagggtcaatggcacctgatatatctgtcatagagrtactgagattccccctaggtagccagaagtatcacctctcatagaagggtgggagcagttgatgatggttcaaatgtggtataattctctgatccgtgaaatcttacagtcaaagtttctttcatttattagtccatttttgacttttttgacctgtttgtgggatgtccacagggctaggactcacaaaaagattctcatttcaattttcattgtattgatgaagaaacagaggattggaaagctgtagcaacttcttgtggttacccagaggcatgagatgcagatgggattcaaatttccttcggtcatcctgaatcttcttcagctcattcccaggaatccttatatgcctctattctacctgaaaattattttggagtttttca

SEQ ID NO: 280969 - DNA, 594 bp, Homo sapiens
ttcttcatgccacccagacaggtgccttagccacaatttatgagcagttatacaagttgagctcactgtcatgagccaattacaatacctttttcacaaatgtataacatgccacggtgttattcacatggcattcaccagccatgctcaccaatgagtaccaagctcccagggtcaatggcacctgatatatctgtcatagaggtactgagattccccctaggtagccagaagtatcacctctcatagaagggtgggagcagttgatgatggttcaaatgtggtataattctctgatccgtgaaatcttacagtcaaagtttctttcatttattagtccatttttgacttttttgacctgtttgtgggatgtccacagggctaggactcacaaaaagattctcatttcaattttcattgtattgatgaagaaacagaggattggaaagctgtagcaacttcttgtggttacccagaggcatgagatgcagatgggattcaaatttccttcggtcatmctgaatcttcttcagctcattcccaggaatccttatatgcctctattctacctgaaaattattttggagtttttca

SEQ ID NO: 280970 - DNA, 520 bp, Homo sapiens
catacgcatatagacatatattgtatggcaagttgtaaatgcttacaaatgataacaatataaaaacctgcttcatctcactgacatttyagcaaattctagagaaattcttaccagcactgctaagcgttcctcatgctgtgttagaaggagccaggcagccaagagagtcagcattaataacatctccagttccaccatttctagctaaagggtaaatcttttaaatttttaagacctatgtttctttatacatatagtaggggtaaaggtaacattgccccttccctataagatcctgactatagaatgattatacattctaaaagacctgcataaatgcaagagatattgtggaagtgtttgcatgcatgtgtgtgtgtgtgtgtgtgtgtgtgtgtgtgtttcatgtttattcttcacccctctgtttctctgttttcactaacagtaaacacatgaaacctaaaagaagcctccatgctttgtattgaaacaaaaagaggcacctgggaaaccg

SEQ ID NO: 280971 - DNA, 1080 bp, Homo sapiens
tcattataaatatagaagctcaaatctttaacaaaatattagcaaattaaatccaatagcatgctaaaaggattatacatcatggccaagtgatatttatccaaagaatggaaggatgtttttatataagaaatttaatcactgtaacatacacattaacagaacaaatgacatttatatatgattatatcaatttayataagaaagatttgacaaaatttaatactatttcataacattcagaaaattaagaataaaagggaatgttctcaacatgataaaagacatttttgaaaaaccagcatctaaggttgtagtcaacagtgctaaactggaagttttccctctgagaccagggacaagacaagtaggcctgcttttactattgctattcaatagcaatagtaaaatttgaaatatactgaaatttgtagccaaagtatttgaaatacactgaaatttgtagccawcaataattttattttcaaaaagctagaatagagaattttgaatgttcatgacaaaagaaatgataaatattcaaggtgatagatttgctaatactcctgatttgatcattatgcatggtatacatgtatgaaaatattactwgtgtctcataaatatgtacaattattacatgtcaactaaaaatcaaataaccttaaaaagaatgaatcaggccaggcacaatggctcacacctgtaatctcagcactctgggagtctgaggcaggccgatctcatgaggtctggagtttgagaaaaaccgggccaacatggcgaaacaccatctttactaaaaatacaaaaattagccaggtgtggtggcatctgcctgtagccccagctactcaggaggcagaggcaggagaatcacttgaacccaggaggtggaggttgcagtgagccaagatcatgccactgcactccagactgggcaaaagaggaagactccttcttgaaaaaaaaaataaacaataaaataaagaatgaatcaatttctaaatacttgcttaaaacagtaccaaaatatttattaatcagggaaatctaaacactatcatatacaatgccaat

SEQ ID NO: 280972 - DNA, 610 bp, Homo sapiens
caataattttattttcaaaaagctagaatagagaattttgaatgttcatgacaaaagaaatgataaatattcaaggtgatagatttgctaatactcctgatttgatcattatgcatggtatacatgtatgaaaatattactagtgtctcataaatatgtacaattattacatgtcaactaaaaatcaaataaccttaaaaagaatgaatcaggccaggcacratggctcacacctgtaatctcagcactctgggagtctgaggcaggccgatctcatgaggtctggagtttgagaaaaaccgggccaacatggcgaaacaccatctttactaaaaatacaaaaattagccaggtgtggtggcatctgcctgtagccccagctactcaggaggcagaggcaggagaatcacttgaacccaggaggtggaggttgcagtgagccaagatcatgccactgcactccagactgggcaaaagaggaagactccttcttgaaaaaaaaaataaacaataaaataaagaatgaatcaatttctaaatacttgcttaaaacagtaccaaaatatttattaatcagggaaatctaaacactatcatatacaatgccaat

SEQ ID NO: 280973 - DNA, 610 bp, Homo sapiens
caataattttattttcaaaaagctagaatagagaattttgaatgttcatgacaaaagaaatgataaatattcaaggtgatagatttgctaatactcctgatttgatcattatgcatggtatacatgtatgaaaatattactagtgtctcataaatatgtacaattattacatgtcaactaaaaatcaaataaccttaaaaagaatgaatcaggccaggcacaatggctcacacctgtaatctcagcactctgggagtctgaggcaggccgatctcmtgaggtctggagtttgagaaaaaccgggccaacatggcgaaacaccatctttactaaaaatacaaaaattagccaggtgtggtggcatctgcctgtagccccagctactcaggaggcagaggcaggagaatcacttgaacccaggaggtggaggttgcagtgagccaagatcatgccactgcactccagactgggcaaaagaggaagactccttcttgaaaaaaaaaataaacaataaaataaagaatgaatcaatttctaaatacttgcttaaaacagtaccaaaatatttattaatcagggaaatctaaacactatcatatacaatgccaat

SEQ ID NO: 280974 - DNA, 492 bp, Homo sapiens
gaagtaacatataattagtaagattcacaaaatacacaaagaatgaatttggcccttcttcttacaaatcctctatatcagatgaaattgaaataatagtgtataaatatgactacagaaggactttttgttctgagttccacctcttttcaaagacttgagattccttggctcattaataccattagatttatttttgtataggttaaatcacctgttgtyagattgtggtacacagtgaattttaataaattaaacctactgtccttctcaaaaacaacacatagttcaacaactatgattaagttgtctatattaataagtagctatctccaggataattatagtttccactaaatgatttgtataaatgggaaatgtctttaaatagtttcaaagttatttatatcctcccctttgatatgtcctgtgtgttcaaacatttgtgtatgtactcccaggggttctaacttcaatttactaccctgagtt

SEQ ID NO: 280975 - DNA, 577 bp, Homo sapiens
tacaaacctcacataatcccttaggtaaagacacaatattcaacatacataatgatgaacaacaacaaaacagcattttaattggaaccacagtagccctgactacggtctgctcatcttgttaattcatatccccttgagttgtgtgaactaggcgattagtagccccaaataatagatcattatcctgagataaaacaatcgacccacatttggtcactgtcagtgattaatgatataaaacagagataagccttatgcatggaggatttgggtatcattttaggatcatgtctaatacttgctgcacatctaacctaacatttaaacttattttgggcatacatggttgtgtaggcttgttaatcatttacctataaaaataaaaactaggtatttctgaaatttggaaaatattttgtattgcatttattctttagttagaattatggcatacattagcactgtaaaattaattgctctaattagcaagtgtyatcagtgacaaactaacatagaacattttatttgctgcagctgtcattaatataaaaaaaaaagtgaaggaaaaagattt

SEQ ID NO: 280976 - DNA, 613 bp, Homo sapiens
cgggcatgtaggtggtatttaaagccagatgaatataggacaataaggaaagggaataaaggattatgaaatctaaaatttaatatataaaaataaaatacaaatagagggcaagaagattgaaaatgagcggccaaagagagaaaagggatccgtgactcaaaagctcagagagttatatraagatagactgggccttgtgatggtatcacattctctagagacgtcaagtaggatgaagtttgagaagaagccattagatataatatttaatatgtcagtttcactgattcaatgggtggtatgtttagatgtaaattgaaattaaaaaatgaagacaagaagtttacattcaagatttagctaaggcaaggaaaaagaggagtgttttgtttaaaatgaagaaataaactcatatgtgaaggtgtgctataacttataaacatactacataaatataatttttactggaaaggggtccctatctagaccccaagaaggggttcctggatctcatgcaagaaagaatttgaggcaaatctgtaaagtgaaagcaagtttattaagaaagtaaaggaataaagaatggcttctccatcagagcagtggcttg

SEQ ID NO: 280977 - DNA, 613 bp, Homo sapiens
cgggcatgtaggtggtatttaaagccagatgaatataggacaataaggaaagggaataaaggattatgaaatctaaaatttaatatataaaaataaaatacaaatagagggcaagaagattgaaaatgagcggccaaagagagaaaagggatccgtgactcaaaagctcagagagttatataaagatagactgggccttgtgatggtatcacattctctagagacgtcaagtaggatgaagtttgagaagaagccattagatataayatttaatatgtcagtttcactgattcaatgggtggtatgtttagatgtaaattgaaattaaaaaatgaagacaagaagtttacattcaagatttagctaaggcaaggaaaaagaggagtgttttgtttaaaatgaagaaataaactcatatgtgaaggtgtgctataacttataaacatactacataaatataatttttactggaaaggggtccctatctagaccccaagaaggggttcctggatctcatgcaagaaagaatttgaggcaaatctgtaaagtgaaagcaagtttattaagaaagtaaaggaataaagaatggcttctccatcagagcagtggcttg

SEQ ID NO: 280978 - DNA, 613 bp, Homo sapiens
cgggcatgtaggtggtatttaaagccagatgaatataggacaataaggaaagggaataaaggattatgaaatctaaaatttaatatataaaaataaaatacaaatagagggcaagaagattgaaaatgagcggccaaagagagaaaagggatccgtgactcaaaagctcagagagttatataaagatagactgggccttgtgatggtatcacattctctagagacgtcaagtaggatgaagtttgagaagaagccattagatataatatttaatatgtcagtttcactgattcaatgggtggtatgtttagatgtaaattgaaattaaaaaatgaagacaagaagtttacattcaagatttagctaaggcaaggaaaaagaggagtgttttgtttaaaatgaagaaataaactcatatgtgaaggtgtgctataacttataaacatactacataaatataatttttactggaaaggggtccctatctagaccccaagaaggggttcctggatctcatgcaagaaagaatttgaggcaaatcygtaaagtgaaagcaagtttattaagaaagtaaaggaataaagaatggcttctccatcagagcagtggcttg

SEQ ID NO: 280979 - DNA, 602 bp, Homo sapiens
taattaactaaagtatataacttgatcacatttctaaagttttcacctaatatctttttcaattccagatcctatgttgatatgttatatttattcatcatatctccataaggtcttcttgactgtgattatttctctgactttccttgtgtttgatgaccttgacagttttgaggaggagagatcaagcattttggtgaaatgtccttcaattggattcgcttgatgttctacattttatggaggaagatcacaaagataaagtgtcattcttatcactttatattaagggtacatactatcaggatgatttaccaaggttaggtgatataaacctagattacctggctgaggtagtgtttatcgggattctccccattttcatactgtactctttgaaatgaagttgctatgctcagctcattcttagagyggcaagtttcattctacttcattaagggaagaatatctacacaaataattttgatttttttttttggagatgtatgtcttttcacctatttgttaatttacttcattatttatttatatcagaatgaatgtgggcaaacgacatgaatagacatttctcaaaagaaaat

SEQ ID NO: 280980 - DNA, 602 bp, Homo sapiens
taattaactaaagtatataacttgatcacatttctaaagttttcacctaatatctttttcaattccagatcctatgttgatatgttatatttattcatcatatctccataaggtcttcttgactgtgattatttctctgactttccttgtgtttgatgaccttgacagttttgaggaggagagatcaagcattttggtgaaatgtccttcaattggattcgcttgatgttctacattttatggaggaagatcacaaagataaagtgtcattcttatcactttatattaagggtacatactatcaggatgatttaccaaggttaggtgatataaacctagattacctggctgaggtagtgtttatcgggattctccccattttcatactgtactctttgaaatgaagttgctatgctcagctcattcttagagcggcaagtttcattctacttcattaagggaagartatctacacaaataattttgatttttttttttggagatgtatgtcttttcacctatttgttaatttacttcattatttatttatatcagaatgaatgtgggcaaacgacatgaatagacatttctcaaaagaaaat

SEQ ID NO: 280981 - DNA, 602 bp, Homo sapiens
taattaactaaagtatataacttgatcacatttctaaagttttcacctaatatctttttcaattccagatcctatgttgatatgttatatttattcatcatatctccataaggtcttcttgactgtgattatttctctgactttccttgtgtttgatgaccttgacagttttgaggaggagagatcaagcattttggtgaaatgtccttcaattggattcgcttgatgttctacattttatggaggaagatcacaaagataaagtgtcattcttatcactttatattaagggtacatactatcaggatgatttaccaaggttaggtgatataaacctagattacctggctgaggtagtgtttatcgggattctccccattttcatactgtactctttgaaatgaagttgctatgctcagctcattcttagagcggcaagtttcattctacttcattaagggaagaatatctacacaaataattttgatttttttttttggagatgtatgtcttytcacctatttgttaatttacttcattatttatttatatcagaatgaatgtgggcaaacgacatgaatagacatttctcaaaagaaaat

SEQ ID NO: 280982 - DNA, 531 bp, Homo sapiens
tcagcatcctgagtggctagtaccacaggtgttcaccaccaagcctgttggggctttttattttttatacatatgaggtctcactatgttgctcaggcttgtctaaaactcctgggctcaagcaatcctctcaccttggcatcccaaagtgctccatgtaaaccttgaaatcagtttgtggttactaacaaaatagctggccaggatttttattgtgattactctgaatctatagatcaagttgagaagaattgacaccctagcaatattgagtctctcaatccaaacatggatcatatccccatttgtttagatattatttgatttattttatcagagtacagtggttttcagcatataatctgtatatatttcattaggattatacctaagcattcatttcttttctaattattataaatgtatatcttactttaaattttaatcrccattgctgacatatatgaaagcatttgacttttatacactaaactcatgttctgcaatcttgctagaccaacgtcttacttc

SEQ ID NO: 280983 - DNA, 614 bp, Homo sapiens
aacttatgtttcttccctgacaatctgtataccttttatttcctttccttgtcttattgaactatctaggattcaattcaatagaattctagtacaatttaatttattgcactccctaggatagtacaatgatgaataggagtggtaaaaaataatatccttgccttctctcaatagtagggaaaattgcccagttttttaactgtcaagtataatgtkggctataggttctttgtagatgtcctttatcaattagaggaggtttctctataatacaagttattgagaatttttatcacaaatggctgttggattttgtcaaatggtttttctctatctattgataagatcatgtaatttttctttttcaggctgctgacgtgataaattacattgacttttaacagagtctaaagttggttctctgagatgatcaataaaatgataaaattctacccaagttaaaagcaaacaaacaggagagaagatacaattacaaatataagatgtgaaatgggacattactactcataccctggacagtaaaatgataataaaagaatactttgagaaatgctatgcttacaaatttgataacctaggtgaaatagtcc

SEQ ID NO: 280984 - DNA, 584 bp, Homo sapiens
cttatgtttcttccctgacaatctgtataccttttatttcctttccttgtcttattgaactatctaggattcaattcaatagaattctagtacaatttaatttattgcactccctaggatagtacaatgatgaataggagtggtaaaaaataatatccttgccttctctcaatagtagggaaaattgcccagttttttaactgtcaagtataatgttggctataggttctttgtagatgtcctttatcaattagaggaggtttctctataatacaagttattgagaatttttatcacaaatggctgttggattttgtcaaatgktttttctctatctattgataagatcatgtaatttttctttttcaggctgctgacgtgataaattacattgacttttaacagagtctaaagttggttctctgagatgatcaataaaatgataaaattctacccaagttaaaagcaaacaaacaggagagaagatacaattacaaatataagatgtgaaatgggacattactactcataccctggacagtaaaatgataataaaagaatactttgagaaatgctatgcttac

SEQ ID NO: 280985 - DNA, 533 bp, Homo sapiens
taaggtttttaccaaaaagaactgttctcctgtaatagtcccaaagtaaaagtctcaggttgagacatggaaaagtgcttaggacagttagaattctctctgcttgaatgaatttagcaattatagggatatgattttatgttagcaggattgatggcaggtagagttgatatccatgtaaaataagaaagctgtattacagcctcatcaaatgtatatgtctaccttttctttatgaaatactcttataattgggaacagaaacaaaaaggagaaatatcttagaggtaaaacaaagatcacatgaaaatraagaaaacagaatgaaaatactcattgcaagaatattcacccaaatgacacatctccaaatcaataggtttaattataatttaattataatatacttttataaatatttatatgcatgtctcagaatattgaatttcttgttctaggaaattgaccatttatatgttcaaaataagtgatatactagtcaaagcaatctgagaaatgaaactatgaaaaca

SEQ ID NO: 280986 - DNA, 613 bp, Homo sapiens
aatcatagctgtatattctggagtaattgacaagctaatcttaaaacgtatatagaaatccaagggacccagagtattaaaaaaatatttaaaaaggagaaaaatggtagatgacttatactacatggttataatactctaaattcatagtaattaagatagtgcgatactggcaaagaattgaacacatagattaatgaaactgaattgatagtctacaaataaactctaatttatggttagccaatctttaacaaaggtagcaagataatttaatgggaaagaataatttttcagcamgttgtgctgaaacatatggatacccacatgcaaaaacaaacaaacaaaaatatatatatatcttacccttacaccatacatgaatattaactcaaggtagatcatagttctaaatataagcactaaaactgcaaacttttaaaaagaaaacatagaagaaaatcatcttgaacttgaattagacaaggagtttagatacaacaccaaaagtatgaacgataaataaaaaattataaattggactttattaaaatacaaacaaaattgtacttaagtaggagaggcagagcaagatgacagaatagaagattcc

SEQ ID NO: 280987 - DNA, 587 bp, Homo sapiens
ctggttgtccctcccactgccctgcaaggacactgatttaacaactaaaaatcaccttcataagaactaaaaatcaaatgagcactcacagtacctggttttaatttcctatccctgagagaggtactgaagaggtaggaaaaacagtgttgaattaccaatgcaacctcttccctatcccccagcagccatggcatggtgcggagagcatttttgtgcaatggggrgaaggagattgcagcaattgtgaggcattaaactcagtgctgccctttacagcagaaaacaaaatctgacccaaatcaggtgatacctgcctatggagggagcatttaaaccagcgctagcaagagaggaatcttcaattccagcggtccaaacttgagttcccgcagtcctcagcattgtaagctaaattgtgctggggccctaaataaatttgaaaggcagtttcagcctccgggactgcaaatcctagtttagtcctagtgctgaacttggttcatagacagtggactcaggggcacatgacatactgaaacagcagctggggtgtctaagggagtgctgtcatcactcctccccta

SEQ ID NO: 280988 - DNA, 619 bp, Homo sapiens
agaaaggctaaatgatgaatcaatgaaaaataataactacaacaacttttcaagatatagatgatacaatcagacataaatagaaataataagttaaaaagtgggggaatggagttaaggcatacagtcatcattaattttctttttgcttgtttgcttgtttatgcaaatggtgttttatcagcttaaaataatgggttataagatagtatttgcaagaatcatggtaaccttaaacccaaaaagcatacaacatatacacaaaatataaaaagcaagaaactaaatcctatcaccagagaaaatcaccttcactaaaaggaagcaaggaagcaaggaaaaaggaatagaagaccagaaaacagcaaaatggcagtagtaagttcttacttatcaataacattgaatgtaaatggcctaaattctccagtcaaaagatatagagtggctgaatggatacaaatagaagatccaatgatcttttgcctacaagaaatgtagtttgcctattaagacacacatagactgaaaataaagggatggaaaaatatattccatgccaatgaaaactaaaaaaaagaggaatagctgtrcttaaacagatttcaaggcaaaaaat

SEQ ID NO: 280989 - DNA, 572 bp, Homo sapiens
agctgtgcttaaacagatttcaaggcaaaaaatatgaaatgacaaagatggtcactatataatgataaagggaaaagggatcaattcaccagaggatataaaaattataaatatatatgcacccaacactggagcacccaratatataaaacaaatattattagagctaaagataaatatagaccacaatacaataatagctgtagaattcaacaccccactttcagcactggatatatcttctagacagaaaattgacaaagagacattggagttaatctgcactataaaccaaatggacctaatagatatttatggaatattttatccaacagctgcagaataaaaatccttttcctaggcacatggatcattctccagaatagaccatataagttacaaaacaagtcttaaaacattaaaaaagaaagaaataatatcaagcatcttctctgaccacaagtatatgccaacaaactggaatatctgtaaataatgtaaaaatcctcaggtacatacaactacaaagattgaaccatgaagaaatccaaaacctgaagagaccaataaca

SEQ ID NO: 280990 - DNA, 572 bp, Homo sapiens
agctgtgcttaaacagatttcaaggcaaaaaatatgaaatgacaaagatggtcactatataatgataaagggaaaagggatcaattcaccagaggatataaaaattataaatatatatgcacccaacactggagcacccagatatataaaacaaatattattagagctaaagataaatatagaccacaatacaataatagctgtagamttcaacaccccactttcagcactggatatatcttctagacagaaaattgacaaagagacattggagttaatctgcactataaaccaaatggacctaatagatatttatggaatattttatccaacagctgcagaataaaaatccttttcctaggcacatggatcattctccagaatagaccatataagttacaaaacaagtcttaaaacattaaaaaagaaagaaataatatcaagcatcttctctgaccacaagtatatgccaacaaactggaatatctgtaaataatgtaaaaatcctcaggtacatacaactacaaagattgaaccatgaagaaatccaaaacctgaagagaccaataaca

SEQ ID NO: 280991 - DNA, 366 bp, Homo sapiens
tgataataaatgtgtggctttayttctagactcttcaattctattgaattgatctgcatgtctatccctattctatttcagtactttaaatttattttcttttctttcttaaaatttactctgctgccttttttttctaggtctgtgagtacaatgtcagctaattcatttataaatattcatacagtgttaaaatgtgttaaaaatggaattaaggccgtgagtttacttctaaataccgctcatgatgaatctgaataaacatttaaaaaatgaaaataaagcaaacattttacaattttgtttttgttttaaaccacggactgtttagaagcttcttctgttgtatttacacatttaaaaatt

SEQ ID NO: 280992 - DNA, 366 bp, Homo sapiens
tgataataaatgtgtggctttatttctagactcttcaattctattgaattgatctgcatgtctatccctattctatttcagtactttaaatttattttcttttctttcttaaaatttactctgctgccttttttttctaggtctgtgagtacaatgtcagctaattcatttataaatattcatacagtgttaaaatgtgttaaaaatggaattaaggccgtgagtttacttctaaataccgctcatgatgaatctgaataaacatttaaaaaatgaaaataaagcaaacrttttacaattttgtttttgttttaaaccacggactgtttagaagcttcttctgttgtatttacacatttaaaaatt

SEQ ID NO: 280993 - DNA, 635 bp, Homo sapiens
atataatgaggcatttctgtgccatgaaaaaacaacaacttgtagaaaattccttttgagactcacattgtaaattacttaattttttacaatttgtttttstcctactctatgctactcttaaaaaggaactgtgggtttaaaaaaaaccatttctaataacatagtaactgtgtgtgactctcttccctgggcatgaggggtcaacctttaatttaaatatcaagcatttattgtgccacaattgaagagacagtaagtagcaaaatatcagttctcatacagtattttaaatccattccaaagtgagaagaactatactgctaatattatttgcaaaacctttgccaaataagattaaagcgtaaaccatattaaagcatttgatgtgtactgtagctaaatataccatatctatagaaaatgttgcatcctctgcctcccaataataaaagcacatagcaggtgttattgtttggtcccagatatataaagacaactaggaataagcacacccttacctgacacttaagcttagcacattgtcactacatattgtagttacttgtgtacatgtatatgcatgtatatgtatatatacattatacacatgtaaacgtatccttgccttgttc

SEQ ID NO: 280994 - DNA, 609 bp, Homo sapiens
gttactggatatgacgtaaaccagagtcttgagatagatttgtacaaatgtgcttctttttttgggcttctgctattgccatgacaaaaacatggcatgagtagaacatttaatgaactgaaataggttatggttatatatatgagagaaacaaacctcaaaaaattctaagtacagctttaataaatgcagttggttagtatcaaatgcacagaaaactttaaaagtttttgaaaaaggtgtattttcaaatgcaccaccaacttgatcctaagagtccatgaccattccaatcatgaaaatatctctkgtccctcaactttcaacagacaggaagcaggctgagaactctactcagctaccaagaatggaatcttcttctttgcctcttcagcagtggtccagtagaatgaggacaaagaaagaatgttcctgagcagcagaatcaggagtcataaaaaaataaaaagtaaagtggcaaatcccttccaagaaaacagaaatggggcctaaccaaataggcttttctaccctcaaggtaatgaacctaataaatttgcccagtgagatttcagaatttctagagattactgtccgctgtaagcctcc

SEQ ID NO: 280995 - DNA, 1176 bp, Homo sapiens
gttactggatatgacgtaaaccagagtcttgagatagatttgtacaaatgtgcttctttttttgggcttctgctattgccatgacaaaaacatggcatgagtagaacatttaatgaactgaaataggttatggttatatatatgagagaaacaaacctcaaaaaattctaagtacagctttaataaatgcagttggttagtatcaaatgcacagaaaactttaaaagtttttgaaaaaggtgtattttcaaatgcaccaccaacttgatcctaagagtccatgaccattccaatcatgaaaatatctcttgtccctcaactttcaacagacaggaagcaggctgagaactctactcagctaccaagaatggaatcttcttctttgcctcttcagcagtggtccagtagaatgaggacaaagaaagaatgttcctgagcagcagaatcaggagtcataaaaaaataaaaagtaaagtggcaaatcccttccaagaaaacagaaatggggcctaaccaaataggcttttctaccctcaaggtaakgaacctaataaatttgcccagtgagatttcagaatttctagagattactgtccgctgtaagcctccwcatgtgcctcagagacagagagtgaaatggccaggaaaggagatgacatttgtactggccctaaaaggatatttagattttaattatttctagccaacctattggtatgttcttgttctacttcaccagctcaactgaggtgtctctcaaaaagagagagagagagagaaagtaaagaaagaagaaagagagagagagagaagaaacwacaatatcgagaaccacctttgtgccctgcctcctagtcctgaacttacttcccctctgaggagctcctgcagcttttgccctctgcagcacagaaggctgcacatcattccagtattcccactgtcctgggatcctgaagagtctcttgaacttttctgactgactgaggcaataacttaatgtcacagtctagagtgtgtaagcaaattatacagtcatggacagtacagaaaaattttcctatgcccagatttgtccactcagctctcagccaaccacttgctcactaatcttgacaccaacaccaggctgtgatgtactcttatgctcttcctggaaaacctccatgcacatca

SEQ ID NO: 280996 - DNA, 588 bp, Homo sapiens
tctttagttgctattccatccctgggttgcatggtatagagggttaaggagcagctgctttgatttgtgttaggaaactgagggggcataggagacagacacttcctgcctcaggagggcttatgtcaagaatacacactggagtggataatttattctcatgaattgaacagtgtacctagctgtactgtgaactccaggataatggaaactttaatctgttattcccccacatttctcacagcactgaccaagagaagggtcagtagataattgacagctgcatttgttggttggctcattagttgggtaattgaaaaagccagtgaaataaacaaaagaaagcaacccagactggtgacagcacttttttttttttttgaattacttagatctcagagtttgaatctggagtttctgaaacctaaagtagttattaaactttccctggtctagactctgagaccaactagtaggtaatgtatctatttgcagatamaataaattaactctggatgatgtgagcacaaaagacagatgggtggagagccagagttagggacatgctgaagtcacctgcagacttgc

SEQ ID NO: 280997 - DNA, 600 bp, Homo sapiens
ggattacaggcatgcatcaccacccctggcraattttgtatttttagtagagatggagtttctccatgttggtcaggttggtctcgagcttctgacctcaagtgatccacccactttggccttccaaagtgctgggattataggcgtgagccaacgcacccagcctccccctccttttatcaagttcctgactctgttcctctacacacatcccaagatgaaagatgatgtcattaaaaatgaagtcacataaactttatcgcatttttagccattcagggggtcctgtatcttcaggcacacaggcgtgccccttcttttcccactgcaccctgacaatatgaagccagcatagttgcctgcacattccatgtggtttcaactctctggccatgttgttctgatgccttgaacgaactcttctttgatataagctctatttaacctaatttactgttgttcatttttcaagacatagctcaaatattacttcctccaagaagtcttcctggaaatctccaaagtggggagatttttttggtccttgtttatctgtatcaaactatgtatatgctctgataacacttacgtttactcaca

SEQ ID NO: 280998 - DNA, 600 bp, Homo sapiens
ggattacaggcatgcatcaccacccctggcaaattttgtatttttagtagagatggagtttctccatgttggtcaggttggtctcgagcttctgacctcaagtgatccacccactttggccttccaaagtgctgggattataggcrtgagccaacgcacccagcctccccctccttttatcaagttcctgactctgttcctctacacacatcccaagatgaaagatgatgtcattaaaaatgaagtcacataaactttatcgcatttttagccattcagggggtcctgtatcttcaggcacacaggcgtgccccttcttttcccactgcaccctgacaatatgaagccagcatagttgcctgcacattccatgtggtttcaactctctggccatgttgttctgatgccttgaacgaactcttctttgatataagctctatttaacctaatttactgttgttcatttttcaagacatagctcaaatattacttcctccaagaagtcttcctggaaatctccaaagtggggagatttttttggtccttgtttatctgtatcaaactatgtatatgctctgataacacttacgtttactcaca

SEQ ID NO: 280999 - DNA, 558 bp, Homo sapiens
aaacatttcagctgaagaaaatattaccccaagacacaacaaagcagaacaaaacaaacaatggcaaaaacttgtaacagtaattacgaaaaactaagtaacttaaaacgagcaactgcagaaaacaagagcattctgaagcagatatttttaaaataaatgaattaataaatcaaagagggaagaaataagaaaaaaagatatgaaatgacaattgtgtacactgagacagaaaaggcaaaaataaactcagtaatcaatcagaaattacaaaataaaccagttagtgtagatttcataaaaataaaaatctactaacggacattgagaagtattatgaaaagagtcaagaaacacaaataaaatcataaactagataaaatgcatcagatggtaaatgataaatatagaaaaaagggaaaagtaacatgaaatttcttttagaagaaaaacaaracaatgaaaattaatattttaaattatatttcaggaaaactacccattaataaaaagaaaacctgaatctccataataaatggacctattactaaaaaaagt

SEQ ID NO: 281000 - DNA, 528 bp, Homo sapiens
ttttctaattctgtaaaaaatgatattggtagtttgatatgaatagcactgaatctgtaaattgctttaagcagtayaaccattttaagtacattgattcttccaatccaagagcatggagtaattttccttttatttgtgtcattttcgatttgtatcagcagtgtcttgttgttctctttgtagagatctttcacctccttggttagatttattcctattttattctttttatgatcattataaatgggattgtatttttgatttggctctcaacttgaacgctattagtttgtagaaatgctactgatttttgtacattgattttatatccagaatttttactagtttattcatcccaagagcatttggcagtctttaggattttctaggtataaaatatcatcggcaaatatagtttgaccccttctttccctatgtgaatgccttttatttctttcgcttgactgattgctttggctatgacttccaggactggccatgttgaacaggagtggtgcaagtggg

SEQ ID NO: 281001 - DNA, 528 bp, Homo sapiens
ttttctaattctgtaaaaaatgatattggtagtttgatatgaatagcactgaatctgtaaattgctttaagcagtataaccattttaaktacattgattcttccaatccaagagcatggagtaattttccttttatttgtgtcattttcgatttgtatcagcagtgtcttgttgttctctttgtagagatctttcacctccttggttagatttattcctattttattctttttatgatcattataaatgggattgtatttttgatttggctctcaacttgaacgctattagtttgtagaaatgctactgatttttgtacattgattttatatccagaatttttactagtttattcatcccaagagcatttggcagtctttaggattttctaggtataaaatatcatcggcaaatatagtttgaccccttctttccctatgtgaatgccttttatttctttcgcttgactgattgctttggctatgacttccaggactggccatgttgaacaggagtggtgcaagtggg

SEQ ID NO: 281002 - DNA, 528 bp, Homo sapiens
ttttctaattctgtaaaaaatgatattggtagtttgatatgaatagcactgaatctgtaaattgctttaagcagtataaccattttaagtacattgattcttccaatccaagagcatggagtaattttccttttatttgtgtcattttckatttgtatcagcagtgtcttgttgttctctttgtagagatctttcacctccttggttagatttattcctattttattctttttatgatcattataaatgggattgtatttttgatttggctctcaacttgaacgctattagtttgtagaaatgctactgatttttgtacattgattttatatccagaatttttactagtttattcatcccaagagcatttggcagtctttaggattttctaggtataaaatatcatcggcaaatatagtttgaccccttctttccctatgtgaatgccttttatttctttcgcttgactgattgctttggctatgacttccaggactggccatgttgaacaggagtggtgcaagtggg

SEQ ID NO: 281003 - DNA, 577 bp, Homo sapiens
ttgtggtccatcccaaattccctttcagctagcgacctaagagagtgggatggggagcctcacctgatgcagtggtaattccagacaatgcatacttgagagtcagatataaagtggtcatccattcctgagtcctaaatgagcatttgctgtgcattctgctcagagctcatgtattgtgtaacagtgagcataaaaaccactgtttttaaagtatgctgtatttatgaaaattattgaacaatgataaggctcacatcataacagtgactgattttccatttagtattgagaaatgattcacaaggtgtggtcctgggaccagcaatatcagcatcactttggaacttgttagaaatacaaattcttagrccccaccccagacaacgtgaatcagaaactcaggatggagcccagttttctgtattttagcaagccctccaggggattctgatacacactaaagtttaaaagtgatgagcatttatgaatctgcacttacgttctttgtatttccaatgcatttacatgtcattgtattttctatgaatgtgaaatcaaagaatgccttagaagc

SEQ ID NO: 281004 - DNA, 549 bp, Homo sapiens
aaaagtagaaacccctgataaaccatcagatctcataagacytgttcactaccacaagaacagtatgggggaaactgtacccctgattcaaagtattcccactgggtccctcccacaacaggtgggaattatgggagtacaattcaagatgagatttgggtggggacacagagccaaaccatatcagtctcctacaaactcctacaaaccagaatctcagttggcagtatcaacagcatagcttagatattctagatggtacttattgatcagggagtgttctcagaacttaccttaggctttttactactcatttaatctttacaacaatcatggaagggaggtacatcattggcatcattttatacctcagtaaactgagatacgaggaggttttataacttgcccactatgctaactgcaatgccatggtcagcagaaaattgttttttttttcttttaagatgcctggatactgcatattcatgaatccacacaaggtcagggttccattctttgacctctttgctgaggaggtaccagagaaaa

SEQ ID NO: 281005 - DNA, 582 bp, Homo sapiens
tgcccactatgctaactgcaatgccatggtcagcagaaaattgttttttttttcttttaagatgcctggatactgcatattcatgaatccacacaaggtcagggttccattctttgacctctttgctgaggaggtaccagagaaaattcatcctgaagatgaaaaagggttttgtgaggtgggagagaacgtgcgtgttgtctgaagtggcagaacataacaagtcacaatgcaagggagacgaggaactgcccagatcatctggtttttttttggcacaatgcacataccacgcaaaatcacactcatacaccaaatcaagcactttaatcacaattcmagaagagtttaacaaaagactcagggatgattttgctgattctcagagagcactcactttctaaaagggcaaatcactggggatccatttagtgttgttacctacgtagagttttactcactgtgaaacagcataccttccagaggcctgacctagctctcaattcttctggcctagttcctgggaaggatttttatgtaccttaaatcacattcacataaacacatacatgtacagacaca

SEQ ID NO: 281006 - DNA, 534 bp, Homo sapiens
aaaaattttaatttaaaatgttttacatgagaacaaaagtataactggggaaattttgtagccttacatgcttttattttccattaagattcttttgctctttttttatttcaatagtttttggggtatagctgcttttgattatacagataagttctttagtgttgatttctgagattgcagtgcacctatcacctgagcagtgtacactgtacccaatatgtagtcttttatctgttacccccctcccaacytttccccatgaatccccaaagttcattataaaaatatggaagcttaagtaagattataaaagaacaacatggtaaatcttatgaatctggaaaaatgagcttaagaaaggtagaattatgattaataaaattagcagaagtaattgtagtgtaagtgatttacttaataagtaaaatttttaaaagatccacacagagcatcatcagtgaaataagagggaaaatatactgtttctagaattataaataagatagatgatagttgtctctttaactatga

SEQ ID NO: 281007 - DNA, 565 bp, Homo sapiens
gtgtccagcgaataaagaaagaatgtatctggtcgtctcattccccaggaattaatgaggaagcaccagatgtcactagaatgggaatgtctttggggaaaaggcaaaattgttggcttctctgagggcactttcatttttctacttgtgtacttgttttatctttcatagaaaaaatgggagctcctcaagaataggttctgtattgcagcagtccccaacctttttggcaccagggaacagtctcatggaagacaagttttccatggactggctgggagcatggcagggaggtgggggtggatggtttcaggatgaaactgtcgcaccttagatccccaggcattagattgtcctaaggagcatgcaacctagatccctcacatgcgcagttcacaatagggttcatgctcctgtgagattctaatgctgccgctgctctgacaggaggcagagctcaggcaggcagtaatgcttgctcacctcctgcagtacggcccggttcctarcaggccacaaaccagtaccaatctgtggccctgggtttgggtacccttgctatatt

SEQ ID NO: 281008 - DNA, 568 bp, Homo sapiens
taaccatttttaactttacaatctagtattattaattacattcactatgtgatgcacctgtaatcactatttttttccaaaacaactacagacactctgtacccattaagccataactctccattcttctttacccttagcccctgataacttttaatctagttcccatctccacagatttacctaatttagatattttatattaatggaattgtaaaatatgtgttcttttatgtttggcttatgttgtttatcatcataatttcaagattcgtccatgttgcagcatgtgtcaattataccacatttttattatccattcatttgttgatagacacagattatttctaccattttgctattttgaagaatgtttctatcaacattgatttatatgtttgttagagtccctctcttcaatttttaggggtatatacctgggagcgaacttgctgggtcatgataattttgtttagctttttgaggaactgacaattttctacrgtggctaggccagtttgcatttccaccagtaatgtgtaagagttccatttccccacatccccat

SEQ ID NO: 281009 - DNA, 604 bp, Homo sapiens
aagcttccttagaacagatttcaatttattttattgttttataattcactaatagcaataatttttaatgaattaatctcctgaaagatataactaatatgggagttttgtgtacctcctaccaatttttgtcataattttacttcaatattcaactttattcaaggacaatgatattaagggtttaatgctaaatgcctctcaatttttatatttcaggcattcaagattgtgacctaatttgagctccrtgcaccagatcaacatatgggttgtgcaaagcactgcagaggataacatattagggggagagctaacctttcttcctcgttttctcccagacaaaatcatgcattggtcacactactgagcattagaacaacctaatgttgcctttgatgggagaaagaatatcaggttcattaatattgtaaataatataatcagttgggaatgaaatgtgtcaaccatgcattaaaaacatttgcttttaaaatctctcccagcaactacacacttgatatttgaaaattacaatcacacatgcagatcaaggaaactcactggagcaattacctatgcatgaatgatttcaactttctgg

SEQ ID NO: 281010 - DNA, 643 bp, Homo sapiens
aaacagcatgttactggcatggcaaatatatagacaaatggaactgaacagaaagcccagaaataaacccatgcatacacaatcaactgatcttccacaaagggatcaagagtacacaaagaggaaaggttagcctttttaacaaacggtattgggaaaactagatatctacatgcaaaataataaaattgggccctaccttacaccacacacaaaaatccactgaatatggattaaagacttaaagtmagagctgaaactattaaactcctagaagaaaagacagggggaaatcttcttgacattggtattggaaatgatttcttggacacaacctcaaaggtacaggcaacaaaagtagaaatagatgactgagactatatcaaactacaaagcttctgcagagcaaagaaaaaaaagtaaaagtaacctatggaatgggaaaaatattcataaaccatatatctgatcacaggttaatatccaaaatgtataaagaattcatatgcctcaatagcaaaaatacaaataacttgattcaaatatagacataggaagtaatagatgtttatccaaagaagacatacaaatggccaacaggtatatggaagatgctcaaaatcactactcacgtaaatgcaaa

SEQ ID NO: 281011 - DNA, 643 bp, Homo sapiens
aaacagcatgttactggcatggcaaatatatagacaaatggaactgaacagaaagcccagaaataaacccatgcatacacaatcaactgatcttccacaaagggatcaagagtacacaaagaggaaaggttagcctttttaacaaacggtattgggaaaactagatatctacatgcaaaataataaaattgggccctaccttacaccacacacaaaaatccactgaatatggattaaagacttaaagtaagagctgaaactattaaactcctagaagaaaagayagggggaaatcttcttgacattggtattggaaatgatttcttggacacaacctcaaaggtacaggcaacaaaagtagaaatagatgactgagactatatcaaactacaaagcttctgcagagcaaagaaaaaaaagtaaaagtaacctatggaatgggaaaaatattcataaaccatatatctgatcacaggttaatatccaaaatgtataaagaattcatatgcctcaatagcaaaaatacaaataacttgattcaaatatagacataggaagtaatagatgtttatccaaagaagacatacaaatggccaacaggtatatggaagatgctcaaaatcactactcacgtaaatgcaaa

SEQ ID NO: 281012 - DNA, 431 bp, Homo sapiens
catgttaagtgtttttcctacaataaaaaagagaaaggaaatagataaataaaacaattatacagtctattgtaaataatatatttgcctcataggccacaaaaagctgttttctgtcattcacttttaatgaaaagtatgcaatactataaataattttctcttctgaaactgaaattgccaattgcagaacacataatctcaaataattctcattattttaaagggttcttgatagaagtatgtgtatttacttacagataactcattagaagccacaatttkcaactttttcttatgacacatttatgttgtatgttaatttccagtgcttctcctcgggaatctacctacaagcagaatcattaaatttacttgtaaaagccagggaactctcctggtggggaagttctcccaccaccaagaaaata

SEQ ID NO: 281013 - DNA, 465 bp, Homo sapiens
taaacattgctgaaacagtctgacaagactttcctggacttcaggagattttagatgatagtattcaaaaaaaaatgggttccatggagcagcagtgaagacaccatcaacagccacttcagacatttcagatagagcttttctctgaggatggaaaaaagtggaaagtaaaatgctactagaggcatcaggacttaraaagttttctccgctttatagattgatggccaagttgaaagaatgtgcagcaaggtgagaatctggctggtgaaacaaaaacccaaggaaaggcagtcaataaaagggtgggtagctgggcagttgtatgattagcaactttgaagttaaatggcattttgcaattcactgtgaaaaagagaacaaaaaacgctgagactgaacaagaagaatctcaaaagaattatccatttataaatgtgcctacagaaaaactgaacatataaa

SEQ ID NO: 281014 - DNA, 598 bp, Homo sapiens
ggagttattggacggggcatattggtctatactgcccagggttctggaaataaacagaaaagtcaaacatcaggtgaagtaggagagttcgtggcatgagggaagtttgtggcgtattttgtatacttcctaccactatttttctgtcttttcaaatttgttgaacttcattgatagtttcccatgtgttaagctttgttatgtaatatatttgaatgtcttttcatttttattataattcttaaaatgtgtaaaaacatgtatctttaaaaggaattaatatttccaaatttacaatttacttgaccatggaaatttttattttcctcagctccatatcrcctacatgaaagttcgttcatgaagcttgacacttctctccatgcccaggacaatgtagatcagtatgcccattccacctcactcttctaggtgacaatcatacagcttgtctatttcttctagttccatcccaattattttgttgaatggtttcctttaaaccatcaagaaatgaaaagtcacatgaaataccactatcagaaataattacagttaacatggtggaacatcctgctggtaatgacataatacacac

SEQ ID NO: 281015 - DNA, 601 bp, Homo sapiens
atgtaaattttaaattgacatgtatgtctcctgaataaaatcaggattccattaatagggactaattggagaaggtatatgtttaggggcaagcaagctcagctgattgacccacttggacacttamgtgtgctgagaagttattttattattaaaacaaaaattaaccaaaacaaaacagaaaaacccagtagagttctttccttgttttcctgtttcattggaaagttttggtttggtttgactaaagtaaaaaggaaagagtaagtataagtaaagctatcatttgatgagattgcctaacatttcagcatttgatgaatgcccagttatttaatatgtttaatcagttcccaaccaattcacttttcaatatagtgattgattttgatttaaattacttgacttttctatatttgtttcacctattttatgaccttattttccttagaatatgttgaagattctttcagacataaaacaatactcatgagctgcaataaaattcttctacaaatttattttacatttgttattactgaaaaaaatgatattcaagtttatgttacctttaatgtgcatgtaagtcagactctgaaaa

SEQ ID NO: 281016 - DNA, 491 bp, Homo sapiens
caaaagaaagaggtttaatggactgacagttccatgtgactgcagaagcctcayaatcatggtggaaggcaaggaggagcaagtcacatttgacatggatggcagcaggcaaagggagagcttgccctttttaaaaccttcagatctcatgcgacttattcactatcatgagaagagcataggaaagacttgcccccacgattcaattacctcctaccaggtcccttccacaacatgtgggaattcaagatgaggtttgggtggggacacagccaaaccatatcagatgctgcatatatttctaaggtaacactcgtaagatttgctgaagaattggttgtgaaatttaagagaaagagagtgataagcacttttcccaacattttagcccacagcaatagaagaatggagttgctatatcctgagatgagaaaaacagaggaccttttacgagagaaaatcaggcatttgtttcaaaacctattaaattt

SEQ ID NO: 281017 - DNA, 542 bp, Homo sapiens
actaacatcgaattcatcttaattttggttgtaaagtatatctgtttgggtataggctaagttcgtgaaacagagaccacagaatagaattacttcagatatagaaatgatatttttctcaagtgcatggggttgarttgtgtgcccccagtaaatatatacggaagtctaaacctgcataccagtgaatgtgatctgacttggaaataacgtcattgcagttgtaattagttaagatgtggtcatactggagtagggtgggccctcaatcccgtatggctgttgtccttataaaaagagaaaagaccatgtgaagacacaggcacacacagaaaattccacgtgagtatgtgagaggaaggtatgttttggagtaatacatctacaagacgagaaatgcctaggagttcctagaagctataaaaggcaaacaacgatacttcctcagaaattttggagggagcgtggccctctcggcaccttgattttggacttctaacctacagaaatgtgagataatacgtttctgtcttttaaaacca

SEQ ID NO: 281018 - DNA, 542 bp, Homo sapiens
actaacatcgaattcatcttaattttggttgtaaagtatatctgtttgggtataggctaagttcgtgaaacagagaccacagaatagaattacttcagatatagaaatgatatttttctcaagtgcatggggttgaattgtgtgcccccagtaaatatatacggaagtctaaacctgcataccagtgaatgtgatctgacttggaaataacgtcattgcagttgtaattagttaagatgtggtcatactggagtagggtgggccctcaatcccgtatggctgttgtccttataaaaagagaaaagaccatgtgaagacacaggcayacacagaaaattccacgtgagtatgtgagaggaaggtatgttttggagtaatacatctacaagacgagaaatgcctaggagttcctagaagctataaaaggcaaacaacgatacttcctcagaaattttggagggagcgtggccctctcggcaccttgattttggacttctaacctacagaaatgtgagataatacgtttctgtcttttaaaacca

SEQ ID NO: 281019 - DNA, 542 bp, Homo sapiens
actaacatcgaattcatcttaattttggttgtaaagtatatctgtttgggtataggctaagttcgtgaaacagagaccacagaatagaattacttcagatatagaaatgatatttttctcaagtgcatggggttgaattgtgtgcccccagtaaatatatacggaagtctaaacctgcataccagtgaatgtgatctgacttggaaataacgtcattgcagttgtaattagttaagatgtggtcatactggagtagggtgggccctcaatcccgtatggctgttgtccttataaaaagagaaaagaccatgtgaagacacaggcacacacagaaaattccacgtgagtatgtgagaggaaggtatgttttggagtaatacatctacaagacgagaaatgcytaggagttcctagaagctataaaaggcaaacaacgatacttcctcagaaattttggagggagcgtggccctctcggcaccttgattttggacttctaacctacagaaatgtgagataatacgtttctgtcttttaaaacca

SEQ ID NO: 281020 - DNA, 587 bp, Homo sapiens
cttcttaattttgagtgtaattgacaaggatcctgcataattccactctctgtaagggtattggctaacattaacataaacatatttacataattrtaaaatacctttctataaattataattttctaagatgtcatcaacatctactaaggaatatcataagaagtagccatatgaaactggttactctattccctgtagacaatattccctaagttagacagtgcctactcagtggagacccactttacctttgttatcagtatctctgtgttgccaaggcaactagattatttttatatgatggatattatgaattatgtaacttgtaattatatatatatataaaaatatatatgccacttggaagcttaaagccaacgtgtgactcatctctactagggtagcaaatttatcctacattttgtgtaccaaatttcgctacagatttaatgttttttttctatatcttattttttttctttgcctcaattcattcaacttttaaaagctcttttatattttgttgtatggctcttcacatatggctttaaattcttattttgaaacagggtgaaaggtgaata

SEQ ID NO: 281021 - DNA, 430 bp, Homo sapiens
taaaccatgtaaatatcttcctctccatgtacgctctcaccaatttccacagatatttcccagtcacccaatttttcagtaaacattatgcctaattctagtccgaggcagcaggcaattttctgacataagtcctggtaacagctgcaggtaaagattttgctatttggcactttgaccatctagttggcaacatttcactcaagcaacactgcttgcratgcagacaaaatcaaagtcataccacagactaagttactaattgctttgtgttgttactctattatttttcactggttatgttttgactacataattattgttcactgtacaatcaagtagcacacaactatcattttacctttttcttcaaaataaaaagaaattgtcttgaattaattttgaatatagagaaaagttgcaaaaataa

SEQ ID NO: 281022 - DNA, 715 bp, Homo sapiens
gtatttagctagtgtttatttagtatttcttttcctttttttttattttctgccttctttttctctgagattttaattctgtgtctttaaagcaacatgtaactggttgaacttttaatgcatttttttctattggaatgtctagtaaacacttgcatgtgaaacaaggacactattaccaggttaaaattcaagccgaagactgggagacattattgtctacatgtatagtagaaaatctgcagaagccctacaaataaaaagatagacaaataccctagtgggaacatgagcaaagtaaatgaacaggtacattgaagatataattcaaatggccaacaagcaaaagtcaagtagctttagtagtaatcagagaaatgctgatggtgtgtaaaaaattacactggaaagcattgtgaaaataccgaagaaatttgtagatgcacattacctaggaaaataattctacttcctgytacccatcctagaaaaattcctatgcactaataagggagccttaggtgaaaaggattttcaccatttcatttgtaatagtatgatatttgaaacaaacttattgttcattaatacggaagtgggtaaacagaggatcaataaatggaatacagtattgaaactgtaaacactgcacctaaatgcatcaatacatcaacaaggataaatctcacaaaataatattataaataaagaaaaa

SEQ ID NO: 281023 - DNA, 715 bp, Homo sapiens
gtatttagctagtgtttatttagtatttcttttcctttttttttattttctgccttctttttctctgagattttaattctgtgtctttaaagcaacatgtaactggttgaacttttaatgcatttttttctattggaatgtctagtaaacacttgcatgtgaaacaaggacactattaccaggttaaaattcaagccgaagactgggagacattattgtctacatgtatagtagaaaatctgcagaagccctacaaataaaaagatagacaaataccctagtgggaacatgagcaaagtaaatgaacaggtacattgaagatataattcaaatggccaacaagcaaaagtcaagtagctttagtagtaatcagagaaatgctgatggtgtgtaaaaaattacactggaaagcattgtgaaaataccgaagaaatttgtagatgcacattacctaggaaaataattctacttcctgctacccatcctagaaaaattcctatgcactaataagggagccttaggtgaaaaggattttcaccatttcatttgtaatagtatgatatttgaaacaaacttattgttcattaatacggaagtgggtaaacagaggatcaataaatggaatacagtattgaaacygtaaacactgcacctaaatgcatcaatacatcaacaaggataaatctcacaaaataatattataaataaagaaaaa

SEQ ID NO: 281024 - DNA, 549 bp, Homo sapiens
taaatgcctttaagacattcttargaagatgccatcagacaatgcagtggcttaagctgggcacctgtgagaatatggggttacagtgctgtaggtcttcccaaattacactgtacactgtgtaagtacatgacagtgcctgacatgaacagagattggaatcactgtgtctgtacaggtctcagagagtctgaaacgctgaatattaaatactgcaccctactaaagtacttttggatatcctgattattctgtaaatttagggcactttgtaaattgccatagtcattaataaaaagtatatttaaagattagctatcaagtacaattgatttgctctagaattttggtaatgacatgtgtagtaatcagtagaactattcgcaatattcgtaacttttcagttttcctttccttccaggtacatggtgagattactaccacctttgaagttagatgtggtcactgacttgcttaggccagcagtgacatatatctcacttgaggaaaagggttaagaaccagtaggtgactttccatcttctctga

SEQ ID NO: 281025 - DNA, 549 bp, Homo sapiens
taaatgcctttaagacattcttaggaagatgccatcagacaatgcagtggcttaagctgggcacctgtgagaatatggggttacagtgctgtaggtcttcccaaattacactgtacactgtgtaagtacatgacagtgcctgacatgaacagagattggaatcactgtgtctgtacaggtctcagagagtctgaaacgctgaatattaaatactgcaccctactaaagtacttttggatatcctgattattctgtaaatttagggcactttgtaaattgccatagtcattaataaaaagtatatttaaagattagctatcaagtacaattgatttgctctagaattttggtaatgacatgtgtagtaatcagtagaactattcgcaatattcgtaacttttcagttttcctttccttccaggtacatggtgagattactaccayctttgaagttagatgtggtcactgacttgcttaggccagcagtgacatatatctcacttgaggaaaagggttaagaaccagtaggtgactttccatcttctctga

SEQ ID NO: 281026 - DNA, 549 bp, Homo sapiens
taaatgcctttaagacattcttaggaagatgccatcagacaatgcagtggcttaagctgggcacctgtgagaatatggggttacagtgctgtaggtcttcccaaattacactgtacactgtgtaagtacatgacagtgcctgacatgaacagagattggaatcactgtgtctgtacaggtctcagagagtctgaaacgctgaatattaaatactgcaccctactaaagtacttttggatatcctgattattctgtaaatttagggcactttgtaaattgccatagtcattaataaaaagtatatttaaagattagctatcaagtacaattgatttgctctagaattttggtaatgacatgtgtagtaatcagtagaactattcgcaatattcgtaacttttcagttttcctttccttccaggtacatggtgagattactaccacctttgaagttagatgtggtcactgacttgcttargccagcagtgacatatatctcacttgaggaaaagggttaagaaccagtaggtgactttccatcttctctga

SEQ ID NO: 281027 - DNA, 549 bp, Homo sapiens
taaatgcctttaagacattcttaggaagatgccatcagacaatgcagtggcttaagctgggcacctgtgagaatatggggttacagtgctgtaggtcttcccaaattacactgtacactgtgtaagtacatgacagtgcctgacatgaacagagattggaatcactgtgtctgtacaggtctcagagagtctgaaacgctgaatattaaatactgcaccctactaaagtacttttggatatcctgattattctgtaaatttagggcactttgtaaattgccatagtcattaataaaaagtatatttaaagattagctatcaagtacaattgatttgctctagaattttggtaatgacatgtgtagtaatcagtagaactattcgcaatattcgtaacttttcagttttcctttccttccaggtacatggtgagattactaccacctttgaagttagatgtggtcactgacttgcttaggccagcagtgacatatatctcacttgargaaaagggttaagaaccagtaggtgactttccatcttctctga

SEQ ID NO: 281028 - DNA, 591 bp, Homo sapiens
aaccacactgtctttattgttactttgtagtaagttttgaaatcagaaagtgtgaatcctccaattttgttgtgctttgtattagtcagggttctctagagggacagaactaataagacagatgaacatgtgaaggcgagtttattaggggaattgactcacacaatcacaaggtaaagtcccacagtcagctatatgcaagctgaggagcaaggaagtcagtctgagtcccaaaacctcaaaagtagggaagccgacagtgcagccatcagtctgcggtcgaaggcccaagaccccctggcraaccactggtgtaggtccaagagtccaaaagccggagaacttagagtccaatgtttgagggcaggaagcatccaacactggagaaaaatggggtccagaagattcagccagtatagtccttccacgttcctctgtctgcttttattctagctgtgctggcagctgaacagatgctgcccacccagattgagggtagttcaccctcaatccaccaatccaccaactcaaagcacaatttaaagtcttttttaaatccaccgatccacccaatccaccaactcaaatatt

SEQ ID NO: 281029 - DNA, 596 bp, Homo sapiens
taccagctagttattctaagggatgaaaaacattaaattgtgccatttatatcctttgtggtcattctggggtctttaggcattcattttcaatgcctggaatttatttctattatctttagttcagatgatatttatgctctctaattcagttggctaacatggtcttataagtaaatacatgtttgaaagaaaatttgaaagtgggaatagtttaacaatatattatggaagagcattttagagatattaaaataaaatgttaactattcaaattcttgttagaatttgtgggcatttgtataaaaatttactcgagataaacaaatgttgggaaatactgtagggaggctttctaaatgacaccacactgattagttttctttctttttctttttcttttcttttttttttgagatgaagtctcgctctgtctgcaacctcttccycccaggttcaagcaatgctcctgcctcagcctcccgagtagctgggattacaggcacccaccactacgcccggctaatttttgtatttttagtagagacggggtttctactttactccagttcccagcaagttcctcatttccatct

SEQ ID NO: 281030 - DNA, 552 bp, Homo sapiens
ggtaatagatggacaactagcttgaataacagcaatcaagaaaacagatagaatagagaggataaacagagctacaacttgcgtctccaaaaaatgctaataaaatgccaaatttctagcaagattgattaagataactagggaaggaagaagtaaatacaaatgaaaacatttacaaaaagagaagtgataaaaccatgcaagaacgtagaaaagtatatgcagatgcatatgaaaccatggattaaatattcaaatgtctagaacaaataaaatataaaattgattsaaaagaaaattaaaggaaacaatagttaacaaatttaataaatagaacactgggtgttgatcaatagacacatcttaccaaaatctcaaggaatggactattgttatacaaactcctttaggcaactggtaaagagggtacatatagtcaaactcatcatatgaagtgaattttaacctcatagaataaatggttgtaacttagtatacctttgtagtgttttgttaagggaaaactgaaatcctatctcactcataataata

SEQ ID NO: 281031 - DNA, 563 bp, Homo sapiens
tatgtttaggataaatctatatcctgctacctttgagatggagaaactgaggtataaagaggtgaagtaacttacctacaggcacacagatggtaaactagatttaatattcaaatctaaggcatctgtgtccagaatccatgttcttcaataccattctgtaatggtataactacctttcatgacctcctaacccagtggaaacctgaagtattcaaycttctaccataatacattcaaaatttgttgtcattgttcttatgctaatgtgtaaaaaataactagggaaattctttaaccaaattgtacattttgttaggttaattaaatgtactttaagaggaaaaggaggtattatttttagtagaagggaaaatcactaatgagataaataaaatatttatagagtttgtattaaactgtcttatttaattgtcttcactgacttgactaattttgtctctggaacattacactctaaattgttattatttttagtgactcttaaataaggcattctgatgagtgaaatttggcaaccagcaagaataaataagcacaag

SEQ ID NO: 281032 - DNA, 1181 bp, Homo sapiens
gtgcatgggttacatgcaaacacttccttccccattttatgttagggacttgagcatccaagattttggtacccacaggaggtcctggaaccaatcccttatggataccaatgggtgactctgtatatttcacagtttcttcatttataaattgatgaacatttaaattatttccatatcttggctattttgaactgggtatgccactatcttaactgagtgatcagattatcaccaagagatcagtcatgccaatatatacacattgcctccgtagtaatttttaacacattctacatctttaacatattcatgaacaaataaaaaagacaaaccaaagttgagggacagtctgcaaaatacctgaytggatacctcaaaagtattggggtcataaaagacaagggaagactaaagaaactgtcacatattggaggagaccaaggaaacaagataactgaatgcaatgtggcatattggtttaaatccctgaaccaggaaaaaagaacattattaggaaaaactggtgaaatatgaagaaagttggcagttaatagtagcttactgwtataaattttgttattgatttatttttatattaaagcctcatgtgattaatwttgattgggattgcctttaacatatacttcaatttgggaagaatcgtcatcttatatatcaaattttttatacatttatgtctttgttaatttttctcagcaatgttttatagttttcaggtttgaatcttgcacatttttgttaaatttttgtgtttcatttttttatgttatgaatgctacctttaaaatctctctttttgattgtttgttgctactttatacaattataattgatattttatattcccctgtatcccgtgacctttcctgctgattaactcactgactaaacgctctgattatttttagtaagtttttattgttttgtaatttccttaggagtttcgacatgcacatttatgcctcttggcatgtctagaaacagaatttttgatgtcaaaaatgctacatattatgcttttaaatgtttgactattattttttcatcataaaagaaaatttgtggcttttatcgttaaagcagttaaattactttcaaatcagttatctgcttgtaaactttgctaacacaggactgaaatacatgctaacatgggt

SEQ ID NO: 281033 - DNA, 635 bp, Homo sapiens
tgtgttattttctcaggaatgaagattagtaatactaaaagcaaaagtatccggagcagatttgcctggattagaatcctgactccaccttttttttttctttttttctttttttttttgagacggagtcttgctctgtctcccaggctggagtgcagtggcacaatattggctcactgcaacctgtgtctcccaggttcaagcaattcacctgcctcagcctcctgagtagctgtgactacaggcgcgtactaccatgcctggctaattttttatatttttaatagagatggsttttcactcttgttagccaggatggtcttaatctcctgacctcatgatccgcccgcctcggcctcccaaagtgctaggattaccggtgtgggcccccgtgcctggccgactcaaccttttaatagcggtatcactttgggcaagttatttaaatctctgtattccaatttcttcatctgttaaatgataattataatagtgtacctgtagtgcataggattaaatgaattaatatgtgtaatacttagaatagtatgtgtaacatagtaaatacacaagttatttgctgctattttcttattttcacagtataagaaaatacctacttaagattcatttgg

SEQ ID NO: 281034 - DNA, 635 bp, Homo sapiens
tgtgttattttctcaggaatgaagattagtaatactaaaagcaaaagtatccggagcagatttgcctggattagaatcctgactccaccttttttttttctttttttctttttttttttgagacggagtcttgctctgtctcccaggctggagtgcagtggcacaatattggctcactgcaacctgtgtctcccaggttcaagcaattcacctgcctcagcctcctgagtagctgtgactacaggcgcgtactaccatgcctggctaattttttatatttttaatagagatgggttttcactcttgttagccaggatggtcttaatctcctgacctcatgatccgcccgcctcggcctcmcaaagtgctaggattaccggtgtgggcccccgtgcctggccgactcaaccttttaatagcggtatcactttgggcaagttatttaaatctctgtattccaatttcttcatctgttaaatgataattataatagtgtacctgtagtgcataggattaaatgaattaatatgtgtaatacttagaatagtatgtgtaacatagtaaatacacaagttatttgctgctattttcttattttcacagtataagaaaatacctacttaagattcatttgg

SEQ ID NO: 281035 - DNA, 635 bp, Homo sapiens
tgtgttattttctcaggaatgaagattagtaatactaaaagcaaaagtatccggagcagatttgcctggattagaatcctgactccaccttttttttttctttttttctttttttttttgagacggagtcttgctctgtctcccaggctggagtgcagtggcacaatattggctcactgcaacctgtgtctcccaggttcaagcaattcacctgcctcagcctcctgagtagctgtgactacaggcgcgtactaccatgcctggctaattttttatatttttaatagagatgggttttcactcttgttagccaggatggtcttaatctcctgacctcatgatccgcccgcctcggcctcccaaagtgctaggattaccggtgtgggcccccgtgcctggccgactcaaccttttaatagcggtatcactttgggcaagttatttaaatctctgtattccartttcttcatctgttaaatgataattataatagtgtacctgtagtgcataggattaaatgaattaatatgtgtaatacttagaatagtatgtgtaacatagtaaatacacaagttatttgctgctattttcttattttcacagtataagaaaatacctacttaagattcatttgg

SEQ ID NO: 281036 - DNA, 570 bp, Homo sapiens
aaattacatagttttcctaggaagattaaactgactttgaaacagtcttaaaacagcattagttagggcttctccaaaataaaaattgggctggtgcrgtgctcacacctgtaatcccagcactttgggaggccaaggtgggaggattgctttagcctcggagttcgagaccagcaacatggcaaaacccctcctctacaaaaaattagccaggcgtggtagcacatgcttttggtcccagctacttgggaggctaaggtgggaggatcacctgagagcctgggaggttgaggctgcagtaaactgcactccagcctgggcaacagagcgagaccctgtctcaaaaaaaaaaaatggtaataatttttaaatgcatgagagtgtcataaagtttccataaactcattaaaaactcacctgatacagagcagttctgtatcttgtcattttggtgtgtcagttcagtctgaattgggatattattttgttccctttctctaaaaaggcacttggcatcagctttggcatttctaggcccagaagaatttcagagggatactcataaaaatt

SEQ ID NO: 281037 - DNA, 570 bp, Homo sapiens
aaattacatagttttcctaggaagattaaactgactttgaaacagtcttaaaacagcattagttagggcttctccaaaataaaaattgggctggtgcagtgctcacacctgtaatcccrgcactttgggaggccaaggtgggaggattgctttagcctcggagttcgagaccagcaacatggcaaaacccctcctctacaaaaaattagccaggcgtggtagcacatgcttttggtcccagctacttgggaggctaaggtgggaggatcacctgagagcctgggaggttgaggctgcagtaaactgcactccagcctgggcaacagagcgagaccctgtctcaaaaaaaaaaaatggtaataatttttaaatgcatgagagtgtcataaagtttccataaactcattaaaaactcacctgatacagagcagttctgtatcttgtcattttggtgtgtcagttcagtctgaattgggatattattttgttccctttctctaaaaaggcacttggcatcagctttggcatttctaggcccagaagaatttcagagggatactcataaaaatt

SEQ ID NO: 281038 - DNA, 596 bp, Homo sapiens
atgaataggagttttgaaaaagagatttgactgtaacagaaaagagagaagatgattcttaatcatagaaacagctgagactgggtctcacaagctttttccctgaaattagatttcgatttgagaagaaagaaatggccagggtacataatatacaaattagtaatgcactgcayaagtgggaggtggtgggaaaaaaagccctatatactttgatgtgcaagaggaccttttttgttatatgctaattagaaagcactttgttacagaactttttggcagcccttctaaccttaggaacctctaagcaatcatttaatttgggtccatttattgtaaagaagagtatagttgacacctgaattataaaactacagccttacatttgtctggtgattcaagtataacgacatacaatctgctttcaagcctctcaccagtcaatagcaagaatttgaattccttcctagcctgtaatgtttcaaacacattatatattccccaacccacctcactcctgttaatctttcaagtaactcctatactttgatgaatctgtaccaggtattaatcaaaagagaagtgctttcctgagt

SEQ ID NO: 281039 - DNA, 517 bp, Homo sapiens
tctcagtcagatatggggtgatcctagaagtttgtgtagtctgtaatgaagtgggctgtagaacaggggtccccaaccctccgggccacagactggtaggaactgggtcacacagcaggaggtgagcagtgggtgagtgagcaaagcttcatctgtatttgcagccgctcctcatcactctcattaccacctacgctttgccttctgtcagatcagtggcattagattttcataggaatgcaaaccctgttgggaactgtgcatgcaaggratctcggttgctcactccttatgagaatctaatgcctgatctgtcactgttttccatcacttccagatgggaccatctagttgcaggaaaacaagctcagggctcccactgattatacattatagtgagccatataattattttattatatattacaatgtaataataatataaagtgcataataagtgtaatgtgtttgaatgatcccagccctcccccgctgcccctagtctgtggaaacattg

SEQ ID NO: 281040 - DNA, 612 bp, Homo sapiens
aaatgtcctaacttcctagccattatttgctatcatttttttgtttgctcataagatcagtaaaaattatttttatttgcaagaccctgtcaagtaatgaagctaaatcatttgaacctgtaaagacatgctttgaagtagctgaagtttaacgattatctctgttttgtttgktttctgttttttaagagctcttaaatgtcagtagttagaaattacaaattttactgtagcaggtcatctttcttctccttgcttacaaggaagtaaccattttttagtctttccccatgacaagagtacaatgtgagaaagtttgctctgcttagcccagatctctaatgtatattgaaaacatccccatgaaaacacatctagatactgtaagaaacatctttgtttacaaagaccattacattttcactaatctttggacaatttgaataaatatgcataatagtctcttaagaaatgctggctctaggctatattatgaaaaagttgaagttgcccttatcactccagactctttttaccccttcatttgtgccctcatgtaggtgattattctggccttttcacatactaataataccactacgggttctcctt

SEQ ID NO: 281041 - DNA, 551 bp, Homo sapiens
taatacttaacaactctaaagagagaaaaaagtagtcagccttattagaagtaaaactatgcaattgcagtgaagtgctgtgaatgccatgcttgggaggtgggagtaaatttgcctacctattgagtagcgcatcacagagagctgttcattcccgtctgtgtggatagaaactagatctctggtttctgcatccagaacaaaccacctgttaagaagtaaaaatcaaaattttcttcagatattagcatttatagaaaaaaaaagttgttctttttcttttttttttgagatggagtcttgctttgtcataacgctggtgtgcatggagtgatcctagctcaccacagccttgaacttctgggctcacactatcctcccacacctcagcctcctgagttgctgggactacaggtgcataccacygtgcctggctaatttttaatttcttttttgattttagagatggggtcttactatgttatctgggctggccttaaactcctggcctcaagcagtcctcccacctcagcctcccaaagtaatgagat

SEQ ID NO: 281042 - DNA, 569 bp, Homo sapiens
ataatgtctctttttttcctttattggagttactggtgtcatttgcagttgtcttaacttttgtcactgctttcctaaagggggtatgcttttatacactttaaaaatgctcatgtttattttactttctaccttcagtatgacttagatataaagcttctctgcatctctgttttgattcaagaattttgtgtcctgtggtttttaatgcttattctctatttgttatgtaactaatgtggcaaaaaagtaaaacttaatcttaaattctttcatttttcagaaaatgtacattacyaatttgaatttgggttcaatttgaataggtccttcaatgggttgtaatgatatttcttttgcaaattgaagagagcaagggcaggagaagagagggtagaaaataaaaaggatatagtcaccaagcatcattgtctacttatgcactggtacataaatgtaacccgtccccaataaaaatatggctgaaataaaaaagaagaaaatgcataatgtaagaagtgactcattttacttactttaataggtattgtgatctggaaacatagaat

SEQ ID NO: 281043 - DNA, 463 bp, Homo sapiens
tatctatatctaaacaaagtttaattcaaaggtttccaaacattcttactatttttgcatttatgcgttgtatctaatttcagttaaaagtcaattccccaagtcattggagcttaatgtgtttatctgataggaaaaaaattgaactcagtattatattttaaatagttattaaagattattaaaatgtctatttgaaatacaagcttcaaaatataagcctacctgtataaatatgtagaaaacaaatacacacacacacacacacacacacacacacacactttagagatgatagaatcttcaacttatgaattttttgaaatatgtatacttacaattgaaagtttgtgtkattatgtaaatgaatctaccaaagcttccaacttagtttgtgtaatctgttaaaagaaaaactttagacaaattaaatttagcagagtttatttaaaaaaagaatgtt

SEQ ID NO: 281044 - DNA, 549 bp, Homo sapiens
taatgataagtttgttttggaatgatggatcttatcatatgttgtaggcaaaagagtcataatacaccctccatcamcacatttatcattgtgatctaatcactaaataattattgtattcaagtttaaagaaaactttttaataatgaatgaattttactttttagaccatatgatgtcagaatgtatgtataatctctctttaagagctcaaagaggtagataagggcattcaaagaggtaacagctcaaccattagaacagtgtttgaaggaggaattacagagccctagagctagacttttccacgcggtgcaattttaaacaaattgctgtgtacgaacaatgcatatcactgctgagtttcacccctcttttctattgtcctaggcatttatcccttcaccccaagacactcactgtcttaggaatactcatagtggcttagagttcccaatttgatgccagatatgagtaattccatatatccctttcctattcctctccacttttgctccattaggattctactcttctattgattatttg

SEQ ID NO: 281045 - DNA, 1323 bp, Homo sapiens
ttgaagaaatactatagtcatgtatcatccattattgtgaatgcagccaaactaaacaaacaacagttgaaaatatgtaaatctattatatataatgtttataaaagtgtcatctgtggttcttaagaattttgaattgtcaagtctgttgagatgttgtagaaagttatgaagcttctccctcracagtccacacagagttatacatacaatttcagaggttctcagaccactaggttagcaatcaaaaattcaactgagagaaataaagcttttgatcaagagacatgggtcagatatttatcagagttgagatatttgacaaattgctttatcattctgaaaattagtttattcatttatcattattttaaatgagcacaacactatatctacatggttatgaagataagtgaaaaatatctagtgctattatccaaataaaatgtgaaggtgttaataagggatcacacttttcaaccaccttttggaaaaatcaacttacttttaaaaatgtttttgcccttagtatgatatttagataaaataactattgtgattaatgattaataaatattactttacgtatgtgttcattcatctagtaagtcaaaaaaattagtgttttcatttctcacactaacatagaacttgaaatagcwttgaagaaatactatagtcatgtatcatccattattgtgaatgcagccaaactaaacaaacaacagttgaaaatatgtaaatctattatatataatgtttataaaagtgtcatctgtggttcttaagaattttgaattgtcaagtctgttgagatgttgtagaaagttatgaagcttctccctcgacagtccacacagagttatacatacaatttcagaggttctcagaccactaggttagcaatcaawaattcaactgagagaaataaagcttttgatcaagagacatgggtcagatatttatcagagttgagatatttgacaaattgctttatcattctgaaaattagtttattcatttatcattattttaaatgagcacaacactatatctacatggttatgaagataagtgaaaaatatctagtgctattatccaaataaaatgtgaaggtgttaataagggatcacacttttcaaccaccttttggaaaaatcaacttacttttaaaaatgtttttgcccttagtatgatatttagataaaataactattgtgattaatgattaataaatattactttacgtatgtgttcattcatctagtaagtcaaaaaaattagtgttttcatttctcacactaacatagaacttgaaatagc

SEQ ID NO: 281046 - DNA, 661 bp, Homo sapiens
ttgaagaaatactatagtcatgtatcatccattattgtgaatgcagccaaactaaacaaacaacagttgaaaatatgtaaatctattatatataatgtttataaaagtgtcatctgtggttcttaagaattttgaattgtcaagtctgttgagatgttgtagaaagttatgaagcttctccctcgacagtccacacagagttatacatacaatttcagaggttctcagaccactaggttagcaatcaaaaattcaactgagagaaataaagcttttgatcaagagacatgggtcagatatttatcagagttgagatatttgacaaattgctttatcattctgaaaattagtttattcatttatcattattttaaatgagcacaacactatatctacatggttatgaagataagtgaaaaatatctagtgctattatccaaataaaatgtgaaggtrttaataagggatcacacttttcaaccaccttttggaaaaatcaacttacttttaaaaatgtttttgcccttagtatgatatttagataaaataactattgtgattaatgattaataaatattactttacgtatgtgttcattcatctagtaagtcaaaaaaattagtgttttcatttctcacactaacatagaacttgaaatagc

SEQ ID NO: 281047 - DNA, 568 bp, Homo sapiens
tagaaaaacatttttaaaatctcctttgctgccatccaatcacttgtttagaagaatagctatcttttaaatttttctcttcaaagttatataaggcaagaggacttttaaaataccaatctttctcagtctgtggtatacaatgacttctagagccattatgcaaaactatcctggtttgatgctgtgtgtgtgtgtgtgtgtgtgcacacgcacgcacatgtgcaccagcctgagtgttggcctgctagtaccgacagctaaaaaagcaaagctctaggaygcatcttcttatttagactggcttttttggaacattatttgtcttcacccaatatgaaagctgactttttaaaagttgatttaaggatacatctacaatttctaggagaagataaatagtgaaagtcaaaaaggaaatatcagtagaggcaagtcattaaaaacatatattcaaaacaacataataagaataatgttatctactccatgttctttaattagggttttcatgtctcaaactaacatagaacttatgttagtcaaaagttaattttgacttcaatag

SEQ ID NO: 281048 - DNA, 595 bp, Homo sapiens
aaccctttgctacataagcctttaagtcttaatatttcccgaggagaatctacgatacatgtctgtgttaaacaactctccttgcctataaatttttccttttatctaaccttaatcctctatgctttagattaagcctctcrtgctttctttggtgcagagaatctatttaagagccctttatgtacttgagaggagtttttcagtcattcacttgactactggttcaataacccaagtacttttaacctttccctctagaattgatgtctgaattctataagcattttggagcactttggtggaaactcttcaagtcatgtttagctgtgaatcgaacagattcagtatcatagatttggattaggattaacctgtcaacaatttatcatgcacaatatcctgtgatatggaattatagaattttaagatctattttatgtataatcttgccatgtttgaagtttaaccaccaaaatttattatttagatgtatttcataatcaaatggttttggaaccataaaagaagttttaaaagttgcttaatggcatttttcttctattgcctaaaactggtttccttttttagagat

SEQ ID NO: 281049 - DNA, 1134 bp, Homo sapiens
aaccctttgctacataagcctttaagtcttaatatttcccgaggagaatctacgatacatgtctgtgttaaacaactctccttgcctataaatttttccttttatctaaccttaatcctctatgctttagattaagcctctcatgctttctttggtgcagagaatctatttaagagccctttatgtacttgagaggagtttttcagtcattcacttgactactggttcaataacccaagtacttttaacctttccctctagaattgatgtctgaattctataagcattttggagcactttggtggaaactcttcaagtcatgtttagctgtgaatcgaacagattcagtatcatagatttggattaggattaacctgtcaacaatttatcatgcacaatatcctgtgatatggaattatagaattttaagatstattttatgtataatcttgccatgtttgaagtttaaccaccaaaatttattatttagatgtatttcataatcaaatggttttggaaccataaaagaagttttaaaagttgcttaatggcatttttcttctattgcctaaaactggtttccttttttagagatwttttattcattcatctccaagctaagtactttttcattagcaaataatgtttgctgtttttctttctatccctctgtatttaatttagcataagcttttatgacttgggttttttttwattatttttttaacctacattttaatgtgttccactctattttcatcctggtatatgttaagttttatagaatatatgaccatcagtattagattctcatgccttatgtggccatatcaaagtgctctatgcagtccttgttaaatgtgctgtcttataaccctattaattaatggtgcaagattaataaaaatataattaaaagatcacgtagatgaaatgtaatctcatttcacttcattgttataaacatttctgctacctgggttgtattttattttttaatgtgacctacttaaacatacatttttatatttttattgcattgataaaaatatgaaaattatacaaattttgatattttgtttcattttggaatgatgtttattgctttctagtattcaacgttaatttatttta

SEQ ID NO: 281050 - DNA, 538 bp, Homo sapiens
ttttattcattcatctccaagctaagtactttttcattagcaaataatgtttgctgtttttctttctatccctctgtatttaatttagcataagcttttatgacttgggtttttttttattatttttttaacctacattttaatgtgttccactctattttcatcctggtatatgttaagttttatagaatatatgaccatcagtattagattctcatgccttatgtggccatatcaaagtgctctatgcagtccttgttaaatgtgctgtcttataaccctattaattaatggtgcaagattaataaaaatataattaaaagatcaygtagatgaaatgtaatctcatttcacttcattgttataaacatttctgctacctgggttgtattttattttttaatgtgacctacttaaacatacatttttatatttttattgcattgataaaaatatgaaaattatacaaattttgatattttgtttcattttggaatgatgtttattgctttctagtattcaacgttaatttatttta

SEQ ID NO: 281051 - DNA, 538 bp, Homo sapiens
ttttattcattcatctccaagctaagtactttttcattagcaaataatgtttgctgtttttctttctatccctctgtatttaatttagcataagcttttatgacttgggtttttttttattatttttttaacctacattttaatgtgttccactctattttcatcctggtatatgttaagttttatagaatatatgaccatcagtattagattctcatgccttatgtggccatatcaaagtgctctatgcagtccttgttaaatgtgctgtcttataaccctattaattaatggtgcaagattaataaaaatataattaaaagatcacgtagatgaaatgtaatctcatttcacttcattgttataaacatttctgctacctgggttgtattttattttttaatgtgacctacttaaacatacatttttatatttttattgcattgataaaaatatgaaaattatacaaattttgrtattttgtttcattttggaatgatgtttattgctttctagtattcaacgttaatttatttta

SEQ ID NO: 281052 - DNA, 557 bp, Homo sapiens
ctcaaatttagcaccttgattaagccccttatttcttaactgggttgttagcatagagatcagggaagcagatactgatgatgccctcaagttaataaaatccagtgtgatttacaataactggaagctggaatgagccactcaaagggtacttgtttaacatggcattagaggaaagaggactagtcaataagtaaacaaataagacacagtccccaagaaagagttgtgggatatgggggtggataagtagaataacaaattcagagcagtgtgctagtgttaggataggtacaggggatagagaggtatctcagagcttccctgaagcrggtgaaacttttgctgagccttgatggatgagaaaactacccagggggatgggggttatattcactccaagtaatgtgattggagtagcagtcatacttgttactatttgctgaccattcagaatgtgccaggcattttgtatattttatgtcatttataattttttatgataagtcatccattttaaatttgtaaatatagacgataagtaaaaagaagcaggc

SEQ ID NO: 281053 - DNA, 550 bp, Homo sapiens
ggagctgtatcaagactgtggcaacagtgctcccagaaaaggaggcagcatgtgatgctggagcatgcttggcaggaaggaaaaggtggagtgagacctgggaagagccagtgtgtgcaggagtggtgagaagtaagtccagactctagatgtagaccgtgggarggactcccaatctggcttccttttcaatccttgtaaaataatgagactgaaccagacatttctgtggggcactcagtttcatctagggaacctttctttatatattggtttctgagtgaggttgtgttttagcaagagaccactgcttaacagtagcaacagtgacaaaaaaatgtaaaaataatcatcttagatgtgttctgagtctgttgttgttcacctgattaaatttgcatctgatttgagtccatctctgcagcattgtgatgaccctagaagaattctagggcccagacacagatcacagatgtggaggcatgccacaggctctggaagaaaatttgatagtagaagagcttgttctactttccttatttcagggttg

SEQ ID NO: 281054 - DNA, 623 bp, Homo sapiens
catccaactgaacatataaaagtcaatccactttaattaatatgactaagactctgttcagtcacattgatattgttcacattccctaagatttttctaatcttaaactcatatattatcctacagattaacattaatctggagtcctggaataaacacaatacagattaatgtcaaaagatgtgaattctagcatagctctgctaaggcaagacttgcttttttgcctctgtttcctcacctgtaaagtgagggggctggcctagaatgatcatgaatgtgtcttatagccatcaatgtatcattcagaggagacttttaaaaagtgaaaatggcctgccttttattgtatataataaaaataaaataattgcatatgttgtaaatattatgtgcaaatgaagaaactgcatgatcatgaatgtgtcttatagccatcaatgtataataatatatacatataaagtctagatttattcttcagcaaatatagatggattggaggtatttttaaactttccaactaaattgaacaaatacagcagatagcaaaayttaatttacttaagttttttgacattttttcattaaaaaaagaactgtatatcagcaagattgaaaaa

SEQ ID NO: 281055 - DNA, 596 bp, Homo sapiens
cagtcatttagaaaacctgaccttatcagaggacaaaaattacacagattatagaagccccatcattgattaatgacattttcaagctgtgaaactatttgagttaatatactttgataatgcagtagaaatatgaatttgtattaacattgaatttaccacaatagcataaggaagatattttaagttagataagattacataaggttctatagattctccatttgcagctgagagtaataaagtgaattctgctaggaatgagttttagtgggattttttaaagaaacaaaaataacctaaagcaaaataatatatatttttattttaaaatgaagatacatataamatgaatattttatatttttcattaaaaaattctgtctctaagagatgcttaccccttatgttggtttcagttcaaatacatgaaaatactagattaagcttgggtctggcatctcacaatcgcaaaacccacatacactagcaattgtaattttgaatattttcttttgtcattttccatatgaatgtcctcacatagctattgtttcacttacctattgccccaagatgattcatccaaaaacatc

SEQ ID NO: 281056 - DNA, 596 bp, Homo sapiens
cagtcatttagaaaacctgaccttatcagaggacaaaaattacacagattatagaagccccatcattgattaatgacattttcaagctgtgaaactatttgagttaatatactttgataatgcagtagaaatatgaatttgtattaacattgaatttaccacaatagcataaggaagatattttaagttagataagattacataaggttctatagattctccatttgcagctgagagtaataaagtgaattctgctaggaatgagttttagtgggattttttaaagaaacaaaaataacctaaagcaaaataatatatatttttattttaaaatgaagatacatataaaatgaatattttatatttttcattaaaaaattctgtctctaagagatgcttaccccttatgttggtttcagttcaaatacatgaaaatactagattaagcttgggtctggcatctcacaatcgcaaaacccacatacactagcaattgtaattttgaatattttcttttgtcattttccatatgaatgtcctcacatagctattgtttcacttasctattgccccaagatgattcatccaaaaacatc

SEQ ID NO: 281057 - DNA, 576 bp, Homo sapiens
tgtgcttttgctacagagaagccatgacaagcatgtggttgtcagagacaaaggaatgttgtggctaatgattcgatttaccacagttataytgatgcatcattatataataaatagttatacaatattctatcaaataattatgccatattttatataaatctccccaacttctgaaacatttatgtggattttggtttgttgcattacttatgtaatacagcagtgtacatccttgtgcatgtaattttctttctatggaatattctttcatcaggatagcttccctgaagatggattatttggccaaagtgtacagatagatgtctgacttttaaaagttattgcaactccatcagctacaagtgatacattagttctttttaaatttatttttcagttaaaaaagttaaattgacacgttatatctatacatttttatggggtacatagtgatgttgtgatacacataatatatagtgatcagatcagactaattagcatatccattatctcaaacatttctttgtgtagggagcattcaatattctccttctagctattttaaactatata

SEQ ID NO: 281058 - DNA, 576 bp, Homo sapiens
tgtgcttttgctacagagaagccatgacaagcatgtggttgtcagagacaaaggaatgttgtggctaatgattcgatttaccacagttatattgatgcatcattatataataaatagttatacaatattctatcaaataattatgccatattttatataaatctccccarcttctgaaacatttatgtggattttggtttgttgcattacttatgtaatacagcagtgtacatccttgtgcatgtaattttctttctatggaatattctttcatcaggatagcttccctgaagatggattatttggccaaagtgtacagatagatgtctgacttttaaaagttattgcaactccatcagctacaagtgatacattagttctttttaaatttatttttcagttaaaaaagttaaattgacacgttatatctatacatttttatggggtacatagtgatgttgtgatacacataatatatagtgatcagatcagactaattagcatatccattatctcaaacatttctttgtgtagggagcattcaatattctccttctagctattttaaactatata

SEQ ID NO: 281059 - DNA, 589 bp, Homo sapiens
tagtcatgtgtccatatttagctgcaaggagggaatactgccttggtttggtgaacatatgcccagtgaaaattccattactgtagaagacagggagggacaagatttagggggactgatagcaatccctgccacagcatcaaaggggaaaagtaaatttatgataccttttcaaagttttgtcctggaaaataaaaccatctatttttacagggttgatatacatgtatatgtttgttatttgatattgagtagagtaataaccagatttttgcaactataccaaagagaagttcaataaagtaattagaattgcctagctctgtctacgacaacccctttaacaagaaggtactccgctctattgaggctccaaatgkaaaggtttcctttcccttctctgaggacttgcctaaatctataagtgtatccaaaatttcagtattaattcaatgtggggacactaattatttatctttgaggaagatgctaggccagcccaggtcttcatttttgtttaagagaaataatcagccttaaaaatccccccgtgactgtttgaggatggacttttcaaaggaagagccag

SEQ ID NO: 281060 - DNA, 531 bp, Homo sapiens
tatacacatttatttaacctgtacagatgggagccttcagaatgacaaccacgccccttatgaggtacagaagcttatataccatcttgaggttataaacagaatgttggctcagagcacggccaaatgatttatgctggtaaatcagattttagtggcaagacaggtgatgatagggagaaagaaagagtcctgcctgtcaaaagtggctgtgctatatagatgaaccctcacaggtagcatctctcagagagaatagatggtaaatgtttcttttcargtctttaaaagtgtcaggctatcagttaacctctcctagatctcagaaatgcctagaaagagaagtcctggctacatcaatggaaattctccacagatgcaaattttctctacaaaagatggctttgcagagccacctcagtctgttgtccctgtagcagccatttcaaattatgtcaaagagatatattttggggtaaaatattttgattatcttcattagtatatctcaattttgtcaatacaaacctg

SEQ ID NO: 281061 - DNA, 531 bp, Homo sapiens
tatacacatttatttaacctgtacagatgggagccttcagaatgacaaccacgccccttatgaggtacagaagcttatataccatcttgaggttataaacagaatgttggctcagagcacggccaaatgatttatgctggtaaatcagattttagtggcaagacaggtgatgatagggagaaagaaagagtcctgcctgtcaaaagtggctgtgctatatagatgaaccctcacaggtagcatctctcagagagaatagatggtaaatgtttcttttcaggtctttaaaagtgtcargctatcagttaacctctcctagatctcagaaatgcctagaaagagaagtcctggctacatcaatggaaattctccacagatgcaaattttctctacaaaagatggctttgcagagccacctcagtctgttgtccctgtagcagccatttcaaattatgtcaaagagatatattttggggtaaaatattttgattatcttcattagtatatctcaattttgtcaatacaaacctg

SEQ ID NO: 281062 - DNA, 489 bp, Homo sapiens
ataattcatgctcagtttgttagaacatttccacatcacaaattacaacattcgggttcaaggatggatataaagtacacagagaaagtattgtaagagaattattttgcagtgagcctgataatagaattatgtgtgtacctatgtatggttttgagtggaagcctatgcaaatgtcagcaaaaggcggggrttcttttcaatttttcttgagaacaccaatttttctgacagtcttgtcctttttaagatttactgagttatatctataaaatcccctcagtttacagataaaatagatttccaaattatcacaaaatttattttttttatcttatttagtgaaaaataaattcagagtcatgctagaatatgttaaacatcaggtcagtatatttaaaggtcaatatggtatgataattgccccttcaaaaaataattattcaagtcaggttagaaataattgttgtgcatttattttccagtttt

SEQ ID NO: 281063 - DNA, 559 bp, Homo sapiens
tataggggaatgatgttgaacaaaacaatgtaatttgaggacctgctgtatgtcatttcacttaaaagtcacagtttccaagaaycaattgatgatactgcataaggacctactttactgcagtagactaaaataatacttaccaaacccttctcccaaataaaatgatgtccaagattttatatagggtagtgttttctagcttaaggccagtgtcagtgccgattcagcatactatcaatcatctttttctatattaaaatgtactaatactggccccaagtcatttttttaaaaagatttaaatgttttcctcatttttaattttactgaagtcagagagcttttccatggcttcaacatggggcaatgtatggaaaatagtgtttttggatgattaatctgcaagtaataaatgaattaaaatttgaagatattggaagcattcaaagcccaaaagagactgacatagaatgataagagcctggactagagtagaagaactgtaaactgaatgaaagttacagataatgacaatagtgatataaattcatgttga

SEQ ID NO: 281064 - DNA, 568 bp, Homo sapiens
ccttgctccttctaatcatacatgacagctcccccagctgaaatgaatatttccaccatctctgtcaattgttaacttatcaatatcttctctagttatcccaactaggcatctgttctggcttctgaatgcctgtagaaagctgtaccctgttgtttaatatacttctaaatatctgagatcatatctaattacctttgttctctgcttgactgtatgttgtttgagagagtaaaccctatatatgtatacatatatatattcaacacaagttgaaaaattattcaacatatatatacactacatatatgttgaatatgtatatgaatatgtatatgaataaaaggcatatatactgcttcttagagaataagagaacagtaacttaaagtggaagaactcaaagactaaactcaacatataatacaatttaagcaccaacmcagacaaagcattgcattttggggaattctcactggattattgctaatattacaatacactgcttactaccatagcttaaatggaaacaaaatgtaattaagaactggtaactttcagtgaataa

SEQ ID NO: 281065 - DNA, 501 bp, Homo sapiens
gttctcccttcagtttatccataaacagaacaattatacatgaggatacacattaatagatattgcttcccaattcctaaagaggcagtccctaagtcaggtggtcagtgcagccttgagagacctgagaaacatacaagcccagaaagcaatggacttgtgtcattttactccattaggctagactagaagacaggccatgattccaggttcaattgcaatttccatataaagaagtcttatcacaccatattacttgcaagttttttgttttgktttgtttttatttctttctgtgtcatacaggctatgctgtgtctggatgtggcctatcccacagatgacacaaggtggtacaaactttatacccagaaatggacccactttagctaggggctgtgtttctaaatattctacttgttgagccaatatcaggtagataatattttaaactgtatgcttcaaaataacttgggacaaacaggcctagataggaaatta

SEQ ID NO: 281066 - DNA, 610 bp, Homo sapiens
ttgcccagggtagagagcaatggtgcgatctcaataagcagctcattttgattacaggtatacatgaagtaaaattcatgaagtaaaattcattataccaaaaagcctcccacagaactttcatgcaccctgagctatgtgaactgaaaagtaacagtgggatagcaagaaccagcttacaaaataaattcctatcgagtgtttttcacagaaggatgataattttaggttgcttacatcatatatttccaatcttaatgagaaaaacctactctgatgatctgatgttattgaagtattctgagaaagaattgctgatgggatttagtgagctactgaataagagaaatcaaaactgtataaattagatatattttctaaaaataaggtgattgtgcagaaaactaaagattcatggaaatagatataacagcttggatattactaagckctaatgatagttatctcattattgcaaggatttgatgatatggtccactgttcacctgaaaccaccaaacacagcatgtttcatatctcagttttcagtcacagagcatttccagagtttactcctgttcagctgagatacagtattatggtatccttc

SEQ ID NO: 281067 - DNA, 545 bp, Homo sapiens
ttgtaaattgtacaccagctcttaatggctttccctggaagcgacagacatatctatttcacatttcactagaaatggcattggccaaatctaacttcagagatgtggggaaatacastcctactaggtttacataggaagtatatggagaatagtactagagggactactgccgcaaacgtggtattacatcctaccaactgatattaaaacgtatctctcgaaatctacagggtacagttaaatttcatataattgaactctccaactttaaactctggtgcaccacagtgtaggtaaaggtcttttcactctaagagaaacatcacgtagaaggttacagaccagtttctaatggaaactgaatgcctaagaaatttctgacttgtagtgtacagggggatggaataagggtatagacataaaaaaaagttttaaatattttacattttatagttccttgcccatttcctcactaaaatttgaaataagtaatactttcagttctgtaaaccaggtattaattacttttccaaagagaactt

SEQ ID NO: 281068 - DNA, 583 bp, Homo sapiens
ggatagaaatgcccttcaaattaaaaagaaaattaaataaattagtcacttgcaatcaaaagtaaatatttaacaacaaaggtaaatcatatttaacaagatcaaagtgtgtgactttggccagctttcaaatgtcttggtctttgcacaaactaaaaactatttttggatggataattaataaaatacattatttatttgtttcatgggaagttttgttagacaattctataattgtaaagaccaagaatattttcagaagtaaaaaatcaattaagctgttaattatctactaaatatagcatctttttaacaatagttatarttaatttaaaatattaaaagttcattttgtttattttcaattaactatgtgttgcaagagacattgttcatttgacagttggagtacatattttctcaaagtacttctgaattaagaaaaaattgttgccaatttgcagcttaaaaattgagctcatgtcaaatattttagaatctatggcatgtcaaagaagaatctcaattaaatataaagaattagtttttgtaatgtatgatgcttaattattttagtttaaca

SEQ ID NO: 281069 - DNA, 560 bp, Homo sapiens
tattttctataaatcagtctttgatgaaaacaagactgtcgaagtgaagaaatgaaaagcaatgattaccaaattacaccaccaagaaattgtgtcttaaaatgcttcatttttaatcaaactctcctttgcattaaaaacttgaactgaaaagcgcctctggaaaaaaaaatatraagtttttttaagagggtgtaaagcatttgaagcctttggttactccaattaaatcctattttctatgtagtactaaaattattagtagtaagctgcttggacccattgtatgttaacagaacaaagataaaactatgacagctattagaagagaaagataaggtaaaaaaagagttgatgaagaatgcaagacaaatgacatataagtgaaaaagaagcagaggaaaagattagagttctccttgacttcaaagaaaataaaaaattaacagatctggcagcattcacacatgaacacatttatatatacacacaaatgcaaatgcatgattaaaactagtgaaatacaaagtatttgatgaaaatacagattgagtaagaat

SEQ ID NO: 281070 - DNA, 560 bp, Homo sapiens
tattttctataaatcagtctttgatgaaaacaagactgtcgaagtgaagaaatgaaaagcaatgattaccaaattacaccaccaagaaattgtgtcttaaaatgcttcatttttaatcaaactctcctttgcattaaaaacttgaactgaaaagcgcctctggaaaaaaaaatatgaagtttttttaagagggtgtaaagcatttgaagcctttggttactccaattaaatcctattttctatgtagtactaaaattattagtagtaagctgcttggacccattgtatgttaacagaacaaagataaaactatgacagctattagaagagaaagataaggtaaaaaaagagttgatgaagaatgyaagacaaatgacatataagtgaaaaagaagcagaggaaaagattagagttctccttgacttcaaagaaaataaaaaattaacagatctggcagcattcacacatgaacacatttatatatacacacaaatgcaaatgcatgattaaaactagtgaaatacaaagtatttgatgaaaatacagattgagtaagaat

SEQ ID NO: 281071 - DNA, 583 bp, Homo sapiens
ggatagaaatgcccttcaaattaaaaagaaaattaaataaattagtcacttgcaatcaaaagtaaatatttaacaacaaaggtaaatcatatttaacaagatcaaagtgtgtgactttggccagctttcaaatgtcttggtctttgcacaaactaaaaactatttttggatggataattaataaaatacattatttatttgtttcatgggaagttttgttagacaattctataattgtaaagaccaagaatattttcagaagtaaaaaatcaattaagctgttaattatctactaaatatagcatctttttaacaatagttatagttaatttaaaatattaaaagttcattttgtttattttcaattaactatgtgttgcaagagacattgttcatttgacagttggagtacatattttctcaaagtacttctgaattaagaaaaaattgttgccaatttgcagcttaaaaattgagctcatgtcaaatattttagaatctatggcatgtcaaagaagaatctcaattaaatataaagaattagtttttgtratgtatgatgcttaattattttagtttaaca

SEQ ID NO: 281072 - DNA, 363 bp, Homo sapiens
agcccagctgctgttgcgacccagctgggtgtgcacacgcttgrggtggcacttacatgtcagtcctctaacacctcggacccctacagactttgggcaccaacgggcatgggagggagaccagggggcaatgagggcagctcgatgggatcctacaggcgcctctcaccacaaacagtctgggtgccatagttggcatgttgatgatggaaggcagacaggttcctgggtggaaatggtcagatccccagtgaaactccaccttcaagctaggaatggcctgaagcctgggggccaggctgccagttccaggcaaagtccacagcctggagtgaaaacttcattgatgacttttcggccact

SEQ ID NO: 281073 - DNA, 573 bp, Homo sapiens
tgaatatgcatattgtttttgacatgcacttatcgcacgatcattggtcaattctgggttatatgatgaaaatatctcatttttattccctatgtgatgattttattatttgtttatttatttatctgtttgtttttgagatggagctttgctctggtcacccaggctgaagtgcaatggcatgatctctgctcactgcaacctctgcctcctgggttcaagcaattctcctgcctcagcctsctgagtagctgggattataggtgtgtgctaccatgcccagctaattttgtgtttttggtagagatggtttttcaccaggttggccaggcttgtctcaaactcctgacctcaggtgatccacctgcctcgacctcccaaagtgctgggattacaagtgtgagccactgtgcccagcctgataattttaaataattaaaaatgcttaaatgaatgttattttaatgtttaaaatttacacagtgatgcaaacattaagcacagtgcttcatttgtatttttaatctggttttgtgtttgtttgtttgtatttaaaaagaaaaaaagaggttg

SEQ ID NO: 281074 - DNA, 498 bp, Homo sapiens
cagtaagtttctgtttattattttctaatgtttcagtctttaaagtagaaattaatgcacgtcaaaaaaattaacaatttagatccttgttaatatttgccacacttcaaggcatcatacctgcrtgtaggcagtgggaagtgcatcgaataagacaatgttagtgggttctctagcatttcttagtcctgaagtagggttaatgacatctctttacattttaagtccgaagtgcagatataatgctgcaactttcaattgaagataccttatcaaattccatttcaaaataactgctgtctaaataactaaaggccacaggcatcctagggtaagtaaacctggtacctttttaattatttatatggcaggttgggaattgatttttttcttagtcagaaataatggcacacagggcatgtaaattttgatggagtaaatgcaattatgatgaaaggcgagaaaggtccagaacaaggcattttttgagagaaacag

SEQ ID NO: 281075 - DNA, 498 bp, Homo sapiens
cagtaagtttctgtttattattttctaatgtttcagtctttaaagtagaaattaatgcacgtcaaaaaaattaacaatttagatccttgttaatatttgccacacttcaaggcatcatacctgcgtgtaggcagtgggaagtgcatcgaataagacaatgttagtgggttctctagcatttcttagtcctgaagtagggttaatgacatctctttacattttaagtccgaagtgcagatataatgctgcaactttcaattgaagataccttatcaaattccatttcaaaataactgctgtctaaataactaaaggccacaggcatcctagggtaagtaamcctggtacctttttaattatttatatggcaggttgggaattgatttttttcttagtcagaaataatggcacacagggcatgtaaattttgatggagtaaatgcaattatgatgaaaggcgagaaaggtccagaacaaggcattttttgagagaaacag

SEQ ID NO: 281076 - DNA, 498 bp, Homo sapiens
cagtaagtttctgtttattattttctaatgtttcagtctttaaagtagaaattaatgcacgtcaaaaaaattaacaatttagatccttgttaatatttgccacacttcaaggcatcatacctgcgtgtaggcagtgggaagtgcatcgaataagacaatgttagtgggttctctagcatttcttagtcctgaagtagggttaatgacatctctttacattttaagtccgaagtgcagatataatgctgcaactttcaattgaagataccttatcaaattccatttcaaaataactgctgtctaaataactaaaggccacaggcatcctagggtaagtaaacctggtacctttttaattatttatatggcaggytgggaattgatttttttcttagtcagaaataatggcacacagggcatgtaaattttgatggagtaaatgcaattatgatgaaaggcgagaaaggtccagaacaaggcattttttgagagaaacag

SEQ ID NO: 281077 - DNA, 498 bp, Homo sapiens
cagtaagtttctgtttattattttctaatgtttcagtctttaaagtagaaattaatgcacgtcaaaaaaattaacaatttagatccttgttaatatttgccacacttcaaggcatcatacctgcgtgtaggcagtgggaagtgcatcgaataagacaatgttagtgggttctctagcatttcttagtcctgaagtagggttaatgacatctctttacattttaagtccgaagtgcagatataatgctgcaactttcaattgaagataccttatcaaattccatttcaaaataactgctgtctaaataactaaaggccacaggcatcctagggtaagtaaacctggtacctttttaattatttatatggcaggttkggaattgatttttttcttagtcagaaataatggcacacagggcatgtaaattttgatggagtaaatgcaattatgatgaaaggcgagaaaggtccagaacaaggcattttttgagagaaacag

SEQ ID NO: 281078 - DNA, 1123 bp, Homo sapiens
aaggtgggaaaatcttaacaggactaycagctgaagagacaagacacaggagattgtataaataattctggagcatgtaaagtaatgaaagaaaaaggcagatagaacaatagtaaaataaagggagagattcaactctctttgctgaaatcaaagttataaaattaagtctttatttactattgaatattgtacttttatataatatgattatttttactattaaatggtagaagttatacatgtaataaaacagacatgtcacttgcattattggtaattgttagtattataatgaaatctgttaattgctggtatttaagaacatacattattcataaattttgatgtggccttcttaacagatacatatatgaaaatgcagagtttatgtaaatccataaaaattatttccctggatgactgttaatattttcactattgtggattgtgatttgtacatattttgcaaagtacaccactgctttacaaataatttatatgcaaatttaatatgactatagtttgtgacttaatatttggtagaaatcaccttttatttttatcattattattgwgccactatggcatacaatatagaggtttctcagaaagctaaacatagactcaccatatgatccagaaattacacttctgagtgtatgtatccaaaagaaaaaaaatcaatatatcaaagtaatgtctgcactgcccaggtttattgcagcacaatttgcaatagccaaaacctgaaatcaagctaattgttcatcaacagataaattaataaagattatgtggcctatatatacaaatatatatataaaatagaatattattcaaccataaaaaagaatgaaattctgtcatttgcaccaacattgataaaactggaggtcattatgttaagwgaaataagccaagcacagaaagacaaatattgcatgttttcacttattttacagaggtaaaaaatgaatctcaggaagacagagaatagtttggtggttaccagaggccaggaagggttgggggaggaaaagtgaagacaggttgattaatgggtacaaatacatagcttgatagaagaaacaggacctggtgtttcatagatcaatagggt

SEQ ID NO: 281079 - DNA, 585 bp, Homo sapiens
tacgattttcttattgtgacttgttatggtttgtaaaaaattttacagacagtttaatccagtggataattataaagacttaactgtaaaactattgtctccttagtccacctagaaagcatcttctcttaatctgagccatatsgaaagctgacaggtttgagggaatacaggaaatgaaaaaaaaaaaaacaggacagcaaaatatcacaatttttgccttcataattcaaagaggtccaccatgctgtgtccctttcttagtattagggagcataaagctcagcaatgtgttcattactttaaaggagtaacttcatattacttaatgccacaaaattccacaaattatgcaatatagttggtaatatttgttaaaaacctagttgctgctataataacgttttccttttaaaaatacatatataaaatgtaagcacaatacattaggaagtgaaaaataataatatctatttttaaaggaggtgtactaagctgtcagtgagcttaataaacatgtttctatacagttaagcaataactgctcccaaatactaatgaaacaatatccatggtattgctgca

SEQ ID NO: 281080 - DNA, 598 bp, Homo sapiens
gataattaaaaaatcttttttataagaatacaataggaaaacattggatttactgctcattttttttatggtataagcgtcatctaatcctgtatatgaaagagtaccagctggagccttatctgaaatttctacacatctgggaaaattcgttaaaggttgagctagattgaatatattaaacaactctattggtataaaaaagtagaaaatacaaaagacagaaatatttctaaaagataagatagcctgaacaatgcamttaatcaaaaaatgatcttcagttatcaaaattgggtagtgattgtgactatattctggtggctataattctaatattccttcatccaactctcatgggcataaaaactaggtcccaggagaaaagtaggctaaaattaacagctgcagcagctgtttccatataacaccaacaaacaagcaaacaaacatctataaaattttgtagtccaagcagaaataatttggttcccagtaacttaatgttacataaaatatggagtaatatactctcccacacatcaccttagaccttcaaggaatgggaatctttatagaaaggaatgtcatgcatgag

SEQ ID NO: 281081 - DNA, 511 bp, Homo sapiens
aaaagtgataaggaaaaagaaagaactttaggaggtcagagtcagggtctttggagaacaaggtttctagtcctgaagagagggccttagaaagaagtttcctgcctccttcttcactaacttttctgccaagagacatttcagaatttcaaaatttctatagatcaatattgctctccttcttcatttatccaagtggaggtattcattgtaaatatatttttcctgttccagcaataccaaatgaatataagattgactgtaacaagagggagcaaactcatgcctttattccataagggtctaaatcaaaggggtaccatctgagcctgaggaggtggtaaggacacccaccccaaagttcctgaactttaaatttgatgcaatgatgtcattactgaactgggctttgtggtttttttccattggggatgaagtgagtatattttacctttggtcrtaagaaaagtggattgtcattggaattaattcagttcatcaaatattttca

SEQ ID NO: 281082 - DNA, 611 bp, Homo sapiens
attattaatagcaggaaccttctttactatcacttccagaaatcatatggaaattttggcatactttgaatgactgtatatagatgagacttttttgcctcaattttaaggcaaacagatcaaagcctatgagggtgtaattactactggttgagaaygtttttctaagtgttagcataggcatattttgctacagttataccagcatctgctctaactctttaaaaacaccctagggcatgtgaagaaacagatcatatcaaaggaggataactgttttcagataactgctgtgacataaattttcttcctaagaatcatcaatgctggtttttaaaacttggcgtactccactacctcaatttaaaacatgagagatgtgtcttgttaaaaggtttagacattaatggttaaagatagacaaagaagacttactcataaactataaaattagaagattgttgattacactcatttctcttaactttagtgaggcatatattgcataatattaaaattcaaacattttaagtgcacacttttatatactcactgatgtaaccactactctaatgagttacagaacctgtgtatcaatcccctaagccagc

SEQ ID NO: 281083 - DNA, 506 bp, Homo sapiens
actactggttgagaatgtttttctaagtgttagcataggcatattttgctacagttataccagcatctgctctaactctttaaaaacaccctagggcatgtgaagaaacagatcatatcaaaggaggataactgttttcagataactgctgtgacataaattttcttcctaagaatcatcaatgctggtttttaaaacttggcgtactccactacctcaatttaaaacatgagagatgtgtcttgttaaaaggtttagacattaatggttaaagatagacaaagaagacttactcataaactayaaaattagaagattgttgattacactcatttctcttaactttagtgaggcatatattgcataatattaaaattcaaacattttaagtgcacacttttatatactcactgatgtaaccactactctaatgagttacagaacctgtgtatcaatcccctaagccagcttcctggttcccttttgcagtcagtctctcctactgt

SEQ ID NO: 281084 - DNA, 477 bp, Homo sapiens
ccaaagacaaggattctgaaagagggcaagctaagaagctatcacattggcctgagaagaaaaagagttctgtccaagaaatgacaaaactatgttgccagctatctctttgctggaagtatagagacatctagggagttaacaatacttagacaaatttccatgcatgaagaaggaagagcaacagaattctacatggtattgttggccttatcccactaacaacagaactctacagtaaattgtggcagtacgcayattatttttcaataggaagaagaatcactaggataagttcaagagaactgccagagagggtatggaaggatgtgatgaagtgagaagtctcccagaaaattactatgctttgattattatggaaatatctttagtttaagagtggtcacttttgggggccagatgacacttctaatcccatttaaacacccaaaaatatatttaaagaaggttaaaaaa

SEQ ID NO: 281085 - DNA, 558 bp, Homo sapiens
cttgagtgtttagtgaattttgagtagctgctcaattgttctagattttgaactttttaattttttttaagagacaggatctcgctctgtcacctaggctggagggcagtgggagtgatcatggctcacttcagcctcaaccttcctaggctcaagcagtcctcccacctcagcctcccacatacccaggaatacaagtgcatgccaccatgcctggytttttatattttaatttttattttttgtagagagagaatctcattatattgcccaggctggtctccagcccctgagctcaagcagtcctccagcctcagcctcccaaaatgttgggattacaggcatgagccactgtgcccggcctgaactttcaatgcatatactttaaatggatttctcacttataagcattctcagacaggaacttttctaaacaaacatttaaaataacactttcagatttacagagttattgcacatgtagttcccatattcccacattcagcttcccctcgttagtatagtaatttcattactattaatgagccaatagggaaa

SEQ ID NO: 281086 - DNA, 546 bp, Homo sapiens
tttctttcttttttttttttttaaatattttttattttaagttctgaggtagatgtgcaggtatgttacatagatraatgtgtgccacggtggttggctgtacctatcaacccatcacctatgtattaagccctgcatacattagctatttttcctaatgctctcccctcccctgaccccaacccccaacaggccacagtgtgtgttgttcccctccctgtgtccatgtgttctcattgttcagctcctacttataagtgagaacatgcagtgtttcgttttctgtttctgggttagtttgctgaggataatggcttccagctccatctatgtccctccatgtacctgcaaaggacatgatattgtttctttttatggctgcatagtattccatgatgcatatgtaccatattttctttatccaatctaccattgatgagcatttgggttgattccatgcctttggtattgtgaagagtgctgcagtgaacataagtatgcatgtatctttgtaatagaatgatttatattcctttggtatattcc

SEQ ID NO: 281087 - DNA, 546 bp, Homo sapiens
tttctttcttttttttttttttaaatattttttattttaagttctgaggtagatgtgcaggtatgttacatagataaatgtgtgccacggtggttggctgtacctatcaacccatcacctatgtattaagccctgcatrcattagctatttttcctaatgctctcccctcccctgaccccaacccccaacaggccacagtgtgtgttgttcccctccctgtgtccatgtgttctcattgttcagctcctacttataagtgagaacatgcagtgtttcgttttctgtttctgggttagtttgctgaggataatggcttccagctccatctatgtccctccatgtacctgcaaaggacatgatattgtttctttttatggctgcatagtattccatgatgcatatgtaccatattttctttatccaatctaccattgatgagcatttgggttgattccatgcctttggtattgtgaagagtgctgcagtgaacataagtatgcatgtatctttgtaatagaatgatttatattcctttggtatattcc

SEQ ID NO: 281088 - DNA, 546 bp, Homo sapiens
tttctttcttttttttttttttaaatattttttattttaagttctgaggtagatgtgcaggtatgttacatagataaatgtgtgccacggtggttggctgtacctatcaacccatcacctatgtattaagccctgcatacattagctatttttcctaatgctctcccctcccctgaccccaacccccaacaggccacagtgtgtgttgttcccctccctgtgtccatgtgttctcattgttcagctcctacttataagtgagaacatgcagtgtttcgttttctgtttctgggttagtttgctgaggataatggcttccagctccatctatgtccctccatgtacctgcaaaggacatgatattgtttctttttatggctgcatagtattccatgatgcatatgtascatattttctttatccaatctaccattgatgagcatttgggttgattccatgcctttggtattgtgaagagtgctgcagtgaacataagtatgcatgtatctttgtaatagaatgatttatattcctttggtatattcc

SEQ ID NO: 281089 - DNA, 546 bp, Homo sapiens
tttctttcttttttttttttttaaatattttttattttaagttctgaggtagatgtgcaggtatgttacatagataaatgtgtgccacggtggttggctgtacctatcaacccatcacctatgtattaagccctgcatacattagctatttttcctaatgctctcccctcccctgaccccaacccccaacaggccacagtgtgtgttgttcccctccctgtgtccatgtgttctcattgttcagctcctacttataagtgagaacatgcagtgtttcgttttctgtttctgggttagtttgctgaggataatggcttccagctccatctatgtccctccatgtacctgcaaaggacatgatattgtttctttttatggctgcatagtattccatgatgcatatgtaccatattttctttatccaatctaccattgatgagcatttgggttgattccatgcctttggtattgtgaakagtgctgcagtgaacataagtatgcatgtatctttgtaatagaatgatttatattcctttggtatattcc

SEQ ID NO: 281090 - DNA, 565 bp, Homo sapiens
aagtttatcaaagagatgatgttctggtgcctcagtgcgtagggtatgcaccctcacaagccatgtctgggaacctgacttcaccaactgccagaatgcgagcttggggacattgtgaggtgcagcttcatctatctgagcctatttctcctttagtgagattagaataagagtggcacccccctaataaagttgacttgggtatgaaaggagttaatccctatcaaatagttggcactgttaatgttacctactagtgagaatgtgatctcgctttttaaaaaaagaaagaattccttaagggagcataagaattaaaggagttgacaaggagcatgggggtaaagcagcactcatcacctgcagggttyttccaggagagcatgagggcagagagcaagagcggggtcaatgtgcagcttgcacagcccaaagagtagctcaggagggagaaagccatggacatcacgggccgccaagtcctgcaaggaggctgtgaatgagaggggtgcactgaatctcagatctttggctgctgaagccatgtgctaaggtttggccagga

SEQ ID NO: 281091 - DNA, 457 bp, Homo sapiens
cgggccgccaagtcctgcaaggaggctgtgaatgagaggggtgcactgaatctcagatctttggctgctgaagccatgtgctaaggtttggccaggagtgaaagttgagcagtgagcttggaagtctgtagagacattgacggtgcacagtggcagctaataacacgtcgggttatcgttctaagcacttttcatgtaccagttcatttaagcctcacaatagctttctgcagtagattctatttttttkttttgtttttttttattttttagacagagtctcgctcttgtcgcccaggctggagtgcagtggtgcgacctgggcccactgcaacctctgcctcctgggttcaagtgattctcctgcctcagcctcctgagtagctgggattacaggtgaccaccacgacacccagctcatttgtatagtttttgtggagacggggtttcaccatgt

SEQ ID NO: 281092 - DNA, 545 bp, Homo sapiens
taaaatatttatttcctaatactctcatttagaatgttaaattctacccagctttttgttaaccaaactgtaatattttttctctacataaggtcattgatgagaatgagcattaagggacaggaagtttcaaattatttgtgctataagattgatgaattttaaaaaccgtaacattagagtgcacggtggccccaaatccatgtgcctttggagaaattcaagttgttgctcccgtgttagataggggaatgtgcagaacccaggaaagattcaacctccatttccaccaactgaaggcctctggagcacaggcaaacccagaaggaaaccacagacgcttcaggaacaggaaaaggaagagttccacatggaatattgcctcaaaaccacagaaaatgtctaygaagcagaccccttgttgaactaggtgatgagtgaccagtgataatttttcagaccctgcagaaaaaaatagatttttaaatcattttaccaattagaaattggtccagtataacacaaaaacggagaccaggaaataa

SEQ ID NO: 281093 - DNA, 438 bp, Homo sapiens
aaattgggagaccagaggcatgcagaagaaacagtatgtgaagattcctgtgtaaggagaagcgcaacctatttaaggaactgaaataaggctaatgagtctggacctcaggagaagaggaaggtgcgagtatgaaatgagactccagggctaagtatggccagatcacgaaagacatggctgatcatttaaagcccttctttatttaaagaaaaacgaaaaggcattcaattctcttaaacaagagagaaccaggtttgagcttttagagaagcactcccactgcagtatgaaaattgacaatttggggagggcatgaatggargcacttaaagcacatatgttaactaggaggctatgttgtcccacagctaaaacaaaggagtatcttagactatggaagaggcattggacatggtgataagtggatacattaaa

SEQ ID NO: 281094 - DNA, 545 bp, Homo sapiens
acctctgtgccctcatcaggacatcactgatgaggtatccgtccattaattcctactttcagcctcttaggttctgctcttcccttaatgtcttctaattctgtcccatcctgcacatcacttccagactggtcatccaaaacagacctttcttcatgttattcctcygttcaagaacctaccactactgctgtttgtttataacaatggctcgcaaaccatctgctatggtttgaatgcatcccccaaaaagcatgtgttggagacttaatccccaatgcaaccatgtaagaggtgggaccattaaaaagtggtttggccacaaagcctctgccctcaagttggattaatgctgtgatctcaggagtgagtttgttatggaggggagtggatttcttataaaaggatgagttctcccaccctcactttctcttgccctttcaccttctaccatggcatgatgcagcaagaaggccctcaccagttgccagtccctcaatcttggacttctcagcctccagaaccaagagccaatacatttattt

SEQ ID NO: 281095 - DNA, 602 bp, Homo sapiens
tttttttttttttaatttaaaggcaggggtataggcatgcaataaaatggctctgaaaatagtttaaaaatgtattttggatttggcagtagcttacatctgtctcgtgcctagtgttgagggattctttggagaagaaaagagggtatggagagggaaggagaccccagtggaagatcgtatgcccaataacgggtgttgggggcttctttttcccttctaaggggcctattacctagaaaaccaatccatccttaagggaccaagagaaggtatggaaacacatgttgttgttgagaacataaaggtgaatgttgaccttctgtccacctcttcttccccagagggtgactgatcatccactgcacccaggagaagcatttgtgcatgaatgagtgaactcttttgtattaaaagtgatgatggtggcggtactgtgacacaataggtcagtggcctgtaaattcttcagttctgagcagggcttctggcttgcaatgccccttctttttgacccagtatgctgggctaaaccataagggttayatttatttcctcactatagacaccagagcaggctttgagtagctggatccttgctt

SEQ ID NO: 281096 - DNA, 648 bp, Homo sapiens
  misc_feature (1)...(648): n = A,T,C or G
tatgaatatgaatgtgaagaagtacacataagcacacacatacaatgtgttcaaatataacgtccacagttgtctgtctggctttcatgttcctccaacgttgtttctaccctatcactaggcttacttcccactaattctactgatctaaaattgaatcagtcctctgcatgctccagttttattcctgtattagtttactacagatgccatagcaaaatgtcacaaatccagtggtttaaagaacataaatgtattgtttcagagttctggaggccagaagtctraggtcaaggtgcaggcagggccatgctccatccaaaggtgctggggaagctgctgctacgggtctctctcctagcttccagtggttcctttgcttgtggcagcacaactcttaatatttacatagtgtccttcttgtaggtgtgtctgtgcccaaatgtcccctttttctaaggatgccaggaatgttgtactagggacccactctactctagaatgacctcatctcaactacctgcaacaaccttacttgcaaataaggttccattctaaggtgctgggggttagaacttcaacatataaattttggagtaacacaatccaacccacaagcattcctactcctccgcctttgnnnnnnnn

SEQ ID NO: 281097 - DNA, 488 bp, Homo sapiens
tgaataacaaccccccaccccaygtgattgtagttatcttaggctgtcagttgtaagttctcatgtctcctgaaaggatttatgcctgtagtatttacattacccacatctatttcccttgagttttctgtttgaagttaatccttcttactgaagagaatggaagcaaaacatgaattgagcagctcttccttctctgttttctgttaacactacactgtcatcgcccaagagcagttctctcatttccttctggattctagatctaaacagatgggaaggcagaccctttttccttgtctgtaccatttctcattcatttttgctcatgcctttggacatgtaggagaggtactgctggggaggaataaggggagcagaagctccactgcactaacagctggaagatctggcttctaatccccacactgcctttcccagcagtagagcattgggcaagatgttttaacccttttgagcctcagttt

SEQ ID NO: 281098 - DNA, 648 bp, Homo sapiens
  misc_feature (1)...(648): n = A,T,C or G
tatgaatatgaatgtgaagaagtacacataagcacacacatacaatgtgttcaaatataacgtccacagttgtctgtctggctttcatgttcctccaacgttgtttctaccctatcactaggcttacttcccactaattctactgatctaaaattgaatcagtcctctgcatgctccagttttattcctgtattagtttactacagatgccatagcaaaatgtcacaaatccagtggtttaaagaacataaatgtattgtttcagagttctggaggccagaagtctgaggtcaaggtgcaggcagggccatgctccatccaaaggtgctggggaagctgctgctacgggtctctctcctagcttccagtggttcctttgcttgtggcagcacaactcttaatatttacatagtgtccttcttgtaggtgtgtctgtgcccaaatgtcccctttttctaaggatgccaggaatgttgtactagggacccacyctactctagaatgacctcatctcaactacctgcaacaaccttacttgcaaataaggttccattctaaggtgctgggggttagaacttcaacatataaattttggagtaacacaatccaacccacaagcattcctactcctccgcctttgnnnnnnnn

SEQ ID NO: 281099 - DNA, 538 bp, Homo sapiens
aggaataaggggagcagaagctccactgcactaacagctggaagatctggcttctaatccccacactgcctttcccagcagtagagcattgggcaagatgttttaacccttttgagcctcagttttttcacctgtgaaatgggttcaataatctccrctgtgccttcctcacagataggaaaatataaataaaagctctttaaacattttaaagtatactaatcttatttatgctactcatatactgttaaatatagacatatatttatatcaactatatatatgcctgcagatatgtgtgtgtatatacacgtgtgtgtgtgtgtatgtgtgtgtgtgtttggttatcagcccttcattccacatttctgcctttttcttccttatgagcagcctctcagggaaggaacctgagcagcgtgtatgcacacttgcactatggggcagcattgcacagtggtggagagtgcaggctttgcagccaggctttctgggatggaattccacctcctcggtgaaatacttgggaaagtgactt

SEQ ID NO: 281100 - DNA, 608 bp, Homo sapiens
agagttggaatttggtctttggcccttatcctgcctgctttgggggccatttgccatctttaagatcaagaatattcctgcacatatactatcagccactcttcccttggagcagcctatgtttttgttcaccagactgtccagtagagctttcrtggtgatagtctatgtcagtgctgactaatacagtaggcactagccataagcagctatggagcacttgagatgcagctaatgacggaggaactcaatttcttgaattttatttagttttaattaattggcatttaattttttttttttttctttttgagacggagtctcactctcttgccaggctggagtgcagtggcacgatctcggctcactgcaacctccacctcctggcttcaaacggttctcctgcctcagcctcccgagtagctgagattaccatgcccagctaatatttttttgtgttttagtagagacggggtttcaccatgttggccaggatggtctcgatctcctgacctcgtgatctgcctgcctcagcctcccaaagtcctgggattacaggagtgagtcaccgtgcctggccatcatttaaatttaaatagccgcctgtg

SEQ ID NO: 281101 - DNA, 509 bp, Homo sapiens
aaacatgaactcacttgttaaggagtctaatttactccacctcatattaggcaactctcagagctcttcatsactttctaattctaaccgtttactttcacggggaacattacctatccatgttggtagatcattttctataaattatgtacaacacaagcagcagtgtataatgccactacttaaataaatatgtattctttatagtgtcacaggtgaagtattgaaagaaatgatataatttgccaagaatcccattttgaaaataacttgtccagaatgccgaacctgtgcaatgctggcttttttctgctgtttagatttttttgtaataaatgtgcgttataataaaatatttcaaataaacactgcattattaatgaatcttgtgcttgccctagggcagctgagtcataaatggttcatttaaattctgggttcctcctgcgacagacacagtacttctaatagttcactatgtgaagactgtaccttcattgtttccattt

SEQ ID NO: 281102 - DNA, 509 bp, Homo sapiens
aaacatgaactcacttgttaaggagtctaatttactccacctcatattaggcaactctcagagctcttcatcactttctaattctaaccgtttactttcacggggaacattacctatccatgttggtagatcattttctataaattatgtacaacacaagcagcagtgtataatgccactacttaaataaatatgtattctttatagtgtcacaggtgaagtattgaaagaaatgatataatttgccaagaatcccattttgaaaatmacttgtccagaatgccgaacctgtgcaatgctggcttttttctgctgtttagatttttttgtaataaatgtgcgttataataaaatatttcaaataaacactgcattattaatgaatcttgtgcttgccctagggcagctgagtcataaatggttcatttaaattctgggttcctcctgcgacagacacagtacttctaatagttcactatgtgaagactgtaccttcattgtttccattt

SEQ ID NO: 281103 - DNA, 565 bp, Homo sapiens
ccaccttaatgaccttatcttgacgtaactaatgatatcttcaattattctactttcaaataagttcatattctgagatattgctattgaacatcagcaaataaatggggatgaagagaggagtaattcaacctgaaaaaccttgraagatagtctttaccttagcaaaagaaaggatgtgggactttggaactgaaagccaactatcggtctcatttatcttgaatttattttaatcctgaatttgagatgcagacatacattcatttttattcaacttttaaaaccaattttccactgtcatttaataaccccaaattgtctcactatttaaaatgacatatttcctgtgttcaaaataaggcccatgctcttaaaccccaagtgagatatgtgtagcatgctgaaccatactgtaaccatacaatagctcatacaatctaaccatacagtagaccaacagggtctatttactccctgtattttctatcatatttcattgatcttgtctaacattcattggaatcacataatatttgtgtattataacttcagtgagaaaata

SEQ ID NO: 281104 - DNA, 565 bp, Homo sapiens
ccaccttaatgaccttatcttgacgtaactaatgatatcttcaattattctactttcaaataagttcatattctgagatattgctattgaacatcagcaaataaatggggatgaagagaggagtaattcaacctgaaaaaccttggaagatagtctttaccttagcaaaagaaaggatgtgggactttggaactgaaagccaactatyggtctcatttatcttgaatttattttaatcctgaatttgagatgcagacatacattcatttttattcaacttttaaaaccaattttccactgtcatttaataaccccaaattgtctcactatttaaaatgacatatttcctgtgttcaaaataaggcccatgctcttaaaccccaagtgagatatgtgtagcatgctgaaccatactgtaaccatacaatagctcatacaatctaaccatacagtagaccaacagggtctatttactccctgtattttctatcatatttcattgatcttgtctaacattcattggaatcacataatatttgtgtattataacttcagtgagaaaata

SEQ ID NO: 281105 - DNA, 565 bp, Homo sapiens
ccaccttaatgaccttatcttgacgtaactaatgatatcttcaattattctactttcaaataagttcatattctgagatattgctattgaacatcagcaaataaatggggatgaagagaggagtaattcaacctgaaaaaccttggaagatagtctttaccttagcaaaagaaaggatgtgggactttggaactgaaagccaactatcggtctcatttatcttgaatttattttaatcctgmatttgagatgcagacatacattcatttttattcaacttttaaaaccaattttccactgtcatttaataaccccaaattgtctcactatttaaaatgacatatttcctgtgttcaaaataaggcccatgctcttaaaccccaagtgagatatgtgtagcatgctgaaccatactgtaaccatacaatagctcatacaatctaaccatacagtagaccaacagggtctatttactccctgtattttctatcatatttcattgatcttgtctaacattcattggaatcacataatatttgtgtattataacttcagtgagaaaata

SEQ ID NO: 281106 - DNA, 565 bp, Homo sapiens
ccaccttaatgaccttatcttgacgtaactaatgatatcttcaattattctactttcaaataagttcatattctgagatattgctattgaacatcagcaaataaatggggatgaagagaggagtaattcaacctgaaaaaccttggaagatagtctttaccttagcaaaagaaaggatgtgggactttggaactgaaagccaactatcggtctcatttatcttgaatttattttaatcctgaatttgagatrcagacatacattcatttttattcaacttttaaaaccaattttccactgtcatttaataaccccaaattgtctcactatttaaaatgacatatttcctgtgttcaaaataaggcccatgctcttaaaccccaagtgagatatgtgtagcatgctgaaccatactgtaaccatacaatagctcatacaatctaaccatacagtagaccaacagggtctatttactccctgtattttctatcatatttcattgatcttgtctaacattcattggaatcacataatatttgtgtattataacttcagtgagaaaata

SEQ ID NO: 281107 - DNA, 483 bp, Homo sapiens
agggttcgcagggtggctgcaagaatcaagtggtggtagtggcggcggcggcggcggcggcggcggcggcggcggcrgcggcagcggcagcggcgctggacgcagagctccaacaaactgcagaccaggcggctgcgcggagcgaagtgaaacctgcgcggccctgcagcccagctctggctggcggccccgctcctacgcccaatcactgcggaccccgcccccgctaggtcccgccccggcgcgcgggctggcaagctccgcccccctcggcgccgcggccgccggcgcgtgcaggctcggacaggtaaaggcgggggttgccccgctgggttgcctcccgcgcgcgccgccgtccctggcgtgtttaccggagtaactctgcctgctggcggccatgtgcgcgcccatcccccaccccgaagtgtaccctagcctcccgctcacctaccccaacccggcggcggccgcggcgtgcgcggc

SEQ ID NO: 281108 - DNA, 601 bp, Homo sapiens
cgccttcggtcctgacctggctggcagtaggccatgattcttgaaattcagtacagtgaracggcggaccaatgctaggcatcttccgcctggccgctgcggaaaatccatctgctgttaacgccaatgccaaggaacgccgcggatgcccttggttctggcagccactggaaggcagggataagacattcccggcggataggagagggagatgcaagtcagtgttttggaagctgcactggtgtatttttatttcattttccatggcttaggtgccaatgtatttttttttttattttcaggaaaaaaagctaccaaactaataagattgtttttctaaaactacacaagggcagagggacggctttcttttcttctgatctacacattgtactccatttttcaagttttcggccagtggtaaatttgtttcactccccaaatcacagtaaatccccaggttttcatggtttatttttacaggtttaacaacatcacttacaccagccccacctttgccctcacatggtggtcatgtctgagccgcactgatgttgttaagatcacagtttcccttgcagcagtccaaaacgccatttca

SEQ ID NO: 281109 - DNA, 601 bp, Homo sapiens
cgccttcggtcctgacctggctggcagtaggccatgattcttgaaattcagtacagtgagacggcggaccaatgctaggcatcttccgcctggccgctgcggaaaatccatctgctgttaacgccaatgccaaggaaygccgcggatgcccttggttctggcagccactggaaggcagggataagacattcccggcggataggagagggagatgcaagtcagtgttttggaagctgcactggtgtatttttatttcattttccatggcttaggtgccaatgtatttttttttttattttcaggaaaaaaagctaccaaactaataagattgtttttctaaaactacacaagggcagagggacggctttcttttcttctgatctacacattgtactccatttttcaagttttcggccagtggtaaatttgtttcactccccaaatcacagtaaatccccaggttttcatggtttatttttacaggtttaacaacatcacttacaccagccccacctttgccctcacatggtggtcatgtctgagccgcactgatgttgttaagatcacagtttcccttgcagcagtccaaaacgccatttca

SEQ ID NO: 281110 - DNA, 601 bp, Homo sapiens
cgccttcggtcctgacctggctggcagtaggccatgattcttgaaattcagtacagtgagacggcggaccaatgctaggcatcttccgcctggccgctgcggaaaatccatctgctgttaacgccaatgccaaggaacgccgcggatgcccttggttctggcagccactggaaggcagggrtaagacattcccggcggataggagagggagatgcaagtcagtgttttggaagctgcactggtgtatttttatttcattttccatggcttaggtgccaatgtatttttttttttattttcaggaaaaaaagctaccaaactaataagattgtttttctaaaactacacaagggcagagggacggctttcttttcttctgatctacacattgtactccatttttcaagttttcggccagtggtaaatttgtttcactccccaaatcacagtaaatccccaggttttcatggtttatttttacaggtttaacaacatcacttacaccagccccacctttgccctcacatggtggtcatgtctgagccgcactgatgttgttaagatcacagtttcccttgcagcagtccaaaacgccatttca

SEQ ID NO: 281111 - DNA, 601 bp, Homo sapiens
cgccttcggtcctgacctggctggcagtaggccatgattcttgaaattcagtacagtgagacggcggaccaatgctaggcatcttccgcctggccgctgcggaaaatccatctgctgttaacgccaatgccaaggaacgccgcggatgcccttggttctggcagccactggaaggcagggataagacattcccggcggataggagagggagatgcaagtcagtgttttggaagctgcactggtgtatttttatttcattttccatggcttaggtgccaatgtatttttttttttattttcaggaaaaaaagctaccaaactaataagattgtttttctaaaactacacaagggcagagggacggctttcttttcttctgatctacacattgtactccatttttcaagttttcrgccagtggtaaatttgtttcactccccaaatcacagtaaatccccaggttttcatggtttatttttacaggtttaacaacatcacttacaccagccccacctttgccctcacatggtggtcatgtctgagccgcactgatgttgttaagatcacagtttcccttgcagcagtccaaaacgccatttca

SEQ ID NO: 281112 - DNA, 559 bp, Homo sapiens
atgtctcacccctgttctcagcataagatgaccacatgctgttttttgtgaaaaatcccttacccaaacttgaaatgtcccttcattagcccctttcgtctggctaccttggtagagtctttttctccatccctttaatctgggctgagttatgacttgctttgccagtagaatatggggaacatgtcactgtgtgatttccagagtttaggccttaagaagctttgaatcccccattatcactctcctataacygtgagaatacctgctgtgcagaagcccagtctagcctgctggaggacaaaaggccacgtagagatggaccaaggtgccttggccaacagccagcacccactgccagatatgagagagaggccatcttggacatcctagtcctgttgaactcagatgactgcagccacaggagtgatcccaggtaagactagccaaagaactgtccaggctgcctgcccacagaataagtatcagtcattatcaccggttaatgcacagaaatagaaatttttaacctgactaagcaaaacaacaaataaactta

SEQ ID NO: 281113 - DNA, 527 bp, Homo sapiens
aatttgcagcccaaacataaccaggtacatagcctgctaaaacaaaaacatcaacattctccataggttttaaacaacatccagaatctcataacataatattcaaaaggtctaggaaataatccaatatttttcagcatatgaaggagaagagaaatgtagcttgcatgaaaaaggkcaatcaacggatgccaacagcaaaatgacacagatgttagaattatctggcaaaagctttaaagtagccattctaaaaattatctaatgaacaatcacaaaccgtcttgaaacaaatggtagaatagtaaatttcagtaaagaaatagaaaatacaggctaggtgtggtggctcacacctgtaatcccagcattttggggggctgaggtgggcagatcacttgaggtcaggagttcaagaccagcctggccaacatggtgaaacccgacctctacttagaatacaaaaattagctgggcatggtggtgggtgcctgcaatcccagctacttgggaggctgaggcatgag

SEQ ID NO: 281114 - DNA, 509 bp, Homo sapiens
atgcacatggcagttccctcacaacaaagtatctggccccagatgtcaaggttggcagtgccaatgttgaggtaagaaacttggtccttgagaaatgaagatttatgttcacataataatctgtacatgaatacttatagcagctctactcacaattgtcaaaaactggacataacccaaatgtccttcaaagggtgaatggaaaaacaaactctgctaatccacacaacggaccagtaytcagcaatgaaaatgattcactgttgatgaatgcaaccacttggctgaatctcaaagacatcatgcggagtgaatgaagtccatatcaaaagtttacagattgtatgattacatttatatggaattttgtcaaaaagacaaaattatagtgatgaagaataatagatcattggttaccaggggctgctggaagagagagagaacaattatggagccatagcataaaggattattttaggatggttaaattattctggttacatatacat

SEQ ID NO: 281115 - DNA, 429 bp, Homo sapiens
ctgaaaatcctagccaatgcaacaaggcaagaaaaagaaaacaaagccatggaaattggaaaggaaacaataaaactgttgctattcacagacaacatgcttgcttacatagaaaaaaaaaaaaacaacacacagtaaatgtcccccgrcatgccctaaatcctctagaactaataacgagcttagcaggttacaggatacaaggtcaatacattaaaacattgattatatttctaaatactagcaacatacaactagaaagcaaaacttaaaacaacatacctttttaccacagcttcccccaaaatgaaatatttagttataaatctacaaaaacatgtacatcatccttatgctggaaataaaaaatctggattaaagaaatcaaagaggaactaataaaatggatcggaagagtcaacatagtac

SEQ ID NO: 281116 - DNA, 642 bp, Homo sapiens
caggccagtgaaaaacttactctacacattgagtttaaaaaaaaaaagcaattaaaaagtgcccttgattctatttggacacatgtgcacagtgttttattcttctctgcctcccatgcaatggtgggggatagtcggtgcatgattaggaggttaaaccatattaactgggatttcctggtgttgtcctttacagtggaatgggtagagcttcagcatctccttccagaacttccagaagtgtctggccagctcttgtcctccccctgccaagatgttctgctgcaggctgttccctgagagttgcatgcatctgccacaccctttcagttgtaattgtgacaccagtgcagagagatatcaattcagggagcaaagcagacattatcctttccctcgattgtcatgagatgccccagttaggtgtggatcccgaggcacccatgacattgtcctccaaactgtgcctgcggccccaggtgatgttgctaaattatacatgggtagaggctttcagcagcgctgtttttccaccggagcacaaagcactgtgttacagsagggattttacatgtggatctccaggccccgcagaaaccgcagagctgcagggaagcaagtaactatttaactgagagggca

SEQ ID NO: 281117 - DNA, 1156 bp, Homo sapiens
ccaaatgccatcagaagcaagctctacatgtgcccgactgcctaagaggagcatatgagcgcacagatggcagcagtatatgaggacattacacctgctctgctccttgatacttcattgtcaagcatctaaataagtatctaaatggagaaccagctaggaagtacaaatcctggtgttcagaaaagcagcgagccgcccaggcgtggagggtgcaacgctttggggatgcctacccatgcgagtctagcacggcttgcgggtggggtgttccttcttgaatgatctgttctccatttcctctgtgcacagctctgggggcagatttcattkcagactgctttagaagacaggacagcaggagaggaaatcactagagacaaaagaaaattagaaggatttggtagaagtcatatataggaaactgagagcaaaatttggctctcggagactaaagttagtgggaggagagaacagggcctggccaagacttatcatttcaccatttaaatagagatcaagatgctaaagttcccaggagacatctcttttgtgacttgccaagagcacggagawaggatgaatcagataccaggcctattaccaaaaatcttataataataaagaggcaatgtcttacacaagaataagagcagaatttattaatgaaatgccataagaaaagcataaataaaacaaatcctgagggggttataacaggggagatgtctacttgggagatgagcagtttcattagaaaaaaataagagggaaaattacatttcagctagctgtgaatattgacatatcaaactggaagaaatagaaggaccaaaaaaagagaggctgtataaaggcaatatgtctgttaagcaagatatgttagcagaaaaatgggaggtaatattaaggaaacctagagactaggaggctgagttttaaacttttttccattactggggggagaccttataaagatgtatgtgcaggaaaccaacatgttcaaaattggacttcaagggcatcaatttgtawaaaggatcagagctaagaaagtctaaagcctacctgataaggtagctactgccatattccacttaaatgtcacctacactttggatttaaaggcagataccatattacatagaggtctaca

SEQ ID NO: 281118 - DNA, 548 bp, Homo sapiens
aatagcctccaattgcatccatgctactgcagagaacataatctcatyctttttatggctgtgtagtattccatggtgtataggtaccatattttgtgtatccactgcaccgctgatggacatcttggttgatatgtcttcgtttttgtgagcagtgctgcaagtgacatatgaatacatatgtatttttggtagaatgatttctttgcctttgattatacacacagtattgggattgctaggtcaaatggtagttctgttttaagttctttgagaaatcttcacactgtttttcagagtggctgaaataacttacatttctaccatcaatgtctaagtgctccctttcctccataaccttgacaacatctcttatttttctttttttacttttaaaaatagtaattttaactggttttagatcgtatctcattttggttttgatttgcatttttctaatgattagcgatgttgagcattttttcatatgtttgttagtgacatgtatgtcttcttttgagaaatatctgttcatgtcctttgcccac

SEQ ID NO: 281119 - DNA, 548 bp, Homo sapiens
aatagcctccaattgcatccatgctactgcagagaacataatctcattctttttatggctgtgtagtattccatggtgtataggtaccatattttgtgtatccactgcaccgctgatggacatcttggttgatatgtcttcgtttttgtgagcagtgctgcaagtgacatatgaatacatatgtatttttggtagaatgatttctttgcctttgattatacacacagtattgggattgctaggtcaaatggtagttctgttttaagttctttgagaaatcttcacactgtttttcagagtggctgaaataacttacatttctaccatcaatgtctaagtgctccctttcctccataaccttgacaacatctcttatttttctttttttacttttaaaaatagtaattttaactggttttagatcgtatctcattttggttttgatttgcatttttctaatgattagcgatgttgagcattttttcatatgtttgttagtgacatgtatgtcttcttttgagaartatctgttcatgtcctttgcccac

SEQ ID NO: 281120 - DNA, 549 bp, Homo sapiens
agctcataatctagcaacattctattcataatatatgtattctctaagatagtagaagctttctctctagctctcctcattactttcggagtcctcaccagaatcaacagtaatgtctgtgtgtccaagtattcccttcaaagcagtttagccttttttatcatgtgcctccaatcattaataggctctactcattacctttaatagaacacttttttttttgagatggagtctcactctttagcccaggctggagtgcagtggggcaatctcagctcactgcaagctctgcctcctgggttcaggctattctcctgcctcagcctcctgagtagctgggattacaggtgacaccaccatgcctggctaatttttatatttttagtagagatggggtttcaccatgttagtcaggctgatctccaactcctgaccttgtgatccacccacctcagcctcccaaagtgctkgaattacaggcgtgagccatggcatcagacctagaacatattttttgtataaataacaaatatctccttgtgtttaaat

SEQ ID NO: 281121 - DNA, 613 bp, Homo sapiens
gaacaaacagattttctgcagttcatttttagtcaacttgttaaaagtagtttatgaatttggcataataaaattttagttccaaattatagatacaattcaaaattttaaggtactggttgtgttggacaatatttgaacacttggatagagttaggatttcaaaaagatttcagcaacctaatgatacactggatagctactattccattttagcctcaagaggagaagcagtttattgtgtaataataygcccaatttttttgcagagattattttataaactgaaattaagttgtcttatttaaacgtgagacagttggataaatctaattaccaaatctaaattagcaaaattttccatttgatcaatgcataaagtcaaaaacatatgagaacctaaaaggacacacctattaaatactcatcaagggagtgtctaagctcattagtccaaaaggagaaagatatgctgagctgaatatatatatcagcataaaagcaaatctgaaggcatatttaagaaatgcatattgcaagtattttaagcactaataatgaaaatgataatccttttgtaaataaaggaattaattagaaataatacatataa

SEQ ID NO: 281122 - DNA, 601 bp, Homo sapiens
atatgtcaacatattcttttccttttcagaaacgaaacccaaaattatgagtctttctcaagctccaaaagctattatacacacagatccaaagctagaatacttctcacctgacacagatactattctgaatacctcaagaccatattgaaatcacayttaattgtgtgatatctcacctgtgtcattttaaatgctcatttgttaatataatgttattcaaatttacagaggtgtgatgggaagttagacccagggacaatccatgtgccttcaaatatatcttgttaagtgcttgtttatatatttaatagtaaaccacttaagagtttaaataaactcaatttggagaatttctggagaaacagcaggatgaggccagtaaacttgtttagaaattaaaaaacaaagattttgtttccctctgttcttgtttgttcaatgtagcaaactttacataatcagaaagagtaacatttttatgccaaagaaaagatggggcaggaagcatttatctcagaattaatcaaaagttttcttaaaattcaataaaatctgtctctcttttgttacatttagtatgttcataaggaattaatga

SEQ ID NO: 281123 - DNA, 1125 bp, Homo sapiens
aaatgccaagctttatctcctgtcatagtgagattttaaaagatgatagaatttttatgactacagattccaatatcctctcattgtagaatcatttaaaaataatttattattactttctatagtactacatatacccaatagatctacatgatgccaaaacagtttttaaatgtggaaagtttagttgactttttagtctgaatacttcaaacaatcaataataattaaattgtatccctttgtttgtactgatcagtgataccatcctggatacttcagaaaaataaacataaatattcaaacacttgaaaaaaagttttstacaacatatatcattaaaggtatattcctatagatatccatttccaagtatctttttctagtatgataatcccaagtatatttgctaatgccacatcatatgacactaagtcaatgtaaagaaatgtaattatttttactctctgattatggagtatacactgggattacgaatatactaataacgtttaatcaaaggtatttatagaagttagggttgcattttgcagaaaattataagacacacacatatacacaawaatgacagatcactatggtgaacattctgaaagcaaatcaattggtagctgcctcacattttgaaagtcagctgatctgtagtagattcactctcatcaacaaaatttaagaggtaacttcaatccctttttgcctttgaactaacacaaatacacttctacagcagaaatcaactgagtctttcctcaatagatatcacatttctggaacaaacattctccaaaatctctaagtttggctgggttctgaaataggtattttccaagaaatgtgaaggtattttctttttgtttttatttcaatccactctttggttgtgctctgggtcaaagctacagcagagtacatcaggggtgattcagatcttcactattcttattgactttctttgaaaaagctttcatttgcagagaaatctagtcttactgttcaaatgtcattcagaatgacttcaccatgtctttgwctttgagtcatttgtctgaatcctttgtagaggcagtgagcataaagatgcattttaaactcagaacaagtgcc

SEQ ID NO: 281124 - DNA, 538 bp, Homo sapiens
aaggaggaaattcagccatttgaccaatgttgatatgagggcattgaacaaatatggaattatgtgactatttttctttttggaatgcccaagtctcttagtggaggggaggagattatttaattaaaaaaaaaattggcagaatttttacaaaccatgaaggaagtttttccccatactcttattcctggcataactatttcagagaactttctagaaaaatagaattttgagcgtgaatatttaggatgtggtataaaacactttgcagcacacagaacattttcacactgttggggaacattgaatgtcatgccatagggagtggcttcagagaacagtatctttagamtctccagaaaataaataaaatgacacaaaactaatgtgcccaagtggtttggcacttacagattaataaaactggcagagattgtcctgtgctttgaaatgttatatgtaaatttaataaatagttcatgaaaaataacattaccaactggccttagtaatgtcttctcatgaaagattcctcaca

SEQ ID NO: 281125 - DNA, 614 bp, Homo sapiens
agatttgatatcaatactactgttttataggtactacttctgtacctataaaactccaggcaccactggcagagaaggaaagaagagaagcagcagctgggtgtcagagagaagcagcttgacttcatagggccagcttgatggtgggactttggagaagagtttctccagggatggccaaactccagggaaagaccaccttttcatttaattccctttccagctccccttcctgctgagagccacttccactgctaaataaaatcctccacatttaccacccttcaattcattcacacagcctgattattcctggatgtcagacaaaagctcaggtgccaagggagtgtgcaaaaggccatcaccrtcaccctccactgagcttttaaacatacaagccatccatggatggcaaagctaaatgggcacattgtatcacatgctcctggggctgtggggggtcacaggtattcccttagatgctgttgcagggctgcacagaattctactcctgccagcatccagaatcgcttttcctggccactgcacctgatcacctgtatctcccctcctgtgacacgttgagagctgtgggctgagtaaatgagccaacc

SEQ ID NO: 281126 - DNA, 611 bp, Homo sapiens
gatacaaatgaacattcttgcctagttaaacgagcttgcattccttgaacaaatacaatttgatttaaattgattatcttactttaaaaaatattgatggatttagttgctaaaaactcatttataattttaacattcatgacaaagattggcatataatattttttcttgtaatatcgcttcatttgagatcactgttatgtggctttttgaaacaagctggaaaatagattctcttttacttattctcagggagtagaagtaattcttactttcctattctctgcgtttaggtttttactttattaaatgtaaggatttactagtggaaccctctggccatggtgtttacttggtgaaaagaaattgaattgttaaattcattaataaataaaggtctaacatatttttaaaatttattcctttgttagttttggtaatttctgtactttttaaagaaatgtttttcttttcagttaaagtttcaaacttattggcagaaatttacttaaattctctcaytaaatttagtatcttgtagaatctctggtgctatcctttttacattcataatatgaaatatatttttctttttttctcttggtgcttct

SEQ ID NO: 281127 - DNA, 552 bp, Homo sapiens
ctgctgtttaactctccaatgtttttgttttaaaactatatttatcatttttaatttmgaaagatacagtcacttggtgtacaattctagtttatgctgttcagagttcctagcataatgcttttgctatatgaactactctacacatttgatgatttaatagtttattttaaaaaatataattactaaattgacttgtgtttgacatgcaacctagctgacagggtaatggagtgtttttcttattagaaaaaaagcgagatttagctgaacattataaagccatcaattctactgctctacttcttcatggttgtgaaaataatccttatgaagtcttgtatatattgactacaagagtagaaagatctgtagtttcaaagttttattaaagcaaataaatacataaaagcctgctttcgtgcatgaagctttctgttaaggctgactacaatactacaatactacatgtttaaatattacaatactacgtttttaaatactacaatactatgtgtttaatttgtgacaggcttacatttgattatagtc

SEQ ID NO: 281128 - DNA, 552 bp, Homo sapiens
ctgctgtttaactctccaatgtttttgttttaaaactatatttatcatttttaatttcgaaagatacagtcacttggtgtacaattctagtttatgctgttcagagttcctagcataatgcttttgctatatgaactactctacacatttgatgatttaatagtttattttaaaaaatataattactaaattgacttgtgtttgacatgcaacctagctgacagggtaatggagtgtttttcttattagaaaaaaagcgagatttagctgaacattataaagccatcaattctactgctctacttcttyatggttgtgaaaataatccttatgaagtcttgtatatattgactacaagagtagaaagatctgtagtttcaaagttttattaaagcaaataaatacataaaagcctgctttcgtgcatgaagctttctgttaaggctgactacaatactacaatactacatgtttaaatattacaatactacgtttttaaatactacaatactatgtgtttaatttgtgacaggcttacatttgattatagtc

SEQ ID NO: 281129 - DNA, 640 bp, Homo sapiens
tgctgcattgtacaggtcctactatgatgttagattcattcatatggcttaacttacatcctatgaaaatgtcctcctttttcaaatctgagagtttttcctctcttctgacccttgcagccactcacatattcttcttgcttgcaaggcagaatccagagactctcacaaggtaggcaagactttaaattgctcttaggaccaaacaactgtccttcatcaatcactactctattactctggtacctaaagatactgattaactggaaatgtttcttataaccaactattaaaagaaatgccatttcaaagagagaacatatcacttcagataacaaaacyagggcaaatgtatggtacctcatctgccttcaagtctctatgcttctactgcacagcttgttttctgataatttgtcacgccatgccttttgggatatagagctttaattctagctttctctctacctgggaagctctcctataagacagtttcctatttattagtaaaacctcagctcaaatggcatgtcatctaaaagccttccctaaacacctcctctccgaagtcccctggttactttctattatttcacactactttcttttcattaaatcacatatttgatgttttattgat

SEQ ID NO: 281130 - DNA, 640 bp, Homo sapiens
tgctgcattgtacaggtcctactatgatgttagattcattcatatggcttaacttacatcctatgaaaatgtcctcctttttcaaatctgagagtttttcctctcttctgacccttgcagccactcacatattcttcttgcttgcaaggcagaatccagagactctcacaaggtaggcaagactttaaattgctcttaggaccaaacaactgtccttcatcaatcactactctattactctggtacctaaagatactgattaactggaaatgtttcttataaccaactattaaaagaaatgccatttcaaagagagaacatatcacttcagataacaaaaccagggcaaatgtatggtacctcatctgccttcaagtctctatgcttctactgcacagcttgttttctgataatttgtcacgccatgccttttgggatatagagctttaattctagctttctctctacctgggaagctctcctataagacrgtttcctatttattagtaaaacctcagctcaaatggcatgtcatctaaaagccttccctaaacacctcctctccgaagtcccctggttactttctattatttcacactactttcttttcattaaatcacatatttgatgttttattgat

SEQ ID NO: 281131 - DNA, 596 bp, Homo sapiens
atggcataataaataacccatgtggttcttgtctcttatttagttgacacaataacacgtgaaacacaagcaacttctgaagatactttatttggactgctatttaagctgtttacaatactttataatactttataatttaataatgtatcaggtatttttagataacaaatgcagctaaatctactataccaaatagattattaaatttcactttgagtgaacttatgaaccagaaaatatagaattcaaccaaaatagaccactctaataagtttatattaaatataaacataaaaaacttttttatgattatgaaatctttattgcaaattttaaaattagccttgcaccagaaattactttgtttcaatatagtagaatattacttytaagtgctatgggaaatgatatttcacttcagttagagaaagttcagtgaactaaggtttaacaaggaaaaattaagtatggaaatctaaaaaaattagaaagatgctgtattataagaagatactacaataagagtaggtgaaattatagttctatttgaaaaagaggtaacaacgaaaagctgctatagaaggaaaggggaa

SEQ ID NO: 281132 - DNA, 611 bp, Homo sapiens
gactcactcactatcatgagggaaactatccccgtaattcaattacttcccaacgggtccctcccaagacacatggtgattatgggaactacaattcaagatgagatttgggtggggacacagccaaaccatatcaatctctatgaccagaaaagattcatttttctacatggcaaaaaggggagtttattagcatattaaagtaacacaattcacctaactagttaatatcttcgtgaattatttattggaaatactttggcaaaaacttaagagtgcacataagggttgtacagtaacatctgtcttttaaatttctacttagagaagataggtattcagacatccccataattttttaaatgcttataattagggagctggtgtggttgcacactcctgtagtgccagatactcagaaggctgagacagraagattgtttgagcccaggaattctaggctacagtgtgctaatatcacacctgtgaattgccactgtactccaccttgggcaacatagcaagaccctgtctcaaaagatcaaaaaacaaagaaacaaagtatttgtaattagacaaaaaggtatagtctaataaacatacttatacat

SEQ ID NO: 281133 - DNA, 620 bp, Homo sapiens
tttaaataaaaatgtaatatattattgttatgccttcatggaccctaaataatatgtttcaacatattttaaattcaagagtaagaatctaaaagaaaagtcaaatattgactgggttgttttagaatttgtgatggttaattttgtgtttcaatttgactgggctattgtgcctagttgtttggtgaaactctyagtctagaatttgctgtgagggtatattgtagatgtaattagcatttataatcagttgactttaagtcaagcagattactctcactaatgtggctaggctttatccaattggtgcaaggccttaagagcaaaaattgaggcttcccagacaagaaataatcctgccttatgattataacagaaatgctgtgtgagtactcagcctgcaggtctattctgtagattttggactcaagatcaattgttaccttctagcctgccagctgccctacaggtttttgacttgccagtccccatagtcatgcaagtcaattcttaaaaatttctctctttctctaaaataggatgcatatcctattacttctttttctttaaagaaacctgactgatacagggctcaatgcttatgtagggactatgggata

SEQ ID NO: 281134 - DNA, 625 bp, Homo sapiens
ttacatatatatttctaaataaacaggtgttgtgcaattttaattatcaatgagataaattacctttgttattttccattataaaattrtgaaattcttagtagaggaaaatataaaatatagactatttaaagcaaacagtgcaagctttaggctgtattttttcagtgattatattctatgcatttataaaatccaggtcatatcagagaggttaaggtcatcgtctcttgagttagactcctggactctgctggtatgagttctatatcctttggcaatgtacttcttctttctgtgcctttgtttcctcattattgaaatgatacatacaacataggtaggttatgttagttacattaatttatattaaataaatgaatgcatgtaatatgccttgtgtatattaagttttcaataaatgctagctagatattattgatattattgctaccctcacacaatatgtagcataatgtgtatttttaaaactttttacatattattatacatttggacttttctgttactctatactatcttcattcaaccattgttaatgatggcataaatttaaaaaatacattattgaagcccacaattttcacagcattattataatagg

SEQ ID NO: 281135 - DNA, 600 bp, Homo sapiens
gaagcgctcagagaataaccacgactttttggttctgacaataaccattgaaaggataaatattttagaaaaatatttccagataccaataaagaatgatgccaagaaatgaaactaaaatcaaacaaaatcttttactaaaaaaacattgacttgcactgttgagagtgaattcatgatagaagtagagagactaaagaaatgaaaaattaggcaatctttaattttagcaaaaagaaaagttgcataagaaagaaaatktaatttttatatactgaaagtctcaattatgaatgctcacacagataaaacaatgtatgcctgggataataattttaaagcactaactcttgggaggatggataaaagggaaatgggtgtagagataagtgctggccaagtgtaggaagctatattctcatctcctctaatacaaagtcaatagctaaaactaaaacagaaagttcacataatattatataagcattctacttagaaatatggaagtgatgattaggagaaatgtttaaaatagctgcctccatgaagcaagaatcagaagtggagagggatagggcaggtgttgcttgtcattgctgt

SEQ ID NO: 281136 - DNA, 231 bp, Homo sapiens
gtatttctgtagaggactgtctgagctactggtagtgttcactttaacacttaaagtccctgcctttacggtgaaagctactgtagtcttagggccaaacaagctaatatttggattatacacaaggtgtacagtcctaaatgcacacatagatccgtggaaataaaatagtacaatttctgggccctcgcctcccrcatcccaatatggggctataccagttggatgact

SEQ ID NO: 281137 - DNA, 588 bp, Homo sapiens
atataacaattataaatatatatacacccaacrctggagcattcagatatataaaggaaatattattagagctaaagagagagatagatccctatacaataatagctggtgacttaaacaacttaccttcacattagacagatcttccagacagaaaattaacaaagaaacatctcacttaatctgtactgtagaccaaatggatctaacagatatttacaaaatatttcattcagtggctgcagaatagacattcttttcctcagttcatggattattcttaaggatagactatatgctcggtcagaaaaaagtcttaaaacattcaataaagttgaaataatatcaaacatcttctatgaccccaatgaaataaaactagaaatgaataacaggaataattttggaaactatgcaaacacatgaaaattaaacaatatgctcctaaatgaccagtgggccaatgaagaaattaagaagaaaattgaaaaatttcttgaaacaaaagataatagaaatacaacataccaaaatctatgggatacaaaagtagtactaagagggtagtttatagctaaatgtgcctgc

SEQ ID NO: 281138 - DNA, 588 bp, Homo sapiens
atataacaattataaatatatatacacccaacactggagcattcagatatataaaggaaatattattagagctaaagagagagatagatccctatacaataatagctggtgacttaaacaacttaccttcacattagacagatcttccagacagaaaattaacaaagaaacatctcacttaatctgtactgtagaccaaatggatctaacagatatttacaaaatatttcattcagtggctgcagaatagacattcttttcctcagttcatggattattcttaaggatagactatatgctcggtcagaaaaaagtcttaaaacattcaataaagttgaaataatatcaaacatcttctatgaccccaatgaaataaaactagaaatgaataacaggaataattttggaaactatgcaaacacatgaaaattaaacaatatgctcctaaatgaccagtgggccaatgaagaaattaagaagaaaattgaaaaatttcttgaarcaaaagataatagaaatacaacataccaaaatctatgggatacaaaagtagtactaagagggtagtttatagctaaatgtgcctgc

SEQ ID NO: 281139 - DNA, 603 bp, Homo sapiens
aatatgattcaatggcaatgcattgttccaaagcaggtgtggctattgttgagtgaatggaaagtataatgttgatcaaagtagtcatgaaggacattaaagaaaaggatacataagattattttgatagaaataaaataaagaggagatgataataggaaacaagatagaaatcatttttctaaaggattataacattgytttaggatatggtctgtttcaaaggcaccatggtagaaagaaatgttcagttgaagaagttggactaaaaactcaagttgtaatttgaataagagagtaatcggtcactatgagcctatgctaattgtgtttggagagtagaggatatatgtaggtttaaagtcaaggctatggttggtgtgggtatttagggtgatcccctgtgtcctactggagtacattaagattaaaatgaacagaatggaagataaacttgcaaacatgatgggaaattttgtcaataaaaaaaggaaaggaataagagggtagtcatatggatcaacaaaatcacctagataaattcgcaataatggttattgctcaatcaacaaaataaactaaataaattagcaacaaataatg

SEQ ID NO: 281140 - DNA, 603 bp, Homo sapiens
aatatgattcaatggcaatgcattgttccaaagcaggtgtggctattgttgagtgaatggaaagtataatgttgatcaaagtagtcatgaaggacattaaagaaaaggatacataagattattttgatagaaataaaataaagaggagatgataataggaaacaagatagaaatcatttttctaaaggattataacattgttttaggatatggtctgtttcaaaggcaccatggtagaaagaaatgttcagttgaagaagttggactaaaaactcaagttgtaatttgaataagagagtaatcggtcactatgagcctatgctaattgtgtttggagagtagaggatatatgtaggtttaaagtcaaggctatggttggtgtgggtatttagggtgatcccctgtgtcctaytggagtacattaagattaaaatgaacagaatggaagataaacttgcaaacatgatgggaaattttgtcaataaaaaaaggaaaggaataagagggtagtcatatggatcaacaaaatcacctagataaattcgcaataatggttattgctcaatcaacaaaataaactaaataaattagcaacaaataatg

SEQ ID NO: 281141 - DNA, 585 bp, Homo sapiens
gtttctgacacatagatttcagcaaccaccaaccacatgagtaccactgagagttttaccagcgctgtcccgaggttaactatagtggcacttcctttcttctcaccaccatcttctttcctgcctcttcctacagataaaacagggtctatgatcctgtgccaatgcatttgaagcttgttgtcagagacattgtcaaggagaatttaaggtaagaatagattaaagaggagaaatataagagaataattgctatgcttcaaataacgctgaactcaatatctgctgttccttggggctgacacatttgatatgtggcttttattctattggatgytgctttaaactgaagaaacagaaaccagtatagatttgtttggattcttagcaagaatctccctccaggtggcaatggccagtctctttttcttctcacagttctgtgatggaggtttcctgaagggaagataaatggaccttctgaccaagctgagaagaaggggagcatatgaaagaacttgagcagaccatgtagcgttcttgaaacttgaaagggggctggggaaaggaaaactgggcaggaga

SEQ ID NO: 281142 - DNA, 585 bp, Homo sapiens
gtttctgacacatagatttcagcaaccaccaaccacatgagtaccactgagagttttaccagcgctgtcccgaggttaactatagtggcacttcctttcttctcaccaccatcttctttcctgcctcttcctacagataaaacagggtctatgatcctgtgccaatgcatttgaagcttgttgtcagagacattgtcaaggagaatttaaggtaagaatagattaaagaggagaaatataagagaataattgctatgcttcaaataacgctgaactcaatatctgctgttccttggggctgacacatttgatatgtggcttttattctattggatgttgctttaaactgaagaaacagaaaccagtatagatttgtttggattcttagcaagaatctccctccaggtggcaatggccagtctctttttcttctcacagttctgtgrtggaggtttcctgaagggaagataaatggaccttctgaccaagctgagaagaaggggagcatatgaaagaacttgagcagaccatgtagcgttcttgaaacttgaaagggggctggggaaaggaaaactgggcaggaga

SEQ ID NO: 281143 - DNA, 585 bp, Homo sapiens
gtttctgacacatagatttcagcaaccaccaaccacatgagtaccactgagagttttaccagcgctgtcccgaggttaactatagtggcacttcctttcttctcaccaccatcttctttcctgcctcttcctacagataaaacagggtctatgatcctgtgccaatgcatttgaagcttgttgtcagagacattgtcaaggagaatttaaggtaagaatagattaaagaggagaaatataagagaataattgctatgcttcaaataacgctgaactcaatatctgctgttccttggggctgacacatttgatatgtggcttttattctattggatgttgctttaaactgaagaaacagaaaccagtatagatttgtttggattcttagcaagaatctccctccaggtggcaatggccagtctctttttcttctcacagttctgtgatggaggtttcctgaagggaagataaatggaccttctgaccaagctgagaagaaggggagcatatgaaagaacttgagcagaccatgtagygttcttgaaacttgaaagggggctggggaaaggaaaactgggcaggaga

SEQ ID NO: 281144 - DNA, 522 bp, Homo sapiens
tttgtttaatacaagagattgcaaaaaatgtatgcaatgtctactctcaggaatgacacastaaaagattatgataccttggataaactgcatagctctcattaattttgataattcatgttggctagtagaacaaacttgtttaaaacatttaaagcactcttacctacacatggcttctaattttaagctgctataattttcatatacaatggcttacattatgctgaggatagatccaaggtttacaaagtagtggatgataatcacaaagttgatttgaacctcatcttttcttaagaaatttaaagactgtggttctaaaatatgaactgatcttcataatatcacaggtgtgcattgaatttttaaatttgaagtccatcaaaatatttctaagatcaaattgtctccctggaaatttgcatgcacattgctttacatactttcactgtatttgactccaattctcttaaaattatgaagaatgctattttaatcttagcagtagaaatcacaaaa

SEQ ID NO: 281145 - DNA, 1045 bp, Homo sapiens
tttgtttaatacaagagattgcaaaaaatgtatgcaatgtctactctcaggaatgacacactaaaagattatgataccttggataaactgcatagctctcattaattttgataattcatgttggctagtagaacaaacttgtttaaaacatttaaagcactcttacctacacatggcttctaattttaagctgctataattttcatatamaatggcttacattatgctgaggatagatccaaggtttacaaagtagtggatgataatcacaaagttgatttgaacctcatcttttcttaagaaatttaaagactgtggttctaaaatatgaactgatcttcataatatcacaggtgtgcattgaatttttaaatttgaagtccatcaaaatatttctaagatcaaattgtctccctggaaatttgcatgcacattgctttacatactttcactgtatttgactccaattctcttaaaattatgaagaatgctattttaatcttagcagtagaaatcacaaaawtttgtttaatacaagagattgcaaaaaatgtatgcaatgtctactctcaggaatgacacactaaaagattatgataccttggataaactgcatagctctcattaattttgataattcatgttggctagtagaacaaacttgtttaaaacatttaaagcactcttacctacacatggcttctaattttaagctgctataattttcatatacaatggcttacattatgctgaggatagatccaaggtttacaaagtagtggatgataawcacaaagttgatttgaacctcatcttttcttaagaaatttaaagactgtggttctaaaatatgaactgatcttcataatatcacaggtgtgcattgaatttttaaatttgaagtccatcaaaatatttctaagatcaaattgtctccctggaaatttgcatgcacattgctttacatactttcactgtatttgactccaattctcttaaaattatgaagaatgctattttaatcttagcagtagaaatcacaaaa

SEQ ID NO: 281146 - DNA, 1234 bp, Homo sapiens
agatccaaggtttacaaagtagtggatgataatcacaaagttgatttgaacctcatcttttcttaagaaatttaaagactgtggttctaaaatatgaactgatcttcataatatcacaggtgtgcattgaatttttaaatttgaagtccatcaaaatatttctaagatcaaattgtctccctggaaatttgcatgcacattgctttacatactttcactgtatttgactccaattctcttaaaattatgaagaatgctattttaatcttagcagtagaaatcacaaaatggtcccattcyattgatggttgttccttacaaaatttcatatttttaggcttcacatatcctttagatttcaagtttcatttaataacagtttgatctttggtttcaaggatctctttttagaattgttaaaatacctgagaggtcaaaccaaaaatttatatctctactcttcaggaacagaatcaaatggacttagggtgtaggcgtcccacagtaatggtaaagtcgcagaaacatggcaatgctgaattaccatgcagtctaaaattagtatgtaattggcttaaaatgaagacaccttggtatagcaacgtagtatwcacctttttgctttcaacttagaagaataaagaactatctgaagccctcctttgatctcattaatgttttgtctgttttttaaaaaattatatwtatccagcctatcttgagtagtcctagtttactcttgtattccggtgtaaccaagaattgtcctcatttttgctctttaaagtatcaccctattaggagagatagattatatttacactctattaatacattttagtgtgtatctgtgtatgtgttataaatatttgtacacatgcagtcagtgtgcatagttgttaccagtcaagcaatgttcaactacaggagttatatattaagatatttattgcaaataattggcttgtatgattatgagggcttggctgatcaagtacaaaattcacagggaaggtcaagaagaaaggcaggctaaaacctttctggtcatgactgaagctactgtcaacaggtaaaatttcttcttcattagaaaaatttcagctctgctcttaaggcatttcagaacctgattaaattaagcctgtccagattacctggaatatctcttttactcaaagtcaactggttgtgtactttaattacatctgtggattcccttcagagcaacacc

SEQ ID NO: 281147 - DNA, 546 bp, Homo sapiens
ctagagctgattcattaagggtgtttttggtaaagatgtattaccactcctctgctaccagtcaaaatatgatatgcaagtattaagacattttcagaacgtgaacactgttctctctgcattcgatgctaaattttggatgaacataaaaaactataagaaagtggtttatgtcctcagacagaattaaaaacaaattagaattccaaggaacacccacctgagaaatttgcgtaatgataactgttaagtaacagcacagtaaagacgagaacaaaacggttatcatcagtagaacatatcgtggaaaggaagggtatatataagaagtagaagggtaacttcatgaaagagaatgagttgaatcttttcatggaaaaaagggtagagtttgatgaaacaaagaggagtcgaagccttctggttggagggagacatattgtgcaggtgacgctgtccctagcagacctttgaactatgagtaggrcagcctagttgccatggatgatttgtgtacaaaagtagtaggtgatgaggttggaaaag

SEQ ID NO: 281148 - DNA, 620 bp, Homo sapiens
acaaggaagaatttcgggatattttgagcagtcactaagaataatcaaatgatttatgtcataattctgtctatttgtaacgggataatagactagaagagtgttacatattattacacacttgaaacaatatttactataaaaattcttaatggaaacaaaaggccaacaaaattttgatttcttgattatggcacaaaagagggcatgaaaatatttttcaaaacagatggcaatgtgtaggaaagtgagagaactcatccccagttatattttctaataaacaaatttgtacagcacttcaaagtttacaaaacacttcacacactttgtttattgttttcatatgtacccataatgtgcaagaaaatcagcccacaggattttttttcataattattccctcatataggaagcaattgatgaatggaagtggataaaatccaggaagttcarcccaacaagatacttgtctacagtttactcttcaagagaaaacactggcatagatttaggagcaaatgtattgtcatttttcttaaaaagatagcacagaataaaattacagaaaaacatcaagcacagaaaataagttaataaggttgtatgttttccttatt

SEQ ID NO: 281149 - DNA, 525 bp, Homo sapiens
cagtgatgatttccaggtattttaattttctaattaaatataatagctgttaggatacctttatcatagactgttaatcatctaaatcacatttagactttctatacagttttagttaacacattttaaactttttcaaaagggatttgtagagacaagtcgrtcatgtcatgttccttccatatttataattctgatagtacatgatataaatgccttaaactatttccgaactgaaagctaaataagcaaaaatgtttactatgtagcattctagtgacttcaaactttcttaatcacatcctataaataagaaatactttttaaatactgaatcagtacacacatatatacatgcacacacacacagagcacatacatataatgtatactatacaaaagtaaaaggtttccaaaataatatttaaactgatcacattcaatacattctaatattgtctcctcttttctattatggaacattgtttaaatgctgtagagattcactaaatatatgctaagact

SEQ ID NO: 281150 - DNA, 566 bp, Homo sapiens
ttttttgagttccttttcaaggctgtccttggaagtttcagaaacaacgaggaccagggtatttttcctaaatgtaaacatgtaactgtgtttgggagaaagcaggaaccattgaggaaaggaagtcctttctgcgcccctctcttctctctttcacggtaattaaccatactcaaatgaaaattaagtttggcggaaaaagctctcttctttttctttaaacaggggcatcatggttcattctagccatttagagccctcagtgatccataattcaactggaaattaataaaacacagcccgttcttggaaatgaagtttgaattaaaatcctcttgttttggaatatgtgactttttttttcctttcatttgtgacagtcaattttaaatgatgtcacttcaaggacattttcatttctcccacaacatattacatgaaacacttgcctgtaaaaccggstcattagcctgcaaaattatactgtacagaatggctttcattcaaagtagaaatgggatttttagtaggcaatttctgtattttataaagataaagcaatgttt

SEQ ID NO: 281151 - DNA, 509 bp, Homo sapiens
gcagtatttactgaatatttatcatttgcaaggagctgtgctagccagtgttccaacaccaggtgagccagatatgtttctctgtattttcaatagagcaaaaatagaaggaaataaaggatgggaaaacagaccttttgacaagaaatgtagatatgcttctttctttagaagtgtattattttattctagagattttaaagcaagattatccataccagatatttgcagtggtgcagcctacctgcctttaacactagtgaatgattcaatgtactgttaagtgtaattcacgcattgaatctgtccttagagtgagagatctcactttctgtggctcatgtgaatggagacttagtgttaatatctaccaaagctagtgtcttgggttgccgctgattttgtgaacagctgccaacttccaattggggaaaaaaaaagtgttctgatttattcccatgacacamggagagaataaaaatcacataactattttaaacataccataa

SEQ ID NO: 281152 - DNA, 549 bp, Homo sapiens
gctcccccttttaaaaccacccctggagatctgggcatagccatgaacctgctcacacagaagggctcagcacagagactccctgaaaagtcaagttatcctcagcagtatgtgacccttcttgagttgcatcctcattgtcagggtgagggatagatgccatggtccattgttgggatatctgcagcgtggagtttcttcctctccaaaaatgatgataatgtggtcacttcaggggtttcaaggatttctggtgaacaatatctctatggaatatacaacrattttaggtgcagtacaaataaaggatttgacaagaataaaaacaacactttatataaattacctaggtttgctaaagagtcaccttatcacttacacaggtgtggtgttcatctttaaccattgatcctttttcagtagcgattggtttcattgccctatgtatgaatagacagagttgctcaggtctgttcctgtcccatttttctcatttgaaactatgatgtttccctccaaacacctgttgtggtcagtgctaattccagg

SEQ ID NO: 281153 - DNA, 532 bp, Homo sapiens
ttttcacaaagctctaaaacaaccattctgccaagaatttttgttgtgttgttttttacgaactgtgacttttcctgttatgttttaatcagatgtgaacaaaaycaaatagttgttagacacttttatacagggattatcttatagatttctgtcaagcatagccaacctgaatctttcttgtatgtcttctaaataactgcataaatatactggtgttcaaataaacacgagaggaaaagaagcaaaagataagatcactggcaaagacataagagattcaaaggggaaaactgcaaaatattgtagttcttggccaccatcaattctggcatagggcaatagctttgttaggctagagcctgacatgattctcaccaaatgtgtataaggcccagtgcagcaggggtctcaaaatgtaatcaatgtgttttcagtgttcccagggtatacattgtagatactggagatatagaaattgttcagctcgggagattccatatgtacagtaaaagcattctaactccagagc

SEQ ID NO: 281154 - DNA, 532 bp, Homo sapiens
ttttcacaaagctctaaaacaaccattctgccaagaatttttgttgtgttgttttttacgaactgtgacttttcctgttatgttttaatcagatgtgaacaaaaccaaatagttgttagacacttttatacagggattatcttatagatttctgtcaagcatagccaacctgaatctttcttgtatgtcttctaaataactgcataaatatactggtgttcaaataaacacgagaggaaaagaagcaaaagataagatcactggcaaagacataagagattcaaaggggaaaactgcaaaatattgtagttcttggccaccatcaattctggcatagggcaatagctttgttaggctagagcctgacatgattctcaccaaatgtgtatraggcccagtgcagcaggggtctcaaaatgtaatcaatgtgttttcagtgttcccagggtatacattgtagatactggagatatagaaattgttcagctcgggagattccatatgtacagtaaaagcattctaactccagagc

SEQ ID NO: 281155 - DNA, 532 bp, Homo sapiens
ttttcacaaagctctaaaacaaccattctgccaagaatttttgttgtgttgttttttacgaactgtgacttttcctgttatgttttaatcagatgtgaacaaaaccaaatagttgttagacacttttatacagggattatcttatagatttctgtcaagcatagccaacctgaatctttcttgtatgtcttctaaataactgcataaatatactggtgttcaaataaacacgagaggaaaagaagcaaaagataagatcactggcaaagacataagagattcaaaggggaaaactgcaaaatattgtagttcttggccaccatcaattctggcatagggcaatagctttgttaggctagagcctgacatgattctcaccaaatgtgtataaggcccagtgcagcaggggtctcaaaatgtaatcaatgtgttttcagtgttcccagggtatacattgtagatactggagayatagaaattgttcagctcgggagattccatatgtacagtaaaagcattctaactccagagc

SEQ ID NO: 281156 - DNA, 532 bp, Homo sapiens
ttttcacaaagctctaaaacaaccattctgccaagaatttttgttgtgttgttttttacgaactgtgacttttcctgttatgttttaatcagatgtgaacaaaaccaaatagttgttagacacttttatacagggattatcttatagatttctgtcaagcatagccaacctgaatctttcttgtatgtcttctaaataactgcataaatatactggtgttcaaataaacacgagaggaaaagaagcaaaagataagatcactggcaaagacataagagattcaaaggggaaaactgcaaaatattgtagttcttggccaccatcaattctggcatagggcaatagctttgttaggctagagcctgacatgattctcaccaaatgtgtataaggcccagtgcagcaggggtctcaaaatgtaatcaatgtgttttcagtgttcccagggtatacattgtagatactggagatatagaaattgttcarctcgggagattccatatgtacagtaaaagcattctaactccagagc

SEQ ID NO: 281157 - DNA, 544 bp, Homo sapiens
ggactaattttcttaaaaatcgatattattatctttcaagcaaaaatagggatgcttttgttctcaagataacaggattttaggacaatcccaagtctgggtctgtttagtaaacattatcaatctgttcccttaactgtaaacatctagaggctaggaatgcctaactttctgggaatgcagctcagcaagtcccagcctcattttcctagccctcactcaaaatggggtcgctctggttcgaacgcctctgacatgtccagttatgcaayaacttaatttttttcaaaaatgggtgtaattttctctatggtggctttatgccttttgattcctaggctcattttcaggaaataagatctccctattgaatggtcttggtattgacattcttgatgtaagttggaaccgtggaaaccctaatgaaatagtatgacatacaaccaggccattaaatgccaattccattttggctggcaagcctggttgagattacccgaaaacatctccttaaggtagtccatagctacaacaggaggagcag

SEQ ID NO: 281158 - DNA, 384 bp, Homo sapiens
attgcagaagactttctaatctccgtatttatacttagaatttaaaaatattctgaaggtcaagaaagaagtaggcaaatccccaggacagacccagcccttatgctcctcacaacctgcctactcttggcttttgcaaccttgagttcaactacygtcacttcataccacctgtcgctccccacacatgctgtgtgctttcctgctttgttccctctcctaggctgcagcccctcaccctctgccaagttctagaagtgcacagcattcctgaaggcctggttcaaataccatctcttctgggaggcaggcagagctcgtcactccctcctcagcacgcccacccctgacactgagcactcttgtccactacctaatttgtca

SEQ ID NO: 281159 - DNA, 384 bp, Homo sapiens
attgcagaagactttctaatctccgtatttatacttagaatttaaaaatattctgaaggtcaagaaagaagtaggcaaatccccaggacagacccagcccttatgctcctcacaacctgcctactcttggcttttgcaaccttgagttcaactactgtcacttcataccacctgtcgctccccacacatgctgtgtgctttcctgctttgttccctctcctaggctgcagcccctcaccctctgccaagttctagaagtgcacagcattcctgaaggcctggttcaaataccatctcttctggkaggcaggcagagctcgtcactccctcctcagcacgcccacccctgacactgagcactcttgtccactacctaatttgtca

SEQ ID NO: 281160 - DNA, 384 bp, Homo sapiens
attgcagaagactttctaatctccgtatttatacttagaatttaaaaatattctgaaggtcaagaaagaagtaggcaaatccccaggacagacccagcccttatgctcctcacaacctgcctactcttggcttttgcaaccttgagttcaactactgtcacttcataccacctgtcgctccccacacatgctgtgtgctttcctgctttgttccctctcctaggctgcagcccctcaccctctgccaagttctagaagtgcacagcattcctgaaggcctggttcaaataccatctcttctgggaggcaggcagagctcgtcactccctcctcagcaygcccacccctgacactgagcactcttgtccactacctaatttgtca

SEQ ID NO: 281161 - DNA, 982 bp, Homo sapiens
tgccatttaggaaccactgtattccaaaaaatgacactgagcctcttacttggagaaacatgtttgtgcttagttgtcccccctgtactctgctttctctggccttacagccatatgctttctccattttattttctgttcatttcaaacaagtattgcctatcctacacagagaagaaagagcttgggggtggttattctgacaagacattcagggatagagaagctcttttcccctggcattcatttcttgtgtgtttcttttgagtaattaaacacagaamggtcacctagcatgctggcaataacaggaaatgggaggggggaacataaagtaaaagcaaacaatcaatatgaggaagtcaacactatgtttttgtttttcttccagtttctttaaaaagggawaaaactttcacccttcagatagtgaaaaaacttattgagcaactgctgtgtgactggctcttgtatcaggtactaaggatgctaagatgaatgccctcaggctgtggaggtaaattctgtgtgtcttcccaccagctggatcagaagaccgaggttcctgactaagaatgtcacatgaggctttccctctttcttcttacttcctctgattccagaatgatgttttgagcacagcatgttcacctctttacagagtaagaacagcttcttgtctttagggtgcaattttaaagagaaatgtcgctacwttttccctgccaattttgaacactagactatggtttctccaaatttgatgctttatcacattccaggtagtataatctttatattatcaacgtgtacactcccttgcttttcctagctgtgcctttttttccttcctggaatttatatttctgtctcccatctgccagcctttcccataaactctcaggcacagaatttatttcaattttctgtaatctcactttctaacaccaataaataatccacctatctctgtgaggccctg

SEQ ID NO: 281162 - DNA, 575 bp, Homo sapiens
ttttcctagctgtgcctttttttccttcctggaatttatatttctgtctcccatctgccagcctttcccataaactctcaggcacagaatttatttcaattttctgtaatctcactttctaacaccaataaataatccacctatctctgtgaggccctgctgaccttttgcttctyaccaacttgatattttttactttctgtctttcgtttttacatattttcactttggttctctgatctggcctcctttcccccagttttgcaccctggctatctggtggtggcttctcagcccctaccttgtacttcttttcctttgcagggatccccagctgcaagctctttcactaccatctgacgtgtcctctgtgctcctgcttttctcatcagggctgctgtctgcttagcggcttgggttgaagcttctcttggaccctggttcgttcgcctgctgtgcccttctcctcttgcttccctggcctgtactcactgaattctcttcttttatctgactcttccaaatggggaatttgcagaaattggaaagcatctttacccagccagcaccaccat

SEQ ID NO: 281163 - DNA, 575 bp, Homo sapiens
ttttcctagctgtgcctttttttccttcctggaatttatatttctgtctcccatctgccagcctttcccataaactctcaggcacagaatttatttcaattttctgtaatctcactttctaacaccaataaataatccacctatctctgtgaggccctgctgaccttttgcttcttaycaacttgatattttttactttctgtctttcgtttttacatattttcactttggttctctgatctggcctcctttcccccagttttgcaccctggctatctggtggtggcttctcagcccctaccttgtacttcttttcctttgcagggatccccagctgcaagctctttcactaccatctgacgtgtcctctgtgctcctgcttttctcatcagggctgctgtctgcttagcggcttgggttgaagcttctcttggaccctggttcgttcgcctgctgtgcccttctcctcttgcttccctggcctgtactcactgaattctcttcttttatctgactcttccaaatggggaatttgcagaaattggaaagcatctttacccagccagcaccaccat

SEQ ID NO: 281164 - DNA, 397 bp, Homo sapiens
aataaatataatatgggttgtactttgacacaatgtaaaatcccattcctcatttagcttttacccacgattctttgtttttttttttttttctatttcccagccaaggttttttatttttttttaagttctggggtatgtgtgcaggaygtgcaggtttgttacatgggtaaacatttgccatggtggtttcttgcacctgtcaaaccatcagctaagtattaagcccagcatgcattagctatttttcctgatgttctccctttccccgccccttcccaacaggccccagtatgtgttgttcctctccttatgtccatgtgttctcattgttcaggccccacttatgagtgagaacatgaagtatttggtttcctttcctgtattagtttcctga

SEQ ID NO: 281165 - DNA, 547 bp, Homo sapiens
taccacctccctgcattaaattctgtctgttggaaatgcttgaagaagttgatgttttcctggctagactttcatttattctcacattgrgccactgcagcttctatcagcattttctttctcctcaagtcaacatgagcttgcatttatcagagaaacttagttcatgaaacagaaccccattaaaacttttgaaacaaaaatgtaaaaaagatacagtcattaaaaagataaaagagcagcatgtattaccaataggcaagaagtacgactaggaatcatgagagagttagactagaaagttcctccccttcatcttttctttctgcagaagagagtaaatacgacagaaagcagtaccctcagccccagtcctacataacttcccaaacccagtggccaagatgagctacctagatctccattttcctgttatcaagctctgcttgtttcaggtgtctaagcttcatgtaatcagctgtaaacaggagtggggtgtggatgaggtccagactctgcagctggctgagctggagagggtggggca

SEQ ID NO: 281166 - DNA, 615 bp, Homo sapiens
aaatttgttgcagaatgattgctatgaaatgcctctttttctttactaccatggtagaagattcttataaattttcttatctttttgatgaaaagaaagtaatgtatgagactcttccttattactcaaaggtgttttgagcccatggtcctttcttgtggcttaacatcagcatgtaccttgccacagcaggggtggatgatacatatccacttaccttctcactggcgtttgtggtttaatgttgaattcctactccaggggaacttactagtagaagatacatccatgggttccaaggcttcccatgtcgttcycttttggtccctactccgctctctttgtctatagtgtcagtgtctatcctcttgtcccagcctatgaggtcctccagtttcccatacagtttccttttagcattttcaggtgatagttgcctcttcatcttatcaataattggaatatcagcagaccctctactcttaaactaatttaccaggacagtgcgttcatcattttcagcgttgaattttttggctttcacatcactctgatctgcacttctgtgtatatgaaccatagttggaagtcagatatggctctgaggtcagtcat

SEQ ID NO: 281167 - DNA, 615 bp, Homo sapiens
aaatttgttgcagaatgattgctatgaaatgcctctttttctttactaccatggtagaagattcttataaattttcttatctttttgatgaaaagaaagtaatgtatgagactcttccttattactcaaaggtgttttgagcccatggtcctttcttgtggcttaacatcagcatgtaccttgccacagcaggggtggatgatacatatccacttaccttctcactggcgtttgtggtttaatgttgaattcctactccaggggaacttactagtagaagatacatccatgggttccaaggcttcccatgtcgttcccttttggtccctactccgctctctttgtctatagtgtcagtgtctatcctcttgtcccagcctatgaggtcctccagtttcccatacagtttccttttagcattttcaggtgatagttgcctcttcatcttatcaataattggaatatcagcagaccctctactcttaaactaatttaccaggacagtgcgttcatcattttcagcrttgaattttttggctttcacatcactctgatctgcacttctgtgtatatgaaccatagttggaagtcagatatggctctgaggtcagtcat

SEQ ID NO: 281168 - DNA, 538 bp, Homo sapiens
cttaaaattattccacgggttgaatagaatttttaattggtgcagttgacagtgagatctcaatcaataccatacattgaagaaaaagaagaagaagaagaaaagaaagaaaaataaaaataaaagcacagctttgttcaggccactccttatcttgcctcatgaacttccatctcaagtcccacccgcagaccttatttcattctgacactgctcatggctttcactaacttccccctaactcyagctgttgatctgtcattagtaaatctcaacaacattccaacctgttagaaaaaaaaacaataaggcagaggctcaggtacccctaaagtctggagtcataagaaaattaaaaatctgtgagttcagaggacaggggtaaagtgtatatggaaagaggagggaaattctccacagatgggactgttttatctgatgcatcctggagttctgagaggtgttgctaaggcctcccagaggttgctcttggctcctcctaatgccagggtaggcagctcagctctcctatgtgtat

SEQ ID NO: 281169 - DNA, 518 bp, Homo sapiens
atgtgagtcagtagagatgggaatgttgattgatttgtacaaacatgtgtaaacagtactcttaaaaacaaactcactcttcttatactgtgaagaaaatatgaattcttcacattggagagactgggacatgaagcccaacctctcgcattgagttttatcatttggaaagcgctaagaatatccttgtccaatttcctcatattaaaatggaggaccctgaggcccagagaaatgggaatgatttgactaaatgcacagagttaattaatggcagaaactataagtattgattttaaaaaaataaaaacaaaccaaaaacacctatgaggcttctattaggcgcctagatggagtgcaatttctgaagcaaagtcataaaagacagtgtggtttctagcttgtgtgcttggatcactggcactggggacagtgttaaagctcatactgggagccaagtataccaaggtgagcaggagcaacagtgcrtggtgacctccccctcctggaagcatgtg

SEQ ID NO: 281170 - DNA, 535 bp, Homo sapiens
ttttccaaaatttccgatcctgaggacagtattgtatgttttggtgtggggctgtgtgtgtgtgtgtgtgtgtgtgtgtgcacgygcatgtgtctatctcagtgtcctcccagccaacaatttccattgagcctttagtgactagaacatgaggctggtagtgaggagagttaatgctgcatgctccactcaagatgaatggctgaattattgtgacattagcaaacaagtaattcgtttcccatgtcattgttcctcatctcaagctggttagccaagccttttcaaaatcctgacttgttcaacctgataccagttacagtccatttcaagctcttctgtataaaatgcaatcttgtcaaagggaagacacctgctcccagcaggagggttgctcaccaactgccaaagcctttgttacagtgtctagaaacaaaatgatctttccatctggaatgtgtctgccaccataactgcctgccttgagttgactgccaacctgtggtaccagaacgagacagagaaacatgagcag

SEQ ID NO: 281171 - DNA, 535 bp, Homo sapiens
ttttccaaaatttccgatcctgaggacagtattgtatgttttggtgtggggctgtgtgtgtgtgtgtgtgtgtgtgtgtgcacgcgcatgtgtctatctcagygtcctcccagccaacaatttccattgagcctttagtgactagaacatgaggctggtagtgaggagagttaatgctgcatgctccactcaagatgaatggctgaattattgtgacattagcaaacaagtaattcgtttcccatgtcattgttcctcatctcaagctggttagccaagccttttcaaaatcctgacttgttcaacctgataccagttacagtccatttcaagctcttctgtataaaatgcaatcttgtcaaagggaagacacctgctcccagcaggagggttgctcaccaactgccaaagcctttgttacagtgtctagaaacaaaatgatctttccatctggaatgtgtctgccaccataactgcctgccttgagttgactgccaacctgtggtaccagaacgagacagagaaacatgagcag

SEQ ID NO: 281172 - DNA, 535 bp, Homo sapiens
ttttccaaaatttccgatcctgaggacagtattgtatgttttggtgtggggctgtgtgtgtgtgtgtgtgtgtgtgtgtgcacgcgcatgtgtctatctcagtgtcctcccagccaacaatttccattgagcctttagtgactagaacatgaggctggtagtgaggasagttaatgctgcatgctccactcaagatgaatggctgaattattgtgacattagcaaacaagtaattcgtttcccatgtcattgttcctcatctcaagctggttagccaagccttttcaaaatcctgacttgttcaacctgataccagttacagtccatttcaagctcttctgtataaaatgcaatcttgtcaaagggaagacacctgctcccagcaggagggttgctcaccaactgccaaagcctttgttacagtgtctagaaacaaaatgatctttccatctggaatgtgtctgccaccataactgcctgccttgagttgactgccaacctgtggtaccagaacgagacagagaaacatgagcag

SEQ ID NO: 281173 - DNA, 586 bp, Homo sapiens
gggcaatacttttgaagtaaaagggggaaaatggcttcacttttagtttggaaaggaaggtaggctcccagagcaaggttgcatgaatagctctcaagtatttagagatatgtaatcctttcaaggtacataaacatgtatgcacacatgcatacacactgccactgtagctggatgcagcagattagagatggtggcaagttctttcacaggcttcttatggagaggtggtggctatttgccctccccgtgaatctgggctggcctgtgagtgtttcaccaatagagtatagtgcaagtgaatctatgttagatgtaagcctagcctttaagaggactggtagccactgccttggcttctttgagcactgtgcctgactagtaccctgtttgagaaagtttgtggagaggctctgakcctacatgaagaggaagaggactgaggcatgtggagtgaagcccgtagaccctccagcccagcccagtcaccacttgaataccagcgaccccagtcaactccacatgatgcaaagaaatcagccaattcttgacccatataaaatgatccttattttaacttatcatg

SEQ ID NO: 281174 - DNA, 514 bp, Homo sapiens
tttcagaataaatcccaaagttctcaattattagtctctgttagaactattttctcctcattttctctttctgtttccctgctaaaattagcatttctaccagggctctgtagttaacttagtacaccrttccagctctgagtcagatgccaagaacaccttttctgtctggctgccagggtgcctgcattgatgtactatgctgaggacatcaatatgatgttcagtgatgcatagttgtttctattctaagggatatatttgactgtttatagagcagcaagaaacagcctaatgctcacctgctgacaaaatgaacatggataagatgcttctagatttctggtatagatgcttgtgagcagtgatgagctaagttgaggtgtggcttatagcaggcaggaactcactgaatctcagattctcagatgaccttttcatctgggcaggaagacaactttccttagctgggcaaaagtaagaagggttcaggaatttgatgtgtcaaattcac

SEQ ID NO: 281175 - DNA, 591 bp, Homo sapiens
cctgggcctgggcactaggcaccctaataccactgtcttggggtctacagaaattcatcactccagccactgccgccaaccataccatccagacttaacacttcatggtgcccacttctttgagtcattagttcttaatttaaagtcttcagtagtaaaattttataggcaaatcctaggtaacttgttcatggcctagatgcaaaggatatcagggaartagactggggcattttcagctttcaatagaggaacttgggctttgactccaaaagacgcaccctgtggaaaattccccagcacagaaagagagtttaggttctgagtataaaaatatttacaaatgtctttgcaagatagcttggacatgtttggtgatatgttcaaggcaaaagcacaaactgaaatgaaaaaaaaattagaaactccaaggaaaacaaaagaaggagagtaatggtccaaccgtgaagcaaagtcaaatgtaaattgattttatagaattaattgagtataatgggaaaacacacttttagctttgatgctagaaacttttcctaccaatgactcaaggatcccaaggtgagacctaca

SEQ ID NO: 281176 - DNA, 1110 bp, Homo sapiens
agaaacaaatctaatagaatttagatctattagatcaaatctacagaaatcatctacagaacaaagctaatagaaatgccttattgaaaacaagaatggattcttatatgtgtgactccatacacctctacccaaaccctaaatttaaaattcttttgtagcttcaaaagggaaagtgtcggttggatggctaatggcagagtatgtaaagttgtttcagtaaaaccattaaaggaaacctgggaacaatattttgattgatttagcacaataaacaaattgcactgatatgcttctgaattgctactatcatgatctttagcagttgcatagtgtaaatcattagtcaatcaagcactcaatctaccatgtgaacactaacaaaaataggctagatatgataattaggtgaaagtctgatcattcatgaaaacgaaaacaggacttctctcaactgtgtggttgtatatggccatcttggtcctcatatactgcaccagctgttattccattactgtaaatttcccctaaagcattgatayattcttcaactcataataagtttctacatctaagacatgaaaagtattatgactgggtttagawtgatagcaataaatgttgctaaggggctgcatttcccttcagaataatgtctgagaagtgttaccacagcaagcatgccaagtcaaagtccagccagggtgaatgggaaaggagtattcccaaggaacagcctgagacagggttccaggtattgaaatattcagatttgaagcttctggaagccctttcagtgaccgcagatgwgtgtgtatgtgtagatggaggagaggaagggcggagagaacaatgttttctacgcttcaatcttttgcctttaaaaaataaatttatagactttatcttttagagtagtttttaagtttacagaaaaatgagcagaaactagagagttcccttacacccactcaccacctgctcccattttccctattattaacattttgcatcagtgtggagtatttgttgtaatcgataaactgataatgatacgttgttatgaattaaagtctatggtatacattagggctcactctttgttttgta

SEQ ID NO: 281177 - DNA, 594 bp, Homo sapiens
agtttgaatgttttcagtgacaaataggaaacctccaactcaacagtcttaaagaataaggaaaaaaaatcttacaaacaaaatgttacacagtagagtagctctcaggcttgctaattcttattaaaacctttccttgaagacttccagtgggcctcttctcacatttcattggccaggactggcatccctgcccacttctaagcctgtttctaccaaaggaagtctrcatcacttgcttgggcaattcagaatgtacctgtgacttgtgagaagaaggagaggacacccaaccaaatctggtccccatcagagaggaagaagggccattgatacccagggaccagccaaagtgtctttggtatattcgtgaaatttcctaagattgctactatttatgctaataattattctaggatgcttaatttctttttcattgcctgttattttatagccctatcttaaaataaataacttcatttgtttgtgtattttttaacatgaagcaagaaaaatttttagtgagaaaaggaaaataggcaaacagcaggaaagagttttcatattctgacttctgattgagtgtgacaaaag

SEQ ID NO: 281178 - DNA, 582 bp, Homo sapiens
atccaacaatcgcacattttagtatttacccagagkagctgaaaacttatgtccacgcaaaaacttgtatatggatatttatacagctttgcttataatggccaaaacctggaagcaaccagaatgtccttcagtaggtgaatggataaactataatacattcggaccatggaatattattcaatattagaatgaaatgagctatcaatctatgaaaagacatgtgaggaaattaaatatatattattaagtgaaagaagccaatataaacaggctatgtactgtatgattccaaatatgacattctggaaaaggcaaaaccggggacacagtgaaaagatcaggggttgagaggggaaaaaaggagggatgagtaatcagaacatagaagatttttttaaggcagtggaaccgctctgtataataccataatagtggatacgtgtcattatgcattcatccaaactcctagaatgtacagcacaaatagtgaactgtaatgtaaatgcagtgtgtaggtgtttatacaaaaaaacagatggaaagattttgtacatagctctatgtgaaaatgtatttatt

SEQ ID NO: 281179 - DNA, 582 bp, Homo sapiens
atccaacaatcgcacattttagtatttacccagaggagctgaaaacttatgtccacgcaaaaacttgtatatggatatttatacagctttgcttataatggccaaaacctggaagcaaccagaatgtccttcagtaggtgaatggataaactataatacattcggaccatggaatattattcaatattagaatgaaatgagctatcaatctatgaaaagacatgtgaggaaattaaatatatattattaagtgaaagaagccaatataaacaggctatgtactgtatgattccaaatatgacattctggaaaaggcaaaaccrgggacacagtgaaaagatcaggggttgagaggggaaaaaaggagggatgagtaatcagaacatagaagatttttttaaggcagtggaaccgctctgtataataccataatagtggatacgtgtcattatgcattcatccaaactcctagaatgtacagcacaaatagtgaactgtaatgtaaatgcagtgtgtaggtgtttatacaaaaaaacagatggaaagattttgtacatagctctatgtgaaaatgtatttatt

SEQ ID NO: 281180 - DNA, 540 bp, Homo sapiens
tgctgtggtggtatactatcatactacataataatagaaatgaattatgtcagtaaaatcttgaggcttaagatttactgtgataaatatttttcattaaagtgaaatatcttggcagagtcactttcatatgcagactgttgacacaaggaggccagctgtgcctrtgcagatgccgagatttgggtctatattattaatgatttatcatgtcatggagagcttagattagttttgaaagcaatcccttgccacaaaagcactttctataatgtgcgaacgcaaggaatactatatgtgcattccaaatcaaagtaatcacagaagctgcagcaacctttgaaatttcaatacctctttttattttgaaacatgaaattctacgtcctaaattttattattcattaaaattcatacaaaatgttatttcatatcaactggatagtgagtggtgtgtgtatcagaattaatagacatatacacatagataagaaaatgaaggagatggaatggaacaaacatttattgcaaacctattgt

SEQ ID NO: 281181 - DNA, 592 bp, Homo sapiens
tggttagctgtattcctcggtattttattcttttcgtggctattgtaaatgggattgcattctggattgggtctcaatttggatgctgttggtatatagaaatactactaatttttatacattgattttgtatcctgagactktgctgaagttgtttatgagatctaggaactgaggtgtttccagtcttcttgccacaacagtctaatggagaatgctgggaaaagcacttcatcagggtggcggcagcaagatctgaactcattcacatgtgccatcaatagtagcagcacaacccatttgacacattttttttttggctacttaatatttatctttttccatgattggatagctacataatatgtgtcttcgtagaaggccaagccaatttgatactcatcagacctggaattcagagttaaggatgctgagaagcagaggctacatagctgctacatcccatctagtttttagttaccacactgtgggcagtgcactggtagctctagagacccaggccaactttcgctacaggaagcaatattctgttcaccacgttccctagcacagctctgacacagcctcgcgt

SEQ ID NO: 281182 - DNA, 572 bp, Homo sapiens
tgaatctacttttgaaaactagattcaaccttatgtgctaacaactcatgtgactgagggtcagaaaaaagggatgttggtaaattcccaaattcactaccatttgggaaaaaactggctgtctttcaacaattattagctcagccttgccttcaaacttttccttcatgtaggtgaatagaaacagagtaagtagaaaaaacatctggtaatgtaactgtcaagcaacaacaatgggaagtttcagaatccatcatttgcctatgacctaactgtcagaaatttgcaaagtcattaataatatgagaaaattccaagatcaatacttaatttaaaatkcaagagagcagataagatgataaagtaatctttaaattccatctgaaggtgcaggaaaatggttagaacagaggaggactctccaggtggattgcaaggcaagggggatctgaggggagatgctcagagacagagatcaacccaaggttctcaaagagccatgcatgaagagagaaaagaactccagctcacaggagtaaataagggaggtaatacagggaaaatatcataaa

SEQ ID NO: 281183 - DNA, 1032 bp, Homo sapiens
ccttggttcccacaggagtatgcgattggcttgtttgaataattttgcaggctggcaaagaactgaaacccactactcaggataagcaggagcttgggcctgggcccccttggaagaaggggttcttggcttggcccttatctgcagagcccagtcagaaaggaaactcgcagttaggccatcccaggcccacctggcaacacacgtcaaggcaacacataacactgaatcttgatctgggccttccaccacatcccctttcatccacacccagtgcaggtggttggataaggcttatccaacccctagaaccagacgaggacgrgtggccttggtgtaaatgtctcaaagcccccacccacagagattagttcaggaataaatttgtcagccaattcatgccaattaaagccaaactgagaattgtgtaagggtactataggaaagagatatgcwgccttcttttctctatcagggaatcagatgtttttgaaagtacgtgagcgtcaaatgatcacataaactcattcttgggatttttaaataattgcataaaattcttgaaataacttgtaactgcttgtgtttaaaatattttcatgacatcaacaaatttgagcaaacattctgagtaaagataattaattgtacttgaaatgtcagactgagacccagggtcaaatttgcaaaattttttwaaaaagtaattattctctagtgccataaaatatttagttttaatattgctaaaatctatgttatgtctattacgttaacaactatgatgataactgggattttcctagtgaggaactaaaagtcctttaggtgttccttaattcataactatatatatttttaaatgcccgtttgggatcagagagattaaaagatgctccaacatgtttatatgagactgtgcataggtagctggaatctattcaaagtagttgagtgtttctttgagattatattctagctctttcccttcccaactgtgtgaccttgggcaaccacttaatcttccttcat

SEQ ID NO: 281184 - DNA, 1183 bp, Homo sapiens
gccttcttttctctatcagggaatcagatgtttttgaaagtacgtgagcgtcaaatgatcacataaactcattcttgggatttttaaataattgcataaaattcttgaaataacttgtaactgcttgtgtttaaaatattttcatgacatcaacaaatttgagcaaacattctgagtaaagataattaattgtacttgaaatgtcagactgagacccagggtcaaatttgcaaaatttttttaaaaagtaattattctctagtgccataaaatatttagttttaatattgctaaaatctatgttatgtctattacgttaacaactatgatgataactgggattttcctagtgasgaactaaaagtcctttaggtgttccttaattcataactatatatatttttaaatgcccgtttgggatcagagagattaaaagatgctccaacatgtttatatgagactgtgcataggtagctggaatctattcaaagtagttgagtgtttctttgagattatattctagctctttcccttcccaactgtgtgaccttgggcaaccacttaatcttccttcatwaaatatatcttacctgaatgggtaaaaatctttcaacaatgagaatagagttaactaaattatgaaaacagatatattcatgaagaaaaaaatacagaagaatgggaaaccaaaaaccattcgaataaaaatatatgaagacagagtgcagcacaawatctcatagaaaggaatttggctaatcatcactattaaaatggatatacctctatccaaaaggtggagtggactaaataaaggaaaattatatttatatatatattttaaatggtgctttgtagcagtaaaacaaatcagttctttctattataaacttcctgattcaaatcaaaagaaaatatagtaggctgcaatttaaatagcacaatattacctagaagtttaaacccacacaaagtttgccatgttcaaggcaaatattgggaagataaaaataagcagaaagctgttactacatttaaattgccagatacctagttacctgattaatgaagaaaacaaaaacacatataattgtagaatttgtgtaatttctctgacctttataccacccatatccatcaaattaatagtttttctctttatgttaagctgtgtaaacaaatc

SEQ ID NO: 281185 - DNA, 606 bp, Homo sapiens
aaatatatcttacctgaatgggtaaaaatctttcaacaatgagaatagagttaactaaattatgaaaacagatatattcatgaagaaaaaaatacagaagaatgggaaaccaaaaaccattcgaataaaaatatatgaagacagagtgcagcacaaaatctcatagaaaggaatttggctaatcatcactattaaaatggatatacctctatccaaaaggtggagtggactaaataaaggaaaattatatttatatatatattttaaatggtgctttgtagcagtaaaacaaatcagttctttctattataaacttcctgattcaaatcaaaagaaaatatagtaggctgcaatttaaatagcacaatattacctagaagtttaaacccacacaaagtttgccatgttcaaggcaaatattgggaagataaaaataagcagaaagctgttactacatttaaattgccagatayctagttacctgattaatgaagaaaacaaaaacacatataattgtagaatttgtgtaatttctctgacctttataccacccatatccatcaaattaatagtttttctctttatgttaagctgtgtaaacaaatc

SEQ ID NO: 281186 - DNA, 575 bp, Homo sapiens
ttctgctattttatgtcattgaacaaattcaagtgtacaattagatttcaaaaattatactctcccatgtaattaaaggtatttctgaaaaaaaaatgcttattcatgaaggacagtgtttttataaaatttgatatctaatgactgatgtttaatagctgtggaataaaagaatgctaaaagtcatactgaatgcctgaaaaaatgagtcagtagttgggacyagaaccaaccaaaagatccacagagtagaggtgataagaaggtgtcttgagattttagaatcaatagcaaaagctattagtatccatagccatggaattaagcaaaaacaacagacaggagaagaaaaatttattcagtgatgaaaagaacattgaaaccaaagggaaggaacaagtgactcatcacaaaagtgtaccactattaaaggtaagagaatagacctgctgtggagagaattagaaactggttgctaatgtgcctacatattgagaaaaacattctagttcctattttcctaaatttcaatcacatccttagaataaaattctattatctaagctgacctaagt

SEQ ID NO: 281187 - DNA, 575 bp, Homo sapiens
ttctgctattttatgtcattgaacaaattcaagtgtacaattagatttcaaaaattatactctcccatgtaattaaaggtatttctgaaaaaaaaatgcttattcatgaaggacagtgtttttataaaatttgatatctaatgactgatgtttaatagctgtggaataaaagaatgctaaaagtcatactgaatgcctgaaaaaatgagtcagtagttgggactagaaccaaccaaaagatccacagagtagaggtgataagaaggtgtcttgagattttagaatcaatagcaaaagctattagtatccatagccatggaattaagcaaaaacaacagacaggagaagaaaaatttattcagtgatgaaamgaacattgaaaccaaagggaaggaacaagtgactcatcacaaaagtgtaccactattaaaggtaagagaatagacctgctgtggagagaattagaaactggttgctaatgtgcctacatattgagaaaaacattctagttcctattttcctaaatttcaatcacatccttagaataaaattctattatctaagctgacctaagt

SEQ ID NO: 281188 - DNA, 505 bp, Homo sapiens
tgtgcatttgggaaataagagtacatctctcagcctcaaatttcttattttctcataaataaaatgttataactatgaaaacaaaatatatctctccaatggataaaaacattaattgtaatatctctaatacttatactcttaatctatatagcatatagaaatattgatcagtttcccaataatgctgcatattgtgagatgttaattggtgatctaagaaaaaaaattcatcgtcaaatagatttggaaattattgaaagactgatccattcacaaaattgtgagtaatttgaataagtaacatatgggctatgatcctgtgagggaattatttcttaaagacaaataaaacttttacarctgaaaactactacacaaaatgaagtaaaatttaaaatgtattgaataggatcagtatcaaaatggagatatcagagtaaaacagaagagaaacaatagttttaaagaatgtgtacagaaccataagaccctgtgcatagcc

SEQ ID NO: 281189 - DNA, 624 bp, Homo sapiens
cattcctctcttagtaactgatataaaagaaaatcagcaaggatataaaaaattcttaaactggacttcagtaaaataaaagcattttgctcttcaaaagacattgttaagagaatgcaaagagcagctatagactgattagcgacaattgcaaatcacatacttaacaaaaggcttgcatccagaatataaaaataaatttcaaaactcagcaataaaaaagcaaacaacccaatgtcttttaatgggaaaaagattgaacaaatacttcacaaaaatgtcaagtaagtacacgcaaagatgctcaatattctttgtcacaatgattaaccatagtaacagttgctacaggttcttacacatgaaatcatgttcagttggctaaaygtttaaatactaaaataaaatacctaaataccagaaatggctcaatggcttgcaatcaaattttcacaattttcctttcattttatgttgtaaaaaggtagaaataatataaatattttagagtcaaagttttaaaataaaaatatgtggaatattatatcattgtgctttctcctatttttatatatgttagctgtttatatattaccatctcctgaaacagagtagcaaataaag

SEQ ID NO: 281190 - DNA, 531 bp, Homo sapiens
gcttggaggtatctcttgacagcattatggtgagagccaatgtcccaaaaggatcatatttaatacaaatctgttgattggcctcagaagatctatgatgaatacagaagcagtccaggggcaaggaagaagggagccttattagaagaagagatcaaatcctgagctctggccaagaacagagattggctaatactatgtgttatgtaatgtaataccaagtattaatacaatggttacaagatcatttgaycctttgttaaaattgaagaaattagttatgtatcttccttttacgcatacatttattttttattttgtccttctactcatctactcattttttctttttgtttttttttctttcagatggagtctcactgtgttgcccaggctggagtgtagtggagcaatcttagctcactgcaacctacccctctgaggttcaagtggtcctcccacctcaacctcccgagtagctgggattacaggtgcaggccaccatgcctagccaacttttatatttttagt

SEQ ID NO: 281191 - DNA, 1211 bp, Homo sapiens
gtggctatataaataaaatgttcaatgtgagccccatagtaaccacacacaaaaaatatacatcaggtagacaaaagataaagagaaaagaatcaaagcacaccaatacaagaaattatcaaaccgcaaagaaatacaagaagagaggaacaagagaaatataaaacagacaaaaaacaatttaaacagtggccaaaggcaatccttagtatccaaaaatyactagaaatataaatgaactatactttttaatcaaaaggcataggagtggcggaatggatttttttaaaaaaagaaaaaaaacaaggcccaaatatatattgtcttcaagaaactaaaagtgaagagatgaaaaaagatattccatgtaaattgtaaccaaaagagagcagggtggttaaactcatatcaggcaaaacagactttaagtcaaaaactatcacaagagacaaagaagttaattatataatcataaaatggtcagttcaaaaggaagatataataattataaacatatatgcacccaagataaaagcaccaaaatatataaagcaaacattggtaaatctgaaggtataaacaaacattagcaaaataagagtagawgtggctatataaataaaatgttcaatgtgagccccatagtaaccacacacaaaaaatatacatcaggtagacaaaagataaagagaaaagaatcaaagcacaccaatacaagaaattatcaaaccgcaaagaaatacaagaagagaggaacaagagaaatataaaacagacaaaaaacaatttaaacagtggccaaaggcaatccttagtatccaaaaattactagaaatataaatgaactatactttttaatcaaaaggcataggagtggcggaatggattttttwaaaaaaagaaaaaaaacaaggcccaaatatatattgtcttcaagaaactaaaagtgaagagatgaaaaaagatattccatgtaaattgtaaccaaaagagagcagggtggttaaactcatatcaggcaaaacagactttaagtcaaaaactatcacaagagacaaagaagttaattatataatcataaaatggtcagttcaaaaggaagatataataattataaacatatatgcacccaagataaaagcaccaaaatatataaagcaaacattggtaaatctgaaggtataaacaaacattagcaaaataagagtaga

SEQ ID NO: 281192 - DNA, 605 bp, Homo sapiens
gtggctatataaataaaatgttcaatgtgagccccatagtaaccacacacaaaaaatatacatcaggtagacaaaagataaagagaaaagaatcaaagcacaccaatacaagaaattatcaaaccgcaaagaaatacaagaagagaggaacaagagaaatataaaacagacaaaaaacaatttaaacagtggccaaaggcaatccttagtatccaaaaattactagaaatataaatgaactatactttttaatcaaaaggcataggagtggcggaatggatttttttaaaaaaagaaaaaaaacaaggcccaaatatatattgtcttcaagaaactraaagtgaagagatgaaaaaagatattccatgtaaattgtaaccaaaagagagcagggtggttaaactcatatcaggcaaaacagactttaagtcaaaaactatcacaagagacaaagaagttaattatataatcataaaatggtcagttcaaaaggaagatataataattataaacatatatgcacccaagataaaagcaccaaaatatataaagcaaacattggtaaatctgaaggtataaacaaacattagcaaaataagagtaga

SEQ ID NO: 281193 - DNA, 622 bp, Homo sapiens
actatttgttttaaaaataattttgcaagggagaaattgatctgcataaagcagaaggaggaaataccctcaagcatttgacaatgtgttccatttttccttcccacagggtacacaatcttcctgatgatttttttgttatttcaattactaaagcttaaagtgtcaccatattaggaatggtgcatttgactttaaaatactagtctgaaataaaaaatacctaattttatattacttcagatacgtcaatacagggagagacttcaaataggtcaatacaggtcgaggcatccttcaatattccagtaacaaaatatataattcaraattttatttaaatatattttttgttggattgagtgtcaaatattcgagtaactccaaggaaaaagttatgaatatgtatatatacacacatatatgtttatgtatgtatgtatgtacatatatatgcatatatatacatatatttctatatatagcagcctatataatatggtatatataaaaaagtaagattcacatatggaaataatgccttcatataattttattgaaattaattttggactaggagagttgtagctatttcaaaacttactgattatcagaacaattg

SEQ ID NO: 281194 - DNA, 602 bp, Homo sapiens
catctacaccatcacgctggaaactaaggcaaattttctaaaggaatggtgtttcctttttcttcctagaaasgtataaacctaaggttcctcaatagtctcccagcagatgaggcaacctcttaatggtttggccattgctataaaggcaattagcaaagtttatgtaaataaatttattgactacatcacagcatggcctggtagcagcatgtttgtcttgccattagctgttttttaagaagatagaaataactttttgtgaaccatgaaatagggagtttaatgtctgtgagcttactcacatctgccatgcctgcaagaaagttgatgacctgttgtaaattcaatgtactgatcttggaaggtaatgggagagagaaaaacacatggattagaagtgttgaattttagagattttgaaacaaagaagaaaatacttcagtagaaaaataagaaagtgatggagaatacatgaaaatttttagaacctacatgcctgtcatcattaattacttctgtaaggtattacatttatgcctttcttgtttctatttttcatattttgtatattatggcttttttccaatttactaattata

SEQ ID NO: 281195 - DNA, 602 bp, Homo sapiens
catctacaccatcacgctggaaactaaggcaaattttctaaaggaatggtgtttcctttttcttcctagaaaggtataaacctaaggttcctcaatagtctcccagcagatgaggcaacctcttaatggtttggccattgctataaaggcaattagcaaagtttatgtaaataaatttattgactacatcacagcatggcctggtagcagcatgtttgtcttgccattagctgttttttaagaagatagaaataactttttgtgaaccatgaaatagggagtttaatgtctgtgagcttactcacatctgccatgcctgcaagaaagttgatgacctgttgtaaattcaatgtactgatcttggaaggtaatgggagagagaaaaacacatggattagaagtgttgaattttagagattttgaaacaaaraagaaaatacttcagtagaaaaataagaaagtgatggagaatacatgaaaatttttagaacctacatgcctgtcatcattaattacttctgtaaggtattacatttatgcctttcttgtttctatttttcatattttgtatattatggcttttttccaatttactaattata

SEQ ID NO: 281196 - DNA, 543 bp, Homo sapiens
ttggtttctctgtcaataagtgggatcataataaagccacatcctaggattaaatgagttaatgcatatattgcatttagaacagtgcctgaccatagtaagcgatctttctgtttcagttctaattttgattaccattttccagttatcttttggataacttcatattttctcatttaaattcctcaattggggtttcatgakaaaattaaattctaatggccaaagacgtacattgtaagcaatgacttaatttctcatgtatacatctacaatggtactaagcttcataccatccttggaagaactaagaacatagtgacttgaattgctttcactgttctatacttcaaattaggtatcgcagtttaaaaaggcaattattggctggtcgggcacagtggctcacgcctgtaatcccagcactttggaaggctgaggcaggcggatcacctgaggtcagcagttcgagaccagcctggtcaacattgtgaaaccccatctctactaaaaatacaaaaatcagccaggcatggtggtggg

SEQ ID NO: 281197 - DNA, 570 bp, Homo sapiens
taatcccttgtcagatgggtagtttgcaaatattctcccattctgtgggttgtctctttattttgttgattgcattcttttctctgcagaagctttttaacttgatgtgataccatttcttcatttttgctttggggtattactcaagaaatttttgcacagactaatgtcctggagattttccccagtgttttcttgtartagtttcatagtgtgaagtgttagatttcagtctttcatccatttttattttattttttatatggtgagagataggggtctagtttcattattctgcatatggatgtccagttttcccaggactatttatagaaaagactgtctttttcccagtgtatgttcttggcacctttgtcaaaaatgagttcactgtaggtgtgtagatttgtttctgggttctctattctattccattgttctatgtgtctactttaatcaagcaccatcctgttttggttactatacctctgcaatataatttaaagtcaggtaatgtaattcattcagttttgttctttttgcttaggatagctttggctatcctgcatc

SEQ ID NO: 281198 - DNA, 641 bp, Homo sapiens
ttcttatagggaaggtctagtggtgatgaactccctcagcttttacgtgggaaagtcttaatttatcctttgtttttgatgggtggttttgctagatacactaattttcgttgacaggtttttttctttctttcagtgctttgtataaatcatcttattcccttctcatctataaggtttctgcagaaaaatctgctgataataaaagcccccatgtacataaggagtctctttttaatttgtttctttgactgggacatgttttcctgtttcattgtatgtcttgttatcttttgtttggactttatcatttaaataatcggccactttttccagactttgtaatctggatttgtatagggagaattttttaaaatcagcccacctagagattctggagacttctcaaatcttttctgatgatatgtcctctttgggcttgtgcttgtaatctcctaattgaggatgtttgcctgtttctacccaggagttttccctggagtttgtgatacatgcartgtctctggtgccatagtaagccatggtattggagcttcaactagtgtctgcatgcgttactgcagactctggggcaggttgattgcatttgttctaagtggctacaatgtggcacacctgtt

SEQ ID NO: 281199 - DNA, 584 bp, Homo sapiens
aggtgatctgatgagtttcacttccttactgggtggggtagtttcctgaaaacagaacttagataaggcaaatgtaactttaaagttataagaccaaggaggtscttgagcccaggagttcaagcctgcagcgacctatgatcaagcctgggcaacacagcaagaccctgtctctaaaaagaatttaaaaagaacagggagggtcattttctatgtttattcaaaaagctgtaaatattagttctaagggacagttaggcttttcactttctccattttacagataacattgctgaagccaagtgtttaagtaattttcccaaagtcagtacacagaggatctatgattcaagccctcataggtctgcctttaatatatcatgttgtttctaatatagcatgtatctgtcttcttaaggagaaatatattgcctctatataaccatttaggagaaaggtctaaatacctttcttaaacacaaattttggggggctttaaaataaatattgctatttttgtctttttcacaattttcccacctctccctacccccataaaaagccaacacaaataaacttacagc

SEQ ID NO: 281200 - DNA, 568 bp, Homo sapiens
accacataaagactgacagcagaacactcacaatcatctatttgacgtctaggactgaaccaatgcaaagagagggtgtgggaatgagccgcagtgttgggcagacccaaagagtacagtaataacttctaccgatcgggcacttgccctattgctctatgccaagcagtgtactaagcacttttctttatttttctgacactgtgagacagagatagatttggagcccgactataggcctgtctgactttgatgtctatactactgggatcacaaaagcaaatgtcaccagttcctgacctgccagtgtctggtagaactcttttgacaataaagagttctaatgaacatttgtcacttttttttcttcaaacctttattttaagttcaggggtatatgtgcaggtttgttacattggtaaattgtgtgtcttgaagatttggtgtgcagattatttcatcacccaggtaataatcatagtaccygatacgtagtttttctatactcattctcctaccaccctccaccctgaagtaggccttagtctactgcatgacaacatgtggt

SEQ ID NO: 281201 - DNA, 568 bp, Homo sapiens
accacataaagactgacagcagaacactcacaatcatctatttgacgtctaggactgaaccaatgcaaagagagggtgtgggaatgagccgcagtgttgggcagacccaaagagtacagtaataacttctaccgatcgggcacttgccctattgctctatgccaagcagtgtactaagcacttttctttatttttctgacactgtgagacagagatagatttggagcccgactataggcctgtctgactttgatgtctatactactgggatcacaaaagcaaatgtcaccagttcctgacctgccagtgtctggtagaactcttttgacaataaagagttctaatgaacatttgtcacttttttttcttcaaacctttattttaagttcaggggtatatgtgcaggtttgttacattggtaaattgtgtgtcttgaagatttggtgtgcagattatttcatcacccaggtaataatcatagtacccgatasgtagtttttctatactcattctcctaccaccctccaccctgaagtaggccttagtctactgcatgacaacatgtggt

SEQ ID NO: 281202 - DNA, 634 bp, Homo sapiens
tgagaacacttggtggaatgtggttgcctataggagagtgtatgactgatgtgtgagtgtgagtgacgtgtgtgatactttatcttgagccaacctctcctcatgcactagtctgaatcctggttctttgcccttctttatgttttctaatcaccttggaatttttattctccctttaatctatccaatcgcatcaacttttaagaaacaattacagtctaatttcttctagggcrcttttgccacatatttgaaccaaataatagcattttgtttatggtctctacccagatcttagctcttgataataaactgtatggtatttttatctatttacttatctaaactgtaaacagctttggtctctcgacagtaagctttcaatgcatagcaaatgctagaaataagtcagttatttgatgaataagtcgtcatatcaaatatgccttttaaattatgtatatgttaattagtttatttgttagagcaaggaatccagggtatgcacataatcctgccaaaccagtacgttttgcacaaaactaaattctgttccaactctggatactattcccaaactccagacaccaatttcagactggggaatatggatgcctcactcactgaagcagag

SEQ ID NO: 281203 - DNA, 569 bp, Homo sapiens
aatgcatgtttagatctagaacatgtccacatttgcmtgtaacagtatttaacttcttcattaaaacaaagctaaaattaaaaaagcattataaagcattatatgtgtatgtgtctgtacgtgtatatatatgtatgtataaaacactataaagtataatgctttaaacaaagtatatgtacttgtcattgtgtgtatacttatgtataaacacacacagacatatatatacacatatatatgtacacacacatacacatactctgtttacttgatattctaaacaactgaacccatatccatgaattaaactagaaaaatacttgaaagtgttcaatgtaaggaaatgcacacctgagaaaaacaagacaattgaaaatcagtcatacacaagctgagaccttttcttcacaccaaaacagatcagtgtttcagtgtctgtctaatgaattctccttttaagaatcccttgaaggaagtttgtcaaatatgtttctcaagctcatcatattaaaatgcttggtgtagttttatttctgttaaaatcacttggcttttgaggcttactg

SEQ ID NO: 281204 - DNA, 581 bp, Homo sapiens
tgtgcacatgtaccctaaaacttaaagtataataataaaaaaaaaaagttggaagagagtgaaaacaataggcaactctctctgcagagaagatagtaagaggtcatccatggataaatatgacagtttgaaggaatgcatgtttagatctagaacatgtccacatttgcatgtaacagtatttaacttcttcattaaaacaaagctaaaattaaaaaagcattataaagcattatatgtgtatgtgtctgtacgtgtatatatatgtatgtataaaacactataaagtataatgctttaaacaaagtatatgtacttgtcattgtgtgtatacttatgtataaacacacacagacatatatatacacatatatatgtacacacacatacacatactctgtttacttgatattctaaacaactgaacccatatccatgaattaaactagaaaaatacttgaaagtgttcaatgtaaggaaatgcacacctgagaaaaacaagacaattgaaaatcagtcatacacaagctgagaccttttcttcacaccaaaacagatcagkgtttcagtgtctgtctaat

SEQ ID NO: 281205 - DNA, 551 bp, Homo sapiens
tcacattcatccttcccactggaaagcctgccttccagttctcatttcttcttctacattaagcttcttcccagcaaaatttacagagggaatgtttgctctattcaggggaaatgccatcattctattataccatcattaattataacccatcctttatcaaatggataatcactttggaacacaacggtccagtgtctcctgttttaccagtgctgttattcactatatgtagaatatcagcagttaatcgaggtcgagctacccaaaacccaaatctttttattgtattttattttcctaactttttaattgttgaaacttcaratctacagaaaagttgttggaaaatagtacaatgacacccatatactctacatccagatttatctaacatttttgccacattttctctatccatagacaatttttttgttttctttaaccatttaagggttaattactggtagcaaaatacttcctctctaaacattttggtatattcctcctcagaacaagggcattctccaacataaccacaatgcagttat

SEQ ID NO: 281206 - DNA, 492 bp, Homo sapiens
ccaaaacccaaatctttttattgtattttattttcctaactttttaattgttgaaacttcaaatctacagaaaagttgttggaaaatagtacaatgacacccatatactctacatccagatttatctaacatttttgccacattttctctatccatagacaatttttttgttttctttaaccatttaagggttaaktactggtagcaaaatacttcctctctaaacattttggtatattcctcctcagaacaagggcattctccaacataaccacaatgcagttatcacacttgggaaattttacagtttctattccattttgccattggtttcaataacaatctccataattatttttaaagaatttatccatgattccacattgcatttaagtcatgtctgtttagtctccatccttttctgtgtgtttatgtatctctctggacactggcatttgagaaatttccaggcaagttgctttgtcagacaaa

SEQ ID NO: 281207 - DNA, 528 bp, Homo sapiens
gtggtatcacattgaaatcaaccaaatcaatcctaatgagcatattaaccccacagaaatattcaaatgctacagaccagaaaatcaagcagccaaaaatgaagtggtttgctgttaaatgtttaagaactacctctctgaaggcagagaggaaccctgatgctagagactgaacaatatcagactgttcagggtgctgtaacaaactaccatagactgcatagcttacaaacaacagaattgtatttgctagattctggatgctgggaagtccaaaatcaagtggccagaagatgtggtgtctggtgatagcctgattccttacttatggatatcttctctttgtgccttcacatggcaaaaggcacaagggagctctctctttcayaagggcatgaatcccattcatgacagctctgccctcatgacttaataacctcccaaaggccccagctcctaatatcatcacatggagaattaggatttcaacatacgaaatctgaagtgatgcaaactttccgtctatag

SEQ ID NO: 281208 - DNA, 592 bp, Homo sapiens
tttctttcagctgtccaaacacaccaagatcctttcagcatccagggctgtgtctgttgttctctctccctggaaatgcccttytgcatatagccatctcctcccatccttcagttttctggggcttccataaaaaataccacagactgtgtggcttcaaaaacagaagtttatttcctcaaagtcaagtgaaagatcaaggtaccagtaggtttggtttctggtgaggcctctctgttcagcttctagaccgctccttctcactgtgccctcggctggccttttcaccgtgtgcatcctccaggagacagagggttctcatgtctcttcctcttttaaagaatggtccaattggattacagtaccacccacccttctggcctcatttaaccttaattacctccttatctccaaatacagtgacactgggggttaaggtttcaacatatgaatttgggagaacacaatttagtgtgtaacaaggtccctactttcagcaagtgctgctctgcaccttcctctctaaatttaatctctcctgtttttctctcataacaccatgttcatttccttaatcatctctgtgtgtata

SEQ ID NO: 281209 - DNA, 1237 bp, Homo sapiens
tgtgtaacaaggtccctactttcagcaagtgctgctctgcaccttcctctctaaatttaatctctcctgtttttctctcataacaccatgttcatttccttaatcatctctgtgtgtatatgcagacacacatatgtaatattttgtacaaattatttacttggagcctgtttttgccattaractgtaaatatcataagggtaagaacaaagcctaccatatttactattataggctcagcaattggcatggagactagtgcacagtgggcagtcaatacatactgtggtttgctcactatttatttaatgcataagcactttaaaaatcaagatgcaaacgaagagtgactccttgcactccctgaactcatctgtgtcctggcagtagtacaggcacttttcaagcattatctcatttattctttacagcaacataagttattgctgttttattttccactcggtagtgataatcattgtctgcattcataatccacaagagtggaattaaagggtcaaaaggtatgagcattttgaagctctcagagcatatcattaaattgatttccacagaagcttgcaatagttactgcgwccctactttcagcaagtgctgctctgcaccttcctctctaaatttaatctctcctgtttttctctcataacaccatgttcatttccttaatcatctctgtgtgtatatgcagacacacatatgtaatattttgtacaaattatttacttggagcctgtttttgccattagactgtaaatatcataagggtaagaacaaagcctaccatatttactattataggctcagcaattggcatggagactagtgcacagtgggcagtcaatacatactgtggtttgctcactatttatttaatgcataagcactttaaaaatcaagatgcaaacgaagagtgactccttgcactccctgaactcatctgtgtcctggcagtagtacaggcacttttcaagcattatctcatttattctttacagcaacataagttattgctgttttattttccactcggtagtgataatcattgtctgcattcataatccacaagagtggaattaaagggtcaaaaggtatgagcattttgaagctctcagagcatatcattaaattgatttccacagaagcttgcaatagttwctgcgtgtctacttcatcgtaccctcataaggattaacatttttatctatgctagttgta

SEQ ID NO: 281210 - DNA, 1215 bp, Homo sapiens
attataggctcagcaattggcatggagactagtgcacagtgggcagtcaatacatactgtggtttgctcactatttatttaatgcataagcactttaaaaatcaagatgcaaacgaagagtgactccttgcactccctgaactcatctgtgtcctggcagtagtacaggcacttttcaagcattatctcatttattctttacagcaacataagttattgctgttttattttccactcggtagtgataatcattgtctgcattcataatccacaagagtggaattaaagggtcaaaaggtatgagcattttgaagctctcagagcatatcattaaattgatttccacagaagcttgcaatagttactgcgtgtctacttcatcrtaccctcataaggattaacatttttatctatgctagttgtagaggtgaaatagtatggcattactattttaattcgttagattatttgataaccaaagagtctgaagccaaagccttttcctgctagtcctatttacatcatctcccatgcctaaacatccttcttcttcatgggaagttgcctggaagcctgtaagaattcttggttttctcagcattgtgttwattataggctcagcaattggcatggagactagtgcacagtgggcagtcaatacatactgtggtttgctcactatttatttaatgcataagcactttaaaaatcaagatgcaaacgaagagtgactccttgcactccctgaactcatctgtgtcctggcagtagtacaggcacttttcaagcattatctcatttattctttacagcaacataagttattgctgttttattttccactcggtagtgataatcattgtctgcattcataatccacaagagtggaattaaagggtcaaaaggtatgagcattttgaagctctcagagcatatcattaaattgatttccacagaagcttgcaatagttactgcgtgtctacttcatcgtaccctcataaggattaacatttttatctatgctagttgtagaggtgaaatagtatggcattactattttaattcgttagattatttgataaccaaagagtctgaagccaaagccttttcctgctagtcctatttacatcatctcccatgcctaaacatccttcttcttcatgggaagttgccwggaagcctgtaagaattcttggttttctcagcattgtgtt

SEQ ID NO: 281211 - DNA, 542 bp, Homo sapiens
ccacaagagtggaattaaagggtcaaaaggtatgagcattttgaagctctcagagcatatcattaaattgatttccacagaagcttgcaatagttactgcgtgtctacttcatcgtaccctcataaggattaacatttttatctatgctagttgtagaggtgaaatagtatggcattactattttaattcgttagattatttgataaccaaagagtctgaagccaaagccttttcctgctagtcctatttacatcatctcccatgcctaaacatccttcttcttcatgggaagttgcctggaagcctgtaagaattcttggttttctcagcattgtgttacagcaaatcttaataatgatgaagatcttcttaattaaaattgctcaagaaatttattttttttagttgacagcttctcggataaaatcctccaataacttccrattaccttcatgattaagcccaaactcttcggccaccacctcatttccatggtcatctctccctcctctatttgatattttatagtcaagcaacacag

SEQ ID NO: 281212 - DNA, 540 bp, Homo sapiens
caaggtagtaaaatggaagcaggggcttcagtgaagtcaaaagggcctagaagtagttgtgttgtcaagggagagggttcaaggggagatagtaattctgatcatagttcctatcagtattattttctcaaggtagatattatctgtccaagatgtcttcttcactgatgtttccagcacctcagtttgccgctcctctatgtggagtctcatttcagcagaggagcctgaacttcttagaaagtagttcaagacttcaaaatccaggaagcagaagcagccagtcttcctaaagtttggactcagaagtttcacaatgtcattttcaactattctcttagtcaaattaggtacaagcagctgagattcaagagggggagagggccatgtgtacagagargaaaggaattgatggcagtggccatttttccttgagagatgctatgagaagtacagaaagttataaggggtatgggaaagaagctgtagcagattgagaaagagattagaaaatgacttgaatgaaaaggtcatatgata

SEQ ID NO: 281213 - DNA, 598 bp, Homo sapiens
taaagcactgaagtaataggtgcctattatatattagttctttagctccttccttcaaacctattatatacatacataatatttttttctccttctacccatggaaagaaaaaaaagtagaaagtcagagtggaagaatctgaaaaaaacaccactgacccagaggattatatgcacacccaaaaatgaggcagaagcctcgttttggcagctctgggtcacttaggagtttttcacaaccaaagggctactaattctgaagccttataaagctgtgtgctggaaccaggatggttctgaagacattttaaaatattctggatgagttcattctgctcaagttaagaggaattttctcaagattagttcaagttgygactgaaagcaaagattagtaaatagaacttctcattatttaaacataataatccatgaaaatataatgtttaagccaatactaatggctatttaaaggatttattttatccaagtttatgaatgatgagaggtttttaaaaaaggaattttgatgaaaggaatttaacttgggaaatcttgctagaagttgatttctaagattaacattaatgcatatgat

SEQ ID NO: 281214 - DNA, 580 bp, Homo sapiens
gctatcaattatagattacttactatctgtcaaagagcatggaaagaattttgtatacatgatctcatttgatacttataaaactgtaatttgaatagtgttactatctgcatagtcaaatgaagaaattaatgcttaggagaccaagtgacatatccttaggtcacatagttagtaagcagcacagcctgggtggaaaccacttgcattattttaactccagtgtctatactcctaaaaagtatagtttactttcttaaaagctaatgttatttctaagtattggattacccattttaaactttaaytatagcaaaaccatgtgaacaagcttctataggacatcagcaagaaaaaggcactgtagtgcatccaattccttacactgacaaactggttaaattatcagaccctttgatgtagaataaaatttgtgtggtctttgtgtggagaaaatgttatatatatatatatatatatatgtgtgtgtgtgtgtgtgtgtgtgtgtatatatatatgtatatatatatatatgtattttctttttaattcactaaaacccaaacataattacctttaa

SEQ ID NO: 281215 - DNA, 635 bp, Homo sapiens
tgatcgtggtattgatgccagcatttatttccttggtactttatttgacaggaagagcattataatgaatgagatgctctagccattctaaatatcattaatggctggcaaatattcccctatattctaaaacctttctgagatatgcacagctctctctccaaattaacagtgtctacatgacacttggtgtaccacctgttccccaagggcagaaagaatagaaaaaaatcagtcatcaggaaaaaaagcaagctttggaaaaaaagtattccagaataaaacaggatttgtgaaaatgtatctcccctctaatacccacttctttttacagaggcaactttagtgtgagtttctagaatgtagactagaaatttgccttatgcttcttagtatatcagattatactcaaggtrtataccctatagacattaaatgaaaattgtttggtacaatgattgactctgtgtgcccttattatagcctcaatctcccatgtttcaatatatactgataagatgttaattacaaataaaaaaacaacacttttggggaaggtatgcagaaaatgaggagtaaggagatttaagaaagtctttttaccagcacaatgaatctagattgcggagagaaaa

SEQ ID NO: 281216 - DNA, 1061 bp, Homo sapiens
agttgcataaagtataaagtagaattgctacaaacagcactttctgaataaaataagaaaaaactaaaaattaataacaaaaagccaagattttccactagggttttttttaaataaattactattaagatttaaattatataagttctttaaaatcatgatatagaaactttacaagttaaaagsaaatataggagaaaaattcagaaccataaatatttatatcaataaaaatgaaggaatgaaaataaattaaaatgcagacaataatgcatatcctgtaggtttatggaaagtattcaacagcataatgtatgtaaaatactgggtatatgtttggcatgctgtaatagtgaataaacattatttgtctaatgatgctctgcaatcttctgaacatgtccatcacaatgattactgaaagacattcttatgctccctctagtctatctcattcttctacattactgaagacwcagcatagacattatgaaatactgattgaatgactcactgatgagtgggagaagtaaagatacatgtaggtgggtgataaggagtgtggaactgaaagtggtggaaacatgaattcagcttatgtttataagtacagttgcagaaatgaaaagaatgtcttctatatgtcctagattctctgtctctctacttttcaatgcttgatctcctgactgttggctcagccttatgccaatttcttggaccaagcccagtttgaagctaagttaaatttgtaggtaaaacaaaacaacttcaggctaagttccattcttgttgacgtttcttttattttgccatttctattcccgttaactaatccataatcaaccacagtaaaagatagctaaatttacataatctgcctccaggcataaaaatgwcttgttactccttagttattcaccagtgccttgacaaatgcacagcacaaaatacatcttgaataaattattcaagtttaattattgaataattattcaatattgagtaacaaatgtcaacagcacatcagcaaaatccattagtacatcaaaaagtatatc

SEQ ID NO: 281217 - DNA, 602 bp, Homo sapiens
ataaaagacattttaactggggtgaaattatattgtattgtggttttatttgcatttccctgatgactaatgatgttgaacatatattcatatacctgttggccatttgtatgtcttcttttaagaaatgtctattcaggtattcttcccatttttaaattggatttttttttttttgctattgagttgtatggatttttttatactctggttgttgttaatctctttcagatgaatagttttcaagtattttctcccactctgcaggttgtctcttcactccattgattgtttccttttctgtgaagcagcttcttagcttgatgtaatcccatttttctatttttgtctttgttacctgtgcttttcgggtcttactaaaaaattatttgcccagatcaatgtcctaggcagcatccccaaagttttcttctagtagttttatagactaattaaactttttaaaatttaaatatggctagtatgcatcatcactttttcttttggaaaagcattaataggacatttttaaagaaargtgcttctgttactcccagaaacctaggtataatgtggaatttagttatatctcatcaaaaaca

SEQ ID NO: 281218 - DNA, 533 bp, Homo sapiens
aataactctcatctttaaaaattaaaaaacagagtcacrtgagccatgctactcatctgccctgttcactgacagtagtaggatcttgacaagcctttactaatccctctacctaaatctagactattcttccatccctcaccccagctccagtcccaaccacctccatctccatcatttgcatatcaaacactcactcttcttcaaggttaagttctagcatagcctcctgagcaagcctagcctgtcccccagcacctgaatgcagaactgaaggttgaataaagtaactttctattaactcattttcctgccacttaacttactgcattatgctgtctgggtgccttcagtgaaaggtgatgttttattcatctttctcactgagtactgtgctggacatttactatgcccttaaaaatattttttcaacaaaataatggaagtgaggttcttcttggacagtttaacaatccctgaagctctattaatttggacaaaaaagagagagagaagatattggacatatgtta

SEQ ID NO: 281219 - DNA, 536 bp, Homo sapiens
atatggtatgaggtaggataaaagttcattctgtatttggctatccaattgtttcagcagtgttcattgatgagacttttctttcctattgaattgcctttacactgttgttaaaaattaatcatagatatgtgggtatatttctgaagtctctgttctattgcactgatgtgtttatttatctttaacccaacatgcaatacttcattgtcttatctactrtagctttataggaagtctttaagttaggtaacatttgttctccaactttgattttttttttttttcaaagttgtttgggctactttatgtcttctgcatttttctatgaattttagaagcagttaatttctacaacaaggttactagaattttactagaattgcattaaatctacaggtcattttaaggagaaattacattttaacaatatggagtctttcaattcatgaatacagtacatctctctgtttcttttggttttctatctctttcagtatattttgcaagtttaaatgtagtggtatttctcatat

SEQ ID NO: 281220 - DNA, 546 bp, Homo sapiens
tctttccgtttctaaaatatgtagcccccttttctcattcatctcatttattgctcatttacctttgctgttacttcttcaaggaagctattttgttgaacactataatacattccctaaatatacccatatgttaagatgcttttgttattaggacattttccacattatatcataattgcacatttaatttcactcaccattcactgtaaacttcagtaggaatcaaatctggctcgttttttaaatgtacaagttagctgtgtaacacatcatcagaaacatagggtcttaatacaacaataattacttattttgctcacaaatctacaatataggtagtctcagtgggtaaagtttayttatgcttcatgtggtatgagctgggatggcttgacttgagctagactcaaggatccagcttaaaatgactcatgcatgtggcttgcaaataggggatacctgtcacttccactccacgtgagcctctccatggggttacttgattccaagaacaagctttccaagagattcagtcaaaagctc

SEQ ID NO: 281221 - DNA, 637 bp, Homo sapiens
caaaataatatgtacaccaaacccccacaacacacaatttatctatagaacaaacctgtacatgtactcccgaaactaaaataaaagttttaaaaatatattattgtagggactaccagaatgtctgtgtcatcacaaaattaatatgttgaaaccctaatccccaatatgatgatatttggaggtggcacctttgggaagtaattagatcatgagagtggagccctcaagccaagatcagtgtccttacaagaagagacacaagagatatgatctccataccatgtgaggacaaagcaagaaggtgtacctctgcaaaccagaaaaagtttcattaccagaaactaaatctgccagcaccttgatcttgaacttcacagccttcaaaattgtgagaaataattatttgctgtttaagccatccagtatatagtatttttggtatagcatcctaaactaagtaccacaartatttatgtggtacttttaggtgacagacactgttctaggcacttgaattcataagtgaagaaacagacaaaaatctctgttttcaaggaacttacatccttatattctaggtggggaaagcagataatgaataacataaacaataagtagactatctaataaaaac

SEQ ID NO: 281222 - DNA, 560 bp, Homo sapiens
acaaacaaaaatagaagcacaacatactaaaatttatgagatgtaacaaaagcagtcctaagaggtgaattatagcaataaatgcctgtatcaaaaaagaagaaagatcacaaataatctaatggtacaccacaaggaaccagaaggaaaaaagaagcaactaagcctaaagttagcaaaaggaagaaaataacaaatatcagagcagaaataaatgaaacagacactagaaaaatcatggaaaaaatttataaagctaatgtttggatttttaggaagataaaattgacaaacctttagctaaacaacaacaacaacaaaagactactcaaattagatcagaaatgaaagagaagacatcacaatggaaactaccaaaatacaaagggctataaaaaactactgtgaacaattatatgctaataaattgaataacctataagaaatggatatatttttagaaacasaacttaccaagactgaagcatgaaggaatagaaaatttgaacagaccaataacaaataaggagattgagtgagtaataaaaaaagtctctcac

SEQ ID NO: 281223 - DNA, 540 bp, Homo sapiens
ccaaactcattttatgaggctagcattaccctgacaccaaagccagactacaagaaargaatattagaggccaatacttctggtgaacataggtgcaaaatttttcaacaaaatattagcaaactcaattcaagaacacaataaaagcatcattcaccaagatcaaatggaatttatccctgggatgcaacgatggttcaacatatgcaaatcaatcaatgtgatactccatatcagcaaatgaaggataaaaatacaatgatcacttcaatagatgcagaaaaaacatttgacaaccttcaacacctttttagggtaaaaattctcaacagattaattgtagaatgaatgtatctcaacccaataaaggccatatacgataaacctatagataacattctcaatgataaaaattggatagcttttcttctaagatcagggacaagagaagaatgtccactcttaccacttctttttaacatagtgctgtaagtcctattcagagcaattaggcaagggaaaaataaaaataaaatttat

SEQ ID NO: 281224 - DNA, 540 bp, Homo sapiens
ccaaactcattttatgaggctagcattaccctgacaccaaagccagactacaagaaaggaatattagaggccaatacttctggtgaacataggtgcaaaatttttcaacaaaatattagcaaactcaattcaagaacacaataaaagcatcattcaccaagatcaaatggaatttatccctgggatgcaacgatggttcaacatatgcaaatcaatcaatgtgatactccatatcagcaaatgaaggataaaaatacaatgatcacttcaatagatgcagaaaaaacatttgacaaccttcaacacctttttagggtaaaaattctcaacagattaattrtagaatgaatgtatctcaacccaataaaggccatatacgataaacctatagataacattctcaatgataaaaattggatagcttttcttctaagatcagggacaagagaagaatgtccactcttaccacttctttttaacatagtgctgtaagtcctattcagagcaattaggcaagggaaaaataaaaataaaatttat

SEQ ID NO: 281225 - DNA, 492 bp, Homo sapiens
cttgcctttcccagcttctagaagggcccatattccttggttgatggccccacattacttcaaccatcgcatttccttacctgaccctggtcaacctttctcttaaaaggacccttgtgattacatcaggctcaaccaagtaatccaggataatctcctcatttttacatccttaactaatcttatctgcaagtcccttctgtgtgtaaggtaacattcacaggttctgagaattaagatgcagacatctttgggagggtcattatccagactaccacagaggacttataaatggaagatatggcatacaacaatacaaaataaagaataacaagtgttattagcrcttgttactcttgaactcttattattctttggagttggttaactccaaatttaacaaaagcaaataaaacaatatagctgtttgaaaagatcatagtcacagaaattaataatttttaaggccacaattctctcatgtaaccaaat

SEQ ID NO: 281226 - DNA, 562 bp, Homo sapiens
ataaacaaattaggtggcaaacacaagctaggaaaaaaaaagtttaaaatgcacattctaggcaataattaatatggttactatataaaatccctaaaaaataaacgaggaaagaaaactctttagattctatagaaatctgaacaaaaaaacccatgaaaaataaaaagtcaatacatatatgagaaatgtcaaaatttttttagtaacccagaggtacaaagtattcctttttccttttttcctacaaaattgacaaagacatgtcatattctactctggaagtggagtagaacaccatttttgagatcagttgacagtgtcagtacctttaacccagcaatcccactgttatgggtacatcctaaggacagactctataaaggtcaaagatggtttcctatgatggtcaacaaagcattacttgctataaggaataacctttaaggcgtgtttaaattacggttatgttatatgatagaactctrtgaaaccattataaattgttttcaaataatatttaatgactttaaagaatgcttgcatagaagtgctcgtgaca

SEQ ID NO: 281227 - DNA, 542 bp, Homo sapiens
tcatggatcagtcaatgtccacttaaatagtctgataggaaaatttctgcccaaatagaataaaattattatataatcctataagatttatatctcaagaatgttatctgttaaatacaaagaaaaattaagcaattaatcctgagaattgtggctgtggaaaagaatgagaggccatgaggattagatgggactgagaagaatttaaagttgtggtcatgaagggtaaaagcaacctgatgtgttggaagcagagttatgagtagtagagagaatatacaagtcaataccaaggagagcagagctgtgctgtcaagcccctgacaattcgtgaayttctgctgctgaaattattagtgctgccttggatcaagttccatttgtatgatggccagctgtactttggattccactcttggaatcatatttggtctctctctctctctctaattgccctaagtgtttcttcaccataaatccctcatgattaagacagcttaaatgagtctctgtttccttcaactaagagaacctcatgagaa

SEQ ID NO: 281228 - DNA, 592 bp, Homo sapiens
acacacggtcacgtttgggacatgttttgattacatagtcaaaataattgatggactagatattggatgtgaaagtcagagtaatcaagactgactactctgcaaatgaaccagtgagtgatttgtggttcttgttataaagatgagaaaatatggaagaaggacagctaggacaggatagaagtcaagggtttggtttcagatatgctattattgagaatatcatattaatgatcaaatagaaatattaagtataagtygtgtatatatgttaagagcttagggaagagcattgaatgtagatggaaatttgggggtcactagattttaaagttattcaattaaatgagctcatctagcaggggagaattagagaagagatttaagtctgagaagaagaagaaagatcagccaaggagactgaaaagaagctacttgtgaggtaggaaaataattcaagaacatgtgacactctagaatttaagtgaagaagtgcttcagcatagtggctaatggagattgggtaatcaaataaatacctgtcagggttcaaataaaatgaaactgagaattgaccattgaatgttgcaag

SEQ ID NO: 281229 - DNA, 597 bp, Homo sapiens
attcttcttcctctgcagttggagagttgatcactacgaagtcctttcataaatattcctgacttttgctggcagaattgtctccagcattagccactgataaattcttatgataccttctgtatgcttgtgactatttaatgaaataatgctaatgatggacatgctaacagaaatacatcagctatccactgctttattgggtgagtttgctccacttgcaaaatagtgacaatttcacatcattgtcatgcattagagaaaccatctacttaatattttacttggatgggataaatctgaggtagggctagtcctaatggtataggacaactctcttacacccaaaggacatctaactggaccttcctgtcctgaaaaggcagttctacaaatggagtggggcaaatagggagtagatgaagctaatttggtagtaaagttgtgtcttttcatggcagttatgtgcttctctcatcatgtctttctyttgttagtttgtcccgtttaagttgtaattccatttagccgaaatcacggccattttaaaaaagtgtttcaaattctaacaagggcttataattgaaatagaaaata

SEQ ID NO: 281230 - DNA, 422 bp, Homo sapiens
ttttctttctttactttcattttgggactcctattatttgtatttttccagacttaatggtgttctacaagtctctgatgctctgttcatttttcttcattatttatctttctgtgtcacagagtggataatatcaagtgacctatcttcaagtttgttgattattttttctgcctgataaaatctgctgttaatcctctattaagtttttatttaagytgtacttttcaagtatagaatttctatttggttctcctttatagtttctatctattaatattctttacttagttttcataattttctttagttttctagacatatttgcctttaggtctttgatatttaaagatatattttaaatagctaatttaagcttttgtctagtgtgatggttaatactgagtgtcaacttgattgga

SEQ ID NO: 281231 - DNA, 597 bp, Homo sapiens
ccttgttcaaatgtgtttctttaaaaaaatgctttatttaatatatgttgtttatttattaacattgaagtcatggtcaatagttgtataactcacgcctgaatgaagcttatctcaaatacttatcgtcatcgtaaggcacagccttcttgtgcttagggatacyagacagtgtttcagcactatgcatggacgtgcactttaaatagcaaaatcgccaacataaagtataaaatgcaaaaatgtgcattaaagagaccataaaggtgatgtttgcttacactatgacaactaaacatatatatatatttgcattatatatatatgtattcttatctatgcatttcatttcactctcttctctgttttagaaaaaaattggggagtaatagggatagaaagaaaatttttagttgacctatggaaattgttagtttataggaagattaagaacatagttagagtacctacttcaaaattatcaaaggaatatggaaaaccagtttctgtggctacaaaatgcccagtaagtcagaattttctcatttggaactgctactgattctcttgcaccccataattcagccagtgccattg

SEQ ID NO: 281232 - DNA, 388 bp, Homo sapiens
tcacttataatctgcttcatttcaaaaatgccttgagttaccgaatgcctatgtcaagagcagttatgtctgtgcccatcattgccaggtctacctatgtaaatgtgactgatgctttacagagtgatttcacaggcagattttaggaaaataactatttcagtttttacttgttctttctttggagactgttgacctagttctaagactkgaaacccgaaaatgaccgagtgttggcaataactgactctcccattggtgcactgggaagacattcatgcaagagccaccatcatatggcccattggctgctggcaagaatgatgccagcttgtgccctaggattttgctccgggcttgtcctgcatgaagaacctctccacccccc

SEQ ID NO: 281233 - DNA, 388 bp, Homo sapiens
tcacttataatctgcttcatttcaaaaatgccttgagttaccgaatgcctatgtcaagagcagttatgtctgtgcccatcattgccaggtctacctatgtaaatgtgactgatgctttacagagtgatttcacaggcagattttaggaaaataactatttcagtttttacttgttctttctttggagactgttgacctagttctaagactggaaacccgaaaatgaccgagtgttggsaataactgactctcccattggtgcactgggaagacattcatgcaagagccaccatcatatggcccattggctgctggcaagaatgatgccagcttgtgccctaggattttgctccgggcttgtcctgcatgaagaacctctccacccccc

SEQ ID NO: 281234 - DNA, 576 bp, Homo sapiens
gtattccattctccatcatgttgcagacagacatctatttctccccaatatattacaaamttgaatacagagtcctctaactcataatgagaacattaatgtttatcactttactttcttagagtaatagcattattttcgtcaaaaactttattcttacaaagcatttttatataccttatcttatttaagccctgtttgttgatgttgtttctgttattactcccatttcagagatggagtaactgtggttcagtgaggaattaagtggcttgcctcaggtgatataaatagtaggtggcagatcctaggcttgtattcatacatgttgtctttcagttgactgccattctttctctacctctatgctaccctgttccttgctcccttaaaagtttctcacctatgatttcagggcccatccacagagatagtaagtatgtgtagggccacagatatgcactcttcatatcaggtatcttagatacaagtagtataaacatcataacttaagaaacagagatatagaagctatcttggatgaataagtgatcagggcagggcagaaggtggtta

SEQ ID NO: 281235 - DNA, 602 bp, Homo sapiens
caacataaagtataaaatgcaaaaatgtgcattaaagagaccataaaggtgatgtttgcttacactatgacaactaaacatatatatatatttgcattatatatatatgtattcttatctatgcatttcatttcactctcttctctgttttagaaaaaaattggggagtaatagggatagaaagaaaatttttagttgacctatggaaattgttagtttataggaagattaagaacatagttagagtacctacttcaaaattatcaaaggaatatggaaaaccagtttctgtggctacaaaatgcccagtaagtcagaattttctcatttggaactgctactgattctcttgcaccccataattcagccagtgccattgactgcctggttcctagtatggcttctgctacagaaaatctgttcaatgtgttttggctcttgctatacaagaaccctagggaaacctagaagtaaagcaggaaaatagctatagtagtcagggacagctgtgaygcttgcagtaaaatggttaaaggttggagttgggtgttagacctggtacaaatccatgttttgctgctgtttcatagcttgtgaccttg

SEQ ID NO: 281236 - DNA, 592 bp, Homo sapiens
gtggcacctgtgcccttttaggaatacaatgttgtatctttatccctgacaatcaacagaacataatggcagctttgcaggggctgtcacaggagattaaagcagttgagaaccttactgacaaccacctacaggcatggtgggcatccctgggtgttggcctatgctggactcccttggcctagggagtggagtgtaaggaaaatggctgtgctacagatagaagtaggccaaggcaaatatccggtatagcatgacacagcatgtttggaatgcaggcacacaaccctgtacattatataatcccatttatgtaactactttatgtgagctcctacctggctctgagccactatcatctgtaagatgtataaatacactgctaatgctgtggggagagaggggagaataaagccatgtcccaactgcctacagtccctcgactgttctttcagctgcccacygcccattcaccaactccttttggaccctagcatgggatggagcctgacactatgtatcttagtagtaaagagcaccagctttggagacaagctgattcaaatgtcaaacagtcatccagtagctggct

SEQ ID NO: 281237 - DNA, 597 bp, Homo sapiens
aggaataattaggagtgactgtataatgttttagttaagggcttgtggtctgtaatgacacagattggcttcaccactcacaatctgtacagtcttgggcaagtaagtgacttgttctctttcacactcagtttcatcatctatgaaataaaagtaataataactgtactctcttagatttgtgatgagagttaaatgagatatagcctgtattcagctgatacatgttaaatgatcaaaaaatataagttactaatgcaaggaagactaataaagcaaaaagaattaactatagcataagtggaatttttaaaacacttctcaaaatgctggaagagggggaaaacatttaactaaataatttagttycctcttatttcctgtacataagtggggcaaattttagtgacatttataaagagtattatatgctaacataaaaatgattttggtgaagtattaaaaatcaataatgtcattttgagggtctcaactaaagtatgaatgtgctaagtttaatggggccttgtgctagaatttcaattaatgcaaatggaagagaacattgaacacttagtactaattttatttgcctag

SEQ ID NO: 281238 - DNA, 544 bp, Homo sapiens
caaactgatttatagatagaatgcagggtagtgcttacctgggaatggagcagcaaggaggaagagggatatataataaaaatcatgaagaaacttttaggggtgatasctatgttcattattttaatttcaatgatggtttcatgggcatattcatatgtcaaatcttatcaaattgtttgtgtatgaattttattctatgtcaattatacctcaataaatcagtttaaaatataagtctaatttaattgcttttaataatagcaacttaagcttacttagggtttgctatattgcagaaatttttctctgtccttgatgtatattaatgtaagccttataataaccccatgaagtaaggacaaaacaattcgcagtatccaactcccggcctcaagcgattctcatgtctcagcctcccgagtacctgggattataggcacccgccaccacgttggctaacttttttgtatttttagtagaggccgatgttttataatccctgttttccggatgataaaaatgatctggagaagtgaattaa

SEQ ID NO: 281239 - DNA, 544 bp, Homo sapiens
caaactgatttatagatagaatgcagggtagtgcttacctgggaatggagcagcaaggaggaagagggatatataataaaaatcatgaagaaacttttaggggtgatacctatgttcattattttaatttcaatgatggtttcatgggcatattcatatgtcaaatcttatcaaattgtttgtgtatgmattttattctatgtcaattatacctcaataaatcagtttaaaatataagtctaatttaattgcttttaataatagcaacttaagcttacttagggtttgctatattgcagaaatttttctctgtccttgatgtatattaatgtaagccttataataaccccatgaagtaaggacaaaacaattcgcagtatccaactcccggcctcaagcgattctcatgtctcagcctcccgagtacctgggattataggcacccgccaccacgttggctaacttttttgtatttttagtagaggccgatgttttataatccctgttttccggatgataaaaatgatctggagaagtgaattaa

SEQ ID NO: 281240 - DNA, 544 bp, Homo sapiens
caaactgatttatagatagaatgcagggtagtgcttacctgggaatggagcagcaaggaggaagagggatatataataaaaatcatgaagaaacttttaggggtgatacctatgttcattattttaatttcaatgatggtttcatgggcatattcatatgtcaaatcttatcaaattgtttgtgtatgaattttattctatgtcaattrtacctcaataaatcagtttaaaatataagtctaatttaattgcttttaataatagcaacttaagcttacttagggtttgctatattgcagaaatttttctctgtccttgatgtatattaatgtaagccttataataaccccatgaagtaaggacaaaacaattcgcagtatccaactcccggcctcaagcgattctcatgtctcagcctcccgagtacctgggattataggcacccgccaccacgttggctaacttttttgtatttttagtagaggccgatgttttataatccctgttttccggatgataaaaatgatctggagaagtgaattaa

SEQ ID NO: 281241 - DNA, 601 bp, Homo sapiens
atatatattttaaggttgtgatataattaaagagaatttctttcttaaattgacctcactttttrtaacacaagtttgtattctatgtattgccatctccagaatttactagctgttcaatcttgggcaaatcactaaagctctctctactttgaattcctcatgtataacataggcataataacaaatgaacttcacaaggttggtaggcaaattcaatgaattaaacttttgaagctggtggaagaatgtttggccagtgcttgaaggtttctgcaatacctgttagttcttagaagggttgatattttacaaggaccaccttctggggatggaatgttttccaaaccccttctttttgacaagccatgttttgtctgtccttgctcaaattttgcataagaattgctttttccataaccaaatcttataaattgcttcatttctttaacaacggaaattggttacaatttacaaaattgagcagggatgtggaatttattttttaatctattttttaatggatagaatattgaaagattgcttttagacaaaagtatgcttttatgtaatttaaacaaactatacctaagtattgtag

SEQ ID NO: 281242 - DNA, 601 bp, Homo sapiens
atatatattttaaggttgtgatataattaaagagaatttctttcttaaattgacctcactttttataacacaagtttgtattctatgtattgccatctccagaatttactagctgttcaatcttgggcaaatcactaaagctctctctactttgaattcctcatgtataacataggcataataacaaatgaacttcacaaggttggtaggcaaattcaatgaattaaacttttgaagctggtggaagaatgtttggccagtgcttgaaggtttctgcaatacctgttagttcttagaagggttgatattttacaaggaccaccttctggggatggaatgttttccaaaccccttctttttgacaagccatgttttgtctgtcctygctcaaattttgcataagaattgctttttccataaccaaatcttataaattgcttcatttctttaacaacggaaattggttacaatttacaaaattgagcagggatgtggaatttattttttaatctattttttaatggatagaatattgaaagattgcttttagacaaaagtatgcttttatgtaatttaaacaaactatacctaagtattgtag

SEQ ID NO: 281243 - DNA, 615 bp, Homo sapiens
ctcactctctctaaaatgggaggaaaggaaaaaaagaagcttctcttcctataaacaatgaagaccgaagtgggggaagctgccatcccaaaagagatctaaacagataggaaagatgagcaggtgaactgctaatggatattcgtaaagcttgtcagagtaayataagaaaagagcctccagcagagaaggtagtctgtctttcattgaaacccagaaattccactttcaatggaggtttagagtgagatgtagtttattttaaacaggatataaatgcaagtcttttcatacatccatagattccttcatccctcttccctatcccagtgccacaaacactaggcaggcaggtgcttttactctagggaataaaattaattttttttattgagaaaaaattgaacatatcagtttttatgagccttgagggagatctcctgagtatggtggcacagctaagtgagagctgaaattttcttcttccttgcttgtcataaaattgcagtcctgtcatgaaggtcaaccatgggaagaaggggcacagtgaatctacccaggcatcttttctacttttattagtctagcggagactcatttttctattttatatgt

SEQ ID NO: 281244 - DNA, 550 bp, Homo sapiens
agagcctccagcagagaaggtagtctgtctttcattgaaacccagaaattccactttcaatggaggtttagagtgagatgtagtttattttaaacaggatataaatgcaagtcttttcatacatccatagattccttcatccctcttccctatcccagtgccacaaacactaggcaggcaggtgcttttactctagggaataaaattaattttttttattgagaaaaaattgaacatatcagtttttatgagccttgagggagatctcctgagtatggtggcacagctaagtgagagctgaaattttcttcttccttgcttgtcataaaattgcagtcctgtcatgaaggtcaaccatgggaagaaggggcacagtgaatctacccaggcatcttttctayttttattagtctagcggagactcatttttctattttatatgtccagagattgtgcctttttctatcttgtctgctcagagaggatggccttttctagtttcaacaatgatgcagtacaggtgagcagctgtatgttgtgggttggagac

SEQ ID NO: 281245 - DNA, 550 bp, Homo sapiens
agagcctccagcagagaaggtagtctgtctttcattgaaacccagaaattccactttcaatggaggtttagagtgagatgtagtttattttaaacaggatataaatgcaagtcttttcatacatccatagattccttcatccctcttccctatcccagtgccacaaacactaggcaggcaggtgcttttactctagggaataaaattaattttttttattgagaaaaaattgaacatatcagtttttatgagccttgagggagatctcctgagtatggtggcacagctaagtgagagctgaaattttcttcttccttgcttgtcataaaattgcagtcctgtcatgaaggtcaaccatgggaagaaggggcacagtgaatctacccaggcatcttttctacttttattagtctagmggagactcatttttctattttatatgtccagagattgtgcctttttctatcttgtctgctcagagaggatggccttttctagtttcaacaatgatgcagtacaggtgagcagctgtatgttgtgggttggagac

SEQ ID NO: 281246 - DNA, 563 bp, Homo sapiens
gggcaggccagcaggcaggctgaaaatttaggaggaaattgatattccagtcttaagtctaaattctacagggtagcaggctggaaactcaagcagactttctatgtcatggtcttgaagagctctcttcttagagaaatctccatattgtctactgatctaaatgttaatcacattttaaagcaaaatcaaaaacaaacactcacagcaacatatagattgctgtttgaccaaacaaccaggcaccatagcctacccaagttgacacataaaattaaccatctcagcaaggaatgtggagatttkggggattacagagaaaaaaaagaatggtgattctagataaattacaatactaaatgagcattgttttaataggagaggaagacaaactggcctgagaaaagctaaaggcaagggatggaattttgttttactttatcaccagtgacagccatagatagcatacagcacagagtagacactcagcttgtgaaataaaatatcaaaactttctcaaagatatatttgatttgtctaagggagtctttggcaataatgta

SEQ ID NO: 281247 - DNA, 556 bp, Homo sapiens
ctgcctcagaatttcttgggctcaaaatatcctctatctaattatatcaaaacaggagtgttagtcaatgttttctaacttatgtggtagcaaatgacaactcccaaatttaggtaccttrcaacaaaagtgtatttggtactcaagtcgcacattgggtgccgaatagctatggttcagctccaggctacaggtcagcttcaaatcttctaagaaaagtgtcttcttatttttgagatgcaggctaaagagcagtaacctatttgggacctaagagagggagaaagtaagcaagtgagtggaattgtacggaatgtttctcaaagtcccagtgtggtcctgtcacctacagtaatatttccttggccaaaaaggaaatatttttaagccttaaaataaggaaaataggtaggcttctatatgaataccgtgattcacacgcaaacaggaaaagatgtctcatcctctcattggagacaaaaatagaatatgacacagatgtcaaactcctcactcatctccaattttaccgtgtttcatgccccaggacataaaa

SEQ ID NO: 281248 - DNA, 556 bp, Homo sapiens
ctgcctcagaatttcttgggctcaaaatatcctctatctaattatatcaaaacaggagtgttagtcaatgttttctaacttatgtggtagcaaatgacaactcccaaatttaggtaccttgcaacaaaagtgtatttggtactcaagtcgcacattgggtgcygaatagctatggttcagctccaggctacaggtcagcttcaaatcttctaagaaaagtgtcttcttatttttgagatgcaggctaaagagcagtaacctatttgggacctaagagagggagaaagtaagcaagtgagtggaattgtacggaatgtttctcaaagtcccagtgtggtcctgtcacctacagtaatatttccttggccaaaaaggaaatatttttaagccttaaaataaggaaaataggtaggcttctatatgaataccgtgattcacacgcaaacaggaaaagatgtctcatcctctcattggagacaaaaatagaatatgacacagatgtcaaactcctcactcatctccaattttaccgtgtttcatgccccaggacataaaa

SEQ ID NO: 281249 - DNA, 597 bp, Homo sapiens
catgattgttttccaattatcattactctaatgatgttgaactccttgctggtgatattttcttccaccaaatgtgaactattgagagatctctcttctgagaatttaggaaagggttttaaagctgatttgccctcaactagttctgtagctattatagaatgttacttacatcctttgtatcaaagttagtttgcctcaggaaggaagaaaagaaaaatttaacaaaactagcaaaaaagaaaaagcatgtataccgcttatttaactggcctttcaaatttctctttagagtaagattgacaatggaaatmagtgactgaggcataaatcttgatcatggaggtttattaagccacttttggacatatcccaggaaaaacacaagccacagacaaatctgtggctgtttttctgaagagattttcaaaaggcttagtgttcatacatttctttaaatgagaggaggaggaaggcagatggggggcaggtaggttcttaggttaatacctcttaagatgataaggtgaattactgaagagacaaatggagtaacagaagagtcaattatgcagaagtctctaggtaggtgaagga

SEQ ID NO: 281250 - DNA, 539 bp, Homo sapiens
aaataaacaacttccagccattattgcagaggtcacaagatatgcaaattccccaattactcctgtacatgacatctctaatgtagaacctaagactggccctttgagatatcttttcagtttttatgtctgatgagtgatggctccacttggacctgccaactgctcctgtggctccacccagaagagattcagtgcacaggaggaccatttcccacattcctacgattgcacccccaaccaatcagtagcaagcatccaatgtctagccactcccacmccttcccccaaattaccattaaaaaacattagcctcaaaattacctgggagactgatttgtgtagaaataaaactctggtattctattcagctggctctgtgaattattaacctctttctttattgcatttccccaaccttgataaatcagctttatctggacagggggcaagaaaaaaccactggtcagttacaccatgatgaacactaatgcaagcgctaaggattctttagcattgcaggagttctatgaaaccat

SEQ ID NO: 281251 - DNA, 657 bp, Homo sapiens
gaaaatttcagtggaaaataaatcataatagtcagctcataactagcaactttcacaactttgttgaaactaccaaacatctacctgcatgrtgtttcagaaattattttagtgacctcggtatttctaagataaatttgctgttcattatgtctcattcatattaatgacaaagaagaacatgaagagctttcgtttttgcattcgttataaattatattccattctctttcattataaggataatgaaacatttctggcgatataattcatggtcatttcactttttgtgtgttctcaaagtcacttgcctattgcatggttgttacaagagtacctatctcttgggtcatgtctatggagctcaatcatatgcaattatgctgtgctatttgaaccattattgcccttatataccttattattccatatgtagcaccacaagatgattcaaaatttcagttattaatatgtcacttcaaacgtgaagtttacacacacacaaacactaaatatgtatgaatgcatgtattatttacatgaaaacaaattgaaatattatccatatttgtagaatgaccttatttactgtatgtatcatacaacatattaaacctaaccatgatgagaacttttttcacataataatataaaata

SEQ ID NO: 281252 - DNA, 657 bp, Homo sapiens
gaaaatttcagtggaaaataaatcataatagtcagctcataactagcaactttcacaactttgttgaaactaccaaacatctacctgcatggtgtttcagaaattattttagtgacctcggtatttctaagataaatttgctgttcattatgtctcattcatattaatgacaaagaagaacatgaagagctttcgtttttgcattcgttataaattatattccattctctttcattataaggataatgaaacatttctggcgatataattcatggtcayttcactttttgtgtgttctcaaagtcacttgcctattgcatggttgttacaagagtacctatctcttgggtcatgtctatggagctcaatcatatgcaattatgctgtgctatttgaaccattattgcccttatataccttattattccatatgtagcaccacaagatgattcaaaatttcagttattaatatgtcacttcaaacgtgaagtttacacacacacaaacactaaatatgtatgaatgcatgtattatttacatgaaaacaaattgaaatattatccatatttgtagaatgaccttatttactgtatgtatcatacaacatattaaacctaaccatgatgagaacttttttcacataataatataaaata

SEQ ID NO: 281253 - DNA, 574 bp, Homo sapiens
gaggcctccacccaggaacgagtcagcgcaaggagacagcttccactccttaggatttcatccctaaccaatcagcactcctgcctcattggcttcccctgcccatgaagttgttcttgaaaactctgctccccgaatgcttggatagactaatttgagtaataataaaactccagtctcccacacagctgctctgtgtgaattattctttgcccattgcaattcttctgtcttgtgaaattgactctgtctaagcagcaggcaaggtgaacccagtgggcagttacagggctatctagttgcaggaaaacaagttcaagactccctctgaatttacattatsgtgagttgcataattatttcattatatcttacaatgtagtaataatagaaataaagcatacaataaatgtagtgtgattgaatcatccccaaaccattctcacccccacagtctgtggaaaaattgtcttccatgaaaccagtccctcgttccaaaaggtttggagctgctggcccatgacacagccctaggagatcctgacaataggttcctaagatggtcgggctacag

SEQ ID NO: 281254 - DNA, 639 bp, Homo sapiens
ggatttcatccctaaccaatcagcactcctgcctcattggcttcccctgcccatgaagttgttcttgaaaactctgctccccgaatgcttggatagactaatttgagtaataataaaactccagtctcccacacagctgctctgtgtgaattattctttgcccattgcaattcttctgtcttgtgaaattgactctgtctaagcagcaggcaaggtgaacccagtgggcagttacagggctatctagttgcaggaaaacaagttcaagactccctctgaatttacattatggtgagttgcataattatttcattatatcttacaatgtagtaataatagaaataaagcatacaataaatgtagtgtgattgaatcatccccaaaccattctcacccccacagtctgtggaaaaattgtcttccatgaaaccagtccctcgttccaaaaggtttggagctgctggcccatgacacagccctaggagatcctgacaataggttcctaagatggtcgggctacagcttggttttacacattttagggagatagaagacatcaatcaatacatgtacraagtacatcggtctggtccagaaaggcaggacaactagaagtggggacttccaggctatatgtgg

SEQ ID NO: 281255 - DNA, 354 bp, Homo sapiens
acaattgcaaaaggtatcatcttcataatggaaataccaaaaataaaagctaaaaaaaaagaaaggraaagagaaataagcagaggaaatattttaagtaataatgggtgagatttttgcaaaattaatgccaaaccaaaccatggctggaactcagagcacaaccaaacagggcaattactaaaaaatcttcacctgtgtatagtatagcaggtttaaattacaaaataaataaataaataataatagaagaaataaaaaatgttaaatcaattagaggaaaaaaaacttagatttagaagaacaggggaaagaattatattacacttttctttacaagcattgcaaataaga

SEQ ID NO: 281256 - DNA, 606 bp, Homo sapiens
aatttgttcaaatatattataaaaagataccctgtttgcacagcaacaaaacttgtgttttatagtactttgtgtaaattactaatcaggagaaattgcttgtgtacagtgcaaaacagatttcaaaattgtgttttaccactccaaataatgaagtgttttctactgaataagagaaacttctaaatctatatttgatatcaacttcacttgagttctaaaaatgtgtattttatttctcaaatasttgccatattttgatttctacagtgctcataacaatcatgaaccattaacttttccaataaatatttaaatctaaatgaaagttttctacattttacaaagtaaatacaaacgaagatgtgactatagtgaatccaactattgagatggaaattcttcataagaacttcaggatttgtttagagctgtaatcacaagctggagttttttggggggaaatatataaacaatttaaattaatatgatccagtttagaaaataaagataaatttttataaatttttttcaaaaaatgaatatgtttataaaggccttaatagaaatcaactgtttaaatattttcatgtgtacagatcatta

SEQ ID NO: 281257 - DNA, 548 bp, Homo sapiens
aacaaagagagaaaatagggaaattttaaaaaagagagtgagataaaaacaaagctaaaagagcttagtacaaataagamacaaaaaataaaataatcacaaaatgtagatgaatttggaaagagcacagacaggataagattctacggaaaactaagtaaagccaagaaagctaaaacatcagaaagaaaagtgaaattaaaaagtaattaaagagtttgctcttcagtgataattaagtttctcctatcagacatacccttccaaaaataataactaaaatcctgaaaaaagaacaaaaaaattgtgatggtttttttgatatgtctacttggttactctaaagtccctagatattcaatcaaaactctaatcgaggtgttgattgaatgtattctacagatgtaattcaagcctcaaattaggcaattttaaggaggattacactatgtaatctaggtgggcctgattcaatcagttaaaaggatttaaagccggatgaggcttcctcaaaaaagaagagaaattatgcctgtgaacagcagctt

SEQ ID NO: 281258 - DNA, 603 bp, Homo sapiens
tttattttaagattcaggaactatggcagggctttaagctaatgaagagtatgacctgatttatgttttgaaaatgtcattataggagctgtgtggagattagattgggatgaaagaagagtgaaaatggcgaggccagctaggaaggtactgcagtaaggcaagtgaagatgatgctggtaaagaatggaatggtagctgtggaatttgaaagaagtatataaatgtgatgtaaagtttgcattcggagctaacaaaactttcagataaattgagtaggggggtaaaaaacatgatcaaatcggatatccagatttttggcctgagaagctgtgaatgtgagcagcttgcattttggctatttgagctcctttgttctttgtatcaaccggaagatatctgggcactttccaggcattgcctctcaaacacttgcgtggcgaaccacaaccattacagatgttccacttcattagaatagttaygggctttcacagtttaaaaatagtcttggctttagtgagggaacataagctgcaatcagcctctttctgagagggcctggtacaactgttccatacatatcactcactaaattctttt

SEQ ID NO: 281259 - DNA, 1086 bp, Homo sapiens
tagtgtttgcactatgaggttcttgtgttgtgtttttcagctccatcacattatttattttcctctctaaactggttattctggttaacagctcctatgttttatcatggttcttagcttcttttcagtgagttagaatataatcctttagctcagggaagttcattatcacacatcttctgaagcctacttctgtcaattcatccatctcagcctcagtccagttctgtgcccttgctggagacatgttgtgatcttttggaggagaagaggaactctgactttttgagatttcagcatttttgcattgattctttctcatcttcatgggtttatctacctttgatctttgaggctgctgacttttggataagttttttgtgggatctttttttgttgatgttgttgctttctgtttgtttttcttttagtagtgaggccccttttctgcagggctgcttcagttctcttgaggtccactccagcccctatttgcctgggtccctcctttccctggagatatcaccagtggaagttgyggaccagcaaagatggcagcctgctcattcctctwccttggttactgtttgcatgaaatatctttttccatcccttcactttcagactatgtgaatctctaaaggtaaattttgtcttttataggcaacatatagttagatttttwaaaattcaaccacactttgtcttttgattggaatatttaatccatttacatttaaaattattattaataagtaagaacttaaatttgccattttgtgtattgttttctgttttgtagttcctttctttctttttttctctcttgctgcttttcctagtgacatgatgatttttttaatgtcatgcttttacttttaataacgttttgtgtatctattatggggtttttctttgtaattatattttaagctagtcataacttaacttcaatagcatacaaaaacagtacacatttacttccttgcaccccacactttatgctattgtccttatttatgtatttttattaagtgcacacattaaaattattgtaactatacttactgttagtattttcatctt

SEQ ID NO: 281260 - DNA, 487 bp, Homo sapiens
attttttaaaattcaaccacactttgtcttttgattggaatatttaatccatttacatttaaaattattattaataagtaagaacttaaatttgccattttgtgtattgktttctgttttgtagttcctttctttctttttttctctcttgctgcttttcctagtgacatgatgatttttttaatgtcatgcttttacttttaataacgttttgtgtatctattatggggtttttctttgtaattatattttaagctagtcataacttaacttcaatagcatacaaaaacagtacacatttacttccttgcaccccacactttatgctattgtccttatttatgtatttttattaagtgcacacattaaaattattgtaactatacttactgttagtattttcatcttctaactttcatactggtgttaaatgtgacctacacaccactattaaagtttttgagtattataaatttgactatatcct

SEQ ID NO: 281261 - DNA, 526 bp, Homo sapiens
tcactgaaggcacagagaaatggttagaaaactctgatttctcttaattcctctcattttcacttcctccttcttttcttccctcagttgcctcacattgaacaaatctttaggaaagccagagagcaagagcaccagggaaatgtaacttacaagagaagaataagaaatggatctggagataaataagctaatggcaaacacaagagagcatcttctgtgctttcacaaaagcatcattgagttttagccagataatattttttggtataatcaaagaaagacttcttagagagctagaaggatctaagtgaagaactgtgtgcccttgtgaggttggtatggtggtgtcagtggtgatatctattggagaatgactgtatrctaaattttggagctgaaaactggcttaaaaggagtccaaaattgggccccaaaaggaagaatatggggtccatgtctttgagaactcatgaaaaattctactaaagaactataagaaaaatttatggggaccattaacaga

SEQ ID NO: 281262 - DNA, 477 bp, Homo sapiens
taagaatgtgaaagaaaaaggttggtgatttctaccacatccctttcaacttgtcaatttggttgctccagaagacagatggattatgacaaatgagagtggattatcacagactcaatcacatgaggactctaacttcagcagctattccaaatttgaccttataactaaagaaaatcaacacattattttgcacctgaaatgcagttcttgacgcrgtgaattccccctccacccatcccccgcatacctggtaatgaacatcatcagaagaagttgattttaagctaggtagtcaagtacacatcttcattgtttaattgcagaactctatcaaatctccaactcaaactatcctatgtgggctttccacaaatgacagcatcattctggctcattcgattcatcaacaatttgctgatcagaccaactcaaaggtaaatagcaattattttagaaattgtaataagggacacg

SEQ ID NO: 281263 - DNA, 477 bp, Homo sapiens
taagaatgtgaaagaaaaaggttggtgatttctaccacatccctttcaacttgtcaatttggttgctccagaagacagatggattatgacaaatgagagtggattatcacagactcaatcacatgaggactctaacttcagcagctattccaaatttgaccttataactaaagaaaatcaacacattattttgcacctgaaatgcagttcttgacgcggtgaattccccctccacccatcccccgcatacctggtaatgaacatcatcagaagaagttgattttaagctaggtagtcaagtacacatcttcattgtttaattgcagaactctatcaaatctccaactcaaactatcctatgtgggctttccacmaatgacagcatcattctggctcattcgattcatcaacaatttgctgatcagaccaactcaaaggtaaatagcaattattttagaaattgtaataagggacacg

SEQ ID NO: 281264 - DNA, 1060 bp, Homo sapiens
agtacatgaactattatatactgaatctgtgtgtaggctcacaggtctggcaggtcaattatagcagaggtcagagtaaggcagaagattatgtcctacayggtagagacagaaaggaaggtcaagcaagatgattaagagaacagagtgtaggccaggcgtggtggctcacacctgtaatcccagcactttggaaggctgaggcaggtggataacgaggtcaggagattgagaccatcctggcgtctcctgtctctactgaaaacacaaaacattcgctgggcatggtggtgggcgcctgtagtcccagctactcaggaggctgaggcaggagaatcgcttgtacccgagaagcagaggttgcagtgagccaagatcatggcactgcactccagcctgggtgacagagcaagactctgtctttaaaaagaaaaagaaaaagagagagagaacaaagtgtagaggaattggggattcatttcatatcaattagtgcattttgaataawtgacataaattatgggcgatttatgggtatacttttaggttttaaatgtgttaggattatgttttagcaatatgatttttaataatttctaattttattgcattgagatcagtcaaatctcccaagatttttgagccaacctttcttgaatataggatggcaaatatttacaaatgtttcatgtccattttaaatgcatgcatttatctgttggttaaatgttatctctgtacctgttatatcagactagttaatcaagtttttctgatctatatacttaacttatttcttgcatgcttgagatatttcttgaaagttatgttagcattccwcttactatgttgttgagttttaaattgtccttatcattctgttacttataactttagaaaatttaggactatgaagttaggtacagacatgttaattattttatatgtttgtgcatttttattagaatgtaatatctctatcttagaccttttatataatatcatgttgatgtgacagctatatatgcctattgtactatttttctcatctcttcatttt

SEQ ID NO: 281265 - DNA, 537 bp, Homo sapiens
gaattctagttacaatcttyagtagctacctacaaattcattctaacttacatgattagtggtgtttttcctacaaaggtaataagttatttagtgtttctcttctcatgcatgagacaggaccattttgcattgtttttattctttctttccatattgaactcctctgttgtaatattgtagaacagaatttcccaaaatccatatggttatgcttgtacaattagccaatctctcttcaacccccacctccccacacacacccttttcagcctctgataaccatcatcctactctctatttccatgagatcaactttttaaactcctacatatgaaggagaatatgtaatatttgtgtttatgcctggcttatttcgcttaacataatgaccttcagttctatccatattgctgcaaatatcagtatttcattcccttttcaatggatgaagagtacttcattgtgtacatataccccattttgtttattcattcattcattgatggacatttaagttgattccatatcttgcta

SEQ ID NO: 281266 - DNA, 595 bp, Homo sapiens
cccctctgtttctgttttctggaagagattgtaaagaattggttttggaaagagattagtatttgaaatgatagactgagtaaagtagatggtccttcacaatgtgaatgggcattcaggcaatcgttcagagcctaaaggaaacaaaatggtgaaagaaggttgaatttgctctcctcctgactgcttaagctggagcattgatcttcttctgcccttggtgctcctgatttccagaccttcaggcacagatgggaatttacaacatcagctctctggctctcaggcttttgaagtataccaccaactttcctgggtgtcccgcatgcagacagccaattgtgggacttttcagcctccataaacatatgacccaacactgtrtaatacgtctctttatttatactcagatgcagtattttatctccttcattttctctgtttttctgcttaagattgtattggtttctgccctaatttttattatttattttcttatgcccattttggatttaagtgaattttctttctcgagttggaagcataaattatgcaattttgatctttctccttttgtaatatatgcacttgatgc

SEQ ID NO: 281267 - DNA, 525 bp, Homo sapiens
atacattttatttttttgataaagtacagtttttctctatcatcccacatagaactgatttctattttgttttgattctcatgtttgaataagtacattattgaagtatgaaatcacacaaaaaagaatatatgtttaagttgccatatatattaacattttaaatcttaacattttaaaacttttcatacaactcaacctttttttttcactgttcacattaacaccagccatgtgtaaaagtcagttatttcacttcctcgctaactggtattctcaaggtttttcrttaaagcaattctgataattctctagaagtgtatcatttgtaatttttatttgcatctccctagtggctaatgagtttgaatatactttcttggctttggccatatgaacagtgccttgtaaaattcttgtgaaagtatttattaagttaactttttcatattgttctgtagatggtattactatataaaaccctttattccaatgtttgcaattgtgttgtcatagtctgtggtt

SEQ ID NO: 281268 - DNA, 560 bp, Homo sapiens
caacttcctttctttgcctaaatatctaataaatttagcatccataaaacacctttatttttccaaaagttatgatattccatctttgtcactcccttgataactaataattgtaaattgattaaaaaatggttgcatcctggttttaaatttttttctctgcaggaggagtatccaaacagaccatcttgtatggtctgtatgggtgcattataacttactttttacttccttattgatggattattatgttgtttttttactataattaaaatgattactattgtatataaatgtattttaacagtatatatattttgtatatttttggtagttatggtcatttgaagtgctaggttctactcagaaattttgctggacatatygtgatggccaaattttatgtgtcaacttgtcaattgtgtcaattttaagtgtcaatatagtgcccagtttttatcaaacactagtctagttatggctgtgatggcattttgtacgtttgattaacatctgaaacaaaaagaagaaattctacctcaatgccataattgaaatac

SEQ ID NO: 281269 - DNA, 563 bp, Homo sapiens
gggtgcattataacttactttttacttccttattgatggattattatgttgtttttttactataattaaaatgattactattgtatataaatgtattttaacagtatatatattttgtatatttttggtagttatggtcatttgaagtgctaggttctactcagaaattttgctggacatattgtgatggccaaattttatgtgtcaacttgtcaattgtgtcaattttaagtgtcaatatagtgcccagtttttatcaaacactagtctagttatggctgtgatggcattttgtacrtttgattaacatctgaaacaaaaagaagaaattctacctcaatgccataattgaaatactacctgaatttgtatccagctttcccaacaaatttttcatcaagtctagaatatctcttgcctaagtttccagcttactagcttgccctgtgaattttggacttggcaacacccacaatcatctggttcaactttcagtttcttaaaatacatttctttacacatacatactattggttctgtttatttctacagaatcctaatat

SEQ ID NO: 281270 - DNA, 1041 bp, Homo sapiens
tgcgtaatgagtgaaaagaagaaagcatataaaagatgtcagtgtttcaaagctaagttataaacaaaaatagtaaaaagaatacaaccatcttgacttccatgctaattaggatgatttgttgcctttagcaaatgaagttagagttaarctacgttaaatcattgaacagagtggaatatttcagaggaaatattagtaaactacacaagctagagtgcttgaattaaatctgtgtgaaaatattgagggaaaagctcagtttctcatttagcagcaactttaacaaattaatttttcacaacaaatttaccatggaaatctatggttaattgataaattccttgaattttaaattcaggaggtgagggctgttcatccaactactcattttatagacaaggagatggaccttgtatttgatggatgactcaaatttctcacagtaacaaaagccaacatcatacagcaatctctgggacctagttcttctgaattttwgctgaactaataatagtaaagagcatctaggtctctaaaaggcaaatcttctcacaatcatgaagctctttgatttgtattaagtgacattctgtctatgtttcttcagtcaaagtcacttttgaaattatgacttgtttgttcatttaaggcaagtaaawttctccaaacaaagatattagttagtttagaacattttaaaccaaacttcattatccagaagacaaacctaaaccaggtaatcagagctcaattgcataagctcataccataaaacttaaagcgtgtgcactcagaactaatttcactcatgtggatcaagctaattctcaacaatgccagttaatgaaagattactctatttaatagtcctctagaatagtgcaatgatacccaaaagcttggaaagagccagtatctttacaaaatgctcaagatattacctggaaggtcacaaatgcaggaaaaaaaaatagatgactgaaaaagaataaccaaccaccagaagtcatgctaaatcttcatttcagaaggttatct

SEQ ID NO: 281271 - DNA, 540 bp, Homo sapiens
gctgaactaataatagtaaagagcatctaggtctctaaaaggcaaatcttctcacaatcatgaagctctttgatttgtattaagtgacattctgtctatgtttcttcagtcaaagtcacttttgaaattatgacttgtttgttcatttaaggcaagtaaaattctccaaacaaagatattagttagtttagaacattttaaaccaaacttcattatccagaagacaaacctaaaccaggtaatcagagctcaattgcataagctcataccataaaacttaaagcgtgtgcactcagaactaatttcactcatgtggatcaagctaattctcaacaatgccagttaatgaaagrttactctatttaatagtcctctagaatagtgcaatgatacccaaaagcttggaaagagccagtatctttacaaaatgctcaagatattacctggaaggtcacaaatgcaggaaaaaaaaatagatgactgaaaaagaataaccaaccaccagaagtcatgctaaatcttcatttcagaaggttatct

SEQ ID NO: 281272 - DNA, 624 bp, Homo sapiens
tagaacaaggaatttgtcattttcctattctgagtgaagatattgccaagaataaccaatcatccttaaacaacaaaaagaaaatcagactacccaagatgaaaatttccatagtgaccatatagctcaacttccttgttctttacttgagagcaaaggactgtataggttaattratttgctcataccagaacatttgtttcctgaatcccagttcagggctatttcatttttaccaatgattcttagtcttttggtggcaaggatcagtcaaagaatttggtgatgaaactaatgacattttcactgggaaaatgtatgcatgtacagtgctttctacaattttaggcatctgaatttctctacaattttatgattagaagtaatttttgttgtcattatttccagacctatttatgttttgattttgtgttacagttgcccatgaggaattaaaccaggtcagtttttttcttttgctgattttttatagatatccattattggttttgatcataaccacatgtctccttgttcaaaattagtggagatttcctggagaacaatagcaataggtattgcctgcatttgtttgactatttattttattatattatttttact

SEQ ID NO: 281273 - DNA, 487 bp, Homo sapiens
tacaggtgatagatgaatacaaagtatttctgactggcaattgtttgaaaacgttgagctttgtckaaaaggttgaagtcagcagaaagaaatgcctgaattaagagggcttatggaagccaaggttcttgttaggtagatgaagccactaggtaggaggcttcagagaaaatagatggtaaatgtcttttactggactttaaaagatgtcagtgtcatcgttaaatctcttctggatcaagaaaaagtctggaaagggaagaagacactccatagaatgcatattacctgtccaagaggtagatttgcagggccgatccaaaatatgtcaaagtaatatattttggtgtaaaatactttgatttcctattgtaatgtactttgataggaccaactgtctgttatgtgatgccacagcaggatcaggttggagttgggtaacttattgctacaaagaggtgtccctccccatacaatgcctgaggtc

SEQ ID NO: 281274 - DNA, 616 bp, Homo sapiens
caatgggaaatgcccagtgctgtaggttagtagctaaggyttatttgtattgcttgggaggttacttttggtaaagtttaaaagtcagaagtattacacattttttctggctagagttgggtaataagagatttaaaagtgtttttcaaaagagtgctatggttaaaaatcaacttaattaaaagcaaatattcaagctctaacaaccttggactccttgtgaaaaacaggtgaggcaccacagacccagttttgggaaaagcctctgctttcctcataaaaccccaggaattgaaagtagatagatccctctcaaaatctaagtctctgttcatttttgcattgcattatctgaagctttcaaatttgggggtcatcagaaattactttgcattatgattgcactttgccgcataataactaagtaggaaatatatacctttggggatagctaatggcagttatggggcaatatgcatctctttgcatgtttggatcagagaagcatgctcttagccacctagaagctatggaaatgtccccagcctgcactgagagataagacttccagaggagacaggctgattccttctgtttgggatccaggaactggtat

SEQ ID NO: 281275 - DNA, 616 bp, Homo sapiens
caatgggaaatgcccagtgctgtaggttagtagctaaggtttatttgtattgcttgggaggttacttttggtaaagtttaaaagtcagaagtattacacattttttctggctagagttgrgtaataagagatttaaaagtgtttttcaaaagagtgctatggttaaaaatcaacttaattaaaagcaaatattcaagctctaacaaccttggactccttgtgaaaaacaggtgaggcaccacagacccagttttgggaaaagcctctgctttcctcataaaaccccaggaattgaaagtagatagatccctctcaaaatctaagtctctgttcatttttgcattgcattatctgaagctttcaaatttgggggtcatcagaaattactttgcattatgattgcactttgccgcataataactaagtaggaaatatatacctttggggatagctaatggcagttatggggcaatatgcatctctttgcatgtttggatcagagaagcatgctcttagccacctagaagctatggaaatgtccccagcctgcactgagagataagacttccagaggagacaggctgattccttctgtttgggatccaggaactggtat

SEQ ID NO: 281276 - DNA, 608 bp, Homo sapiens
ctgtttaccctacaaagaaccactaggcaaagtttaattgaatacaatttcattgactactattaaataaatcatggaaaaacccccccaaatataaaaattataaaaaatataaataaactagctgaatagttgccaaatataatatttttttctgtggatagttggtaaaatttttctatggcatttagtacacttttaaaattttcttaaatgttctatacatttatttaattcaacatccaaaatttcagggttttattttttattttgtgtaggattttttttcattttttttctaaatactatttctatgtataaagaagaactcacagtgctgaattctcacattgcttttaatgaattttcagttgattttcttgagtgtttcagctatatatcatttgatctaatgatataatctaaaaaaaattttgcttcatctagaaatataaaakactatatccatttagactacatacttatacaaagcacacacacatacgttacttttgactaaatgcatttgctagtgtgtccagaataatgttacaggaacacattgacagtggccatccttgccttgtttgacctttaatgagagggtt

SEQ ID NO: 281277 - DNA, 1083 bp, Homo sapiens
ttacatgtacctctctagctacttttaaaatatcttccatgagactggcgtttctcagtattcttatatgcctttagatgtgtacctttttgtttactcgataattttaaactgtgctttgtgtacctgmggatttatatcttcaatatcttcagaaaatgtttcagttatgtcttcaaaaaatacttgtatcatgtcttcaccatgcgtttcgcttttcactttggactatttcattagccatgtatgatagactttcccattctattcttcatgtttcctaaattctctcatattttgttttatctgtctacctagcaatagtatgaagccattttcttccccttcagaggattctgttacaattgggggtctcttgtttctaacggtggcaaagatattgtggattgccctcagggtactcccctgcaccgccactttacaggagcttccctctctcagtttcagttcaactctcagctcacgatctcctcctccccacctttgttttcaggagatccttccgaatatgtggattaccwttacatgtacctctctagctacttttaaaatatcttccatgagactggcgtttctcagtattcttatatgcctttagatgtgtacctttttgtttactcgataattttaaactgtgctttgtgtacctgaggatttatatcttcaatatcttcagaaaatgtttcagttatgtcttcaaaaaatacttgtatcatgtcttcaccatgcgtttcgcttttcactttggactatttcattagccatgtatgatagactttcccattctattcttcatgtttcctaaattctctcatattttgwtttatctgtctacctagcaatagtatgaagccattttcttccccttcagaggattctgttacaattgggggtctcttgtttctaacggtggcaaagatattgtggattgccctcagggtactcccctgcaccgccactttacaggagcttccctctctcagtttcagttcaactctcagctcacgatctcctcctccccacctttgttttcaggagatccttccgaatatgtggattacc

SEQ ID NO: 281278 - DNA, 541 bp, Homo sapiens
ttacatgtacctctctagctacttttaaaatatcttccatgagactggcgtttctcagtattcttatatgcctttagatgtgtacctttttgtttactcgataattttaaactgtgctttgtgtacctgaggatttatatcttcaatatcttcagaaaatgtttcagttatgtcttcaaaaaatacttgtatcatgtcttcaccatgcgtttcgcttttcactttggactatttcattagccatgtatgatagactttcccattctattcttcatgtttcctaaattctctcatattttgttttatctgtctacctagcaatagtatgaagccattttcttccccttcagaggattctgttacaattgggggtctcttgtttctaacggtggcaaagatattgtggattgccctcagggtactcccctgcaccgccactttacaggarcttccctctctcagtttcagttcaactctcagctcacgatctcctcctccccacctttgttttcaggagatccttccgaatatgtggattacc

SEQ ID NO: 281279 - DNA, 469 bp, Homo sapiens
aattaaaaaatcaatagattaagatattttgacatttttctctctgtataaaatgtagcaagcacattaaaatgtaataaagatgtacaaggcttgaacaacactattagtcaaattgaactaattgatatttatagatcactgcaccaaagttataatatacattttttaagtacatgttatatatttaccaatatagctgatattctagaccatacaataatgtaaataaattcaaacagattgaaatcacacaaattttgayataaacaaactataaagcaataacagaaatatagcttgtagaacatttagtactacatttgtaaataatccacagactaaagagaaaaacaaaaaggaaattagaaaatatttttaactgaatgaaactaaaaatacaacgtatctatatatttgtaggccccagctaaatatttatattagaaagacagaaatttgaaatcaa

SEQ ID NO: 281280 - DNA, 502 bp, Homo sapiens
ataccttctcaagaagtgatgcttaagtgtgggctgctcaatgacttattttcaaagattatagtatgaaaataggaaaaaagtagtgttacagtgaagaaaaatgagaactattacctcggccatgtgatgatagttaatattaatgacatgttcataccatgtattcttaatatgatgtgatgagaatagcactttgcctctgtaatcttcctccttccccctaaaaatgtcaccaaagtctaaccattaaaaaaaatcagataaacccacattgagcagggttctacaaaacagctggtcaatgctcctccaacggtcaaggttatcrgaaacaaggcaagtttgagaaactgtcacaggctacagaagcctaaggggtcatgagaactaaatgtcatatatcctgcatggaactctgaaacagagaaagaacactgagtaaaaactaagaaaatctaaatatgtaaaagctttagttaataacaatgtatcaatgtta

SEQ ID NO: 281281 - DNA, 595 bp, Homo sapiens
attacactgatgctggcccatggcacgtggtgaytgtatgagttttgggaaaggcagaggagtcatgcaaggaacatgcaaaactctgggtttccttttgaatttggcatcatgatctgcacttctgcatctttattcaatataaagaaaaatatcttaaagaaaagaagtaaattataggattgccagttttgactggggcttaattctattctttaatattttgtaaggtttgcttgattcacaagcttatttcattcaccatatccaaacacaaagatgacctaaaacttataaatgttttaaccctgtcagactggtggatcaggacctttgagaatgaggggtggaaagtaagaataaagtgagaagttgtggataagtaaaaatgagaacctatgttttgttaaaaatttttctccgttccagttagagtgtgtcttgacatttactaagatagttactctcatccttgcattttacctttaaaaaatatcattctattctctaatatttataactgaaatctgaatgcctgcttgcaaattgtattgactaaacattgtcacaatttagtgattcaactgtactacct

SEQ ID NO: 281282 - DNA, 1171 bp, Homo sapiens
attacactgatgctggcccatggcacgtggtgactgtatgagttttgggaaaggcagaggagtcatgcaaggaacatgcaaaactctgggtttccttttgaatttggcatcatgatctgcacttctgcatctttattcaatataaagaaaaatatcttaaagaaaagaagtaaattataggattgccagttttgactggggcttaattctattctttaatattttgtaaggtttgcttgattcacaagcttatttcattcaccatatccaaacacaaagatgacctaaaacttataaatgttttaaccctgtcagactggtggatcaggacctttgagaatgaggggtggaaagtragaataaagtgagaagttgtggataagtaaaaatgagaacctatgttttgttaaaaatttttctccgttccagttagagtgtgtcttgacatttactaagatagttactctcatccttgcattttacctttaaaaaatatcattctattctctaatatttataactgaaatctgaatgcctgcttgcaaattgtattgactaaacattgtcacaatttagtgattcaactgtactacctwcctgcagtttagcattttgttaaaaaaaaaaaatcaagtaaaaattaacttgtaaccttaaaattatgtaatcctttttgtgtagttgaaactcagtttcatgaaagtaaaggaatgttaactgaatatgacattataggctgtccctatccttttagtgacctatttctgcatcatgagtwccacatgagctcgttaatgcaccaagtgtatatcatagataatttgatttcttgggtcaggggttttccttttttttaatattagaacatattcttcagatggtatttgttcatacgttggctgaaatactgccatggaacataatctggtctgatgagaggctattgcccacctcctcctgctgtggactctgcagctgctcgtgcctgccctgaggccaagttctggagccacttttctgtgaggattaaagtacaaggcatagtttaggctcagggtttaggtttcaccaggctctccctatgtgtctggccccatttgctcctgtctgagatggagggagaattctgctgtgtctaatgaaagcattgaaacatttggcccgtggacca

SEQ ID NO: 281283 - DNA, 1049 bp, Homo sapiens
aatgaattaaaaacgaagtttataatcaagagggaagcagagcttaaagttttggaaaattctcagcctggccatgtaaagaatgaaaaggcatgtttgggagggaacaccaagagtgctgccaggttcacatttgataatgagatgagtatgtgtagaaggaagccagatgctatttatcaagacaatggaagaatgaacccaaaggcatttctgaggttactggtkctggattctcaaccctgtcccagagtgccaggaccctgagggcagaatagttttaagggaggactcaggacaccatggaaccttggggcttgctgcctagggctgcctcaagtctctgccccccaccccccacattctggtgcagcattctttggccaccatcccaggtgtggcttatgcaggcccttgtcaggccacccttcctgtaagccttggcagagtccacgtgatgctaactctgcaggtgcacagagtgcatgaactgtggagacacagccacctccacctagattttgwaatgaattaaaaacgaagtttataatcaagagggaagcagagcttaaagttttggaaaattctcagcctggccatgtaaagaatgaaaaggcatgtttgggagggaacaccaagagtgctgccaggttcacatttgataatgagatgagtatgtgtagaaggaagccagatgctatttatcaagacaatggaagaatgaacccaaaggcatttctgaggttactggtgctggattctcawccctgtcccagagtgccaggaccctgagggcagaatagttttaagggaggactcaggacaccatggaaccttggggcttgctgcctagggctgcctcaagtctctgccccccaccccccacattctggtgcagcattctttggccaccatcccaggtgtggcttatgcaggcccttgtcaggccacccttcctgtaagccttggcagagtccacgtgatgctaactctgcaggtgcacagagtgcatgaactgtggagacacagccacctccacctagattttg

SEQ ID NO: 281284 - DNA, 524 bp, Homo sapiens
aatgaattaaaaacgaagtttataatcaagagggaagcagagcttaaagttttggaaaattctcagcctggccatgtaaagaatgaaaaggcatgtttgggagggaacaccaagagtgctgccaggttcacatttgataatgagatgagtatgtgtagaaggaagccagatgctatttatcaagacaatggaagaatgaacccaaaggcatttctgaggttactggtgctggattctcaaccctgtcccagagtgccaggaccctgagggcagaatagttttaagggaggactcaggacaccatggaaccttggggcttgctgcctagggctgcctcaagtctctgccccccaccccccacattctggtgcagcaytctttggccaccatcccaggtgtggcttatgcaggcccttgtcaggccacccttcctgtaagccttggcagagtccacgtgatgctaactctgcaggtgcacagagtgcatgaactgtggagacacagccacctccacctagattttg

SEQ ID NO: 281285 - DNA, 532 bp, Homo sapiens
aatcaggtaagcaaaaaatatttacttgttgatttttctacttatgcaaagccaatattacatttttataatgtgttaagattttgaactataactacagaagaagttttaaagaaaagtattactgacttataaaaccatgagaatagtgtagaaacacctgcacaatacttattcacacccacacattagttattctttttttttttttttttgagacagggtctgtctctgtcacccaggctggagtgcagtggcgcaatcactgctcactttgtccccaacctcctgggctcaaacgatccttccacttcagtcttcttactaggctaatattcttattgtgaggctaatcyggatgggtattaatattgcccctgaagaacacaagaacatactcatggttatctaatccaatattcactgctccctttcaaaataaaccattttatcagaataaaccattttaccagcagtgacatatgttctgaaataataattttatatatgtttttaatctttggtacaaaat

SEQ ID NO: 281286 - DNA, 514 bp, Homo sapiens
gaaaatgctccaactgattcttatacactgtacgttgaaaccatgtcctttctagtctgatttcataggcaaaaagtagtcatatgcccatatggcatattgttgcagtgggactgggaaatagagtttcttgctaagcagtttgtcacttaagagtttctggaagatggaatgtgaatttttaggtgaacagctagttacctctgccagagtgactctgattgggttcttgttaatctttagcaatctctaaaaatggtgtgtcaaagtgccaatcctttcccttctgggatcagaactttgttagggtaaagtttggasggagaaaaatgactgctgactttcttccaaccatctcaagtcccagagcatagggtggtagacatgtccttcacctgcccacacagttggggaaggacctattgctggctcccttaggcaacatctagagataataaactcttcactgttggtagcctttcccagcattttcctcaataaatatttcttatta

SEQ ID NO: 281287 - DNA, 600 bp, Homo sapiens
gcttttctggcttccattttggagttatttgtgacctatgcctaatgagtagcaattgctgatatgaatttgttatactatcagaagctgaaatatgtatgaatgttgtaagaatcatagagtatctcttgtaatagctgttataaaataaagcgatatgtgtttgttcagcrggtacacagtctcagtttgggataaaaatttctggagatggatggtggtgatagttgtacaacaatgtgaattcatttaatactactgaactgtgcatttaaaaatgttaaaattttatattatgcatttcttataacaataagaaagtaaaaacagtgcatttgagtcctcaataatatttaaaaactagaaaactgtagcacatgtgtatacatttctataaatttgtgtatattcttcatcaagtttttagtcaaaggcctgtattctttcattgaaccttgaatgatcaatactgctgtattacaagctcaagtggatgaggcattgtgaagagaacgtaaaaaacaacttgtagctattgctaaggatgttactataaggaagcaagcatacaaatattaacataaatgacagaataaagta

SEQ ID NO: 281288 - DNA, 600 bp, Homo sapiens
gcttttctggcttccattttggagttatttgtgacctatgcctaatgagtagcaattgctgatatgaatttgttatactatcagaagctgaaatatgtatgaatgttgtaagaatcatagagtatctcttgtaatagctgttataaaataaagcgatatgtgtttgttcagcgggtacacagtctcagtttgggataaaaatttctggagatggatggtggtgatagttgtacaacaatgtgaattcatttaatactactgaactgtrcatttaaaaatgttaaaattttatattatgcatttcttataacaataagaaagtaaaaacagtgcatttgagtcctcaataatatttaaaaactagaaaactgtagcacatgtgtatacatttctataaatttgtgtatattcttcatcaagtttttagtcaaaggcctgtattctttcattgaaccttgaatgatcaatactgctgtattacaagctcaagtggatgaggcattgtgaagagaacgtaaaaaacaacttgtagctattgctaaggatgttactataaggaagcaagcatacaaatattaacataaatgacagaataaagta

SEQ ID NO: 281289 - DNA, 333 bp, Homo sapiens
ccagatgggactacctagcttcaggaaaacaagctcagggtacccactggttctacatcatggtgagttgtataagtcttacattctatattacaatgtaataacaatagaaataaactccacaataaaagtaatgcacttgaatcatcctgaaaccatcacccccacccccarccccactgccctggtttatggaaagattgtcttccatgaaactagtccctggtgccaagaaggttggggactgctagaacacaacaaagtggggtaatttcttaactgttgctgcattccagaacattcaggcaaagtttaacattgtcaatgtaaagt

SEQ ID NO: 281290 - DNA, 499 bp, Homo sapiens
gtcagtcattttcttcttggtgaatatatagcaccttgcatatgattttaataagcttattttttattgcttccctattgtgaagtccttgaggacattttttaataatgtctggaacaaaatatatatttagtaaatggttcttgaatgaataagcaaataatatggacagtaaaacagagggaaggaatgtgagactgtcctctctgggattctggtggcactttargtagtaattgattctggaagagatctgaagtctattgcatacaagctggaaattcagaatcagagtcacagagtaaggactagtaaggaaacaggcttatgaacaatatttaaagtagtaaatttatcattatctgagttatatcttaaatttattcacataattgaacttcttttatgctttcttgggtagtcaaagtcttatcaaaaaacaagcacaaaaaaacaaaacaggataatgtatatgtatgtgtatattcttgaaaattgt

SEQ ID NO: 281291 - DNA, 582 bp, Homo sapiens
tacaccgtccttttaaccctctacaaaggctaccttgaaaaattcactccttatagagtcagtcattttcttcttggtgaatatatagcaccttgcatatgattttaataagcttattttttattgcttccctattgtgaagtccttgaggacattttttaataatgtctggaacaaaatatatatttagtaaatggttcttgaatgaataagcaaataatatggacagtaaaacagagggaaggaatgtgagactgtcctctctgggattctggtggcactttaggtagtaattgattctggaagagatctgaagtctattgcatacaagctggaaattcagaatcagagtcacagagtaaggactagtaaggaaacaggcttatgarcaatatttaaagtagtaaatttatcattatctgagttatatcttaaatttattcacataattgaacttcttttatgctttcttgggtagtcaaagtcttatcaaaaaacaagcacaaaaaaacaaaacaggataatgtatatgtatgtgtatattcttgaaaattgtgtacctaactgtgaaaatgtgtgtgt

SEQ ID NO: 281292 - DNA, 581 bp, Homo sapiens
ctggaaacatcacacatcctgattccaaactatgttacaaagctagactaatcaaaacaataggtactgtcataaatactgtcttactcttaaatccctgattttattagctgcttttgctgagtggggcttggttaactcttttaaatttttgtaaaaatgtttttctctgagtcttttttgaataagagctttattgagatataatttacataccataaaatctaccactttaaagtgtacaattctgtgtttagtatattcacagaaatttgcaaccatcactactatctaattttagagtatacctaccgatccaagaagaaatttgtccaccaaaaataacaacagagagaggcaggccctctgttggggaatagtagggaattgcaatttgagatatggatgctatgatggattataggtacatctgaggaggctggggtatggaggagcatttaaagacaaaagcaagaagcacatataagttgtcttgaaacaaagagaacattggcatgggggcttcttgcaggarttgacatcagttcattagtggaaagtgtgtcaaacaagtgttcttg

SEQ ID NO: 281293 - DNA, 614 bp, Homo sapiens
ttctttgcaaatacaaaatcatgtaacatgtaaagagataaagtacaattgtaattttaaatgaggaagatactgcttcaagctggaggaatcagggtgtcaatgaaaagagccaaactctgtaaaatatttgataaataaatatttatcaaatattcaatatcaaaaatcaaaatatcaaaaaaatcaaatatcaaaaatatattaaataaaataaagatttattctgagccagatatgagtgaccatggcctgaggagtggtcctgagatcattggcccaaagtgtttgygctacagcttgatttttatacattttaaggaggcagaaattacaggcaagtacataaatcagtacatgtaaggtgtacattggtttggcctcgaagggcaggacatcttaaggaggtagtcagggcagagagggcttagagaaaatatatggcaagtgtttcctatttagacttttgaaaggtgccagtctttcagatcagttaatctcttcaggattgggagggcctggaaggaaaaagatctaattatgttaatagatattctttacagataccgattttctcccacaaaagacagttttcagggccacttcaaaagtat

SEQ ID NO: 281294 - DNA, 604 bp, Homo sapiens
cttgataactgatgttctaaaatgtaagtataaaatcgagtctcaaattctatgtacagaaagctactcatggcttatgctttagaatttactcttacacagcaatgaatacaatctcaatatgtatgaagaaggaattatgagttaatcagggtcacataagcgatcacagaatatacgctgaaagggcactattcaaggaaaagcataaatcactagaatataagcttcatgagggtatasatttttgtctgttaggttccctgctgtatacttaacacaatgaattagacaagaattattgtactacttctcaaatgcctggaacatagtgaacagtctatactaaaatacactgcattgcgtaaagactcagattcattcaacacatttaaaagattcaaaatgaatatacagtaggtcattttgcagatataaaaaaatagaatgatgcatgtctgtatctatgagattaaaattgaatttggattagagaagcacccaagcttgtttatcaggagacaaccaaagagtagcaatcttagtagttccagcaggagagtctaacagtggtgaagtagaaaagtggacagatttactatgt

SEQ ID NO: 281295 - DNA, 541 bp, Homo sapiens
tgaacagtctatactaaaatacactgcattgcgtaaagactcagattcattcaacacatttaaaagattcaaaatgaatatacagtaggtcattttgcagatataaaaaaatagaatgatgcatgtctrtatctatgagattaaaattgaatttggattagagaagcacccaagcttgtttatcaggagacaaccaaagagtagcaatcttagtagttccagcaggagagtctaacagtggtgaagtagaaaagtggacagatttactatgtacttagaaggtccagataaatcatacctggtgattaactgaatattgaagataagaaagtggctgatgtcatggaggactcattggtgtcaaacttggtaagaggtttgatagtattccacttgctgagacatgcaataacaaaggggcatactttgggaagaccacagaatcattcgtacatccttggagcttgattcacatggaaaaatatccaagtgaagacagggccaactacatattttctggggccaagtgcaaaatgaaaat

SEQ ID NO: 281296 - DNA, 604 bp, Homo sapiens
cttgataactgatgttctaaaatgtaagtataaaatcgagtctcaaattctatgtacagaaagctactcatggcttatgctttagaatttactcttacacagcaatgaatacaatctcaatatgtatgaagaaggaattatgagttaatcagggtcacataagcgatcacagaatatacgctgaaagggcactattcaaggaaaagcataaatcactagaatataagcttcatgagggtatagatttttgtctgttaggttccctgctgtatacttaacacaatgaattagacaagaattattgtactacttctcaaatgcctggaacatagtgaacagtctatactaaaatacactgcattgcgtaaagactcagattcattcaacacatttaaaagattcaaaatgaatatacagtaggtcattttgcagatataaaaaaatagaatgatgcatgtctgtatctatgagattaamattgaatttggattagagaagcacccaagcttgtttatcaggagacaaccaaagagtagcaatcttagtagttccagcaggagagtctaacagtggtgaagtagaaaagtggacagatttactatgt

SEQ ID NO: 281297 - DNA, 517 bp, Homo sapiens
tgggttgttaagggaaattatgggaaataatgcttaaaacatttttttktgtgtgaaatttgtacagtctcaggcatgcagttaatcattgttttatcaatgtggggggcacccttctgcaggtggcctcagcctgtccttatcaagctggccagcccattcccaaagctgttggtctgtgcattttctttcataccggttgaaggtcctgttttcctgagactgcttttagtgaataatctacaaactgaagcaaagcagtaattccatttaagtaagcaaattctaaagtgaaaatttggcagtgaaatcttctaattttagaatatttttagggccaagcatggtggttcatgcctgcaatctcagcattttggttgtttcctcatgttggccaggctggtttcgaatcacgacctcaagtgatctgcccgcctcggccttccaaactgctgggattacaagggtgagctacaacacccggccacaaaaaaaaaagaaaagaaaagaaaagaaa

SEQ ID NO: 281298 - DNA, 623 bp, Homo sapiens
ttcatcttgataatatcaaggaaggtgataatgatggtgatcgtgtgataatgtgctagaaacagtgatggtgatgatctcaatatacctgtgcagtatttttagaatagaaagcgattctcactggtattatcttttcatcatagttttgtgagatagatattcctcttcattttacataygaaaaactatagtccagaaaggtaaaataattcacatatcatcaaacgttactcaaatatttcttaactgaaaaattagttcctagttttgcaacacacaaagttttccttctattaatattataaagtatctaaaatagtactcctactatcattttacatttctttattgttagcaaacattcagtctttacatttatgatctcatattgatagtccaatagaagaagagagattggtattattatctcagtggtataggtgaagaaactaaggaagtggggaaagaattaattcacttgcctaatgtcactaaatgtaatagcatacaagtataatttggtgttctgtgaattagtagcaatgaagtaatgataaacagctccacaggcttgttcactgtacaaattcagtaattttgatatataactcaatggttca

SEQ ID NO: 281299 - DNA, 1201 bp, Homo sapiens
aaggattgcattaaatctgtagactgctttaggtagtatgracattttaataatattgatttttccaaatgaacatggaatatcttttcattgtttggtgtcctctttaaattcttgactcaatgtttcatagttttcattgagaagatctttcacatcattggttaattcctaggtattttactttatttgtagctaacgctagacctcacttgaagtcagtacatctcagagtctcattcaaggtccacggtataccccctgggtattgctgctggttattcacgacccaaggctctttagtcagcaggcaatggatcctggcaagactgggagcttccttgcaaggcagtgggttctcttttgggccagggtatgtctaaaaatgtaatctggggaagggcatagtatgggggcctcgttactctgatcagtgtcctatccttctgtaactgagctggcatccaagatgcaaatcaaaagtcctccatactcttccctctcctcctttcaagaggaagaaagggcaccttttgcagctgtgagctgtactgcctggggttgggggaggagtggcacaagctctcccttagctgccctwaaggattgcattaaatctgtagactgctttaggtagtatggacattttaataatattgatttttccaaatgaacatggaatatcttttcattgtttggtgtcctctttaaattcttgactcaatgtttcatagttttcattgagaagatctttcacatcattggttaattcctaggtattttactttatttgtagctaacgctagacctcacttgaagtcagtacatctcagagtctcattcaaggtccacggtataccccctgggtattgctgctggttattcacgacccaaggctctttagtcagcaggcaatggawcctggcaagactgggagcttccttgcaaggcagtgggttctcttttgggccagggtatgtctaaaaatgtaatctggggaagggcatagtatgggggcctcgttactctgatcagtgtcctatccttctgtaactgagctggcatccaagatgcaaatcaaaagtcctccatactcttccctctcctcctttcaagaggaagaaagggcaccttttgcagctgtgagctgtactgcctggggttgggggaggagtggcacaagctctcccttagctgccct

SEQ ID NO: 281300 - DNA, 600 bp, Homo sapiens
aaggattgcattaaatctgtagactgctttaggtagtatggacattttaataatattgatttttccaaatgaacatggaatatcttttcattgtttggtgtcctctttaaattcttgactcaatgtttcatagttttcattgagaagatctttcacatcattggttaattcctaggtattttactttatttgtagctaacgctagacctcacttgaagtcagtacatctcagagtctcattcaaggtccacggtataccccctgggtattgctgctggttattcacgacccaaggctctttagtcagcaggcaatggatcctggcargactgggagcttccttgcaaggcagtgggttctcttttgggccagggtatgtctaaaaatgtaatctggggaagggcatagtatgggggcctcgttactctgatcagtgtcctatccttctgtaactgagctggcatccaagatgcaaatcaaaagtcctccatactcttccctctcctcctttcaagaggaagaaagggcaccttttgcagctgtgagctgtactgcctggggttgggggaggagtggcacaagctctcccttagctgccct

SEQ ID NO: 281301 - DNA, 600 bp, Homo sapiens
ttttcctatgctcttatttcatatctaattgtcttttttcctgggaagttaatttttttaattcttttgtgacatttttattgggtttgaagataagttaaattcatgtagtcagttcatcttatttaacaatgmgtctgcattaattttttaaattagtgccatttccaaagtttccaaaacttctaatgatgagataatatcaaatgagataaattagaaagctattagatttttgtgactagtatagtcacaaaaaggaaaaggaaaagaaagacattttcagttttgtcaatgatttgaaatataaaaaggaaacaatctgggtatttttctttgtgctttacaacatttgggcaaaattttctcttggagttaggtctgttttgcttctctttcaggataacagcctgatgtttgccttcacaatcaattcccattcctttccatttggagctgataaatcttcactgcaaatggcaagtgaggtcaaagacatcccaggatagaagtcttcagtcttcaccagatgcaatttgacactcggaagcctggtgagaaggatcaggcaggaaccagtgagggaatgggaatcatttg

SEQ ID NO: 281302 - DNA, 600 bp, Homo sapiens
ttttcctatgctcttatttcatatctaattgtcttttttcctgggaagttaatttttttaattcttttgtgacatttttattgggtttgaagataagttaaattcatgtagtcagttcatcttatttaacaatgcgtctgcattaattttttaaattagtgccatttccaaagtttccaaaacttctaatgatgagataatatcaaatgagataaattagaaagctattagatttttgtgactagtatagtcacaaaaaggaaaaggaaaagaaagacattttcagttttgtcaatgatttgraatataaaaaggaaacaatctgggtatttttctttgtgctttacaacatttgggcaaaattttctcttggagttaggtctgttttgcttctctttcaggataacagcctgatgtttgccttcacaatcaattcccattcctttccatttggagctgataaatcttcactgcaaatggcaagtgaggtcaaagacatcccaggatagaagtcttcagtcttcaccagatgcaatttgacactcggaagcctggtgagaaggatcaggcaggaaccagtgagggaatgggaatcatttg

SEQ ID NO: 281303 - DNA, 263 bp, Homo sapiens
caattcccattcctttccatttggagctgataaatcttcactgcaaatggcaagtgaggtcaaagacatyccaggatagaagtcttcagtcttcaccagatgcaatttgacactcggaagcctggtgagaaggatcaggcaggaaccagtgagggaatgggaatcatttgctaaaagttgtttggtgatttggtttaagatatcggtgatttatcagatccttgtcagttataaatctccaggagcctaaatgaataaaaaac

SEQ ID NO: 281304 - DNA, 421 bp, Homo sapiens
gtagctaataacctatgccacactgacatacgtatattatggagcaaaagaaggccttaaaaccttcattttattatgctgcttagargtatcagaggttttacattttgttcttaaatttgcagttgaaaagctgtgaagataaatttgagatgcctaagggagagagcctatgatattgaagaaagaatttgaatacaattatcaattaattatgcaatgataacaaaatgtattgcaggcactgtactcaagactgtctcctgaggaatattgttgtagcaaaggttggtaagcctcgaagccctctatgagtgaatatcattgatggcttcaaacaactgtaggagcagtcatgtgaaagatttaccccttatggtcctaggagcgatattaggtataaggtgttgaaaccacagtc

SEQ ID NO: 281305 - DNA, 421 bp, Homo sapiens
gtagctaataacctatgccacactgacatacgtatattatggagcaaaagaaggccttaaaaccttcattttattatgctgcttagaagtatcagaggttttacattttgttcttaaatttgcagttgaaaagctgtgaagataaatttgagatgcctaagggagagagcctatgatattgaagaaagaatttgaatacaattatcaattaattatgcaatgataacaaaatgtattgcaggcactgtactcaagactgtctcctgaggaatattgttgtagcaaaggttggtaagcctcraagccctctatgagtgaatatcattgatggcttcaaacaactgtaggagcagtcatgtgaaagatttaccccttatggtcctaggagcgatattaggtataaggtgttgaaaccacagtc

SEQ ID NO: 281306 - DNA, 486 bp, Homo sapiens
tgtggctgccagagatgatgggggaggtagaatggatcactggtggaaggtgtaggatcatagaatggcagacaagatttgagccaggtgtcttttcttttttgatgcctccagatcactcctcgaacctgttctctgccccaggaggttgaggtgtctratctatagccatgaatgcctgtgccctcgactttgagttgggcagtgtaatggttattttaatgcatcaacttgactgggctaaaggatgaccgtaaagttgatacagcattatttctaggtatctcactttctttttcaatgagttcatattcattgctgtgaaggtcaacaccttctgactttatcttttcactaaagtatatctttgctacctccctagactaatttatagacaccatctgttaaattctgactgatactaaaaaattaatggttgaaaataaataaacattttcaaatctcatggtaatgtcaaattttcag

SEQ ID NO: 281307 - DNA, 597 bp, Homo sapiens
atgatgttgttccacaagactctgtcagcataatccacagaacgacttgtgttgaagattatttgtgggggtggcctttgtctgacagaatgtaatgaaataagatgcatagtaaaactcaaaaatattttattagaattatattgggagaacgaccatcgatttagaaacatttttaaatacaaagagctgtcagaatccyctggttcttacaggaagaagctcagattattacttaaattcaaatacagctgtagtttctatgcattgagagtggaatgtgctctatcttcttataaggacacaaatcctattgaatcagaacgccacctgtctgatctcatttaaccttaattacctctttagcggattcctcttcaaattaaatcacactgtgaagcagggcttgaacatatacatttttgggaagacacaaacagtctataacagctattattttttattattcttacttttttccctctaaaaaagtgttctaggtttgatgataagttacatgatcacttaaggtatatgcatacttaaattctctaagtcgtgttagactactctctaaatagacaattggaccttata

SEQ ID NO: 281308 - DNA, 560 bp, Homo sapiens
taaatttgtgcaagcaaccaaatctaataatatggggcattaatggagattggtttaaacaaaagtaacagctttgcttgccttagcttacccaatttatgtttaggacctgccacatcgaccatacccacgattccaccttctgatataaaccgtttgtcagcttctgaaaacccaatayagaaaaatgatggttatttccaacaacatgtacatttgaagttttttgttactatttatgccagaatgaaacacatatgtaactttccttgttttttcctccttgtacattcctgggttttgaaattttgaataaatcaccacaggagaagtttaaaaattgctatggttttaacagctttgctcttttttctttaacctgattcagtttgtttgttggaactgatttatttgaattggtgagttttattgatttttttcatgcctgatttaattcaatcaaattgccttgttccaagttgtgtaaatgagttttattttctaacccaattaggaaaagcttataggatgttgttcatgtaagaattggagaataacca

SEQ ID NO: 281309 - DNA, 635 bp, Homo sapiens
aagtgcagtgatttctcatgaggtcctgaaaacctctaaataatagccaacataaatttaagatagaaggtaaaatgccttgcataaataatacattcttaacaattttgtatgagtcatttgaaataaagtgtgtgcaatggtattattctctgatgtaaccgccttactttgcatgaaactaaaaattaaatcatctatactgcaattaacatatctaagtcaaatttyctgactgtcatacagctctgcgttaccaaattgaaatacatatgtaaagatagtccccctttctttaactaaatattaatgtatcaatcaatttcattgaaattattttcttaattggtgtaaggtttattgactaaatcaaaaatatgattgatattttttggtgcatacaaactgtatcatacagatctctgcccattttcttgctttctgataggcaccattctttttctttgagtgtatgttctcttgaccagttctaactttttatttacttctgaaacaaatttgttattgtctttgttctgtttcctgagttcagtcactttattcccacatttttaaaaattgattttccttcttagtttttgaatttttaattccaagtggtttgtaataccctc

SEQ ID NO: 281310 - DNA, 635 bp, Homo sapiens
aagtgcagtgatttctcatgaggtcctgaaaacctctaaataatagccaacataaatttaagatagaaggtaaaatgccttgcataaataatacattcttaacaattttgtatgagtcatttgaaataaagtgtgtgcaatggtattattctctgatgtaaccgccttactttgcatgaaactaaaaattaaatcatctatactgcaattaacatatctaagtcaaattttctgactgtcatacagctctgcgttaccaaattgaaatacatatgtaaagatagtccccctttctttaactaaatattaatgtatcaatcaatttcattgaaattattttcttaattggtgtaaggtttattgactaaatcaaaaatatgattgatattttttggtgcatacaaactgtatcatacagatctctgcccattttcttgctttctgataggcaccattctttttctttragtgtatgttctcttgaccagttctaactttttatttacttctgaaacaaatttgttattgtctttgttctgtttcctgagttcagtcactttattcccacatttttaaaaattgattttccttcttagtttttgaatttttaattccaagtggtttgtaataccctc

SEQ ID NO: 281311 - DNA, 575 bp, Homo sapiens
aggttgagcatccctaatcctcaaatttgaaatgcttcaaaaatctgaaagcatttttgagcatcaacatggtgccacaagtggaaaattccagacttgacctcatgtgacagattacagtcaaaatgcaggcacatgatgcacagtttattcaatgtccccaaatgaaaaaagaccctaccagccccttcatctgatatacatgttttccaaatgccttacaaagggtaatttaaaaaaatctgtttcctgcacaaaattattaaaaatatcatataaaattaccttcaggctatctatataaggtgtgcatgaaacaagcataaatatttttgtttaggcttagatcccatccctaagctatctcattacatatatgcaaatattccaaaacccaaaaatattctatatctgaaacacttctgatcccaagcattttggataagagacgttcaccytgtattgcctaattgccccttattgccaatgggacaatatatatttctactgggaaaatatgaaaatatctgttttcacaccttgccaatgtactatgacattttgaaacatttctc

SEQ ID NO: 281312 - DNA, 1179 bp, Homo sapiens
cttaagaacagtggatatatacacggtgaaaggcaattggagagatagtcaagataaaggctaaatgacagacaaacaagtttttggggaaaaatgggaaataagacgactgagaggagccctcctggggtcagaacaaatattagactcagaaactacttcttcaaaggggccagaagttgattggtttactttgtagaacagtttatgtcctagaatgttgttgaaaacagtagagcaatcagttggcaattagtggagtttaacagctgaatgtggtcagagaaagagaagaaagccttaccaaaattaccaccatatttggctatgggtatattcatrtttgtacctctctgaggagaaatatcagagtctttacactgtgtgctggggttgggaatgagagagaaaataaacttcactaaaataatccagatattcactaaacaaataaacaatcaaataacaataatacacccagaagaagggcagcagtattccgagtggctgcaataagctattaaagatgtcgaacttcaaacaataacaacaaaatgaggcatgtcactcaacaggaaagtacgacccawcttaagaacagtggatatatacacggtgaaaggcaattggagagatagtcaagataaaggctaaatgacagacaaacaagtttttggggaaaaatgggaaataagacgactgagaggagccctcctggggtcagaacaaatattagactcagaaactacttcttcaaaggggccagaagttgattggtttactttgtagaacagtttatgtcctagaatgttgttgaaaacagtagagcaatcagttggcaattagtggagtttaacagctgaatgtggtcagagaaagagaagaaagccttaccaaaattaccaccatatttggctatgggtatattcatgtttgtacctctctgaggagaaatatcagagtctttacactgtgtgctggggttgggaatgagagagaaaataaacttcactaaaataatccagatattcactaaacaaataaacaatcaaataacaataatacacccagaagaagggcagcagtattccgagtggctgcaatawgctattaaagatgtcgaacttcaaacaataacaacaaaatgaggcatgtcactcaacaggaaagtacgaccca

SEQ ID NO: 281313 - DNA, 627 bp, Homo sapiens
caatgagctcaaggatttccaaacaagatacatacaaagaaaatcactcttaagcctaccatggtcaaattgctgaaaataaaaaatagtgaatcttaaaatcaacaggaagtggggcaagggtggagagaaatatgtcagataggtcatgaaagatagataggtcaatgaaaacaatgatagctgaattcttattagggacaaygtaggccagaaagcaacagaaacacatttttaaaaggctaaaagaaaaaaaaagagctatcaatagttaactacctctatttatcaaaatatcaaaatattctttaaataaaaaggcaaaataaaatattttcagaaaaacaaaatttgagagagtgtacactacaaaaataactaaaacaagttctttagagtgaaggaaaatgaaacctaaggaaaacccaaatctgtaggtagaaaagaaaaataccagatttggcaaatataaaagacattttaaagtattttcaacaaattcagctgagaaaaatggatattcacatgtaaaataatgaagttggacctttgcctaatatcatatacagaaattaactcaaaatgtgtccaagatctaaatgtaaggttaaaaactgtaaaactcta

SEQ ID NO: 281314 - DNA, 545 bp, Homo sapiens
tttaatatatgttaatggatgagacactccaattgagaagcagagtgctcaggctggatacaaaarggcaacattcaactatacacttaaaaaaaacccactttaaataaaagggcacagacacactgaaaataaaagggcggaaaagatacaccccataaacacaatgcataagaaattagtggggctaggttggtatcaaagaattgtcagaaatagagacgtttcataatggtaaagggatgaagttatcaagatgtaacagtcctaaatgtttacacattaataacagagcttcaaaatacagaaagcaaaaactggtagaactacaaggagacacacacacacacaaaaaaacaataatagttggggactttcacaagtctctcttagtaattgataaacaggtaaacacaaaaccagcaagtacataaaagagcagaacaacatgtcagccaacttcacctaattgtcatgtacaatgtgccaaactcaacacctgcaaagtatactttctttttgagtaaaatattctattcaccaga

SEQ ID NO: 281315 - DNA, 545 bp, Homo sapiens
tttaatatatgttaatggatgagacactccaattgagaagcagagtgctcaggctggatacaaaaaggcaacattcaactatacacttaaaaaaaacccactttaaataaaagggcacagacacactgaaaataaaagggcggaaaagatacaccccataaacacaatgcrtaagaaattagtggggctaggttggtatcaaagaattgtcagaaatagagacgtttcataatggtaaagggatgaagttatcaagatgtaacagtcctaaatgtttacacattaataacagagcttcaaaatacagaaagcaaaaactggtagaactacaaggagacacacacacacacaaaaaaacaataatagttggggactttcacaagtctctcttagtaattgataaacaggtaaacacaaaaccagcaagtacataaaagagcagaacaacatgtcagccaacttcacctaattgtcatgtacaatgtgccaaactcaacacctgcaaagtatactttctttttgagtaaaatattctattcaccaga

SEQ ID NO: 281316 - DNA, 642 bp, Homo sapiens
agtctgcacttggtagtattatattaagattttattatattaagatttaattaacacagttttacataatatgcacttcttgagttataaaatatatgaatacatttatacaactagaaacagtgaaataaaaatcaaatctaatgagcaagattaggagaattgggctggttgcagtagctcacacctgtaatcccaacacttcgagaggccaaggagggaggatcacttgacccaagagtttgataccagcctgggtaacatgatgaaaccctatcactacaaaaaattagccaggcttggtggagcatgcctgtagccacagctacccacgaggctaaggtgggaggatcacctgagcctgggaggtcgaggctccarggacccatgatcacatcactgcactccagcctgggtggtagagtgagaccctgtctcaaaacaaacaaacaaacaaacaaaacaaagattaggagaattgtatattcatacaattgaatattatgtaaccaggaaaaatcatggttttggagaatcattactgatgagaaaaatgccaataaaaaaattagtacacagagttataaacttttaatgtatgtacctatggactccagatgtgtccaagcttatccagcatgc

SEQ ID NO: 281317 - DNA, 569 bp, Homo sapiens
aaaaacacactcatcactagcatgtcggtattatacttaatgtaaatgtgactagtcttttcttattcattttttccagatttcttttttattttcatttattaaatacagaagaaatatttcgctgaagacacaggaaaccctattttgtataaacgagggattgcaagagattgttggaagatcaaagatgggtgaattggaggtaggtcaatgtttccttcccttcttagactccagttctctttaaaaatggcaactgaaaacctaaatactgacaaaggcataaaaatmaccatataatatcaaatatagctatatactaaactttatgaggtcaaagactttgtccatccactcagtactgtatactcaatatctaagacaattcctgacacatagtaggcattcttgagcatttgctgattgaacgaaggattattcatacttttaatctttggctgaaattatttttatgataaatttcattaaaatttattgagattttagagaaaatgttctatgtagaattttcttaattgcttttatttttatagttgaaaactggc

SEQ ID NO: 281318 - DNA, 625 bp, Homo sapiens
tggtaaataacaaaggctccagacattcaaaaggatattcgtagaataggaatctaaaataccaaacagtagaaaacacagtaaggaacattaacaaaagaagaagctgccaaacacatgtactctaaaagtacataattccaatgttgctatttctgatgagccctaaattcctttggttcgtaccttgacatttagagtgtttttagatcttcaccaagcyctaactgcttcagtgactaaagctctaattctgcagaatttatagccttaatgctgtgtcatattctggagccacttcatttcacctgtctgaccgcctgggtctcaggtcaaccacgcacaagctgggggcaagcctcagcacagagttcctaatgtggctcaagacaggctgctggagttcaataaatattgattgatggtaatagggacagtatcactctccttagatatgttgtcactctgccttcaggaaaacactgagagtctgtgctattcagggcagtttctatggcagcagaaattaaaggccagcaaacttgaagctacacaaaagtcgtgggacaacatcattctgaatcttgcatcattcatgactgtttgtattgtctcagcaccaaga

SEQ ID NO: 281319 - DNA, 479 bp, Homo sapiens
tatacacttatacacatgaatgcctttgagtcacagaaaatatgacaagtaaaagtgtatgtaatacagatgacaaaagagtgcacttggacctttattaattctgagtgaggggtcttaggtccctggaaatagggaaggcagaatacatgcagcaaaggatctaaaaagaaaacgaaaacatccacatggacatcctaggtaagaacctaaaattctaaccaatgcaaagagcaaaaatatttytaatcaggcactgtgtttagtcttctactttgctatttatatttattaccagaactcttgaaatataaactgctgaaagatttctaatggctaatttttctcttctcacctcgggggaattaaattgatatctggaatgcaaaggagactatcagcacaacctctgcccctaacacatctacctacacccccctccacacacacatatgtgcagttatcagaagactcagaaa

SEQ ID NO: 281320 - DNA, 479 bp, Homo sapiens
tatacacttatacacatgaatgcctttgagtcacagaaaatatgacaagtaaaagtgtatgtaatacagatgacaaaagagtgcacttggacctttattaattctgagtgaggggtcttaggtccctggaaatagggaaggcagaatacatgcagcaaaggatctaaaaagaaaacgaaaacatccacatggacatcctaggtaagaacctaaaattctaaccaatgcaaagagcaaaaatatttttaatcaggcactgtgtttagtcttctactttgctatttatatttattaccagaactcttgaaatataaactgctgaaagatttctaatggctaatttttctcttctcacctcgggggaattaarttgatatctggaatgcaaaggagactatcagcacaacctctgcccctaacacatctacctacacccccctccacacacacatatgtgcagttatcagaagactcagaaa

SEQ ID NO: 281321 - DNA, 537 bp, Homo sapiens
catattatgtggacgtgagcaaggagaaaaccctattatctagagctcaacttccatataacagatggatattgctataatctgaatatatctcctaaaattcatatgttgatacataatcctgaatgtgatagtattaagagctggggcctttargagataattaagtcatgatgatggagcccttataaatgaaattagttaccttataaaagagattgaagggagaaccctaaagttccactggccattccatctatctcttctgccatgagaagaggcagaatccctcttttttattgcccttcccccttctgtcatgtgaggatgctgcctggagaggatgccatcaatggaaaaagcccttaccagaccactaaacatgctggtgccttcatcttggacttcccagcctccagtactataggaaataaagttatgttccttataaatatccagactgtgttctttttttgttacagtagcacaaacagactaagacacatgttaaatgaaatactgtcctcttcaaattgt

SEQ ID NO: 281322 - DNA, 537 bp, Homo sapiens
catattatgtggacgtgagcaaggagaaaaccctattatctagagctcaacttccatataacagatggatattgctataatctgaatatatctcctaaaattcatatgttgatacataatcctgaatgtgatagtattaagagctggggcctttaggagataattaagtcatkatgatggagcccttataaatgaaattagttaccttataaaagagattgaagggagaaccctaaagttccactggccattccatctatctcttctgccatgagaagaggcagaatccctcttttttattgcccttcccccttctgtcatgtgaggatgctgcctggagaggatgccatcaatggaaaaagcccttaccagaccactaaacatgctggtgccttcatcttggacttcccagcctccagtactataggaaataaagttatgttccttataaatatccagactgtgttctttttttgttacagtagcacaaacagactaagacacatgttaaatgaaatactgtcctcttcaaattgt

SEQ ID NO: 281323 - DNA, 537 bp, Homo sapiens
catattatgtggacgtgagcaaggagaaaaccctattatctagagctcaacttccatataacagatggatattgctataatctgaatatatctcctaaaattcatatgttgatacataatcctgaatgtgatagtattaagagctggggcctttaggagataattaagtcatgatgatggagcccttataaatgaaattagttaccttataaaagagattgaagggagaaccctaaagttccactggccattccatctatctcttctgccatgagaagaggcagaatccctcttttttattgcccttcccccttytgtcatgtgaggatgctgcctggagaggatgccatcaatggaaaaagcccttaccagaccactaaacatgctggtgccttcatcttggacttcccagcctccagtactataggaaataaagttatgttccttataaatatccagactgtgttctttttttgttacagtagcacaaacagactaagacacatgttaaatgaaatactgtcctcttcaaattgt

SEQ ID NO: 281324 - DNA, 537 bp, Homo sapiens
catattatgtggacgtgagcaaggagaaaaccctattatctagagctcaacttccatataacagatggatattgctataatctgaatatatctcctaaaattcatatgttgatacataatcctgaatgtgatagtattaagagctggggcctttaggagataattaagtcatgatgatggagcccttataaatgaaattagttaccttataaaagagattgaagggagaaccctaaagttccactggccattccatctatctcttctgccatgagaagaggcagaatccctcttttttattgcccttcccccttctgtcatgtgaggatgctgcctggagaggatgccatcaatggaaaaagcccttaccagaccactaaacatgctggtgccttcatcytggacttcccagcctccagtactataggaaataaagttatgttccttataaatatccagactgtgttctttttttgttacagtagcacaaacagactaagacacatgttaaatgaaatactgtcctcttcaaattgt

SEQ ID NO: 281325 - DNA, 298 bp, Homo sapiens
agaagtagttctcaacggtgggcttaaaacattcaggaaaccactctttaagctgtttgttatccaggctttgttgttccatttatacagtacaggcagagtagatttagcataattttaagagttctaggatgtttagaatggtaaataagcactggcttcaacctcaagtcaccggctacattagctcccaacaagaaagtcgggtgtgctttgatgttttgaacccgggcattaacttctcctctctagctagagagtcytagaatgtctagatggcatcttcttccaaaataag

SEQ ID NO: 281326 - DNA, 495 bp, Homo sapiens
gtgctgtggaaagcaaagtggcagcytagaaggaatttgggtccctgatgattttgtgaaactgtgattttttccatcagacctgaacttccaacctccagtcatctttttcataagagagaaataaacatcttgtttaattcactatcacttttggctttttgtcactcatagctatgcaccctcctaattgacataatggtcctctgcattaatatccctaggattggacattgtctttgctatattgtaccttccattaaagggaagtgtaatgtcacaaaactagcatcgggtatagatataagttgagattaaaacaaacaaataatattcttggacaaaaacatgacattatatttgaaacacatgaagactgaataaaattatcttaaggctaattttcaaaaactggaggcaatgaagtatagtggttaagaatacagattctggaaacagcctggattcagatcctttctttgccacttactttgt

SEQ ID NO: 281327 - DNA, 555 bp, Homo sapiens
actaaatgtctagcacatgaatgagagctaataaggatcacaggaatgagtgaaacagtgaaagcatgaataaatgaatacaacaagataagaaacataaaaaacgaaattgcttcaaaaattgcaaaaatcaaatcctaataaccttcagtttcaacttccaagagaacttggaagtcaccattcttgtccttaccctaagaagctgaacaaactgaaaatcattaacttttttggaaccaatcagaaaattrtggttgcagggcaaaacaccaccctaaaatctggagagataagtaaatacaaagaattgcagatgatatatcaatttacttagagctgaagctgctggaatcataaactggtaaaaacacaaaaatcatattttgaggaatttctaggtactgaatgtgatctgccctggaagtgagaaactcttaggggctacagtatgagataacacctgcacatttataggttttcttccagaaaccccaacaggctcccaaagtaaagacttgagaaagatcccagtgtggctctggcagggggaca

SEQ ID NO: 281328 - DNA, 555 bp, Homo sapiens
actaaatgtctagcacatgaatgagagctaataaggatcacaggaatgagtgaaacagtgaaagcatgaataaatgaatacaacaagataagaaacataaaaaacgaaattgcttcaaaaattgcaaaaatcaaatcctaataaccttcagtttcaacttccaagagaacttggaagtcaccattcttgtccttaccctaagaagctgaacaaactgaaaatcattaacttttttggaaccaatcagaaaattgtggttgcagggcaaaacaccaccctaaaatctggagagataagtaaatacaaagaattgcagatgatatatcaatttacttagagctgaagctgctggaatcataaactggtaaaaacacaaaaatcatattttgakgaatttctaggtactgaatgtgatctgccctggaagtgagaaactcttaggggctacagtatgagataacacctgcacatttataggttttcttccagaaaccccaacaggctcccaaagtaaagacttgagaaagatcccagtgtggctctggcagggggaca

SEQ ID NO: 281329 - DNA, 555 bp, Homo sapiens
actaaatgtctagcacatgaatgagagctaataaggatcacaggaatgagtgaaacagtgaaagcatgaataaatgaatacaacaagataagaaacataaaaaacgaaattgcttcaaaaattgcaaaaatcaaatcctaataaccttcagtttcaacttccaagagaacttggaagtcaccattcttgtccttaccctaagaagctgaacaaactgaaaatcattaacttttttggaaccaatcagaaaattgtggttgcagggcaaaacaccaccctaaaatctggagagataagtaaatacaaagaattgcagatgatatatcaatttacttagagctgaagctgctggaatcataaactggtaaaaacacaaaaatcatattttgaggaatttctaggtactgaatgtgatctgccctggaagtgagaaactcttaggggctacagtatgagataacacctgcacatttataggttttcttccagaaaccccaacaggctcycaaagtaaagacttgagaaagatcccagtgtggctctggcagggggaca

SEQ ID NO: 281330 - DNA, 520 bp, Homo sapiens
gtgtctggttccaaaatcatagttctttgcaatattgtacagtcctatggctttttgtcactcgacaaatttgacatatttggcttctataactttttaaattagtgataaaaatgccaaacagcaaaatgagaataaaaggcaagtaaagatcccctccaagggtgaaaaaatagagaaatcaaaacattttaggatggagaattgaatcagctatggatccatttaaagccattattacttcatttggttctagctatcatgctggtaagaatataacaatggtcttgaccaaatgccttactgaaattttgattcactctgtacttayactgtaggtttataaaactattaatcctatcaaaaaagtaaatgatgtcagcatagtctgatttattttaataaattagtgttgtatttcaatgattatcatttctatttttaaatatttagatacatgtatttaacaacctgctataaaattttatcagattcaatattaaagtcattgatttatatt

SEQ ID NO: 281331 - DNA, 563 bp, Homo sapiens
ataccatgcattttaactttgttgttttcttgacatgcctagaaattcactttgcatgagtgtatttattttatttaaggtcttaaaagatgactcttcaagccttcatgcttggatatctagtttcaaaaaaaaaaaaaaagaattcgagtggaatttgttttcctagattctggctcttagatattccaatgccccatgagagaatgatacgagaatgatacctatgcatggacatgaaagtgaatctcaatttcttaagtgttactcttgcatagaaatgatcatcgaaatgtattatcttstagatttgctatgacatctgggacggcttctggaatttggagttacactcttgttcccatgtcatagtggtttcagtcaactagagataaggctatctgtaaataattaattgccatcttgcattacttccacttcatatttgctgccatgtcattagctgatttaaagattctaattcttaaaataagtatagacattttgctaggcaattctttcatatttctaaatatttttgccaccatctaaaaagcaaatct

SEQ ID NO: 281332 - DNA, 615 bp, Homo sapiens
caagcctatatttacaactcatccatattgctcagctgttaattcaaagctccatctttttttcatgaatacttgtaattttccaaagtaagagaaaacataagcataaatggtttattcagtaaatacgtaaggcataccttttaaattaaggttttgtaactcygctcctctgactggttaataatttatactagttaatcttggctgtctttttcctttgatatggagaataggaaaaattcctgtcaaaaatgatgcccactcaatgttggacctggagtttcttaagacattttccagtgaaggtttgagtcagcataggtcagattcagacccactgccacccatagacagtgcttaataaatacttaatgattgatacagattgaatttctagtgtcagttctgacacagccaccatatgattgtgacagataagaaagaaaatttgtaaaaagttctactcaatagaaagatacacatttatatacacccgcaaacacagccttaaactacagagagcaaaagtttaaaggagataaaaataactccaccagcttagaagaaaattttggcacttctctctcagtaactgacattacgagcagccaa

SEQ ID NO: 281333 - DNA, 519 bp, Homo sapiens
tgaatacttgtaattttccaaagtaagagaaaacataagcataaatggtttattcagtaaatacgtaaggcataccttttaaattaaggttttgtaactccgctcctctgactggttaataatttatactagttaatcttggctgtctttttcctttgatatggagaataggaaaaattcctgtcaaaaatgatgcccactcaatgttggrcctggagtttcttaagacattttccagtgaaggtttgagtcagcataggtcagattcagacccactgccacccatagacagtgcttaataaatacttaatgattgatacagattgaatttctagtgtcagttctgacacagccaccatatgattgtgacagataagaaagaaaatttgtaaaaagttctactcaatagaaagatacacatttatatacacccgcaaacacagccttaaactacagagagcaaaagtttaaaggagataaaaataactccaccagcttagaagaaaattttggcacttc

SEQ ID NO: 281334 - DNA, 661 bp, Homo sapiens
aatgtttctgtatagcattagatttactggtcaaaaggtagttcaatagtaggaggaatctacctcagtatactgaaactgagtataattaatgaaaccaaaagataatktgtgaataaattgttttttctaccttgaaattaagtgacgatttacatggcctttccaactcggtggaataagtgaactccaattatagtacaacttcagttgaaattattcttggcctcacagctgctctcatatggtatgtgttatttaattttttttcataaatgatgattgatgatatagcaaaaaacaaaaaatctaagcatttaatttaaaaaagataatgggacatcatcaaaccaatgaatagtataattttatataaaaatgttaattgtttagtttaaattttagctcaagagtagaattggaagattcaagaaagataacagagtaggaaacacaggaatctgtctccccacctagacgactgcagtggcccaatctatctgataaaactcttttggaactatagagtcttgtacaggtttgaaacttccgggaatagtcttggatggtaaattacaattaattttggtcaagtttaggttttagtacaggagcagctaaccatccctcatcttcagcaccatgacaggcagccatacct

SEQ ID NO: 281335 - DNA, 661 bp, Homo sapiens
aatgtttctgtatagcattagatttactggtcaaaaggtagttcaatagtaggaggaatctacctcagtatactgaaactgagtataattaatgaaaccaaaagataatttgtgaayaaattgttttttctaccttgaaattaagtgacgatttacatggcctttccaactcggtggaataagtgaactccaattatagtacaacttcagttgaaattattcttggcctcacagctgctctcatatggtatgtgttatttaattttttttcataaatgatgattgatgatatagcaaaaaacaaaaaatctaagcatttaatttaaaaaagataatgggacatcatcaaaccaatgaatagtataattttatataaaaatgttaattgtttagtttaaattttagctcaagagtagaattggaagattcaagaaagataacagagtaggaaacacaggaatctgtctccccacctagacgactgcagtggcccaatctatctgataaaactcttttggaactatagagtcttgtacaggtttgaaacttccgggaatagtcttggatggtaaattacaattaattttggtcaagtttaggttttagtacaggagcagctaaccatccctcatcttcagcaccatgacaggcagccatacct

SEQ ID NO: 281336 - DNA, 388 bp, Homo sapiens
tctaatacttgtacatggaagtctgtgaggcttggcaatctcaccaccctcagagttggctcccatgctgtctgtattgccagcagctttgacttctttgtcttatggaatgaatctgatatacattcattccctagccacctccaagctcagctcagattctgctagcaaatmagtattatttttctcatgcccctagttttcctccaggccttgaatagtgtgccatccatggaggcaaacagttcttcctgacttaacatttggtcactatgatgttttactccccacgaagatcttgggaagccacatttcgtctggctgcaatcatcatcctttaaggttagggcttcctcaaatatacctcctgaccttcaaaccctcactc

SEQ ID NO: 281337 - DNA, 388 bp, Homo sapiens
tctaatacttgtacatggaagtctgtgaggcttggcaatctcaccaccctcagagttggctcccatgctgtctgtattgccagcagctttgacttctttgtcttatggaatgaatctgatatacattcattccctagccacctccaagctcagctcagattctgctagcaaataagtattatttttctcatgcccctagttttcctccaggccttgaatagtgtgccatccatggaggcaaacagttcttccygacttaacatttggtcactatgatgttttactccccacgaagatcttgggaagccacatttcgtctggctgcaatcatcatcctttaaggttagggcttcctcaaatatacctcctgaccttcaaaccctcactc

SEQ ID NO: 281338 - DNA, 477 bp, Homo sapiens
agactttttgttttttgcttcttgcttttgagacagagtcttgccctgttgcccaggctggaatgcagtggcgcaatctcagctcgctgcaacatccgcttctggagtacaagcgattttcctatcttaccctcccatgtagctgggacaacaggcatgtaccaccacacctggctaatttttgtatttttagtagagatggggtttcaccaggttgaccagagatggggtttcaccatgttgaactgtgctcaagtgatctgcctgcctcagcctcccaaagaactgggattacaggagtgagccactgcacccagcygagtttttacagacttttgaaggactgatgaagccctttgttaaaactctgtattgagtatttggtttctttctcatttatttctgtctttaatgattctttgtatttctttgtgtttattttgttgttatttttgtaatttctctagatggatgatt

SEQ ID NO: 281339 - DNA, 1093 bp, Homo sapiens
agcatgtctctacttttataatgtaaaatacgtaaaaaaggaagatatccataactaaacagcttaaaaaataatacacagaaaaacataacttttacttaatgaaaagaagctgacaaaataagacagagaatcagctgagaaattaaggcctgctgagacccagtgatatgtctcactttggggtggcctcccaaatcagggagagagggacatgaagaaacaaagtgatatgaggatgactggtttatctggaggacaatgcagaggcaatgaaaagagattaaattgagtagggaaatgggaagattatctgaacaaaggaggtgttgactgtgtagaactaggagaggaaagcaaggaytgggaagaacgtagacggtaagagatcttcaggagactgaagaagatgatgcaacagaggagagaggagtaactgggcatacacacaaatgaaaaatgaactctcctgcctggtcttagggcacccaccagatgaaaagtttgagggggacaacaataataataactaccacaaccatttagtaagcatgcwtaccttttttttttttcctctttcctcatctcctataaactttaattggtattggtgttattttggaaatatctcaaaaatatagaataatatagaatatccacccagaattaacaattgctaacatttttaaaaatgtagtcacacttgcttcatctattttatgaaataaactaaacattctagataaagatgaagtactctttaaacccacccctagccattatcctttcctctccccagaggcaaccaaatttgatatggtgtgcatcatttctattccttctttatacatacattttcaaacacatctgtatctatgagcaatatatagtatttttgtatgttttaagtttatataaatggtatattatgtgattgttctgwaactcacttttctcaatcagcattatgtttttaagatgacactgatatatattgatgtgatttcttcattttcactgccatattaaattgcactgtatgaatagatgatgactgatgagttattgatcattcccctattaatttggaaca

SEQ ID NO: 281340 - DNA, 536 bp, Homo sapiens
gaggaacttagcatacaggaatagggagagatgccctaatctggtgactggtacatagccagaggcagaagattctcttggcagtcatattcattaattcaatgaatattcaaagatgccctctatgccaagccatctttcacttaattcaggtttctgcttaaaaggcatgggcaggtctagccacagcttaaaatccctgtcagtctcatggtcacactgttataatattcttattaacactaagtactatcccgcttatattcaattcttaaattctttaaattctgctaaaatgtaatactccamaggggcatagatttttgcctgttttgtttttattctatgtacatcatctagaatactactgtcacatggtacactctaaataaatgtttgctacattaatgtatcaataatacccacttcatgccttcagagaatgaaacatctgatgtagaggcaggcacagtaatatattttttataagaaatagattaacggtgatgtcactacatttcactgcctcatttaac

SEQ ID NO: 281341 - DNA, 499 bp, Homo sapiens
tcacatctgtccttcttattaagaaacagcctcttttacagaagtcctaaagtattctctgtacacctcattgggcagaactgggtcacatgttcacccctagctgtaggggaggctggaaaaaccatcatataaccaaggagaataggatagccatgcttggattggagaatttctgagcctccccacccttgccccgaaactgaacatattccttctttgaacaaaatcagtttttgttatcactgggcattagtagaaaacgctgttgggtaagcaattagcaaatccagtgagaarggagaagcagagctcttagagtcaaaaatacagtcaggagtaaggactgaatatggactgaagggaataaactcaaagcgattgagccacatactgcatccaggcaatttttgtatttgctaccttgttcggtcctcacaacagttctacaaaccaagtaactggcattatatcactgttatgcaggagggacaagagg

SEQ ID NO: 281342 - DNA, 545 bp, Homo sapiens
tttcatcttaattaactataaaaagaaaactaaactcaaagcaaacagaaggaaggaaataatacaaagacyaaggagtaaataaatgacatagagaatcgaaaaataatagagagccatcaatgaaaataaaagttggtacttccaaaagatcaacaaaattgacaaacccttaaccagaatgacaagaaaaaggatagaagactcaaattactagaataagaaatgaaagagggaatattacttccaatcttataaaaaaatgctataaataagtgtatggcaaaaaatcagattaacttaaataaaacaaactcctagaaaaacaaaaactactgaatctgacttaggaagaaatagataagataaagaaacctataacaagtgaagacattgaattagtaatcaaaacactacccacaaataaaagccaaggccaagacggcttcactgctaaattctacacaaactccttaaaaggagggaagacgagggaacacttcctaacttattctgtgaggccagtattgttctgatagcaaaac

SEQ ID NO: 281343 - DNA, 454 bp, Homo sapiens
tactgactacaggaaagcagttatccaatttaatattctattaaattggcaggcataagagccttaaggaggcctatgagccttaaggaaatgggtccaaacctatctaccaatctttttttttttttaactagttttagatttttkttttatttttactcttgcatctgtgggtgtgaaactccctattggcagcagaattgactgcctctgggcagatgtctgtgttcccagagcctactgacaaaggggtaaagaaggaagtggagatactgagaattgattaaagaacatatggaaggaatcaatataaattataccaactgaattggaattctagtgaccaagcactgtttaaacaaaatggctggtcagttttcatcttggatggaaatgtcatccaatagttcccctactgggaataacgccacaagcaattatagaaaattgactt

SEQ ID NO: 281344 - DNA, 557 bp, Homo sapiens
taaagttaattcttgatcataggcactaaatgagtggaaccttatcctgtgtaacagaaaatggcagataatccaaaagctatttttatttggctttggaatatacgtgtatacttacctttgaatatggaaatgtttgacattccaaaaacttatttcaaactaagttaggaagccaagctgggaagacttcatgctcctgcagctaagaggctatgtccaatttctagtcctgccaacctcaattacttccaccttgcaactcacttcaagctgtggaaaagcatgaaggactctcaggctcattcatacattattctctgttctgtgaaacctgtgctgaagcagggaaagggttaaatagatcagtttctataggtttcctgaaatagagagagagacttgagaaatcaacagaattgtggttaatacaaacttamgaattaatccatgaagaacatctgtctgaggttctaacaggaactttccaaatatagtggttaatccagatcaatacattgagtttattatgcactagacattctggttgttatagt

SEQ ID NO: 281345 - DNA, 487 bp, Homo sapiens
tctaggatgcttttccacaaaacttactgttcagagggagacacaatggaaatcaattgctaattaaatttgtgtctaaattaataaaacacaactattcagatcatatctgtctgaataatttctattatggtgaacataattgttagattcagcatttaatgaaccatattgttaggtaaaattcttgtgacaattgggactaatagaatatattaacctttattcttcccagcttgacattacattggaccatgttaacatgaaaacacctggaagagtttcattgttatgtagccattgtgactctcctggccctctgatagagcccrtgaggctttgggaaatcagtgatgtttgatgtttgtcaatgggtgtccttatctacaatagtttttagggccttggttctatgtgcacgtgtcttcatgaaatggaaactctactatgctcagcagctggaaagcaccatcaaatgttgacagtt

SEQ ID NO: 281346 - DNA, 603 bp, Homo sapiens
catccccttgaatgttatctccttcaagacatcagcatagcagtccatgctggtgctttggggacacctattccaatgaactgtgctttgggagatgtcttcagagtctggcatctgccgttttaaatgcctagtataaaacatctgccttgcctttgtaacagggaaaatgacccttgttcacagaacaaagaaagattgggcaatgttacatttaagggtgaaggccagacccccttttccacctgtgaaccaatcagtctggcaatggcaaaagccaacaccaaycaagcttcccttgatgctcatagtcaggccagtagctgacctcactgttctctcatcagtcacaacacacacaccagcactttgtgcaaaatctgctatcccccaatagtggacagggatcttttccattttgcattagctataaaactgaccccaataaaccacagtaggcatgaagtcactttccctcaacttagttcctgacttctctttcttgccaatgtgaggggggtgagatgaagtgggagtatgtaccccaggacatcaactgcatagcagtgactctctgctgaagtcactgcaggttggcactca

SEQ ID NO: 281347 - DNA, 586 bp, Homo sapiens
gtttgagttgggattttaagacaagagtgtgcatgtttttcccattctgcttgccatgccctgtaatatgtggggaggaattggaaggggaggcagactgggatcaaaaaaggtggagaaacatgtaaagaatgggatttatctgtatttatttatttttacttttttaaaccttttaaagaagaatggaaagaaattagcaatagtaacaayagtacattatttaagtgtctagtacgtaacaagtacagcattagtctctttgcacaaactatcacatacagtttgagaagttaaagaacaaaggctgttaagatttatgcagagggagcaggcttacctaggctgctgctgcagagaacagaagaacagaattggtggatggaacttatattaagaatatgaagaaatttttaagcagttatccttgcctgataattgctgggcttccctggaggcaagtgatcttttggctgcagatttagaggtttgtcctaaggactgctaacacaacaagccaggcatcagacattatcatcatctaaaaagcattattttaaaaggtattgcttaagtttcattgtcc

SEQ ID NO: 281348 - DNA, 533 bp, Homo sapiens
gacactggggtctattaaacttgattaatacactcagcatatgtatccatagctcaagccatgcctgggcatmcttgagacagctattgtgcaatgtgtttgatcaaaacactcaatgctgtaatagaaccattccggaggcccgcaatgcagtgtgtccaccagggctctgagcggtgcatgggaccacaggcacctgataagtttcatgcttcacaggttaaaaaaaaaaaaaaaatgagagggttgacctgaatcatctcagactgtataaagttatgctgctaaactatctccaatttgcgccactttctttgcatctgtccttttccttctttccatgcctcttgctaccacctgagttcaggccagttttacctctacccaggtcaactgcaagaggcctaacctgggcatctgctcccagggtctctctatttcagccccccaccctgcgctgccaacacaatggtcccttttcaggtaggagtgccagagccaggcaggttgcgtgctcaggttggccctgcggg

SEQ ID NO: 281349 - DNA, 565 bp, Homo sapiens
tggatgcagagattacagtgatgctgccacaagccaaggaacgtctgatgccaccagaagctggaagaagcaaggaaggatcctcccctagagcctttgcagggagccctgacctgctgacaccttgatttcagacttttggcttccagactttaagataattaatttgttctttaaagtcgctgatgttatggtgatttcttatggcagctactccaaactaaacatcgtaaaaccttcagtacctacctgtgacctgttaatgttaacttttataaattactgggcatggtttttgtgagatcactggaccacactcatcagctggaatragcatatgaaaaaccttgcccagctgaacctttcaaaaatacccttcagtgttatgcatatatagatggtagatactgataaaggagatagtgtgttttcacatatgtgtatccatgtggggctgtagaatggggatgagtttatttaggaaaggatgattgtaggtgagttctgaggaagacctgcacatctacatcccagagggagaagaagggaagggatatctcagacg

SEQ ID NO: 281350 - DNA, 572 bp, Homo sapiens
tcataggctgcagaactgatattgtgttagcagacatgaaaacaacattcatctatttgcacatctccatcagagctcttgagtaaccagatgtattgccaacaagcaataatattttgaaaagactctcttttttcctgagcagtaggtctcaacagtgggtttaaaatattcagttaggccatgctataaacagatgtgctgtcatctagtctttgttgttccactgatagagggcaggcggagtagatttakcataattctttcttaaagggcctaggatttttagaatggtcagtgagcattggcttccacttaaggtcaccagctgcattaacccctaacaagagagtcagcctgtgttttgaagttttgaagccatgtcctaacttctctctagctatgaaagtcctagatagcatcttcttccaatagaaggctgtcttatatacattgaaaatcttttgtttagtgtagccacctccatcagtgattttagctggatctcttggataacttgccacagcttctaacaacagcacttgctgcttcaccttgcacttttatgttat

SEQ ID NO: 281351 - DNA, 572 bp, Homo sapiens
tcataggctgcagaactgatattgtgttagcagacatgaaaacaacattcatctatttgcacatctccatcagagctcttgagtaaccagatgtattgccaacaagcaataatattttgaaaagactctcttttttcctgagcagtaggtctcaacagtgggtttaaaatattcagttaggccatgctataaacagatgtgctgtcatctagtctttgttgttccactgatagagggcaggcggagtagatttatcataattctttcttaaagggcctaggatttttagaatggtcartgagcattggcttccacttaaggtcaccagctgcattaacccctaacaagagagtcagcctgtgttttgaagttttgaagccatgtcctaacttctctctagctatgaaagtcctagatagcatcttcttccaatagaaggctgtcttatatacattgaaaatcttttgtttagtgtagccacctccatcagtgattttagctggatctcttggataacttgccacagcttctaacaacagcacttgctgcttcaccttgcacttttatgttat

SEQ ID NO: 281352 - DNA, 647 bp, Homo sapiens
gagtcatacaaggagataagaccaaatgactgagactacagagaaaaaacagacaatagaaacagactcaaaaatgatccagatatttgaggtatcagacattgatcagaaactattataattaatgtgttcaagaaaatggatggcaaaacggaaatgtcaccagaaaattatttttaaaggaatcagatataacttctaacacatcaaaaatacaattacaaatgttaagaagtaaagagatgagttgaacaccagattagatacagcagaagaagttattcaactggaagatagatacacagaaaatgaagaaacagacacagagtaaaaaaatgaattgaaataaatttataaataacataaatcaaagaagaaatcaaaaagaaaatcagaaaatattttgaatgaaatataaaatatattactaaaacttgtaaaatgcaactaaagcagtgtttagaggaaaacttaagctttaaattcacatattaggagattgtaaaggctraaaattaattatctaagcattcaagtcaaaaagctaaaaaaatcccagcgaattataaacaaaaaaaaaacaaaaggcagaaaaattaagcaaaatcgacaaattaatttaaaaacacaatatagcaaacctgaca

SEQ ID NO: 281353 - DNA, 514 bp, Homo sapiens
aatgagaattgaaactgcagtgagatacagtatgcccctgccattttaaataaaactggcaatattcaatgctagtgagggtgtggagcagctggaattctcataccttgctgttgtcaactggtacaaccactctgaaacactctttggaaatcttcattataatagatctgaacatagatagtccctataaatcagcaatttcatccgtagtgcatgcccacataatacacacaatgtgtattaaaacacatgtacaagaatgttyataacactattattcataaaagccaaaaactcaaaaacaactcaaatgtctaccagtaatagaatgggtaaatagtaacacacacacacacacacacacacacacacacacacacaaacaatggaatacaatagagcagtgaaaatgaacaaaataactgccatacgctaaaaacggaatgaatcttacaaacataatgctcatggaataaaagaagcaagacctaaaagaatatatactgaataa

SEQ ID NO: 281354 - DNA, 514 bp, Homo sapiens
aatgagaattgaaactgcagtgagatacagtatgcccctgccattttaaataaaactggcaatattcaatgctagtgagggtgtggagcagctggaattctcataccttgctgttgtcaactggtacaaccactctgaaacactctttggaaatcttcattataatagatctgaacatagatagtccctataaatcagcaatttcatccgtagtgcatgcccacataatacacacaatgtgtattaaaacacatgtacaagaatgttcataacactattattcataaaagccaaaaactcaaaaacaactcaaatgtctaccagtaatagaatgggtaaatagtaacacacacacacacacacacacacacacacacacacacamacaatggaatacaatagagcagtgaaaatgaacaaaataactgccatacgctaaaaacggaatgaatcttacaaacataatgctcatggaataaaagaagcaagacctaaaagaatatatactgaataa

SEQ ID NO: 281355 - DNA, 595 bp, Homo sapiens
ttgataggaacgttcagaactatctgccagattctttggcttcatcktacatatgcctctagcagatgcctcctaaaacacagactggaaaaaaaaaagtgtttatagtatttgacaagtgaagggaacactattggctgccttctcggcctccatttccctcctcttccaggccaaaagaacctcagctttgttctcgcttagtaaacccaggcagccaggagcctcttatcaccccacccccagctctcagattggtctaagggcaatcctattccacagtgattggttcaggaatgagcatgtgacctgatcctagccaacgacacaagagggggactcctcgcgcctaaaagagagccacgggaagagacggtctctctggcttccttgggcatgttgtgagtggttacctggagctgttgcagcccttttggtgaccaggccaggagaaagccagctctaagaatggccaagcagaaagatgggaagaacctgcctcctcaaagacattgccaagccacaaatcaacaaccctgaattctatataccctggggattacctgttttattaagagaaaactccagtggggta

SEQ ID NO: 281356 - DNA, 595 bp, Homo sapiens
ttgataggaacgttcagaactatctgccagattctttggcttcatcgtacatatgcctctagcagatgcctcctaaaacacagactggaaaaaaaaaagtgtttatagtatttgacaagtgaagggaacactattggctgccttctcggcctccatttccctcctcttccaggccaaaagaacctcagctttgttctcgcttagtaaacccaggcagccaggagcctcttatcaccccacccccagctctcagattggtctaagggcaatcctattccacagtgattggttcaggaatgagcatgtgacctgatcctagccaacgacacaagagggggactcctcgcgcctaaaagagagccacrggaagagacggtctctctggcttccttgggcatgttgtgagtggttacctggagctgttgcagcccttttggtgaccaggccaggagaaagccagctctaagaatggccaagcagaaagatgggaagaacctgcctcctcaaagacattgccaagccacaaatcaacaaccctgaattctatataccctggggattacctgttttattaagagaaaactccagtggggta

SEQ ID NO: 281357 - DNA, 591 bp, Homo sapiens
tgtagtgtggcatttgccaaggaagcaaattacagtcttggaaccagccacagatgctgactctaaaatgaatggattctcaaagatcccactgggtgggtggaccagatattttattctacaaaccaggacactgtgaacggagacatgaattataattactccatgacaacaggcatgaacctggaagaatgctctccccgcaacctgagtttcactggtgaaagcatgttaattgcagaagccagtgcggcagaaaagatcaaatgctgcagcacgtgtcttggcaacgtcttcaaactcccccaacttaaaggtgcattttcccaccaagaactcaaaaccagattagatttccaaaggcccttccgaggtccctctgctctccacaagggtgacacttagcgccatctgttggtgttgtgcagagctgaaaagcttttgctctgcagccagtttcgctatttttsaaagttcatcatttgaacgttggcaagtcaaggatcttctatagttcagtttgtcttggccaacaccccgccagagaagtcatgtgtcatggttgttttggatagtaaagcaagtgggcag

SEQ ID NO: 281358 - DNA, 426 bp, Homo sapiens
gtatcatttcatatgttgaagcatcatttgtttatctgttttgcccctctgtagacagtctgtgacttgtgaattactttcctccaggtaatcatttgtatttggctttgcttattgaacactttcgtttattcttattaaagattttcttttgctttgaatttttttttttaatttccacttagtcatcttttcttttacatctgggctataaaggaaggattgyatcttggaaaaatgaggcttatctaactacctacagaagcactgaacacttaacactgaaagggatgcaggtggctagcttacttaactttctttctattcatccttcatagacgacaatctatataattctcaagtcagccccattcatattttagatagcatatgtatatgttttaggtagattcatgtagatagttg

SEQ ID NO: 281359 - DNA, 426 bp, Homo sapiens
gtatcatttcatatgttgaagcatcatttgtttatctgttttgcccctctgtagacagtctgtgacttgtgaattactttcctccaggtaatcatttgtatttggctttgcttattgaacactttcgtttattcttattaaagattttcttttgctttgaatttttttttttaatttccacttagtcatcttttcttttacatctgggctataaaggaaggattgcatcttggaaaaatgaggcttatctaactacctacagaagcactgaacacttaacactgaaagggatgcaggtggctagcttacttaactttctttctattcatccttcatagacgacaatctatataattctcaagtcagccccattcatattttagatagyatatgtatatgttttaggtagattcatgtagatagttg

SEQ ID NO: 281360 - DNA, 643 bp, Homo sapiens
gtgcacacgataagacaatcacagttctcgaaccagggtcctttatcatccatagattcctccaaaatcacttgttttatttatatattcttttatattccacctattgtaaagccttttagtccaatatcctcgcatatgtataagttcttaacatgtagttattatctaatttacctaaatagtattgtgtttatatgtgtgtgtgtgtgtgtgtgtgtgtatatatatatatatacttcatcctgtttcttactctttccactgtatttaagtcctcttcctcctgtttctgcatgctacgtaatactccatgggtgcatcagccaattgttaatctgtctcctctctcagtaaaaacacacagatggtctccaaactcacatcatgacaaaacacaccagtcaatatccttgcaaaagttcatttacgaccaagagctcagcggacacagaagatgtctgtgtttgcccaagtgctgccagygtgctttacagaatggctgcattggtctacattcctaccagcaatgcacaaggattcccataccctatgttccacccgtacttaacactatatggctgtccagtttttgttagtctaaacggtagatccataccatggtttgaacatctctgaaaac

SEQ ID NO: 281361 - DNA, 553 bp, Homo sapiens
actgcaacctctgcctcccaggttcaagagatcctcccacctcaggctcccaaatggctgagcctacaggtgtatgctaccacgcccagctaatttttgtatttctgtgaaattttcttaatggcttttgattataatactaaaattgcattaactgaaacacaaagcaggattttagtgttctcttgggcagtatctctgaatataaaatacaaattattttcaaaatggcaatgaagaggaaaaattcatataaaaatggagtatctttgtatgatcattcacatttatctgatragtagtatatccctcagagttagtatcccaagtaacacttataatcaatttcaatgttactcaaccataaatattatcttaacatgtataagtcaagtatttagtgacatctataacctgactaatccaggataataaaccttacttaaaattaatacctctctgattaattagctattaaaactttctgtgtttgaaaagacaacatgtttgatttttcagaagcatgtgtgaaattcttagcacaaatcttggc

SEQ ID NO: 281362 - DNA, 599 bp, Homo sapiens
cagtggctgatatgtaaataaatcctccccctctcccaatagctaatccaagaggcccaccatagtcaatatcaattcttatctgtaggtaaattgtctcacttagggagttctaagtgcctctgcagaacagagaagggatccatcacttgttgcataacccttgatgtccccagccacagtacaaaactagggactatctgtggaggctcagtcccaagccaatactgggaatcctgagtttcctgggaagctgagttcattgatgatggatgggaaccccagaacgatcccaaagctggcatccatggcacagatctgaagatttccattttaaattgcatttggaacaaagatgtcagttgttcatgccccctgggtaggggtggagaggaagggcattccaaagaaacacattckcatttcttgtttaaggaaaatagaataagaaagagacaaatcactggcctacttaagtaaatgctctgaaaatttcatgtgcttttgatagtaaatgtctcatcatagaacagaaaataaaagaaacttgaaataagtagcgcttcaagaggagataagcattagattatgctggcctc

SEQ ID NO: 281363 - DNA, 593 bp, Homo sapiens
tatgtttaaaaaaggcatgaggtcaggtacagtggctcatatctgtaatcccagcactttgggaggctgaggtgggaggatcgcttaagcccaggagttcaagacaagcctgggccacctggcaaaacccccrtctctactaaaactagaaaaattagctggttgtggtggcatgagcctgtagtcccagctactcgggaggctgaagtggaaggatcatctgaacctgggaggcagaggttgcagtgagctgtggtcgtaccactgcactccagcctgggtgacagagaaacaccctgtctcaaaataagtaaataaataaaaagccataatatcaaactatgcacgtgattcaagttttataagtcaaatctattttatatatatatgtgtatatatgtgtatatatatatgtgtatatattatatatatataaactatgtctcatgttttgtattatatatgtaacccgagcatctgcagttttcaagatttatggggccatgccttcccataatatccaggcataaatccatgctccattctacaggactacaagaaatctggccctttctgcaattatgtctgatctt

SEQ ID NO: 281364 - DNA, 542 bp, Homo sapiens
tatcaaactatgcacgtgattcaagttttataagtcaaatctattttatatatatatgtgtatatatgtgtatatatatatgtgtatatattatatatatataaactatgtctcatgttttgtattatatatgtaacccgagcatctgcagttttcaagatttatggggccatgccttcccataatatccaggcataaatccatgctccattctacaggactacaagaaatctggccctttctgcaattatgtctgatcttcagagtgccctggtttttgtttcccacagttcttgctcagtagctgccccaggcttcttcttcagtcacttttgcctgtttygtcattccttccatatgcaattccccctcttttcagtccagcgaagccccaaacatggaaacaacccaccactgttttattcttcatagaccagctaacaggggcctctcatggtttaataagtttaaatatggcttgaggatagcatagccagattacaaggcaagaaaggaaaacatcaaattggaattaatgtatc

SEQ ID NO: 281365 - DNA, 546 bp, Homo sapiens
cagattttgtatgtgtggtggcttttgtgcagacccactgtcggtctccttggtaaagatagtaagctgaggaaacccagccaactgaaaagtaaaactaatgagcagtattttaaaggtggaatctaagctgctatcacaaaggtctcccaatattgygtggcttaaacatgaaaggcttaacattactctcccatgtaatagtccagaacttaagagtccaggcttgtagagcagatctgccatcttcagcatgcagctcccttcccatccgaggtggctgctttatattttatgtgcatcctaaacatcagaaagcatgaaggggcaaggaaagccctactcatttctctgtaaggtgcaagttgaatatggtacaatccctttgcctagaacagacatgtgatcacactgaggttcaaggaaaacaggaaatgtagtctctggctgggcagccatgtgtccagctgaaacttcagagttgggttattataggaggagaaaaatggatattgatgaatgataagcagtcactgccatacagca

SEQ ID NO: 281366 - DNA, 583 bp, Homo sapiens
actatactttgttcacacatcctttttaattgaacatctatgctgtgccacttttgtggttttattgttgttggtgtgtgcttattgcttttttatgaataattccttgttgaacatctttgtgctggaagttttatatgatattcattattttyttttcctacaagttgaatttttgtgtcagaggatatcagtaccctttgccaaattgctttttgaaagattatatcaatacgtctttacttttgtgtcagaagaggcaagtctgccacaataattcccaagcctctgcagtaacacagcaaaagtttattttccacttgttatttgtttcaacactagttgtcacaagagtgtctctgttcattcatatcactaagggaattcagggaattatacactggctcttaaaactttcttctggaagtgattaatgtcatttctgctcacatttccttggccatagcaaattatgtaaatgtgtccaacttccaatgggaagtgtagtcctaccatatactcaaaaggaaaatcaggacaattgcaaacagcccaagcttccaatgacagagagaagaggagc

SEQ ID NO: 281367 - DNA, 572 bp, Homo sapiens
atacgtctttacttttgtgtcagaagaggcaagtctgccacaataattcccaagcctctgcagtaacacagcaaaagtttattttccacttgttatttgtttcaacactagttgtcacaagagtgtctctgttcattcatatcactaagggaattcagggaattatacactggctcttaaaactttcttctggaagtgattaatgtcatttctgctcacatttccttggccatagcaaattatgtaaatgtgtccaacttcmaatgggaagtgtagtcctaccatatactcaaaaggaaaatcaggacaattgcaaacagcccaagcttccaatgacagagagaagaggagctccagatgcaccatttctgactttccaacaaattttaaagctgaagaaagaagtcatagtgggtgaatggaatgctttccctaagccaaagacagtagctctaaatctcaacaaaagtataaaaaagaatgtttgtttttggtgtctgcttccctttgttaaccttcgattttgaaaaaattatggacaaacaggaaattgcaaaaattgtgcatagtgt

SEQ ID NO: 281368 - DNA, 572 bp, Homo sapiens
atacgtctttacttttgtgtcagaagaggcaagtctgccacaataattcccaagcctctgcagtaacacagcaaaagtttattttccacttgttatttgtttcaacactagttgtcacaagagtgtctctgttcattcatatcactaagggaattcagggaattatacactggctcttaaaactttcttctggaagtgattaatgtcatttctgctcacatttccttggccatagcaaattatgtaaatgtgtccaacttccaatgggaagtgtagtcctaccatatactcaaaaggaaaatcaggacaattgcaaacagcccaagcttccaatgacagagagaagaggagctccagatgcaccatttctgactttccaacaaattttaaagctgaagaaagaagtcatagtgggtgaatggaatgctttccctaagccaaagacagtagctctaaatctcaacaaaagtataaaaaagaatgtttgtttttggtgtctgcttccctttgttaaccttcrattttgaaaaaattatggacaaacaggaaattgcaaaaattgtgcatagtgt

SEQ ID NO: 281369 - DNA, 509 bp, Homo sapiens
actagcctcctggtatggtgcaggaggaagtacacagcaccacctacgtggtatccttrctaaaaacttgcacgtggcgctatcaagactctagattcaactagcagtttacagcaataataggatttagagtgaaacaactccatggggaggcgactgcgggaaatcctaagtgcatatgacctgcttccttccttcctttctctctctcctttccttccttccttccttccttcctttctccctccttctctcccttccttcctttctttcttccttccttcttttttttttgacagagtcttgctctgtcacccagtctggagtgcagtggtaaaatctcagatcactgcaaactctgcctcctgggttcaagtgattctcctgcctcagcctccagagtagctgggattacaggcgtgtgccaccatgcccagctaatttttgtatttttactagagatgggggtttctccctgttggccaagctggtctcgaactcctgatctc

SEQ ID NO: 281370 - DNA, 556 bp, Homo sapiens
cccaacctcaggtgatcagctcgcctcggtctccaaaagtgctgggattacaggcatgagccacctctcctggccgaggataactttttttttttttgagacggagtctcacactgttgcctgggctggagtgcaatggtgygatctcaggttactgcaacctttgcctcccggattcaagcgattctcctccctcagcctcccgagtagctgggattacaggcgcctgccaccacgcccggctaattattttatttttagtagagatctggtttcactatgttggcaaggctggtcttgaactcctgacctcatgatccaccctcctcggcctcccaaagtgctgggattacaggagtaagccaccatgcccggccgataacttttcttaagaagggatgagatgatgttgaagatgaagtccctcccagcagaccagcgacatccatttacaaggaaaaaattaatcttgtttgtgccctaatggaagaggactgatgattaacagcaggaacaatagctaacaccatggacatctcaatttgttcagcttaca

SEQ ID NO: 281371 - DNA, 556 bp, Homo sapiens
cccaacctcaggtgatcagctcgcctcggtctccaaaagtgctgggattacaggcatgagccacctctcctggccgaggataactttttttttttttgagacggagtctcacactgttgcctgggctggagtgcaatggtgtgatctcaggttactgcaacctttgcctcccggattcaagcgattctcctccctcagcctcccgagtagctgggattacaggcgcctgccaccacgcccggctaattrttttatttttagtagagatctggtttcactatgttggcaaggctggtcttgaactcctgacctcatgatccaccctcctcggcctcccaaagtgctgggattacaggagtaagccaccatgcccggccgataacttttcttaagaagggatgagatgatgttgaagatgaagtccctcccagcagaccagcgacatccatttacaaggaaaaaattaatcttgtttgtgccctaatggaagaggactgatgattaacagcaggaacaatagctaacaccatggacatctcaatttgttcagcttaca

SEQ ID NO: 281372 - DNA, 694 bp, Homo sapiens
aatttgttcagcttacacaattctgactgaaatattaaagctgagtaaacttcccattcaatggttgccaaaactaatgcacccagatcagctgcagtcaagaacagagctttcaatgaaaattttaaacaagtgggatcaagatcctgaagcatttctttgaagaattctaacaggagatgaaacgtggccctaccagtaagatactgaagacaaagcacaatcaaagcaatggctaccaagaggtggaagtggtcccatcaggacaaaagtggactggtcaagagcaaaggtcatggcaagagttttttgggaggctcaaggcattttgcttgttggctttccggagggccaaacaacaattacatctgcttattatgagagtgttttgaggaagttagccaaagctttagcagaaaaacacctgggaaagcktcaccggaatccttctccaccatgtcaatctcttgctcattcctctcatcaaacagaggcaatttttttgagagttttgatgggaaatcattaggcatcctacttacagtcctgatttggctccttctgacttcttttggtttcctaatcttaaaaaatctttaaaggacacccatttttcttcaattagtaatgtaaaaaagactgtactgacatggttaaattcccaggaccctcagttacttaggaatgggctaag

SEQ ID NO: 281373 - DNA, 1298 bp, Homo sapiens
tccccacataatcaatgtaaatcatatttacaaggcaggttttgttgttgttgattattttgcttctcaatatctggaatataattgagataagatgtgggtcactgaataaaaggcctgagacttctatttttccttcaactgacagtcccttgatctatttaaatttatcaataatagattaagcacattgccattttacatattttctacaacctcaaatcagtttgaaacataaaaaaamcccacacaactatatttgtgtttgtatttctttcaaatagtatgaatttgataggttagcattccttgagttctgatggggggaaattgcatttaattgatctgataaaaacaaagaaagtggagttgaaaagctaaataaagagtttgcttctcttttaaggcaagaagactggaagttatatcaacagttgtatttttcagtccatttggtttctctttctccctccctgaccccagtttaattgatttttgagttaaataattcagcttctctccctttgtaatgggctgtatttggggagatgaagacaaactgcttagaccttgaaaaacacatgggctcctcggttagatggcatctgcgaggactcagaactccctccacattctatagggaaaaaawggtaatttgttatatgatattttgttacagcagcacaaaaaggactgagatagtgggtttgtgtgttgcagatgttaattccctaaccacactgtctctaatttggtcactaagccacagtaaagccataaaaaatcccawatattaccacttagcattaaatgtttcactcctccaatacttctggagccacttcctcctctctcccaacagtttaaccctggataaattccttgagtgatattatgtgataggcttgcctgatcattcttgggtactgggttggcccttctgctcttttattccataaaatgtatcaagcaccttctgtcaagcactgggtaaagttttgggaatacagagatgacagatacaatccctggcctcagagagttcacagtctaggtgcagagacagacgaatatacaacacttacaaaataatactaaagtcatgctgtggtaatatgggagaagatgcccagcttcatatagagagcaagggtgtggaaggaaggcagaaggaagtgtgtgcaagaatgagaacaagagagtgagagcaagtgagagaacaattgggtaattggtaggcagttcgtgtggttggagctcagggtatgtgtgcatgcagctgggaaggtaaacatgag

SEQ ID NO: 281374 - DNA, 622 bp, Homo sapiens
tagaccctttgttatgctctcagaagaactatttacacattttgatttggcaaagaacagttcattttttttctgggactttctggcttttttattccacatggaatatgcaagcaaaactggctgaactttgaaatagcagctaaatcctaacagcactacagcattacttgccttgctcttctcaaatggctatatttattataaattaagtcaatattctgctgtagaaaagtcactgtataacgggtacatctgcctactatgcctagtcccagaaccatgagcctgtctggcatagatcattcagttttgcaggcatccctctatggaatgtggttctctcccctacagaagggtccccactgtactgggggaggggaggttgtaagcaaagtcatccrtcccttggaagacgtcctgacctccccaggactgaactttcaacctcttgagctgacagttagtagtggatgcacaaattttgcttgcgactaattgcagcttgtaaatggagcattgtggctccggaaaagagccagcagtctctcttcccagggtcacccaagtggaatctggacacaagaaagcctgtcccctaatgggcgtcctccctgagccc

SEQ ID NO: 281375 - DNA, 622 bp, Homo sapiens
tagaccctttgttatgctctcagaagaactatttacacattttgatttggcaaagaacagttcattttttttctgggactttctggcttttttattccacatggaatatgcaagcaaaactggctgaactttgaaatagcagctaaatcctaacagcactacagcattacttgccttgctcttctcaaatggctatatttattataaattaagtcaatattctgctgtagaaaagtcactgtataacgggtacatctgcctactatgcctagtcccagaaccatgagcctgtctggcatagatcattcagttttgcaggcatccctctatggaatgtggttctctcccctacagaagggtccccactgtactgggggaggggaggttgtaagcaaagtcatccgtcccttggaagacgtcctgacctccccaggactgaactttcaacctcttgagctgacagttagtagtggatgcacaaattttgcttgcgactaattgcagcttgtaaatggagcattgtggctccggaaaagagccagcagtctctcttcccagggtcacccaagtggaatctggacacaagaaagcctgtmccctaatgggcgtcctccctgagccc

SEQ ID NO: 281376 - DNA, 623 bp, Homo sapiens
tgtttgccttcacaagttagtttttgtgtgccaatttcattaggccaattgggtgtcataaatgatgttagaatagggtgatcaaccaacccagttatgctgagactgtctcagttttaaaactgaaaattctacattctctgaaacctcctattccsaggcaaatgaatagctcgtcattttaccaagtaatttcccttccaagtcaaaatgtcctactgagcttgaaagtgtagcaacttaataaagtcttgagtttctgagtttaaaatcttagtggagcacacattaaaagggattcttctgaaagtgacaaggggcttacctggggaggtcagtttgatttgaaattatccaagagtaagaggactctttgtgacatctgatgggtgggggagctcggtgtccaagtataccacactcagtaaccacacataggtatttagtagccagcgttttcatctttcttccatgtcttcaatttctgatacagaaaaaaaatgccagacagatttttataaatgttctcttgggacattgtacatttccactcatatacttttatgcacttgggaaacatgtgaaaaggaggtcagatgaaagaaatatttaaactatgtaag

SEQ ID NO: 281377 - DNA, 623 bp, Homo sapiens
tgtttgccttcacaagttagtttttgtgtgccaatttcattaggccaattgggtgtcataaatgatgttagaatagggtgatcaaccaacccagttatgctgagactgtctcagttttaaaactgaaaattctacattctctgaaacctcctattccgaggcaaatgaatagctcgtcattttaccaagtaatttcccttccaagtcaaaatgtcctactgagcttgaaagtgtagcaacttaataaaktcttgagtttctgagtttaaaatcttagtggagcacacattaaaagggattcttctgaaagtgacaaggggcttacctggggaggtcagtttgatttgaaattatccaagagtaagaggactctttgtgacatctgatgggtgggggagctcggtgtccaagtataccacactcagtaaccacacataggtatttagtagccagcgttttcatctttcttccatgtcttcaatttctgatacagaaaaaaaatgccagacagatttttataaatgttctcttgggacattgtacatttccactcatatacttttatgcacttgggaaacatgtgaaaaggaggtcagatgaaagaaatatttaaactatgtaag

SEQ ID NO: 281378 - DNA, 623 bp, Homo sapiens
tgtttgccttcacaagttagtttttgtgtgccaatttcattaggccaattgggtgtcataaatgatgttagaatagggtgatcaaccaacccagttatgctgagactgtctcagttttaaaactgaaaattctacattctctgaaacctcctattccgaggcaaatgaatagctcgtcattttaccaagtaatttcccttccaagtcaaaatgtcctactgagcttgaaagtgtagcaacttaataaagtcttgagtttctgagtttaaaatcttagtggagcacacattaaaagggattcttctgaaagtgacaaggggcttacctggggaggtcagtttgatttgaaattatccaagagtaagaggactctttgtgacatctgatgggtgggggagctcggtgtccaagtataccacactcagtaaccacacataggtrtttagtagccagcgttttcatctttcttccatgtcttcaatttctgatacagaaaaaaaatgccagacagatttttataaatgttctcttgggacattgtacatttccactcatatacttttatgcacttgggaaacatgtgaaaaggaggtcagatgaaagaaatatttaaactatgtaag

SEQ ID NO: 281379 - DNA, 594 bp, Homo sapiens
agagaccctcttagattgtgaaatcctagtgagtggagctgtttatttgctcatcatcaagacaggtggtctctcaggccagcagacacttctttagagagcagtctctgggctgcagctttgactccagatgggtgaaaaccactctgttacatcttaggcttcacttgctctsttttttcttggtatggctgtgtgggggctgatgataagaaggaccgtgaaggaggatcagttttatttttctgcctctgccaccttcgtgttcacagcctctggcttggaacaatgcacacacctctagaacgttgtcacctctcatcagatctacaaattgggtgcttgcaccagtggagaagccagctcacaggcaactggaatggttttaagtgtcctgccttgtttctttttcttgaatttgctcagacatatgcatagatttacatgatctgtccatttgtatatactttgggcacttaaccttgcagctacctatttctatttaaagtcataacttcccccacattttcctgatcatgttcaactctgcagtctacgttgctgagaacattctgtcattcattcattgaacaa

SEQ ID NO: 281380 - DNA, 581 bp, Homo sapiens
aaggatgactaataaggggtaaaagagactcatcttcctcttcctctctctcccccactcccagggctgggtctttctgccctcagaaacccttggacgctgtcagtgattgttagagagagactkttcgggctgaggcttcagacactgcccaagggcagattgctggactcccagcccgagccctgcctcacgaacaatgaagacccttcagcttctcccttcagctgtctcagggccatcccgggtgaggtgggggtgggcgatcaagtgaaccccagctcaggagggcacaaggagggaggtaaaatagcacggttaaaatcagagtctttttgaaccccgggttaaatttccagccctgccatttatctgtgtaactttgatttgtgttagttaacctgaaagaacctcagtttttctatctagaaaatggtgatgataatccttaacaaagagaggctgaaaagatgaaataaaatgaaaccattgtgcctgtcaatcagtgcatgttggctgatattgatattgtcagcctaagtgtatggaagaattatattctctcttctattttgtaaaat

SEQ ID NO: 281381 - DNA, 581 bp, Homo sapiens
aaggatgactaataaggggtaaaagagactcatcttcctcttcctctctctcccccactcccagggctgggtctttctgccctcagaaacccttggacgctgtcagtgattgttagagagagacttttcgggctgaggcttcagacactgcccaagggcagattgctggactcccagcccgagccctgcctcacgaacaatgaagacccttcagcttctcccttcagctgtctcagggccaycccgggtgaggtgggggtgggcgatcaagtgaaccccagctcaggagggcacaaggagggaggtaaaatagcacggttaaaatcagagtctttttgaaccccgggttaaatttccagccctgccatttatctgtgtaactttgatttgtgttagttaacctgaaagaacctcagtttttctatctagaaaatggtgatgataatccttaacaaagagaggctgaaaagatgaaataaaatgaaaccattgtgcctgtcaatcagtgcatgttggctgatattgatattgtcagcctaagtgtatggaagaattatattctctcttctattttgtaaaat

SEQ ID NO: 281382 - DNA, 525 bp, Homo sapiens
gacagaccaaattcacagtcaaatgcgacaagatgagggcctggcctggttttaaatccaaggacaaaaatatcattcattcactctttcattctttctcttatctgaatccccagtggtacctaaaatagagctggtctaaagatgatgattaatgaatgttaaattattgatactacttctaagaagatgtaactgccagctacagaaccagccaaaaggactgcaaacccagtaattcatttcatcccaacctgactgatctctctgatgtctgcactgctgtgtcactagactgcccgattgtcctaggttgagacatttacctactgagccccagggatgggtggctgcttctaagctgctgcctaattccctcattactaaatgttgacgctgcttccttagaggactgctaaaccataactcaaaaatgttttaaacatgctactatttacttagattagaatatttacttaaatgytttaaaaaatacagtattttaaggcttttatctcttctgac

SEQ ID NO: 281383 - DNA, 635 bp, Homo sapiens
ttttaaacatgctactatttacttagattagaatatttacttaaatgttttaaaaaatacagtattttaagkcttttatctcttctgactactaccactaaccctgcttcccctcatttttccagagattaacactactgtgatttaaggatagagctctccagacttaaaaaaaaaccaaaaaactgcttttatatccagatatatgtaaccactgaaaaatatacattatttttcagcattttttacataaacattatcatccctttcattgagttatgttcctcagttttcctcctcaaagtttttgagatcaaatatagttcccatttttcttctttatatagctgcacagtattccatcataggattacaccacattttatttattccaatattaatgaatatttaggttatttatacttttttttctataaccaacaagcccatgccttctactgcttatcctttccccacctgaatttgtacaatccccagcttctcttatccatgaccactgaaaccccagggaagaccttatcactttcaggatgtccatggctctttcaccctatgccatgcttggaaccaggaaagcccaaaagaccccacttcctgcccttctattctgctcc

SEQ ID NO: 281384 - DNA, 624 bp, Homo sapiens
attttaaggcttttatctcttctgactactaccactaaccctgcttcccctcatttttccagagattarcactactgtgatttaaggatagagctctccagacttaaaaaaaaaccaaaaaactgcttttatatccagatatatgtaaccactgaaaaatatacattatttttcagcattttttacataaacattatcatccctttcattgagttatgttcctcagttttcctcctcaaagtttttgagatcaaatatagttcccatttttcttctttatatagctgcacagtattccatcataggattacaccacattttatttattccaatattaatgaatatttaggttatttatacttttttttctataaccaacaagcccatgccttctactgcttatcctttccccacctgaatttgtacaatccccagcttctcttatccatgaccactgaaaccccagggaagaccttatcactttcaggatgtccatggctctttcaccctatgccatgcttggaaccaggaaagcccaaaagaccccacttcctgcccttctattctgctcctcctctcctatcgctcatttctttgcctctatcctccactcctcccagcaaa

SEQ ID NO: 281385 - DNA, 635 bp, Homo sapiens
ttttaaacatgctactatttacttagattagaatatttacttaaatgttttaaaaaatacagtattttaaggcttttatctcttctgactactaccactaaccctgcttcccctcatttttccagagattaacactactgtgatttaaggatagagctctccagacttaaaaaaaaamcaaaaaactgcttttatatccagatatatgtaaccactgaaaaatatacattatttttcagcattttttacataaacattatcatccctttcattgagttatgttcctcagttttcctcctcaaagtttttgagatcaaatatagttcccatttttcttctttatatagctgcacagtattccatcataggattacaccacattttatttattccaatattaatgaatatttaggttatttatacttttttttctataaccaacaagcccatgccttctactgcttatcctttccccacctgaatttgtacaatccccagcttctcttatccatgaccactgaaaccccagggaagaccttatcactttcaggatgtccatggctctttcaccctatgccatgcttggaaccaggaaagcccaaaagaccccacttcctgcccttctattctgctcc

SEQ ID NO: 281386 - DNA, 624 bp, Homo sapiens
attttaaggcttttatctcttctgactactaccactaaccctgcttcccctcatttttccagagattaacactactgtgatttaaggatagagctctccagacttaaaaaaaaaccaaaaaactgcttttatatccagatatatgtaaccactgaaaaatatacattatttttcagcattttttacataaacattatcatccctttcattgagttatgttcctcagttttcctcctcaaagtttttgagatcaaatatagttcccatttttcttctttatatagctgcacagtattccatcataggattacaccacattttatttattccaatattaatgaatatttaggttatttatasttttttttctataaccaacaagcccatgccttctactgcttatcctttccccacctgaatttgtacaatccccagcttctcttatccatgaccactgaaaccccagggaagaccttatcactttcaggatgtccatggctctttcaccctatgccatgcttggaaccaggaaagcccaaaagaccccacttcctgcccttctattctgctcctcctctcctatcgctcatttctttgcctctatcctccactcctcccagcaaa

SEQ ID NO: 281387 - DNA, 367 bp, Homo sapiens
gatcacagctcaccgtagccttgaactcctgggttcaagggttcctcttgccttagtcttctcactagctgagactgcaggcccrcgccagcacacctggctaattttacaaaaattgttttggagagacgtggtcttgccatcttgcctaggctggtgtggaactcctgggttcaagcaaacctcccaccttggccaccctaagtgttgggattacaggcgtgacccattgtgcccagcctaaacttttttgttttttttttaatgctgagctgtacacagaagaaagtaaaggtcttggtcaagcctaggaaagaagtatgcaaagaaactggtggcaggctggatgtgggcatatttcggggct

SEQ ID NO: 281388 - DNA, 367 bp, Homo sapiens
gatcacagctcaccgtagccttgaactcctgggttcaagggttcctcttgccttagtcttctcactagctgagactgcaggcccacrccagcacacctggctaattttacaaaaattgttttggagagacgtggtcttgccatcttgcctaggctggtgtggaactcctgggttcaagcaaacctcccaccttggccaccctaagtgttgggattacaggcgtgacccattgtgcccagcctaaacttttttgttttttttttaatgctgagctgtacacagaagaaagtaaaggtcttggtcaagcctaggaaagaagtatgcaaagaaactggtggcaggctggatgtgggcatatttcggggct

SEQ ID NO: 281389 - DNA, 471 bp, Homo sapiens
ggggaggatggagaaaggatacaaaaagacactgtgggatttcagggcaacccatgagtgaggatcacagcagagctatgccttgcaaggaccagaactggaaaacctttgtgacttagaccgccctcctcaggacagctcccgccactcttcagggacaaagttcctttactcagccatagtttctgtgctccaaatactcagcttacacatgcctgttgctgctgcactcaccactgtggttctcagtgcaaattccccagaaagcagtctgactggctgggagaccttttttyttttaaccaggctcccaaagttgtagattttggggtcatttacaatatgcatttccccaacacactcagatctaggtggacttgaccagatgggcatctgtattccattacccagcatataaccactttgggcaacagggaatgtgaagggccccaaaccgttccccaccaagag

SEQ ID NO: 281390 - DNA, 471 bp, Homo sapiens
ggggaggatggagaaaggatacaaaaagacactgtgggatttcagggcaacccatgagtgaggatcacagcagagctatgccttgcaaggaccagaactggaaaacctttgtgacttagaccgccctcctcaggacagctcccgccactcttcagggacaaagttcctttactcagccatagtttctgtgctccaaatactcagcttacacatgcctgttgctgctgcactcaccactgtggttctcagtgcaaattccccagaaagcagtctgactggctgggagaccttttttcttttaaccaggcycccaaagttgtagattttggggtcatttacaatatgcatttccccaacacactcagatctaggtggacttgaccagatgggcatctgtattccattacccagcatataaccactttgggcaacagggaatgtgaagggccccaaaccgttccccaccaagag

SEQ ID NO: 281391 - DNA, 1092 bp, Homo sapiens
tagaccgccctcctcaggacagctcccgccactcttcagggacaaagttcctttactcagccatagtttctgtgctccaaatactcagcttacacatgcctgttgctgctgcactcaccactgtggttctcagtgcaaattccccagaaagcagtctgactggctgggagaccttttttcttttaaccaggctcccaaagttgtagattttggggtcatttacaatatgcatttccccaacacactcagatctaggtggacttgaccagatgggcatctgtattccattacccagcatataaccactttgggcaacagggaatgtgaagggccccaaaccgttccccaccaagagtgtgggtggcaggcaccctgaaatatgtctagcacactcataaagcatgaacatctacacacaactaaaaataaatagtgagagccctgacactgcttctgggggttttcccaagcacctgttacgaatgrtaacaatggatggccgctccttctccctcagcttwcaaaaaacagaaccgtggaggtagagactaattcttcagcagcccagagaagagaactgggaaacagggcccttgcagatacacaagaccaagctggagagttcagggacttccaaaagaaggtacaagaatgagcactataccatagtggggtgggtcacaaaagcaggaaawggtccccaaacaaagaatccatcagtcagttacagcactctccacatgtggtgaaacagtatgcaaccatttaaaaactgcagagaacaatatttatgaacacctaaaaatgctgaaagcacactactaagtaaaaggggagaaaggctataaaaggatttgaaagtattttcgtaaagataaacacccacacacacccacacacctctatatatgtgtggaaaaaggactgggctagtatatttaaaaaacgctaaagggaggtcgggtaataagggattgttttttccttgcactttgtgttttctaagtattctatagtctgaatgaattagattcataattaggaccaacagtcataagcaatttctcagaccacctgcctcataaaacccaa

SEQ ID NO: 281392 - DNA, 583 bp, Homo sapiens
tttggtacagatgaattcaggttgtgtaagtggagaggagggaggtggccaaggagcctgaagtsggggaggggggctgatggtgaaatagggaatgggtggagagagaaaatgattgcaaaattggctggagccagcctggtcaggtcaactttgcaggtgtgtgaagtgtcaaatggttaatcagttgccctctgtttgagctgcttaatgcacaagggcctggttgaacaggtttgacctcatttactttttcttaaagctgtttagccactttcctaaaaactcctattttctgagttattaaactttccattccatgttgatcccttccgagccctctaacgcatctcttctcttgcttcttccaactggatgccttcatgaggcattaacaggtactgtgagccctgatgaaaatcatcctttcagggtacaaggaaggcacctgaatgacagatggttggaggaatcttgagaaagcagtttaggcattaacatgcaggctgtcgctgacttacacagagccaaggacgtgacatacagcatggggccatttctaaatccccactgaggacaaggg

SEQ ID NO: 281393 - DNA, 596 bp, Homo sapiens
aggcaactgcttgggagaagttgatgaggtcatcactggacagagaatctattccctgggcccaaccaactctctagaccatcctgccatgtgcctctgagaagtgagcttccccagccaagcccacaggaggacatatggagcaaaggtcaacagtcactcagctgatggatggcaagcattcagatgggaggtgcctccacaggccatgataacccatggatccatttgagaaagatgccaaaaaacagttaattcaaggccactttaaaatacctggcattcaatcctcctcaatgtctccatcaactgtagaccctataactaccaaatgagctccactcgccacaaagctcaagacacagaaacggtcagagagcagagcctattcctgaaaagcaaaagactccaaacttccacaactcaaccagtgaagggctggggaagactgacargttcactaagaaatgagaggaaggaaaaacaaggtgttcaaattagaaaatgattccattaatgagggctctgatgatatagttgtggaggttatcagtttgccagagctgcagatttaaaatacttacatggtcatcgaa

SEQ ID NO: 281394 - DNA, 493 bp, Homo sapiens
ttcactgcagctatcctgccaagctcattgtaaagtgacgaattttgtggacacttacagagaaaaaatagcttcaaatgctgtagaccaatgctgcacgctgcagagacacagtctttgggttctgtgagctgtatttgggcattacgcagagttcagctgccatctgtccctttgaaggccagctaagaagttggtcccagcctgggcatggtaccactgtcctacattccagccatttgggatatcctgggttcaagcattccckcccattgctggatcaagcacttcccacctcctgctctgggaaatcagatctcagtaggtcatcaaccatcccagaaagtccagcagagttggttttggtttgggggtgttttttgagttgggtggaagaagagaccttacataatcttttaactttttctctaaggctgaattccctataagcaaaattttaaaattttttttaaagaagaaaaacacccagaca

SEQ ID NO: 281395 - DNA, 493 bp, Homo sapiens
ttcactgcagctatcctgccaagctcattgtaaagtgacgaattttgtggacacttacagagaaaaaatagcttcaaatgctgtagaccaatgctgcacgctgcagagacacagtctttgggttctgtgagctgtatttgggcattacgcagagttcagctgccatctgtccctttgaaggccagctaagaagttggtcccagcctgggcatggtaccactgtcctacattccagccatttgggatatcctgggttcaagcattcccgcccattgctggatcaagcacttcccacctcctgctctgggaaatcagatctcagtaggtcatcaaccatcccagaaagtccagcagagttggttttggtttgggggtgttttttgagttgggtggaagaagagaccttayataatcttttaactttttctctaaggctgaattccctataagcaaaattttaaaattttttttaaagaagaaaaacacccagaca

SEQ ID NO: 281396 - DNA, 582 bp, Homo sapiens
gcagaaaggactcttttttgctrcacatccaggctgtttaagaaaaggcttaaggcagcttaagcacaaagaatgtcatcttcaaacattgtaacggcatcttctttttggggcactgaagtattcccatgattccaagaatcaaatgaacagcatctggttatggggtctctggtctctgccaaggcaaactcataaagcatttcagagcccttcatctggaaaggccttttctccaccccacgcccagccaatgcccactcatactttaaggcccagctcatccgtcatctctgctagggaaccttcctcagtgccttatgcaggcaaccattcctgccttgtgttgtgttgtgttgtgttgtgccttaagtcaaatccttaactcatctttgtgtgtccccttgcatttcagacagtaggtgcccaataaatgtttgtgggatgaatcaactggttattctcctggaacaccctttcccagtacacctccactcgccagaacaactgtcttcctcacaggtgccagccatcaccccgaccacaccctctcaaaaggcctttgccagtcatcaaacaaag

SEQ ID NO: 281397 - DNA, 582 bp, Homo sapiens
gcagaaaggactcttttttgctacacatccaggctgtttaagaaaaggcttaaggcagcttaagcacaaagaatgtcatcttcaaacattgtaacggcatcttctttttggggcactgaagtattcccatgattccaagaatcaaatgaacagcatctggttatggggtctctggtctctgccaaggcaaactcataaagcatttcagagcccttcatctggaaaggccttttctccaccccacgcccagccaatgcccactcatactttaaggccyagctcatccgtcatctctgctagggaaccttcctcagtgccttatgcaggcaaccattcctgccttgtgttgtgttgtgttgtgttgtgccttaagtcaaatccttaactcatctttgtgtgtccccttgcatttcagacagtaggtgcccaataaatgtttgtgggatgaatcaactggttattctcctggaacaccctttcccagtacacctccactcgccagaacaactgtcttcctcacaggtgccagccatcaccccgaccacaccctctcaaaaggcctttgccagtcatcaaacaaag

SEQ ID NO: 281398 - DNA, 595 bp, Homo sapiens
ttaacattttgccacacctggtttagtttttttatttttcctttcaagaaagaaagcattacaggctgtgcttcaatccctatttcaccccctttcaagccccactattccacccatcccagaaatgacaacatcccgaatttggtatttaccactcttgcacatttatttttatgcttttactacctatgtatgtagccataaacaatatacagagtttttggatgctataaaactgtttaaaatggcatcacactgtatgcacccttttgcatctgttttaattgacaaaacatttttgagggtaatccttgttgacataygtcactccagggcattcctttcaactgctttataccatggtccactgtctggataatcattatctatagcacaatgtattcattttcctactgataaatttttaagtggtttccaacttttcattgcaataaatattcttgtaaatcttcatccaaggttatcttcaaccacactaggcattgcccaaattgctctgcaacatcagtgcaccaatttacattgccaagatcagtgtttaagtgtttctattctttgatgtctttgtcaacct

SEQ ID NO: 281399 - DNA, 595 bp, Homo sapiens
ttaacattttgccacacctggtttagtttttttatttttcctttcaagaaagaaagcattacaggctgtgcttcaatccctatttcaccccctttcaagccccactattccacccatcccagaaatgacaacatcccgaatttggtatttaccactcttgcacatttatttttatgcttttactacctatgtatgtagccataaacaatatacagagtttttggatgctataaaactgtttaaaatggcatcacactgtatgcacccttttgcatctgttttaattgacaaaacatttttgagggtaatccttgttgacatatgtcactccagggcattcctttcaactgctttataccatggtccactgtctggataatcattatctatagcacaatgtattcattttcctactgataaatttttaagtggtttccaacttttcattgcaataaatattcttgtaaatcttcatccaaggktatcttcaaccacactaggcattgcccaaattgctctgcaacatcagtgcaccaatttacattgccaagatcagtgtttaagtgtttctattctttgatgtctttgtcaacct

SEQ ID NO: 281400 - DNA, 526 bp, Homo sapiens
gtctggggccttttgggctcggtgccttagggtttatacatgaatgctggactccctgtgtggtggtgaacaccccatgactaagtgcatgtcagcgtcagcactggcccacactcctgggttcgtgttttcactttttcattcaggaactcgggagctggggccactcccttggcccttcaggttctccacctgagcagtggggataataaggcagacccggggatggctctggtgagggtggaggagtcactgtacagagagagtagagcgggggtggattttattgttagaagtggacactggtgattgggttgtataagtgggaaatctctcctgagaaaacacacagcctcacctgtacagaaacacacacattcacaccacacgatgcagcctcacacaagacaycaccaatcctcaagcacccaactcagcaccacccaaaagggagcacagctgcttcctcaaaatttggccataatttttccctggggaattcaggttttaaaaaaacacttcccct

SEQ ID NO: 281401 - DNA, 435 bp, Homo sapiens
tgataaatgaataaacactatctgtatgagtaaacacagcagactatgaaggaaaacacatgaccagcacgtgctaacacgtcaattaacttcaaacatagtatgctaaatgaaggaagtcagattccaaatatatrtatatgtccatttctattaagcaaatgggaaatttatggagatggaatgtcacagcagtattgcttagggctggagatgggagtggggattaactgccagtgcgcaagagagaacttgggtgagggaaacatatttaaattagatcgtggtgatgggtgcacacagtatcaatttaataaagcatcaaattgtagaccttttcagtgggcaaactttatggtgggttcacacccaatataggtgttaaaaataaattaatgttacggaaattcttgtcgggtttttaacaagccaaga

SEQ ID NO: 281402 - DNA, 435 bp, Homo sapiens
tgataaatgaataaacactatctgtatgagtaaacacagcagactatgaaggaaaacacatgaccagcacgtgctaacacgtcaattaacttcaaacatagtatgctaaatgaaggaagtcagattccaaatatatatataygtccatttctattaagcaaatgggaaatttatggagatggaatgtcacagcagtattgcttagggctggagatgggagtggggattaactgccagtgcgcaagagagaacttgggtgagggaaacatatttaaattagatcgtggtgatgggtgcacacagtatcaatttaataaagcatcaaattgtagaccttttcagtgggcaaactttatggtgggttcacacccaatataggtgttaaaaataaattaatgttacggaaattcttgtcgggtttttaacaagccaaga

SEQ ID NO: 281403 - DNA, 435 bp, Homo sapiens
tgataaatgaataaacactatctgtatgagtaaacacagcagactatgaaggaaaacacatgaccagcacgtgctaacacgtcaattaacttcaaacatagtatgctaaatgaaggaagtcagattccaaatatatatatatgtccatttctattaagcaaatgggaaatttatggagatggaatgtcacagcagtattgcttagggctggagatgggagtggggattaactgccagtgcgcaagagagaayttgggtgagggaaacatatttaaattagatcgtggtgatgggtgcacacagtatcaatttaataaagcatcaaattgtagaccttttcagtgggcaaactttatggtgggttcacacccaatataggtgttaaaaataaattaatgttacggaaattcttgtcgggtttttaacaagccaaga

SEQ ID NO: 281404 - DNA, 606 bp, Homo sapiens
tggcttagtctcttcatagtttcctcttacatatgggacactgaatactccccgcaactgcaattcttgaatcaacttaattaatgaacttccacagtaccttcttgtgggtacctcttcttctttacccgggagccatgaggtctcctacactggttggtgtgcacagcatatcttcttgtattctctatcagagaagaygctggttaatgcatttacaatagatagggctgttgacatcttgctgacagaagaccagagggaaaatagtgataatctgttctaagtttaaacttatgatccttttctttacaggcttccaagcagagcccactgaatcaaagttgggtttcaggaagatcacggagttcagtgagcactcaacacctctatcagacagactgcgtgggcagtgccttcctggagaggggaacacagccggatgactgtgagtgcagggctggtgcagagtgggggcccggattcaaattccactaagccatgtggacctggcaagctcatgtcctccctctgccctcagttctctgcactgtcataatgtaattttagcaatactttttaggccctatttaggccctacttctt

SEQ ID NO: 281405 - DNA, 589 bp, Homo sapiens
gctccggggcagtggagcatgctttcctgttcggcttttccgtgggcatgacgccttatggtttatggagaacatcagccctgcaggggtgcagaggaggggctgtggctgagattttacacttgagggtgctgacattcagagatgataagtgacgagcagaacctcaaccccgctgagtgaaggacctgagatgggaaatgtatttggttccctagagagagagattcytgaaaaactgccacctcttcatcacgccctgtgccagagacccaagagacccctcactgtctttctccagtcctcctagcccaaggtgtgtgggtggacaaaggtggtgctctggaggaaatgcctgagataaggacaggtccttaatgataaagaattctccttcctctttcagatccttgacctcccagtatgacagcttaaaggctgtcatctctgtggcctgcctcccctttcccttcaccctgccagctgcctctcagtgactgtctcctccagtgactacactgagggaccagggactgcttgcctcccgaggctgctcagaccttccgacaccgcacaatgattgtcaaaa

SEQ ID NO: 281406 - DNA, 582 bp, Homo sapiens
ataaagaattctccttcctctttcagatccttgacctcccagtatgacagcttaaaggctgtcatctctgtggcctgcctcccctttcccttcaccctgccagctgcctctcagtgactgtctcctccagtgactacactgagggaccagggactgcttgcctcccgaggctgctcagaccttccgacacygcacaatgattgtcaaaagatgggtctgcaaagagtaacttcccttccactgattaaacctgaatatgcaagctactgtgaattaactggaaaagtggccgtgtgggctggtgctttggtgatttaatgaattaagtctgcaagccccactgcctccttgactattgatcagagctgcctgcaataaggtctggctaagaatgggcagtggctgcaccagctctgggtaaaatttgacctaaaatgaccagtctcattcactaacctcaccatagtcttatgggttcaatggacctgtccaatcctttgctctgttctctccatcaccttcctgtgtaattttcctccaccacgcacataatagaaacatggcacaggggagctaatcgcc

SEQ ID NO: 281407 - DNA, 582 bp, Homo sapiens
ataaagaattctccttcctctttcagatccttgacctcccagtatgacagcttaaaggctgtcatctctgtggcctgcctcccctttcccttcaccctgccagctgcctctcagtgactgtctcctccagtgactacactgagggaccagggactgcttgcctcccgaggctgctcagaccttccgacaccgcacaatgattgtcaaaagatgggtctgcaaagagtaacttcccttccactgattaaacctgaatatgcaagctactgtgaattaactggaaaagtggccgtgtgggctggtgctttggtgatttaatgaattaagtctgcaasccccactgcctccttgactattgatcagagctgcctgcaataaggtctggctaagaatgggcagtggctgcaccagctctgggtaaaatttgacctaaaatgaccagtctcattcactaacctcaccatagtcttatgggttcaatggacctgtccaatcctttgctctgttctctccatcaccttcctgtgtaattttcctccaccacgcacataatagaaacatggcacaggggagctaatcgcc

SEQ ID NO: 281408 - DNA, 452 bp, Homo sapiens
aatgaagcccagcattactcttcaacgctgtgtgtgtaaatccactgagtgtgctgacccccacgcttgtacccacctgctaacacagaaagggtccactcagaaggsaggcacagctccagcactgaggctgtccacaccagcttcacaagagggttgccacaaggacgacggatacccggataacaaccaaatggtaatttgagtacttaatggtcatgatccctaaagtgtgtagctcagagggcttgtggtgataactccatcaagactctaaagcatctccccaattcttactggacttgatccatgtcttgaggagacccagctatgacacgcaggcaccacgttgtcctacttagtgcctcccttagtgtttcagaacctgtgatttgatcagaaacatgggctttctatgttggtttcacactaaggactatgtgacacctgca

SEQ ID NO: 281409 - DNA, 419 bp, Homo sapiens
gtgtgctgacccccacgcttgtacccacctgctaacacagaaagggtccactcagaaggcaggcacagctccagcactgaggctgtccacaccagcttcacaagagggttgccacaaggacgacggatacccggataacaaccaaatggtaatttgagtacttaatggtcatgatccctaaagtgtgtagctcagagggcttgtggtgataactccatcaagactctaaagcatctccccaattcttactggacttgatccatgtcttgagragacccagctatgacacgcaggcaccacgttgtcctacttagtgcctcccttagtgtttcagaacctgtgatttgatcagaaacatgggctttctatgttggtttcacactaaggactatgtgacacctgcaggaagatgtctacat

SEQ ID NO: 281410 - DNA, 419 bp, Homo sapiens
gtgtgctgacccccacgcttgtacccacctgctaacacagaaagggtccactcagaaggcaggcacagctccagcactgaggctgtccacaccagcttcacaagagggttgccacaaggacgacggatacccggataacaaccaaatggtaatttgagtacttaatggtcatgatccctaaagtgtgtagctcagagggcttgtggtgataactccatcaagactctaaagcatctccccaattcttactggacttgatccatgtcttgaggagacccagctatgacacgcaggcaccacrttgtcctacttagtgcctcccttagtgtttcagaacctgtgatttgatcagaaacatgggctttctatgttggtttcacactaaggactatgtgacacctgcaggaagatgtctacat

SEQ ID NO: 281411 - DNA, 605 bp, Homo sapiens
taatttgagtacttaatggtcatgatccctaaagtgtgtagctcagagggcttgtggtgataactccatcaagactctaaagcatctccccaattcttactggacttgatccatgtcttgaggagacccagctatgacacgcaggcaccacgttgtcctacttagtgcctcccttagtgtttcagaacctgtgatttgatcagaaacatgggcttkctatgttggtttcacactaaggactatgtgacacctgcaggaagatgtctacatagctacctggattatgagatcatgacgttctcttatgtgagggatggcgtttgggatctctgcaggtgtgggtaattccaggcatagagggtgctggaactcccttgcatggtgaatagtgatctcttcactggctgataaatagaggttgtagttcaggccttcaacattagcaccgtatgagtaaacattttgactcttcactatgcagcaagtggaacccaggcacattatttatgtggggcttagtttctcccctggcatgtgggctcaataaacaagctcacaacatatgggcatgatgatgatgaggtgtgaactaatgtaagtaaagt

SEQ ID NO: 281412 - DNA, 572 bp, Homo sapiens
gaaacatgggctttctatgttggtttcacactaaggactatgtgacacctgcaggaagatgtctacatagctacctggattatgagatcatgacgttctcttatgtgagggatggcrtttgggatctctgcaggtgtgggtaattccaggcatagagggtgctggaactcccttgcatggtgaatagtgatctcttcactggctgataaatagaggttgtagttcaggccttcaacattagcaccgtatgagtaaacattttgactcttcactatgcagcaagtggaacccaggcacattatttatgtggggcttagtttctcccctggcatgtgggctcaataaacaagctcacaacatatgggcatgatgatgatgaggtgtgaactaatgtaagtaaagtatgtggtctgatttgttaaattaagaaaaatggcactgagagttgtgctgggtaaacacaacatttttttcctgggggaaacacagatagacacacattcacaagcaaatcatgcagacttgcacacagaccacctcaccccacccccgccctaatacacacataccca

SEQ ID NO: 281413 - DNA, 605 bp, Homo sapiens
gatctcttcactggctgataaatagaggttgtagttcaggccttcaacattagcaccgtatgagtaaacattttgactcttcactatgcagcaagtggaacccaggcacattatttatgtggggcttagtttctcccctggcatgtgggctcaataaacaagctcacaacatatgggcatgatgatgatgaggtgtgaactaatgtaagtaaagtatgtggtctgatttgttaaattaagaaaaatggcactgagagttgtgctgggtaaacacaacatttttttcctgggggaaacacasatagacacacattcacaagcaaatcatgcagacttgcacacagaccacctcaccccacccccgccctaatacacacatacccacacacaacctaatgtgaacatgttcccagaaactatacatagataaaaagagtatgtcaccaggaaaaccagtttcttttactataccctacatcctcattcccaccagatgtcttggatcatggaggctctccagacaaaagccagcagttaagctccagatttcctgtagaatccttttctaacaaccagtgagtgattccagaatacgtaccattgaa

SEQ ID NO: 281414 - DNA, 543 bp, Homo sapiens
aaacaacatttacatcttaggcaaagacaggctactttaccttggtagtagagtagggcttccttttcacacgctttttggaaggcttcttcragtcacctaggggatgtggagggacacagcatggctgtcagttcattggcagtgctactcatgaatgactcagggactggaacttaggggcgtgcctggttaacaagcatggaatgagcttctcctggaccatcttcttcacggaccaaggaaggcaaagaaagagcagcaaggaaatgagagtagagcccttggctttccaggtaatggcaaatgaaagcaacgtgaaataatcaactccaaatgaacaaatgctaaaatacatgctaggattcaaccacagcatcctgtcacttcttcagaccctttaaaagcccagcaggactgccactaccttcttgacatctaccaagtccctttcaacctccacagacccacatacactgctactgcatttatcatggagggtatagggttctgccttgtttatgtgtgaattttttaaaaact

SEQ ID NO: 281415 - DNA, 596 bp, Homo sapiens
ccacatacactgctactgcatttatcatggagggtatagggttctgccttgtttatgtgtgaattttttaaaaactagatttaataccatgcaccagcattaattgtatttatttcttttcttggttatgaaaataatcagtcaggcatagtggctcacacctgtaatcccagcagtttggaaggtggaggtgggtggatcatttgaggtcaggagttcgagaccagcctgaccaacatggtaaaaccccatcattgaagataaatgttttatatccatggttaacagatgagatgaccatgaaatgaacaccagtgtactgggtggagcagcttatctattcagtcttcggcactaaaacctgtgaaacaatatcatcttgccttatttactaacaaatacaagtgcctctaaacttagacagtttccaagtcatggaactgatgagcacttagctcctgcagagagctctggaygatgggtcgggagaacaaagacacaatacatcaaaacggcattaacaagtaaacaggttttcaaagccctctacatgcaaatttacacaattatccttttaatttttatcttcatatata

SEQ ID NO: 281416 - DNA, 596 bp, Homo sapiens
ccacatacactgctactgcatttatcatggagggtatagggttctgccttgtttatgtgtgaattttttaaaaactagatttaataccatgcaccagcattaattgtatttatttcttttcttggttatgaaaataatcagtcaggcatagtggctcacacctgtaatcccagcagtttggaaggtggaggtgggtggatcatttgaggtcaggagttcgagaccagcctgaccaacatggtaaaaccccatcattgaagataaatgttttatatccatggttaacagatgagatgaccatgaaatgaacaccagtgtactgggtggagcagcttatctattcagtcttcggcactaaaacctgtgaaacaatatcatcttgccttatttactaacaaatacaagtgcctctaaacttagacagtttccaagtcatggaactgatgagcacttagctcctgcagagagctctggatgatgggtcgggagaacaaagacacaatacatcaaaacrgcattaacaagtaaacaggttttcaaagccctctacatgcaaatttacacaattatccttttaatttttatcttcatatata

SEQ ID NO: 281417 - DNA, 1129 bp, Homo sapiens
aaactgaatcccaattcacactgggactacaccagctgccaccatgcctggctaattttttgtatttgtagtagagacaggktttcactgtattggccaggatggtcttgatctcctcaccttgtgatcctcttgccttggcctcccaaagtgctgggattataggcctgagtcaagatacatattttttaaatgaagaaaattttgaaagatactctgcttggtacaataatcaaatatataaattgaggaataaaacataatcatgaaacatatttataactgcatatggaaaatacagaggctaattttttaaataacatattttgaaagcattaactagtaatttgaaaagatcgcatttgacaggccagtatgaacataccttgaatgcagccacacaggttccccataagaaaaatcaaaatcagggaaaatgaaacctcaatggttcaatctgctctgacctttgaaaaactcagcacagatagtggcacttaggaccaagggcaggagatccctaatcccatcaccatggcgatagggcataaacattccagggtgwaaactgaatcccaattcacactgggactacaccagctgccaccatgcctggctaattttttgtatttgtagtagagacagggtttcactgtattggccaggatggtcttgatctcctcaccttgtgatcctcttgccttggcctcccaaagtgctgggattataggcctgagtcaagatacatattttttaaatgaagaaaawtttgaaagatactctgcttggtacaataatcaaatatataaattgaggaataaaacataatcatgaaacatatttataactgcatatggaaaatacagaggctaattttttaaataacatattttgaaagcattaactagtaatttgaaaagatcgcatttgacaggccagtatgaacataccttgaatgcagccacacaggttccccataagaaaaatcaaaatcagggaaaatgaaacctcaatggttcaatctgctctgacctttgaaaaactcagcacagatagtggcacttaggaccaagggcaggagatccctaatcccatcaccatggcgatagggcataaacattccagggtg

SEQ ID NO: 281418 - DNA, 1129 bp, Homo sapiens
aaactgaatcccaattcacactgggactacaccagctgccaccatgcctggctaattttttgtatttgtagtagagacagggtttcactgtattggccaggatggtcttgatctcctcaccttgtgatcctcttgccttggcctcccaaagtgctgggattataggcctgagtcaagatacatattttttaaatgaagaaaattttsaaagatactctgcttggtacaataatcaaatatataaattgaggaataaaacataatcatgaaacatatttataactgcatatggaaaatacagaggctaattttttaaataacatattttgaaagcattaactagtaatttgaaaagatcgcatttgacaggccagtatgaacataccttgaatgcagccacacaggttccccataagaaaaatcaaaatcagggaaaatgaaacctcaatggttcaatctgctctgacctttgaaaaactcagcacagatagtggcacttaggaccaagggcaggagatccctaatcccatcaccatggcgatagggcataaacattccagggtgwaaactgaatcccaattcacactgggactacaccagctgccaccatgcctggctaattttttgtatttgtagtagagacagggtttcactgtattggccaggatggtcttgatctcctcaccttgtgatcctcttgccttggcctcccaaagtgctgggattataggcctgagtcaagatacatattttttaaatgaagaaaattttgaaagatactctgcttggtacaataatcaaatatataaattgaggaataaaacataatcatgaaacatatttataactgcatatggaaaatacagaggctaattttttaaataacatattttgaaagcattaactagtaatttgaaaagatcgcatttgacaggccagtatgaacataccttgaatgcagccacacaggttccccataagaaaaatcaaaatcagggaaaatgaaaccwcaatggttcaatctgctctgacctttgaaaaactcagcacagatagtggcacttaggaccaagggcaggagatccctaatcccatcaccatggcgatagggcataaacattccagggtg

SEQ ID NO: 281419 - DNA, 615 bp, Homo sapiens
ccaagggcaggagatccctaatcccatcaccatggcgatagggcataaacattccagggtgaaggcacaatccacactgtgaggtccaactgctgccatgcagacaggtgggcttttacaagtacaggaaggtcatcaaaggctcagtgttttgtttcaaaaastgaatcccaagcccacacattattatgctggcttcttaaaataagttatgagatgggaaatagggcacccacaaatatatatatataattatatataatataatatatagtatatatataatatatttaatataatatatatatattatataaaatatatatttatatatatatataatttgggaatttgggaataaactgaatcccaattcacactgggactacaccagctgccaccatgcctggctaattttttgtatttgtagtagagacagggtttcactgtattggccaggatggtcttgatctcctctccttgtgatcctcttgccttggcctcccaaagtgctgggattacaggcctgagtcaagatacatattttttaaatgaagaaaaatttcaaagatactctgcttggtacaataatcaaatatataaattgaggaataa

SEQ ID NO: 281420 - DNA, 1231 bp, Homo sapiens
ccaagggcaggagatccctaatcccatcaccatggcgatagggcataaacattccagggtgaaggcacaatccacactgtgaggtccaactgctgccatgcagacaggtgggcttttacaagtacaggaaggtcatcaaaggctcagtgttttgtttcaaaaagtgaatcccaagcccacacattattatgctggcttcttaaaataagttatgagatgggaaatagggcacccacaaatatatatatataattatatataatataatrtatagtatatatataatatatttaatataatatatatatattatataaaatatatatttatatatatatataatttgggaatttgggaataaactgaatcccaattcacactgggactacaccagctgccaccatgcctggctaattttttgtatttgtagtagagacagggtttcactgtattggccaggatggtcttgatctcctctccttgtgatcctcttgccttggcctcccaaagtgctgggattacaggcctgagtcaagatacatattttttaaatgaagaaaaatttcaaagatactctgcttggtacaataatcaaatatataaattgaggaataawccaagggcaggagatccctaatcccatcaccatggcgatagggcataaacattccagggtgaaggcacaatccacactgtgaggtccaactgctgccatgcagacaggtgggcttttacaagtacaggaaggtcatcaaaggctcagtgttttgtttcaaaaagtgaatcccaagcccacacattattatgctggcttcttaaaataagttatgagatgggaaatagggcacccacaaatatatatatataattatatataatataatatatagtatatatataatatatttaatatawtatatatatattatataaaatatatatttatatatatatataatttgggaatttgggaataaactgaatcccaattcacactgggactacaccagctgccaccatgcctggctaattttttgtatttgtagtagagacagggtttcactgtattggccaggatggtcttgatctcctctccttgtgatcctcttgccttggcctcccaaagtgctgggattacaggcctgagtcaagatacatattttttaaatgaagaaaaatttcaaagatactctgcttggtacaataatcaaatatataaattgaggaataa

SEQ ID NO: 281421 - DNA, 563 bp, Homo sapiens
tcagttgcattatgtcactatggcacatacagtatcatgcaacaactgacagaagggttgtgggcctgattcacagtgtatgtgagtcacaaatgtcacttatgacaccatacagcaggtgagaggggatagtcattaytcacctcgggtcacattgtcacacatgataccatatgatagcagagggtgatgcagaactgagttgtattatgtcgctatgtaacctgtgatagatgatagctgatgcgggtgaagaccaaagttacattttgtacctacattatatgaaatatacaacatgcacgagggaggtgcagacacaaatcacactgtgtgctgtatcccatatatgtgtttaatttctgtgtttaagagagctgggttcatgaatgaacttagtcactgcaccttgtatgatataatacaacagctgagagagtgggacacattcctcattcccattctgtcagtgattgaccacaccttgtgttaactgtatgagccactgtgtttggccgtgtatagcgcacgtggcacattgttcactgatacatatttgctcc

SEQ ID NO: 281422 - DNA, 563 bp, Homo sapiens
tcagttgcattatgtcactatggcacatacagtatcatgcaacaactgacagaagggttgtgggcctgattcacagtgtatgtgagtcacaaatgtcacttatgacaccatacagcaggtgagaggggatagtcattattcacytcgggtcacattgtcacacatgataccatatgatagcagagggtgatgcagaactgagttgtattatgtcgctatgtaacctgtgatagatgatagctgatgcgggtgaagaccaaagttacattttgtacctacattatatgaaatatacaacatgcacgagggaggtgcagacacaaatcacactgtgtgctgtatcccatatatgtgtttaatttctgtgtttaagagagctgggttcatgaatgaacttagtcactgcaccttgtatgatataatacaacagctgagagagtgggacacattcctcattcccattctgtcagtgattgaccacaccttgtgttaactgtatgagccactgtgtttggccgtgtatagcgcacgtggcacattgttcactgatacatatttgctcc

SEQ ID NO: 281423 - DNA, 563 bp, Homo sapiens
tcagttgcattatgtcactatggcacatacagtatcatgcaacaactgacagaagggttgtgggcctgattcacagtgtatgtgagtcacaaatgtcacttatgacaccatacagcaggtgagaggggatagtcattattcacctcgggtcacattgtcacacatgataccatatgatagcagagggkgatgcagaactgagttgtattatgtcgctatgtaacctgtgatagatgatagctgatgcgggtgaagaccaaagttacattttgtacctacattatatgaaatatacaacatgcacgagggaggtgcagacacaaatcacactgtgtgctgtatcccatatatgtgtttaatttctgtgtttaagagagctgggttcatgaatgaacttagtcactgcaccttgtatgatataatacaacagctgagagagtgggacacattcctcattcccattctgtcagtgattgaccacaccttgtgttaactgtatgagccactgtgtttggccgtgtatagcgcacgtggcacattgttcactgatacatatttgctcc

SEQ ID NO: 281424 - DNA, 407 bp, Homo sapiens
ctagcactttgggaggctgaggcaggaggatcacttgagctcaggagtttgagaccagcctgggcaatataacgagacctcatcttactaaaaaccaaaagcattacctgggcatggtggtacacacctgtagtctcagctgcttcagaagttgaggtgggaagaactggttgagcccagaaggttgargctacagtgagctgtaattgcactactgcactctagcctgggtggcccccatctcacacacacaaaaaaagagcgagaccccgtctcaaaaaaaaaaaaaaaaaaaaaaaaaaagggagttcctcatttgccatgagtggacacctgcttctttactgcttcaaagtgaacacagctattccttgtaaagggttggttttactgtaaggaaatctaga

SEQ ID NO: 281425 - DNA, 1084 bp, Homo sapiens
atcagtggatatttcagcagaaaccctgcaggccagaaggtggtgggatgatacattgaaagtactgaaagagtaaagcctgccaactgagaatactatatttgacaaaattgtccttcaaaagtgaaggagaaattaagacattcccagataaataaaagctgaaggagtttattaccactagacctgaccaataagaaataataaaggggccgggcacagtggctcatgtctgtaatcccagcactttcgggagccgaggcaggtggatcacctgaggtcaggtgttcaagaccagcttgaccaacatggcgaaaccccatctctaataaaaatacaaaaattagctgggtgtggtggcacrcacctgtaatcctagctactcaggaggctgaggcaggagaatcacttgtacccgggaggtagaggttgcagtgagctgagatcacaccactgcactccagtctgggcaacggagcgagacttcatctcaaaaaaaaaaaaagaaacaataaagggagwgagtccttcaagttgatatgaagggatactagacagttgctcagcctgatgaaaatataaaggtaaatacataaagattaaaacctgtattattgtaatttttgctwataactcaatttttaatactttaatggaatttaaaggacaaaagcataataattataaatctatgttaatggatacaaagtatataaagtttaatttgtgacatcagtaacttaatagtggggcaaagatgtaaagagtagaggttttgcatgtgattgaagttatctgtttaaaataataagataactttaagatgttccatgtaattcccatagtaaccacaaggaaaatacctacagaatatatgcaaaaggaaatgagaaggaaatcagagcatagcactacaaaaaatcaactataacacaaaggaagacaataagggaggaaagaaggacaaaaaggctctaaacatacagaaaacaatgaccaaaatggtggtagtaagtccttcctaatcaataatttcattaaatgtacataggttaaactcccaataaaaagacataaatcggct

SEQ ID NO: 281426 - DNA, 562 bp, Homo sapiens
gagtccttcaagttgatatgaagggatactagacagttgctcagcctgatgaaaatataaaggtaaatacataaagattaaaacctgtattattgtaatttttgcttataactcaatttttaatactttaatggaatttaaaggacaaaagcataataattataaatctatgttaatggatacaaagtatataaagtttaatttgtgacatcagtaacttaatagtggggcaaagatgtaaagagtagaggttttgyatgtgattgaagttatctgtttaaaataataagataactttaagatgttccatgtaattcccatagtaaccacaaggaaaatacctacagaatatatgcaaaaggaaatgagaaggaaatcagagcatagcactacaaaaaatcaactataacacaaaggaagacaataagggaggaaagaaggacaaaaaggctctaaacatacagaaaacaatgaccaaaatggtggtagtaagtccttcctaatcaataatttcattaaatgtacataggttaaactcccaataaaaagacataaatcggct

SEQ ID NO: 281427 - DNA, 562 bp, Homo sapiens
gagtccttcaagttgatatgaagggatactagacagttgctcagcctgatgaaaatataaaggtaaatacataaagattaaaacctgtattattgtaatttttgcttataactcaatttttaatactttaatggaatttaaaggacaaaagcataataattataaatctatgttaatggatacaaagtatataaagtttaatttgtgacatcagtaacttaatagtggggcaaagatgtaaagagtagaggttttgcatgtgattgaagttatctgtttaaaataataagataactttaagatgttccatgtaattcccatagtaaccacaargaaaatacctacagaatatatgcaaaaggaaatgagaaggaaatcagagcatagcactacaaaaaatcaactataacacaaaggaagacaataagggaggaaagaaggacaaaaaggctctaaacatacagaaaacaatgaccaaaatggtggtagtaagtccttcctaatcaataatttcattaaatgtacataggttaaactcccaataaaaagacataaatcggct

SEQ ID NO: 281428 - DNA, 407 bp, Homo sapiens
ctagcactttgggaggctgaggcaggaggatcacttgagctcaggagtttgagaccagcctgggcaatataacgagacctcatcttactaaaaaccaaaagcattacctgggcatggtggtacacacctgtagtctcagctgcttcagaagttgaggtgggaagaactggttgagcccagaaggttgaggctacagtgagctgtaattgcactactgcactctagcctgggtggcccccatctcacacacacamaaaaagagcgagaccccgtctcaaaaaaaaaaaaaaaaaaaaaaaaaaagggagttcctcatttgccatgagtggacacctgcttctttactgcttcaaagtgaacacagctattccttgtaaagggttggttttactgtaaggaaatctaga

SEQ ID NO: 281429 - DNA, 562 bp, Homo sapiens
gagtccttcaagttgatatgaagggatactagacagttgctcagcctgatgaaaatataaaggtaaatacataaagattaaaacctgtattattgtaatttttgcttataactcaatttttaatactttaatggaatttaaaggacaaaagcataataattataaatctatgttaatggatacaaagtatataaagtttaatttgtgacatcagtaacttaatagtggggcaaagatgtaaagagtagaggttttgcatgtgattgaagttatctgtttaaaataataagataactttaagatgttccatgtaattcccatagtaaccacaaggaaaatacctacagaatatatgcaaaaggaaatgagaaggaaatcagagcatagcactacaaaaaatcaactataacacaaaggaagacaataagggaggaaagaaggacaaaaaggctctaaacatacagaaaacaatgaccaaaatggtggtagtaagtccttcctaatcaataatttcattaaatgtrcataggttaaactcccaataaaaagacataaatcggct

SEQ ID NO: 281430 - DNA, 561 bp, Homo sapiens
aaaaaggctctaaacatacagaaaacaatgaccaaaatggtggtagtaagtccttcctaatcaataatttcattaaatgtacataggttaaactcccaataaaaagacataaatcggctgattggatttaaaaaaacgggattcaactatatatgstgtctacaagagactcatttgaaatccaatacaaatgggttgaaaaatgagagaatggagaatattccgtgcaaaaagtaaccaaaacagatcaggaatggctgtacaagttatggctgtacaagttgttggggtttatgttactgaagaatgaacagagatgagtaagtggaggtgttatgtaaaggcatactgtactcaaaatctgaagacctgcagcagatttaaattccagctcttattataactttttaaaagattgtgaaaatatcaaaatatagatgaatcaagttttaatatactgtatgatgggtggatgaggctgtccattgtaccatttgtttgaattctcaggcatggtttggcagtgcaagaactctgtaacgttaacaaattcaataaaaa

SEQ ID NO: 281431 - DNA, 584 bp, Homo sapiens
gtaaaagtaaatatatgggaaaatattaaatctagtattatcgtaactttggtttaaaactccatgttttgctttctacataatttaatagacaaatgcattaaaaacaattattagtttatgtttatggacacacaatgtacaaaaatgtaattttgtgacattgataactgaaagaggagtggcaaaactgtgaggagartttttgcatattattgaaatatagctggtatgaattcaagttagagtgctataactttagaatgttaagtgtaatccctatggtaaccacaaataaaacattatataacataaaaaagtaaatgagaagggaattaaaacacttcgctacaaaaaatcaactaaatacaaatgagatcatgcaggaaatggacaaaaatgctgtaaggcatatagaaaatgtatagcaaaatgccagaagtaagtccccccttatcagtaattactttattactttttaaaccattttgttgaggaatgatttacataaaaactgtacatatttaacgtacacatcttgataaatttacaccataaaaccattatcatcaagcctataaaca

SEQ ID NO: 281432 - DNA, 587 bp, Homo sapiens
gggctgggcagccgactgtggtgggcaaagtcactccagggcggggcgcggttggcctgggcyccagcatccctctcagctcccgggctgggggtcaggaagctccggttcctgcagtccacgtgaaaggtccccctggctcctcctgcctcggtgcccgctgtggcacagctgggccgctgaccaaaagcacttttggcagcaggctcagcccctcgtgggctctggtctttgtaaatgtaaacatttctcttgctcactgagagaccttggcggagacactgccgctggtcctcctgggtggcgcatgatcccctccgccggatcagtggggagccccttcccaccctggctgagcaggcacgctgcgccctgtgctcctgcgctccctgcgcctcgatgccctttagccaaatgtgggaccccccggccctctggctccgtgtgcacatgccaggcagtggggccggctccttcctgcaaggtacctctggcctggctgggccccctgtcccgagagcggtggggccctctgcctgaacttctgaactgctcaccgactccttggccttttccaccaaaaactt

SEQ ID NO: 281433 - DNA, 587 bp, Homo sapiens
gggctgggcagccgactgtggtgggcaaagtcactccagggcggggcgcggttggcctgggccccagcatccctctcagctcccgggctgggggtcaggaagctccggttcctgcagtccacgtgaaaggtccccctggctcctcctgcctcggtgcccgctgtggcacagctgggccgctgaccaaaagcacttttggcagcaggctcagcccctcgtgggctctggtctttgtaaaygtaaacatttctcttgctcactgagagaccttggcggagacactgccgctggtcctcctgggtggcgcatgatcccctccgccggatcagtggggagccccttcccaccctggctgagcaggcacgctgcgccctgtgctcctgcgctccctgcgcctcgatgccctttagccaaatgtgggaccccccggccctctggctccgtgtgcacatgccaggcagtggggccggctccttcctgcaaggtacctctggcctggctgggccccctgtcccgagagcggtggggccctctgcctgaacttctgaactgctcaccgactccttggccttttccaccaaaaactt

SEQ ID NO: 281434 - DNA, 587 bp, Homo sapiens
gggctgggcagccgactgtggtgggcaaagtcactccagggcggggcgcggttggcctgggccccagcatccctctcagctcccgggctgggggtcaggaagctccggttcctgcagtccacgtgaaaggtccccctggctcctcctgcctcggtgcccgctgtggcacagctgggccgctgaccaaaagcacttttggcagcaggctcagcccctcgtgggctctggtctttgtaaatgtaaacatttctcttgctcactgagagaccttggcggagacactgccgctggtcctcctgggtggcgcatgatcccctccgccggatcagtggggagccccttcccaccctggctgagcaggcacgctgcgccctgtgctcctgcgctccctgcgcctcgatgccctttagccaaatgtgggaccccccggccctctggctccgtgtgcacatgccaggcagtgsggccggctccttcctgcaaggtacctctggcctggctgggccccctgtcccgagagcggtggggccctctgcctgaacttctgaactgctcaccgactccttggccttttccaccaaaaactt

SEQ ID NO: 281435 - DNA, 332 bp, Homo sapiens
gctttttaaatagacttttgactggggctccagcagcgcggggcgcgcagacctggagttgcatggaggccagagccacgacacccgcctggggaacggagcagccccaggcgctgatccccgtccacctgccccacggagccctcgccgcccgcttgccactgcctgcatggccctcctgtccccggccccccagccctcctttccccagctcccccaccctcctgtccccggcaccccagcttcccagcccccgaaaccgcccccccacctcgacccggcccatgccgcaagtcgccmgctgggcggacccggcctccgcccgcctcctg

SEQ ID NO: 281436 - DNA, 332 bp, Homo sapiens
gctttttaaatagacttttgactggggctccagcagcgcggggcgcgcagacctggagttgcatggaggccagagccacgacacccgcctggggaacggagcagccccaggcgctgatccccgtccacctgccccacggagccctcgccgcccgcttgccactgcctgcatggccctcctgtccccggccccccagccctcctttccccagctcccccaccctcctgtccccggcaccccagcttcccagcccccgaaaccgcccccccacctcgacccggcccatgccgcaagtcgccagctgsgcggacccggcctccgcccgcctcctg

SEQ ID NO: 281437 - DNA, 568 bp, Homo sapiens
cctgggtgtgtggaacgtccttattactgctggggatgttgcttgtctgtgggaattgggaatttcacacctagctctgaatttctaggaagcccgaacaaaagagaaatagaaatagagaaatcacatacttcccaccagagaggagacaccatccataccagaggagactcgtatggggggtggtgaggataaggccgatccatcttccccacctcatactctgcctcctgcagtgtggcctccctgagggcgccctggcaagggagggtgtgggaccctcatcagtatggctcttacaaattcccagaagctgctgtagcagctcaaagaggggcaggctcttccaggtctgttccttgccagatgccctctcccagcctggggttaaccctaagcaggcattgatctgcactttgctcagagtcactggtgacctcccrggtagccaagagcttcccccttctccgtgagccctctgagactgcaggtcccagacggttgtaaattctgcctggtggaaattgccaaggctccaaagcaggcacctgctgccctcaggagcctc

SEQ ID NO: 281438 - DNA, 393 bp, Homo sapiens
tatgcaatacaaacattcgccttcccactcttccccctaccacagaggagctgtaatttcccatatttggaatttggggagagctgggcctcatttgaagataaggccagattcagtctctgatttggggggaagtaagtaattgagagagccttgaggactgtggtatttatggtgaatatatcagaactatgtgtgcctccttgtcatcatttattcaacacctctgatgtcctagagctggtgctatgcccatcagtatctgactctygttttcttctgcatattttcccttttgcaaatgtataggcattcagctttaatcaggtaggctttttactctgtgatctgcaacggggatgactgaagtcatgtggaggattttaagtaact

SEQ ID NO: 281439 - DNA, 584 bp, Homo sapiens
gcagttgctcttcaaattgtcattcctttattttctatttctacctacctcctgatgttagctcaggttcctgctaccaaggtgtcttgcaaaaaaatttggtgactattactctaagtgaagcctttgatactttctcttaatacaatggttaaacctctaacaaygtagactaatgaggaagattagtttgaattagtaaaatgtctgaattaccaaatatttttcaagaacttcactgttattacttttaagtaaatactgtaactcaaactaggctaatagaatgcctaataaagatccttaggggatcctgctttaggagagaaataagaatgatttgcaattagtgcaccaattgtttatgtaaatggaatttctgaaatactagactgagcttgaaaaccgtttgttcccttaagtattttaaatagtccctacggaacccctgtgcatgctggtagttgtttatatgctgtatagagacctgtttcatgaagacataactcaaccttatatcatcagtatcagaaattccaagttagtgatggccaggatcctcaccttccaagattagattagat

SEQ ID NO: 281440 - DNA, 519 bp, Homo sapiens
tagggcttagatcagagcttcccaaaccttctgtgttaagaacgtttttgcatctgtttggatttcatggctgtttttccattttccgtgcacacatgtccaattgtaccaccctattataatgcacactcttttctcacacccacaggataatttgtagttccacagctatttgttgagcatcctcatctgccagcacaggatgggggtggcaagtgaggggaaacacagatatgtggtattggtccctgcctgtggtagacgtgattggttacctacagtggctcttsttttctcttcctgctggcaggacccagttgggttggatgccacacctctcccacacgccactcaaggaaaggtgaccctgcctccagctctagggtatgtgctgattgagctgagcccatcctggaggcccgtagtttagacatggttttggccactgaggtatgagaagtctgctgggagatgctgggaaagatgtttttccttgtaaaaggaaatgcagaagggaca

SEQ ID NO: 281441 - DNA, 593 bp, Homo sapiens
gtcaactctccattcaacagagaaacagtgccaccactgtctttaaattttcaaacttaycgagaaaagctccagagaggccagtgccagcaatgccggctgtctcccaagtctgaagggttttcctctgggtattaggagttgaggtgtttggttagagaagaaacaggatgcacgggagatcacacacagagtaagaggtgcctctcaaatgcctttcccacgtttctaactctgctttttttaaagcacgatcagacccgccatctgcacttttacctgctgcctgacgaaaaccagatgccaaaggcctcccagcactcacggggccctttacccttaggaaaacaccgtgattcagccaggcgagattgatgcaacatcgtaacaaagcgtatgcaaagtgcctagctccggactgcttgcagaaaaggcacattttgactcttctgagagtgggaaagatttgaaagatgggatttgcaccttattcttattcaagtctggagatctggaacttcttcctgaagctccatgtttagccagataattgagacgctccacctggtcaccaccggacaccagccacccaa

SEQ ID NO: 281442 - DNA, 593 bp, Homo sapiens
gtcaactctccattcaacagagaaacagtgccaccactgtctttaaattttcaaacttaccgagaaaagctccagagaggccagtgccagcaatgccgkctgtctcccaagtctgaagggttttcctctgggtattaggagttgaggtgtttggttagagaagaaacaggatgcacgggagatcacacacagagtaagaggtgcctctcaaatgcctttcccacgtttctaactctgctttttttaaagcacgatcagacccgccatctgcacttttacctgctgcctgacgaaaaccagatgccaaaggcctcccagcactcacggggccctttacccttaggaaaacaccgtgattcagccaggcgagattgatgcaacatcgtaacaaagcgtatgcaaagtgcctagctccggactgcttgcagaaaaggcacattttgactcttctgagagtgggaaagatttgaaagatgggatttgcaccttattcttattcaagtctggagatctggaacttcttcctgaagctccatgtttagccagataattgagacgctccacctggtcaccaccggacaccagccacccaa

SEQ ID NO: 281443 - DNA, 593 bp, Homo sapiens
gtcaactctccattcaacagagaaacagtgccaccactgtctttaaattttcaaacttaccgagaaaagctccagagaggccagtgccagcaatgccggctgtctcccaagtctgaagggttttcctctgggtattaggagttgaggtgtttggttagagaagaaacaggatgcacgggagatcacacacagagtaagaggtgcctctcaaatgcctttcccacgtttctaactctgctttttttaaagcacgatcagacccgccatctgcacttttacctgctgcctgacraaaaccagatgccaaaggcctcccagcactcacggggccctttacccttaggaaaacaccgtgattcagccaggcgagattgatgcaacatcgtaacaaagcgtatgcaaagtgcctagctccggactgcttgcagaaaaggcacattttgactcttctgagagtgggaaagatttgaaagatgggatttgcaccttattcttattcaagtctggagatctggaacttcttcctgaagctccatgtttagccagataattgagacgctccacctggtcaccaccggacaccagccacccaa

SEQ ID NO: 281444 - DNA, 454 bp, Homo sapiens
ctctcaaatgcctttcccacgtttctaactctgctttttttaaagcacgatcagacccgccatctgcacttttacctgctgcctgacgaaaaccagatgccaaaggcctcccagcactcacggggccctttacccttaggaaaacaccgtgattcagccaggcgagattgatgcaacatygtaacaaagcgtatgcaaagtgcctagctccggactgcttgcagaaaaggcacattttgactcttctgagagtgggaaagatttgaaagatgggatttgcaccttattcttattcaagtctggagatctggaacttcttcctgaagctccatgtttagccagataattgagacgctccacctggtcaccaccggacaccagccacccaaacattctcctctgcaaggcacttggcattctggtgcctgtggagagagcagccttctcactagca

SEQ ID NO: 281445 - DNA, 553 bp, Homo sapiens
gtctcccaggcacagggttttgcacggagcagggcaggtaggggacagggcattcctgcacaagcccaggatgtgcatgcggtaagcatggcaaagggggctcagggggcaccgccagcctgccctgctctgacgctggacttgccactcacctgctgtggggcctcaggcaaatcactgaactgtccagcctggatgacggcagcacctcacttgccttgctgctgggagtgttgtgaatagagtaggttagactgtgggcagggcttggtgaatggtagctgtgattatcatcatggctgcactggggacacccccaggaggcctgagtggcacaggtctcttgctcactrtatgtcccctgtggactcccttccaggctgtgcagtgagtggcagcagtgacccttgggaagtctcatggctacggcagcaggtgacaggtgtgacaacagggaagagggatgtggtgacagaggttggggttcccctctcccacagtcagtttcccacaaagggcggtgtctgccagcaagcccctccaatgagcccca

SEQ ID NO: 281446 - DNA, 560 bp, Homo sapiens
ccctctcccacagtcagtttcccacaaagggcggtgtctgccagcaagcccctccaatgagccccaagcttggtttccctccactccacgctgtcccagtgcagagcrtctgacctcagaggcagacacactgtcccagaggtggtctacgaatggagtccccgtgccctccccacacacagggaacatccaaatgccatcatggaagggtggccacctccccaggcttggtgggcctggggccgatagtgtgatacatttgaccccctcccagccctggatgcagacaccaagagcagagagacctggcagtagtcatgcagcagcgcaccaccccacatcctcagcacaatccaaagcagcccctcatccccaccgtgaccaccacagcctgaatccaggcgccacctgtttctgacctgaactccctcacagcccctgcctgcactccctccctccaacatcacctgcccttcagtcttccagaaagcagctagagggctctgtctgtccaactgcagaacaggccctgcctcctccctgccccgttggacagctca

SEQ ID NO: 281447 - DNA, 560 bp, Homo sapiens
ccctctcccacagtcagtttcccacaaagggcggtgtctgccagcaagcccctccaatgagccccaagcttggtttccctccactccacgctgtcccagtgcagagcgtctgacctcagaggcagacacactgtcccagaggtggtctacgaatggagtccccgtgccctccccacacacagggaacatccaaatgccatcrtggaagggtggccacctccccaggcttggtgggcctggggccgatagtgtgatacatttgaccccctcccagccctggatgcagacaccaagagcagagagacctggcagtagtcatgcagcagcgcaccaccccacatcctcagcacaatccaaagcagcccctcatccccaccgtgaccaccacagcctgaatccaggcgccacctgtttctgacctgaactccctcacagcccctgcctgcactccctccctccaacatcacctgcccttcagtcttccagaaagcagctagagggctctgtctgtccaactgcagaacaggccctgcctcctccctgccccgttggacagctca

SEQ ID NO: 281448 - DNA, 560 bp, Homo sapiens
ccctctcccacagtcagtttcccacaaagggcggtgtctgccagcaagcccctccaatgagccccaagcttggtttccctccactccacgctgtcccagtgcagagcgtctgacctcagaggcagacacactgtcccagaggtggtctacgaatggagtccccgtgccctccccacacacagggaacatccaaatgccatcatggaagggtggccacctccccaggcttggtgggcctggggccgatagtgtgatacatttgaccccctcccagccctggatgcagacaccaagagcagagagacctggcagtagycatgcagcagcgcaccaccccacatcctcagcacaatccaaagcagcccctcatccccaccgtgaccaccacagcctgaatccaggcgccacctgtttctgacctgaactccctcacagcccctgcctgcactccctccctccaacatcacctgcccttcagtcttccagaaagcagctagagggctctgtctgtccaactgcagaacaggccctgcctcctccctgccccgttggacagctca

SEQ ID NO: 281449 - DNA, 560 bp, Homo sapiens
ccctctcccacagtcagtttcccacaaagggcggtgtctgccagcaagcccctccaatgagccccaagcttggtttccctccactccacgctgtcccagtgcagagcgtctgacctcagaggcagacacactgtcccagaggtggtctacgaatggagtccccgtgccctccccacacacagggaacatccaaatgccatcatggaagggtggccacctccccaggcttggtgggcctggggccgatagtgtgatacatttgaccccctcccagccctggatgcagacaccaagagcagagagacctggcagtagtcatgcagcagcgcaccaccccacatccycagcacaatccaaagcagcccctcatccccaccgtgaccaccacagcctgaatccaggcgccacctgtttctgacctgaactccctcacagcccctgcctgcactccctccctccaacatcacctgcccttcagtcttccagaaagcagctagagggctctgtctgtccaactgcagaacaggccctgcctcctccctgccccgttggacagctca

SEQ ID NO: 281450 - DNA, 454 bp, Homo sapiens
ctctcaaatgcctttcccacgtttctaactctgctttttttaaagcacgatcagacccgccatctgcacttttacctgctgcctgacgaaaaccagatgccaaaggcctcccagcactcacggggccctttacccttaggaaaacaccgtgattcagccaggcgagattgatgcaacatcgtaacaaagcgtatgcaaagtgcctagctccggactgcttgcagaaaaggcacattttgactcttctgagagtgggaaagatttgaaagatgggatttgcaccttattcttattcaagtctggagatctggaacttcttcctgaagctccatgtttagccagataattgagacgctccacctggtcaccacyggacaccagccacccaaacattctcctctgcaaggcacttggcattctggtgcctgtggagagagcagccttctcactagca

SEQ ID NO: 281451 - DNA, 1096 bp, Homo sapiens
gtgccaactcaacattgattgtgcctgagccactcagaaggtgggagggggcacacccctgcctcttcatttcggcagtggtcacgtactgcaggttgtgaaaagcgcaggtgagttataggygcagctttgccaccaattagagctggttgtgtcatctcagacaacttgcttttcttctccagaccttgatcttctcatctatcacatgatttctaagaacgttttagagagcactagcatgggttccgatgctggctttgtcacttattaactgtgatcttggataagctgcttaacctctctaagcctcagttttctcatcggtaagatggggataataatgcctgtctcatagggttattgagaagatttagtaacatctgtaaagaccctagcacagagcctagcccacaatcagtcctcaataaagagctgctggctaagacatatttctgctggaacattctgtggctctggatccatagaggacaggatttggccaatgactgcttaaggacatttcaacggccccttgacaatgacaccatcactgggctgcccacctcatcccacagctgcagwacagcgtgtcaatctctgaaggttttgggcatttccattagcactccatcttcatgtaaaccagaagatatgcagtttcctgcctagagagaagagaagacacatcagcacagcggcatgaaagcttcatcagaaaacaatgcttcattaatccgtgacaggacaagcgtcagcaaacttccaggcggctggattaggccttcatctatccatcaccttggagaggaacaaaataggtggcctgggaagwtaagcactatgtttctattcgttaatatctaaagcggaggttaacaagctatggacacacaagccaaacccagccctcttggggttttttaaatctactttcaacttttattttagattcagcgggcacatgtgcaggtttgtcacgtggatatgagcatactccccaacagttggcctttcacccctcccctccctccccatccagcagttcccagttgttgccatctttaagtcaatgagtccccatgtttagctccca

SEQ ID NO: 281452 - DNA, 511 bp, Homo sapiens
acagcgtgtcaatctctgaaggttttgggcatttccattagcactccatcttcatgtaaaccagaagatatgcagtttcctgcctagagagaagagaagacacatcagcacagcggcatgaaagcttcatcagaaaacaatgcttcattaatccgtgacaggacaagcgtcagcaaacttccaggcggctggattaggccttcatctatccatcaccttggagaggaacaaaataggtggcctgggaagataagcactatgtttctattmgttaatatctaaagcggaggttaacaagctatggacacacaagccaaacccagccctcttggggttttttaaatctactttcaacttttattttagattcagcgggcacatgtgcaggtttgtcacgtggatatgagcatactccccaacagttggcctttcacccctcccctccctccccatccagcagttcccagttgttgccatctttaagtcaatgagtccccatgtttagctccca

SEQ ID NO: 281453 - DNA, 489 bp, Homo sapiens
cactgcttctgcatttgcctgttgtatgtatgagatttacacktgttttaaagcaacattttgtttcagttgggctggtggccatacccggcactagccggtcaatagtgagatggctcctcatggaggaggcttggcttgaggctgagggtctttaacccacatatacaagagagttgccactaagggatggaagccaggctaataaccaagtgccacacagagttcctatctgtccctcctcaccatttttggctggcaggatttgagcattttagggcttgggaagatagtattactaaatctactaaaatacatcacccatccttatagactttggccagttgctgagcaaattaacttcacaactgaagtgggccacactggcctttgtggtcccccactcctcttagaatttgtgagcgtggggcctactggagggtgggaggtgggaggagggggtggatcaggaaaaataactgatattag

SEQ ID NO: 281454 - DNA, 514 bp, Homo sapiens
cagcgtcagcactggcccacactcctgggttcgtgttttcactttttcattcaggaactcrggagctggggccactcccttggcccttcaggttctccacctgagcagtggggataataaggcagacccggggatggctctggtgagggtggaggagtcactgtacagagagagtagagcgggggtggattttattgttagaagtggacactggtgattgggttgtataagtgggaaatctctcctgagaaaacacacagcctcacctgtacagaaacacacacattcacaccacacgatgcagcctcacacaagacaccaccaatcctcaagcacccaactcagcaccacccaaaagggagcacagctgcttcctcaaaatttggccataatttttccctggggaattcaggttttaaaaaaacacttcccctatacttattcctatcacaatcccaggatcagggtggctcttcacattgaaaccaggcaaggatgccacacctttcttggc

SEQ ID NO: 281455 - DNA, 479 bp, Homo sapiens
caagacaccaccaatcctcaagcacccaactcagcaccacccaaaagggagcacagctgcttcctcaaaatttggccataatttttccctggggaattcaggttttaaaaaaacacttcccctatacttattcctatcacaatcccaggatcagggtggctcttcacattgaaaccaggcaaggatgccacacctttcttggcatccagattgttttctcggtaagtgattccagaatacttactagattcaygcctcagaggggccacctgcaccacctgcaatacagaaacaaagctttttgaggggtatgtcatgttgtggattgtttgcacaaggctgtgtttctctcaatgaatattgaaaacttgatcagaaagtgtagtcaacttcaaggcctccaaaacaagggtaggatacacactggaaaagacatcagcttctggatggtggatctctcaggtccacgtaggttggca

SEQ ID NO: 281456 - DNA, 479 bp, Homo sapiens
caagacaccaccaatcctcaagcacccaactcagcaccacccaaaagggagcacagctgcttcctcaaaatttggccataatttttccctggggaattcaggttttaaaaaaacacttcccctatacttattcctatcacaatcccaggatcagggtggctcttcacattgaaaccaggcaaggatgccacacctttcttggcatccagattgttttctcggtaagtgattccagaatacttactagattcacgcctcaraggggccacctgcaccacctgcaatacagaaacaaagctttttgaggggtatgtcatgttgtggattgtttgcacaaggctgtgtttctctcaatgaatattgaaaacttgatcagaaagtgtagtcaacttcaaggcctccaaaacaagggtaggatacacactggaaaagacatcagcttctggatggtggatctctcaggtccacgtaggttggca

SEQ ID NO: 281457 - DNA, 619 bp, Homo sapiens
ctgcttcagtcttatctgtttggggtcaactgctgaggatttcatacaaattaatgaagtttgtgaatctaaacttctacacaaagggggaaatatttgcaaatcatttmtcttgtaagagactaaaatttagaatatttttaaatatatttaagatatattcaaaaatctacagcaacaaactaactaaataaaaatcagacaactctttaaaaatgggcaaaagacttcaacatatatttccctaaagaagatatagccacaaatagtagcacaggaaaagctgctcaggatcattagtcattagggaaatgcaaatgaaaaacacaagcagccaccaatatacacctactaggatgatttaaaggaaaataagtgtgaacaaggatgtaaagaaattgtaaccctgatacattgatggtagaaatggataaagttgcagccactgtgaaaaacagtctgcagtggctcagaaggttaaatatagaacccctgttggacccaggaactctactcttaggcaccccaaagaatagagaacagaaatcaaacagatgtttgtatactaatgtttgtagcatcacttttcacaggagccaaaaggtggaaataatccaac

SEQ ID NO: 281458 - DNA, 619 bp, Homo sapiens
ctgcttcagtcttatctgtttggggtcaactgctgaggatttcatacaaattaatgaagtttgtgaatctaaacttctacacaaagggggaaatatttgcaaatcatttatcttgtaagagactaaaatttagaatatttttaaatatatttaagatatattcaaaaatctacagcaacaaactaactaaataaaaatcagacaactctttaaaaatgggcaaaagacttcaacatatatttccctaaagaagatatagccacaaatagtagcacaggaaaagctgctcaggatcattagtcattagggaaatgcaaatgaaaaacacaagcagccaccaatatacacctactaggatgatttaaaggaaaataagtgtgaacaaggatgtaaagaaattgtaaccctgatacattgatggtagaaatggataaagttgcagccactgtgaaaaacagtctgcagtggctcagaaggttaaatatagaacccctgttggacccaggaactctactcttaggcaccccaaagaatagagaacagaaatcaaayagatgtttgtatactaatgtttgtagcatcacttttcacaggagccaaaaggtggaaataatccaac

SEQ ID NO: 281459 - DNA, 587 bp, Homo sapiens
tggaaataatccaaccatcagtgaacaaatgaatgtaataaaagcaaggtggtctgcatgcaatgctacatcatccatctgtaaaaaacgaacatcattttgatagatgatacaacatgggtggacattgagaacattatgcttagtgaaataagccagacacaaaaggaatatattgtataattgtaattacatgaagtgcctagaatagtcaaattcatacaagagaaagtgggataggaatcaccatgggctggaaatagggggaaggygctatattgcttattgtggacaaggttttgtaagaaatcatcaaaattgtgggtgtagatagtggtgttggttatgcaaccctgtgaatatattgaatgccacggagtgcacactttggttaaaaggttcaaatgataaataatgtgttatatatatttccccacgatagaaaacatgcacagccaagcccagatgccagtcttgttagctgccttcctttaccttcaagagtgggctgaagcttgtccaatctttcaaggttgctgaagactgtatgatggaagtcatctgcattgggaaagaaattaatggag

SEQ ID NO: 281460 - DNA, 535 bp, Homo sapiens
tagtaagagagatgcaacagggctctgtggctgagctgggtgccttgcctcacacctgtaatcccaacctttgagaggccgaggcaggaggattgctcgagrccgggaattttgagaatagcctggacaacatagccagaccccatgtctacaaaataataagaaaacacacagctatagtccaagctacttggcaggctgaggcaggagggtcccttgagtccaggaattggaggctgcattgagctataatcgcaccactgcactccagcttgggtgacaaagtgagaccctgtctctaaaagaaaaaaaaattggcctgtgagcatgggcttgattttcaaacaggacccggagggtagggtaaacgtgtgggtaaatctaaatgaatgttattggtataaaattacagtagtatagaaaatgatatcttgtggggtttaaaagaaataaaacatactgaaatatgtatgggtacagttatatatctgggatttgcactgaaataatgtggggtagagggaagcaggaaaga

SEQ ID NO: 281461 - DNA, 626 bp, Homo sapiens
cttatctggttttggtttcaagactatagtagccatttcatttaattgtacatgtagggtattctaatttatggaaaactattacatyttccttgatttttttttttttagaaattacttctagggatctatatggtagagtccatggagaattgttttaattcttcattcatgtcttcagtgggtataggattggtcatattggtcatagttttctgctcggatttcaataagaaacttgtggaagaacctgaagggtgggatctttgagggagcctaagacagagcaagacaagctaagaaggagggcagtgccacagcagaactgccgttgatgccccctcgcctagattgcggaagagacatccagctgtagacactgaggtgcaggaaaacaatggagcaccatcagagaaagcagtgcccaggaacaaggaggcactgatggtggcaaggggcaaagacagctgccacgaggctgttcacatgagggtctcaggctgcatagacacccacaccagctgaggggtcctggttttcataaagtgtgtggctcagccaggccaccaacaagcagttcacaaacagtagtaatacgacactttccaaagaccttacttgagtaa

SEQ ID NO: 281462 - DNA, 534 bp, Homo sapiens
ggtataggattggtcatattggtcatagttttctgctcggatttcaataagaaacttgtggaagaacctgaagggtgggatctttgagggagcctaagacagagcaagacaagctaagaaggagggcagtgccacagcagaactgccrttgatgccccctcgcctagattgcggaagagacatccagctgtagacactgaggtgcaggaaaacaatggagcaccatcagagaaagcagtgcccaggaacaaggaggcactgatggtggcaaggggcaaagacagctgccacgaggctgttcacatgagggtctcaggctgcatagacacccacaccagctgaggggtcctggttttcataaagtgtgtggctcagccaggccaccaacaagcagttcacaaacagtagtaatacgacactttccaaagaccttacttgagtaacacggtgatcctcacaaatttccaatcaggatggtcgcacagttcctcctgctttaggactcagagcctgcccgtggtcacagtgggtagg

SEQ ID NO: 281463 - DNA, 534 bp, Homo sapiens
ggtataggattggtcatattggtcatagttttctgctcggatttcaataagaaacttgtggaagaacctgaagggtgggatctttgagggagcctaagacagagcaagacaagctaagaaggagggcagtgccacagcagaactgccgttgatgccccctcgcctagattgcggaagagacatccagctgtagacactgaggtgcaggaaaacaatggagcaccatcagagaaagcagtgcycaggaacaaggaggcactgatggtggcaaggggcaaagacagctgccacgaggctgttcacatgagggtctcaggctgcatagacacccacaccagctgaggggtcctggttttcataaagtgtgtggctcagccaggccaccaacaagcagttcacaaacagtagtaatacgacactttccaaagaccttacttgagtaacacggtgatcctcacaaatttccaatcaggatggtcgcacagttcctcctgctttaggactcagagcctgcccgtggtcacagtgggtagg

SEQ ID NO: 281464 - DNA, 579 bp, Homo sapiens
cactttccaaagaccttacttgagtaacacggtgatcctcacaaatttccaatcaggatggtcgcacagttcctcctgctttaggactcagagcctgcccgtggtcacagtgggtaggtgcagactctgaagatgcactttggtcagagacccygctgaactctgtctaatgaggacctctgtcctgtctgctgaccaccggtcagaggtgcaggctgcagtggggagtaagaatgccaccttctcaatgttgggaaaactccctgccagaactgagaatggccctttctaagcagaaggcaagctcagactaaagaaggaggccgaacacatcaggttggcagattgccaaagattcactcagggagagcccacatcctgggccatcttgggtggtggcaagatgaggtagacgactgcttttgcaacacacacctgacaacaaaaattcaacaactgtaaaagagccacaaaatccccaaatatttgcaaattagcaatgcacttttaaataactcttgggttaaagaagaagtctcaatagaaaattaaaaatacttttaactacattaaaagaaa

SEQ ID NO: 281465 - DNA, 1051 bp, Homo sapiens
ttctctcatgaaatctaccgaattcttcaacaggtgaataaaaagacaaaaattcattkaatgcaatattatttggtgatttaatgtgccattttttgccattaaggcataaaaaagacatgaaagcagctaaagcgtacatcaatttagtgcaataaattcatctgaaaaaactacataatatatgattccaactatatgacattctggaaaaggcaaagctgaagcgatagtaaaaatattaatagttgccaaggtttctggagaaagaggacagagattaatgagaagagaggatttttagggaagtgaacattttctttatgagaccataagggtgaacataatgttttaaatatttcaaaattcatatatatgtataacagaaagaatgaacattatgcaaatgtagacttcagataataatgtgtcaatattttctcattattctagcaaatgtaccacagtaatgtaagatgttactaataggtgaaattaggaagtgagggtgaggagacagaataawttctctcatgaaatctaccgaattcttcaacaggtgaataaaaagacaaaaattcattgaatgcwatattatttggtgatttaatgtgccattttttgccattaaggcataaaaaagacatgaaagcagctaaagcgtacatcaatttagtgcaataaattcatctgaaaaaactacataatatatgattccaactatatgacattctggaaaaggcaaagctgaagcgatagtaaaaatattaatagttgccaaggtttctggagaaagaggacagagattaatgagaagagaggatttttagggaagtgaacattttctttatgagaccataagggtgaacataatgttttaaatatttcaaaattcatatatatgtataacagaaagaatgaacattatgcaaatgtagacttcagataataatgtgtcaatattttctcattattctagcaaatgtaccacagtaatgtaagatgttactaataggtgaaattaggaagtgagggtgaggagacagaataa

SEQ ID NO: 281466 - DNA, 602 bp, Homo sapiens
atggcttagtctcttcatagtttcctcttacatatgggacactgaatactccccgcaactgcaattcttgaatcaacttaattaatgaacttccacagtaccttcttgtgggtacctcttcttctttacccgggagccatgaggtctcctacactggttggtgtgcacagcatakcttcttgtgttctctatcagagaagatgctggttaatgcattgacaatagatagggctgttgacatcttgctgacagaagaccagagggaaaatagtgataatctgttctaagtttaaacttatgatcctttttttacaggcttccaagcagagcccactgaatcaaagttgggtttcaggaagatcacggagttcagtgagcactcaacacctctatcagacagactgcgtgggcagtgccttcctggagaggggaacacagccggatgactgtgagtgcagggctggtgcagagtgggggcccggattcaaattccactaagccatgtggacctggcaagctcatgtcctccctctgccctcagttctctgcactgtcataatgtaattttagcaatactttttaggccctatttaagccctact

SEQ ID NO: 281467 - DNA, 602 bp, Homo sapiens
atggcttagtctcttcatagtttcctcttacatatgggacactgaatactccccgcaactgcaattcttgaatcaacttaattaatgaacttccacagtaccttcttgtgggtacctcttcttctttacccgggagccatgaggtctcctacactggttggtgtgcacagcatagcttcttgtrttctctatcagagaagatgctggttaatgcattgacaatagatagggctgttgacatcttgctgacagaagaccagagggaaaatagtgataatctgttctaagtttaaacttatgatcctttttttacaggcttccaagcagagcccactgaatcaaagttgggtttcaggaagatcacggagttcagtgagcactcaacacctctatcagacagactgcgtgggcagtgccttcctggagaggggaacacagccggatgactgtgagtgcagggctggtgcagagtgggggcccggattcaaattccactaagccatgtggacctggcaagctcatgtcctccctctgccctcagttctctgcactgtcataatgtaattttagcaatactttttaggccctatttaagccctact

SEQ ID NO: 281468 - DNA, 614 bp, Homo sapiens
atttttagtagagatggggtttcaccatgttggccaggctggtctccaactcctgacctcagatgatccgcctgccttggcctcctaaagtgctgggattataagtgtgagccaccacgcccggccatatgctcagtttttatgtcaatttaaaactctctaaagaaatatattaattgaaaaataataatatagcaccactctttcagggagatctatgcttatatttaacaaccaggtaagttctagacattagcttgaagcattgtctatcattaaacatgaaccaaaattgacttttaagtagatatttacttttgtggtggtagcaatatttactgaccaggcaaattagaatcctgacacattaaaaaatatggcttagtctcttcatagtttcctcttacatatgggacactgaatactccccgcaactgcaattcttgaatcaacttaattaatgaacttccacagtaccttcttgtgggtacctcttcttctttacccgggagccatgaggtctcctacactggttggtgtgcacagcatagcttcttgtgttctctatcagagaagaygctggttaatgcattgacaatagatagggctgttga

SEQ ID NO: 281469 - DNA, 602 bp, Homo sapiens
atggcttagtctcttcatagtttcctcttacatatgggacactgaatactccccgcaactgcaattcttgaatcaacttaattaatgaacttccacagtaccttcttgtgggtacctcttcttctttacccgggagccatgaggtctcctacactggttggtgtgcacagcatagcttcttgtgttctctatcagagaagatgctggttaatgcattkacaatagatagggctgttgacatcttgctgacagaagaccagagggaaaatagtgataatctgttctaagtttaaacttatgatcctttttttacaggcttccaagcagagcccactgaatcaaagttgggtttcaggaagatcacggagttcagtgagcactcaacacctctatcagacagactgcgtgggcagtgccttcctggagaggggaacacagccggatgactgtgagtgcagggctggtgcagagtgggggcccggattcaaattccactaagccatgtggacctggcaagctcatgtcctccctctgccctcagttctctgcactgtcataatgtaattttagcaatactttttaggccctatttaagccctact

SEQ ID NO: 281470 - DNA, 547 bp, Homo sapiens
ggctggtgcagagtgggggcccggattcaaattccactaagccatgtggacctggcaagctcatgtcctccctctgccctcagttctctgcactgtcataatgtaattttagcaatactttttaggccctatttargccctacttcttagtatcacagtacagggctaaaaaatcactaaatacaggaaaaccttagagaggactggtacttcagtaatgttctctaagtgtttactacatgccaggaggaataagctggacacttagcagtggcggaatatggagggggaacttggatggctccggggcagtggagcatgctttcctgttcggcttttccgtgggcatgacgccttatggtttatggagaacatcagccctgcagggggtgcagaggaggggctgtggctgagattttacacttgagggtgctgacattcagagatgataagtgacgagcagaacctcaaccccgctgagtgaaggacctgagatgggaaatgtatttggttccctagagagagagattcctgaaaaactgccacc

SEQ ID NO: 281471 - DNA, 547 bp, Homo sapiens
ggctggtgcagagtgggggcccggattcaaattccactaagccatgtggacctggcaagctcatgtcctccctctgccctcagttctctgcactgtcataatgtaattttagcaatactttttaggccctatttaagccctacttcttagtatcacagtacagggctaaaaaatcactaaatacaggaaaaccttagagaggactggtacttcagtaatgttctctaagtgtttactacakgccaggaggaataagctggacacttagcagtggcggaatatggagggggaacttggatggctccggggcagtggagcatgctttcctgttcggcttttccgtgggcatgacgccttatggtttatggagaacatcagccctgcagggggtgcagaggaggggctgtggctgagattttacacttgagggtgctgacattcagagatgataagtgacgagcagaacctcaaccccgctgagtgaaggacctgagatgggaaatgtatttggttccctagagagagagattcctgaaaaactgccacc

SEQ ID NO: 281472 - DNA, 547 bp, Homo sapiens
ggctggtgcagagtgggggcccggattcaaattccactaagccatgtggacctggcaagctcatgtcctccctctgccctcagttctctgcactgtcataatgtaattttagcaatactttttaggccctatttaagccctacttcttagtatcacagtacagggctaaaaaatcactaaatacaggaaaaccttagagaggactggtacttcagtaatgttctctaagtgtttactacatgccaggaggaataagctggacactyagcagtggcggaatatggagggggaacttggatggctccggggcagtggagcatgctttcctgttcggcttttccgtgggcatgacgccttatggtttatggagaacatcagccctgcagggggtgcagaggaggggctgtggctgagattttacacttgagggtgctgacattcagagatgataagtgacgagcagaacctcaaccccgctgagtgaaggacctgagatgggaaatgtatttggttccctagagagagagattcctgaaaaactgccacc

SEQ ID NO: 281473 - DNA, 547 bp, Homo sapiens
ggctggtgcagagtgggggcccggattcaaattccactaagccatgtggacctggcaagctcatgtcctccctctgccctcagttctctgcactgtcataatgtaattttagcaatactttttaggccctatttaagccctacttcttagtatcacagtacagggctaaaaaatcactaaatacaggaaaaccttagagaggactggtacttcagtaatgttctctaagtgtttactacatgccaggaggaataagctggacacttagcagtggcggaatatggagggggaacttggatggctccggggcagtggagcatgctttcctgttcggcttttccgtgggcatgaygccttatggtttatggagaacatcagccctgcagggggtgcagaggaggggctgtggctgagattttacacttgagggtgctgacattcagagatgataagtgacgagcagaacctcaaccccgctgagtgaaggacctgagatgggaaatgtatttggttccctagagagagagattcctgaaaaactgccacc

SEQ ID NO: 281474 - DNA, 586 bp, Homo sapiens
gggtgttagcaccatagtcctctcttcgttactttgaaatatacaaaatactgttgctaagcatcgtcaccctggtctgctatcaaagattagaacttctcctgtcttggctgggcacggtggctcacgcctgtcatcccagcaccttggaaggctgaggtgggtggatgacctgaggtcaggagtttgaaaacagcctggccaacatggcaaaaccccatctgtastaaaaatacaaaaattagcctggcgtgctggcctgtgcctgtaatcccagctactcgggaggctgaggcaggagaatcgcttgaacctgggaggcggaggttatagtgagctgagatcatgccactgcactgcagtctgggagacagagcaagactccatctcaaaaacaaacaaagaaaaaaaaaaacaaaacaaaaaagaacttctgtctaactacaaggtggaaggaatcatatgctgggtgtcagaccttccgggatatatgtgcagcttctaggaattgaaaccaccagctcttggaaacttgtgccaggcttcagggtgggagaggcagttctagagccacagccgccaagcc

SEQ ID NO: 281475 - DNA, 625 bp, Homo sapiens
ccaggagaattaagagcctccctccctccctctatccattcatcgtgaggagaagaggccaagcagcagggacaccggcaggaattctccagttagaaaaggccctctgagccaggtgcggtggctcacgtctgtaatcccagcactttgggaggccgaggcgggtggatcacctgaggtcaggagttcaagaccagcctggccaacatggtgaaaccctgtctctactaaaaatgcaaaattagtcaggcatggtgggttgtgcctgtaatcccagctacttgggaggctgtggcaggagaatcgctagaacctgtggggctgaggttgcagtgagccgagattgcaccactgcactccacagagtgagactccatctcaaaaaaaaaaagagagaaaaggccctctgaggccaagcttggtgtctcatgcctgtaatcccaacactttgggaggctgaggtagaagttgaggtcaggrggtccaagacaagcctgggcaacatagtgagtctacaaaaaaaatattgagaatctacgtaaatatagtgggggtgggggtggggaacaagaaaacaaaaaattcaaagcatagtgaaaagaaatatagcaaaacccggccgggc

SEQ ID NO: 281476 - DNA, 625 bp, Homo sapiens
ccaggagaattaagagcctccctccctccctctatccattcatcgtgaggagaagaggccaagcagcagggacaccggcaggaattctccagttagaaaaggccctctgagccaggtgcggtggctcacgtctgtaatcccagcactttgggaggccgaggcgggtggatcacctgaggtcaggagttcaagaccagcctggccaacatggtgaaaccctgtctctactaaaaatgcaaaattagtcaggcatggtgggttgtgcctgtaatcccagctacttgggaggctgtggcaggagaatcgctagaacctgtggggctgaggttgcagtgagccgagattgcaccactgcactccacagagtgagactccatctcaaaaaaaaaaagagagaaaaggccctctgaggccaagcttggtgtctcatgcctgtaatcccaacactttgggaggctgaggtagaagttgaggtcaggaggtccaagacaagcctgggcaacatagtgagtctacaaaaaaaatattgagaatctacrtaaatatagtgggggtgggggtggggaacaagaaaacaaaaaattcaaagcatagtgaaaagaaatatagcaaaacccggccgggc

SEQ ID NO: 281477 - DNA, 542 bp, Homo sapiens
tcagtgggtggatagggaccaggctgggccaggcaaggtygggtgctgtctgacctggctgggcggtagctttggctccaaggtctgctccccggtcagtgggatcctgttcaataatgaatggacgacttcagctctcccagcatcaccaatgagtttggggcacccccctcacctgccaatttcatccagccaggtatggggtggaggtccggggggtgggggactggggtggagaggggcgggtgtcctgggcaggcagctgacgggcatccctgtcttctcccatcggccgcagggaagcagccgctcttgtccatgtgcccgacgatcatggtgggccaggacggccaggtccggatggtggtgggagctgctgggggcacgcagatcaccacagacactgcactggtatgtgtcaccccttttctccctggccctgcccactctgcacagcccccaagccacgctgatcacactcccatgccccaggccatcatctacaacctctggttcggctatgacgtgaagagggccgtgga

SEQ ID NO: 281478 - DNA, 542 bp, Homo sapiens
tcagtgggtggatagggaccaggctgggccaggcaaggttgggtgctgtctgacctggctgggcggtagctttggctccaaggtctgctccccggtcagtgggatcctgttcaataatgaatggacgacttcagctctcccagcatcaccaatgagtttggggcacccccctcacctgccaatttcatccagccaggtatggggtggaggtccggggggtgggggactggggtggagaggggcgggtgtcctgggcaggcagctgacgggcatccctgtcttctcccatcggccgcagggaagcagccgctcttgtccatgtgccygacgatcatggtgggccaggacggccaggtccggatggtggtgggagctgctgggggcacgcagatcaccacagacactgcactggtatgtgtcaccccttttctccctggccctgcccactctgcacagcccccaagccacgctgatcacactcccatgccccaggccatcatctacaacctctggttcggctatgacgtgaagagggccgtgga

SEQ ID NO: 281479 - DNA, 519 bp, Homo sapiens
ctacttctttctacatagacacagtaacagtctgatatctctttcttttccccacagggaccttcctggctgtgcctcgggtcaggaccagaatgacacccattcatttccctgggcctttgctcgggyggtccctgcaccctggcctctgcctgacgaggatggtggggagaggaggggggacgtcccccacactgctgtctccactgttcctgctgcccaggcctctgggcttccaggactgcagcgggtgggtgggtgggctggcctgagcccaggaatgcacttcagctcctggttgagcaatgtcactgaggcttgggagtcgggtgggggcgggaggaggcgtccacaggcccccctaccgtgagaggcagccgtgggaacagcctacctctaaacaatcactgcagcccaggctgaccaggggctctggccggacataggggcctggcaggctgtgtgccctgtaaggacacagtctgtctctgtgcctcagtttctctgctgcccagatgg

SEQ ID NO: 281480 - DNA, 519 bp, Homo sapiens
ctacttctttctacatagacacagtaacagtctgatatctctttcttttccccacagggaccttcctggctgtgcctcgggtcaggaccagaatgacacccattcatttccctgggcctttgctcgggcggtccctgcaccctggcctctgcctgacgaggatggtggggagaggaggggggacgtcccccacactgctgtctccactgttcctgctgcccaggcctctgggcttccaggactrcagcgggtgggtgggtgggctggcctgagcccaggaatgcacttcagctcctggttgagcaatgtcactgaggcttgggagtcgggtgggggcgggaggaggcgtccacaggcccccctaccgtgagaggcagccgtgggaacagcctacctctaaacaatcactgcagcccaggctgaccaggggctctggccggacataggggcctggcaggctgtgtgccctgtaaggacacagtctgtctctgtgcctcagtttctctgctgcccagatgg

SEQ ID NO: 281481 - DNA, 519 bp, Homo sapiens
ctacttctttctacatagacacagtaacagtctgatatctctttcttttccccacagggaccttcctggctgtgcctcgggtcaggaccagaatgacacccattcatttccctgggcctttgctcgggcggtccctgcaccctggcctctgcctgacgaggatggtggggagaggaggggggacgtcccccacactgctgtctccactgttcctgctgcccaggcctctgggcttccaggactgcagcgggtgggtgggtgggctggcctgagcccaggaatgcacttcagytcctggttgagcaatgtcactgaggcttgggagtcgggtgggggcgggaggaggcgtccacaggcccccctaccgtgagaggcagccgtgggaacagcctacctctaaacaatcactgcagcccaggctgaccaggggctctggccggacataggggcctggcaggctgtgtgccctgtaaggacacagtctgtctctgtgcctcagtttctctgctgcccagatgg

SEQ ID NO: 281482 - DNA, 461 bp, Homo sapiens
catttccctgggcctttgctcgggcggtccctgcaccctggcctctgcctgacgaggatggtggggagaggaggggggacgtcccccacactgctgtctccactgttcctgctgcccaggcctctgggcttccaggactgcagcgggtgggtgggtgggctggcctgagcccaggaatgcacttcagctcctggttgagcaatgtcactgaggcttgggagtcgggtgggggcgggaggaggcgtccrcaggcccccctaccgtgagaggcagccgtgggaacagcctacctctaaacaatcactgcagcccaggctgaccaggggctctggccggacataggggcctggcaggctgtgtgccctgtaaggacacagtctgtctctgtgcctcagtttctctgctgcccagatggaggggcccagactccaggtgtagacatctggagcaggcagtgttca

SEQ ID NO: 281483 - DNA, 500 bp, Homo sapiens
aacctcttttctttataaattctccagtctcatgtatttatagcaatgtgagaactgactaatacatagggtctcactgtgttgcccaggctggtctcaaactcctgggctcaagtaatcctcctggctttgcttcccagagtgtagagattacaggcatgaccactgaacctgcccctttccccccaacaacatcttgattgcaacctcctaagagactccgagtcagaagtatccagttaagatgttactgactttctgaaccayagaaactgtgagataataaacatctattgttcctttaagccttaagtttggggcttttttttttacaccaatatataactaatgtagacacctgcagtccctaagattgaatgcaaaattgtgttacatacacatgagtgtgttcttctgggaaaagagtccataaacttcaaaagattctcaaaggaatccaagacccaaaaagattaagaaacattgcatcagacaataaa

SEQ ID NO: 281484 - DNA, 632 bp, Homo sapiens
catcttgattgcaacctcctaagagactccgagtcagaagtatccagttaagatgttactgactttctgaaccatagaaactgtgagataataaacatctattgttcctttaagccttaagtttggggcttttttttttacaccaatatataactaatgtagacacctgcagtccctaagattgaatgcaaaattgtgttacatacacatgagtgtgttcttctgggaaaagagtccataaacttcaaaagattctcaarggaatccaagacccaaaaagattaagaaacattgcatcagacaataaattgtcaatgagcaaggtcctgtccttttagattgggttttgaaatcacccatcccacaaatatatgataccacttaactagtttttcaagatatttcttgttcaaagatgctcccactttttctttgtgctcaagtcctagataaacctggctaggggcaggaggtatgattcaggagttagtgagccgggagggctcactgtgcctgggaaagccagcttctcatgaatttttggaatatgccttggctcagaaacctacctctctaggcacaggatccaacttatacgttcaagatgcgtgactgagcatgtgaaagtgtca

SEQ ID NO: 281485 - DNA, 632 bp, Homo sapiens
catcttgattgcaacctcctaagagactccgagtcagaagtatccagttaagatgttactgactttctgaaccatagaaactgtgagataataaacatctattgttcctttaagccttaagtttggggcttttttttttacaccaatatataactaatgtagacacctgcagtccctaagattgaatgcaaaattgtgttacatacacatgagtgtgttcttctgggaaaagagtccataaacttcaaaagattctcaaaggaatccaagacccaaaaagattaagaaacattgcatcagacaataaattgtcaatgagcaaggtcctgtccttttagaytgggttttgaaatcacccatcccacaaatatatgataccacttaactagtttttcaagatatttcttgttcaaagatgctcccactttttctttgtgctcaagtcctagataaacctggctaggggcaggaggtatgattcaggagttagtgagccgggagggctcactgtgcctgggaaagccagcttctcatgaatttttggaatatgccttggctcagaaacctacctctctaggcacaggatccaacttatacgttcaagatgcgtgactgagcatgtgaaagtgtca

SEQ ID NO: 281486 - DNA, 632 bp, Homo sapiens
catcttgattgcaacctcctaagagactccgagtcagaagtatccagttaagatgttactgactttctgaaccatagaaactgtgagataataaacatctattgttcctttaagccttaagtttggggcttttttttttacaccaatatataactaatgtagacacctgcagtccctaagattgaatgcaaaattgtgttacatacacatgagtgtgttcttctgggaaaagagtccataaacttcaaaagattctcaaaggaatccaagacccaaaaagattaagaaacattgcatcagacaataaattgtcaatgagcaaggtcctgtccttttagattgggttttgaaatcacccatcccacaaatatatgataccacttaactagtttttcaagatatttcttgttcaaagatgctcccactttttctttgtgctcaagtcctagataaacctggctaggggcaggaggtatgattcaggagttagtgagcckggagggctcactgtgcctgggaaagccagcttctcatgaatttttggaatatgccttggctcagaaacctacctctctaggcacaggatccaacttatacgttcaagatgcgtgactgagcatgtgaaagtgtca

SEQ ID NO: 281487 - DNA, 567 bp, Homo sapiens
  misc_feature (1)...(567): n = A,T,C or G
tatcattagtttcagcacacaaatctcagctcacagaataggactcatctctagcagacctgctttacaagacatgttaaataaaatatgttttatgagaaggaaaatgacacagatcagaattctggatctgcataaaaaagaacagcatcagagaagaggtcaaagaaggttaactaagatatcttattctttattgatttagaagataaatgtgtgtttaaagtaataatggtaaaaacacactggtggtggtggcaggtgcctgcagtcccagctactggggaggctgaggcaggagaatggcatgaacctgggaggcggagcttgcagtgagccgagattgcrccactgcattccagcctgggcgacagagtgagactctgtttctatgttaattaaagatcttggtttagnctgctcacattggtggtctatagcacatggataagtgaaaagaatgacagaactttcataagaaattgagagtgaagatttgggaatactctgttctatgttacctacactcaatgtaaagcagtacagtgttattttaagtagacatag

SEQ ID NO: 281488 - DNA, 563 bp, Homo sapiens
tattgtcttgacatctatctcatttcttaggtctggtactaatttgtgagcttcagtggtaagtgcatatatatttagaattgtgatattttccttttggactagtccttttatcaatatataatgtccttctttgtctgttttaactgttgttgctttaaaatttgttttgtctgatataagaatagctacttctgctcactttttgtgtccatttgcataaaatatctttttctacccctttaccttaagtttacttgagaccttatgtattaagtgagtctcytgaagagagcagaaactcggttggtaaattcttacccattctgctattctatatcctttaagtggagcatttaggccatttatgttcaatgttagtattcagatgtgaggtactattctattcattgtgcaatttattgccagaataccttgtttttctcatgtgttagtgttatataggtcctgtgagatttatgctttaaggagattttattttggtgtattttgaagatttgtttaaaaatttagagcttatttttaccagttcttatagtgtt

SEQ ID NO: 281489 - DNA, 994 bp, Homo sapiens
agaaagaccaccaggtgggggcagatatacacatgtttatatagagttcagcctccccctgggcagggcttgctgtggctttcgtgggggatggagtgtggttcccagtctaatggagttgtatttccaggagcattatggatgcctctgctaagtcataaaggtcgccaagcaagtgaaggaaagccagcagttgcagacctcaccttgttcccatgaagccctcagtcccatgcagccctcagtcctcaggccaatcttacccccaccctggctcccacaacagcaccaaggctatttccaggcagccagtgaccagggctgagaacctgccccagaccgtgaccctccccattgagaaagcaagcagactcacaggtttttgacatctcagggagcttgtagtggtgatccagctccttcaaagggtctatggattatcttgscttccctggtatgttcccacagtagttcttggagcaaaagttcacagtgtgagcttccacatgcttttctgtccatccaagtggcagttgcaagctagtcctgcctcctgtccaccaccttaaacagtaacccctgwccagatataatcaggaaacataactaaattcatattataaaatgtttagcctgaactaggaaaaaaaacagactttatggtcagaaggtatcctagttaaatgactgttcctcaccaawcctgccaatttcaggtttccttttcattctgtttttctgctgattatcttgtctttatttttagagatttttcagtcagctcagttagttactcaaatttaaaatatttgaatatagtatgtataaaggctcatcaaaatatagacctcttttctaacttttaatggtttatatatttatcacttgcaaacaaatatgtggaaaaaaagctgtactctttcagtttatcacatgcgttatgcttcatgactgcctaatgaagtgtgtgctactttattcccattttaaggat

SEQ ID NO: 281490 - DNA, 524 bp, Homo sapiens
tattgattttaacacatacacacaaacatatactaatatataaattatttttacatagttatcataacatttttaaactgagatgtaggtttctttccaaggaattggtgtactgacatctgatccctgtcctcttcattctctgtcaggcttataaggacatggaatgagagatagttgaagaatatggctgttcccttaatccagctacatggaccaggtctgagtgcgaggagaaagtaggctgcaaagaaagctcaagacattggtttgaagaarggatttcatgagattctgactataggctggacaactttagttctccagagacaaagttcaataagtatatagaggggctgtgaggactaggtataacataatagtacttttggatgcttggggccttagcaatgttgaggaatctaggagaaaggcagcctccaggaaaaggaagccatgttggcaggggagggctggtatcaggggcagtgataaaatattgctcccatgggtcctgcaagaaa

SEQ ID NO: 281491 - DNA, 340 bp, Homo sapiens
aaatgaattgagtgtcaaaatgacaccgtaaatggaaatttccccacctgacctcatatgatgagtatcaatcaaaatgcagaagcacaacacacagcttattgtgtcctyaagggaagaaaaacccctttcagccccctttacctgcaacatgtgttttccatgcatgcccatatttccccacaaagtatatccaaaaagggggataaatggcatgtgtgtgggctgtatgcatcaatggcaagttccccacaatgccccacatgggcaatgccccacaataccccacctacatgaattacttattgtgttcatttgcttgttctctgctctgtggtga

SEQ ID NO: 281492 - DNA, 597 bp, Homo sapiens
ttgtctttaaggagaacaaatgagtcacggtcaaatctcacaagtccctgccttagaagtgattgaatcatccactatgcccagcttctagcctcctctaagtcagtctaattgaaaagaaattcagattttgagtgactctaaaacagatcattaatggaaaggctgaaagagagatttgaaaccagcttttatattccaattacaagaaaatttacagtcagcaagtactatgtttagattagcctattacatgttaaaggaagtggccatggtggttccagcaaagagttcactgaactaacaaaacacatctctatccaaactcacaggcttcaaaagcatatgctcattcatagacttcactgtggaacaccagaacgagtaattgctctgaagacagacagtcatcactttaaatctctactctcctctttgtcatttattatctatgtaaccttggacatgtctattcaattgtgttagtttcagaatgcgtatctgttgcaragttgccatgtttatcaagtgcgttttatagttacctatttagcacagtgcctcaaatagggtaacctctcaacaaatgttagttac

SEQ ID NO: 281493 - DNA, 584 bp, Homo sapiens
atttcttttcaccattgcttcatatatttgtaattaagtkacattgttttgtcacattctgcattctcccttggtgtcctctcacatcctaaataattttgtttaaactttgcaaacataatgttcactctttgtgctgaaaatttctaagggttttcacaaatgcggtgttatgtgttcaacactgcagtgtcatatagaagagtttcactgttttaacaatttttttgtgctttagttattcaaccttccatttctttctccctgtcaaccagcaatatttttgctgttgctacagttttgttttattcagaatgtcaaaaattgacatcatatgttatgtaatctttccaaattggcttcattcacttagtaataaagtttacaatttatctatatattttcattatttagtagcttatttttatcactgaaagatatgccatcgtgtgagtgtatcacagtttgtttattcatctattaagtgaaatcttagtaccttctaatattttggcaattatgaagaaaatccccactcaggtttttacatggacgtaagttttaaaatcacttctgttatgtat

SEQ ID NO: 281494 - DNA, 598 bp, Homo sapiens
tccatagcatcatttatcttcaatttcccagcagtgttaactctttaagctcagtagcaacagagctacatgtagatacatatgacttcagtctaggggtcagtagagttacctctgcagttttacccacacttgggattcagagactatgacaagcagcaaaamaatttgtcttttcaattaatcagtactgttgttgagcaccatatacattctcaggccatttctaagaaatatggcacatgatcagtgctctcagaagaggatgtaaagcctatgatatttatagaatttcctagaagggtatataagagactgataatattggatgcctctgatgagacaaaggggagaaagggaaaggctcctcttcactatttaccctttaataccgttgaatttacacaatttgcttcatttacctatttaaaaataaaatatacaatgacaacttaaaagttggtttgaaggtaaacatttatcggtaggaaacaactaaaatgcaatttcacagtgtgtgtcagatgtttagtgtcacatagattctaggccctagaaaagggaaggaagaagaatgaaaactggaataattaaggac

SEQ ID NO: 281495 - DNA, 592 bp, Homo sapiens
aaacatttcacatattccaactcttagcacatcttttgttttgaatcctcttattaaaaagaactttttaatggtgtaccacagctcccatttttttcccacagtttcacaaacacttgttatattttgtctttttgatagtagccattctaacaggtgtgaggaaatatttcattgcagttttaatctgcatttccctgatgattagggatgttgagcaattgcgtctccttttggaaaatttttattcaaatcctttttacactttcaattaattgttttcatagcaactgagttgtttaagttctttatatattttagatattaactccttttcagmtgtatggtttgcaaatatgttgtcccaatctgcgggttgtctcttcactctggtgattattccttttcccatgcagcagctttttagtttgctgtaatcctctttgtctatttttgcttttgttgcctgtactttggggttcatacccaaaagctgcccactaaattttcttttagtagttttacagttttcaggtcttatatttaagtctttaatctatcatgagttgattttctatgtggtgtgagatag

SEQ ID NO: 281496 - DNA, 592 bp, Homo sapiens
gctggtttatagagttactatactataatttttatcattattttagagcatactcctgtttattttttgaaagctaactctaaaacagcctcaggcaggtccttcagaaggcattaagaagaaggcattattgtcataggagatgacagctccatgtatgttattgcccctgaagaccttccagtggaacaagatgtggaggtggaagacagtgatattgatgatcctgaccctggaaacagagcataaaagtttaaaaaaattgcagcctgacaatgccatagaaaagaaaaacctaattttctggagaaattcaagccacctgcagaaatttgcatagataaataagagtcaccaagataataggaaaaatgccttcagggcatgtcagagaacttcacagcagctcttctcatcacaggcctggaggcctaagagggaaaaacgctttcatgaactggctccagggcccccttgctctgtgcagcttcaggacatggtgcccggcagctcagctgctttagctccaataggacmaaggtacagctcaggccattgcttcagagggtgaaagccttaagccttggcagct

SEQ ID NO: 281497 - DNA, 560 bp, Homo sapiens
gctgctcttttctctatggccaaggatggccaagtttttgtcacctaacccagaattttttacttcgagaatctctctccctttgtccagtggcaaagaagatactcagaatcctcattagatataatgagtaattgttccctctgaaagaaatatctctaactcaggttcttctgagctgggaaacattttaaatatagcattggctactgcaggttcatgataatgtttacaaaagcaatcaatatgttaatagaattgtttgattaatataagaagttgagaatttagtttttaccaaccttcaacataactggagacatttataaacagattttctttgtttctgctygaagtggaactagtaataataacatggagataaaactttatttgctctatagcagatccagagcagcctcaggttgtctcttttaaagggcttgagtccagatcagttcattgaggcaaacactatttctatgcatcaaccgattgtgtgctgtttatttcattggtagttcacttgactgggcttctgatttttctgttaattaaag

SEQ ID NO: 281498 - DNA, 539 bp, Homo sapiens
cattattaaacattctcttcataagaacatagtaccacagaaacactaggggaaaaatgttgaaacagtatttagcagtgggatcatttcattaggagaaaatgtaaatgaagctgaagttttaaggcagatatgctcaagcctgccccatttgaagtggaaagatgaattgggaacttcagtaggtcatccaacattccagcctccagtaaccaaggcagtatctcagagaaacttctatatctctcctgattctgtgataaaaggaccatgttagaccactcaccatcttgtgttcagctgaaactgtagacagatcttgaatctatttaaccaaaattagcctctctaacttcttattgtttttttaaagccagaactatctttgtcatatgatatcttctttcagggttcattgaaccctcttaatkactttctaatgagaggaacagatttagggactggacaccagtttttaagacatagtatttgggagaggtgttgtctagtactacaaaattagagcatatgagtaacta

SEQ ID NO: 281499 - DNA, 543 bp, Homo sapiens
tggtggtgatggttgcacaatagtatgaatgtacttatgccactgaaccatgcacttaaaaacgatttgaggcaggcgcagtggctcatgcctataatcccagcactttgggaggccagggcgggcagatcacgaggtcaggagattgaggccatcctggctaacacagtgaaaccctgtctctactaaaaatacaaaaaattagctgggcrtggtggcaggcgcctgtagtcccagctactcgggaggctgaggcaggagaatggtgtgaacctgggaggtggagcttgcagggagccaagatcgcgccactgcactccagcttgggcgacagagtgagactctgtctccaaaacaaaacaaaacaaaaaaaaaacaaacaaaaaacgatttgaaaggtaattttttgttatgtatatattttccacaataaataaataaacaactacactggcagagtagtggagcccagggtgagctcaggctgtctagtttctgaacccaagttcctccgttacctggaggacatatattcacacatcc

SEQ ID NO: 281500 - DNA, 586 bp, Homo sapiens
ctgggactacaagcatgtgccaccacaccctgctaatgtttgtattttttttttttggtagaaacagggtttcaccgtgttggtcaggctggtcttgaactcctggcctcaagtgacctgcctgcgttggactcttctatctctgttactagcacttatgaaagaaaggaagtggggaaggaaaatgagcaagaaaagttagggaaaagagagagagattatttttaaatacttttctctgcttacctgtttcaataarcagaagagctaaccaaagaagtcagagaaagaaagtgcaggtaatcactgattattgacttatttgctgagtgaaatttttttgggggaaaaagattatacaacaactctgagatagttaacaggaaatggtaacaagcaaaaagcttcctcctgtttttctgctcctgtgcatgataccccctctcactcagggcaaaatcaagtcagcagatcaaagcatgatgttaaactttgtcttcatctctccccattgggagggccatttagttaggggtgacaacaggtctgcatggctttttaggataagtgagagtagctggactat

SEQ ID NO: 281501 - DNA, 585 bp, Homo sapiens
gttgaggaagggaacagggaagagatgtttccccatctgctttgcttaggtcatgtttgtaagtaacaaaaaccrgttcaacatggagaaaccttaaatacatattactaagtgacagaagcccacctgtaaagactgcatactgtgtgattcatgttctaggaaaggggaaactatgaagacagtaaaaagattagtggctgccaggggttgagggggagggaggagtgaaaagacagagtacagaggatttttagggcagtgaaacgagtagagctgatactatgcattgtacctatgtccaaacccatagaacatataccaccaaatgtaaattgtaatgtaaactatgaactctggtgataaggatgagttcatgtaggcttatcaatggtaacaaatggaaaactccagtgggggatgttgatagtgggggaggctgtgcatttgtggaggcagaaggaatttctatatcttcctgtcaattttgctttgaaccttaaactgctctaaaaaatttaagccttaatgaaagaacaaacaaatcagttaaagctcactttttctcgcaggggagtttattat

SEQ ID NO: 281502 - DNA, 585 bp, Homo sapiens
gttgaggaagggaacagggaagagatgtttccccatctgctttgcttaggtcatgtttgtaagtaacaaaaaccagttcaacatggagaaaccttaaatacatattactaagtgacagaagcccacctgtaaagactgcatactgtgtgattcatgttctrggaaaggggaaactatgaagacagtaaaaagattagtggctgccaggggttgagggggagggaggagtgaaaagacagagtacagaggatttttagggcagtgaaacgagtagagctgatactatgcattgtacctatgtccaaacccatagaacatataccaccaaatgtaaattgtaatgtaaactatgaactctggtgataaggatgagttcatgtaggcttatcaatggtaacaaatggaaaactccagtgggggatgttgatagtgggggaggctgtgcatttgtggaggcagaaggaatttctatatcttcctgtcaattttgctttgaaccttaaactgctctaaaaaatttaagccttaatgaaagaacaaacaaatcagttaaagctcactttttctcgcaggggagtttattat

SEQ ID NO: 281503 - DNA, 529 bp, Homo sapiens
gaattggcaacatctgggccaatcaatcatggcagaagattgaggcaatattttacaaaataactgccaaaggctcactgctgtgatgaggagggagttaagagtttctacttgaactgggtgggcattgccaaaaatgatccactcctttatctcagtgggtggggattccatggcattaaagttcatatccatgagaactggcatggggccgcctacctctctgaccctctacccatcctccctttggtggatgccagcctctgtgacatttctcagtagctgcaagtagcaaagagaacctgtgggaaatgctagccttgcctcctgccttccgttgagggcagattrggacttgtagctgctatcagctgcaaggaactgagggtcatgccattgcattgcctgaaactggagatcattcacaattcagttcatggtccaagaaacaaaaataatatttaatgagcaaaatcttctttgtctaattatggtaaatgtcaaggttgaatccaagtgctttgcttaa

SEQ ID NO: 281504 - DNA, 568 bp, Homo sapiens
cacactacgggacaggccacttcagaaagtctgaaaagaatgggacagcaaagctttcctgagcaatgaagaaatctttctcccattatttatgcacactgcttcactgttccttctttctttcttgtcatacaatagaaataaygatcttggtaccagaccctgtgttgtgcgaggacaattaatcacccacctagtcatttatttcctcatactcttccccaccaggaccattatcctgtaggtaaacagaggtgccagtaaatcacggacagaacacaggtcagtgggagaatggttgattaagcgtctctataacttaaagttatgtagtacctctcatcccaaaggatctccaagcaccagatagactgatgtacgcactgctgcagaacccctctatttgtcactttctacacctttgcgttagggggctggaatgtttattgcccttttcaggcagttaccctagaaactgcagtcatgggtaagacaagaggaaaaggaaggaacttttcactttcctgtcctttcaagcaacagaaatcaactagcaatcagagagtaa

SEQ ID NO: 281505 - DNA, 605 bp, Homo sapiens
atctgtgccactggaataaacaaggccactggattcctgtggtatgatttgatcatgagtcattagaatgatgcagaagatagtaaaactcaattttaagactatgatcaaaacgaagacctccaattaaaaagatcctcgtaaaaaattttaagactccccttaggggggcctgtgggagccatggacctcacattaaaacatacataccyaaagacattaggtttaggtcagtagtaggtttgaagttggaatcaaagcaaaattctgggcaaaaaaaagaagccaaataaaattaaatgattacatgacaatacaattcattactcaatagaataatagacttgagtatggaatcttattataggcatgtccgagactgctatatgtccaactgtgtctgttctctccttttctcttttagtaagaaaattctcccctactccataggtgctttcaggcatcatggctaatcagctagaggccacatttcccagtctcccttgaagcttgttgtggccatgtgatcagcttcttgtgaatgggagcttgagtgtaagtctttcacatctactctcttttcctcttctctctggctggtactt

SEQ ID NO: 281506 - DNA, 534 bp, Homo sapiens
ccatgtggaactgtaagtccaagaaacctctttcttttgtaaattgcctaatcttgggtatgtttttatcagcagcatgaaaacggactaatactctctagttgcatccatgctgttgcaaatgacaggatcttatcttttttatgttggaatagtactccactgtgtttatgcacccattttctttatccattcatctgttgatggacaccaaggttgattcacttgattccaaatcttggttattttaaatagtgttgcatgaacacagtgcaaatatcttttgatatgctgatttcctttctttggagtatacatcaagcagtggaattgttagttatttcttttctcttgctgcttttaggatcctttctttatccttgacctttgggaatttgattactaatgccttgaggtactcttayttagattatatctgcttggtgttctataacttccttgtatttgaatatggacatctttctttaggtttgagatgttctctattactatatttttgaatgaactttctac

SEQ ID NO: 281507 - DNA, 613 bp, Homo sapiens
tatattcttcttgagtgaaggataaaggggaaaagtgcaattagagaacaaaaaattacatcatccagaggaaaggaagcatctttagcatcctctaggatgagaatggcccttagccaagacctgaatgttcttacacatgattactctaaattcaggctggagctaagggggttgttatttagatatctatcactcatcaatgccaattacctgaggacaccatttgaaagggtgaggttagcagttggaggaaaggaagtcacacttctgcataatmaaagaaaggactcacttctttatgtaagagatagcctcatacattgagaattatgggaaaaataaaatatttctgcttatcagatgactgtactgactctgaaattgatgtttgtctttggaattgtgagtagatgtgtttgattttgatcgttaggaggagctggacaatagggagaattatgaagtttatctctaacttccgtttgtacaccaatttcaaaagcatttcaggaaatgttctgggatatttcatgtgccttacagtgtcagaggacagggttgaatcttgctggagctctccccagcccctactcagtctccatgaattcca

SEQ ID NO: 281508 - DNA, 489 bp, Homo sapiens
gacacaggcttttgaggtatatgaatgtatcactgattttaaaaattaactttaataagtaaatcaattaatgtaattcatcatcataaaagtgaaagagaaaatcacatgatcatcccaaaagatgcaaaaaaagcatttgatattaaataaccaatcaaaattcagaaaaacttagcaaaccaggactagaatttttttaaactgataaaacatatctattttcaaaaaccatagaacatatcacttatttgtgcaatgttatcaattactgctagactaggaacaaggccagaatacccaccaaccacatccattcaacataatactcggggtgctatccaatgcagtaaggcaagaaaaaacaaataacagatataaggattgaaaagaaacaaacaaaaagtatctctcttcacacataatacmatcaggtatgtagaataaatctacagataaattattaggatatgtaagataattcagcag

SEQ ID NO: 281509 - DNA, 602 bp, Homo sapiens
ttggaatcacacatgctcccatgtccatattcatgtatttatttagtaatccttatcaagcccctatcgggtgccaggcatggttatagstgttggcaatatcaagatgaataggacaaagtcctttttctgaaggcacttgcaatctactgagagaactgatggttcagcttggcatttcccaaagtgggtttcaggaaatgctaatcctgggagatattcagcaaaagtaaacagaatccaggatgttatgatgaaataagtctgggggatttggagattatagactctgcagagtcctgcagtaaagaaagctataattcattttttataatgaaatatttcacaaagttgtttgaccacagagcctctttttgtctttttaccttataccatccagtggaattagtgcttcatggaatacagtttggaaaactctgacctcttgcccataaggcataaaacatggaagaatatctcaccattacagaggaaagggtaggaagggactttgaaagtctaagaatcatgggcttctcttcagacttttgctgaggtatgagtaggaagtctgatgtcctcatcacttaacgtttgctgag

SEQ ID NO: 281510 - DNA, 642 bp, Homo sapiens
ctctttctgtacaatagagactctgaaaagtcacagcaagagaagattctaacatcggtctttgtcacaaatagcctttacacttggaatcacacatgctcccatgtccatattcatgtatttatttagtaatccttatcaagcccctatcgggtgccaggcatggttatagctgttggcaatatcaagatgaayaggacaaagtcctttttctgaaggcacttgcaatctactgagagaactgatggttcagcttggcatttcccaaagtgggtttcaggaaatgctaatcctgggagatattcagcaaaagtaaacagaatccaggatgttatgatgaaataagtctgggggatttggagattatagactctgcagagtcctgcagtaaagaaagctataattcattttttataatgaaatatttcacaaagttgtttgaccacagagcctctttttgtctttttaccttataccatccagtggaattagtgcttcatggaatacagtttggaaaactctgacctcttgcccataaggcataaaacatggaagaatatctcaccattacagaggaaagggtaggaagggactttgaaagtctaagaatcatgggcttctcttcagacttttgctgaggta

SEQ ID NO: 281511 - DNA, 1248 bp, Homo sapiens
ctctttctgtacaatagagactctgaaaagtcacagcaagagaagattctaacatcggtctttgtcacaaatagcctttacacttggaatcacacatgctcccatgtccatattcatgtatttatttagtaatccttatcaagcccctatcgggtgccaggcatggttatagctgttggcaatatcaagatgaataggacaaagtcctttttctgaaggcacttgcaatctactgagagaactgatggttcagcttggcatttcccaaartgggtttcaggaaatgctaatcctgggagatattcagcaaaagtaaacagaatccaggatgttatgatgaaataagtctgggggatttggagattatagactctgcagagtcctgcagtaaagaaagctataattcattttttataatgaaatatttcacaaagttgtttgaccacagagcctctttttgtctttttaccttataccatccagtggaattagtgcttcatggaatacagtttggaaaactctgacctcttgcccataaggcataaaacatggaagaatatctcaccattacagaggaaagggtaggaagggactttgaaagtctaagaatcatgggcttctcttcagacttttgctgaggtawttacaatccctaacttttttttttttccttcttagtgctatatggattgatggtacgtattccaatgaatgggatctaagttttgatgaaatatggcatgaagcattaagcttactggcgtactgttttgagtaaatcagcccaaacaattttggctcttaaagaatttataatgtgaggcagacaatgtaaaaagaacattgaagcaactaagtcaacactgcatggagacagggatgacttggttctttgtgggcaaaaaaawtaaaaaagaaatttaattctttaattaaaaaaattccatttcaccatttacttattgtgtaaacatgtttaagttacttaatttctacatatgttcatttcctcctctatgaaaggggcctaataacatctcttgaaaggttgtggtgaggattgaaggcatcactacgtaaaaaggaaaagccctattggcccttagcttggcacacaggaggcttggctttcatactaccaaaacagatgtctctatcctccctgagtatcccccaatatggaggagccagaccagtcttattttaagattcaatcaagaatgatgtttagtctattcagcctgctat

SEQ ID NO: 281512 - DNA, 602 bp, Homo sapiens
gggcctaataacatctcttgaaaggttgtggtgaggattgaaggcatcactacgtaaaaaggaaaagccctattggcccttagcttggcacacaggaggcttggctttcatactaccaaaacagatgtctctatcctccctgagtatcccccaatatggaggagccagaccagtcttattttaagattcaatcaagaatgatgtttagtctattcagcctgctatgacaagttagtccaacttcaggrttctcattgtagatggtggtttagtctgttcaggctgctatgcacagttaccatagactgggtggcttaaacaacagaaattaatttctcaccgctttggaggctgggaagtccaaaatcaagtcaccaacagactgatgtctgctgagggtactgttgtggtttgcagatggcagtcttctcactgtgtcttcacatggcacagagtagacagaggaagcaagctcttgtgcctctctttttataagggcactaatcctcttcatgaagactccaccttcatgacctaattatctcccaaagtttccacctcctaatatcatcacattgagagttaagattttaacgtatgaa

SEQ ID NO: 281513 - DNA, 586 bp, Homo sapiens
attttctctctctctctctcatacacatgcacacacacacacacacacacaatttattaagtaacacataggcgtttctgacacttcagattcagtgctcagcctggtcacagtggagctcgtcaccctacacatccattcttactaaaatgacccaggaaaatgcttctctacatcttgccctacattctggaaacagaaggttgctgcaactcagtgtcataaagatttgaggaagtagccttgtgacataagaaatggacagtttttcaaaacatgagaaagatttgagttttgaaactgcctaggaaagagaaaagactagctatcttgtaaaatccttgctcataatgtaagtaacataaggaattaatgcataatgaattatgcttccyggaatactgagtgtctactttcttgcctctctacattctttcaaattcatggttctggagttactcataaaatagcataacatttgtaggtattgaatatggcaggtaagaaacatttttccaatattgtttgacagaaagagagggtcaacagttacataaaaagagcaaagagggcataactcacctag

SEQ ID NO: 281514 - DNA, 488 bp, Homo sapiens
ctccctttgccccctactccccgacaggccccagcatgtgaygttcccctccctgtgtctgtggaacacctctattctttaagtaaattaaatacctgggaatattttactgtctccctcactcatcccacaccatcttcataaattaataaattatcccaaatactttttacatttactccctgtgatagacacaataatggcccaccaaagatgtccacatcctaatccctcaagcctgtgaaagtgttttcttaggtgacaaaaaaacactttgcagatgtgattaaattgaagctcttgggataagaagattgttctggattatctcaatgagccaaacccaatataatcagaaggatctttgtaaaaggaaggtagaaggatcacagtcagagaagatgtgacaacagagaaagaagccagagggactcaaggaagaggccttaagccaaggaatgcaggaacactggaaaaggcaaagaaat

SEQ ID NO: 281515 - DNA, 643 bp, Homo sapiens
aatattcggttgtttatttgagatctttctgttttgctttagtttgttttgttttttatctagatatttattgctatacactttcctcttataactgcttttcctgtatcccataaatttggtttgttttgtttccatttttgtttatctcaagatatttaaaatttttcttttaatttcttygttgaccattgattgttctggagtattttgtttaacttccatgtatttgtagtttttccaaaattcctcttactgatttttagttttaggctattgtggtcaaaaatgatactcaatataatttcagtcttcttgaatttgttgaggctgtttttgtgccctcacatgtgttctattctggagaatgttctgtttgttcttgagaataatatgtattctgttgttaccgcatggactgcttcatataggtctattacatccatttaatttaaagtgctgttcaagtctaatatttagttatcgtttttctgttcagatggtcttttcattgttgagagtgaggtattgaaatctccttctattattgtattgcaatctgtctctttcttcagattttttactatttgttttatatatttatgtgtgctaatgttgaatgaaggtatttttacaattgcta

SEQ ID NO: 281516 - DNA, 586 bp, Homo sapiens
gttgtcactgctggctccggcagcctgcttttattctcttatctggccccacccacatcctgctgattggtccattttacagaaagctgattggtccattttacagagaactgattggtccattttgacagggtgctgattggtgcatttacaatccctgarctagacacaaaagttctccaagtccccactagattagctagatacagtgtgtgggacataaaggttctccaagtccccaccagagtagctagatagagagtgtcgattggtgcattcacaaaccctgagctagacacagggtgccaattggtgtgtttacaaaccttgagctagatacagagtgccgattggtgtatttacaatcccttagctagacataaaggttctccaagtccccaccagactcagaagcccagctggcttcacccagtggatcccgcagggggctgcaggtggagctgcctgccagtcccttgccatgtgcctgcactcctcagcccttgggtggtcgatggcactgggtgccctggagcagggggcggcgctcctaggggaggctcgggctggcaggagcccacagcga

SEQ ID NO: 281517 - DNA, 586 bp, Homo sapiens
gttgtcactgctggctccggcagcctgcttttattctcttatctggccccacccacatcctgctgattggtccattttacagaaagctgattggtccattttacagagaactgattggtccattttgacagggtgctgattggtgcatttacaatccctgaactagacacaaaagttctccaagtccccactagattagctagatacagtgtgtgggacataaaggttctccaagtccccaccagagtagctagatagagagtgtcgattggtgcattcacaaaccctgagctagacacagggtgccaattggtgtgtttacaaaccttgagctagatacagagtgccgattggtgtatttacaatcccttagctagacataaaggttctccaagtccccaccagactcagaagcccagctggcttcacccagtggatcccgcagggggctgcaggtggagctgcctgccagtcccttgccatgtgcctgcactcctcagcccttgggtggtcgatggcactgggtgccckggagcagggggcggcgctcctaggggaggctcgggctggcaggagcccacagcga

SEQ ID NO: 281518 - DNA, 581 bp, Homo sapiens
ccctgttgccgatgctggagtgcagtggcgcaatctcggctcactgcaacctccacctcctgggttcaggcgattctcctgcctcagcctcctgagtagctaagactacaggcgtgcatcaccatgcccagctaatttttttttcttttattttactttaagttctggggtacatatgcagaatgtgccggtttgttacayaggtatacatgtgccacggtggtttgctacccagctcattttttgtatttttagtagagatggggtttcaccatgttggccaggctggtctcgaactcctgacctcaagtgatccgcccaccttggcctcccaaagtgctgggattacaagtgtgagccactgtgccctgccaaaaaattacatttaaaaagaaacaaccaatgtattaatagacagatatgagctacaaagagaaatactgggaatgaagaagtagtcattgaaattaaaaaatctactagatgagagttctagactggacagagtcatagagataattagtgatgtttgatacttgttttgaataattcactcagaatatatcacagcaatggaacag

SEQ ID NO: 281519 - DNA, 581 bp, Homo sapiens
ccctgttgccgatgctggagtgcagtggcgcaatctcggctcactgcaacctccacctcctgggttcaggcgattctcctgcctcagcctcctgagtagctaagactacaggcgtgcatcaccatgcccagctaatttttttttcttttattttactttaagttctggggtacatatgcagaatgtgccggtttgttacacaggtatacatgtgccacggtggtttgctacccagctcattttttgtatttttagtagagatggggtttcaccatgttggccaggctggtctcgaactcctgacctcaagtgatcygcccaccttggcctcccaaagtgctgggattacaagtgtgagccactgtgccctgccaaaaaattacatttaaaaagaaacaaccaatgtattaatagacagatatgagctacaaagagaaatactgggaatgaagaagtagtcattgaaattaaaaaatctactagatgagagttctagactggacagagtcatagagataattagtgatgtttgatacttgttttgaataattcactcagaatatatcacagcaatggaacag

SEQ ID NO: 281520 - DNA, 560 bp, Homo sapiens
ttaaatggactcacagttccacgtggctggagagacctcacaatcatggcggaagagcaagggacatcttacatggtggtaggcaggaaagaatgagagccaagtgaaaggggaaaccccttataaaatcatcagatctcgtgagacttattcactaccaggagaacagaacgggggaaactgccctcatgattcaattatctccaaccgggtccctcccacaacacrtggaaattatgggaactacaattcaatatgagatttgggtggggacacagccaaaccatatcactcacacccttttaaaatttttggtggtggggggtgggggtgctaatactgtgactcctttagcagcagtcacaaaaagtgatgtggagcacttggttcctgcagcatgtttccagcagcagcacaggttttgtgggtcatagcaaagcagcagtagcagcagtcctggcagcacagtgtcctgcctctatctgtcccagctgtcccagctatccatgttctgtgacatctgcaggtagctttgggccccaagtttcccacactatcag

SEQ ID NO: 281521 - DNA, 560 bp, Homo sapiens
ttaaatggactcacagttccacgtggctggagagacctcacaatcatggcggaagagcaagggacatcttacatggtggtaggcaggaaagaatgagagccaagtgaaaggggaaaccccttataaaatcatcagatctcgtgagacttattcactaccaggagaacagaacgggggaaactgccctcatgattcaattatctccaaccgggtccctcccacaacacgtggaaattatgggaactacaattcaatatgagatttgggtrgggacacagccaaaccatatcactcacacccttttaaaatttttggtggtggggggtgggggtgctaatactgtgactcctttagcagcagtcacaaaaagtgatgtggagcacttggttcctgcagcatgtttccagcagcagcacaggttttgtgggtcatagcaaagcagcagtagcagcagtcctggcagcacagtgtcctgcctctatctgtcccagctgtcccagctatccatgttctgtgacatctgcaggtagctttgggccccaagtttcccacactatcag

SEQ ID NO: 281522 - DNA, 603 bp, Homo sapiens
tcatacatgatataaaatgcaaaaaagttgcatgataaaatatatcttaaatcaaaataagaatataaatcaagaaagaaatataaatttgtatttcatagtttgatatattaaagtacactaggtcttcttcggaattaatggatrgtgtataagtaataacatgacttaaatcaagataagaatcacgtgataagccagtacactttctttctcctgacaacgcttttttcggcacatatagagaaaaaattgtaattatactttagaaaatctcttctaatattgtttactggattccaagttacacattgtaatattttcatgacttgtcacaatgaacccattaataggtatgacatttcctgattatgtttgaagtatgataacatatttctccaatgagttgcaaggaatcaagatgtgattcattaagcatgcttatgagttgttcacataattacaaagagaaaccatccacatgaaaataaaaacacaattttaggcataggagaaaagcttaacttctatgactattagctccagtgaaagatggaatacaccgagagagaaatatactgggtggacacagcattatggaag

SEQ ID NO: 281523 - DNA, 603 bp, Homo sapiens
tcatacatgatataaaatgcaaaaaagttgcatgataaaatatatcttaaatcaaaataagaatataaatcaagaaagaaatataaatttgtatttcatagtttgatatattaaagtacactaggtcttcttcggaattaatggatagtgtataagtaataacatgacttaaatcaagataagaatcacgtgataagccagtacactttctttctcctgacaacgcttttttcggcacatatagagaaaaaattgtaattatactttagaaaatctcttctaatattgtttactggattccaagttacacattgtaatattttcatgacttgtcacaatgaacccattaataggtatgacatttcctgattatgtttgaagtatgataacatatttctccaatgagttgcaaggaatcaagatgtgattcattaagcatgcttatgagttgttcacataattacaaagagaaaccatccacatgaaaataaaaacrcaattttaggcataggagaaaagcttaacttctatgactattagctccagtgaaagatggaatacaccgagagagaaatatactgggtggacacagcattatggaag

SEQ ID NO: 281524 - DNA, 601 bp, Homo sapiens
tttttttccataagctgtgtaaggatgaaacatgacttcacttcaaaaacattctaaattcctagttatcacatttgcaactcagtgctgccttcctgcctgcatgtttctatttgtgctgttgatctcaattatgttctcttatccttgctttttagatatcctgatgatttctgtgattctcataggttctgcagctctctttatcacgtaggcatccttaatttaacacttttcgcctctgcttctgtatttgtcctgctgcgcaatcagcattctggatgatgcatcagtargagggtcattgtaaatcacctctggcaggatgagtcactttgtgcttagagttgagctgaagagtgatttcttattccagagcaaggcagcatttcgtttttaaccataaatgttcccttgccagcaacagctagaacatgttacttttaaaacatttcccatctataataatattgtataggcagcaagaattctgtatgtccccaactaaggacatattaaagaaataattatttttttcaatgatgatagtttcatgaagattgaaatgccattttcttgtgtactattgagaggtgacagc

SEQ ID NO: 281525 - DNA, 620 bp, Homo sapiens
ggttagaacaacttctagctgctctcaagctaagacattaaatttggaatttttgctaagtgggttcctatcattaagttccctgacccaatttaatatttcttccttaaagttcctttcccacagatattctccggatttttgtcactataaattggaaaaaatgtgcaattctttctgtstgtattatacctcttcaaaggttatgcttttaccatatccactggtgtctactgggacttgagtttgattctaggtctagaagcaaggagaggatgtggaggtatatcctgagaaggatcagcagtgccttgcaagtcaacctacccaggggaagcccttacaggttcttcagacaaggagaggctaaccacctcaagcaagaatagaagggctgcttcaactgacaaacaaggcttggggaaatataggggatcaagcactccagtatcctcaaatctgctcatatgtccctacccctattttcacaaacctactccttccctaatcaatgccttaactttaacaggagaccttatgtggttggggaatcatttgcattgcaattcagttacgctcaagattaaaatttgattttgattttcacaaatctcagctct

SEQ ID NO: 281526 - DNA, 620 bp, Homo sapiens
ggttagaacaacttctagctgctctcaagctaagacattaaatttggaatttttgctaagtgggttcctatcattaagttccctgacccaatttaatatttcttccttaaagttcctttcccacagatattctccggatttttgtcactataaattggaaaaaatgtgcaattctttctgtctgtattatacctcttcaaaggttatgcttttaccatatccactggtgtctactgggacttgagtttgattctaggtctagaagcaaggagaggatgtggaggtatatcctgagaaggatcagcagtgccttgcaagtcarcctacccaggggaagcccttacaggttcttcagacaaggagaggctaaccacctcaagcaagaatagaagggctgcttcaactgacaaacaaggcttggggaaatataggggatcaagcactccagtatcctcaaatctgctcatatgtccctacccctattttcacaaacctactccttccctaatcaatgccttaactttaacaggagaccttatgtggttggggaatcatttgcattgcaattcagttacgctcaagattaaaatttgattttgattttcacaaatctcagctct

SEQ ID NO: 281527 - DNA, 464 bp, Homo sapiens
ttttaaaaaaccatgcagtgttctctgtagttgaactyactgatcttttctattattggcttaagattttgagtcaaatttaggtagtcttttcctacaccaaggttaagcaataattcatctctactttttttttataggacttgtagtcttgtcttgtatgagatatgattttgcctatttttttttttacaaattgctactagttgtctcagaatcatttatttaaaagtctatctttactaccagtgatttgaaccatcttcacaaattttttttccagtgacagaatttatcttgagagtataattttttctcagcactttagagatgtcatttcattgctttgtggccattgtttctgatgaaaagtaatttttaattcatgttatttttcttgtgtttatagtgtgttttattttctctggttttttaaaagtttgctttctcccccttgttttagt

SEQ ID NO: 281528 - DNA, 467 bp, Homo sapiens
catttactttgtgctaatcacagttataagcatatatttattcattatctttttactctcctccctgttttacagattaggagactgaggagtagagaggctaagtaacttgccccaaatcattttcgcacagctagtaggtaatggaagtggggtttcaaacccaggtagtctaactctagacytaatgctcttaatcatattctactgcaattcagcaatgggtcatctgccacctggtgagctcattctccatcagaaagtaaggacaagtagggtaagtgaactaggaaggattttgaactccttgctataggccattttcaatggtggcaagagaggttggttagagtcagcattcacaaaggcagccaaccacagagaaaaatatagcattttggagcaggcatagctctgatgttagcaaagaaacaagggaagagcagacataatgcaagaatagaatg

SEQ ID NO: 281529 - DNA, 635 bp, Homo sapiens
cagcaatatcccttccttcgggctgagctcagcagcttcagagggttggttggtaaactttccacacccagtccctcagtgataatatgagccatcagatcttctaaaggcaacactaggcttccaagtcactccataaggtctgtttgatgctagctaggttttccatcaggcaaactgagcatgaaaaatataaaaacttattttaacaaggcattaaaataattgccatggttaagattaaaacattattagtcatgtacctccttattgttcagtttttatatcgttttcatattaaatcacatggcagggatagattggggagctacatttttttcaggacctgagaactctgtaggtcttaaatgtcctgggtcttggctgctaaaggcagagttaagcagggaatagtcattcccttgattgaattggaagrgtactcacatcaaccctcctgcaaccaaagctgtgccccaaaatatctcctcctgcctaaggtgttggaggcttctgtgaaaatgagaattatcttaaatcattgagtcactattgcggattaatgccaaatatgcatgctcaatgttgcaaagagtatggtcctgagaagataaggagtaggtcacaggtgctac

SEQ ID NO: 281530 - DNA, 446 bp, Homo sapiens
gttaaaacaacactttgaatggagcgaaagtgaaaatactacataaaacaacataccaaaacttatggaacatatataaaggcaatgcyacgatgggaatttagagttatcaacatattaaagaggaagaaagatctcaaatcaacaacttaactttacaacttaagggactaaaaaaagaagaacaaagcaaacccaagtctagcagaagggaggaaataaagattagagcagagaatgaaaaatagtagagacaattcagtaaaagcaagagttgattctcaaaaagatcaacaaaatggacaaactattagctggacgggcaaattaaaaagagagaagacccaaataactaaaatcagaaatgaaagtagggacttatagaaataaagagagttaaaagagaatactgtgaattactgtacaccaataaattagataacctg

SEQ ID NO: 281531 - DNA, 582 bp, Homo sapiens
gtacaacctggtaactatagttaatagtaatgtgttgtattcttgcaaattgctaagaagctaaactctgagtgttctcacaaaaagaaaaaagaaaaaaatagaaataacacttgtttgtcaatttcaagtgtagttgggttatggatacaagagtttggtaaaaatcaaagtatttttgagaattaataggcaatgtgaaattcataataaggttatatattttattagtttgtagattatttgtcctataytctatatatcagtaaaatttataaacttataggtatatatacaagtgtgtatatataagcacgtatctctatatatatctgtatctattaatagatatatagctattttttacatgtatagatagacatacatttttttcctccagagagacagttgttcattacttattagcaccctattaggtaaaacccaaacttaaccctcaatacacatgtaaggtaagggcataaaactatatgtcatattaaagaaacctaatattttggggttccaatgagagagagagagaaagagaggagacagagaaacatccaattggaagaatca

SEQ ID NO: 281532 - DNA, 671 bp, Homo sapiens
actctctgacatcaactggattcaacggtgtccttgtcttatcatcaggtcartagttattaatttcatctgattcaggtaaaatttatgataatatttcactttttgccttcccttactgctaatgtaagggacatcccattttctaagtattttttttatttctttatttgtgtgtgcatatatatatatatatatatacacacacacacacacacatatacacacatatataattacagtaaatttcatctctgtcgagtactttacaaggtgtgctattgtttaagaaagagaaatgtcattaatattcatggatccctttggtttaacagatggaagattctttttaaattcatccttaaaggtgacttcttaacatgtactataacttcttcacatacaataaatatttatgcacgttcaagaaggttatcaaaaccacctgtgatcaatgttaattattagcaaactaacaaatgtactcaggctcctgcaagactctgttgctcaattattatagatgtaaattagagacctgaagccataaacaaggatacgatgcactggcatgggggagagctgtgagcagctggtcacagtgatgttttgttttgccagcatagtattttcgcattgatttgccagcatttaaaaattttgtgttcaca

SEQ ID NO: 281533 - DNA, 671 bp, Homo sapiens
actctctgacatcaactggattcaacggtgtccttgtcttatcatcaggtcagtagttattaatttcatctgattcaggtaaaatttatgataatatttcactttttgccttcccttactgctaatgtaagggacatcccattttctaagtattttttttatttctttatttgtgtgtgcatatatatatatatatatayacacacacacacacacacatatacacacatatataattacagtaaatttcatctctgtcgagtactttacaaggtgtgctattgtttaagaaagagaaatgtcattaatattcatggatccctttggtttaacagatggaagattctttttaaattcatccttaaaggtgacttcttaacatgtactataacttcttcacatacaataaatatttatgcacgttcaagaaggttatcaaaaccacctgtgatcaatgttaattattagcaaactaacaaatgtactcaggctcctgcaagactctgttgctcaattattatagatgtaaattagagacctgaagccataaacaaggatacgatgcactggcatgggggagagctgtgagcagctggtcacagtgatgttttgttttgccagcatagtattttcgcattgatttgccagcatttaaaaattttgtgttcaca

SEQ ID NO: 281534 - DNA, 468 bp, Homo sapiens
gttgctcaattattatagatgtaaattagagacctgaagccataaacaaggatacgatgcactggcatgggggagagctgtgagcagctggtcmcagtgatgttttgttttgccagcatagtattttcgcattgatttgccagcatttaaaaattttgtgttcacaaaggcatctgaatatctgcttcttctgaaatattgggggatctgggaatacttggcctatattcaatggtatgtatgctggtagatgtttaccatccagacttcaagaaaagtcttgatttgtatcatttgcctatttctatggtgtaaatactatgccacggctgatttctagctaccaaggtgaccttctttactggagttgggaagaagtacacagtctgctctcacaaactagtatagtttcagcacaccactgtctgtattactcctcaacaaaattggctgaagttaccagttgcc

SEQ ID NO: 281535 - DNA, 1055 bp, Homo sapiens
taaacatcattccatttacttgtaaacttgacaaatggtgtgcagcgaatttagcttccaaatgtatttggtttcatgttaaagatataaaatatattattgaaaattgggattttctgaattctgcttttcattctatttccatattgctgctctctctakcccttcaatattctacttttccaacccttagacattgaaacttactatggttttcccttttctttctctaaaattccaccttttaaagatagttcctttgcaacgaagtaatttctgtctagttttgctttgtcttaacatgcactatgaagaacttggaatccttgcctcaggctctagtttctagggagatttactataagagtgcctttatgcagtacatacactattcaactatacaagcaggctgtggatgggcctcccttgctttcctttgtacagccttccacctcttccctcaacttatttttctagaaatacttcattaggtttagtctataatgtaatactttagaggttgcaaaactgtagactgatcatatggttagttatagttccactggccttcttttctctcactctcttccctgttcctgwtgggcctcccttgctttcctttgtacagccttccacctcttccctcaacttatttttctagaaatacttcattaggtttagtctataatgtaatactttagaggttgcaaaactgtagactgatcatatggttagttatagttccactggccttcttttctctcactctcttccctgttcctgttttaatgcattgggcctgctagtggcagcctgtgggcattgctcagcccagccaggagcctacatgggtaagagggctgctaaattttcttctactttgtaatatagtaactggctgcacagcttgttatcatggaaagaacwgagaatctggattcttctatggtatttggcttttgattttcgcttattttaggtcatctgttctaaactttcccctaatctcccctgccatcgatgcactgctgtctacctctctgcatgacataaat

SEQ ID NO: 281536 - DNA, 585 bp, Homo sapiens
tgccctcaatgtcttcaacaatcaattttatgtatccttggaaaaacatcttacccatttcaacaatagctctttcaaaaccataggcacttgctgttgttaaaataagttatgattctaagtgaaatattctatgaaattaygatgaatattttctgggtagccagaaagaaaacagaagctatacgaaataatatatgaaatatattgaatatataagaaaatataatgcattgaataatataagaagcagcaaagaaacaatcaacagcataaagagacaacctgttgattggagaaaatatttgcaaattactaatgcaacagcaaacgaatatccagaatacacaaggaactcaaataactcaacagtataaaaacaaatactcctgtggagaaataggaatgcttttacactgtttgtggaagtgtaaattagtccaaccactgtggaagacagtgtggagattcctcaaggatctagaactagaattaccatttgacccagcaatcccattactgggtatacacccaaaggattataaatcatgctactatgaagacgcatgcatgcgtatgtttatt

SEQ ID NO: 281537 - DNA, 552 bp, Homo sapiens
aatctcgtcttgtcgcactagtcttcaatcagaatatcttttcttcaactcttaattacttatcatttcattatttcaatgtattgaarggtgtaggctgcttataaaatttatattagtctttactgtaagtcacaaattttaccagtccaagtaactctaccagagctaagataccttaacctgtggtcacaagagggctatgtcacaaagaagataaacaagaaactgcagaatgattatgacaatggaaaagctatcttaaacatacagaactacagatacaatatgctgggaggaattacaattaaacgaattgcagaagtattctttattaaatatttacctgagatgaaaagaatggttgaacaatgacaaccacagtgagtccagaaataattcaataataaaaataatggttttctcaccctattggatttatagtgaagtgtcacaaatttgtctttaatacataagtacagctaaaattgggaaaataacaatgaggctacttacatttggagaaagccatgaaacaacattgtgttttag

SEQ ID NO: 281538 - DNA, 552 bp, Homo sapiens
aatctcgtcttgtcgcactagtcttcaatcagaatatcttttcttcaactcttaattacttatcatttcattatttcaatgtattgaagggtgtargctgcttataaaatttatattagtctttactgtaagtcacaaattttaccagtccaagtaactctaccagagctaagataccttaacctgtggtcacaagagggctatgtcacaaagaagataaacaagaaactgcagaatgattatgacaatggaaaagctatcttaaacatacagaactacagatacaatatgctgggaggaattacaattaaacgaattgcagaagtattctttattaaatatttacctgagatgaaaagaatggttgaacaatgacaaccacagtgagtccagaaataattcaataataaaaataatggttttctcaccctattggatttatagtgaagtgtcacaaatttgtctttaatacataagtacagctaaaattgggaaaataacaatgaggctacttacatttggagaaagccatgaaacaacattgtgttttag

SEQ ID NO: 281539 - DNA, 593 bp, Homo sapiens
acttactaggtgttgttcagttgtttatgtatatattttatttcactttgtcattatcatgactttataaggtaggtatgattatagatcatctcctttgtatagagacacagctaacacagagatttaaaaatgtcctcaattagaccttgagctagaaaagtggagctggaattgaaacccagacactctgtgtctagaattcttgatctgtatggtgagagtgggcatgggcttggagctggacaaacctgggttcaagcattagccctgccaactaagggctgagtaaccttgtgaatgctacttaaacttcgtgagcattcatttcttcatgtatgaaacaatatatgtaaaaacctttagcacagggcttggcatrgagtaacatttcaaaaaatgttagctaagaatagtttcattttactatggaactttcagaaatggcaacattgctttaatttgctaatttttgtactttcatcacagtacaggcatagttgacattggagcaattgtttgtatttattttgaagcattcttcctttggaaaaaaaattatattctgaaaacctcatgcatttggatgaaat

SEQ ID NO: 281540 - DNA, 610 bp, Homo sapiens
tcaatccccatatcaaaacccccaggaagtatgattgattctaccttcaaactatgttgtaaatccaaccaattctcaccatctctcctctaataccattagtcaggattcatttaaaggtgatccactagaaagtgagagaaatagagagagagtatgtgtrtgtgtgtgtgtgtgtgttctctgttgcaggggtttgaccttacttgattgaggaagtgggttaaacagtttctctacagctgttgtccatgtgcctgctgcaggagcttaaagtctacagcacaggcagttggcagaaaacgaacataaatgtgaaatgtggggcctggggaaacccgcaggatgaaccaaatccatgtctgtccttactgtctcctgtggctcaggtgtcctgagggagaagctggtgccctttatcacacagctaacaacgctcctggcccatggatcagagaagttgaaggaaaatacagaggaagttctaacagtggcagacctaattactgcaccatgccaagcaggtaatccagcaggtaagccttgcatgtgagctgcaaaatcatctgccttgagctattgagtgtaaaagacaaaatggctatgatgt

SEQ ID NO: 281541 - DNA, 588 bp, Homo sapiens
aatctcacacttataaaatgtctyttgtggctcaccctaaccagaaacttacggaaaggataattctgagaaacttagttcagcctaggcaacttgactcattacaaagtcaccacagcacacaccttgccaatttggcagccatgcacacctcttggaaacatagctatactaatttcctaaataaagattataacaaaattatgcctccacttaacacaagacagctatcccacttactgttgaaaacatgcttacatttttgccccccaaaatgcaaaatcctccttagtctttgagtaatgttaattcttcttttagctgttcacactcctgaaacttaaatctagagtataaagtaaattattattaacatgtcttgtattagatgggaacaaaatgtgagagaagaagaaaacaagacacttgttttatatatagaaacatatcaaacaatggaagaatttcttataattattactgtataactacatgactatatctagaatttgttgctatctttctctattacacatcctatattccctttgtcttcagcaagcccctaagctgcctcagatgcttccc

SEQ ID NO: 281542 - DNA, 588 bp, Homo sapiens
aatctcacacttataaaatgtctcttgtggctcaccctaaccagaaacttacggaaaggataattctgagaaacttagttcagcctaggcaacttgactcattacaaagtcaccacagcacacaccttgccaatttggcagccatgcacacctcttggaaacatagctatactaatttcctaaataaagattataacaaaattatgcctccacttaacacaagacagctatcccacttactgttgaaaacatgcttacatttttgccccccaaaatgcaaaatcctccttagtctttgagtamtgttaattcttcttttagctgttcacactcctgaaacttaaatctagagtataaagtaaattattattaacatgtcttgtattagatgggaacaaaatgtgagagaagaagaaaacaagacacttgttttatatatagaaacatatcaaacaatggaagaatttcttataattattactgtataactacatgactatatctagaatttgttgctatctttctctattacacatcctatattccctttgtcttcagcaagcccctaagctgcctcagatgcttccc

SEQ ID NO: 281543 - DNA, 563 bp, Homo sapiens
cataaacattgcattttgatatcaaggggaaaagtggacttgacaatataaggtgctgaaaatgaaaatctaataatgataaatgaattaccagacataggaagaggtatgatgcaatgtttgacaacaagcatgttggacccaggcagatttgcattttattccaaaccctagcatttgttgtctgtgctatcttaggtaagcccttggacatcctccagtctcagttttttaatatagaaagagaacctaaaaatagtaataactcttcattgatttgcttggagaattacatgagaaaacatgttgattgcttagcaaccttcctggaacatagcaaatgttcagtaactggtcattattagtggtataaattgttagtggtcaacattaataaatacagttttcttatctctaaaaataagagttggagtatatgataycaaaagttttctcaactactgacattttgtgtctctgcaattttaatggtccctaaatcctacatttccaagtagttaggaagtggcaaaagattggaaccatgcacatatggctgcatg

SEQ ID NO: 281544 - DNA, 466 bp, Homo sapiens
agctaatgtgctatttctgtgtagataggaggaagtttctgggtctaaatactatacagctccagagtgttttctgtggttgtctcttttcttcacttacagtctcatcaagtttgagagtttaaacttaatacatactctgatgaatatctaatagatacccttaayataaagcttacctcttatctccagacttgcatatctaactgattacttgatattcccatttggatctctgtattggtctgggatatatatatatatatatagacacacacacacacacacacacacatatggagagagaaagagagattgattgatttactatagggaattggctcatgtggttatggagactaagtccaaagatctgcaatcagcaaactgaagacccaggaaagcttattgtgatgattaatactgagtgtcaacttgatcggattaaaggatacaaagtattgat

SEQ ID NO: 281545 - DNA, 587 bp, Homo sapiens
tatatataactaattaattttaacagacaaatgataattgtgcatattcatggggtacatagtgatgtttcagtacatacaatgtatagcgatcagatcagtgtaattagcatggccatcytctcaaacatttataatttctttgtgttaggaacttttaccatcctccttctagctatttgaaactctgtaatgtatgattgttaattatagtcatcctccagtgctgtagaacactagaacttgttcctcctatctagctgtgattttgtttcatttaacaaatctctccctatccctcccttcctccaactttgttttacctcttctcttctttattcacctccactctcatgaccatctttgaaatcaaccaaatatggaacttaaatacagcattttagatattcatatttgtagaaaataattttatacttgcagctcttaattttaaaagcatataagtttgcatatctctttcttaaaagagaattcaaggccaacaacttaaattttacttctgacaggattttttattgttttctataggtcagtgagcctgaatagacaaaatatttcctagcaaa

SEQ ID NO: 281546 - DNA, 605 bp, Homo sapiens
ctcactctgtcgcccaggctacagtgcagtggcatggtctcggcttactacaacctccacctcctgggttcaagcaattctccccccttatcctcccgagtagctgggattacaggcacctgccaccacgcccagctaatttttgtcttttttggtagagatggggtttcaccatgttggccaggctggtctcaaactcctgacctcaagtgatcccccacctcgaactmccaaagtgttgggattacaggcatgagctaccgtgcctggccttgaaccagttctgatgtaatgcctcttgcaggaaaatcccaggagtttttgggatgcttgtttctggttccactacaaaacatcacagtcttaggtagacttaatacaagtggacataattatgcagccctgttccacatcattagtgagagtaaatgcctctgccaggattctgccaacactgtttctagccagacatccattagtaaacattgcagtcttaaaatactggttggcttctgtgcctgggctgtctgcataatggaaactaggtctagattttttaaagtatcaacacggataagcaaagaaatgctgttctctaagggatg

SEQ ID NO: 281547 - DNA, 605 bp, Homo sapiens
ctcactctgtcgcccaggctacagtgcagtggcatggtctcggcttactacaacctccacctcctgggttcaagcaattctccccccttatcctcccgagtagctgggattacaggcacctgccaccacgcccagctaatttttgtcttttttggtagagatggggtttcaccatgttggccaggctggtctcaaactcctgacctcaagtgatcccccacctcgaactcccaaagtgttgggattacaggcatgagctaccgtgcctggccttgaaccagttctgatgtaatgcctcttgcaggaaaatcccaggagtttttgggatgcttgtttctggttccactacaaaacatcacagtcttaggtagacttaatacaagtggacataattatgcagccctgttccacatcattagtgagagtaaatgcctctgccaggattctgccaacactgtttctagccagacatccattagtaaacattgcagtcttaaaatactggttggcttctgtgcctgggctgtctgcataatggaaactaggtctagattttttaaagtatcaacacggrtaagcaaagaaatgctgttctctaagggatg

SEQ ID NO: 281548 - DNA, 605 bp, Homo sapiens
atgttaaaggtatattactttactatatcctggagacctttcaatgtcagtaatgggtgcagaatatgccagaggatgaatgtgctataaagtaactaatgagttccttattggacatctatgttgttttttaaaatttttctttctttttttaacctttaggcaattctgtaatgaaccaccttctgtatatatatacatatctctgtacaacaatgccagtatatctgtggctggattcttagaaatggaattgctgagtcaaagattacataatttaacaacatgataggaattgtcctcaaactgccaaactgtgcacaaaaaaggctgttcaagtttacactcccatcaagtgttagagagtagttcagtattcagagaagccatagaagttttaaatatgtgcttcaggagctactggggaaaacaagggagtaagaaaarggctggtagtccacacagcaatctcctttcctcttcagtgagaacacctctcctttgatcaacattatttattcggcttagtttaaaattcctcttgaggagaagtttctgggactaaacatttgaaaatatttgaaataaaaaaattacctgttttt

SEQ ID NO: 281549 - DNA, 598 bp, Homo sapiens
ccaccaactcctagggaaagttactgcgcttctctgggcctcaatttcaacatctataaaataaaaatttaccttcgtagtatagaattttacttttgttttcccccaaatgttttcagatgcatgattcaggaacattagtctggtataattaaarggaaaacatcaagaaaggcttttgagtcagaaagacctgggtatgaatcctggctctccatgtgttaacagagttactatgtgacaactgcttgaactgtggttttctcatatacaaaatagggataatgcacctatcagtgcctgaagcatagctattacccaataagtagcaccgtttttatattgtttttaaaatttacatctaccctataaggtaggtgaaataggtctaatgttaccctaaagttgaagatccagaggcttgcaggtattagtaatttgacaaaagagcagccagctagataagtggtagaacagggcacaaatccaaattcttattcttttcataaacggtgcagcttctttcctccaagcagtaggatgggattcagatctctgtgatgcctgtcaagcgaatgattttacaaacaaattagat

SEQ ID NO: 281550 - DNA, 571 bp, Homo sapiens
tcagcattctctgaatctacattttacatgtgagagggggtagaggaatagtcacatacgcattcaacttgtcctcagtgaatctgcattattacataacctaaaattaacagagggtagaggaggcagtaagataggcatttgtctcgggtgagtggagagatgacttttcagttctgtcctttgtcccatacctgagaagattaacgatgaatttacacggtcagggtaaaattcaccagaactgctttagggtaaagattgtggggccaaccaggaattcccttgtgggaaaattgtgagggaggtatataccctttcatctctgtagctgtcttatttaggaacaaaactggggggcagatttgcatgacccagttcccagcttaactttcccctttgccttagagagtttggggtcccaagatttattttcctttcatagtatatacacacacaatcatttgtatgcacacatatacacttatggatgtgtatttgtaagtatcagtatttatttatagkgactatatataatctttccaaataatcagtctggaggtcagctgaa

SEQ ID NO: 281551 - DNA, 566 bp, Homo sapiens
tggtgacttaatgtggtcctttcagggatagaaatccatccatgtattaatggagtgtagacaattattggtggtgacaatcaatacgttttattagatagcaaaaggagaacaaaggagaagcctgactcgcaaatgtttatttctattagcattcagtcatccttacctcctagtccataccagggctggttttgaactgttgtcctgatacagtcacatacacacagtgtgagagaagcttccaaggggggatgtttgagcacgccagactttagtggcagacagacaagatttaaaaactggttctgctactaacttgtgactctgggcccaatacgtgacacagttgcccaaacctcattgtcttcatcttaaaaacgagaatgctaagatttgtgtcccaaggtagtgtcatcatgtctgcaaagtacttggcttatgggcctctcaataagtggcagcgattactatcatcatcatcatcatcatcatcatcaccatcatcatcaccgtcatcatcgttttgctattttgaaatgcrtgactatatgagtatttatgtg

SEQ ID NO: 281552 - DNA, 426 bp, Homo sapiens
aacacacatctcttaactaactccttgattccttctccaggaagcttagtataatttcactatcaaaaattaatgataaatatgtgatatcatatgtgtttcatggaatgggtttagctttatatgggttttctgtttttagcacctgtacctacaaagagtttgtttgcgtaagtggggtgtgtgtgtgtgtgtgtgtgtgtgtgtgtgtgtgtgtgtgtgtgtgtgtgttttaataaattcttattctctttctcagtgtagcaytccttggtaatatgagtgcagttttctgtttgttacatggtgggcgagttggttcatttctggataaatggcaaattttaattttgtatgttctttcctttttatcttagcaaatgcttctttgtgcaggcagacaagcttagattatgttaaaaatat

SEQ ID NO: 281553 - DNA, 426 bp, Homo sapiens
aacacacatctcttaactaactccttgattccttctccaggaagcttagtataatttcactatcaaaaattaatgataaatatgtgatatcatatgtgtttcatggaatgggtttagctttatatgggttttctgtttttagcacctgtacctacaaagagtttgtttgcgtaagtggggtgtgtgtgtgtgtgtgtgtgtgtgtgtgtgtgtgtgtgtgtgtgtgtgtgttttaataaattcttattctctttctcagtgtagcattccttggtaatatgagtgsagttttctgtttgttacatggtgggcgagttggttcatttctggataaatggcaaattttaattttgtatgttctttcctttttatcttagcaaatgcttctttgtgcaggcagacaagcttagattatgttaaaaatat

SEQ ID NO: 281554 - DNA, 551 bp, Homo sapiens
ccaactaaaaaaatattatctttaaaaaaattaatgaaaaagaagctgtgaacctgacacatttttttatcacacgtatctgtgaaggatagtgtttggcaccagaatattttaaagaaaatttaaatttgttcacttgagtaatcagggtgtgaactattttttcctagcatatttttgcacgcaataaaccaatgagagactatctgccaatatttatagggtcttggtaaagataaaagggcacacacaagtccaaagactgcctgcccaaagtttgaaaggtttggrtagtcttgaatttccttttccatttgaaagataaaatcaggtaaaaatttaaatcaaagtagctttcagttagtgcctttttataggcagtgaagttttagggtaaaacttggtgatttttatctgcaaagaacaggatataggggtccttgaactgcacccaaaaagaaggagttggcagcaagtacctgtttcctttctccattcttcatcacttcacaattattcccctacctgcccagtgagagggggaaaggagg

SEQ ID NO: 281555 - DNA, 660 bp, Homo sapiens
caggaaggaaaaattctgattggggacatctaggaggaagctgggcttgaaattcgtcttcaaagatgaaaattttttatgagtgagttggaagagaaagatattctaggaggagtttgtaaaacatagcatgtctgtatatttgtgagttagtgagccaaggggagcgtgaagtaggaaagttacggtaggagcttgtgcatggtggagaaagctggcagcatttgtagggaccacagtgcagaggctgtgatcaagggagaagagtttggacttaattttgtcgcatttgggagcaaccaagtgtgttttagggagctaagtctgacagcacacctgtacgccactggcatggagaaacgggaaatagaagataagtcagtagagagtaaagcgctgcaatagaccaggggaaaaaaagaagcttgaatttggtcagtgagaatgaaaagaagcatgcagtggacattttcaaggtcaaatcttaaaagtatgaggggcaggtaaagcagaaacaatgaggacacagattttcttgcaaaaccaacatattgtctcttaaytgggctgtataaccccctccagtggtctcctcacatgggttcctgcccttctccaaatcattttccctactagtgttggattaatcttttaaaaatg

SEQ ID NO: 281556 - DNA, 267 bp, Homo sapiens
ttactagcttatcttcccaagtasagaataaagacaggatgagatgagtcattccttcacccctccctgagacatctgcttcctctcttccctttttcttcaaatgctcacctgattgtgggtaaaatgtagatttactgagcactaactaaagtctcacagtatgtacccattggtctcacagctccctctctccttttttttttcttttttaaaggaaaattataagtactaaacctcccaagaacctctttggcaaaacaccca

SEQ ID NO: 281557 - DNA, 630 bp, Homo sapiens
tactctttgtgtccaggtctttgatctccatggctatgagacagtgaacgttgaatrtcaccccagacaatgaggctgctttattggttcacgaattgggcagttccagaatgcaggtggttcagggctctgatgaaggggaatgaaggagaaggcttttatagggtgaatacgggagcaaggcaaagaaaatatttggttgtttacagtggagcagtaggtttagttgaatcattccagcaaaagtcccttgttagaggttggccatttctgactgaataagcttaagtgttttgttgttgttgttgttgttgtttactgtttacaatgagttgagtttcagtttgctgatgcaggcagtggaattgcctcagtctaatggccttccaattattttaacaggactttgtactttttaccttgcattctggaaaaattcctttgattcaatcaagaacataaatttactttcaagttgtatccatttgatattcagtccatccactgaggtttataattcctaagatctctaactggtgaccttttcataataatctcttctgatgtttcactggggcaacttctctcattctcctgagaacttgactcttattttcaagggttcacctg

SEQ ID NO: 281558 - DNA, 630 bp, Homo sapiens
tactctttgtgtccaggtctttgatctccatggctatgagacagtgaacgttgaatatcaccccagacaatgaggctgctttattggttcaygaattgggcagttccagaatgcaggtggttcagggctctgatgaaggggaatgaaggagaaggcttttatagggtgaatacgggagcaaggcaaagaaaatatttggttgtttacagtggagcagtaggtttagttgaatcattccagcaaaagtcccttgttagaggttggccatttctgactgaataagcttaagtgttttgttgttgttgttgttgttgtttactgtttacaatgagttgagtttcagtttgctgatgcaggcagtggaattgcctcagtctaatggccttccaattattttaacaggactttgtactttttaccttgcattctggaaaaattcctttgattcaatcaagaacataaatttactttcaagttgtatccatttgatattcagtccatccactgaggtttataattcctaagatctctaactggtgaccttttcataataatctcttctgatgtttcactggggcaacttctctcattctcctgagaacttgactcttattttcaagggttcacctg

SEQ ID NO: 281559 - DNA, 650 bp, Homo sapiens
agggttgtgcataggggttcgtctccaggtttcataggagagactgagtatgctgctgagatgtgaggcattcatgtgctagtagtgcccttctgggagttctcactctctgaggaaattgccctattcatttgtatttgtgagttaaaacatgtctgttttgtgctgctcaacagagagggcagaaggacrgggtaggaggaaagggatgactggcccatcagctccatatacagtttcccagctcatcattgtgccagtcattccagagctctttccatttctgtctctctgttgcctctagacttagagctctacttacattatagcagtttgaatttttctatgtgtgtctgaggactcttatctccttggtcaatctaatttccactaaatctttaaaatttcttgtccataggtggtactccttttagttgtcaacattcattataaaattattatgatattactgtacctgttcttcatttataagaatttttttataagatggggagtagagtagggctctgtgctcagttaacattttcattcaaacttaatttccattctcggtcttgctattttaaaaaagatgccctctgtaccacatattatattttgtatgctaatatgggctcagagtgttttac

SEQ ID NO: 281560 - DNA, 1071 bp, Homo sapiens
acatcttcaaagaatcagaattctgattcactgatttttgtgggcatggttttgttttctgttttctcttttattgaattctgctctttattatttctattcccttgtctacttgagtttaatttgttctttttcctttttacatttttaaagtatacatttatcacttaaagcccttctcttctcttctcttcttttctttttcctttcttttctttattgagacagagtcttgctctatcaaccaggctggagtgcagtggcaagatcttggctcactgcaacctccgcctcctgggtttaaacgattctcatgcctcaacctcccaagtggttgggattacaggtgcatgccaccacactcagctaattttgtatttttaatagagatggggcttcaccatgttggccaggctggtctcgaacycctggcctcaagtgatccgcccaccccggcctcccaaagtgctgggattacagatgtgagccactgctcctggctttctaaaattcttttaacttgattgagacttgttttaaagcctagaatagatccattttggtaaatggtctatgtgctcttaaataaaggaattctatttatttagtggagtgctcwtcttttaacttgattgagacttgttttaaagcctagaatagatccattttggtaaatggtctatgtgctcttaaataaaggaattctatttatttagtggagtgctccataaatgtgagttcagtgaagctggttgatagtattttttagttcctctatgtacatattgawatgttatttacttgttctatccactaatgagaaaggggtttcaaagtcactaaataactgaagacgttagaatttctcttcaagttctgttagcttttgctttatgttttttgaagctctcattaggtcattaagtgcataaaagtttagttctgttctgtcctcttgatgaatttacccctttaccattgtaaaattactctattacatctgtctcaaattttgatacttttggccattatatttttcaaatattttttctgtctcttcctctccttcag

SEQ ID NO: 281561 - DNA, 591 bp, Homo sapiens
cgttgttagataggcagatggaatataggaaagaacaagaatgaaatataaatggcagttaggtctcagtaggattatgagtggttttctttcttcattatgagggcttttttcaacacagttaaaagcaaacattttctgattatagaaacaatgaatatcattaaaataaataaaaactgatatccagtagaaaacattttcaaaatttaaagatattatttaaaattattttttaagccaccacaaagaaaataaattacaaaatttatgttttttttcattagggtgtatttatcatgatccttttaatgttcacaaatgaactactaaaggcaggtaaatttgatggatgaacatgtactaagtaggatttattttagatgatactttagggccccggttcaaaagtgtggcccagggatcagcagcagcaacatctcttgaaaacttgttacaagtacatacttggggcccagcaatgtaygtttttacaagtgattttgatccatgcttaaatttgggaaatattgctttacgattttgagttatgagactgagctagaacaatttctcaaaaattttattcta

SEQ ID NO: 281562 - DNA, 412 bp, Homo sapiens
atcaaatgggatctatccctgggatgcaaggatatatccacattgacaaattattaaatgtgatacaccacaytgacagaaaaaataagtcatatgatcatcacattagatgcagaaagaaacacttcacaaaatttaacatcctttcatggtaaaaaaaaaaacactcaaattgtatataggagaaatgtacttcataataaaggccatatataatctcacagataacattatactcaatggtgaaaaattagagccctttcatctagatccagtataagacaaggatgcccattctcatcacttctattcaacatagtattggacgtccttgaaagaagagtaagttaagagaaagaaataaaaggcatccaaatagaaaaggaagaagtgaaactgttgtttgctgatg

SEQ ID NO: 281563 - DNA, 623 bp, Homo sapiens
tagcaaacagtggaaagaagaaccaggtgtagtggctcacacttgtaatcccagcattttgggaggctgaggcagatggatcacctgagctcaggagtttgagaccagcctgaccaacatagtgaaaccctgtctctaccaaaaatacaaaattatccaggtgtggtggcgtgtgactgtaatcccagctacttgggaggctgaggcaggagaattgcttgaacccgggaggcagaggttacagtgagctgagatcacgcgattgcactccagcctggaaaacaagagtgaaactccgtttcaaaaaaaaaagaaaaaaaaaagtggaaagaggaagaagaggaacaagggagtcccaggcaaagggaacaagcccaggcagttgcaggaaaatcagggacagcagggtctgcatgagggaagtttctacataggttttgcccagcttaactctgtgggttgaccttccccrtgaaggctgaccctgtacctctgacccagaatttactggggagattgctcacagcctctcttcttcctcacagtatgtcttcgtgctccagctggccaaacctggtgccatggaaaatccagatgcttgcttacctggcaggccgtgctgg

SEQ ID NO: 281564 - DNA, 603 bp, Homo sapiens
tgccatcctttttccaagaagccagttgaattttggagacaaggttctggggctgcagaggattgggccctcatgcctgtctygatgctcccagttctgagctcagtgcgcctcttgggcaggagtttcctggttcctctgcagaatcggcctgaaggtggtggctcaccagccagcttcagtccctttcctctgccctcccctgtggaagtcaggctcatccaggcccagcttctgcccaaccagccaggctcaggtgctggatgcccacagtggaaggagaacagtgaagaggggctgacatgtaggtgccatccccgccagctttcctttctccctccagtggtgtggtttggccaccagcatgccaccctagtctactgcctctagcaaaacaggagtaagaggatatatgcacaaaatgccaggttacttgggttactttgtgatttaaggggcacttactcaactgtttggggtgcctatcatttccttcttcctacttactcttcccctttacagaaatgtcactgccacagtttgaagaagaaacatatggccccgacctgccagtcatggccacatgggcaaggatgaacaagt

SEQ ID NO: 281565 - DNA, 620 bp, Homo sapiens
agatggccataagcatggcttcagagctccacagatgggagctccacgtcctatttgtgtgtgaccgtgattaacgtagcctctctgagcctcagtttctttatctgtaaaatgaggacaacacaagatcatgtctgcaaagaacaaactatcttatagggaaagaaggaatcctcagtaagctctacagtgaatttacatcatagagatgtttgttactatgtcactatgatgcagattcactacggactttatcaagaggacactaaatggagcaaaagatggggtggatttctaccatgcttctaaaaccacctgactttacaattataactggattttcagtcttaaaaaactttgattttgataattttcggaaagtgttagtaatcaaacacaaatgcarttggtacattttggagatgaaacttactccaaataataattttaaaaatcttaatcagcatttgataaaactgtgttgactgtaacagtgattctcaattttggttgcacaaaatacatatgggaacctttatgaaaatagcaatgtttagagcccacccctgacaaatcaaaatctctggggtgggtgggaggaggtgagcatttaaaaaagc

SEQ ID NO: 281566 - DNA, 602 bp, Homo sapiens
aaacagctttgtcttttctgacttatcactattaagcataatataagcaaacagcttattttacctgggtatgtgtttcttattattttttaactgatcaaataagctaacattacttttatgtaatgtttaagattgtaaaaaatgtaaatttatgtctaagtsaagtgaatccttattctgacacactttttatttcaacagtaattgtgttttatagtatgtcatgttgaagataatttttaagatctctaggtaacttaagccttatatcgatattaaataaattaatatgtaatcaatagatatctagttactaagtaggataggacactgacatatattattaaggataattttacttatttttgtatgttagagaagctgtaacaatgagtcatgttaataaatgtgctcacttttgctacacagggatgcatgagactacaaaaagttgtattatgaattttgttaatctgctaaatgctttgagatgacagaaagatgttaattatccactttcttgtcttttctgtgaaatagaagttaattacttcagttaaaagttataattaatatgagtggttacaaccacactggga

SEQ ID NO: 281567 - DNA, 1144 bp, Homo sapiens
ctctgaacagccccttggctacagaggtccatgtggatggtttatgccagagaaagctggctgcagatgggtggtagagcaagctagctgagatggagtggagatgtattgtagtcatggtgctggcaccacatttcccagtgcagccctagaaaccagagcacctgtgagctgagggagaccagatggccagagtgcactgcagcttctcagcttccactcacaagcagcttcaccctccatcttcccttccaggagaagtgattgctttcygtactttgatctacagtggaaagtgcctgcctaaccctgccaaccagctctgcaaggggattcacagtgaagccagatggagtttgattttgttcaggcttatttattttaaattttatttattttaatttgcttttaaaaaagtttttaatcatgaaatatttcaaacatctatagaagcagccaagatagttgaatgaattccatatacccatcacccagcttcaaaatttatcaactcatggcaagtctcatttcaactccattcctgctwtctcatttcaactccattcctgctattattttcctcctcagttatcttgaaacaaatcccagacattatgcccttttacccataaatattttagcatatatttctaaaagagaacttttaacatacatgaccttaatgccattgtcacacctgaaaatttagcagtacagtatttttggtaatatcaaatatccaatcagtttwcaaatttccctaattacctttttaaagtttattttgtttttacagtttatttgttcaaattagccttcaaatacaggccatgtagtacaatggattgatatgtctcctgaatctcctttagtctgtgggttccttcttggtttcttttttgttccttgcaatttatttcaagaagaagccagtcttctgtagaatttctctcagtctacattttactgattgcatccctataatgtcctttaatttgtccctctatctctgcattttctgtaaatttgtagctagatccaaagtcttgatcaggttcagagttgacctcttggcagaccacgtcataggtgctgtgttgtaggaggcacaagcacctcctggttgcctctctattttatgata

SEQ ID NO: 281568 - DNA, 597 bp, Homo sapiens
tctcatttcaactccattcctgctattattttcctcctcagttatcttgaaacaaatcccagacattatgcccttttacccataaatattttagcatatatttctaaaagagaacttttaacatacatgaccttaatgccattgtcacacctgaaaatttagcagtacagtatttttggtaatatcaaatatccaatcagttttcaaatttccctaattacctttttaaagtttattttgtttttacagtttatttgttcaaattagccttcaaatacaggccatgtagtacaatggattgatatgtctcctgaatctcctttagtctgtgggttccttcttggtttcttttttgttccttgcaatttatttcaagaagaarccagtcttctgtagaatttctctcagtctacattttactgattgcatccctataatgtcctttaatttgtccctctatctctgcattttctgtaaatttgtagctagatccaaagtcttgatcaggttcagagttgacctcttggcagaccacgtcataggtgctgtgttgtaggaggcacaagcacctcctggttgcctctctattttatgata

SEQ ID NO: 281569 - DNA, 570 bp, Homo sapiens
gaagttgttctccgcctgtaaactgtgcatgatgattggaccagactgccccagttacactatgaattcataaattttataagtcccatgcttatcttggaactagcaccacctaattatgttacattgtatttaatttgttatatgtaatcacttaaaataatctkcaacttttgtaattctgatctagtatttctttattgggggcacctgtttcagaaagtagaagtggccaggatcacctttgagaggctcagcgctcaaacaagggggatcttgtgggctgttggttgtctctgaaggactggtagggtttattttgataattggaggggggataggaaatgtcattattaagtgtccctctcagagtgaatcaaatatatatgtgtatatatatatacatgcagtgttggcatggatagggaacagctaggagagttacacaggtgcaatcgcagtgttgagctgtttaatttgctcctgaaaggagcaatagtcgtgccctggttaattgagacagaagttatacattagggcttccagagaggcccttggggttcaatttgc

SEQ ID NO: 281570 - DNA, 563 bp, Homo sapiens
aggttctaggatccttgtgttccttgccatgctcagctgagtcaggacagtcagcaacagccgaataaaggatttgggagaggagacttatgggagatgggtgtggcgttagtggggccactccctgcaggaggacctccccaccccaggcctcccacctgggcctgctgatcactactgccccctgctgttggggtgaagcctgcaatgcgacacatgcacgagggaggcaggtggagccacatgtgctcccccagctttgcataggagtaagtctgctctctgctccagagagaaatggggcataaaaggacttggggggcagatcctctctctgatccagaaattcactcggggcacagtctagtcccaggctagagagaacgcaaaacatagtgtggttaaygtgtggtgagacatgtcatgggtaaagactactcatgacctcatgccataaataagacaggacacccattcacttatccgtgctccttccatcccaggcctgtagagggaagtggggacccagaaatcagtcctcagcttcaagaagctcataagaa

SEQ ID NO: 281571 - DNA, 556 bp, Homo sapiens
gggttaaatctccttttgcttctcaactcctagaatcaggctctttcactttcttctctacaggagaggaccctagtcttaaacaatacagcagatgtctcctttgggtgactggcaacttctgtttctcacttgcaatccaaaagctaataacagtgtctgaaggagagaaccttgagtttttagcatgtataagggaaacatatttctcactcttttgtattttgttcaatgacaagaagtgaatattaaaaatttagtgcattttcctaccaaagtattaattcattgcacttgttttcatgaacacatgtagtagatcatactacaccatcttcacccttctaaccattgcatttctgaactgttgagtacattgtaggcattagcaaatacttargttgaatgttgggcttttctttaagctgcttttatcttgtacatagacgaatctgcagtgaaagaagaagtctgcatttaagaagaagctatggttacagatttcctatctttggtcctagtttaatatgtaaacattcttcatttataaatattt

SEQ ID NO: 281572 - DNA, 556 bp, Homo sapiens
gggttaaatctccttttgcttctcaactcctagaatcaggctctttcactttcttctctacaggagaggaccctagtcttaaacaatacagcagatgtctcctttgggtgactggcaacttctgtttctcacttgcaatccaaaagctaataacagtgtctgaaggagagaaccttgagtttttagcatgtataagggaaacatatttctcactcttttgtattttgttcaatgacaagaagtgaatattaaaaatttagtgcattttcctaccaaagtattaattcattgcacttgttttcatgaacacatgtagtagatcatactacaccatcttcacccttctaaccattgcatttctgaactgttgagtacattgtaggcattagcaaatacttaagttgaatgttgggcttttctttargctgcttttatcttgtacatagacgaatctgcagtgaaagaagaagtctgcatttaagaagaagctatggttacagatttcctatctttggtcctagtttaatatgtaaacattcttcatttataaatattt

SEQ ID NO: 281573 - DNA, 502 bp, Homo sapiens
gagaatatccttacaaggaatcggccccaggtgaggttatcacagagttttcaagcaaaggaaggaaggaagaccttttcggacacaggagtgaaagctacttctgctggtcagggaggttcaatgtgcytcagggatttgagatgctctgtttcatttgagtccaacaggatgtcctcattcagaattgtagtggcatgttgtttttaaatcaatgtcctaatgctcacatgtgaaacttgtgaaggttgtaaatttaactgatatttgattctgtaacctgcataactaaatttagtatttgattttttggcaatataatcaataaaatatctctattatttttgttttatttattttgggggtttttgtttgtttttcctattagtgctcaaatatactcaggatattctgttccaaaacatggtccttatagttattttcactgcagataagtgcagcagtcacatgggcatccaaggcacctatttcagttggaacg

SEQ ID NO: 281574 - DNA, 593 bp, Homo sapiens
tttactggggttctctgcatttcctgaatttgcatgttggcctgtctagctaggttggggaagttctcctggatgatatcctgaaatatgttttcaaattgctttcattctccccatctctttctggtaccacagttagtggtagatttggtctctacataatcccatgtttcttggaggttttgttcattcctttttattcttttttctttttttttttttttttttttgctatttttgkctgcctgtctcatttcagaaagacagtcttcaagctctgagattcttttctccgcttggtctactctgctattaatccttgtgattgcgttgtaaagttcttgtagtgtgtttttcagttctattaggttagttatgttcctctctatactggctatttttgctgtcagctcctgaattgtttaatcatgattcttagcttctttgtgttgggttacaatgtgctcctttagctcagcaaagttcacttttatccacattctgaagactaattctgtcatttcagccatctcagcttcagcctagttctgaatccttgctgaagaggtgtggtagtcatttggaggaaaggg

SEQ ID NO: 281575 - DNA, 594 bp, Homo sapiens
caggacagtactggtaaagtcatgtttcatctctcattacaattccttgaagaaatgcttcaggatcttgattccacttgtttaaaatttccactgaacgctctgctcctgtctgcagttgatctggacacaacagtttctgcacccgtcaagtggaagggttgctcaacatgttcagtcagaattctgtaagctgaaacaatagagatagtctatgttgtggctattgtttctactgttaattgtaggtcttcttcaattaaggcatgaacaagattaatttttttcctcayaaattgatgtggatgccttgacaccatgggcttcaacatcaacatcatctcatccctttttaaaatgagttatccatttgtaactggctgatttctttgggccactgtccctataaacttttcacaaagcatcagtgattttattgttcttttacccaagcttcaccataaatttgatgtttgttcttgcttcagttttaatagaatttatgttgctctgatagaggttcttttcaaactgatgtcgtatccttcttaatgcctcaaactagatcctgttcagacatactgtaacacgtta

SEQ ID NO: 281576 - DNA, 613 bp, Homo sapiens
ttcttaatgcctcaaactagatcctgttcagacatactgtaacacgttaatacaagtttattttggtacaaaaagttcttgaaatccacctataattttttgataatatgcattttctgtgatctatttgaagaacccttatatttaagatgttctagaacttatctaaaacagccttttatggcctccatagcctcctgtagttactgtcgtatttctttcctcctgccacaaccaatttttctagagttattgtaagtttctcctgtttacttttcaatccattgcaatttgactgctctcatcatgccactgaaatgtcttttggtaagaaccttagagagctcatctcacttgcatagcttaacattgttagctcatggtttcccttctgaaacaatttagacactcttttccactgactttcatgacactacactcttctagtttccctcctctttaactgagcattctagattcgttttcaactctayttcctctaattgaatgttaaattttggacattctcagggctcagtctttgttaactacatttactttctggggaaatctcttctacttccatgtttgaaatgagacttctatgccaaat

SEQ ID NO: 281577 - DNA, 580 bp, Homo sapiens
ttcaggtgttttgttatacagaaatatcaaataccttgataccatggtattgtcagacttactctccttgattaattaaaatctggtagctctgaaatggaaccgcygtacatgtgcaccagaaaacatgaatagaaacattcatgccataattgtttgataatagcaaaaaacaattttttaagtgaaaaccaaatgttaaaaacaagggacaaaaaatgtgtagtatattgctacaattagagcactgttcatcattagatatggataactacagatacaggtatcatcatggataattttcaagtaaacattaaccaagtaggactccttttatataaaaataatagaactttaaaaatactgttaagagtatttaaacttcaaaaatacatgttacctacatatgttgtaaactattttgaagaggcaaagagataattaagacaaaattcaggttagtagctaacttctagagtggtgggaagcagagacaagatggccaactagatgtaaccaggaagcacttcgcccaccaagagagaccaaaatatccagtaaactaacatactttgaaaaa

SEQ ID NO: 281578 - DNA, 567 bp, Homo sapiens
acacagccattttaagaaggmggcaaactgaacttctggaattgaacaattcactacaagaattttataatacaatcagaagtcattaaacaacagaatagagcaagtggaggaaagaacaacagagcttgaagactgatcctttgaatcaattcagtcagataaaagtaaaaaaaaaaaaaagtatttttaaaaatgaacaaaatcacggagaaatatgggatgacataaagaaaccaaacctatgacccactggcattcctgaaagacaaagagagagagtaagcaacttggaaaacatatttgaggatacagtgcatgaaaaatttcccaatcttgctaaagaggactacatgtaaattcaagaaattcagagaacacctgtgaggtattatgcaagatgtccatcctcaacatacatagtcatcagattcatcaaggtcaaagcaaaagaaaaaaatctcaaaggcagatagagagaagggtcatcacttaaaaaggaaccccatcaggctagcagtggactctcagcagaaaacatacatgccagaagagattggggcctat

SEQ ID NO: 281579 - DNA, 567 bp, Homo sapiens
acacagccattttaagaaggaggcaaaytgaacttctggaattgaacaattcactacaagaattttataatacaatcagaagtcattaaacaacagaatagagcaagtggaggaaagaacaacagagcttgaagactgatcctttgaatcaattcagtcagataaaagtaaaaaaaaaaaaaagtatttttaaaaatgaacaaaatcacggagaaatatgggatgacataaagaaaccaaacctatgacccactggcattcctgaaagacaaagagagagagtaagcaacttggaaaacatatttgaggatacagtgcatgaaaaatttcccaatcttgctaaagaggactacatgtaaattcaagaaattcagagaacacctgtgaggtattatgcaagatgtccatcctcaacatacatagtcatcagattcatcaaggtcaaagcaaaagaaaaaaatctcaaaggcagatagagagaagggtcatcacttaaaaaggaaccccatcaggctagcagtggactctcagcagaaaacatacatgccagaagagattggggcctat

SEQ ID NO: 281580 - DNA, 564 bp, Homo sapiens
cagcgttcaaactctgataatggacagactgcctccttaagtgggcccctgacccctgtgtagcatgattgggagacatctcccagtaggggccgacagaatctcatayaggagagctctggctggcatctggtgggtgctcctctgggaagaagtttccagaggaaggatcaggaagtaatatttgctgttctgcagcatctgctggtgatacccaggcaaacagggtctggagtcaacctccagcaaactccaacagacctgaagctgagaggcctgactgttagaaggaaaactaacaaacagaaaggaatagcatcaacatcaacaaaaaggacatccacaccaaaacgccatatgtaggtcaccaacatcaaagaccaaaggtagataaaaccacaacgatggggaaaaaccagaggagaaaggttgaaaattccaaaaaccagaatgcctcttctcctccaaaggaacacaactccttgccagcaagggaacaaaactggatggagaaagagtttgacaagttgacagaagtaggcttcagaaggtgggtaataacaa

SEQ ID NO: 281581 - DNA, 564 bp, Homo sapiens
cagcgttcaaactctgataatggacagactgcctccttaagtgggcccctgacccctgtgtagcatgattgggagacatctcccagtaggggccgacagaatctcatataggagagctctggctggcatctggtgggtgctcctctgggaagaagtttccagaggaaggatcaggaagtaatatttgctgttctgcagcatctgctggtgatacccaggcaaacagggtctggagtcaacctccagcaaactccaacagacctgaagctgagaggcctgactgttagaaggaaaactaacaaacagaaaggaatagcatcaacatcaacaaaaaggacatccacaccaaaacgccatatgtaggtcaccaacatcaaagaccaaaggtagataaaaccayaacgatggggaaaaaccagaggagaaaggttgaaaattccaaaaaccagaatgcctcttctcctccaaaggaacacaactccttgccagcaagggaacaaaactggatggagaaagagtttgacaagttgacagaagtaggcttcagaaggtgggtaataacaa

SEQ ID NO: 281582 - DNA, 522 bp, Homo sapiens
aatagctttcacagctttttctataataatgacatcttcagtggtgtaatccttccagcctttcctaatgttctctatattctctgtaccagggtttctttttttcatagcattgacaatcctttccataaagtaccatgggtaatgagccttaaggtcctatgagcccctgatctagaagttaaattagaaatgatgtgtctgcaggcaattagatcacttcaacactgttggtgttgaactcatggggttctgggtggccacgggcattgttcaatatcaaaagaactttaaaaggcaatcccttactggtgagggacttccttaytccagggacaaagcatcaatgcaaaggactcagaaaaagggttcttattgtccaggacttcttgtggtacaaccaaaagactggcagctagtgtttatcattccccttcaaggctcaagacttagcaaatttatagataaaggcagtcctaatcataaacctaactgcattaggtcaaaacggtagagttggcc

SEQ ID NO: 281583 - DNA, 564 bp, Homo sapiens
gtatctgggaactcatttgctgcctcttctttgtcagcagaagctgcttctcttgttatctttacattttttaagccaaacttctttcttaaattgtcaaactacaatttggtggcattaaactctccagctttcgatccttcacctttcttttgctctcagttgtcatgtaatgactttgctttttctgcaatcacattagagtctatatgtatgcctttctgatagcaattctgaaccaaaataaaatctgcattatcaatatgagataaaaacgtatttcacaaaaagcataggttttgcacctgctactatagctgcagcaatagctttgtgaatttctttttttttttttttttgtacaatggtccttacattagattcatttatctttaaatggtgggcaaccrcagatgcagaccttaatctatagtagatattaagcaattccacttcttcttgtaatgtcatgacttcgctgtgcttcttgggaaaattcccagcatcactagtggcactttgtgtggatcctatggtgttatttaaggtttactatatagcaca

SEQ ID NO: 281584 - DNA, 1071 bp, Homo sapiens
ttctttatctctaatactttattgtatatgtcactgtgattgtacgattgtgtcaaaatatttgtcacattctcacttttgatgtttagtatttgtcctattactgcyacagatgcaagataaccttttatcaaatacttttatagacttcagaaagtctcaaagagtggtgaaagagaagttattcctgttatttctgaagcgttctgcatataatttaaaaacagagaaaagaagtttctcaaatacacagatttcccaggttgcttgttaaagttgtcaatttcactgaaccctcttcatgaattgttttcctgtcatgttaaataaataaagaatttttccatgttattgtttgaatataatgactctcctgaactggaaacctgacctttatactgtgaatcctcactgcagcagaattctttttttatccgcagtctcttgtgggggaaaataaattaagtctctgagccattgtgattgtaaaggtatgagtaggtataaagaccctataaacattaatggtatttggaagaaaagcagaattaaagattttwttcagtacctttgaagtccttagtgtgctccatcccaatctcttcctcctcccacctttctattctttgtttcatattttattttagaatcagggggtacatgtgcaggtttgttacaaagatatattgcatgatgctgagatttggagtacaattgagcctgtcacccaggtgatgagtgtagtaaccaataggtagtttatcatccgttgacccactccttctatccccctctaatagtccccagtgtgtgttgttcccatctttatgtctgagtgtacctaatgtttagctcccacttataagtgagaatatacagtatttgattttctgtttctggatgagtttgcttagaataacgacctccagctgcatccawgttgctgcaaagggcatgatttcattcctttttatagctgcaaagttttccatgtgtatatgtaccacattttaaaaattcagttcaccactgctaggtacctgggttgattccatgtctttgtgactgtga

SEQ ID NO: 281585 - DNA, 586 bp, Homo sapiens
gtttcaacgccctcctacttcaaacctcctcttctaattgcttcctaccaactacacattcttctgtattttacgcacagagagtagagacagactcttgaagcaggctttaatacagagaaacatctgtaacataaattgccctaaagtggaattaaagtctttctgtaggcaatataataaggtttggtagttgaaagattcaagggatatctttctgaaatggcctcacttgtaagaatacactacagcaagaatctctagaaccagtgtggtataagccataggcaactgccaaggtttttactacagggtggcaaattcagacttgccatgtttgaaatatcatatttggttggggattagatatttatctatggctgctcagtagtttgttatcctgaggaacttagcatgggcagcagcatattattgattttggaaaacaggaaggattgaaagaagctgtgtggattattatgggraaagctgttggcaggtgtgtgtcctgaataaatgaacaacttgataattccacacctggaacccaaagagaaaaaatgtggatggtgacctgctggcgtgg

SEQ ID NO: 281586 - DNA, 407 bp, Homo sapiens
gccagcctctgtggttggaaccctaggcctggtgtcgtgggctcatgagtgggatcttctgatctgtgggttgcacagttccatggaaaaaccatggattcccaggatgggtagcatgctcaatcactgcayccttggctagggggtgggggctcccctgccctacgtggctgtcaggtgggccaccacaccacattgctcttccttcctctttgtgggtcatcccagccacctagttagttctgatgacatgacctggatatctcggttgccagagtgcaagattcgcacattgttacggttcttgagcatctcaggtcatccccaaaccgttggaaaagacaggacagtggctgaggacacatcactcattttccagccttcagatgttccggtgtcttccctat

SEQ ID NO: 281587 - DNA, 477 bp, Homo sapiens
tagttctgatgacatgacctggatatctcggttgccagagtgcaagattcgcacattgttacggttcttgagcatctcaggtcatccccaaaccgttggaaaagacaggacagtggctgaggacacatcactcattttccagccttcagatgttccggtgtcttccctatggctctcccagtacctgcaggtcacaggacaacaggsgctgtggtaaagtcacctaggtgttcctggaacaaaggaaatggaacactggagcaaattattcttcttattcagtcacattttcacctaaatattcagtaaagtagtaactaaaaaaacttaattaccattgataaattttatattgcatattagggaaaaagaagaagggaaatatgcaatgaaatacatactaaataaataaagaataacatattttttgtaccagatgtttttatttatgtgactggtcattattcctccacaaac

SEQ ID NO: 281588 - DNA, 503 bp, Homo sapiens
ttgaaagctggggtttttttttttttttttttttggcctctaggtatatcctggttgctttttagtgagaaaagggcaatcttatctgcatatctcctgtatttttgtagagctccattaactgcatgcctacaatcattttgatacattttgatatgaacacttaaagaaggaaatggaggatttttgctttattttaacttgcagacaattcttaagatattggtatgctctttctaaataagttctaattagagttcttccttagcactttggatgttctcgtaattagtagggtctgccttcaaccaaccaatgaagaaagtatgaaagctctttaacgttcccagcctcccaagcctgctgtctccttgtgattccyttcctttttctaaatgaaccactttctccttttcaggaattcaagatttttctactacttcctggtattaaaatacaataaaaaatcttcagtaaaatacaaagcaataaagcatacatca

SEQ ID NO: 281589 - DNA, 587 bp, Homo sapiens
ccactattctcattacaatcagaatgctggttacaatggcagcatctcctaacatcatgcccgcgctcatagaacagcaactacacagctttccaatgcatgcaatacttttctcactaagaaatttgtcaatttctcaatgccttagtcaaccaggcatcctaaggtccctctaaagagagcacagtgggatgtaaatgtttacattgtacacgataactttgttacaacattacgttcttcctaagccttttattcttttacataaattcaggtagtaagcttctaaaaataatgcatagttttatagtatactgttggtgaaaacttgaatattcatttgggaatactgagtgatggattttgttcttgtgttcagtacaaactcaatttagtgtatggggtgtgggacttatcaataaagttgtacttgctttgatctgtgtcagctgtacattattaaatagtcatccttacatctttttatttttgcttttgcatctctagaccttaagtttcaagaaatattaatycactttctcagtgacacacacacagacacacacaagcacacacacacacacttt

SEQ ID NO: 281590 - DNA, 585 bp, Homo sapiens
ctcatttatttctgtagttttctcttaatagtccagtagtttctgccatgcagtaatttcactaaagctttgatcataccagtaatataaactcaagctttctgcaaaggcttcattgccctaaagaatcagtaattggccaaatggcttttagagttttgcttggattcattgcagtataagtaaaaattaattacccccacagtttctacaataccataatataaaggtgtcaaaacttgtctttctaaatggcatttcttagtatcacactggatatagggtttgctataaatgtgatttgtggaaaccattaatgaagtactagacctaattgacttcttttagctttatgacaacataaaaaagttctgcactagtgatgataattcttttgacgttctgcagttggaaatccrtagctgtatatttttccagtgaggcaagacttcaagttttttagaatttgaaatgcagctgccactaaggaacaatatggcagacatgactattttgatttttataattattatcatcattatctttatcttctgtgcctgctgagctccagctatatttgtatca

SEQ ID NO: 281591 - DNA, 585 bp, Homo sapiens
ctcatttatttctgtagttttctcttaatagtccagtagtttctgccatgcagtaatttcactaaagctttgatcataccagtaatataaactcaagctttctgcaaaggcttcattgccctaaagaatcagtaattggccaaatggcttttagagttttgcttggattcattgcagtataagtaaaaattaattacccccacagtttctacaataccataatataaaggtgtcaaaacttgtctttctaaatggcatttcttagtatcacactggatatagggtttgctataaatgtgatttgtggaaaccattaatgaagtactagacctaattgacttcttttagctttatgacaacataaaaaagttctgcactagtgatgataattcttttgacgttctgcagttggaaatccatagctgtatatttttccagtgaggcaagacttcaagttttttagaatttgaaatgcagctgccactaaggaacaatatggcagacmtgactattttgatttttataattattatcatcattatctttatcttctgtgcctgctgagctccagctatatttgtatca

SEQ ID NO: 281592 - DNA, 445 bp, Homo sapiens
tatgaaaaaaaggcataaagagacatgagacgattacagttgttggttagtggtcctgaaaggaacaataagatttgggggagacaccaggaagagcatacctgagggttaaactcagraaatatgtttactggaaagataaatgtgaaaaaatggatcagaagttcaagtaacagttatgtctatggtgataagaggttggctaagaaaggaatggtaaagaaaaagaagacaagtggcaaatagcagaataatgagtgaataattctgcgaatagcagaattattactgaaacctctgtaagcattacaaatcaatgtaatgggtaatttaaaaaaatttttggtaatgtactcattgtatttttggagtaaagatgttaattatttgctgcgtgagtaaaacaattaaaattctactattgaaccagttcttttcatgttgg

SEQ ID NO: 281593 - DNA, 582 bp, Homo sapiens
tacgactaaggaaatggtatataagaaaataataatgtgtagccatgtactcttgaaaaaaatggtgtaatgataggatcatttctccaacttttatgtcctaccacaggcaatggcctatcagctttcatgtttctcattaatggatgtgaatgaaaggaaccaagtgatcaatgtacttttgttcacttcagtaaccasagtaattcagagtggctccaaaagactatcataaagacttaatatattctttctttacaatttttatttaaagctacagcatggaaatttggcctataatagtcaagagaaaaataattactctctccagggctctatgtcaattttccatctaaatatggatttttattaatgttcattataatttcacataagcatgaagaaactaacattttattgcaattttcaagggagagaaagtacaaagtagtgtcttattccaaatgacctaagaggtactatgaggaaaaagtcattttctaaaactatgcacttattctccagcttccaaattcatgacctggaagcacaggtactcagtaaaggctgaataataatgat

SEQ ID NO: 281594 - DNA, 587 bp, Homo sapiens
tttattcaaccagtttttaatggaaaattccccattgtcaagcactgtgtcatgtattcgagctataaaagtcagtgtatttgggccgcagaagtcatcatgacagacgtagttcctactctgtggatgtacaattcatagattttgaggcatatctttgcccagacatgagaagactatcattttgtaaccgaacaatcagcttgaagccaaaacatacattttatcttatatttgcttctttgttttagcacccagccattataaattccacacattttgaaatattaaaatgttttatggtaaaagatcattatttccaaatgatggaggtgtcaaaatacagtctccgagaagaaggctagacacttacatctcagattactaagctgttgctaatctgctttaaaatcttgcataaatttctattttgtcatctctaaaacaccaaaagtaatgctgcgtcatagttcactggaagtgggaggaaggattcctaaatgattataaagtgttctgtagatasagaatcatgtgtgtaccagagatgataatattgtcccattaatccttcttgtgacaaagaa

SEQ ID NO: 281595 - DNA, 1213 bp, Homo sapiens
aaatacaaaaatatgaaggataatgacattctgtcatatgctgcaacatgaatagaattggaggtctaattatgttaagtgaaataagccaggcacagaaaaagagaaatattgccattctcatctcatttgtgggaggtaaaaaagtggatctcattgagttaaagagtagaatggtggttagcagaggctgggaaggygggggtggaggtaggaagagaggttgcttaaagggtataatataattagaagcaataagattctgcatttgatagtatatggtatagataacaataatgtatagttcaaaatagctggaaaaattagaatgttaccaacatatagtgaagacatatgtttgaggtgatggatatcccaattagtctgattacatattgtatgtatgtatcaaaatatcataggtacccctaaaatatgtgtaactattatgcatcaataaaaacagaaataaattgatctagtacatgttctctatgacagaaaaaggaaaaaattttcatcattttattttatcaacttctactgacagttgaaaccctacctaatttatgcaattttaaatattctgctgcagacaagttcatgwaaatacaaaaatatgaaggataatgacattctgtcatatgctgcaacatgaatagaattggaggtctaattatgttaagtgaaataagccaggcacagaaaaagagaaatattgccattctcatctcatttgtgggaggtaaaaaagtggatctcattgagttaaagagtagaatggtggttagcagaggctgggaaggtgggggtggaggtaggaagagaggttgcttaaagggtataatataattagaagcaataagattctgcatttgatagtatatggtatagwtaacaataatgtatagttcaaaatagctggaaaaattagaatgttaccaacatatagtgaagacatatgtttgaggtgatggatatcccaattagtctgattacatattgtatgtatgtatcaaaatatcataggtacccctaaaatatgtgtaactattatgcatcaataaaaacagaaataaattgatctagtacatgttctctatgacagaaaaaggaaaaaattttcatcattttattttatcaacttctactgacagttgaaaccctacctaatttatgcaattttaaatattctgctgcagacaagttcatg

SEQ ID NO: 281596 - DNA, 1174 bp, Homo sapiens
aaatacaaaaatatgaaggataatgacattctgtcatatgctgcaacatgaatagaattggaggtctaattatgttaagtgaaataagccaggcacagaaaaagagaaatattgccattctcatctcatttgtgggaggtaaaaaagtggatctcattgagttaaagagtagaatggtggttagcagaggctgggaaggtgggggtggaggtaggaagagaggttgcttaaagggtataatataattagaagcaataagattctgcatttgatagtatatggtatagataacaataatgtatagttcaaaatagctggaaaaattagaaygttaccaacatatagtgaagacatatgtttgaggtgatggatatcccaattagtctgattacatattgtatgtatgtatcaaaatatcataggtacccctaaaatatgtgtaactattatgcatcaataaaaacagaaataaattgatctagtacatgttctctatgacagaaaaaggaaaaaattttcatcattttattttatcaacttctactgacagttgaaaccctacctaatttatgcaattttaaatattctgctgcagacaagttcatgwcacatacatacaaaaaagataagtatgaatatcttaattagcttaatctaataatttcacaatgtgagtatatatatacacacacatatgtacatatatatatataaacatgacattgtataccatatgcatatgtgtaatgcaatttttgtaaattacaccttaacaaaactggaagaaaaaagataacaaaaatctcaggwtaacaagatgggaagttattcaatgggcaatataatgttgagtaaccaaattatatgatctaaaggacgttcaagggtaattaatctaagggtctcctatgcggtagaataactatcacaacttaacctgtcaaaaaatatttccataaggaatatctttattgcagcacttcatcaatatcactgcacctacatgaagtgtaccacatacacagcagaaaaccaacttttgttttctgttggttcttctgttgaaaaatgatcacatttaagccctcttgtggtggctctgcatagaaacagtcctacctcttgaggagtcctgaagcaaactactccttgacaacacaatggaacaacaaat

SEQ ID NO: 281597 - DNA, 560 bp, Homo sapiens
aatccactttatactagtcatactcaattcagcttttaaatgttatctatttaaaatggacagttattacttacaatatatatgtaagtataaatatatttaatatgtatgtaaatatatgtgctatatatacatttataatgaaagtatacatatgatataccttttaaaatcaatacatacttaaatattaagttagctctccctccttcactaatactagtcattctagcatgccttatatctactcaatttcttttcaatttcaacatgaatttaaaagttattgcttaaatctaaggaatttaatatacacaacagaactttataaatgtattcaaagaaagggtctctagatcaatgcaaatttttttctttagatcattactaaaaacgcatagtcagggtcaaaatagagctggaattctttttacctayatttaaaaagtatgcagtgaaaagtattcaggctcaactagataaagaagctttacagagtgctttatcagcttcaataattaaaagatttcctgctaactattcaataagagtcttcttta

SEQ ID NO: 281598 - DNA, 589 bp, Homo sapiens
aggctacttgcctagaactcaaagtagtcagccttccccttacctctaggggcagacactgatgcaccgtaggacccctctaaacactgtgtgaaagtatcagtgtagcccatttattccataggcaagtaattcagcttcgagacattcaaagttttgttttgataaatcattgatgtaggtatatctaaatctaggcttataaatccaagttaaaatgtcaagatcttgtatgagatgtgaataggctttggtgatgatttctatttggtcatggttgctattctctttatcagtatattagaaaaaaatatracttttgcttctttctcttgggtctttgttattggataggaagcaattatatcccaagagatataaatttattacaggatttcagttttcttaagtttagcttactgcaccttgagtttcagggtgcatagaaatgatctttgacatgaacagatatgaatgaaaagatgtaaaaaaccatattatcattcgttccaataaacaattgttctaaactgtacctagtgcaaagaaagaatcctttaagatataactgctgtaaaagtgaaaaatt

SEQ ID NO: 281599 - DNA, 331 bp, Homo sapiens
gcgaatttgaacaaaagaaaaaatcgytatgtggcttaataaatccagttccttgatctcatctttttcacaggataaacactcctataatatttatatggggatgttactttataaatcttatggctaaaatattaatcagtatgttcacctaaactttggtaaagagtgctactttcattttcagcaaatggaagtaacagtgatatattttcagcatcttggtgacagacaggatggtatatcctgggactcttgacaactgaagccactgctctccatgaaacccatctgcagacctctcttttgataatttaagcccatcaatgac

SEQ ID NO: 281600 - DNA, 619 bp, Homo sapiens
cgtctcttttcgtaattacaaggctttgattaaaggatcaacaggtaacccaatgaaggacatagagaagagaaattacatgtaatttggtaatgtttttatgacttcctaatagtatattccacgagttagctgcatattttttaaaaaattaataaaatattacatacctacaaaagaatatgtgtgacacatatttaagttaaaagcataataagtaactacctatgaagatacgatgcaacataaaattataggccatgaaattatgaccttagctctgtaaaggaggttggctgcctagtctatcttccttcccattgcaaggattgtctctactccacctcaggaagatgacaatcccgcatgcgcttgaacattttacctagcagtcatggctccctggaaatagcatggtgggtttaaaatcaggagtatttgtcctttttgaatattacagaagtttgaggaaaaagtgaatctggatggtagccaaacttctgtaggactcatttcgtgtcttttaaatatgtttaatgtcttcatcattcacatttcaacagtaactcattttattgcctgaaaccaccctygtcaaggaggatcattctaatggaaa

SEQ ID NO: 281601 - DNA, 633 bp, Homo sapiens
acaagaggcagggtggcatttttatgaagatgaattttatagggttattgtgactattaaataaaacagtagatatgagactggcctttattgttagcattgataaagggcctagaattcaggaaagtaatcaggtcaaccggaagctgagttctaagcttgcattaggcagaaaatgagaaaactagtatttgttaagctcttggaatttattaggcaaatttctctggaggataaatgtactgaargaagttggttaccaggtgctctcaccttagccgggtggggtgagagaaacggcatcattttttggatagtggcaacttttccttcaaattaggagtcccttaaagtacctaatatcaagtcagggacaggtgagtgattagaccaaggacaatatgtctaaatagttatccctttaaaaatgggataatcccatgttttttctcccctttaggaatttttatatccagtgggccaatttgcagctataagtaacatgggccctgcagtttgaggaaggtgaaagcacctgaatctatgtggcatgatgagggggtgcaaaaacaatgatttttacatggaaatggcttcttgtaccactaggctatagttgaagaaattgtacct

SEQ ID NO: 281602 - DNA, 548 bp, Homo sapiens
attaacatattccaatccgttcatatcttggccaaagcaagtcatatggccacacctgaatttaacaggactgggaaatataatcttccatcatggatatgaactaattattgatgaatagttttacagtctacaacaattagcttgcaataagacaataaagatgagtgaatatgttaagtttctttgctttgggttggaattttatcaattaggtgtgagcacactagtggtttcatgctgataagaaacttgactatatctgtatatakgatttcaatgaaaatgggagttaaattaagtattactacataaactcaattttcttgagagatggaatctttcgatatgagggtcaatgtgggaaacaagtgtctttgcagggggaaatgtactatttactgacctaaataatctgaaatatttaattaatgtttgaaatgctaacagacactcattttattttattttttaattttttatagagacagggtcttgctatgttgtctatgcttgtctggaactccttgcctcaagtgaccctcctg

SEQ ID NO: 281603 - DNA, 370 bp, Homo sapiens
tttagtttcttctaattacagagctgggtgttttcatatgtattaagccaactattgttctcagctatcctctgagggagaacttttatcattctggttttacaaataaatgctttgacattaagtgagtttgagtaacttgcccagtttaccagcagaaagaagcagagtttcaatgcaaatctaaggaggtcttaactataaagcctatccaccatgattaaaggacctttatagagaaaggatacatttaagaagagttttaaaaaagmaggttttgggcaaggtaaaaatcaaattgtaattaaggttaataaaatagctttgctgcttgctctgtggcctggggcattcctactcttaggtctgt

SEQ ID NO: 281604 - DNA, 471 bp, Homo sapiens
acaataaccacagtaactctttgctctctatgagcaaatactgccatcttgtggaaattgcacgccaaacagaacattattgttccataaactcaaaagtttttcttgtgtttattaagaattttgcaactcaatttttgcattgtcatacatacgcgcacacacacacactcgcacacatacatacacattattgttgcttataattacaaggtacaattctttagattttcaagttcaatttaaaagggccagtgctttgggaagattgaagrgaacatatctctttgcttattataagaattcatcctattcatcttccaggcagtgcattatattttaccacacttgctttacataatctttaaattgggtttttgttaaatcataaaaaggaggccatagtgagaccattctgatggaatttccaggaacactagattttgtagcaaaatgttatgacagaactct

SEQ ID NO: 281605 - DNA, 491 bp, Homo sapiens
taaagagctttgcaggggtcttttgtatcctggctgctggaattgtcctctcctgcttcatagccatgctggagacgtggtggaacaagaggaaaggctcccgggttccatcaaaagaggtacttgattgagagatttggctctaaattgaatcaacaagcaggctgtatttccagggaggaccatcccagggaggataatgggttgggggtggtccttgttttttcgtttcttgaagattaaaaataaagttgtgaaatataaaaattggtaagatcaatatcaatttccattttaggatatccccagatcagtgaagaggagactatagtgtttgaaagacttagaaattcatataccataatgggctttgaaattctctcaaatctcagaatagattttaattcagtgatttttaaaggccatgattcctttgaccagttcacagagatacttaccaytttgtttcacttagttgtttaacttgtaag

SEQ ID NO: 281606 - DNA, 515 bp, Homo sapiens
tagacctatagaagctcttcgatggccccaagcttatcaaatccaaaatccacatcatgaaaacatccaaatttcaatgtttctcctttactgtggagtcagcttcacttcagggccatattaaattttatctcaatatctgaaagaataattacagaattacacatatctcttttatagtggcctgagcattgttttcatcaagaagtatgagacttataaattaaagaaaatctgaagctaaatcttgattaatttatcttatttccattggacyaaaggggtgaaaatgttttaactgatgaagtcatattcactaaagcttcacaaattgaaacaaaaaccaatctgaatttgctaaacaattttatgtgatggatagcttcaaagaaacttttaaagtttctataactagaacttggctgactaactgatgcctgaggcaactcctgaaaggatctactttaatgcacaataaatacggcttctcatttgcatatgaattgttgcacatt

SEQ ID NO: 281607 - DNA, 534 bp, Homo sapiens
agcagcagtccaggaggagcctctacaagtagtgatcccatgggttcttttactaatatattatttmtaaataatctgactttcaaacaagttaggtgttcacttactgagcaccttcttcattatgtcatcaaactgataaccctcaagttgtagctgctcacaggtgaaaatcaggctataaagtcaaaagacagagcttcaagtttgggtcttggtgcttaccatgactgtgggcaaatcacctactttctggtctttggtgtcattctttgcaaaataaaagtaaaaacattatatactgtacctacctcacagggttgttgtgagaatcaagtgaaaagtatgtgaaagaactttgtaaactttgttatttttaatcaccccatttccatgggttcttcatcttctctacgtaatacaatactataattcacctgaaggatgtactcttacccactctgttcctacctctcacccttacacaagtgaattgtacaaagaagatgaagtacatgccttcctggatatcta

SEQ ID NO: 281608 - DNA, 534 bp, Homo sapiens
agcagcagtccaggaggagcctctacaagtagtgatcccatgggttcttttactaatatattatttctaaataatctgactttcaaacaagttaggtgttcacttactgagcaccttcttcattatgtcatcaaactgataaccctcaagttgtagctgctcacaggtgaaaatcaggctataaagtcaaaagacagagcttcaagtttgggtcttggtgcttaccatgactgtgggcaaatcacctactttctggtctttggtgtcattctttgcaaaataaaagtaaaaacattatatactgtacctacctcacagggttgttgtgagaatcaagtgaaaagtatgtgaaagaactttgtaaactttgttatttttaatcaccccatttccatgggttcttcatcttctctacstaatacaatactataattcacctgaaggatgtactcttacccactctgttcctacctctcacccttacacaagtgaattgtacaaagaagatgaagtacatgccttcctggatatcta

SEQ ID NO: 281609 - DNA, 584 bp, Homo sapiens
tactatcttggttgatataattttctttttcagagatttttaatttttttcatgaatctttgatagattattttatcaataaaaattttgtcaataaataattttcctgattgaactccaagtccttctttggtgattaaagttggtaataaaaacaaattactttaattaatagtttgtctgtacttgcttttccaaggckgtatggaagggagacaatgttctaacacagataacatatgagtgagctcgaaacaattatagtaaaacaccagccaggggtagccaaggtgacgtttgataatgacacacagtgaacatttcaagttagcttcaatctacaaattgtacctctctttcaaaagtcagaggcaatcaactctgccactgccgcatcagaatgcagagactgcccagtgagagacagacactcaggatggaaaggaataatgcaggcagcattttgcagaaagaggtatctgaatgcagagaccagccactccccatagctggggagagtgccaggcttttcagagaactcacgttagaagtttcagcagtagatggaactgggccaatagaca

SEQ ID NO: 281610 - DNA, 636 bp, Homo sapiens
agaaacctaaccaagtttagaagacttgctggaagaagtaaagcttgaactaaagaccagtgagcaraagttggaaaaatagaagtggggagtataaaacatttcagacagagggacccagttctcatctgagaattgaaatgctaataagacctgaaagcaggttcaagtgattacagccctgaaagcaaaagttagaatggtaagaggtgaaatatataggtgggtagcaacgaagctatgctgtcttagagaccacactaagaaacctcatcttcagcctaacagaattagaagcgtctcagcttttactaagagttaagtcttaaatttgtttgcctggttgtgttctgttgtacacatatagagtgcttaatatacatgcatttaatacattctggatttgttttccacaataaattccagagaactgatacaatattctcctaagttgattatcagaattatgacttagaaacttccacccaaagagtcattctgtgatgtacattcaagtgatgccaagaatatagctactgtaggtgtatcatggccatagtgtatggattctgtcttcaaaacaaggattccgtcttcaaaacagattttttaaattgtctcaattgcaacaataca

SEQ ID NO: 281611 - DNA, 558 bp, Homo sapiens
tcgacccatacagtgtctctctgtataatgtctcaactttgttagacttccaaacaaatactcttttctgtgaaattatggttaattttatagctcatttttacttgatagtatataaactatgctttgggtcataacactttttatacttattaattttctaaatgtttatcgaatttccttaagttgttagatgttatatatccaagggcatttattaatctagaaaccaatataaccaaatagtcttctttttttgagtagaagacatttcctctgcaagttgaaaaatagtacttatctcatggtgacgatgtgagaacgaataagatgtcataattttttgaatgtctttaaaagaaatgatttcaaataacaggtaktatttaataaatttttgacttgaaaaatttctgtccactgggggggaaaacaaatcaacattgatttttctgtcaaatcaacaatgacagaaaaaaaaaaccaaattgacattgatttttagtatgtgattttactgaatgactaaaaacattttacatattattccctacttga

SEQ ID NO: 281612 - DNA, 585 bp, Homo sapiens
tattctattcatggtgctagttgttgccttaataccttggttctctctctctctctctctctctctctgtattattgttttataggccctatgagatttatgctttaatgagggtctattttgttgtattttgaggtttatttcaagatttagaactccttttagaagttcttgtagtgctggcttggtagtggtgcactctcagcatttacttttctaaaaaagactttatctttccttcatttacaaggcttagtttcactggatacaaaattcttggctgatagttgttttgcttagggaagttaaagataggaccccaaatcccttctagtttgtagggtttctgctgagaaatctgttaatttgataggttttcctttacaggttacctgatgcttttgcctcacagctcttaagactctttcctttgtcttgactttagataacctgatgattacatgcctaggtgatkatctttttgtgatgaatttcgtgggtgttctttgagctccttttatttcaatatctagatctgtagcaaggccagggaagttttcctcaattattccctcaaataagttt

SEQ ID NO: 281613 - DNA, 585 bp, Homo sapiens
tattctattcatggtgctagttgttgccttaataccttggttctctctctctctctctctctctctctgtattattgttttataggccctatgagatttatgctttaatgagggtctattttgttgtattttgaggtttatttcaagatttagaactccttttagaagttcttgtagtgctggcttggtagtggtgcactctcagcatttacttttctaaaaaagactttatctttccttcatttacaaggcttagtttcactggatacaaaattcttggctgatagttgttttgcttagggaagttaaagataggaccccaaatcccttctagtttgtagggtttctgctgagaaatctgttaatttgataggttttcctttacaggttacctgatgcttttgcctcacagctcttaagactctttcctttgtcttgactttagataacctgatgattacatgcctaggtgattatctttttgtgatgaatttcgtgggtgttctttgagctccttttatttcratatctagatctgtagcaaggccagggaagttttcctcaattattccctcaaataagttt

SEQ ID NO: 281614 - DNA, 616 bp, Homo sapiens
agtacaaaaacagacacctagaccaatgcaacagaatagagagcccagagatcatgctacacacctataaccatctgatcttcaacaaaatcaacaaaaacaaacaaggaggaaaggtctccctattcaataaytaatgctgagttaactggctagtcatatgtaaaagattgaaactggaccccttccttacaccatatacaaaaatcaacttaaaggtggattaaatacctaaatgtaaaacctaaaaatataaaaactctagaagaaaagctaggaaatgccattctggatacaggtcctagcaaatatttcatgatgaggatgccgaaagcaaatgcaataaaaacaaaaattaattaatgggaccttattaaagtaaagagcttttgcacagcaaaataaactgccaacagagtaaacagagaattcacagaacgggagaaaatatttgcaaactgtgcatctgacaaaggtctaatatccacaatgtataaggagcttaaaaaaattaacaactggaaaacaaacaaccctataaaaaagtgggcaaatagtatgaacagacacttctcaaaagaagacaaacatgtggtcaaaaagcatataaaaatcc

SEQ ID NO: 281615 - DNA, 616 bp, Homo sapiens
agtacaaaaacagacacctagaccaatgcaacagaatagagagcccagagatcatgctacacacctataaccatctgatcttcaacaaaatcaacaaaaacaaacaaggaggaaaggtctccctattcaataattaatgctgagttaactggctagtcatatgtaaaagattgaaactggaccccttccttacaccatatacaaaaatcaacttaaaggtggattaaatacctaaatgtaaaacctaaaaatataaaaactctagaagaaaagctaggaaatgccattctggatacaggtcctagcaaatatttcatgatgaggatgcygaaagcaaatgcaataaaaacaaaaattaattaatgggaccttattaaagtaaagagcttttgcacagcaaaataaactgccaacagagtaaacagagaattcacagaacgggagaaaatatttgcaaactgtgcatctgacaaaggtctaatatccacaatgtataaggagcttaaaaaaattaacaactggaaaacaaacaaccctataaaaaagtgggcaaatagtatgaacagacacttctcaaaagaagacaaacatgtggtcaaaaagcatataaaaatcc

SEQ ID NO: 281616 - DNA, 553 bp, Homo sapiens
agcttaaagacacagtcacaagcaaaaagcttcacaaaatttccagtatgtgtgggagtgggtaaccatagccaggctggaaacaacattccaacgaagtcagcctgtgcatgttggcatagcatgaccttctactggagtctgaccaaagtcctctgctggcattggtctgagaggaatgcaaacatatcttagacttcaattgactaagtttttttttttttaaatctaagccaaaggatatgtacaaacccttatttttgagtgactaagaaggtactttcaaaatgaataaaattcctaatttactgatggtatataaaaggaacacttaaatgacactgtaccatgtttgctctattaaatgttctgttgtattttttgaagtaaacttacatttgatcttgaggayacaaagatccctgatcactctgaaaactaactggccaaagaaaagtccaattggctaagggacaagaaaggatatcaaataagtctcattaaatgattaaaattctggtgattataaaatgtattaatttggtttttacta

SEQ ID NO: 281617 - DNA, 542 bp, Homo sapiens
tgccaacttaaatctgtaagtcaaatatataggaagacatttttggrtctaaaaattgcaagggagaggcaggtcatcatggcggacaggaggtaggactagattgcagctctgactcggatggacagaacagtgtgcagaggctcacattgtgaattttagtgccagattgactgcaagaatgaaccagcaatcctgagaggacccacagaacctctgaaggaagcagactgctcctgcaagacccacaagacactccagatcttgtgggtgccccaactgtggaagtgggaaagggagagtctcctcttctgaacacacacccccactggagaaactgaaggtctgtttgcagaaggtttcctaccttaacctgggggtgagtcaacttagctgaacaaaatacaggggtagaggaagcagcagaaaggccctgggagcttgccaggttcccaagcaggccagtcctacctggcaccacaggaatccatcaggagggtggccagaggagtggggcgaggtggggagataagcaccatagg

SEQ ID NO: 281618 - DNA, 542 bp, Homo sapiens
tgccaacttaaatctgtaagtcaaatatataggaagacatttttggatctaaaaattgcaagggagaggcaggtcatcatggcggacaggaggtaggactagattgcagctctgactcggatggacagaacagtgtgcagaggctcacattgtgaattttagtgccagattgactgcaagaatgaaccagcaatcctgagaggacccacagaacctctgaaggaagcagactgctcctgcaagacccacaagacactccagatcttgtgrgtgccccaactgtggaagtgggaaagggagagtctcctcttctgaacacacacccccactggagaaactgaaggtctgtttgcagaaggtttcctaccttaacctgggggtgagtcaacttagctgaacaaaatacaggggtagaggaagcagcagaaaggccctgggagcttgccaggttcccaagcaggccagtcctacctggcaccacaggaatccatcaggagggtggccagaggagtggggcgaggtggggagataagcaccatagg

SEQ ID NO: 281619 - DNA, 564 bp, Homo sapiens
tcagacacacctagccctgcccccacttgatggtccttccctgcttaccctggtagctggagacaaaggtcatataaccttgggagttctagggccccacccaccatgggttcctctccatactaccacagctgatgctgtctggaaagcaccacctcctggcaggaggccaaccagcacaaaaagagcattagaccaccaagctaagaaccttcatggagtccattgcactccctgccacctccaccagaacaggcattggtatccatggctgagcgatccatagatrgttcatatcacaggactctgtgcggagaacccccagtaccagcccagagctgggtagacttgctgggtggctagacccagaaaagagacaatcaccatactgctcacaggaagccacatccataggaaaaggggaagagtgctacatcaagggaacatgctgtgggacaaaagaatctgaacaacagccttcagtcctgggccttctctctgacagcctacccaaatgagaaggaatcagaaaaccaacaagcctctttaacacccacccccaaa

SEQ ID NO: 281620 - DNA, 564 bp, Homo sapiens
tcagacacacctagccctgcccccacttgatggtccttccctgcttaccctggtagctggagacaaaggtcatataaccttgggagttctagggccccacccaccatgggttcctctccatactaccacagctgatgctgtctggaaagcaccacctcctggcaggaggccaaccagcacaaaaagagcattagaccaccaagctaagaaccttcatggagtccattgcactccctgccacctccaccagaacaggcattggtatccatggctgagcgatccatagatggttcatatcacaggactctgtgcggagaacccccagtaccagcccagagctgggtagacttgctgggtggctagacccagaaaagagacaatcaccrtactgctcacaggaagccacatccataggaaaaggggaagagtgctacatcaagggaacatgctgtgggacaaaagaatctgaacaacagccttcagtcctgggccttctctctgacagcctacccaaatgagaaggaatcagaaaaccaacaagcctctttaacacccacccccaaa

SEQ ID NO: 281621 - DNA, 541 bp, Homo sapiens
gggcctattgctagttttatttggccaatttctctcttttggaatgggaatgtttacccaatgcctgtagcaccattgtatcttggaagtaaataactgaaataactggtttttgactttacagactcataggtggaagyaacttgccttgagtctcagataagactggactttggactttggagttgatgctgggatgagttaaaactaggggactattgagaatagtcccccagtgtgaatttgcagtgtgaaaagggcatgacatttggggaggccaggggtggaatgatacagtttggatgtttgtcccttccaaatctcatgctgaaatttaatcaccattgttggaggtgggcgctagtgggagatgttttggtcatgggggtggatccctcatgaatgccttggttccatccttgtggtaatctgtgagttctcactccattagttaccacaagatctgattgttaaaaagagtattgcccggtagggcatggttgctcacacctgtaatcccagcactttgggaggccaaggc

SEQ ID NO: 281622 - DNA, 541 bp, Homo sapiens
gggcctattgctagttttatttggccaatttctctcttttggaatgggaatgtttacccaatgcctgtagcaccattgtatcttggaagtaaataactgaaataactggtttttgactttacagactcataggtggaagtaacttgccttgagtctcagataagactggactttggactttggagttgatgctgggatgagttaaaactaggggactattgagaatagtcccccagtgtgaatttgcagtgtgaaaagggcatgasatttggggaggccaggggtggaatgatacagtttggatgtttgtcccttccaaatctcatgctgaaatttaatcaccattgttggaggtgggcgctagtgggagatgttttggtcatgggggtggatccctcatgaatgccttggttccatccttgtggtaatctgtgagttctcactccattagttaccacaagatctgattgttaaaaagagtattgcccggtagggcatggttgctcacacctgtaatcccagcactttgggaggccaaggc

SEQ ID NO: 281623 - DNA, 548 bp, Homo sapiens
aaatatgtccatttgtctaatagaaaatcttttctgttcttccttttcaagagtgttggctactcttaaaattttgctattttatatatattttagaaactacttcttagaataaatgagaaaccctgtaaatttttgatgattgcattgaatctatatattaatttaagaagaattcacataatttgtattttttcactactaayaaatattttccatttatttagaacttcctaaatatatttttatcaaaatttttgacagattgtataccttttgctcggtttcttcttaagattaacactttttgttaatatgttcaaagctatcttttaaaaaattgtataatatattattattggtatgaatattaaattgacttgcttacttcccccgggtttctatttctttctttctttttttcttttctttcattctttatttttttggacagagtctcactctgtcacccagcctggtgtgcagtggctccgtctcaaatggcaccatcttgctgccacctccgcctcccaggttcaagtgattct

SEQ ID NO: 281624 - DNA, 548 bp, Homo sapiens
aaatatgtccatttgtctaatagaaaatcttttctgttcttccttttcaagagtgttggctactcttaaaattttgctattttatatatattttagaaactacttcttagaataaatgagaaaccctgtaaatttttgatgattgcattgaatctatatattaatttaagaagaattcacataatttgtattttttcactactaacaaatattttccatttatttagaacttcctaaatatatttttatcaaaatttttgacagattgtataccttttgytcggtttcttcttaagattaacactttttgttaatatgttcaaagctatcttttaaaaaattgtataatatattattattggtatgaatattaaattgacttgcttacttcccccgggtttctatttctttctttctttttttcttttctttcattctttatttttttggacagagtctcactctgtcacccagcctggtgtgcagtggctccgtctcaaatggcaccatcttgctgccacctccgcctcccaggttcaagtgattct

SEQ ID NO: 281625 - DNA, 548 bp, Homo sapiens
aaatatgtccatttgtctaatagaaaatcttttctgttcttccttttcaagagtgttggctactcttaaaattttgctattttatatatattttagaaactacttcttagaataaatgagaaaccctgtaaatttttgatgattgcattgaatctatatattaatttaagaagaattcacataatttgtattttttcactactaacaaatattttccatttatttagaacttcctaaatatatttttatcaaaatttttgacagattgtataccttttgctcggtttcttcytaagattaacactttttgttaatatgttcaaagctatcttttaaaaaattgtataatatattattattggtatgaatattaaattgacttgcttacttcccccgggtttctatttctttctttctttttttcttttctttcattctttatttttttggacagagtctcactctgtcacccagcctggtgtgcagtggctccgtctcaaatggcaccatcttgctgccacctccgcctcccaggttcaagtgattct

SEQ ID NO: 281626 - DNA, 548 bp, Homo sapiens
aaatatgtccatttgtctaatagaaaatcttttctgttcttccttttcaagagtgttggctactcttaaaattttgctattttatatatattttagaaactacttcttagaataaatgagaaaccctgtaaatttttgatgattgcattgaatctatatattaatttaagaagaattcacataatttgtattttttcactactaacaaatattttccatttatttagaacttcctaaatatatttttatcaaaatttttgacagattgtataccttttgctcggtttcttcttaagattaacactttttgttaatatgttcaaagctatcttttaaaaaattgtataatatattattattggtatgaatattaaattgacttgcttacttcccccgggtttctatttctttctttctttttttcttttctttcattctttatttttttggacagagtctcactctgtcacccagcctggtgtgcagtggctccrtctcaaatggcaccatcttgctgccacctccgcctcccaggttcaagtgattct

SEQ ID NO: 281627 - DNA, 556 bp, Homo sapiens
ctttattagtttttaaaccctaagaactgaataactataaaatgaacatgtcaattataacacatttaatggaaaaaatgacctttgcaaaaacttttttattttttctaaacattcctatcattttaaaagcacatattaatgcagggatcatcaatgcaaagtcgttgagaatgtaccataccctcaggtttgtaacaatctgaatctagtctttgtatttaatctgtcaggattaccactaattagagaagcatgttcacatgtagatcaaataaggtataaagcaacatgtattgtatgatataggcaagttcaattctcacaaaagccacttcctctctgaatttgagaagttaccaacctataactcatatggaaattataatgaacttttacctcctaaaattttgagtgcttgaaaatgaaagacaagctcaattagaaggcagcacaattttcagaagattgtaagtcaccaatatataaaaatctttatttttattatcattattataaycactagtactaccgaccagcaaaataaaaatcgccc

SEQ ID NO: 281628 - DNA, 584 bp, Homo sapiens
agtccttttatcataatataatgtccctctttgtctttaactgcaattgctttaaaatttgttttgtctgatataagaatagctactcctgctcacttktggtgtccatttgcatggaatattcttttccacccctttatcttaagtttatttgagtccttatgtgtcaggtgagtctcttgaagatggcagatacttggttggtgaattcttattcattctgccattctgtatcttttaagtggagcatttagatcatttacattcaatgttagtattgagatgtgaggtaccattctattcatcatgctatttgttgcctgaatatcttgctttttttgcattgtgttattgttttataggtcctgtgagatacatgctttatggaaatcctattttggtatattttggggatttgtttcaagatttagagatccttttagcagttcttatatcgctggtttggtagtggtgaattctctcaggatttgtttgttcaaaaaagactattcttcatttatgaatcttagtttcactggatataaaattatttgctgataattgtattgtttaaggaggctaaa

SEQ ID NO: 281629 - DNA, 632 bp, Homo sapiens
caagctttaagaccagaagggacaatttttttttttttcttgagacacagtctcactcttattgcccaggctggagtgcagtggcgccatctccgctcactgcaacctccgcctctggggttcaagcaattctcctgcctcagcctcctgagtagctgggattataggcatgcaccaccatgcccagytaattttttgtatttttagtagagacggggtttgatgttggtcaggctggttttgaattcctgatctcgtgatccgcccgcctcagcctcccagagttctgggattacaggcatgatccaccttgcccagcccgacaatttttatatttattttaaaaactgtctatggaacactgggtcagtattatgtaccaataaaagggtcaatacaagtagaagacatagcaaccataaatatgtatgcactaatcagagctgcaaaatatgttaatcaaactgatataaatgaagaaaaatagacaaatccacaattatggttgaaaacttcaatatagctctctcaaaattgataaaacaactagtcagaaaatcagcaaagatacaaaagaagacaacagtattatcaatcaataagtgataatcaacactaataaacaccaacag

SEQ ID NO: 281630 - DNA, 632 bp, Homo sapiens
caagctttaagaccagaagggacaatttttttttttttcttgagacacagtctcactcttattgcccaggctggagtgcagtggcgccatctccgctcactgcaacctccgcctctggggttcaagcaattctcctgcctcagcctcctgagtagctgggattataggcatgcaccaccatgcccagttaattttttgtatttttagtagagacggggtttgatgttggtcaggctggttttgaattcctgatctcgtgatccgcccgcctcagcctcccagagttctgggattacaggcatgatccaccttgmccagcccgacaatttttatatttattttaaaaactgtctatggaacactgggtcagtattatgtaccaataaaagggtcaatacaagtagaagacatagcaaccataaatatgtatgcactaatcagagctgcaaaatatgttaatcaaactgatataaatgaagaaaaatagacaaatccacaattatggttgaaaacttcaatatagctctctcaaaattgataaaacaactagtcagaaaatcagcaaagatacaaaagaagacaacagtattatcaatcaataagtgataatcaacactaataaacaccaacag

SEQ ID NO: 281631 - DNA, 576 bp, Homo sapiens
ggattcctgtgttatttgctaaatatgccaattctagttttaatgcgcttctaaaagactcgaatgatgagccatttatgtattgggttctgtgtgggacgagttgtgacacttcaaacttctcagagcctgcaagttttcactatttgggactctccttctgtcaaactgcatactctacagggggtgtcccasgtggtgtgggtctgaaaagtcacgccagcacctatcccttgttaggtgaccatgatttctcattaagacacatgggcatgtgcagtatcctgtacaacatggaagagtgggaatcttttgcactgggaagctccgagacttcctgatttgggttggagtaaaagagtattgtcaggaagtgctgaagaggtgcctctccccttttgcctgagttgtttatcagtgtctggttggtaaatataaatatgtgaaagtagttgtgcaaatcttctggagttaaaagaaagtgaatggggaaaaatggacattttctgaattacacctttattcttctatgaaaagacactaaaagcagcaagaaataaagagcacttagtttca

SEQ ID NO: 281632 - DNA, 576 bp, Homo sapiens
ggattcctgtgttatttgctaaatatgccaattctagttttaatgcgcttctaaaagactcgaatgatgagccatttatgtattgggttctgtgtgggacgagttgtgacacttcaaacttctcagagcctgcaagttttcactatttgggactctccttctgtcaaactgcatactctacagggggtgtcccacgtrgtgtgggtctgaaaagtcacgccagcacctatcccttgttaggtgaccatgatttctcattaagacacatgggcatgtgcagtatcctgtacaacatggaagagtgggaatcttttgcactgggaagctccgagacttcctgatttgggttggagtaaaagagtattgtcaggaagtgctgaagaggtgcctctccccttttgcctgagttgtttatcagtgtctggttggtaaatataaatatgtgaaagtagttgtgcaaatcttctggagttaaaagaaagtgaatggggaaaaatggacattttctgaattacacctttattcttctatgaaaagacactaaaagcagcaagaaataaagagcacttagtttca

SEQ ID NO: 281633 - DNA, 482 bp, Homo sapiens
gtgagaatgaactaatacagctactcttccatatcctgtggttcctgcattaataatccttctctcagaagaaaagaacccagaactccctatccctcacctcaccccttgcattagaacacatggaatgaagctggggcytaagagtaggttaatagagagcacactgctgcacctgcttccaatcaacaggcacgtgagactcctaactccttataggttgtctctctcagctcaccagaatttccggagcccaagagctgtgctcgtttagactgaaggagaaaaagcaggaattagggttatgactaaaatccctttttatatgagatattaaaggaatgtcatcttttctcttttttctcttattttaccccagatagttaacataaacctttctgctctgacaaagatttactactctgataagtgcattttacttttaatctaaaatgtttcttaatgaaataactgactagtgt

SEQ ID NO: 281634 - DNA, 556 bp, Homo sapiens
atggaatgtttttctatttcttgatgtcgctgattcctttgagcagtgttttataattctcattgtagagatctttcacctccttggtttgctgtattgctaggtattttattctaattatggctattgtgaatgggattatgttcttgatttgactctcagcttgaatgttgctggtgtataggaatgctaccaatttttgaacattgattttgtatcctgaaactttgcttaagttgtgtattagatgaaagagcttttggatagagatggtggggtttcctaggtataaattatatcatctctgaagagagagagagtgattttctctctttctatttggatgccttttatatctttctcttgcctggttgctctagctagtacttccagtactatgttgaataggagtgatgagagtgaggatccttgtcttatgctgattttcaaggggaatgyttccagcttttgcccattcagtatgatgttggctgtggatttttcatagatggctcttattattatggagcatgtttcttcagtgcctagtttgttg

SEQ ID NO: 281635 - DNA, 566 bp, Homo sapiens
tctgtttatattatgaaagtgaaaacagaacttatttctaccaatctaaaattatcttacaaaatatttatttaggaataaaacattcaatctcatgccagttatgtaccaaaggtttcaaaatgcatgtagcttgaattggcaggagtctcattaaagaccaccagcaagaaagctaaataaaataaaaactttaaatagtttttatttaaaaarcagtttaactctttatagaaaattctcaaagaatgtcaaaagaagattccatgcataattacagtaaacttctgtcctagctcaccaccattttcccccaaattgtcctttatctttctcaaccttgtatctttctattctctttttctaaaagagaaatcctgaaaaatcttcttccaactcactctgtgtagggtgcatgtggtttcagcctatcattcctattggccttctgctaagaactcttactcttttctaagtgaagtaattctgagatctcttgcttctccactcatcagccaggataagtttcttaaaacagagatcagattatatcactcctttaccag

SEQ ID NO: 281636 - DNA, 580 bp, Homo sapiens
  misc_feature (1)...(580): n = A,T,C or G
ttgatacaatattaaagaacatagtcttatatttaatttgatttatcaaaaacatttacatgaagaaatctccacacctatgtgattttattgtggaatgccataagatatttaataaataaatattaatttcacacaaactcttycacaaaagaaaacaaaagcagcactntccacaacatcttataaggcgactaaagctcataagagaacctgacataccatttcaaaaaataaaattatatgccaaaatccctcttgaacgtatatgcacaaatgataatatgtgtaccaggcaagatcaggcgatatattacacaggtgatacatcacgaatgtgttagactgtgtttgcattgctatgaaagagtacctgagactgggtaactaataaagaagaaaggtttaattggctctctgcaaattgtacagggaattgtggtgttggcatctgcttcttgtgagggccgggggggggtgacaatcgtggcagaaggtgaagggggaggagaggggaagcaagaaagagagaggaggagtaagacagagagagggagagttgttatgctcttttatttat

SEQ ID NO: 281637 - DNA, 561 bp, Homo sapiens
ctggctgggctggaaatcatgaatttgtgaaggcaccacacaattttaatgtctcctttaaacagctcttcacagcactaagctgatggatggattcaaycaaagatggggctttgtattagaaaataagtgttagaatataattgttgttattgcatattaaatatttaaattatatttcccaaagatctctttggaaaggtaaaagaaacaagccatataaaaaccctgtagttaatagtattgataggccttagtatttattggaatctcagaaaattttaaataaatcaatagcaaataattaggaaaaccccataagattaatttaaaaagataagtctcggtagttaaaatctgacgtactgtctgttaaaaattaaaacatgtattaaagtctctacagaaggaagccagtatttacttccaaaggcacaatgagagagtttgcaggctgctttagaaacaatggtcatatgcagtgacttcatgagtgacagtcccagaactgacaaatgtatccacacaaataatttttaatatgcacttttcaaaaaagaa

SEQ ID NO: 281638 - DNA, 364 bp, Homo sapiens
ataaagaacagcaacatttcttgaatatttaagatgtggctacaaatgtatatccacaggtgtagctttcatccaggattgctgatatactgcatcacctaagacttatgaaatgcctaaaactgtgacccatgtttcaaamcaatggaaaaatagctatgatcctcctggagaacagtgtgttgattgagggaatggagtgacttggtgaaggactgagtttgaaagagtaatatcagcactttcaaactactaaggggttgaatacaggatggtgataaaaagtatgaataaaagaataattattcttttattattgctaatcttattagtaaatacaatattataggtatttgctaataag

SEQ ID NO: 281639 - DNA, 503 bp, Homo sapiens
aatattagaaaaataattaattacattaattatatgttatataattatcctgatagaaaaaagaaaaatatttgatacaatttaacttgcaattatgattgaaaaaaaacctctaagcaaaccaagaataatggaaaactttcctaatttatcaaagagcatctatagaaaaatctataaacatcctacttaatgataaaacactgcaagcactcaccttactttcaaacaaaaaaaaaagaaatagatttctattcaatatggatcctatccagcattgcaaagcaagaataataaataaaaggcatgaaaacaagaatggaagaaaataaaaactgtcattagtcgtagacaatatgagtgyccacattaaaaaataggaaagaatatacaaggaaattattaaaattaattggaaagtaaattaaattgctaggtcaaaaaatcagtacattgaaattaattacatttgtatataccagaaataaatgtttaaaatagat

SEQ ID NO: 281640 - DNA, 626 bp, Homo sapiens
caataaactcaactttgtctcttggtaataccggaggaggccaatttaaacaacatgtacatttatacagaaacttaatttatgtcagagctggagcagaagatcagtgaggaacaaaattattgactttcaatacaaagtgctgaaataattaatttcatcattatagaaaactgaaaacttgggcccatgtctaccatgtacgataatcaatttcaaaggatattaaagacttatgtgcaraaagtaaaactataaaaatgttagaagacaatatagaatatttttatgatctccagataagttatttaaacaagatacaataagcccaacacataaagaacaagattgatgaatttaattttattaagattaaaaattctagtttatcaaaatataaagaaaatgaaaaggcaaaccataaatttagagaagaaagttaacagcacaaataacacaaaaaattaaaattgagaatacagaaataactcctactcttcagtaaaaaagaaaacaaaccaattaaaaaagaaacccacttagcaggagaagaaataataaataggcacttaataggagagaaaaatacacattaaagatgctcaattttacttgtaataagaaaa

SEQ ID NO: 281641 - DNA, 507 bp, Homo sapiens
agaaataaaatctaatcaaggtaaaagaagaaaaaaaaaggtragagaaaatttaagaaattgattcattaatttagaaagccagcatgtcatctgacatgtcagtagaaagctctctcattatcatctctaccccaggtcatgccaaaggctttcaaagctgttgtgtattacccagccattcccagagaacagatgttcttggtgagaaaaactgcccccaaaccttgtcccagcttctcttaggtctttttcttctcccctgcaactgtagcccaaagcagcctctgctttggccacatcagcccttctgagatttcggcacaaggccatctgttttattgcgtcagcttgctcttcagggttttacagatcccagcacagacattggagtggccaaatcaattaccttggcctgtcagaaatatcaacactagctcttgcctgtaaacaaggaatagtacaatttgcttaaatcccatcttaggcacccaatcagccatgtga

SEQ ID NO: 281642 - DNA, 1015 bp, Homo sapiens
agaaataaaatctaatcaaggtaaaagaagaaaaaaaaaggtaagagaaaatttaagaaattgattcattaatttagaaagccagcatgtcatctgacatgtcagtagaaagctctctcattatcatctctaccccaggtcrtgccaaaggctttcaaagctgttgtgtattacccagccattcccagagaacagatgttcttggtgagaaaaactgcccccaaaccttgtcccagcttctcttaggtctttttcttctcccctgcaactgtagcccaaagcagcctctgctttggccacatcagcccttctgagatttcggcacaaggccatctgttttattgcgtcagcttgctcttcagggttttacagatcccagcacagacattggagtggccaaatcaattaccttggcctgtcagaaatatcaacactagctcttgcctgtaaacaaggaatagtacaatttgcttaaatcccatcttaggcacccaatcagccatgtgawagaaataaaatctaatcaaggtaaaagaagaaaaaaaaaggtaagagaaaatttaagaaattgattcattaatttagaaagccagcatgtcatctgacatgtcagtagaaagctctctcattatcatctctaccccaggtcatgccaaaggctttcaaagctgttgtgtattacccagccattcccagagaacagatgttcttggtgagaaaaactgcccccaaaccttgtcccagcttctcttaggtctttttcttctcccctgcaactgtagcccaaagcagcctctgctttggccacatcagcccttctgagatttcggcacwaggccatctgttttattgcgtcagcttgctcttcagggttttacagatcccagcacagacattggagtggccaaatcaattaccttggcctgtcagaaatatcaacactagctcttgcctgtaaacaaggaatagtacaatttgcttaaatcccatcttaggcacccaatcagccatgtga

SEQ ID NO: 281643 - DNA, 507 bp, Homo sapiens
tgctttggccacatcagcccttctgagatttcggcacaaggccatctgttttaytgcgtcagcttgctcttcagggttttacagatcccagcacagacattggagtggccaaatcaattaccttggcctgtcagaaatatcaacactagctcttgcctgtaaacaaggaatagtacaatttgcttaaatcccatcttaggcacccaatcagccatgtgaacttgatcaaggttcttaaccttaatgatccctggagttctcagcagaaaaatcagatataatgatacctagatagaataatatctggcctctgataagttggaaatttttgattaaagtactagcaaatgatacaggttaaagaaatagttattgttttagtatttatcatttctaatgttattatttgttattatttgttataacagtggttcattccaaatatttgcatatcttctctgacttgtgccaagatatctgccataacaaagtaccacaaactgggta

SEQ ID NO: 281644 - DNA, 507 bp, Homo sapiens
tgctttggccacatcagcccttctgagatttcggcacaaggccatctgttttattgcgtcagcttgctcttcagggttttacagatcccagcacagacattggagtggccaaatcaattaccttggcctgtcagaaatatcaacactagctcttgcctgtaaacaaggaatagtacaatttgcttaaatcccatcttaggcacccaatcagccatgtgaacttgatcaaggttcttaaccttaatgatccctggagttctcagcagaaaaatcagatataatgatasctagatagaataatatctggcctctgataagttggaaatttttgattaaagtactagcaaatgatacaggttaaagaaatagttattgttttagtatttatcatttctaatgttattatttgttattatttgttataacagtggttcattccaaatatttgcatatcttctctgacttgtgccaagatatctgccataacaaagtaccacaaactgggta

SEQ ID NO: 281645 - DNA, 335 bp, Homo sapiens
tttgaacttggttacctttttaaagactctgtctccaaatatagtcacattctaagtcactgggggataggacttcaacatataaacttaggggcacatatctcagcccataacactgggacaaagaccaattttcctggggaaccatcctaaaagattccttaggatgtatctctatcctaagatggaaattttgstgtgagaatgtcagtagcaattccctgacctggaaggaccatggaaggtcttcagtgacaacttttgagctgctgtatcaaaacccacctgctgagacaaacagagcttttcagttactcagatcaataaattccttt

SEQ ID NO: 281646 - DNA, 335 bp, Homo sapiens
tttgaacttggttacctttttaaagactctgtctccaaatatagtcacattctaagtcactgggggataggacttcaacatataaacttaggggcacatatctcagcccataacactgggacaaagaccaattttcctggggaaccatcctaaaagattccttaggatgtatctctatcctaagatggaaattttgctgtgagaatgtcagtagcaattccctgacctggaaggaccatggaaggtcttcagtgacaacttytgagctgctgtatcaaaacccacctgctgagacaaacagagcttttcagttactcagatcaataaattccttt

SEQ ID NO: 281647 - DNA, 1183 bp, Homo sapiens
acttccttggctgtacacacaatttgtatgcctgagaaactcaatcactgaagagagagatgcatatcgaaagcatgggtccgtggtgactatatataatagatcttctcagcaaaacaatcagaattaggaagtaacagctatttatctttcatgataagggccaactctagagattcatgtcatggtatttaagtaatcattacttcaggttttatttgtatttcaattttctcctagctttctatgctacatacttmagttgccaagaaaactcaaaagaacaagattttctgaatgatttccagtgtttcttcctccttgaaagaaattgggaaaatcatgttcttataaaatactaaagcattcttttattgattctgtatgccaggaaaacagtgctaaggaagtttcctcaaggaaagagttattatgctgccaaaatagcagagctgaagagtcaaagttcagagatacaatatcatcttgtctcaaaacatttccttttttttaaaattatactttaagttctgggatacatgtgcagaatgtgcaggtttgttacataggtattcacgtgccatggtggttwacttccttggctgtacacacaatttgtatgcctgagaaactcaatcactgaagagagagatgcatatcgaaagcatgggtccgtggtgactatatataatagatcttctcagcaaaacaatcagaattaggaagtaacagctatttatctttcatgataagggccaactctagagattcatgtcatggtatttaagtaatcattacttcaggttttatttgtatttcaattttctcctagctttctatgctacatacttcagttgccaagaaaactcaaaagaacaagattttctgaatgatttccagtgtttcttcctccttgaaagaaattgggaaaatcatgttcttataaaatactaaagcattcttttattgattctgtatgccaggaaaacagtgctaaggaagtttcctcaaggaaagagttattatgctgccaaaatagcagagctgaagagtcaaagttcagagatacaatatcatcttgtctcaaaacatttcctttttttwaaaattatactttaagttctgggatacatgtgcagaatgtgcaggtttgttacataggtattcacgtgccatggtggtt

SEQ ID NO: 281648 - DNA, 511 bp, Homo sapiens
gctcagacattttatttttttaaggtattaaaattattgaacaccagctccccaaatatcagcaacacaacctgttgagaagacgaaactcattgtatcactcaatgtagcaatggagaacaccaccttacctttcataaccccttggggatgggaaggcaaagtcaaaatttattgagcattgaaagtgtcactgttggaggttgtccatgttctttgcatcttgaacaaagaattggacaaaagacacaaacaaatcaaggaaggaatgaaggatttattgaaaatgaaagtatactccacagtgtgggagcgggctgagcataagggcccaagggccccagtacagaatttgggggagtttaartaacctctagaggattccatggttacttccatatgccctatgtaaatggagaggaagaattaaagttacaaaattatttacttggcctatgcccttaggagaggatatttcctgtcatagctaaagtgtgaattggccttatgt

SEQ ID NO: 281649 - DNA, 571 bp, Homo sapiens
ggaggttatgctggcttgtttcataaagatggagaagaagccagcacgagaatcatgagcacagcaattacctgtgagagagtgttctcagcttggaaaagccaagtccaaatgtcttacggcaggaaagagtttagtttgtccaggaaacaaggcctctgtggctaaaatgcagtaagtgatgatggcattgatacaaagtgagtttcaagaagttttggcaggaatcaagtaatatcaggccttgtaagcaaggtcagcttcatcacacagggttctatgcatctgctttaatctstgctgttgctgtcttgggattgttaatcatgtttgaacaaaggatatctcatttttattttgcaccaaagcctacaaattatgtagctggtcctgctggtaaatcatagcaaggatttcaattcacacagtttatgagggtgagtttttttttttttttttttgcttttgtttttctcctctcacattcaagaaacctgtaagtaatcaggccagggttagtgtgctctctgtggtaccagaacccccaattccttcaatcttgttctgcagt

SEQ ID NO: 281650 - DNA, 1134 bp, Homo sapiens
gtcctgctggtaaatcatagcaaggatttcaattcacacagtttatgagggtgagtttttttttttttttttttgcttttgtttttctcctctcacattcaagaaacctgtaagtaatcaggccagggttagtgtgctctctgtggtaccagaacccccaattccttcaaycttgttctgcagtacagggctttcaatcccaagaacaccctggagtataaactgactgctagagctgcagccattacagtctctgtccagctgtgctcaagaacactgcctaaattaccataccacttccacctacatcccattgacccattctagaaaataatcatgcctagctgcaggtgaggctgagaaacaaagtcttaattccaggaagccacgtgcccagctaaaaactgagatttcttttcccatatgaaaaggagaaagagatgttaagggactattaccaggcctgctatatactctcacatattcctttgactgaaataatcattcatttatatattcattcaacattaattcacctaaaaatgttattgagagcctattttatgtcaggctgtatactagggacwcccataccctgttttctgttctcatctatttaaaaaawaataataataaaaacaaaaattttaaaggatctgctattactgtcacttcaaatgctgatataatattcatttcagtaagattagtaataatttgtatcattctatagatctcatgcattgtgcatgcacttccctttcttgatattaatctaatgaaacaactttatctctttttgcttgtaatagcttatagcgtccatttttcttcctgaaaaatagaagtgttagaagtgaaatattgtaggtgaattgatagagacaaaatagaaagataactacatttattttttaaatacatggaataaatatgtaatctctctagacatttcataatttaaaaattattccatattttagaagactcattctatgacatttatgcaggattttcaattgtgtgatcatatagtcataggtttccagaaaaaagaatttagatgacattttaataacctttggcataaaactgcataaattaggagaaacccttctgtttactcctacccaa

SEQ ID NO: 281651 - DNA, 547 bp, Homo sapiens
cccataccctgttttctgttctcatctatttaaaaaaaaataataataaaaacaaaaattttaaaggatctgctattactgtcacttcaaatgctgatataatattcatttcagtaagaytagtaataatttgtatcattctatagatctcatgcattgtgcatgcacttccctttcttgatattaatctaatgaaacaactttatctctttttgcttgtaatagcttatagcgtccatttttcttcctgaaaaatagaagtgttagaagtgaaatattgtaggtgaattgatagagacaaaatagaaagataactacatttattttttaaatacatggaataaatatgtaatctctctagacatttcataatttaaaaattattccatattttagaagactcattctatgacatttatgcaggattttcaattgtgtgatcatatagtcataggtttccagaaaaaagaatttagatgacattttaataacctttggcataaaactgcataaattaggagaaacccttctgtttactcctacccaa

SEQ ID NO: 281652 - DNA, 561 bp, Homo sapiens
actttgaaatgcatcaagaaataagatggattgattgatacctaggaggatggacagacaaatgaatagagaataaagcaatacagtaaaatgttaatggtagaatctaggtgatgagtatacagatgttcactacaatactattttaacttcgcggcatgtttgaaatttttcataatcaaaattttttaaaataggagagaagggtcaaccttgaaagaaagatatctataatctaatggtgattttgtcaagaaatcttagtctgctgatgtgccattttatatatttaaatatatgaagacatcacaaaacagcattcaagtctcaatattcatctgaggaatactgagtttcttatcgtgtatatcttcattgtgagccttactgagctaaataaaattccagaaagtcatttttctatacaatacaaacatatcytttgatttttattttttattttaaagtacaccctactaactgatgatgttatttttttaaattagaaaccaaaaagaaatgaaaacattcttagttctagaaatcacctaatggttacta

SEQ ID NO: 281653 - DNA, 466 bp, Homo sapiens
aacagccccgtctgtgcagaaataatgcacacatccatctatatgccaagggaatgaagggagcatgtgctgtttcccaaactgataaaccccatgtctgttcagtacataggttctgtacatttcctttatagttcttcatacctgtaatagttaatgttcactttctctgttargtctgagattgtattattcactaccatattccctgcacctagtaaactgcctgggaatatgctagaggggaggaaccgacatagttctcagtaaatctagtctgactaaagaatgaaggttttaaacctgaattatatgggtttaaacgggtcagcattttactagctctggagacataatattttaattgtacacaaagcaatatttgattgaagagattaatttccagtggcttttcttacatggtagttttggccagctttgatcctttttgaacatgcataggagt

SEQ ID NO: 281654 - DNA, 466 bp, Homo sapiens
aacagccccgtctgtgcagaaataatgcacacatccatctatatgccaagggaatgaagggagcatgtgctgtttcccaaactgataaaccccatgtctgttcagtacataggttctgtacatttcctttatagttcttcatacctgtaatagttaatgttcactttctctgttaggtctgagattgtattattcactaccatattccctgcacctagtaaactgcctgggaatatgctrgaggggaggaaccgacatagttctcagtaaatctagtctgactaaagaatgaaggttttaaacctgaattatatgggtttaaacgggtcagcattttactagctctggagacataatattttaattgtacacaaagcaatatttgattgaagagattaatttccagtggcttttcttacatggtagttttggccagctttgatcctttttgaacatgcataggagt

SEQ ID NO: 281655 - DNA, 543 bp, Homo sapiens
aagcaggtttgagtaggttatctattactacaataaaatagtaagtaatacactgcttcatgmtaaggatttcaccttgattttaggacaactagaagctctctctgagctgggtgacacagctcataatattgtctccttcttttcatgacctgctcttcaggacatcacctggacaaatcccagtgattttttacagttcagccctgaagcctcaaatcccaagtcagtatcatctttcgcaggactgctgacatctctgcaatctggagcttataaagacactggggtgaccgaggaatagctgtatatcatccccagggttttcacatcaaaggacccagtggaggcctcatcctgttcaaaatgacaaattaaaatgaatcccagagctttattctctaagaacataagacatgttttctttttgaacatttcattgcactgtcttcagaatcaagctctctaaagaatgttattataccttgagcttcttgacacatttcctaataatttgaagcttctgacatttatacaataaaa

SEQ ID NO: 281656 - DNA, 360 bp, Homo sapiens
atagggaagctacatcttaaccagagtaattacatttgctaagcagaatgggatgagcaagagctatgtaaaagaataaaataaatccaccacaaaaccaagaacttctacattcattctgatatataaaccttgytgataaaaaagaaaaaaaaataaagggaataaaaagaagaaaggctcacctccagttacaactcccaggagaatgacagctattatttcctattgagttggtacttaccacacagagcctgaacaattcatacagaaaaataaaccataacattcctgtttattattactttagctgagaggtggtgacattaaacagttctgcactgctgctataaatcagca

SEQ ID NO: 281657 - DNA, 360 bp, Homo sapiens
atagggaagctacatcttaaccagagtaattacatttgctaagcagaatgggatgagcaagagctatgtaaaagaataaaataaatccaccacaaaaccaagaacttctacattcattctgatatataaaccttgttgataaaaaagaaaaaaarataaagggaataaaaagaagaaaggctcacctccagttacaactcccaggagaatgacagctattatttcctattgagttggtacttaccacacagagcctgaacaattcatacagaaaaataaaccataacattcctgtttattattactttagctgagaggtggtgacattaaacagttctgcactgctgctataaatcagca

SEQ ID NO: 281658 - DNA, 521 bp, Homo sapiens
ttccactatgtggctgccctggagtctctgagcctactctggcttgagaggctgcccgatttgcgaattgttcattgctcaattaaactcttaaatttaatgtgactgaaatttttyttttaacaccttacagggctaaatatcccttttctaaattggttctaagtcctggaggcattttggtgtcacctaaaggacttttaaaaatacctatgcctaggttcaattccaagagtttctgatttcactggtctatggcagaactgtattattgtagtctttttaaatctacccaaataattttaatgtataaccatggttgaaattatgcttcttatgcttctaaatgcacgggcatttagccagaaagaaaggaaaaatgatatacggagcaatagcagcaagaccttctcacccttgagcctgaaatgaggaagagcaacactatttttttttccatgaaggatgcaggtggaaagttaattcggcaatacagagaccaaacagcaaaaaaagggagt

SEQ ID NO: 281659 - DNA, 499 bp, Homo sapiens
ttcgtttgagccacttagacaccttgcttctagttaagcagtttcatacagaactctattttccattatgaaatcattgtcgttgcttgagggacaaaagatcttctcagcaaatgaaaaacttgattctaatcatttactctaatcagtaattaacattttgccaaactactaaaaatacaatgacacacagaagaacattttcatgagggtttatgagtgtttcccagcctgtttctctttaatttttaaaactctcacaataattgtcttaaagattctatcaaactacctttctcggtctctgtgaaatacaagtcattaagaagacaragactatttataaatggctagtggacatcaatattctgtccattcattgagtatatatgggcctttttctttgttttgttttgagtcccaaagaacaagacaaagataaaggtgaacacaaagcagtcactctttgccgaagagtgggatgatatcagaggcagcc

SEQ ID NO: 281660 - DNA, 502 bp, Homo sapiens
gagtacaattttccccattgttgacataatttatatattaaaatcatatgaagatgttgtttcmaagcatacatatgcagtatccacgcctaggattctgatttagttgtctgtgttggggatgaagcatgtatgctttttaaaactttctaggtgcttctcaactagaccactaagtgaaaaccaatggtgtaaagatttattttgcatacttttttaaaatgacatttaaaaaattttaagctacatctccactatatattttattttattttttgtttgtgtttttttttgttattatttttaagacaaggtctcattctgttgcccaggctggagtgcagggccaggatctcggctcacttcaacctctgcttcttgggctcaagagattctcccacctcagcctactaagtagctgggactacaggtgtgcgccaccacatcctgctaatttcttatattttttgtagagacaggattttgccatgttgcacaggcc

SEQ ID NO: 281661 - DNA, 656 bp, Homo sapiens
gataaccttgccttttttcctctatcccatatcacaatgggtcaatgctaacatctctttctgcaggtttttatttaaagttggctatttaataagacccaggaggcagctgggaacccaagaatgagcactagaatgaaagacctgtttattcctcactttgccaccggctggtcacatgatcagaacccttattgttaattttaccttcatcctaaatagccctcctctgtgctcccacagcaggctcacaagcatacctttttcattatatcccaaagactrtattgactatgccacaggagtccttccagaagcacttttactgtaagataagtttttctttttaagggtgaaaaagcccttgaggtcacaagggattcattgataaaggtgtattgatagatggtgtgaatgatgtttgagcatcttaccttgtgacacaacaaactaatatttgtgggtaattgccttcttcactcatctaccctagaccagtcctccctccctccctccctcccttcctttccttccccttccccttccttccttctttccttccttccatccttccttcctttttttctttaattcttgtcagaaaaatagttgcaatgtgaatctaagaaaataaagatgtggagtacacagagctt

SEQ ID NO: 281662 - DNA, 549 bp, Homo sapiens
tcatgagcctacaccaccaggtccctgggtttcragtacaaaactgagtggctgttgggcaggcactgagctgtagggtttttttttttctccatactcgagtagcacccggaactccagtgagacaggagaatcgtccactcccttggaaagggggctgaagccagggagccaagaggtctcgcttagcatgtctcactcccatggagcccagcaagctaagaagctctggcttgaaattcccactgccagcacagcagtctggagtcggcctgagtttggtgaggggaggggcgaccaccattactgtgcctttagtaggtggttttcccctgacagtgctaaagagactgggaggttgggactgggtggaactcagcacagtgcagcaaagtagctgtgccagactgcctctctagattcctcctcactgggcagggcatttctgaaggaaacccagcagctccagtcagaggcttacagacaaaactctcatctccctgggacagagcacctagggggaggggtagctgcggtcacggcttcagc

SEQ ID NO: 281663 - DNA, 648 bp, Homo sapiens
tctgaaggaaacccagcagctccagtcagaggcttacagacaaaactctcatctccctgggacagagcacctagggggaggggtagctgcggtcacggcttcagccaggcttaatctttcctgcctgctggctctgaagagagtgrctgatcctgacaagggcgattcttccagctcagcacaccagctctactaagggacagactgctttctcaagtgggtccctgccatcgccatgcctcctgactgggagagacctcccaacaggtgttgatagacacctcatacaggagacctctggctggcatcaggccagtgcccctctgggatgaagcttccaaaggaaggagcaggcagcaatctttgctattctgcagcctccactggtgatacccaggcaaacagggtctagagtggacctccagctaactgcagcagtcctgccgaagaggggcctgttagaagaaaaaaattaacaaacagaaagcaacaacaacatcaacaaaaaagagtgccccacaaaaaccccatccaacagtcaacagcctcaaagataaaaagtagataaatccatgaagatgaggaaaaaacagcacaaaaacgctgaaaattccaaaagccagaatgccttttctcctccaaatgatc

SEQ ID NO: 281664 - DNA, 1187 bp, Homo sapiens
tctgaaggaaacccagcagctccagtcagaggcttacagacaaaactctcatctccctgggacagagcacctagggggaggggtagctgcggtcacggcttcagccaggcttaatctttcctgcctgctggctctgaagagagtggctgatcctgacaagggcgattcttccagctcagcacaccagctctactaagggacagactgctttctcaagtgggtccctgccatcgccatgcctcctgactgggagagacctcccaacaggtgttgatagacacctcatacaggagacctctggctggcatcaggccagtgcccctctgggatgaagyttccaaaggaaggagcaggcagcaatctttgctattctgcagcctccactggtgatacccaggcaaacagggtctagagtggacctccagctaactgcagcagtcctgccgaagaggggcctgttagaagaaaaaaattaacaaacagaaagcaacaacaacatcaacaaaaaagagtgccccacaaaaaccccatccaacagtcaacagcctcaaagataaaaagtagataaatccatgaagatgaggaaaaaacagcacaaaaacgctgaaaattccaaaagccagaatgccttttctcctccaaatgatcwtgaagtggaggagttttcctcccttccagagacaaaagggataattttatggtttgctttgagagacagagtgaagaatccaggtgctctgaagattcacttgcatttgatggatgtgaattccttccagttttatattcaaaagtacttctttatttttwaaaaaaaaagaattgtgaggatttgtgtgtcgatagtaaccttaaatctctagtagctagaattagtaaagttctaattatcttatattggagttttacatccaaggacacctctattaaaaggaggtttctgtgtggtctgttgtaaagatggctttgatgtctttaccaaaaggtgtcttttcactgtaaaaagaatggagcagtggctgcccgtggctgccttcagtgtgagaatgtgctggaatattttattgttggggtggcattgaagttctgctgtgaaatgatttttatgaatgctattccctgggaggctcacagaactgagaatttcatgtcatgaggccatgatcccagggagcagaaatcaaata

SEQ ID NO: 281665 - DNA, 1138 bp, Homo sapiens
tgaagtggaggagttttcctcccttccagagacaaaagggataattttatggtttgctttgagagacagagtgaagaatccaggtgctctgaagattcacttgcatttgatggatgtgaattccttccagttttatattcaaaagtacttctttatttttaaaaaaaaaagaattgtgaggatttgtgtgtcgatagtaaccttaaatctctagtagctagaattagtaaagttctaattatcttatattggagttttacatccaaggacacctctattaaaaggaggtttctgtgtggtctgttgtaaagatggctttgatgtctttaccaaaaggtgtcttttcactgtaaaaagaatggagcagtggctgcccgtggctgccttcagtgtgagaatgtgctggaatattttattgttgggktggcattgaagttctgctgtgaaatgatttttatgaatgctattccctgggaggctcacagaactgagaatttcatgtcatgaggccatgatcccagggagcagaaatcaaatawtttttaaaatatgaattattacatcctgaccccacaaaaattctgagcaaatgtttagtaggtccggctcaaggaaactgtatcattatcttctaggaagtgwtagggaggacgttttagaacacagtgggagaacaataattaacaaaagcttcatattcaaatttgagacacagaccgccttcaaacattcctattctgaaagactattaggctgacttatccattgataataacaatgatttggacaacttttgtaatatggatcgaaactctaaataattgagaccatttgtagtcattagcagaacccaagtcattgaaatataagagtaatacatagcggatttttcaatctgtagtaaaaggaaaagaaagttttggagtatgtttttcctgccagagtgttatgagagtcaaatgtgagatatttggtaagagaacactgaaaaactctactctacacaaatgttagaaaaaattaatgccaagcactagtgaatgcccaatgtatgtgattttagtggattttaagcatttaaaattgtctgcttgtaatttttccatcctattgtatagatagtctaaaaatccaccat

SEQ ID NO: 281666 - DNA, 575 bp, Homo sapiens
atccaaaaaacaccctcatagaaacatccagaatagtacttgaccaaatatctagggcctgtggcccatcccaactgacatgtaaaattaagcatcacagtgaccgattggatgaagggcttaagagtgaagaaaataaataatagatggttctgcrgttttcagcttggataaattgagtgaatggtgatgcttttaactaagacaggattcctgagaagagggcgaaattttggttagagaagactttttcttattcaagaagcatttattgatcatcaaccttgcaccaagcactaagttaaatatttcttcttttggtgtaggagagggaataagtacgtagaaaataccgtatgaagagaagccattgcgtaatgattcagctgtgctttagaggcagagacacttaagctctgtaacttggaccacctgcttaacctgtcctagtgtcatttgcatatatagtacctggcacatagtagtttatcaagaaatatctccagaatgcttagctatgtttttactgtattgattgttgaaattaatgtagaatgctaaacaaatatgagaca

SEQ ID NO: 281667 - DNA, 575 bp, Homo sapiens
atccaaaaaacaccctcatagaaacatccagaatagtacttgaccaaatatctagggcctgtggcccatcccaactgacatgtaaaattaagcatcacagtgaccgattggatgaagggcttaagagtgaagaaaataaataatagatggttctgcagttttcagcttggataaattgagtgaatggtgatgcttttaactaagacaggattcctgagaagagggcgaaattttggttagagaagactttttcttattcaagaagcatttattgatcatcaaccttgcaccaagcactaagttaaatatttcttcttttggtgtaggagagggaataagtacgtagaaaataccgtatgaagagaagccattgcgtaatgattcagctgtgctttagaggcagagacacttaagctctgtaacttggaccacctgcttaacctgtcctagtgtcatttrcatatatagtacctggcacatagtagtttatcaagaaatatctccagaatgcttagctatgtttttactgtattgattgttgaaattaatgtagaatgctaaacaaatatgagaca

SEQ ID NO: 281668 - DNA, 488 bp, Homo sapiens
tgatgtgttttactttagtattctaaattttaaagaaagtaagttggttttttttttctgttacttgaaagcaaaggaatcctaccttacacagtattcaggatctcccagcactgtgcattgactctggcaggtgcaatgtaaaagctgccttgtggcttctttagagaatgaagcttcctgactgtggtcatcaggccttaatactttcctatcaccaggggccaggataataatttgctcatggtggaatctcagtaactatcttccttgtgagttaatgactcagctacagagatgagataatttactgaatggaaagggagttggacaactcaatatcttttctgagctcagtttctttgtcttctaagggtttattgttttaactgctttgttgatgyaaaagattaggggtgaaggacatggtgacattacagacttgagcactaacaattcaagttctagcctaagttgcaatttttcag

SEQ ID NO: 281669 - DNA, 573 bp, Homo sapiens
aagggaatcagaaactccaagttgttattcttcaaccctgtaacccaaagcgttcgattaatagaactagtgaacattttgagctatttataatagtataaacccttctctcttcaagagcctgaggatatgggagattattgccttgttgagaaattccaggaatgggaacaaatagagaaaaaggcagaaaaaggagaactgctgagatatatattcattttcctcagtatgaaggcaattcacataatgactcagttatataactgatactkcttttgtatgacttgaggtcaaatgaatggtatccctaacaattgcccgtgtccctacagccaaggagatgcccccagatgcctagatatgcatgcctcaagagcacagtggaacttgtagggacacattatgtttactggctgccaccctggaattgccccagtgggtggaagagagcacgacttatactgtcagtagcctctgttagtataaggctttcaggagacaattctccataggtgtctcatgcttcggcataccttgccagcagaggcactatcttttcagggacacctg

SEQ ID NO: 281670 - DNA, 609 bp, Homo sapiens
caagggagtgcttgcatcacccctctcctaaccccaggctgtacagctcagggctccgaaagagactccttccttctacatgagagaaagagcaggaaaagtggggaggactttgtcttgcgtattggataccagctcagccacagcaggataggacactggtcagagctgggaggcccacattccaggccctaactcccagaygagatttctagacacaccctgagccagaaggaaatctgctgccttgaaggaaaggactcagtcctggcagcattcatcaactgctaactgaagagccctgggtcttgaataaccagcagcgatatgtcagggtactatgtcaaggggcttgggtgagcctctgagacttgctggtttcagttgagactcagcatattaccagctgtggtggctatggggcaaaacctcttctgcttcagaaaagcagagtgaaaggtaaaggagattttgtcttgcaccttacatgcctgcacagccacagcgcagtagggcaccaagcaagtgggctcttggggtccttgattccaggacttgcctcttggatggcatttctagacctgccctggacagaggggagctcactgc

SEQ ID NO: 281671 - DNA, 457 bp, Homo sapiens
tctatatttgggtttgctccctagttccactggatagaatttctttctaatagctcatattcccatggagtttctacaagctttctcagctggttcggcaggacagttaattagcacagccacctcagctgtgctgacattggttgatgataccagtgtaaaaccagaaatgttttggaatgataggctgtacgaacggatgccaaaagagccctgctgcctttttctcttctgttcaaaatatgtttaattgtagctcttcttmcaaagtacagataacgctagtgattaaaaagaaaaaaaaacaaaactggtatgatagcaaggcagataggagataatcactggtcattaaacaaaatttatttccaaagaaacaatataaagttgtatgggtttgaaagcacaaaataatgttatttttatcttgcatccagttccacatatggcagtcctg

SEQ ID NO: 281672 - DNA, 346 bp, Homo sapiens
tcagctggaggtgaaaccaacctacatctccatgttggtgttctcgttataaaagatttgcactgatacttccaatctagcgatgaacaacacatgatgttacgttttagtcatagcaatttatttcactatgcagttcatttatttttgagtataagcagcttaaggtactgacttaggaaakgtatacattggggaagttaattatcgacctacaccacgtatacttttgtctagcagaacaaataggtcatcttttgtattaaaacaatggcttttagacagatcttataagtagatggattactcttgcatgtgtttaatcagatcaaaggtagccttataa

SEQ ID NO: 281673 - DNA, 937 bp, Homo sapiens
tcagctggaggtgaaaccaacctacatctccatgttggtgttctcgttataaaagatttgcactgatacttccaatctagcgatgaacaacacatgatgttacgttttagtcatagcaatttatttcactatgcagttcatttatttttgagtataagcagcttaaggtactgacttaggaaatgtatacatyggggaagttaattatcgacctacaccacgtatacttttgtctagcagaacaaataggtcatcttttgtattaaaacaatggcttttagacagatcttataagtagatggattactcttgcatgtgtttaatcagatcaaaggtagccttataawatgcaaggacagatatgtaacaagataaccacatatatacttttataataatttaatatcacactaattatatggtctgatttacccagcatgagtatccagtcactactatggtagagttagttggaaattatagctctttaaatggtactgtagcaagaaataatagattcctcataatatttctaatttggaggaggaataaaaataatacttttcaaatgttttcacatggcatgtttaaatatgtaaatatggacatgggtgagcattttaagttaaaagttttccgttaaaatggtaagaaatgagagcaccttttttttttctcttgaagtgtacacacwtggtatatcctttatatatctacaagagggtagccacatgggttggaaatacataaattccacctgtgtccaaccaaagtactgctattatggtagggcatatttcataaattgtgtgactcaggcatgcaaaaatatgatagaaaagtttctctataggtgcactaaagttgccttttggccccataccctctcatggcaaaaaaataaaaataaaaaaaataaaacaacatgaagcatgtc

SEQ ID NO: 281674 - DNA, 601 bp, Homo sapiens
cttacattaatgtcagctatagttttgagatgagtcagcttaatcaactactggctttctttggatgtgaatgatatggtagctctttaaatcctgaatgttgtgagtaccttggaagagaagcaaggtaacttctgcacctcgtccaataatcartttacttgggggatttgtcatcagtcctcagagaagtgagtcacagcagttaccatcttcgggcactttcagcaggccacagcaataagttactgatacacactggaaattttaactatttactagtttggaatacttcagtcaacccatcaagttactcctcccattggggaaagtaaattaagatcagaagtttgggacgaaattgtggcttatgcctgtaattctagcactttgggatgccgaggcaggaggattacttgagtccaggaattcaaagccagcctaggcaacgtagcaagaccctgtctctaaaaaataaaaataaaaaagttagccaggcatagtggtatatgcttgtagtcccagctactcagcaggctgaggtgggaggtggaacctgggaggtggacgttgcagtgagccgtgatagcactgctacact

SEQ ID NO: 281675 - DNA, 601 bp, Homo sapiens
cttacattaatgtcagctatagttttgagatgagtcagcttaatcaactactggctttctttggatgtgaatgatatggtagctctttaaatcctgaatgttgtgagtaccttggaagagaagcaaggtaacttctgcacctcgtccaataatcagtttacttggrggatttgtcatcagtcctcagagaagtgagtcacagcagttaccatcttcgggcactttcagcaggccacagcaataagttactgatacacactggaaattttaactatttactagtttggaatacttcagtcaacccatcaagttactcctcccattggggaaagtaaattaagatcagaagtttgggacgaaattgtggcttatgcctgtaattctagcactttgggatgccgaggcaggaggattacttgagtccaggaattcaaagccagcctaggcaacgtagcaagaccctgtctctaaaaaataaaaataaaaaagttagccaggcatagtggtatatgcttgtagtcccagctactcagcaggctgaggtgggaggtggaacctgggaggtggacgttgcagtgagccgtgatagcactgctacact

SEQ ID NO: 281676 - DNA, 1203 bp, Homo sapiens
cttacattaatgtcagctatagttttgagatgagtcagcttaatcaactactggctttctttggatgtgaatgatatggtagctctttaaatcctgaatgttgtgagtaccttggaagagaagcaaggtaacttctgcacctcgtccaataatcagtttacttgggggatttgtcatcagtcctcagagaagtgagtcacagcagttaccatcttcgggcactttcagcaggccacagcaataagttactgatacacactggaaattttarctatttactagtttggaatacttcagtcaacccatcaagttactcctcccattggggaaagtaaattaagatcagaagtttgggacgaaattgtggcttatgcctgtaattctagcactttgggatgccgaggcaggaggattacttgagtccaggaattcaaagccagcctaggcaacgtagcaagaccctgtctctaaaaaataaaaataaaaaagttagccaggcatagtggtatatgcttgtagtcccagctactcagcaggctgaggtgggaggtggaacctgggaggtggacgttgcagtgagccgtgatagcactgctacactwcttacattaatgtcagctatagttttgagatgagtcagcttaatcaactactggctttctttggatgtgaatgatatggtagctctttaaatcctgaatgttgtgagtaccttggaagagaagcaaggtaacttctgcacctcgtccaataatcagtttacttgggggatttgtcatcagtcctcagagaagtgagtcacagcagttaccatcttcgggcactttcagcaggccacagcaataagttactgatacacactggaaattttaactatttactagtttggaatacttcagtcaacccatcaagttactcctcccattggggaaagtaaattaagatcagaagtttgggacgaaattgtggcttatgcctgtaattctagcactttgggwtgccgaggcaggaggattacttgagtccaggaattcaaagccagcctaggcaacgtagcaagaccctgtctctaaaaaataaaaataaaaaagttagccaggcatagtggtatatgcttgtagtcccagctactcagcaggctgaggtgggaggtggaacctgggaggtggacgttgcagtgagccgtgatagcactgctacact

SEQ ID NO: 281677 - DNA, 473 bp, Homo sapiens
tgcctacttattgttgactttctgtctcaggctcttgtctgagtttattatttggcttctgccattctcttcagctcctctttgaagctcctgctggtaacttccagcctgctcttaagaaacaccaggcatcatcaatgtagatgagtcagcctgcattttggctgtcactctcacctttcagaagtgacatgaaggcctcctagctgccctttctgccttatacctgcacttaatctggacttgaactyagggatcctcaccctagccttcaaaaggaatgcagccccatacttatcaggtaaggtggctttctttgtctttgctacacattgtgcaccagaaacaggaaaaaaaattccactgtattgtgcagtatggattattagggaaatttgtaagcaaggatcatgaagaagagaaaagccctacagtctcctccctctcagcagtttattgagtgctctagacag

SEQ ID NO: 281678 - DNA, 522 bp, Homo sapiens
taatatcttttcaaaactgaatattctcctccatgaacatggtatagcaattcacttattctggttttctataattttcttcaataatattttataatttttatgtaacttgcaaaatatcctttttaagacttatttttagttacaaaagrcttttattttctaactacctttttcttatgtaggaaacattaaccaactttttggatagaattgtagcaacaaataccacacactcaaaatttataagaactggattctgggaaggaagaaagaaagagtttaccagccagagtcttcacatataaaaataacagcctttctctttatatctgcatatacctgatcaaccttacttccaagaatgtcttagtgatccacagaagggaagtttccttcttattacaagtaaacaaactttgaaagagtaaactggcagtatccagttgaaaagaggtcaaaaatatacatttgaaaggaaagagaattaaattattcaaatagtagtatgccattaaaagt

SEQ ID NO: 281679 - DNA, 547 bp, Homo sapiens
ttataaaataaaatggaaatggattaaatgttcatcaaaaagaaatcagatgtgatataatgatgtgtagtcattaaataagtgaaataaatctatatgtactaacaaaaagaagaaaataattctttacaaactaaaaaaggaggttgttaactttggcaatttcatgttcatcaggttcagtttaaaaaaactttagaaagaaaaacatggctagtaagttttttcacatactttttcaacattctgtctttcaccactagttagatatatgttgaaaaacgggaagagaagcactagagatgttgaggactctccagattttgagaactatccatttttatccaaattaaatctttcattttagtatgttttgaayggcaggaagaaattttgcctataaattttcaaagtacataattgcatgtatgtcagcaaacaataccttaactattaggcatacatagttaaagctgtttgcagatatacattgttaattgagcatctttaaatttttattatgtaatatttgatacatacaaaagaa

SEQ ID NO: 281680 - DNA, 491 bp, Homo sapiens
ggggatggttacccgcatctgttcttgtgatagtgagtgagtgatcatgagatccaatggttttatcaagggcttttcaccctttatttggcacttctctttcctcctaccatgtggagaaggatgtgactgcttccctttccgccatggttgtaagtttcctgaggcctccccagccctgcagaactgtgagtcaattaaacctctttccttataaattacccagtcttgagtatttcttcatagcagcatgagaacggactaatacacttttgagtgttgttttcttattacagcaaatgcttgcaaagttgtcttgtataataaaaaagacattttgtcattaaatgtgtattctgtttactgtgagtatatataaaggccagaagcaggtaccttttagycatgaatatttgccaagaaattatttaaataaaatacatttataatgaaataacagagttgaaaaatgcccataataccatttgtgc

SEQ ID NO: 281681 - DNA, 535 bp, Homo sapiens
cctaaatttaattatgtaataggtggaaatttcatgtcttgatcattttacctatatttcttttttaaaaaccatcactgacaatctttccataatttagttagctatttttggacacagattttgaagaaatttttattccactctaatagatttggacgttattctagctttgagaatttttgtgtctttaaaagttaacttgataaaatctagctgataaaatggtaagggaagtaactaaattctactttatgattcttgtcattttattttactttaagtattcttaattrctacattataaatataaaaatgtcaagtttactcttgaggtatgtggaataaaaagtaactagaggaggagcccttccttcaagctttagtattaacctactgaagagaagcaagaggaataggaatggaagctctcatgcatggagtaaccatggtgggaaaggcactgccatgtgtatttaatgatataaactcactgaaatcaatgtatttatcattgacttctcaacaaatattg

SEQ ID NO: 281682 - DNA, 1217 bp, Homo sapiens
attgtcaacataggatgtgggcaatttttcagaggacaaatcagtcaggagcagaaaggaactgtttctgtcagagtcaccatgtccttctataaattgctgcttttayagggaggcagggaccccatgcttgccttcagtttaccttccgtttaatccaaatattaaacagaattaaacttctccttttgggataaataaccataacttaaactgagctttaaggaaatacttctgtgccatattatctagtcaatctcatgaagtttggtttcagctttaggttttttttttccataatgagccacacattcaacatgttttgtatttacaaaaaacaataaactgaacaacttctattttaatattttttaaataaaactgttaggatagaaaatcctactgcattaaattataataatgttgatatccctctccatgatccctcaacctgatattctattaaagggttattttatggtccttttaaacctcctcataaattcattatggaggccgaaagagatcactttcatattgctcagcaatatccctccctttcctgttttctttttctttccttatatttgtaatccaaaaatcacggawattgtcaacataggatgtgggcaatttttcagaggacaaatcagtcaggagcagaaaggaactgtttctgtcagagtcaccatgtccttctataaattgctgcttttatagggaggcagggaccccatgcttgccttcagtttaccttccgtttaatccaaatattaaacagaattaaactwctccttttgggataaataaccataacttaaactgagctttaaggaaatacttctgtgccatattatctagtcaatctcatgaagtttggtttcagctttaggttttttttttccataatgagccacacattcaacatgttttgtatttacaaaaaacaataaactgaacaacttctattttaatattttttaaataaaactgttaggatagaaaatcctactgcattaaattataataatgttgatatccctctccatgatccctcaacctgatattctattaaagggttattttatggtccttttaaacctcctcataaattcattatggaggccgaaagagatcactttcatattgctcagcaatatccctccctttcctgttttctttttctttccttatatttgtaatccaaaaatcacgga

SEQ ID NO: 281683 - DNA, 1217 bp, Homo sapiens
attgtcaacataggatgtgggcaatttttcagaggacaaatcagtcaggagcagaaaggaactgtttctgtcagagtcaccatgtccttctataaattgctgcttttatagggaggcagggaccccatgcttgccttcagtttaccttccgtttaatccaaatattaaacagaattaaacttctccttttgggataaataaccataacttaaactgagctttaaggaaatacttctgtgccrtattatctagtcaatctcatgaagtttggtttcagctttaggttttttttttccataatgagccacacattcaacatgttttgtatttacaaaaaacaataaactgaacaacttctattttaatattttttaaataaaactgttaggatagaaaatcctactgcattaaattataataatgttgatatccctctccatgatccctcaacctgatattctattaaagggttattttatggtccttttaaacctcctcataaattcattatggaggccgaaagagatcactttcatattgctcagcaatatccctccctttcctgttttctttttctttccttatatttgtaatccaaaaatcacggawattgtcaacataggatgtgggcaatttttcagaggacaaatcagtcaggagcagaaaggaactgtttctgtcagagtcaccatgtccttctataaattgctgcttttatagggaggcagggaccccatgcttgccttcagtttaccttccgtttaatccaaatattaaacagaattaaacttctccttttgggataaataaccataacttaaactgagctttaaggaaatacttctgtgccatattatctagtcaatctcatgaagtttggtttcagctttaggttttttttttccataatgagccacacattcaacatgttttgtatttacaaaaaacaataaactgaacaacttctattttaatattttttaaataaaacwgttaggatagaaaatcctactgcattaaattataataatgttgatatccctctccatgatccctcaacctgatattctattaaagggttattttatggtccttttaaacctcctcataaattcattatggaggccgaaagagatcactttcatattgctcagcaatatccctccctttcctgttttctttttctttccttatatttgtaatccaaaaatcacgga

SEQ ID NO: 281684 - DNA, 607 bp, Homo sapiens
atactagaatttatatctcctatctgatggtaactttaccyattaactaacctccttctgtcccccacttactactacccttcccaacttccagtgaccaccattctgtctacttctgtaggatcaacattttcagctcctatatgtgagtgataacatgttttttgtctttctgtgactagcctatttcacctaacataatgttccccaggcttatccatgttgccacaaataacaggatttcattattattgtggctgaataatattctattgtgcatatataccacattttctttatccattcttccattgatgggcacttaacgtttattctatctcttgattattgcgaatagtgctgcaataaacatgggcatacaaatatctcttcaacatactgatttcttcaaaatatacttagtagtgggattactagatcatatgatatcttctttttttagatttttgaggaaatgccatgctgtttttcatgtctgcactaatttacattcttatctacggtatataagagttctcttttctctgcatcctcaccagcacttgctatattttgtcttttgggtcataatcattttaattggggt

SEQ ID NO: 281685 - DNA, 552 bp, Homo sapiens
aaacatcataaaagtgaatttgtcccatgattgattcagaattaagttgcagttgcatattttaacttttgggcttctagtaaaagaattagtttctctttcccattttcacaaactgcatgaaagcgttttatttctctktggcttcctgaagggtacaattggaatagatcttcatttgcttggctttctctacttatgtttgacattttgagctttacctattggttatttcattcacttgagaagcaatctcaagcaatatcagtgtgtgtttatgtttctttgtgcatgtacctgtgtgtgcgtgtacatgtgtgtaaactgatggacattctgagcaggtagggtctatactgtttggtattctgtttcactattgtgttttgaaactccaattcaagacaatagggaaaacctcaccaatatgaaagcatggatcaccactatctgaaccagtttgagttatctgatgctttaattaaataataagggagcatctatttggctgaggaatcagagctatttagaattgggggccatttttactag

SEQ ID NO: 281686 - DNA, 552 bp, Homo sapiens
aaacatcataaaagtgaatttgtcccatgattgattcagaattaagttgcagttgcatattttaacttttgggcttctagtaaaagaattagtttctctttcccattttcacaaactgcatgaaagcgttttatttctctttggcttcctgaagggtacaattggaatagatcttcatttgcttggctttctctacttatgtttgacattttgagctttacctattggttatttcattcacttgagaagcaatctcaagcaatatcagtgtgtgtttatgtttctttgtgcatgtacctgtgtgtgcgtgtacatgtgtgtaaactgatggacattctgagcaggtagggtctatactgtttggtattctgyttcactattgtgttttgaaactccaattcaagacaatagggaaaacctcaccaatatgaaagcatggatcaccactatctgaaccagtttgagttatctgatgctttaattaaataataagggagcatctatttggctgaggaatcagagctatttagaattgggggccatttttactag

SEQ ID NO: 281687 - DNA, 478 bp, Homo sapiens
gtaaaatgtataatgtttcagtgagctacttaaaaggaagaacaacagaaaatatcagagattctcatttttggaattaaagcctgtcagatttccccagatttttctgaatctaagcccttgagcctacacttaaaatgaaagagacaggccgtagaaaattctgtacattttaacaagtgatatgaacagtgatgtgactcattaagcatgaccktgtagacgggtgatgaagtcagctgaaaaacagggatctgctttttctatcgcttgctgacctcagtttcaacggaaaaaataaaagaaacattgacctctcccaaaaagtggaccattcatgaccatcttcaaagtcagaggccatttcttacagtaaagccagcctggagaaagaggaaatgtcttttccaaattgacctggccgatttcatcttgatgagagctgagcagggcagagcctctcatgcctccataacca

SEQ ID NO: 281688 - DNA, 478 bp, Homo sapiens
gtaaaatgtataatgtttcagtgagctacttaaaaggaagaacaacagaaaatatcagagattctcatttttggaattaaagcctgtcagatttccccagatttttctgaatctaagcccttgagcctacacttaaaatgaaagagacaggccgtagaaaattctgtacattttaacaagtgatatgaacagtgatgtgactcattaagcatgaccttgtagacgggtgatgaagtcagctgaaaarcagggatctgctttttctatcgcttgctgacctcagtttcaacggaaaaaataaaagaaacattgacctctcccaaaaagtggaccattcatgaccatcttcaaagtcagaggccatttcttacagtaaagccagcctggagaaagaggaaatgtcttttccaaattgacctggccgatttcatcttgatgagagctgagcagggcagagcctctcatgcctccataacca

SEQ ID NO: 281689 - DNA, 626 bp, Homo sapiens
aaaataacatcgtgcatcatatataataatagcaaatactgcttcttaaaatgtttgtttcagtgtatgtgcgtgtatgtgtgtgtgtacatgtgtatgcatgtgtgcacatgtactgagtcctaatgtaaaatgtactttttactgatagacacaattgaaaaacttcagaagtcctgcgctataatgtcatagtattatattaatttttasaggaaaaataagaacaaaataaaaaaatccagctttataattcgaacttccaaagttccccaatgaattagtttccacagagtttttaatggagactaagataatgttatcattgcacgttgcttcctgtctctctcatggtttgcatttatttagcatccaggcaggcctaacacggggtgattaaatctcctcctcagatcaggccatctgtgccattgagtaagtgagatacttcaaataagtgaatgatgaattctgttccagactgtcccataaaattataataaaaataataatgaagtgctctataataaaaagaaagtcattacaaataccgtgctattgatttcaaagggcagtaattttagaggagctctttcatctgtgttataaatctcggcaaccagcgg

SEQ ID NO: 281690 - DNA, 578 bp, Homo sapiens
tattacactatttagatataccatgacttaaaacatctgagtgatatttaagttattccccattttaaaattatcatgttttaatataattatgtatcattatgtttttatgtaatttgtgtttgtttttaatttgtatttgtttcagggtcaggaaagttaagactttttcatatgctgactagctatttgtttcttttcttataaagtgccctcttttgttcattgatgtttcttgttgtttgttttttgtgagtttgctctctgttttaaaaatcaatttgtaaagctttttctctaaatttaggtaattagctgtgggtcctgtgtttcttgtytgttaaatgctttttccttttgtaatgttttaagctttgctgaaagagtgttttttttttagtgttgtctaaattatcaaatttatggtttctgaattttgtgtctgcttagaaagaccatctccaccctaagttataaataaattcagtcacgttttcatccagttctttaatggcttcattgtttactttaaatctttgctccatctggagtttatttttatctaagtagtgatttgg

SEQ ID NO: 281691 - DNA, 496 bp, Homo sapiens
aacagcattctccactcccccctcgctgttggggataccaacctcaaggcttcatttaattctaggaattagtcacactcggttttgcctcaggacctttgcacaggctgtgcctgatgcctagaatgttttacataccctatcccattccatttttttccattgctacatgtgccttttttgtaccctgtactttttctccatagcagtaatcaagtttgtgttgctacacttctttttgtttgtstgtgtgtgtgtgtgtgtgtgtgtgtgtgtgtgtgttttattttttttgagacaaaatctcactgtgccacccaggttggagtgcagtggtgtgatctcagctcactgcaacctctgcctcctggattcaagagattctccttgccttagcctcctgagtagctgggattacaggcacccgtgatggtgtacttctctgtgccattagctaacggccagtctccccagttccacaagggcagagacccca

SEQ ID NO: 281692 - DNA, 580 bp, Homo sapiens
tgtgtgtgtggctcagctgttaggggaatcagctgtgcccactcactcccccatcccattcccagagcctaaaataaagtcctgggccaaatggtggttgctggggcggagtgggctgggctgggcagtgacttagtggcagtgcaggggccatacgagttcttttgtgtgtgtgtgtgyggggggacctcttgctgtccctgcttgcctagttcctggattccgtgcggtgacaggtgttagcttgtacctagctcatacctcacccagtgcactgccaagttgaaagggcacgggggcttcttctgagtggcccaaatcttgtcccctatacctgcctttcactctcaggtgcttgctttgaggtcatttatgtacccatgctttacatactcttctaacaaccacaatatttggcttctaaattcacagcaagttagaagtaacaaattagaagggggaagaaggccttttccctgcagctgtactgctcccattgtgcgttccttcccctcttctctgtgttgtcctgggatttctcacttctgggattttactcatgctgaattgccagcctact

SEQ ID NO: 281693 - DNA, 535 bp, Homo sapiens
ttttgaaactcaagaatctcctgtgatgaatacttctttcacaatgctcccagagcttaatggattaatattaccttggtcttgggactctatgttcctttgatcgtttgatccccaagactcccagagaaaaacgaaagaagaaggccacaccacaaattctggtgttgagaaagaatacattggagttagccaaatcaattagccacgtgatatatagcagccatgtctaaacactgttttctctcattttttaaaaatttatgaataaaaaatgtcctctttggcttcccaaagtgctgggattactagcatgagccacagcgcctggtctaaacgaggctctctgactcatctgtactggtaccaatcgggaagaaacatccacctcagagccccctttcatcagcccaggggctactcacagcacgcagtgagtggaaagaggaagacttccactgccctgactcagttgcattttcagctcacccaccccaatctccttyttaaccacctgggtctgcccaccttcctg

SEQ ID NO: 281694 - DNA, 531 bp, Homo sapiens
agaacttaactcttaactttggagcacggatcccatttctctggagtctttgtctcctggatgatcattttcaccttttcacctgaataaactttaaactggattctgatccttttaattctttcaggtttatagagagaagattcaagcctcaacaggccaggtcagttggacaaggtgacttttaagccctcttctagcttcatgaaaacagatctgaaacttgcctgatctcagraatggtagtaaaaacaccatgtacctgaatggtctggtggcaggtatgtcctgtgcacttagtattctctaagttctgggaggggcaggttatctgccagtaagaggcaggagattccagcatcctggtgtgcttaacagtatcatctcattcaccagacaggcagcccttgtgcctctccactaaggctaactgccaggaggataaggtgtgggtgggttttattcactgctccatcctcagaggctagcaaaatgcctggaagagggagaaatctctagtgtttatagaca

SEQ ID NO: 281695 - DNA, 472 bp, Homo sapiens
gatttgttatgcattaatagataataaaaagcaaactgacttagccatttttattactgtcctaaattctctgcaacaacatccctccttatgtcctgcacactgggtaaactacagcacctgccatgtcctggatagatgtatgggagtggaattgctgggaattaggataggggtatgttggcttttaccagtttattttcccaccagtaatgtatgagagctttatctcctccacctcctcaacaactcttggcattgtccgtctttaccattttaagccattctgatgagagtatcatagaatctcattgagattttattttgcatttccctgacaactaatggtgttgagtgccttttcaggtgcttactggccctttargcaccctcttttgtaaaatgcttattcaagtcttttgcccccaatgtttgttggtttggttgcctttttcttattgatttgtaggaa

SEQ ID NO: 281696 - DNA, 616 bp, Homo sapiens
atattatatataacatataacatttatatatcatattatatataacatataacatttatatatcatattatatataacacataacatttatagatcatattatatataacataacatttatatatcatattatatataatacataacatttatatatatcatattatatgtaatatataacatatatatctcatattatatataatatatataacatttatatatcgcatattatatatattatatataacatttatatatctcatattatatataatatatataacatttatatatctcatattatataatatatataacatttatatatcatatataatatttatatatcattatatatattcatatatcatattatatataatattcatacatcatattatatataatatttatacatcatattatatataatatttatatatcatattatataatatttatatatcatattatatataatatttatatatcatattatatataatatttatatatcatattatatataatatttatatatcatattatatataatatataacatttatatatcatattatrtataatatataacatttatatatcatattat

SEQ ID NO: 281697 - DNA, 552 bp, Homo sapiens
tttgaatctattggaaagatgttcttgagggtgtggcttcccactttccacagggtctttctggtctttcagctgcatattcctaagcagtagattaattttctaccacatggacagttatgaactatgtaactaactagttttcccttttggtcttggctgccaggaaactttacaccaaatatgtacccacttgcagcaaaagtgcacaactccatggtctgtctttttacagtagcttcattactggttcaattttatgtcgttagccttgttgtaccgtattcatttttacttcctttgacttatataatcttgcttcgttttgtgtatccttataagaaaataggagttayaattttttaaaaaaacactttgatttaggcttggttaaaatgaaaagaagctacagggagtactgttatatcaatcactttgaatttcagtgaaggaaacagaagggaggtatggaagaacatatacattccaaggatctcaagagcataaagaatcgacaccaaggccaggtgcagtggctcaggcctgtaatcc

SEQ ID NO: 281698 - DNA, 565 bp, Homo sapiens
tcctccatcatttatttcaaaaagaaaagccttgtccctcacttcataatcagggctcaaatatattcagtatataggagctttttttaaaaaatgtctctccccctagacttgctttatcaattaaagattccattgattacagaaaagggtcataagacaaatgtgagtaatgtgttccagcattgtgctgaattactgatcacaaaataaaaatacaatccagcctggacattggatgactaagttttgttactcaggctttatactgataaccctaaagttccaaaacaagttgtgaatggcagctttgcaaaggtatacatgtgaactcaacgcttagtcaagctgaagtgcaggagggagttactcagctgtgacacacccagtgtaaccaagccacaaagttactttcacctgtacacaaaatactcttagaggaatttttttttaagtttctttgttcaagtgacaccatatcaagaaagccaagttctycaaggaagcaaagttctaaggttaccaagaagcagctaaaaactaaaggatcttaaaaaaaaaaaaa

SEQ ID NO: 281699 - DNA, 425 bp, Homo sapiens
caaacgcgtccaggaaagaagccgcccaccggaaagtcccaactagagttcccttccttttcccctcggcgtgcggctccctgggtagggggaggagaaagcgcccgacatgcgcacgcggccagacgtcactgcgttctctccccgccccccmggggagccgtctgacgtcacggggcggaggctgccgaaggcgccgccgttgaccctgctgttaccaggcgcgcgcacagccaatcagcaccccgcgccggcgccggccggcctttgaactcggcacggcaacttcctgctgtttggcgagtacacagtgcaatgcagtatgtctgtcagcgctgcggcacaaaggaacagccattttgtgactgagctggacctgcatcaagatgccaggggctcaaagagctgctgcgtgccctatcgaa

SEQ ID NO: 281700 - DNA, 607 bp, Homo sapiens
actaaatgtcttcctgctccaatataaattacatgcatcgactgtcttgatagtaayagaagtgttttcaatgtcaggcaaagaaatttgatggttttctcatcctttcagtgataagtagtctacagtttgtttcattaacaaactttaatggtatttttctacttaaatgttggtaactattcaattgcagatgttgggtaaaaacatttacttacttgctatataaaatactgactttcccaaagatttcctttatcctctaggataaaactccaacgtctcagtcttcaaaatggcataccttttggtgaaaacaaataagattctaaacttaattatgaagcaaacaatagcaagtaaaaataagtgtttttaaactttttaattacaaaaaagaaactaaaatctatgctcaaaacctgattttttaaatgttcttccctaaaatctatcagtatgaatagcaaactagttcaaattctccaataagcttatttctttaaatacttaaaagattaaaattgtttgcacaatatacagagttaaacagaaaaaaaaagctatctttggttcatggttttcctcaaaatctaatcagtcttct

SEQ ID NO: 281701 - DNA, 488 bp, Homo sapiens
aaatttcgtagcaagaacaatatccaaaattccatttttgaatttaacaaagaccaaccacctcacatcagtcaataacaaatggtgctcgtgtattaaccatggatgtgtatgctgcagtatttgacatgaatcacaaacagtatgattaacacaaaacaatttaacctgaactatttattcttctcatgtaaaatgggaaaacagaatcaagaactcattttgtctaccaaaataatgcctaccacctttgtaatagttaccaaaactggtatcagttgattagtaataaatgaaaacctggcatttaaaaatcaaacgtaagtaatctatggcagggtgcaattcatttattctaaatccccaattgtacaaaataaagacgatacaagatattaatccyacttcaaagttatataaaatggattacacacataatttcaaatttaaaaaattgtgaatactccaaggaccctaacccataaatc

SEQ ID NO: 281702 - DNA, 645 bp, Homo sapiens
gtatttgttaaataattttcagtgtaagcataatataagcacatattaagtttcttccaatggcaaaaaaatcatacaaaaaagtaaaaatctatcaccttcatttttccactaccaatcccattccataaaaagttaactactgttgtttcttaagaacatctagagattttatatgtaaataatattgtagcctagattcccccaaaaaggttaagaaagaaagagataatttatctaaccagtatctacctccatttgatcaaaagtttacacaacaaactgtaactcccctaaacttcccagtggagcatacatgggtgctgggcagtgactgttggggaagcctcagggcagtacatgcaaagtgtttggtagggatatgaagtaaaataatgtcaaattaagcctcatcctccatgaaagcttttgcattttccactgcccagtgagaaatgcaaaaggtttcatgaggaaaaagagtcaagtgagtctaagagtctgaagtggtacatagagatgtttaacatattttgtrtgtaaagttgtgtgtgtgtgtgtgtgtgtgtgtgtaaatttaagtacggaaaaactatgaatttttttttcaacttttgttttaggttcaggggatacatgtgaagg

SEQ ID NO: 281703 - DNA, 563 bp, Homo sapiens
ctttttgatttattctcactaatgaatacaacatgagaagatacttttaaaatcatttgaaatacagactatagtatctcagaggttacatctcaagtaacttcagggacagacagatgaatgcagtgggaaggagcyaaactgcaggccagtgtaaacatttctggggtccaacttagcaccatgacatgccacgtgggacctctccacaaaaagaaatggtaaaatagtacctaagaatcctattttcacatgttttcttatattgagaggccatatagcatgatggtcaggaacatgaaaatggagtagggtagacaatggatcaaaatcctggctacctcatttaccagttgtgtggccaaaggcaggttgcttacttctgcaaagctcagttttcacctctgaaaaattttagcaaattgatttctttttaaagaaatatctatccttgcatttctattattcctttcttaactctaaagtcaccttactctctatgcaaaatccataaacagggacctcagtgtttctaattttcaatagattgctttgttcaaaat

SEQ ID NO: 281704 - DNA, 563 bp, Homo sapiens
ctttttgatttattctcactaatgaatacaacatgagaagatacttttaaaatcatttgaaatacagactatagtatctcagaggttacatctcaagtaacttcagggacagacagatgaatgcagtgggaaggagctaaactgcaggccagtgtaaacatttctggggtccarcttagcaccatgacatgccacgtgggacctctccacaaaaagaaatggtaaaatagtacctaagaatcctattttcacatgttttcttatattgagaggccatatagcatgatggtcaggaacatgaaaatggagtagggtagacaatggatcaaaatcctggctacctcatttaccagttgtgtggccaaaggcaggttgcttacttctgcaaagctcagttttcacctctgaaaaattttagcaaattgatttctttttaaagaaatatctatccttgcatttctattattcctttcttaactctaaagtcaccttactctctatgcaaaatccataaacagggacctcagtgtttctaattttcaatagattgctttgttcaaaat

SEQ ID NO: 281705 - DNA, 503 bp, Homo sapiens
gccacgtgggacctctccacaaaaagaaatggtaaaatagtacctaagaatcctattttcacatgttttcttatattgagaggccatatagcatgatggtcaggaacatgaaaatggagtagggtagacaatggatcaaaatcctggctacctcatttaccagttgtgtggccaaaggcaggttgcttacttctgcaaagctcagttttcacctctgaaaaattttagcaaattgatttctttttaaagaaatatctatccttgcatttctattattcctttcttaactctaaagtcaccttactctctatgcaaaatccataaacagggacctcagtgtttctaattttcaatagattgctttgttcaaaattgttagctatttattatcattattattattttttattattgatagtatttttagctaagrattttggtaagaaacaggctagccttgaacttcatccaggcagagatgttgttagtaccaaaaggatctt

SEQ ID NO: 281706 - DNA, 1094 bp, Homo sapiens
tttgtgttttaagctgttaaatttgtgctaattcatcattgtagcaataggaaaccagtatggatatccgtgttgaaacatagtagagttaatcatattgagggatcagtaactgacaaagattaacatgttactttttttctgtttgtgtgtgtgtgtgtgtgtgtgtgtgtgtgtctgtgtgtgtgtgtgtgtgagacagggttttactctgtatctaggctgaagtgcaatggtgcaatcacggctcactgcagtcttgacttccacagctcaagtgatcttccatctcccaggctcaaacaatcctcccacctcagcctcctgagtagctrggactacaggcatgcaccacattgcccagctaatttttgtgggttgttttttttagagatgaggtttcaccatgtttcccaggcttgtcttgaacttttgggcttaaagcaatttacctgccttgacttcccagagtgctgggattacaagcatgagccactgcacctggcctatcttttcttttttaactccaaggaaagacttactaatgttaaaattctggaaatcagtctgwctaaaaaaaaaaaaaaaaaagaatcctgtgctccacctcagatcctctgggtatggaatttggaattctgtawtttaagtaagttccccagggaattcttttgcgcactaaagtttgagaacttctaagcctctgaagtcccttgctactcaaagtgtgatctatggaccagtatctcactagcaccagcatcacctgggagtttctctgtgagaaatgcagaatcttgagaaaaattccagacatactggatcaggatctgcatcataagaagattctcagggatttacaggcacattgaaggatcagaaatagtggtataaacctcagcgttgaaggctaataaaatgtctcctaagatggaatgagaaacaattgggacttggtacatctgacttttggttttccctgaatcaagtctgctgaattctcatttctctgtttggcatagcaagggtcaagggctacacattagagcgcccactcagtctttgactgtgtgtcaacaagcttatggaaaatg

SEQ ID NO: 281707 - DNA, 523 bp, Homo sapiens
ctaaaaaaaaaaaaaaaaaagaatcctgtgctccacctcagatcctctgggtatggaatttggaattctgtaatttaagtaagttccccagggaattcttttgygcactaaagtttgagaacttctaagcctctgaagtcccttgctactcaaagtgtgatctatggaccagtatctcactagcaccagcatcacctgggagtttctctgtgagaaatgcagaatcttgagaaaaattccagacatactggatcaggatctgcatcataagaagattctcagggatttacaggcacattgaaggatcagaaatagtggtataaacctcagcgttgaaggctaataaaatgtctcctaagatggaatgagaaacaattgggacttggtacatctgacttttggttttccctgaatcaagtctgctgaattctcatttctctgtttggcatagcaagggtcaagggctacacattagagcgcccactcagtctttgactgtgtgtcaacaagcttatggaaaatg

SEQ ID NO: 281708 - DNA, 483 bp, Homo sapiens
aaataaaatccttagccagtctctctctcttcccatccagtgatttccttttcctctttctctttggaaaacccaatgggaagccaaaagtcaagggagcttgtggacacaatcaatacagatcagccctttggagcagagcttggtgggaaaaggcagggagcagaccttgagggcygaatggaggatctccaacacagttgctcgttggcattgaatcaaattttcattcaaccactttcaatttttatacctgaattgttcatttttccatatttgtagcatttcagccatctgcccattggtagtcttttgttctcattctgtccttgacaatttcacaagatttgcattgccttatcacccactaacatcatcccgtggtgccgagtacagccacagttgccaccggtaggtctcaaattgaggcaatattctgacagctattcctggattccacagctgttctagagctcagaaggg

SEQ ID NO: 281709 - DNA, 1093 bp, Homo sapiens
atatacaccaaactattaacaggggttatttttgaggaatcgaggttgtggaagtggggcagtacagggaaaggttaatttttaaatattgttttatttgacttgttcacatctaacaggtattcacatattacaattttttaaaagacaaaaggacttatttgcagttgaaaaattaaaatttatcaaatgagaaataatagaaagaagagcataatatgctaagcctaactgaccacagtgtagcacccacagtctgtgtaaagaaaggtaggccacatttgtgagacaatcttcatcattttgyagaagaaccctacttctacaaaatgaattgccctgaaggcaacaagatgtggaagtcagttaagagattgaaaacaactggaagtaggtgatctattagtatttaaaaacgtgacttcaaataaaagaataaggaaagtagagaaaagaatgcatttccacatagaagaccaggagcttttgacagaaggagagawgaaagtgaaacttttatttttttwaaaaaagtagaacataaaaagttttaaaaattggcagcctgaccacaaggtagaaaagaaaaacccattttctggaaagaaattcaagccagctgtagaaatttgcataagtaacaaagagccaaatgttaaatttccaagacaatggagataatgtcttcatggcatgtcagagatcttcaaggcagtccctcccatcacaggtccagagacctaggaggaataaatgattccatgtgtctagcttacggtcctgctgctctgtgcagcctcaggactggtgccttgggttccagccactccagctcaggtgatggctgaaaggggccaggatacaggttgagccattgcttcaaagggtgcaagccccaagccttggtggcttccaggtgttgttgggcctgcaggtgcacagaagacaagagttgagctttgagaacttccacctagatttcagaggatgtatggaaacacctgaacatgcaggcagaagtctgctgcagaggtggagccctcatagagaacctgtaccagggcaatgcagaaatgaaatgtgaggttggagc

SEQ ID NO: 281710 - DNA, 496 bp, Homo sapiens
tgaaagtgaaacttttattttttttaaaaaagtagaacataaaaagttttaaaaattggcagcctgaccacaaggtagaaaagaaaaacccattttctggaaagaaattcaagccagctgtagaaatttgcataagtaacaaaragccaaatgttaaatttccaagacaatggagataatgtcttcatggcatgtcagagatcttcaaggcagtccctcccatcacaggtccagagacctaggaggaataaatgattccatgtgtctagcttacggtcctgctgctctgtgcagcctcaggactggtgccttgggttccagccactccagctcaggtgatggctgaaaggggccaggatacaggttgagccattgcttcaaagggtgcaagccccaagccttggtggcttccaggtgttgttgggcctgcaggtgcacagaagacaagagttgagctttgagaacttccacctagatttcagaggatgtatggaaa

SEQ ID NO: 281711 - DNA, 496 bp, Homo sapiens
tgaaagtgaaacttttattttttttaaaaaagtagaacataaaaagttttaaaaattggcagcctgaccacaaggtagaaaagaaaaacccattttctggaaagaaattcaagccagctgtagaaatttgcataagtaacaaagmgccaaatgttaaatttccaagacaatggagataatgtcttcatggcatgtcagagatcttcaaggcagtccctcccatcacaggtccagagacctaggaggaataaatgattccatgtgtctagcttacggtcctgctgctctgtgcagcctcaggactggtgccttgggttccagccactccagctcaggtgatggctgaaaggggccaggatacaggttgagccattgcttcaaagggtgcaagccccaagccttggtggcttccaggtgttgttgggcctgcaggtgcacagaagacaagagttgagctttgagaacttccacctagatttcagaggatgtatggaaa

SEQ ID NO: 281712 - DNA, 590 bp, Homo sapiens
gaaagtgaaacttttattttttttaaaaaagtagaacataaaaagttttaaaaattggcagcctgaccacaaggtagaaaagaaaaacccattttctggaaagaaattcaagccagctgtagaaatttgcataagtaacaaagagccaaatgttaaattkccaagacaatggagataatgtcttcatggcatgtcagagatcttcaaggcagtccctcccatcacaggtccagagacctaggaggaataaatgattccatgtgtctagcttacggtcctgctgctctgtgcagcctcaggactggtgccttgggttccagccactccagctcaggtgatggctgaaaggggccaggatacaggttgagccattgcttcaaagggtgcaagccccaagccttggtggcttccaggtgttgttgggcctgcaggtgcacagaagacaagagttgagctttgagaacttccacctagatttcagaggatgtatggaaacacctgaacatgcaggcagaagtctgctgcagaggtggagccctcatagagaacctgtaccagggcaatgcagaaatgaaatgtgaggttggagc

SEQ ID NO: 281713 - DNA, 621 bp, Homo sapiens
gggactcctttcctctgtttcagaagaagagaagggacagtaaaaaatgactttgtcttccaacttggataycagctcagccacagtaaaataaggcaaaaggcagaatcctgacaaccccatcctgggccctagctccaagagaacatttttaatttattttttaagttctggggtatatgtgcagaatgtgcaggtttgttacataggtaaacatgtgccatggtggtttgctgctcctatcaacccatcacctaggtattaagcccagcatgcattagctgtttttcctgatgctctgcctccccacaacaggccccactgtgtattgttcccctccctgtgtccatgtgttctcactgttcagctaccacttataagtgagtacaagcagtgtttggtttttggttcctgcattagctcctgcattagtctgctgaggataatggcttccagcttcattcatgttccttcaaaaaacctaatgtcatttctttttatggctgaatagtattccatgattcatatgtaccacatttcttttatccagtctatcattgatgggcattttggttgattccatgtctttgctattgtgaatagtgttacaatgagcataca

SEQ ID NO: 281714 - DNA, 516 bp, Homo sapiens
cagttacaaaagctattatcaaaaagatcaaaagtaacagatgctagcaaagatgtgtaagtatcagaactcctattcagtgttggtggaaatgtaaattagtacagccattatgaatcactgtatggagatttctcaaaaaactaaaaatagaaccaccatacaatccagcagtttcactggcaggtatttatccaaaggaaaggaaatcactrtgtcaaaaggatacatgcactcttatgtttattataacactattcacaattgccaaaatacggaatcaatctaagtgtccatcagttgatgaatggagaaagaaaatgtggtttatttacatagtagaatattacctgaccattaaaaagcaaaatcattgttacatgaatatactgcaaaaaaatatgtcatttgcagcaacatggatgaaactgaaagtcatcatgttaagtgaaataagccagacacagaaagacaaatattgcatgtactcatatgttacagctaaaaaaatgctga

SEQ ID NO: 281715 - DNA, 564 bp, Homo sapiens
gcctgggtgtggagctgagagggctccgaagcactacaatttaagctcaggaaggatggggtggctgcgaatgctctaaatacctgcagatctgcctgggcgtggagctgagagtgctctgatgcacgatgatctatgcccagggatgttagggcagctcagactgctgattcagaccagtagtgctctgaatgcctggagttttgcctgggggtgaaatgaagagagccctactgcaccacaatctcaggggaactggctggggcacccagcaatacacacacacagacctgttctgtattgcygagctggccctggctgtagctcttgttgctcaggagaaaccgcagatctcttcctgctacaggcctgcaatttgggaaagcacaatttcagtacctactgttgaggcactttccacaattctggctgtggttccccctgccccactccagagcaggcacctcaacctctggactgagactaaaatgcctgcatgaccatgttgctgggtcactaaagaatgactgtctttatatgcactcagattaaaaatggaatcct

SEQ ID NO: 281716 - DNA, 1646 bp, Homo sapiens
tcctcattctgggaaaattcctgaagcttttcctggtgtcttttatccctctcagtatttctaagcctctttccaagttaacttcaggacttggggaaacagtgttctccatcagcctgggttgcttggatccccagtggaaaggtgagtcacagaaggagactctctgcctctctcatatccgggggaatcactcacttttatcagctgggtgctttcatgatgggtgtttgcctacattctcctttctgggacctgtggtgtccttcgtgagtccatgaatagattcctgctttccttcttaaagctcacagaactgatctatttccaagtagctgaggcatactaaaagctcctaatctgccatcttgggcaaaaaagggtccactgtccaataataaacacacactttttgtgttcttatacatacatatgtacatacacacatgcatatgtgcattcatgtacatgtatgttgtattagtctgttctcacrctgctatgaagaaatgcccaagactgggtaatttatttaaaaaaaaaaaaaaaagaggtttaattgacwctatccagggtttacaaccagagttgtaaaccattctgtttctattcaatttgtacaaccctgtacactttccaaaacatcttcccatttgttatctcatttgatctttcttagcaacacaatgaattacagttcagagattggtatcattattttacaaataaaacactwcgaaatcctgagaagttatgaaaccacctccaatagcacagtgtgcagattttaagatcagtaaaaggcagcagaatacaaggtgggtaaatctgaaggggtttgatgacagatactcctagaacctaggaggcctgtgtagaacaatgagattgacgctaccaaagacaaattttgttcctgttttcatttctaccataattgctatgaacccagaacctatatgttccatcacagaatactgataaggttggacagtcagcaaacccacaggacaccacaatacacgaagcacctgcaagttgggttccttgagaaccagtggtgggttggccwatctttcttagcaacacaatgaattacagttcagagattggtatcattattttacaaataaaacacttcgaaatcctgagaagttatgaaaccacctccaatagcacagtgtgcagattttaagatcagtaaaaggcagcagaatacaaggtgggtaaatctgaaggggtttgatgacagatactcctagaacctaggaggcctgtgtagaacaatgagattgacgctaccwaagacaaattttgttcctgttttcatttctaccataattgctatgaacccagaacctatatgttccatcacagaatactgataaggttggacagtcagcaaacccacaggacaccacaatacacgaagcacctgcaagttgggttccttgagaaccagtggtgggttggccttttactctcctactattccaagctagtgcctaacaaatatatttttgaatgcctgaatcaaagtaaaaatttaaattaccccccaaaattatatttttccaaaactgtaaatgtgattatataatcctcagaaaaactaattaaaaatgtttcagcctatacccacccct

SEQ ID NO: 281717 - DNA, 523 bp, Homo sapiens
gatggtcaatcaattttatttctttgttgcctcaatccaattaagttcatctataggtggaatctgcaggctcagcagagaagcagcatccaatccttactaatttctacaaattgccctcatgtgaagctgacttaggcatttttgaatatctacttcccattctattgacccttggtaaatggtgtgccatagttayttgtctagtctggactcaaaaacagaacagtgttctcttgctcacatttactaatggtggtggcatctgataatgagtaatggtccagtctaccttaccaaccatatagacagtgagccagtcccccaccaccccagtgcatgcccagagaccccagtctccaacttgaatccacacaaatcttatgttggacctggcaggttcttctgagaatagtagtttctgaaatggctgctggcattgtactcaccggcaatgtctgaagattctggcctttataagcaatttcaaactgtcttgatcacaattcctacaaaagcagca

SEQ ID NO: 281718 - DNA, 385 bp, Homo sapiens
atagcattgactcagtgattatatagtattctctaggacctccaggtcgatgaatatgagtgcagcattggyaaattgcaggactgagtgctggctggaaatttgtagggccaatgtagcagaaagaggggcaaggaagtcaattgagattttgggtgggagaattttttaggaaatcagcttggagtggagatgaagaccattagaggtgatgaggtagaggaaccagtaggtttagatgaatagatcatatacagcaatctcctaggctgatgctaggggttggcaaagaattacggtaatgtgggtgagagttggcgtggtttaactccatagctatttttttaaaaattttctcgaatttcttcaatcccacttaaataca

SEQ ID NO: 281719 - DNA, 616 bp, Homo sapiens
gagtgctggctggaaatttgtagggccaatgtagcagaaagaggggcaaggaagtcaattgagattttgggtgggagaattttttaggaaatcagcttggagtggagatgaagaccattagaggtgatgaggtagaggaaccagtaggtttagatgaatagatcatatacagcaatctcctaggctgatgctaggggttggcaaagaattacggtaatgtgggtgagagttggcrtggtttaactccatagctatttttttaaaaattttctcgaatttcttcaatcccacttaaatacagtaactaatctgcatcgcaaagccttctacttctcttatattttagtatacgcttggctgcattttagatgacatactcatattctaatttttctaggaattcagtaggatttaaaggctatgatgaaagatagtcttggctttgtgaggatatcagctaaaacaagttaataaaaaattctggatgatccatttttctacatattatactttgacagaattattagtgaatcctggagtaaagcacattctgttggctcatgtagaataaattcaaaatatgagaaatttaaaatgttttgtgtctacacataac

SEQ ID NO: 281720 - DNA, 616 bp, Homo sapiens
gagtgctggctggaaatttgtagggccaatgtagcagaaagaggggcaaggaagtcaattgagattttgggtgggagaattttttaggaaatcagcttggagtggagatgaagaccattagaggtgatgaggtagaggaaccagtaggtttagatgaatagatcatatacagcaatctcctaggctgatgctaggggttggcaaagaattacggtaatgtgggtgagagttggcgtggtttaactccatagctatttttttaaaaattttctcgaatttcttcaatcccacttaaatacagyaactaatctgcatcgcaaagccttctacttctcttatattttagtatacgcttggctgcattttagatgacatactcatattctaatttttctaggaattcagtaggatttaaaggctatgatgaaagatagtcttggctttgtgaggatatcagctaaaacaagttaataaaaaattctggatgatccatttttctacatattatactttgacagaattattagtgaatcctggagtaaagcacattctgttggctcatgtagaataaattcaaaatatgagaaatttaaaatgttttgtgtctacacataac

SEQ ID NO: 281721 - DNA, 616 bp, Homo sapiens
gagtgctggctggaaatttgtagggccaatgtagcagaaagaggggcaaggaagtcaattgagattttgggtgggagaattttttaggaaatcagcttggagtggagatgaagaccattagaggtgatgaggtagaggaaccagtaggtttagatgaatagatcatatacagcaatctcctaggctgatgctaggggttggcaaagaattacggtaatgtgggtgagagttggcgtggtttaactccatagctatttttttaaaaattttctcgaatttcttcaatcccacttaaatacagtaactaatctgcatcgcaaagccttctacttctcttatattttagtatacgcttggctgcattttagatgacatactcatattctaatttttctaggaattcagtaggatttaaaggctatgatgaaagatagtcttggctttgtgaggatatcagctaaaacaagktaataaaaaattctggatgatccatttttctacatattatactttgacagaattattagtgaatcctggagtaaagcacattctgttggctcatgtagaataaattcaaaatatgagaaatttaaaatgttttgtgtctacacataac

SEQ ID NO: 281722 - DNA, 572 bp, Homo sapiens
aacaagtaatgagattggcgctgtaacacaaagtctccctgtaaagaaaagccacagacctgaaggcttcactgctgatatttactgaacatttaaaagagaactaataccaaaactactcaaactattctgaaaaatagaggcaatacttccaaactcattctatgaggccaatattaacctgataccaaaccaggcaaagacacatcaaaaaaaaagaaagctgtaggccaatatttttgtttaacacttatgcaaaaatcctcataatactagcaaactaaatttaacaatacattaaaaagattattcatcatgactaagtgtgacttatccaaggaatacaagaatagttcaacatacacaaatcaatgtgatatgtcatatgaacagagtgaaggataaaaaccacaagattatttcaactgatgctgaaaaagcatttgataaaattcagcatcccttcatgttaaaaacactcaaaatacaaagaatagaaagaccatacctccacgcaataaaagccatttgaaacagacmcatagtatcactgaatgggcaaaaactgaaag

SEQ ID NO: 281723 - DNA, 591 bp, Homo sapiens
agttaccttgggctgacctatgctcactataatagtaaaaaagatgcccctgggtggagatttaagatgccagtgaggcatgcgatacatgtactagcatttacagccacagcacatgtgctgccagcagaccacccagaatatgcttaatagcagcacttcttcccaccccttcatgaagaatcatgtaagactcccataaggagagtttcccaagtgtcagttggtgctgtctcacctttgagcatcccactttgagcagccatcagagtgtactttygctttgtaataaactctcttgcttacttttactttggactcactctcaaattcttttgtgcagcaaagtcaaaaacctgaactgggccactgagtatacttagaggacattgtggagttattaattgacctcatttcaatattgttatgtctcagaatagggtggcctgaggagaagaagagacagagggcaactacctgttgttggtggatcagtctaaacacacacatgtttattaattcagtttcccatactacatgagtccagctcatggtgctccaagcaattatgacagtaacatcagagatcac

SEQ ID NO: 281724 - DNA, 591 bp, Homo sapiens
agttaccttgggctgacctatgctcactataatagtaaaaaagatgcccctgggtggagatttaagatgccagtgaggcatgcgatacatgtactagcatttacagccacagcacatgtgctgccagcagaccacccagaatatgcttaatagcagcacttcttcccaccccttcatgaagaatcatgtaagactcccataaggagagtttcccaagtgtcagttggtgctgtctcacctttgagcatcccactttgagcagccatcagagtgtacttttgctttgtaataaactctcttgcttacttttactttggactcactctcaaattcttttgtgcagcaaagtcaaaaacctgaactgggccactgagtatacttagaggacattgtrgagttattaattgacctcatttcaatattgttatgtctcagaatagggtggcctgaggagaagaagagacagagggcaactacctgttgttggtggatcagtctaaacacacacatgtttattaattcagtttcccatactacatgagtccagctcatggtgctccaagcaattatgacagtaacatcagagatcac

SEQ ID NO: 281725 - DNA, 591 bp, Homo sapiens
agttaccttgggctgacctatgctcactataatagtaaaaaagatgcccctgggtggagatttaagatgccagtgaggcatgcgatacatgtactagcatttacagccacagcacatgtgctgccagcagaccacccagaatatgcttaatagcagcacttcttcccaccccttcatgaagaatcatgtaagactcccataaggagagtttcccaagtgtcagttggtgctgtctcacctttgagcatcccactttgagcagccatcagagtgtacttttgctttgtaataaactctcttgcttacttttactttggactcactctcaaattcttttgtgcagcaaagtcaaaaacctgaactgggccactgagtatacttagaggacattgtggagttattaattgacctcatttcaatattgttatgtctcagaatagggtggcctgaggagaagaagagacagagggcaactacctgttgttggtggatcagtctaaacacacacatgtttattaattcagtttcccayactacatgagtccagctcatggtgctccaagcaattatgacagtaacatcagagatcac

SEQ ID NO: 281726 - DNA, 449 bp, Homo sapiens
ttcagcgaactgcagctgacctgaagaaaaggggcctgactgttcgaaaaaaactaacaaacagaaagcaacaacaatatcaacagaaaagacctcccccsctcccaacacacacaaactccatccaaagtttatcagcctcaaagatcaaaggtggataaatccatgaagatgaggaaaaaccagtgcaaaaacactgaaaattccaaaaaccagaatgcctcttcttcttcaaatgattgtaactcctctccagcaagggcacaaaactggatggagaatgagattgatgaattgacagaagtaggcttcagaaggtgggtaataacaaattcttctgagctaaaggagcatgttctaacccaatgcaagcaggctaagaatcttgataaaaggttacaggaaatgctaactagaatacacagtttagagaacaacataaatgacct

SEQ ID NO: 281727 - DNA, 635 bp, Homo sapiens
ttggtttaaaaaaccgactatctcagcagctcttttaggacaaagttgagaagacggaagtgacattagatcagcaaaaatgtcattgtgataaaactcctccagccatgaaataagaagggcctgaacaagcagtgaaaagcagactgccaagatatcaataacttcactcccttggttgaggtttaagtcagactcaacttacactaaattctgtttacaaaaaaaaaaaaaaaacactaaagttttcatgtattaatagtgaggtagacttgcagtaagtttgttcagtaaaaattttaggcttaagcctatcttcaccatgagtatcatgttcccttcagaatgacccttcaaaataacgtttaccatcacaaaaaatctgaagcaaagcaaaaagtctttgcttcaagacttttactaatttatttttactgaatcttgttgcaatatttgtgcaaaatcttaaaaagcacaaatactgcaacaagatacagtagttaaataaatcacctcttttttttccccttactggctgataagcagatttmttcaatagagaataccttttaacagtgtaatgagttcccagatgggccatatacaagcatgtatagatagttgactcatctcct

SEQ ID NO: 281728 - DNA, 474 bp, Homo sapiens
ctgaaatgtagttcttgagtctattgtgccgggtgcctgtgccagatttctcaagcagctcaggtgctgggcacgatcttcctgaagcatctgcagcctggagccattccccccggcccccactcatgtttcaaagctctcaaaccctctctgcrcccccagcgttgagtgtgacatctcaccagtaaagcctggtgaggacagaaggctttctgggcatagaagaccatttccttgggtctatttaaaccctcaaggacccccctagggatggctcccctggaatattaccactgcaatagtgcaaagtaaaaatgcctgtacaataaaaaccaaagaaaccatctctgccaagcaactgggagtgtcatctttctcccatggagctctgctgccaggctcacagtggtggagacccccgagtccagcctctcatagacatttcacttcacacagcagctcctccatgtggaa

SEQ ID NO: 281729 - DNA, 597 bp, Homo sapiens
ctatgttatcactatcaaatatgccctctgatttgtgctgtgtagagcaaataccacgtctggtctactgaattggcaagcctcctggctcaggcaccactggactccaatgttcagaaaacggacagttgctatgttgtgagtattctggcattgttgagttggaaccatctggaatccttctggatactgactgttgggccccttgtagtttctggaatttacccgcttctaggagccacctctctcctctgcacacaggagctcatctgcactaaaggattagaagcaaatagaatctacccyacgatccaagctcaaaggatctggcctgcttgctggtgtcttcccctggcctccgctgggtggtgtttgcctgcccaggtcactgagaccagcagatccttctaggctttgctgaacctggctggtaataactatctgacccttcaattcttccatacactgaactcgttgctccagtgaatccctttcccagcccaccttgttttgtctctgcctttctgtctctcccactttctcaccctttcatgtaattcagcaactattttaaaacaaatagctttatatgaacaa

SEQ ID NO: 281730 - DNA, 529 bp, Homo sapiens
gatttccaagtcagatggcatgatraaaataagaaagcaatacaaatgcctccccttcaaagtcacctaaagcacaccaaaactataaatatttaaggcttgaagcagtggctcacatctgtaatcccagcactttgggaagtcaaggcaggaagatcgcttgaggccaggagtttgagaccagcctgggcaacaaagcgagaccctgtctctacaaaaaacaaataaaataaaaaattaaaacctataattattttaagataagttataaaccagtttgatctcattttaataagtaaataaatcttctatttaaaaagaggtgaggtgagttagaaacagggaagggatctgaagaagaatattaagactattcatcctaagtactaactgaatgcttttcattttcttttttgcttaatctgtatttatttccatgaatatatattacatttttattcgatggctttttggaaaaagtagacatatatcataaatctgtgtgtgtatgtgtgtgtgttgtgtgtgc

SEQ ID NO: 281731 - DNA, 529 bp, Homo sapiens
gatttccaagtcagatggcatgataaaaataagaaagcaatacaaatgcctccccttcaaagtcacctaaagcacaccaaaactataaatatttaaggcttgaagcagtggctcacatctgtaatcccagcactttgggaagtcaaggcaggaagatcgcttgaggccaggagtttgagaccagcctgggcaacaaagcgagaccctgtctctacaaaaarcaaataaaataaaaaattaaaacctataattattttaagataagttataaaccagtttgatctcattttaataagtaaataaatcttctatttaaaaagaggtgaggtgagttagaaacagggaagggatctgaagaagaatattaagactattcatcctaagtactaactgaatgcttttcattttcttttttgcttaatctgtatttatttccatgaatatatattacatttttattcgatggctttttggaaaaagtagacatatatcataaatctgtgtgtgtatgtgtgtgtgttgtgtgtgc

SEQ ID NO: 281732 - DNA, 535 bp, Homo sapiens
gttcttaccagctgaaccacatccctacacaatatatttatgagtatttatatgttgaaaacactgtactaagtgatttggggaacaccaagatgggtaagaccttgccctcaaaattcttagtgtagtggggaaagcaagcaggtaagaacaataaaacaaaggattagatcctgtaaaataatyacaggtaatatgcgttgggcacttggaggaaggactgttctttttctttttctttttctttttttttttttttgagatagagtctcactctgtcacccaggctggaatacaatgtctccatcttggctcactgcaacctccacttcccaggctcaggtgatcctcccacttaagcctcctgaatggctgggactacaggtgtgcaccaccacacttggctaatttttaaaaatttttgtagagacagggtttcaccatgttgctcaggctggtctcgaactcctggactcatgcagtctgcccaccttggcctcccaaagtactgggattacggatgtgagccactgca

SEQ ID NO: 281733 - DNA, 529 bp, Homo sapiens
gatttccaagtcagatggcatgataaaaataagaaagcaatacaaatgcctccccttcaaagtcacctaaagcacaccaaaactataaatatttaaggcttgaagcagtggctcacatctgtaatcccagcactttgggaagtcaaggcaggaagatcgcttgaggccaggagtttgagaccagcctgggcaacaaagcgagaccctgtctctacaaaaaacaaataaaataaaaaattaaaacctataattattttaagataagttataaaccagtttgatctcattttaataagtaaataaatcttctatttaaaaagaggtgaggtgagttagaaacagggragggatctgaagaagaatattaagactattcatcctaagtactaactgaatgcttttcattttcttttttgcttaatctgtatttatttccatgaatatatattacatttttattcgatggctttttggaaaaagtagacatatatcataaatctgtgtgtgtatgtgtgtgtgttgtgtgtgc

SEQ ID NO: 281734 - DNA, 579 bp, Homo sapiens
aaaccatatatactctagaaaatgtgccatagttctaccttccagatttttcgtagtcatactttaacccatatatatctgcttccatagacaaacatgcatataaccttatatatgttcgccacgtgtaccttttgcttttyaagacaaatgggatcatatttatatttgctgtttgacaccttgcttttttgtttttttttttttatttttattttgagacggagtcttgccctgtcgcccaggctggagtgcagtggtgcgatctcggctcactgcaatcttttcctcccaggttcaagcgattctcctgcctcagcctctcaagtagctgggattacaggcacctgccatcatgcccagccaatttttgtatttttaatagagacggggtttcaccatgttggccagggtggtttcgaactcctgacttcaagtaatctacctgccttggcctcccaaagtgttgggattacaggtgtgagccaccactcccggccaacaacttgctttaaaaaaaaaaaaaaaaagtgtgtttagagatggagtctagctctgttgcccaggctggagtgccgt

SEQ ID NO: 281735 - DNA, 587 bp, Homo sapiens
tccagctgaattttagaattatccaaagtattgctaagaatttgtagatgggccctcattttaaacaatacctggaaatattccattatcatttatgcccaaaagcaagcaggaatcctttaatccagttacacagaaaatatgaaatcataggtagggcttttgattttttgcttttgtgggtttgttcatctgtaagttaaaggttgtttccattaagtgtaaatttaatcaatataaccaatatttgcaacaagggcatttcagaatgcaaagagcacctttcttgattaactgatcttgaagaatgctttacccttagtcctccacgtgcctacccttaggaaagcatgctctctgcaaaggttgtatctttaaatcatatttgcacacaacgtaaatgaatgacctgatcccatttatgtgaattcccctcagaaatctcagggcttgtcaaaaagaaacataacattggcaaaggcacctttgttttctccagatttttttttyttgagcagattgttatgcttggccaaaataaaaccaaacatacggcattgagaaatatatgaaaagacagtgcactc

SEQ ID NO: 281736 - DNA, 451 bp, Homo sapiens
ttatttaattcttcaatccaatggtccattttaagatgggaattgtctgtaggktatcagtgaattattatctatcagccacatttcatcacatttcaagtgataatataaagctaaaatttgaaacaatggctataattttctagtattttcttaaggactttgataagtcaaaacaaggagttccttcaatgctttagtttttatctgtaaagacagatccttaatatgcagtatataaagattcacacacactgcatgtagagagatgaatcacaggtgtgaatattgttttgactatcttcccattgggcactgagacagacagcaaggggtattaggagctactctgtaaaccaagagacttggctgcttctcctccattgtgttttgttgttgttgttgttctgggtttactgaaaatattacagcatagcagaaagattcaacc

SEQ ID NO: 281737 - DNA, 451 bp, Homo sapiens
ttatttaattcttcaatccaatggtccattttaagatgggaattgtctgtaggttatcagtgaattattatctatcagccacatttcatcacatttcaagtgataatataaagctaaaatttgaaacaatggctataattttctagtattttcttaaggactttgataagtcaaaacaaggagttccttcaatgctttagtttttatctgtaaagacagatccttaatatgcagtatataaagattcacacacactgcatgtagagagatgaatcacaggtgtgaatattgttttgactatcttcccattgggcactgagacagacagcaaggggtattaggagctactctrtaaaccaagagacttggctgcttctcctccattgtgttttgttgttgttgttgttctgggtttactgaaaatattacagcatagcagaaagattcaacc

SEQ ID NO: 281738 - DNA, 516 bp, Homo sapiens
ttattttcaggttattctcactactacagtgtaaatttttcaggttccaattcaaaacctggtggattattggtcctgaatcctcttccagccttgagctccaaaatgtaacttttggatcttgtgagtttattgtgaaagaatgttctaaactctcatctctgatattgaaagaggcaaatatctttaggcataagcaacctctaagtcttacttctstctctgagatactgccctctcccagatcctggtcccacaattcttcactgctttaatagttctctaattccttgaaatgtaccccagtgtgcgcatgtgtctgtgtattcttgggcatttctggttgttctttgggatggttgttcaaacaccactcaaactaccacttaattatcaaaactatgtttgtatgaggtattaacccttattccagatactgaagtacattcagagaagttttggaacttgtccaaaattatgtagttaataaaaaatgggtcccagatttgaactcaa

SEQ ID NO: 281739 - DNA, 614 bp, Homo sapiens
tcttcccacttcaactcaccaccacgacctcccactctgcatttctgaacatgaccacaaccacctcttcacttggtttcaaacaaatatcactaacctttacatatgctttactaactgtataccctctacaaggtaactactggaactaccaccttgacccaaggatacatcaagatattattatcataaaaccacataattggtacttttaaaacattttacaactccaccaagatcttgttagggaccccagaaattccagctctgttttcttagtaatgccataaaatggagatcttggtgatggactggcctacaaggactctttattcttctatatgtttttctcctatttactcccataataaaatgtcttctatgctctttggacaatttatactctactctgtgaaagtctttgctactatttggccattgaaatatgccaaataagctcaaaactgatgtcaagactttaagyggtagattgtaacagtttctgctgttgtttaatcactgtctggacccagttttgaggcccaggctagagggtagtcagtttcccttcttggcagctgattaagtccactccccaagccaatcactcccct

SEQ ID NO: 281740 - DNA, 619 bp, Homo sapiens
cacaatagctctaaggggtgttgacatttcacttggtaaaatgttaacatgaattcacctcttcaaaaataaagttattagtattgagctatgcaattctaactagagactatttaaaaaattaaagttgtactatagtttaaagaaaacttttgaattagcagttaaatccacattagtcaagtgtccccagtgattaattagaagaagatctagaagtgttaattatgccactagggaatctttaaagttggttctgcacttgctttgaagttttgtcaaaaaaaggacttgggaaatatttgtatgtgtgatacctagatatacaagtgccaccagttttctaaattatattataataaatgtagcacttttatgagtctatycaaacataatcacattgctcatagaaatctaatttttaaaaagtttaattatttttcttgtaaattgggcttgaataactattaatttttcatttactctttaaaattctgagaaatatctaaatcagctttaacaaaataatgactgaagagctgctttgtgaacaatgtttttctatctaatttagcctttttaggtggtttgatttccaaaaaacataaaaccttaagtt

SEQ ID NO: 281741 - DNA, 578 bp, Homo sapiens
ctgtgttctgaaaagattaacacagaactgcttcctctcctctgtgaaaattgtaaactctagcctaaatttatctaagcagtaatcagttaaaaagatgcttctaatctctcaactcaggagacataatttttcagtaaaaataatstcatcagaagtatgtcaagcaattttgaggcatataaagttaataatcactccttctatatttacgcgtcctaaagtgggcaatggggacatattttttcacttttttatgttaatataaaaaaagctatctatagatagataaaattacagctatagatgaatagatagatagatggatagacagatagatagacacatagagtatgtaggtaagaagaacttagagatacatatgcatacttctttcttactaaaaatatgctcatcatattacactctaacaaacatagagccttgctaaagggtatagagctagtaggcaggtgagtatacaccattaacacttacctcaaagcactcaatttaacagggtagagggatttataaacaaatttttccacatcataatgaagcatatctaaaagttg

SEQ ID NO: 281742 - DNA, 578 bp, Homo sapiens
ctgtgttctgaaaagattaacacagaactgcttcctctcctctgtgaaaattgtaaactctagcctaaatttatctaagcagtaatcagttaaaaagatgcttctaatctctcaactcaggagacataatttttcagtaaaaataatgtcatcagaagtatgtcaagcaattttgaggcatataaagttaataatcactccttctatatttacgcgtcctaaagtgggcaatggggacatattttttcacttttttatgttaatataaaaaaagctatctatagatagataaaattacagctatagatgaatagatagatagatggatagacagatagatagacacatagagtatgtaggtaagaagaacttagagatacatatgcatacttctttcttactraaaatatgctcatcatattacactctaacaaacatagagccttgctaaagggtatagagctagtaggcaggtgagtatacaccattaacacttacctcaaagcactcaatttaacagggtagagggatttataaacaaatttttccacatcataatgaagcatatctaaaagttg

SEQ ID NO: 281743 - DNA, 551 bp, Homo sapiens
tctaaaagaaaaaaatgttcagaattcaacattcattcacaaaacacaaattgattgcagatacgttgaaaatgactgattctgcatatgctgaggttccatactaacatttataattgcaattacatagcacatgctttatgtcagactctgttgtacatgtttgtatttaagtcatttaatgcycacaaaattgccatgaaataggcactactattttcaatgtataaatggagtaactgaggcacacagaagttgaattatttcctcaggattaaaaagttaacaagcggttgagccagcattatgcaacccaaatttattttcttaatcatttagcatgctgtcttaaaatattgaccttgatttttgctcatgttacctaattaccattttgtgttcttacctctccaatactgggcatagggtttgggggagaggagttcaagaagacaaaaaaaaataaaaataaaaaaagattgttgctgaatatgtttcactgtttagtcaaattacgtttctcagaatttcagtgatttaagttgaagtta

SEQ ID NO: 281744 - DNA, 551 bp, Homo sapiens
tctaaaagaaaaaaatgttcagaattcaacattcattcacaaaacacaaattgattgcagatacgttgaaaatgactgattctgcatatgctgaggttccatactaacatttataattgcaattacatagcacatgctttatgtcagactctgttgtacatgtttgtatttaagtcatttaatgcccacaaaattgccatgaaataggcactactattttcaatgtataaatggagtaactgaggcacacagaagttgaattatttcctcaggattaaaaagttaacaagcggttgagccagcattatgcaacccaaattkattttcttaatcatttagcatgctgtcttaaaatattgaccttgatttttgctcatgttacctaattaccattttgtgttcttacctctccaatactgggcatagggtttgggggagaggagttcaagaagacaaaaaaaaataaaaataaaaaaagattgttgctgaatatgtttcactgtttagtcaaattacgtttctcagaatttcagtgatttaagttgaagtta

SEQ ID NO: 281745 - DNA, 555 bp, Homo sapiens
atcttggagaaagtatcactcagaaagaggtatgacagtgtaaagaaccaactggaggcagaaggaaggtttggtttgggaccaatcagggctgaagtgaaggcttgacccacaaccaatcagaggatgtagtgacattacactttacgtaaatgaagattcagcctgtggccaatcacagaaagatagggatatataaaataggtaaaaagtaaggaccaattgggaagaagtgtgtgaaataagacaaaggcacaccaaygaaagagaaatgtgtccaaaaaaggagtggaatttgttcacctgggttcagagagtaggcttttccattcaaggacgtgggctctttcttatctggggcctgcagcttgattttcaggctgttcttggtgtgaaggagttttgctgaggacccaccctaactgcctgcctgaatgatttcttccttcctcctctctcattagctcataagctatacaaaaacaggtgacaagctagattagttccactgactgcagtttcctgattttcctattctaaactactagttgcttc

SEQ ID NO: 281746 - DNA, 545 bp, Homo sapiens
aaatcctggttctatattctgttttgtctatctattattgcacaataaattttctcaaatgttgtgatctaaaacaactattttattttgtccacaatttttcagatcaggaattagggaagagcttatttgaacacagtttatgattcacttgccatcagctggagaaacttgtgcctagggaatccactttcaaaatggcttcttcagaaacaggagtttaaaaagaaaacggtatcagtgcaagagaaggtaaamctgaagtaaaaagtaaactgttacagaatgatacatatagtataatactgcttatgtaacgtttaaccccacatcaaaatactatgttttgtttataaaaacagtcacatttaggaaaatgtgaaaacatgggcagaaattatatctaaaagcttctgaacaatgacaaccacaggagagagggcaaggagaatgaaactgagaggaacacataaaagacttcaactgtatctctaacatgtataattcttattatctgagctcttgttattttttctcctggaact

SEQ ID NO: 281747 - DNA, 590 bp, Homo sapiens
tgtctccctcaagtagaaccctctctcacatccttgcacagattaatagaattacaaaaagatctacgtaaaataaaaaacagattccttcctcccttttgatgaaactttgtgcatgcattggggtggagtagagacatattttggcctttttaaccttaacactgttgaagtagtaagatccagagtactgtaataagcatatgaacctatgaaaaagaggccaatataattaatttgccttgcctttcattatgtaaaaagggtcacaaaattcttttgagatgaaaagatggattggtccartcctctttacaaggagacgataatagagtgatttaaaactagcaactatctagtactgaataatttatcccttaggatcctatggcaataaaagtcaacactttaaaatttgatgattcatgatctttgtcataagaactgtcttttcttgtttgtagaaagtagttttcaacaaatagtagataaggaataataactacaaaaaatggtaatagaccatgtgagaacttcggatgatttagcaaattaaggtatggtaatatttaatatttatgtttgctcgc

SEQ ID NO: 281748 - DNA, 581 bp, Homo sapiens
tattttctcttccttatgactttcctaataacactttctattctctagcttatattattgaaagaagacagtacataatacatataacattaaacgtatgtgttaatagacagttcatgttacctrtaaggcttatgatcaataattgtaggctaataataggtatgtttttgaagagtcaaaacctatatgtaaatttatgactgtgcggtgggttgatactcctaacttttgagttgctcaggggttagctgtgtactagctaccggctcattagtcacttagttgctgtcttggttatgaaacccataatgccatgcttgcattcaattaaccctcattttacttcataatgaactcaaagcataaaagtagtgatgctggaattttgttataattgtcttattttattattaattctcattaatctcttaatacacctaacttattacttaaactttataggtataggtatgcatgtataggaaaaaaaaacatagtatgtacagagttcaatactatcttcattttcaggcatccactggcagtctttaaacatatccgtgtagataagagggggc

SEQ ID NO: 281749 - DNA, 581 bp, Homo sapiens
tattttctcttccttatgactttcctaataacactttctattctctagcttatattattgaaagaagacagtacataatacatataacattaaacgtatgtgttaatagacagttcatgttacctataaggcttatgatcaataattgtaggctaataataggtatgtttktgaagagtcaaaacctatatgtaaatttatgactgtgcggtgggttgatactcctaacttttgagttgctcaggggttagctgtgtactagctaccggctcattagtcacttagttgctgtcttggttatgaaacccataatgccatgcttgcattcaattaaccctcattttacttcataatgaactcaaagcataaaagtagtgatgctggaattttgttataattgtcttattttattattaattctcattaatctcttaatacacctaacttattacttaaactttataggtataggtatgcatgtataggaaaaaaaaacatagtatgtacagagttcaatactatcttcattttcaggcatccactggcagtctttaaacatatccgtgtagataagagggggc

SEQ ID NO: 281750 - DNA, 598 bp, Homo sapiens
aacttatctttgagacttccattttgccatcccaaaacaaacccacaatactcattaacactttttctttggttctttcctcagaatcccttaaatatttctccttttatgctcacctctccccaaaaaacatattgatgcttgccccttctaaatgtccttacctctcttctgacagatcttaatgttattgacaggaatcttcagtaattactgtccatgggattttatgttcttaagccatgaattccacatactatggaaaaactttgtctttctagaagcctcaaccactgagtcgttttactcccttatttatagcaatatttttcccccttttaactcctagcatgtgttttggtgacacagggacctatgcttaaattacaatcctttctttattatctatgtggtatgcamaacttttctaagcctatttccttttctctaccatggaaaaattatatttgctaatttacaagattattgtagtatttatattttttatatgaaatactatttgtgaaaatgtcatgtaagtaatagcggaccattcaatattagttttctttttctccacatacctatgtgcatcaat

SEQ ID NO: 281751 - DNA, 598 bp, Homo sapiens
aacttatctttgagacttccattttgccatcccaaaacaaacccacaatactcattaacactttttctttggttctttcctcagaatcccttaaatatttctccttttatgctcacctctccccaaaaaacatattgatgcttgccccttctaaatgtccttacctctcttctgacagatcttaatgttattgacaggaatcttcagtaattactgtccatgggattttatgttcttaagccatgaattccacatactatggaaaaactttgtctttctagaagcctcaaccactgagtcgttttactcccttatttatagcaatatttttcccccttttaactcctagcatgtgttttggtgacacagggacctatgcttaaattacaatcctttctttattatctatgtggtatgcacaacttttctaagcctatttccttttctctaccatggaaaaattatatttgctaatttacaagattattgtagtatttatattttttatatgaaatactatttgtgaaaatgtcatgtaagtaatagckgaccattcaatattagttttctttttctccacatacctatgtgcatcaat

SEQ ID NO: 281752 - DNA, 572 bp, Homo sapiens
accagctaatagaaatattaacaaatatagtaaactagagagtatcttctttttcccagttttaacaggcagcagaatatatttaagagatatgtgtgggcatcttttgatgcttgggtaggagagagtaaaatgaagtatgacagacagagaaaaaatagggttgcaaagagatcacacacccaagcatcatgctctggggtcactattacaggactaccaaattcacatctgyatggaaatgtgtcatttgtaaacagcagacatagggaagcaatgtctgcaaagcaatattgccagaggacccttcagtttcaacttaggtacatagaaagcttaaagctacctgctagaaaacacctaaaactagctagattagatgaaagagtttatggggttaaactaaaaggtctgatattataaagaaaaaatgttcaaattcactgtgaagattttataaatgtaacaaacagacaaaatatgccatagttctttcatctctaatcgtttaattgtagagtaaattatgttgttctgttttcagcatttaatttttaaattagctcttggct

SEQ ID NO: 281753 - DNA, 572 bp, Homo sapiens
accagctaatagaaatattaacaaatatagtaaactagagagtatcttctttttcccagttttaacaggcagcagaatatatttaagagatatgtgtgggcatcttttgatgcttgggtaggagagagtaaaatgaagtatgacagacagagaaaaaatagggttgcaaagagatcacacacccaagcatcatgctctggggtcactattacaggactaccaaattcacatctgcatggaaatgtgtcatttgtaaacagcagacatagggaagcaatgtctgcaaagcaatattgccagaggacccttcagtttyaacttaggtacatagaaagcttaaagctacctgctagaaaacacctaaaactagctagattagatgaaagagtttatggggttaaactaaaaggtctgatattataaagaaaaaatgttcaaattcactgtgaagattttataaatgtaacaaacagacaaaatatgccatagttctttcatctctaatcgtttaattgtagagtaaattatgttgttctgttttcagcatttaatttttaaattagctcttggct

SEQ ID NO: 281754 - DNA, 636 bp, Homo sapiens
ctctgcacacaccatttcatgctcacctagagtggacaatgaacaaactgtcatccatcacgtttgtttgccttgtaagatacactcaaagtgtccagacacagtggtttctttgctgtaaatgctgtttaataaaattgtttcttcacttgctacacctgctatgttctgacagtaaatagtgctatctacctagtaaaatcagcgacattaggaagctaagcagatgttttagggcacagaaacaaatcttatcatgagtgagttaaaaaatgaattttaacaccaacttgtcattttgctcattttttttttcttcttgatctgtcttgtaattaaagggacagagtgcaatggtttgaatatggagagacttctaaaatatgacaccttggtaggggcattttgtagactgtctgattcacagacgcactttcttgtactttagctcgagaaaatttgtaattcaaaaagcctcaagaaagagttcttgcactgatatactttgatacagattatctccataaaaatgttaccacrtgagactttggagtgtccggagtaataattaaacatagcactttgcatttcagcaacaactgatagattcttccatcatcctttagagcaggaagg

SEQ ID NO: 281755 - DNA, 595 bp, Homo sapiens
tctggtccttttgctacctaggaatgaaaagttggggttttcctttcaatttagttctgggaagtcggagtgaaacagccttagtttccctgccttcagaccctattctcctgcctcacagtagtagagactgtgcaggaactgagaaaccaggcgttcagtgaatagtttctggtggccttcgcattattctttttaaaatgaaatagtaatagacacgatttttaacaacaaagattaatgacttkgtaaagtaagtctatagcaattatagcattgtgtttaaacttaagtacttaatcgttccttttcattttgagaattagtagttaaaataaagtgctttaaaataaattttttcatatttttcagctatttatataaaatataatcaaagaagattttttatttatcatgtattttcttttgtctgacagaatattgagtcagattccatttctcaatcgcatgtatagttgtatctatctctggactctatgtggttcttaacctcttttctcgccagcacatacagagtatgtcattgactttggatctgcaaagtaggcataaaaaacagattctctgggctgag

SEQ ID NO: 281756 - DNA, 557 bp, Homo sapiens
aaatctcttaaccatttttgaaacagattacctgtcttttctttgatgtataaaaatttcctttattttcagataagaatatgaatctattattaatkctctaattttgacatatatatatttttctttttagtagtgctaaattttaacattaaaatgtaccaatattttcattttgtggtagaattttttctctttctatttaactaaaaaatttcttatcataggcccaagttttatctttaattcaacaataaaatataaaattcacccggaagtaattttatacatgatgtgaaacagtggtatagtttgcttaaacattttttatagtgatattgcaattgactcataatattttaatgaaaatacctctctttggctttatttggacactactatgatggtcaatatttgtcataaaatgttgatattacataggacccttttagattatttatggagttccattgatgtatatgtcttttctatggcaagactacactgtctccattagtttaacatagcaatatatttgttatccaaagtagcaagtc

SEQ ID NO: 281757 - DNA, 609 bp, Homo sapiens
tggtggctcatgcctgtaatcccacactttgggaggccgaggtgggccgatcacctgaggtcaggagtttgagatcagcctggccaccatggtgaaagcccgtttctactaaaattagtaaattagcaggacgtggtggtgcgcacctgtaatcccagctacttgggaggctgaggcaggagaatttcttgaacccagggggtgagagacagagattgtgccactgcactccagcctggacaactcagtctcaaaaaaaaaaaaaaaatccaagaatgtgcccacaaycacagtgcagatctcagggctggagcaaaaggttcaaaccacagacaagtgtgaaatgctttattcttttgagaaattcccatggagataactaccttttttccatcaaatatttttttttcagtaaaacctgtctagagaagcactttctttttgaatttctctgagaaagatctttctcctctatagtgtctgaccagggttaccagtcctaggactgagactccctgtggaccttttctctacttgttgctgggaatgtgagtaaaacatgagatttctgggattttccagatgttctcacctgtgtggataacacta

SEQ ID NO: 281758 - DNA, 507 bp, Homo sapiens
ttcttaccatgcactttattttgcttggctacttttaattttttcccccccacttctctttgaaaatccgacattgtccaaaccctttcgatgaagaagcttgcttgaatgaaagcgccgtgatgctgtggtggtgcatcagtaaacarggggcccgaggagcgggcagcgcgcggagaaatagggctgatcagcggtaattaccctgacacctcatgcagtacagggaattaactcctaggactttgggccgaatgaagaagacgttgatgtttcacgttgtgaatgcatcagtgcctgaacccattaccagtttaaacggagatgagaatttactatacactttttttttttttttttggttgggaatgtagaccggtgtgcagaaaatgagaaagtaattcaggatgcagaagcaaccacaatttgtatttttattaaggcttttgccttctgattctatatcatatccatgacacataaatacaagagaaggtccatggcaac

SEQ ID NO: 281759 - DNA, 589 bp, Homo sapiens
aaacttggctaataagagctttttgtttattcaagtaaaagtggactgcaagttgtaggattttatagcctccctgcatctttgcttaattaaggcatgcatagrgaatgttttgctagcatattacttgatttaaaatatctaaatatggctgatatttaaatagttaccatcctcttgacttggcttcccctattttattggcttctgaatgattgtttttcttatcgttaggctaggaaaaattattgcaagctttaattaaagaagtgacagtagtcgccacaggaaagatcagaagaagggcttacgatgacctcggcccagacccagctctgtggaggactaattgcaggaccagaggcgaatggtttaacacagctgcccttcacagccctttttgctcaatgtgcacaataatatctgctccttcttgaggactgttactcagatacctgccagttatgagtggtctgacacattctcaacatggagctagggaaacccagaatcatttagccacctaatctaaacaacatatttgttataaagttcacacctgggtagaagatgccaccagtcctctcag

SEQ ID NO: 281760 - DNA, 593 bp, Homo sapiens
actgccatgtaaaaaggataatgtgggaacagtaagaaaaactgtacatacgtaaatttgacaacttagatgaaatagaacagttcttcaaaaattacatattatcacaacttgcctatataaaatacataattttaaaaactttacaattttcaagaaaattaaatttgtatgttaaattctgtaaaaagtaatctctaggcccagatggtttcactggggattttgtttcaaatatttaaggaattaacactgggcacagtggctcacgcctataatcccgacaatttgggtggccaagataggaggatcacttgaacccaggagttcgagaccagcctgggcaacatagtgagactcccatctytataaaaaaaaaaaaaaaagtttttaaaatgccaggcatggtggtgcccacctgggaggttgagatgggaggatcacttgagcccgggagattgaggctgcagggagacattgcattccagcctgggcaataaagtaaggccctatctcaaaaaaaaataaataaaaaaaggatgactattgattttgcacaatttcttccagaaaatagaatttgagaaaatgct

SEQ ID NO: 281761 - DNA, 584 bp, Homo sapiens
aaatttgtggcctacacaggcgtgcatgcaaaatggatctctgcatgcccaaaacaacttagaagcatggcacagaagataggaaaatttaatagggaatgctcatgtcggtgtatattgaatcataaaagaatttcagcaagagcagagccacatagaaaatgaatgtgaacaaattctccaaggagagccacatcctaaaagaaaaaaaatagcagctggccaggcatggtggctcactccttaatcccagcactttaggaggccgaggtgggtggatcacctgaggtcaggagtttgagaccagcctgaccaacatggcaaaccccatctctactaaaaatacaaaaaaattagctggggatggtggcatgtacctgtagtcccagctacttgggaagctgaggcaggagaatcgcttgaacccaggaagcagaggttgcagtgagccgagaatctttcactccagcctgggtgacagagcaagaacaaggctccgtctcaaaaaaaaaaaaaaaaaaacaataacaaacaaacaaaaaaaaamcagcttttcatcaagttacaacacttcaaaatacagt

SEQ ID NO: 281762 - DNA, 568 bp, Homo sapiens
ggaacttacacaaatatcattatgaacatctacttgatctttgaatggagaagggcttaaaaacaaaaaggatcactaaggaaaatattaataaatttagctacctaaagactgaataattgcatggcaaaaatatatcttaagaaaagaaaacactggaaaatctttgtaacaaatataaaaggtgaaagtttagtacctctaatatatgaagarctcattgaaatgaaaaaagaaaacttcagtagatgattggcaaagaaaatggaaagataacactcaaaagaaaaatataaatagctaatagcaagtaatgttcagttttactggcaatcaggcaatcatgagattatagttttaattatctaaagttagcaaaattagtaaacattaaataatttattttttaagagacagggtctcactctcacccaggctggagtgcagtggtgggatcatactcaccgaaatctcaaactcctggcatccagcaatcctcctgcctcagcctctggagtaagtgggactacgagcatgcactgtttccatggctaatttttaaattttt

SEQ ID NO: 281763 - DNA, 595 bp, Homo sapiens
ggaatctaacattattctaagtcatccaattgtaagactaaatactccagaatgcagaggaaatcttgaaaatataaatgaggaaaaatttgttttaacagatatcaaaatataccacagggatgaaaactgcatgacaattgtacaaaaatattcggattattggaaccaaatatgagaagaaaatataggtgtgtgatgggtaacactgagtgtcaactcgattggattgaaagatacaaagtattgatcctggatgtgtctgtgagggtgttgccaaaggagattaacatttgagtcagtgggctgggaaaggcagactgacccttaacctgggtgggcaccatctaatcatctgccaatgcagctagaataaaagcaggcagaaaaatgtgaaaagagagactggcctagcctcccagcctacatctttctcccgtgcaggatgcttcttgctcttgaacattrgactccaagttcttcagttttggaattggactggctctccttgcttctcagcctgcagatggcctactgtgggaccttgtgatcatgagagttggtacttaataaactctcctttatgtatgtatgt

SEQ ID NO: 281764 - DNA, 595 bp, Homo sapiens
ggaatctaacattattctaagtcatccaattgtaagactaaatactccagaatgcagaggaaatcttgaaaatataaatgaggaaaaatttgttttaacagatatcaaaatataccacagggatgaaaactgcatgacaattgtacaaaaatattcggattattggaaccaaatatgagaagaaaatataggtgtgtgatgggtaacactgagtgtcaactcgattggattgaaagatacaaagtattgatcctggatgtgtctgtgagggtgttgccaaaggagattaacatttgagtcagtgggctgggaaaggcagactgacccttaacctgggtgggcaccatctaatcatctgccaatgcagctagaataaaagcaggcagaaaaatgtgaaaagagagactggcctagcctcccagcctacatctttctcccgtgcaggatgcttcttgctcttgaacattggactccaagttcttcagttttggaattggactggctctccttgcttctcagcctgcagatggcctacygtgggaccttgtgatcatgagagttggtacttaataaactctcctttatgtatgtatgt

SEQ ID NO: 281765 - DNA, 544 bp, Homo sapiens
ttttcttgtagtaatttcatagtttgaggtcttagatttaagtctttaattcattttgatttgatttttgtgtatggcaagagattgaagagacggtcctttcccctgtagtacattgttttttgagacatagactacagtatastgtaaacataaattttatatgcagtgggaaagcaaaaaaatttgggtgactcattttattgcgatatttactttattgtgatgtcctggaaccaaacccacaatatctgctagtgtgcctgtggatttaaatggaggtgatgtgcatagccagatggatttagattatttgaaaagtggtctgtctaatgatggcaaatactctgatgaagagcttgaatcattttttttttcacaaaatgtgaggttgaaagagtcatatttctaaattaatatatcacttcctacaagtgatgtgtcatataaagaattctgataatgatacctatttcataaggttataagaataaagtgagatagtgaatattgagcaactagaggttatagaataaatattaac

SEQ ID NO: 281766 - DNA, 646 bp, Homo sapiens
atatgtcaaaacccatgatgaatagacacaacaatccagacccaatcctccaagaccccacaacccggcactcacacagacacacattaggactcttcagtagattttagaagtttcagatgaaatcttaaagcctatcagaacctttctctaatcaagaatttccttcygcaaaatcatccccacctcttcagtattaaatagtttgagaaacatatcatacctccccaagatgaagttttatatttagcatatccactacaatatgcttaattcaaaatcaaacatgaccaattttgaatcaatcttttcttctacctggtcatgggtgtgtttcccagcactttctcatttcattgagccaccttaatatttttcttataatctcgtaagaaaaacagcagatgaaaacagcctgccaaggtccataatattcgcaggctaattcctcgacccagaccaatttagcagcttatggaaatttgcacaagatttgaataagcagccaaacttcagggtacttgcccaaatgcaatcttgccgtctttttaaatttatacagccttaacagaaaccagacagttcttccatcttagattacagagtagtgaaggatgccaatgcctttattagtaagattctgagt

SEQ ID NO: 281767 - DNA, 519 bp, Homo sapiens
gaaattatacgtgggctctcagttcctttctaagccaacaaacaaaaacaaagcaaccaccatacagataaacaaaacaatattccaaaaaataccatgaaaaaaatcttatacatgcttaaaaggtcttttcataaatcagtgttcagttagcaaaaggatatcatttaagcattattatatcccaaaaactaattgctaatgagtaaaaatgtaaatattagatgtcttcaataatttttttcacctgctttgcccataaagtcttaaactattctcttttttgactatgtgcaatgatttatagggagatatgaccrtgagccctcaattcatttatatttaactcaacaaagctttaccatgaagtttcatgggatgccctggatctgtttaaaatgctttttttctcctagaaattagaaaattagcaacaataaatggaactaaaacccaaagcatgtcaggtctgatatcaatgctttatgaatgtaagatagcattggaaagtggcagaat

SEQ ID NO: 281768 - DNA, 534 bp, Homo sapiens
ttcttttagactacatctctctatactgcagtagtccctgaatgggagacttataaactttcctagttcaattaaatgtatattggtattaacaacacactttgatgctaaagccataaaacagcagtacattaaatgtttagaggctccatccacaggtcattttaattttcctttcccatgcaattatcccctaaaccagcccgtgaaaggcctttgtcctttctcttctagaaaaccatgttggtcaggatccaattttcattaccacaactttcacatctgtgaattttatcctacttgtaagctaacagaccctaccagttgaattcaggtactttttctcccctatgggcacccamaccaagcagtttaagataggtatgttggagatcacagccaagaaatgatgttatttccacagccagaagtgtgagaggtggtggaaggaggaggtggaagaggctagcctgcaggagacagttgttactaggaagtaatcccactttgactccttgccccagaacagtgttg

SEQ ID NO: 281769 - DNA, 596 bp, Homo sapiens
gtaccctcagtcttcaaacaattagaggcaccatcctctaaagctgtttctgaagactgaggtggcagatctcaagttttttctctgcgaaattcaatgctaaaagtacttatcttgtgttgatcactayagagaagcactcacaggaaaacgggcaaatacaaattggtgaaataatacaagacagtatgtcatattaagtgacagcttaattcccatgtgcagtgtaagtgctagaggaattcagggagggaacagttcaatgtaaggctgaaactaagttttccaagaaaaggcactcaagcagctcttgactattctcttctgtccctcacttattggttaaatcttccaagcactcttttgtgagaccttttatctatttctgctactcatgttggggttctcatcaccttgtcattctattttttaccacagacagccctttacaaagaacatttacttctagtagattccaaaggacagggaacagagctgggtgcggtggctcatgcctgtaattccagtactttgggaggctgaggtgggcagatcacttgaggccaggagttcacgattagtctgggcaacacagt

SEQ ID NO: 281770 - DNA, 295 bp, Homo sapiens
tgaatagtaagaacatgaacccagccagtaggctgtgtcggcaggaggctggcctgggtacataccagcagcaggaggcccctacccatgcttcctgcactctcagtgttgggccatgtgtgctggaaggatccattctgagtccaagggacaggaagggggctcctgagggcaaagaacagaggcctatgtagtmctctctacatgcctgtagattataggccacccttctgctttcctcttttcttcacagctgctaccacctgccctgtcttttccaccctatcaatctgag

SEQ ID NO: 281771 - DNA, 538 bp, Homo sapiens
attgggcgaccatgaggcagttgctaactgtctctctaaagtaacaatttgtcacagctggtgccagggaaaggcagtctctaatagaaaatacctgagactggtaatcagcagcttcccaataagatctcaggagtggggagaagtaacgcaagactccagaagcatgccaacatataaaaccccaagtcaagaggccaagccttgcacttggcctctcacgtcacccactcggccctcttccaagtgtaattttcttcctttcattactgctctaaagcttcttaataaactttcactcctgctccaaaactgccccggtctctccttctgccttatgcccctcagtcaaattcttttttctgaggaggcaagaattgaagttgctgcagacccatgcggataacttcctctgstaacaaaagcagaggcatatccagcatgggtcagcaggagcagtccacataaggcacaggcaaaaatagggtgcatcatctgtaaattttaaagcaacgatttaaatgacaagaagtcagcc

SEQ ID NO: 281772 - DNA, 458 bp, Homo sapiens
tttccattattgaattttttaaatttaattggaattgtcctatagacttgctacctaattttaaaaatggtaaataagatgattactttgcagatgctgtttgctttaaaaatatatgcaataaagtataatcttacagaacaattagaaagtaattatttgcattagagaaagaaccattccttaacaaatagcttcattcatttaaaaaaaatactgtattttgacagtgtagttcaactgttattgatttatgacaattgaaaagaagaaaagaatccagggaagtaaaacttaaaaaatatacaaaagctaaatgaaggatttggggctgagaataataaatgctactaacagctgactcaaataccaataatgacattacagccaaaagtttatctatkgcttacctagagcttttagccagagtcactgatgcttgttcctgagactggatt

SEQ ID NO: 281773 - DNA, 467 bp, Homo sapiens
agagttaaaaaaggaccaggttccttgcattgctattctccacctaatccatttgtataaactacaactaagatgtcacagctaaaagtcagaaagtacatgatagcaaagaaaatattaacaagatactcaaagatgaagaattccccagataggtggctcagtccattgcacatcaatctccagagaaaccaagaggaagaggaactcttcttgaagacacttaaaatgagatttgagagctaagagtcaacaatttaccatactctcccagtgctcagaggagctgtcctgacacatttcctcatctctgttgtcattagtggtcatctctggctagtactgacttggagtccactaaaracatccctcgcatcttctagcaacagttctccagctctccattgtctccatgtcatccctgcagcctgtgggccactctgcagcctgcattcctgccaggtgtc

SEQ ID NO: 281774 - DNA, 596 bp, Homo sapiens
tttacaacttttaattgataagagaatatcttcatgaccttggatagtgaaggatttcttaaataagtctcaaaaagtataattgtatagggaaaattaattaattcatctagattaaaatgaagaatttatgtttatcaaagacatcataaaatagtgaccaggcaattcataaagaagacatgtaagtatattaaactaacacaaagttagtgccctgaatatatacagatcagctatcaatcagtaagaaaaatagtcccttttaaaataccttttaaaaaatgagtaaaagacctgaatgaccattttacacagggacaaaatgatggtcaacagacacgaaaatattcttaagcttacacaatataaaggaaacacaattgaaaaccacagtgagatayttcatttcatactccctgtaatggtaacaattaaagtgcttgatagtgtcacttgctaccaagaatgtggagcaatgggggcactcacatattgttactgggtttaaaaattggaacaatacttttgggaacatagtgcatttatcttataaagatgaccatgactatacccctttgattatcaaaataact

SEQ ID NO: 281775 - DNA, 867 bp, Homo sapiens
ggagcgaatcatcccttgttctctagataccaagtaatatagatgtgggattttgggggaaactttttgccacagtgtctagcctgtgatgtcttaattataacaataaattaataacatgaataatrgagaagaaatcagaaaaaagttacttccaacctggtaaaatatcacacatatatcatatgttgtaaatgtgagcttagcaataaaatgtaattcacctattcagggttttgattattactgctgtttctatttatctatctgtagttatctaaagattatgttctgaagatgattaaaatggaaggaagactccaagtgctagtgtcacattttgcttaggtggcagtctcttctgataaatctatgccttccagatacccawtgtacataacttatatagaatggactcaaaattatttttatcaatatgattattggtagtagcaatattattactcttccactatttcccaaaaagctggcatttgctataaatatttgaggcaattttctcaataagaacacaatgttagagttatcactcattaactgattttgtcagaaggaaggtcttatgagcaaagttagaaggctgtcaaaagtctgaggtggatatagttattataatatacatgattatcttattaatgatcatttgaaacctaaaaataaggtgacagtagagaaaagggcaagtaaawttgtaaatttggggttctggcaaagttcacttccatgtgatcattattttttaatgttcttgagctcccaatatgaagtgctagattctgaagaggacataatgatgagtataaagatgtagtcattccacaaggagaactttattattggtgcact

SEQ ID NO: 281776 - DNA, 637 bp, Homo sapiens
ccaagtgttcctccttacaattgcctctcccacaaatgtgagtgcactatgaatgctatctttatatccttttttatttttatttacatacaatacttatatattcattcataaacattcaattgccagtttatcttcttttggacctttgtaaaagcagtatcttactgtaagtaggtctcctggattgattatatcatattcatgcgtattgtaccacatatctttatttcattcatttacacatgcaaaatagctgartgggtgaatgaatccttctacatgcccatttttttctgaacatttgaggtctctctttccttatttctctttcccttctttctttcctgcatctctctctttctctcccttcttctttctttctctttattttctccccttccttccctctcttcttccttttttcttttctttccttctttgtttcattccatcctttcttccttccttctttttttccctttttttctttttcttattacagcagttttacaataagcattcttatagctgtcttgatacttgacagagagaaagcatagaatgcattccatgggagtgaaattgttggatcacagctgaggcaaatatcagggctcaaagaataaaacaggtt

SEQ ID NO: 281777 - DNA, 525 bp, Homo sapiens
caccactgccatgatgctggctgcagtgggggaggtgcactgcatgggagtggggcagcatgctccataaggccagtgggagccaggagcaggcaggagccctgccctccaggtcacagctgcatttgcccaagccctaactgcagacccaggtatccctgtgctcttgggggccaggagctagcaggagccccaccctcccaggcagagctgcagacacccaagcttcccaaaccactgctgtggacctgggcatccctgtgctcttgggttcgggagccagcaggaatcctgccctcccaggcacagctgtagctgcccaagcctcagctgcagacccaggtatctatrcattgtaagggacccaggaaggcccccctcttcccctgcaagctcggaaatgcctgctcccactgtctggcctgtccccacttgtggtacctgctctgatctctgagcaaatttgaggccgagcccaggtgctgtagcaacccagatgggtgtgtgcatgcttggggaagtgtt

SEQ ID NO: 281778 - DNA, 525 bp, Homo sapiens
caccactgccatgatgctggctgcagtgggggaggtgcactgcatgggagtggggcagcatgctccataaggccagtgggagccaggagcaggcaggagccctgccctccaggtcacagctgcatttgcccaagccctaactgcagacccaggtatccctgtgctcttgggggccaggagctagcaggagccccaccctcccaggcagagctgcagacacccaagcttcccaaaccactgctgtggacctgggcatccctgtgctcttgggttcgggagccagcaggaatcctgccctcccaggcacagctgtagctgcccaagcctcagctgcagacccaggtatctatacattgtaagggacccaggaaggcccccctcttcccctgcaagctcggaaatgcctgctcccactgtctggcctgtccccacttstggtacctgctctgatctctgagcaaatttgaggccgagcccaggtgctgtagcaacccagatgggtgtgtgcatgcttggggaagtgtt

SEQ ID NO: 281779 - DNA, 595 bp, Homo sapiens
aaccttgctttaacaatcactctcctagaggaagggaatattttcagagaacaagtggaactgggcacacaagggcagcatttgtctttgacacatgcacaaagtgcccatattgtattcatgaaattggtattttatcaaatatttttagaagggttgcatattacaaattctgcaaagtatctttcagaaaaatccttttcaagtatcttttctggagcaccagctcarctcctcttctctttttcgaattgtaactgtgagtcatcaagactttcactctctataagaaattcatcaacccaatcttgctatcccctttctattcagagctatttagttgtctcactgcttcttcatcttggctcaggtcttttctaatgagaagtcaagtaaatgaaatatatgtatatgcccatgtcagattctgccttgtccctttgtgcctccttctgtctctaataaggcatactctctgtagtttcatgactggccaccctctgagattacttctgaccttggactcaaaaccctacgattattattaactgcatgtttagctgctgaaatacaactattctggttacgcagacca

SEQ ID NO: 281780 - DNA, 595 bp, Homo sapiens
aaccttgctttaacaatcactctcctagaggaagggaatattttcagagaacaagtggaactgggcacacaagggcagcatttgtctttgacacatgcacaaagtgcccatattgtattcatgaaattggtattttatcaaatatttttagaagggttgcatattacaaattctgcaaagtatctttcagaaaaatccttttcaagtatcttttctggagcaccagctcaactcctcttctctttttcgaattgtaactgtgagtcatcaagactttcactctctataagaaattcatcaacccaatcttgctatcccctttctattcagagctatttagttgtctcactgcttcttcatcttggctcaggtcttttctaatgagaagtcaagtaaatgaaatatatgtatatgcccatgtcagattctgccttgtccctttgtgcctccttctgtctctaataaggcatactctctgtagtttcatgactggccaccctctgagrttacttctgaccttggactcaaaaccctacgattattattaactgcatgtttagctgctgaaatacaactattctggttacgcagacca

SEQ ID NO: 281781 - DNA, 531 bp, Homo sapiens
tcacaaatgagagcctgaggagggtttacagaaggccctgctcctttgctggtgaagaactcccatttttgtctcccctttaccatgtcacrctttataactgtattgattttcaagtatgcttttagtttatttgtctctttccccaagcaccttaggaattcaacaaacgctactaggaaaagaaacaaaaacaaacacacaagcaaaaaaaagaagaaaaaaaaaaacacacatttggctcgtttctcaggacctaccttttctcccacattttggcctctcaaatcctgcctgccttgggactcttgcattccaatactgtcaggctgccaaagctgctcgcttctctggctcttggtggcttcactctgcctggtttcacagtctcccacctaacactaagacttggtaattctgttatttggtaaactatgacaaaatggtggactcttcttccaatggcttcctcttctctaagatcttggtgtcttgatgttgtttacctggtagctctggatgacttcgaat

SEQ ID NO: 281782 - DNA, 596 bp, Homo sapiens
tattaagaaactgacatctggatacattaaagacatattattcattgttagcagatctgggactagaatttttaatatgttttttaacgtaatagtaaataccagaaatggatgattaaatagtataaggcrtggtctttgctctctgggagctctcagtttagtttatgaagttccaaataaatggtataaccaaaaactgtatgaggccttatacgatttcagagaaagcagagataagtttggacagtatttatctaagtaagagagttttaaaaatctgcaggagttaagcaaatcaggaggaagaggcaatgaatttcaaaaaaatcaagatatcttaacagctatgtcaacacttagttctgtacccattgcatagaaagaaatcacaaagaagagaggaaaatagacacctcctgagttctgtagactagaaaaaatttcttatgatgcttttaaataaactttgaagccaacttctcctttagaagagataccacactccatgctgtctgccatgaagggcagaagaaggcaagtgtatcaatcactctgtccagttttgggtctttcaatgtctgttcccatctcaa

SEQ ID NO: 281783 - DNA, 553 bp, Homo sapiens
caaatatgactctatgtcccaaacatcccatcctctgcattaaaaatgaatgaaatgagaaaaaggaaaaaaccatctgcaatttagatttgtcattcttttgttatcttcatgcattttatgaaaaagtggctggcaaagtactgaaaacccttcaggaattcaatttttatatatttggttgcaatttttatatttggaataacgcttattttggaatagacagctgttaaagtctgttattgcagactttaatgtctgtttttgcctagttgtcattttcctttaggctacaaccccgtttttgctatagctaaaataaagaggtgttagacattacatactggagtgagagatgaaacaggaagaaaattttacgatcattagtcagggagcactgatcagagtacaactggaagttccatatctttgcctttaaatttttgtcaaaatgtacatgttctggatcattaagaaaagaacattcagtacagcataaagtacaagtcagtgagaccccactgggttytacgttcttcacaacttttttttt

SEQ ID NO: 281784 - DNA, 254 bp, Homo sapiens
ctcccaaggacaaccaaagaaggatgtaaagtgctgtgattaataacaggattatttagttatgtttacagagctaggtgtccaaaatttcacgcaaaattattaaaatctctgaataaaaaatttccatcatggggtaactcaatgcccacctcacccccaaataataataagctacaaagagasatatagaatctagtttctgaagaacactacagttaatttcttcattgatttgatcctttttaacccag

SEQ ID NO: 281785 - DNA, 572 bp, Homo sapiens
cttggttagcccaaaggcagtgttattgcagtggaaaaagaatgcttctaaacattgtcattttgtctgtctgatctagtcaaattaaaacttcttgcaggtagggaatttgtctgtattgctcactgctttatgactagcacttaggacaatgcctggcacacagtagctactcaataaataagaaatgaatgagttgaagattgagaaaccacagcaggagaggccttggcagtgttctatttgagctgacagggacccctggagtgtcagaaataagtgtactggtaccctaaaactcctaacactgtccaccttgtctgaatatcctaggaaactaatacaaagagctasagcttaaaaaaaatagaacagataatgttttgtactgtatatattttaggggtacgacacaatatttttgcatacatatatatataatgaaattattactacagtcaatcaaattaacgtatccatcatctcacatagttatctttctgcttgtgtgtgtgtgtgcacatgtgtgtatggtaagagcgcctaaaatctttcttagcaaatttccaata

SEQ ID NO: 281786 - DNA, 572 bp, Homo sapiens
cttggttagcccaaaggcagtgttattgcagtggaaaaagaatgcttctaaacattgtcattttgtctgtctgatctagtcaaattaaaacttcttgcaggtagggaatttgtctgtattgctcactgctttatgactagcacttaggacaatgcctggcacacagtagctactcaataaataagaaatgaatgagttgaagattgagaaaccacagcaggagaggccttggcagtgttctatttgagctgacagggacccctggagtgtcagaaataagtgtactggtaccctaaaactcctaacactgtccaccttgtctgaatatcctaggaaactaatacaaagagctacagcttaaaaaaaatagaacagataatrttttgtactgtatatattttaggggtacgacacaatatttttgcatacatatatatataatgaaattattactacagtcaatcaaattaacgtatccatcatctcacatagttatctttctgcttgtgtgtgtgtgtgcacatgtgtgtatggtaagagcgcctaaaatctttcttagcaaatttccaata

SEQ ID NO: 281787 - DNA, 572 bp, Homo sapiens
cttggttagcccaaaggcagtgttattgcagtggaaaaagaatgcttctaaacattgtcattttgtctgtctgatctagtcaaattaaaacttcttgcaggtagggaatttgtctgtattgctcactgctttatgactagcacttaggacaatgcctggcacacagtagctactcaataaataagaaatgaatgagttgaagattgagaaaccacagcaggagaggccttggcagtgttctatttgagctgacagggacccctggagtgtcagaaataagtgtactggtaccctaaaactcctaacactgtccaccttgtctgaatatcctaggaaactaatacaaagagctacagcttaaaaaaaatagaacagataatgttttgtactgtatatattttaggggtacgacacaatmtttttgcatacatatatatataatgaaattattactacagtcaatcaaattaacgtatccatcatctcacatagttatctttctgcttgtgtgtgtgtgtgcacatgtgtgtatggtaagagcgcctaaaatctttcttagcaaatttccaata

SEQ ID NO: 281788 - DNA, 549 bp, Homo sapiens
agtagatgagttttgtcatgagggattcagatatggtcagaagtagattaattgtacaaacagggaagcaggaagattcagggagtcaggcaggaacaggtactagaaaccatsgtaaggccaaaatctaaatagattttttgttagaaaagaaattgatatccaagtaaaagcgatgcatgtaggctgtaatctctgggtatgagtactcatttcgtgcttaccctgttcctgcagaaacaaattatgtattaactctccctctcactggccatttcttctgtgaataattccctctctcctatcccccctccataactgtgcattcaatatatcttgtattctaagatgttgcttatcgtacattaattaacatgtgctaatttatcattaatgatatatttttaaattcttttatccacaaggtagaaacttgtaatcgattttctatcagtaatatttctctttcatttaaacactcctgatttctgggtatatatcccttttaagctaatgagaagagctttcagctaactgacttttgctgca

SEQ ID NO: 281789 - DNA, 549 bp, Homo sapiens
caactaaaatgtgacacaaaattaaatgtctcaaataagttattctcaaactttagtatgcttaacaaaattaccttgactaccccaatatcagggccccaacaacaggaattctgattcaatccaataagtcagtgtagaaatctgcatttacaagcatacggcgtcaattagataggggatcaagaaggcttctaagtacataatatttaattttattagatctctaaatcttctgacactcgttgctttcagcaatattaagatgttgaggatgaccttatacttaagttccatactacytgagcatttagttctaccaagtggaaaggatgatgtgagctttattctgcctctgttcttatcaacagagagtccaaatgcaagggtcaaggagtatcaggaggaacaacagcttcctctgatttatcttgatacatgcaggcaatggtctttcactagtaagtattggcaaatagaccataaacattggtttagaattctacagtggtgaaagaaaaagcccatgaacaagacattatcgtgatc

SEQ ID NO: 281790 - DNA, 549 bp, Homo sapiens
caactaaaatgtgacacaaaattaaatgtctcaaataagttattctcaaactttagtatgcttaacaaaattaccttgactaccccaatatcagggccccaacaacaggaattctgattcaatccaataagtcagtgtagaaatctgcatttacaagcatacggcgtcaattagataggggatcaagaaggcttctaagtacataatatttaattttattagatctctaaatcttctgacactcgttgctttcagcaatattaagatgttgaggatgaccttatacttaagttccatactacttgagcatttagttcyaccaagtggaaaggatgatgtgagctttattctgcctctgttcttatcaacagagagtccaaatgcaagggtcaaggagtatcaggaggaacaacagcttcctctgatttatcttgatacatgcaggcaatggtctttcactagtaagtattggcaaatagaccataaacattggtttagaattctacagtggtgaaagaaaaagcccatgaacaagacattatcgtgatc

SEQ ID NO: 281791 - DNA, 582 bp, Homo sapiens
aagaatgcatttgctttctacattgcttcagagttgaaccctcaatcatctgtcagcatgtgttcttagggcaacatttctgagatgataaaagaattttaaacaggaaaaagaatcttaactatatttagtctaaaaatctgtcaagtagatcgtgaatggctacatggatgtaacctgattagctccagacaagtgtgagaaacataaaaatataattcagcttggctgtgtatcatatccatttacaatggatcatatgtatcataacgtatttagtttaaytgagttaataaggagggtgcatgtattcaattccatcacatattgtattctacacttgaaaaagtacttcaatgtatattatcagatttaattctcacagcatccctgagacagatggtatgatgcccactttacagatgatgaaattgaaattcaaagaagtgttttaaaggaaacaccttatctattaccttatatatatataataagcagaagatgaaaaagggggaaacagaaaagataagtagataattctgtcagcagccacagacatcacaagaactcaaagagcacagc

SEQ ID NO: 281792 - DNA, 1127 bp, Homo sapiens
tttttcatgcggcattgatcttttgcaaatgcttctatgattggatatacatccataagatcattccttcttaatgtttccatcttctgtgcaatgcttctattttgttttgsgtgcatggaaatacatttctctcatgcactcttatacagaccacagattaggagtaaacaatactgttgctctaacagcaatatttgcatgtcttcttatcctactgtgcatgtgattattttgaaccagttagtacttcactggtttcttcaggcaaatgtagctttgattcattaaaagcttctggaagcttttagcagctggaaggactgccaatgcagacaaaatgacacattttaaaactgattttaggctttaaggattttagattttagggattttgatcttttgagactttttaacatttgagattatggtattggggattatatcttttgggattatgataggaaccaaagatatttataccacatagttacgcccaccagggaggatccactatggaggaaacattaaacaacccaacaggccagccgcggtggctcacawtttttcatgcggcattgatcttttgcaaatgcttctatgattggatatacatccataagatcattccttcttaatgtttccatcttctgtgcaatgcttctattttgttttgggtgcatggaaatacatttctctcatgcactcttatacagaccacagattwggagtaaacaatactgttgctctaacagcaatatttgcatgtcttcttatcctactgtgcatgtgattattttgaaccagttagtacttcactggtttcttcaggcaaatgtagctttgattcattaaaagcttctggaagcttttagcagctggaaggactgccaatgcagacaaaatgacacattttaaaactgattttaggctttaaggattttagattttagggattttgatcttttgagactttttaacatttgagattatggtattggggattatatcttttgggattatgataggaaccaaagatatttataccacatagttacgcccaccagggaggatccactatggaggaaacattaaacaacccaacaggccagccgcggtggctcaca

SEQ ID NO: 281793 - DNA, 563 bp, Homo sapiens
tttttcatgcggcattgatcttttgcaaatgcttctatgattggatatacatccataagatcattccttcttaatgtttccatcttctgtgcaatgcttctattttgttttgggtgcatggaaatacatttctctcatgcactcttatacagaccacagattaggagtaaacaatactgttgctcyaacagcaatatttgcatgtcttcttatcctactgtgcatgtgattattttgaaccagttagtacttcactggtttcttcaggcaaatgtagctttgattcattaaaagcttctggaagcttttagcagctggaaggactgccaatgcagacaaaatgacacattttaaaactgattttaggctttaaggattttagattttagggattttgatcttttgagactttttaacatttgagattatggtattggggattatatcttttgggattatgataggaaccaaagatatttataccacatagttacgcccaccagggaggatccactatggaggaaacattaaacaacccaacaggccagccgcggtggctcaca

SEQ ID NO: 281794 - DNA, 563 bp, Homo sapiens
tttttcatgcggcattgatcttttgcaaatgcttctatgattggatatacatccataagatcattccttcttaatgtttccatcttctgtgcaatgcttctattttgttttgggtgcatggaaatacatttctctcatgcactcttatacagaccacagattaggagtaaacaatactgttgctctaacagcaatatttgcatgtcttcttatcctactgtgcatgtgattattttgaaccagttagtacttcactggtttcttcaggcaaatgtagctttgattcattaaaagcttctggaagcttttagcagctggaaggactgccaatgcagacaaaatgacacattttaaaactgattttaggctttaaggattttagattttagggattttgatcttttgagactttttaacatttgagattatggtattggggattatatcttttgggattatgataggaaccaaagatatttataccacatagttacgcccaccagggaggatccactrtggaggaaacattaaacaacccaacaggccagccgcggtggctcaca

SEQ ID NO: 281795 - DNA, 583 bp, Homo sapiens
tactgaaattagaaaataatttcatgtgatctctgtagtgccaataggaaatattcaatgccaatagcatgaggttctttgagcagtgtcatgtacaatatggatcaaaagctaacaccttacaaagaatcattgatgctttgattcaactttaaataaatctcatttccatatttacacctttacttttatttgtatttttattacttctactaaaatcagtacaacttttctcattacgtcctaactaaaaaagagtctgcaacaatttgctgttgtttctgatgtttcatctaaaagggattttacacttcataaccttctaaggaagtctttttcatgaggaaaatattgcacaggcaaaggtaatatttttctgcattgcaattattttcaccatggctcttttgtaaaatggtgaatcattctgatattttattacctctgccatagtaaatacmcctattatatatttgtattattgcagtagatgtcattttggtacttaaaaacttgctcatgattttagaatcagaaaacacttttagtagctgtatgttcaaaagatatttgtgctgaaata

SEQ ID NO: 281796 - DNA, 1137 bp, Homo sapiens
gactggctcatcaaagcttggcagactttcagaggtaggaatgtttagggattacagaacttcatactctactggtgtggtcattgtactaaggctgatgttcaccagctgacttagaaacacagaaaataaactgaaacatttgttgattgactaatgtttagaagcacagggttatcactgattagtctattttcaaaaatgaagtttaatgattggctgactttcagaattcatagttacatgaatcaggctggtgtttgactgattttcagagcacgggtactaatctgatcttatctctaatgatggttacttatgyacgacttgaaaccttggccaaagaacaatctttcatatcttaaatatgaaaaataaataattttaatccttacttatttcttttgactttcagccaaagctgcagtaagaaacttaagagactctccagatctttatttatagaggtatgactttcaacttgtgttgccattwagaattagctgacatgtttaggtacattggattgccaaaatgatgtttaatcttcttaggttatattttagggaataatattaatgtatgwttcaaaattgtatgggatttataaaattctaatgtctgcacatatgctatcaatcacaattaaggttgttattttaagttattgtaaaccatggagataaccaaatttctttgtcaaccatgctttcaactgtaactactctggacattttgttatccacagacaattgttgtcttgttttgatcctcttcgaaatatgatttataacctgctatagaactttgacaggtgttctcatatgcatgtttctggtaatttggagattgtgacactggaataaagaaaaaacttacagggcttttgaagagctgaaatgttcatgaatatcaagcagaacaagagttaactgaatggcctgtggaaactgaagtaatctttttgacttttgcttggaacattcctgatcctggtttcgtttttcagagtcaaggaaacttgtcttgagctatgtatgacctttaataattgagtgaggtatactcctgtgaacaaaatttggagcatatttgtctctctctttctgcctggcttctccagaatttggaaactag

SEQ ID NO: 281797 - DNA, 536 bp, Homo sapiens
gtaatttggagattgtgacactggaataaagaaaaaacttacagggcttttgaagagctgaaatgttcatgaatatcaagcagaacaagagttaactgaatggcctgtggaaactgaagtaatctttttgacttttgcttggaacattcctgatcctggtttcgtttttcagagtcaaggaaacttgtcttgagctatgtatgacctttaataattgagtgaggtatactcctgtgaacaaaatttggagcatatttgtctctctctttctgcctggcttctccagaatttggaaactagttgtgagtattcttaacttatggcaatatagttgtttacatctgtgcaataggaatccakttttttttctttttttgcaacaggatacaattggagaaactggttgttttaccaaggttttgactggaaggatatgcttcctcttaaggagttaagtttgacttgcagagccaataacagtccctcacagagggaaaactggcatcacaccttgtctacacagtcccctgtacatg

SEQ ID NO: 281798 - DNA, 634 bp, Homo sapiens
gcatccctcctgcctcagactttcttgttcctctttctcttgctaaatagatttacaagtgtcttatagtctttatgccatatgtctatcaaacaagtctttccccagaaaggtagggaactggataacacyatatacctttaggagagaaattcggggcctgaacataaatttcagagagctctggtcacgtactttggtaatactgttttattttgtaatattaaaataactgtggtgagaaaccacttttacccccaagggctccttattaaaagccacatgagaaatttttcctttcctaaattcagtttgtgactaatccaaattatgtgaatttgatcgagtgtgagcaaatcatttaattctttattgtttccatgacaagttctctccttgttttataataactgttaaggagagtcaactttacatcaattaatggggaactgataatgcatgcacatcctttttataggatggtgcaccactttcatagaggaatgacagataagcagcaactcactttgccaatggtcaagttatacaggcccaattcaaacaataatgtactaatacatataaataataaattatgagctaccgtttgtgtcatatatgtaaaatgtagggg

SEQ ID NO: 281799 - DNA, 621 bp, Homo sapiens
tctggtcacgtactttggtaatactgttttattttgtaatattaaaataactgtggtgagaaaccacttttacccccaagggctccttaytaaaagccacatgagaaatttttcctttcctaaattcagtttgtgactaatccaaattatgtgaatttgatcgagtgtgagcaaatcatttaattctttattgtttccatgacaagttctctccttgttttataataactgttaaggagagtcaactttacatcaattaatggggaactgataatgcatgcacatcctttttataggatggtgcaccactttcatagaggaatgacagataagcagcaactcactttgccaatggtcaagttatacaggcccaattcaaacaataatgtactaatacatataaataataaattatgagctaccgtttgtgtcatatatgtaaaatgtaggggaatggccatggtaaaacttattccataaagtatttttttaagaggcatcctccgaagtgaagggaggagtgctgtgtcaaacatctacatggctctcccaggcactacaactctctactagcagagtgaataaagaagtgggaataagccagtgttattcttagggaaa

SEQ ID NO: 281800 - DNA, 621 bp, Homo sapiens
tctggtcacgtactttggtaatactgttttattttgtaatattaaaataactgtggtgagaaaccacttttacccccaagggctccttattaaaagccacatgagaaatttttcctttcctaaattcagtttgtgactaatccaaattatgtgaatttgatcgagtgtgagcaaatcatttaattctttattgtttccatgacaagttctctccttgttttataataactgttaaggagagtcaactttacatcaattaatggggaactgataatgcatgcacatcctttttataggatggtgcaccactttcatagaggaatgacagataagcagcaactcactttgccaatggtcaagttatacaggcccaattcaaacaataatgtactaatacatataaataataaattatgagctaccgtttgtgtcatatatgtaaaatgtaggggaatggccatggtaaaacttattccataaagtatttttttaagaggcatcctccgaagtgaagggaggagtgctgtgtcaaacatctacatggctctcccaggcactacractctctactagcagagtgaataaagaagtgggaataagccagtgttattcttagggaaa

SEQ ID NO: 281801 - DNA, 591 bp, Homo sapiens
gtgggattgcaaacatctcttcaacttactaatttcagatattttgagtgaataaccagaaamtgaattgttggatcatttggtaattctatttttagtttttggaggaaccttcgtaatgttttccatagtggctgcattaatttacattcccatcaataattcacaaatgttatcttttctctatatccttgctaatacttatcttttgtctttttaaaaattttctaaattagccattcttataggtatgaggtgatatctcattgtgattctgaattttctccttcccagtgatcagtgatattgagaatgttttgcttatctgttagatatacacatgtcttcttttgaggaaggtctattcaagtcctttgcctaattattaatcagattattcattgtccttgtataaagtttatagtttatagattcttttagaatcttaaaatttctcccaattcataggttctctttattctgttgttttctttgctacacagaagctatttggttgattatcccattggtctattttcttttgctgcctgcacttttggggtcaaaattaaaatatatatgtatagctga

SEQ ID NO: 281802 - DNA, 591 bp, Homo sapiens
gtgggattgcaaacatctcttcaacttactaatttcagatattttgagtgaataaccagaaactgaattgttggatcatttggtaattctatttttagtttttggaggaaccttcgtaatgttttccatagtggctgcattaatttacattcccatcaataattcacaaatgttatcttttctctatatccttgctaatacttatcttttgtctttttaaaaattttctaaattagccattcttataggtatgaggtgatatctcattgtgattytgaattttctccttcccagtgatcagtgatattgagaatgttttgcttatctgttagatatacacatgtcttcttttgaggaaggtctattcaagtcctttgcctaattattaatcagattattcattgtccttgtataaagtttatagtttatagattcttttagaatcttaaaatttctcccaattcataggttctctttattctgttgttttctttgctacacagaagctatttggttgattatcccattggtctattttcttttgctgcctgcacttttggggtcaaaattaaaatatatatgtatagctga

SEQ ID NO: 281803 - DNA, 655 bp, Homo sapiens
cttttgtctttttaaaaattttctaaattagccattcttataggtatgaggtgatatctcattgtgattctgaattttctccttcccagtgatcagtgatattgagaatgttttgcttatctgttagatatacacatgtcttcttttgaggaaggtctattcaagtcctttgcctaattattaatcagattattcattgtccttgtataaagtttatagtttatagattcttttagaatcttaaaatttctcccaattcataggttctctttattctgttgttttctttgctacacagaagctatttggttgattatcccattggtctattttcttttsctgcctgcacttttggggtcaaaattaaaatatatatgtatagctgagaccagtgttgtatagcttttcctctgttttcttctgttagattggtgcaaaggtaactgtggttttggccaaacccctttacttttgcaccaaactaatagtagttttatagttcttggtcttatgtttaaatctttgtcccgcttgcctacttctcctgatatggggcaggtaacttcaaacacaaaagataatcaaatgttttttgagtgaataaataaataaatgagttaatgaattgaaaatcttctatgatatttgccagaat

SEQ ID NO: 281804 - DNA, 1139 bp, Homo sapiens
cttatgtttaaatctttgtcccgcttgcctacttctcctgatatggggcaggtaacttcaaacacaaaagataatcaaatgttttttgagtgaataaataaataaatgagttaatgaattgaaaatcttctatgatatttgccagaatctggccaagaccaagtttgatgctgaatttgttaaatgtttaatattttcyagagttggataattctatcatatatgccctaagggttgtctttttcgtgggacaatcaattaaccattatcatctgttatctctatactatcctctggcctctaccatcctctggtctctgttgcctcacattatcatcttctgccattagggggaaattggttccttcccagtaaaataacacaactttctaatttgaaagtaaaaaggaaaggaaggaaggaaggaaggaagaagggaagaaggaagagaggaaggaaggagggagagaaggaaggaacgaaggaaggaaggaaggaaggaaggaaggaaggaaggaaggaaggaagggaaaaagagagataatgagggagggagcaaaacgctattggcccccatctgtgwcaatgaacattttttttacattatctggattcaataattatcaacacatggctacttttgcttcatctatgtccttgcctaggtttaaaacacccgatttattttgaagcaaattctaataactgttattttacatgtgctaatatttcaataagtatcactaaaaagataagggctgattgttttaaatatgttaacattatcacaagtcaaaaattaaatataatttcacaacaaataaactctatatgttagagttttctcatctaaaaatgggagtaattgatttatctcttaggtttataagtaaaagttactaaaattgttaataataaaatgatctttttaatttttttctattatactatgggtttcattgaggtgctttgtgttgaatcattatgcatttggatcctgaagactctctgataattatatattgatattataatatatttctggactccagtgatgawtaccttactatgtacttttatatctatcttataagtgagattactttctagacctttaattcatttttctcagttgttta

SEQ ID NO: 281805 - DNA, 624 bp, Homo sapiens
aaatgagttcatcacatttgagtacaattagacctaagaggctaaaggggctaacaacagggraaaagagggtaagcaatgtgaaggaaaaccatgcacaagcattggttttcatattagtccacctaataaaataatataacctacttcatcaattggagaagtcacctcttccccattgtgataagcaaatcaaggtactgaaaatttaaattggtaatgataatgaaaattttgtccccacctggaaataaatggggaagtcatctttaggcaacgagaagttggagaaagagtaattctttgtctttgagagtgatcaaatgtgagaagtgagggaggagaacagtgagagatgactccacatttccttgggtagaaagtgagttattcaagagaaaggaatgcatagccaaaaaccttaagtaagaaagggcttgggtgtttgttttgtcgccagagtatttattctgccatttggaagaaactcttatagtgaagagaagtggttcgctgacttccccatactcagacaataggagttatattttcattttataggtattacctttaataagtaataatagtacattacttattaaaggttttcagaagcagtttact

SEQ ID NO: 281806 - DNA, 624 bp, Homo sapiens
aaatgagttcatcacatttgagtacaattagacctaagaggctaaaggggctaacaacagggaaaaagagggtaagcaatgtgaaggaaaaccatgcrcaagcattggttttcatattagtccacctaataaaataatataacctacttcatcaattggagaagtcacctcttccccattgtgataagcaaatcaaggtactgaaaatttaaattggtaatgataatgaaaattttgtccccacctggaaataaatggggaagtcatctttaggcaacgagaagttggagaaagagtaattctttgtctttgagagtgatcaaatgtgagaagtgagggaggagaacagtgagagatgactccacatttccttgggtagaaagtgagttattcaagagaaaggaatgcatagccaaaaaccttaagtaagaaagggcttgggtgtttgttttgtcgccagagtatttattctgccatttggaagaaactcttatagtgaagagaagtggttcgctgacttccccatactcagacaataggagttatattttcattttataggtattacctttaataagtaataatagtacattacttattaaaggttttcagaagcagtttact

SEQ ID NO: 281807 - DNA, 624 bp, Homo sapiens
aaatgagttcatcacatttgagtacaattagacctaagaggctaaaggggctaacaacagggaaaaagagggtaagcaatgtgaaggaaaaccatgcacaagcattggttttcatattagtccacctaataaaataatataacctacttcatcaattggagaagtcacctcttccccattgtgataagcaaatcaaggtactgaaaatttaaattggtaatgataatgaaaattttgtccccacctggaaataaatggggaagtcatctttaggcaacgagaagttggagaaagagtaattctttgtctttgagagtgatcaaatgtgagaagtgagggaggagaacagtgagagatgactccacatttccttgggtagaaagtgagttattcargagaaaggaatgcatagccaaaaaccttaagtaagaaagggcttgggtgtttgttttgtcgccagagtatttattctgccatttggaagaaactcttatagtgaagagaagtggttcgctgacttccccatactcagacaataggagttatattttcattttataggtattacctttaataagtaataatagtacattacttattaaaggttttcagaagcagtttact

SEQ ID NO: 281808 - DNA, 535 bp, Homo sapiens
atcatacaatttgttttgtatctagcttctttcacttaaaatgatgtttttcatatttatccaagtagtagcatacattagcagctcatacataatcccagcactttgggaggctgaggcaggcggatcacaaggtcaagagatcgggaccatcctggctaacacagtgaaacccagtttctaccaaaaatacaaaaggttagctgcgcgtggtggtgggagcctgtagtcccagctacttgggaggctgaggcaggagaatgacatgaacctgggaggyggagcttgcactgagccaagatggtgccactgcactccagcctgggcgacagagtgagactctgtctcaaaaaaaaaaaaaatgttgaatagtattccagtgtatggaaataccacatttcatttatgtattcacaaggtgataatttgagttattctcactttttgggtattatttataatgctgctatgagtgacagtgtacatgtttttgtatagacatgtgttcatatctctttgttaatattaatagtct

SEQ ID NO: 281809 - DNA, 561 bp, Homo sapiens
ggacatggatgaaactggaaactgtcattctcagcaaactactgcaaggacaaaaaaccaaacaccgcatgttctcactcataggtgggaattgaacaataacttttcatataatatatgaatttaasagtttttggctaattacttaatatactttattcctcagatgattcaaattggcataatgttcctaatatattaaatacatagggttcaattaggtgaaaaaagaaaaaaatgaaaatgaaaacatattgctaaatttggaggcagaatataaagtataaaggaatgttcttgtataacatatttcaaatttacttaaaagctatctaaaagcaaattcagctatttacttatttttagctatttttaaactaaggctcattttaattatgatcacacaacataaacatcaccttgagaatacttggttttctgtctattttagaattttcaacctgcccagtgaatttcttcatttccagctgccaccaagttccagagggacatatgagaatttccatttgaaataagaaaataaattttttgcaaatattt

SEQ ID NO: 281810 - DNA, 556 bp, Homo sapiens
aagaatgggacaaagaaaagaggactttgtcttgcatcttggataccagttgagccacagtaggacagggaactgggcagggttgcaaggcccccatttcatgccctagatcctgaatgacatatctagacacaccctgggccagagtagaacttgctgctttgaagggaaagacctagtcctggcaggatttaatcacctgctgactaaagagcccttgggtccaaagtgaacactggcggtagcttggcagggrttcctgtgagcctgtgacagtggtggccaggaagtgaggttcctctgcctgtgcaaagaagagcaaagagtgggaaggactttgtcttgtggtttgagtgacagatcactgcattggaatacagaatgaggtagattcctgtagtttttttactccaatccatggctcccagccagcatcgctagaccagcccagtgcctacgggaacttgctaccctgaacagaaggacttcaacaccatctgatagtacagccttagggcttagagcaaacataggtggtagccaggtagtggttaga

SEQ ID NO: 281811 - DNA, 556 bp, Homo sapiens
aagaatgggacaaagaaaagaggactttgtcttgcatcttggataccagttgagccacagtaggacagggaactgggcagggttgcaaggcccccatttcatgccctagatcctgaatgacatatctagacacaccctgggccagagtagaacttgctgctttgaagggaaagacctagtcctggcaggatttaatcacctgctgactaaagagcccttgggtccaaagtgaacactggcggtagcttggcaggggttcctgtgagcctgtgacagtggtggccaggaagtgaggttsctctgcctgtgcaaagaagagcaaagagtgggaaggactttgtcttgtggtttgagtgacagatcactgcattggaatacagaatgaggtagattcctgtagtttttttactccaatccatggctcccagccagcatcgctagaccagcccagtgcctacgggaacttgctaccctgaacagaaggacttcaacaccatctgatagtacagccttagggcttagagcaaacataggtggtagccaggtagtggttaga

SEQ ID NO: 281812 - DNA, 445 bp, Homo sapiens
ggtggtggcaatgggccctacatgggctgatcttcaggctcctgaacagtgtgcatagccactgatgttggcaaattgggctacaggcaggctgatctgtaggatatgtgcaagcactgctgctgtcagcagtgggccagtccttgggaccctgggtggtgtgtgcccacaatggccatggcagcagcaggacccgagggttggtcttcaagccactgaggagtgcattcaggcacatggtgatcccactgctggaggcactggaattgctttcagcagctgcagccccaggtaagcagctctcagtctctggggagcacgtgcattggctccctgtgttctgagggcagccactttgatattctcaggtacctgytcctcagggtgtaggatgctgcatgggtttagataccagagatgtggcttcaaccccaggtctagctga

SEQ ID NO: 281813 - DNA, 548 bp, Homo sapiens
agaagtcgaagctaaagcaggtgccacattggtttgcaaacaggatttttttaaagcctctataattagcctctcttccactactgcattaccttcagcagtccttgttttgagattttctaatttcaagagacacttaatttataaaactaggtgttaatttacacatagctgcagtgctagacaatatgacttttgacataattaccaccataacggaaagcttgtctgaagactggcatatagttattcctgtttttaaaccatatttgacttcaccaataagatttgagtattatcaaaattgcccaaagaccattaacaagatttaatagttaaagccaaaactataaagaattaactgttcaaaagtgtgttaatycttaataccaattttatagggccaccattaacttctgaagaaaggtcagcatatgcaactaaatttctaaagtccagtgtttttaaataccggaatataagctgcaaaatcacagatatatgcttaagaaatattgccagtatcatagatggaaaggacagaaaat

SEQ ID NO: 281814 - DNA, 525 bp, Homo sapiens
caattgtttccttgtgtacataatgcttaataagcctactgacataatttcaaaagggcaactatgattacttaatttaaatcaatctttcttaggctgtttgggtagataagttccaaagaaacatattaatttttaaaaaatagatacttgttttttaatggtaaatattgatgttgttgttttgtttattttatttttctattgcccaaattgagggaaggaaataggtgatgtagcaattggtccttattatacatgcttcttacagttgttaggtgggaaagaagatgatcatatgtaaatataatacaaatataatattacatatataattgtaataatataaaattataacacatatatctttcaatragagacaaattatataatacacatatgtataataaaataatgtctattattacaagaaaatttttaataaaacaataaaatattctgataccaggttcactgttgtaccaactgccattatgaatcagaaacaagtcaaaaacacaagga

SEQ ID NO: 281815 - DNA, 1108 bp, Homo sapiens
caattgtttccttgtgtacataatgcttaataagcctactgacataatttcaaaagggcaactatgattacttaatttaaatcaatctttcttaggctgtttgggtagataagttccaaagaaacatattaatttttaaaaaatagatacttgttttttaatggtaaatattgatgttgttgttttgtttattttatttttctattgcccaaattgagggaaggaaataggtgatgtagcaattggtccttattatacatgcttcttacagttgttaggtgggaaagaagatgatcatatgtaaatataatacaaatataatattacatatataattgtaataatataaaattataacacatatatctttcaataagagacaaattatataatacacatatgtataataaaataatgtctattattacaagaaaatttttaataaaacaataaaatattctgataccagrttcactgttgtaccaactgccattatgaatcagaaacaagtcaaaaacacaaggawgcttctctggcatgtgctgacctagttctcgtcactactctgtttttatttctctcatcatgttccagctgcaatgtgtttcctgatgttgaatatctgccatttcaaagaaaatctccttttgtttcacagaatattcgtaattttttcactcagagaccaaattgttgtttaattctctagacagtttaataataaaactatttttcaggtaccctgacctagattaaaatacacwctcaggaaaatggtttattagaagatatctgaaagtgctgatttatcatatattctctatcactgataatgatgagaatcataatacacttataccgttcattatatacacactctgctaagcagttttcatgcttagcaattttgaataatcctcagtaatcaaaaccctgtgatgttgaaatacgattatgtccaattactgataaggaacatgaagtacagaaaataacttaagcgggatcacgtagctggaaagtagtaaaggcaaaatttgaacccaggaagcttgagctttagagcaagtgctttgaatttttacattctgctgcctctcatcaagag

SEQ ID NO: 281816 - DNA, 635 bp, Homo sapiens
ctgctatcttcctagatcactgggcacaaaatattggattatagtaatttaggccaaaacttgaaccctaaaccaaagcttaagtcaaatactaatcccaattcttgattataaatgttttattttctaacaatttaccagcaaatcttagcattgctccttctaaatcaccaggaactctccactcctgcctttgtcagttctcccgagggcactggttctccaaatgcacagtttaacatcttcacaaatgaatgcctgccacaatgcccattttggcctccagtctatttgatgcccatctcttatcaccattactaattcaaacatctcttgcataactcgaactgcatagctaacttcatctaaaccacaaagcagaaaaaaattatgcagatgtgcacagccaacatggaagtccattgatttcttggggccaaatgtaatgaattctcatcacaaattttatgttcatgaatggggagagagactaatagtaatgaacactgtcaaagaccacatttgasaaaatagcatacaagagattataatataataatgtcataatgctgcaaataaaggaaaaactaagtttagtatctggctccctctgtgatatatgcaaaactttgaac

SEQ ID NO: 281817 - DNA, 1156 bp, Homo sapiens
gaccccaggaggggcaagggtggccaatatacattcacctctgtttcaggtttttgatatatatgaggaagctggtcctaagacaaaaggtgactggaatggttacagggtatgacttcttcctattcattgccacaaacaaaaataagcccaggtgtggcacaaaaakaaaccctacagggcgtaatgtttaccctttgctgccaagttgggtctgtagagatatttttcccctgtaccaatgggggttctcagatagtttttgttttccaggcgggggaagtactcccactttcccagactaggccatagcccccaacagactgaatgagtaccacactcctagctgaaaggaatgaagtttggcaggccccaaccagcctccaaacccttctaagcaatataagagtgaaaaaccaaaagctaaaattaaagttacacataaagaaaaaccaagagtaaaccatagaattaagctatattgaaggaaaacactgctcccacagacctctaagacaaaacagtgtagcattaggccacaatagcagttacgatcaaggaagaaaagacaggagctgacaaaaattgctaaaaacagagawaagcagtcattttactctatgacaaaactttactatataatatccctcttcatataaggttactctttctttatatccttcctcgcaaaaaaaaatcaaaacaaacaaaaaaaacccctgcattttctatccataacattctttacatctctctttctaactcactggttctcttatattttgaacttcccctttaataacttctgaattagacaatttttctcaataaagaatacatttctttggcacattttatataaatctaggaagcaagaaatcctgaactgcccaccagatattgtcwttctatagatgaaaagtattgcacagttaagactttaaaccacacagtaaactcaatatttaagcatctattccattcgcatgtatttaactctttcgctttcaacagttttatctagactacctctaagaaccaatatatcacacaaagctagtcaccattgaaagccattttaaccattttaaagcctatgaatatcagtgatttacctaagtaaaaatcttaatgttaaatttaagacataacattc

SEQ ID NO: 281818 - DNA, 554 bp, Homo sapiens
aagcagtcattttactctatgacaaaactttactatataatatccctcttcatataaggttactctttctttatatccttcctcgcaaaaaaaaatcaaaacaaacaaaaaaaacccctgcattttctatccataacattctttacatctctctttctaactcactggttctcttatattttgaacttcccctttaataacttctgaattagacaatttttctcaataaagaatacatttctttggcacattttatataaatctaggaagcaagaaatcctgaactgcccaccagatattgtcattctatagatgaaaagtattgcacagttaagactttaaaccacacagtaaactcaatatttaagcatctattccattcgcatgtatttaactctttygctttcaacagttttatctagactacctctaagaaccaatatatcacacaaagctagtcaccattgaaagccattttaaccattttaaagcctatgaatatcagtgatttacctaagtaaaaatcttaatgttaaatttaagacataacattc

SEQ ID NO: 281819 - DNA, 596 bp, Homo sapiens
gggaaaccaaagaaaaatgttcaggcagctgcttgtctgccactgcagtaagctgcttgggtcaagggtccaagactcccagtaaaaataarcaaggcagcttattggaactagtggaagaaggttagcactagtattgatggggagactttttttttttttttgcatctcttactggggacagttaggactttctcattgtcaatggccctcttgctcattgtaggcacactgattctggcccagggctggtgagttcagggctcttttctgggcatcccagacacagattttgtgacattttctcaagacaggtaacccccagagggaagggattaaagcaactgttaacaattgctctttttgggtatttctttggtttcattttttgtttgttttcaccttttttgcttttcgtctattgcaaactttaaaggctctatttaggagttggctcatagggctttgaagtcccattgctgatttttgtggcttcctcctactatcagggtcaggtcgagtaataaaatgtacattcaggagaacttgcccttctggggagtctgggtctgcattagcatattacctcaatgcct

SEQ ID NO: 281820 - DNA, 596 bp, Homo sapiens
gggaaaccaaagaaaaatgttcaggcagctgcttgtctgccactgcagtaagctgcttgggtcaagggtccaagactcccagtaaaaataaacaaggcagcttattggaactagtggaagaaggttagcactagtattgatggggagactttttttttttttttgcatctcttactggkgacagttaggactttctcattgtcaatggccctcttgctcattgtaggcacactgattctggcccagggctggtgagttcagggctcttttctgggcatcccagacacagattttgtgacattttctcaagacaggtaacccccagagggaagggattaaagcaactgttaacaattgctctttttgggtatttctttggtttcattttttgtttgttttcaccttttttgcttttcgtctattgcaaactttaaaggctctatttaggagttggctcatagggctttgaagtcccattgctgatttttgtggcttcctcctactatcagggtcaggtcgagtaataaaatgtacattcaggagaacttgcccttctggggagtctgggtctgcattagcatattacctcaatgcct

SEQ ID NO: 281821 - DNA, 549 bp, Homo sapiens
aaaatatttgtaagtcatgagatattaaatcaaagaacatgggcaacttcacaaactcctctataaacttttctggattctctgaacactgtccagatttttcctggtataaagccaaattatacaaagaaaatggcatatgtaatctaagtgttccctcacttccattagctacctcccaccacggatttaggtttgacttcaggggctaatatgaggccattcatggtggtacttcttgggcttaatttcttgggcagtgtggggcctaggctggggatagttggataagggggagaggtacctaatgaccttggastggaattcttcttcattagagaactgacgggaccactccctgataattgaaggactgaagagaccctggagagggcacaggccttctatggggagtagcttggaggggatcctttaggcatggctttctgaaagtaacatgagacggtaaagggccatcaaaacctgtacataagggaccttctcccatttgccttctgttttacaaagtaagtctaatagtaaaatatc

SEQ ID NO: 281822 - DNA, 549 bp, Homo sapiens
aaaatatttgtaagtcatgagatattaaatcaaagaacatgggcaacttcacaaactcctctataaacttttctggattctctgaacactgtccagatttttcctggtataaagccaaattatacaaagaaaatggcatatgtaatctaagtgttccctcacttccattagctacctcccaccacggatttaggtttgacttcaggggctaatatgaggccattcatggtggtacttcttgggcttaatttcttgggcagtgtggggcctaggctggggatagttggataagggggagaggtacctaatgaccttggactggaattcttcttcattagagaactgacgggaccactccctgataattgmaggactgaagagaccctggagagggcacaggccttctatggggagtagcttggaggggatcctttaggcatggctttctgaaagtaacatgagacggtaaagggccatcaaaacctgtacataagggaccttctcccatttgccttctgttttacaaagtaagtctaatagtaaaatatc

SEQ ID NO: 281823 - DNA, 549 bp, Homo sapiens
aaaatatttgtaagtcatgagatattaaatcaaagaacatgggcaacttcacaaactcctctataaacttttctggattctctgaacactgtccagatttttcctggtataaagccaaattatacaaagaaaatggcatatgtaatctaagtgttccctcacttccattagctacctcccaccacggatttaggtttgacttcaggggctaatatgaggccattcatggtggtacttcttgggcttaatttcttgggcagtgtggggcctaggctggggatagttggataagggggagaggtacctaatgaccttggactggaattcttcttcattagagaactgacgggaccactccctgataattgaaggactgaagagaccctggagagggcacaggccttctatggggagtagcttggaggggatcctttaggcatggctttctgaaagtaacatgagacrgtaaagggccatcaaaacctgtacataagggaccttctcccatttgccttctgttttacaaagtaagtctaatagtaaaatatc

SEQ ID NO: 281824 - DNA, 544 bp, Homo sapiens
aaaaacattcaaaaggcgtcaagttaacaaaaatgggtctgactaaatgattgtgtctaggaatgtgttcttggtgaaaaaacaataaagaacacaggggaaatattattgtaaatgtcagaatagtgattacttatggagagggagggaggaggtatggagagaggcttctggccaacttcyctctcgaactgtgtggtggttgcaagggcgtttgctttataataattcactaagttgtatgtctgttctgtgtgctttccttttgtcttattttacaataaaaatgtcaaaaaatatagagatttaattttgtatttcccactaggagtgtggatttctcaatttctcatcacagatgtatcaaattttacatatgtggttaaacactatgttcttagatgcatatttgtgtgaaattattttatctttttggggaaataaacactttatcaatatatttggaatgttgcctgttacatttcaaatcctgttttgtatcaaacagtgacagcacttgtgttttgttatgtatttcatgggc

SEQ ID NO: 281825 - DNA, 582 bp, Homo sapiens
aaaattaaaggaggccacacgattacaattatgttaggtgcctgaattttgctaagatattttcctttctgtctgattttttccttatccatgcatgattgcttgcacatagtcattatatgatatgtgacaaatgayagtcactaataactgattatcttcctgtcctagttccatggcagcctacatgaaagattaaggaatttgtttttacttttaaagaaaaatgatccttagatcatgcagaccccctcgatgacttccagaagttagatgaccaacagggcgccaggcagctatgacaagcagggacctcaccttccacagacttttctgctaagctataggcatagttaaacgataacccagcattttttcccatcttgcttgccatagtaaccagcagtcacaaatgctattgtgaaacctaagactggtctttgagatagttttctaccttggtctgtgagtggactgacgccaacccaaccagtgatccaacggaactgacttgactggtattgtgactcacctcctttctcaggaactgattcagccctaacacagcatccattccctatg

SEQ ID NO: 281826 - DNA, 582 bp, Homo sapiens
aaaattaaaggaggccacacgattacaattatgttaggtgcctgaattttgctaagatattttcctttctgtctgattttttccttatccatgcatgattgcttgcacatagtcattatatgatatgtgacaaatgacagtcactaataactgattatcttcctgtcctagttccayggcagcctacatgaaagattaaggaatttgtttttacttttaaagaaaaatgatccttagatcatgcagaccccctcgatgacttccagaagttagatgaccaacagggcgccaggcagctatgacaagcagggacctcaccttccacagacttttctgctaagctataggcatagttaaacgataacccagcattttttcccatcttgcttgccatagtaaccagcagtcacaaatgctattgtgaaacctaagactggtctttgagatagttttctaccttggtctgtgagtggactgacgccaacccaaccagtgatccaacggaactgacttgactggtattgtgactcacctcctttctcaggaactgattcagccctaacacagcatccattccctatg

SEQ ID NO: 281827 - DNA, 557 bp, Homo sapiens
tgccctccaccacgcccggctaattttttgtatttttagtaagagatggggtttcaccgtgttagccaggatggtcttgatctcctgacctcatgatctgcctgcctcggcctcccaaagtgctgggattacaggcatgagccaccgcgcccagccttttcaaaaacctctctaagtgatacagatgcacaactaagtctgaaagccgccgaaatatgctcttcctagcaaggtttattctatgttaatgtcacatgttaccctttctattgaaaaacacaaatttaggtgactcagttctaactgcttaggtgarcaagctatcttcaggggagaaattttaagtaaatattgctacttataaatatatactgtatttcttatttatttatttatttattttgagatggattctcactctgtcagcaggctggagtacagtgagctgagattggtgtttcaccatattggccaggatggtcttgatctcttgacctcgtgatccgcccacctcggcctcccaaagtgctgggattacaggcgtgagctaccgcgcc

SEQ ID NO: 281828 - DNA, 587 bp, Homo sapiens
acaatgttctgtaaccttccagattcacgatttctcctttcaaatgtttttgtggtatctctttcacatagctcttatgacaagtagatatcatcaattcacagtacagtggcatagatgagacaatcagaatttcttttcaaatacaaatggaaatgaaataggcatataatcaacatgatgatattaaaaagtaattttcatgattttacacaaactctctaaggaaaggaaatgataatgaaaggtatattttattgatgtgaaggttttacatgaatttctcaacaggtctatgatataggaagaactaaatctccattttattgttgcagtaattaaggcaaagagaaggacttatacaggtcacaaaaataattagtggcagagccagtatttaaacacaggtcattagagtgcacagttgtaaaattgtactctttaaagtatacaaaatatagataggaaagggaggctggggagagagaaatattagacagaccagcagggatgtyataagatttagtttgctatgtaccagtattccctatttttgaaagataggctgtcttacaagaaaactgtac

SEQ ID NO: 281829 - DNA, 545 bp, Homo sapiens
gctactccataggtagagcagcccctagggctgctggttggctatttttgtggttatttcttgatcatatgctaaatagtgaattattaatatgtatgagtttcttaggaaaggggtagggaattcctggaattgagggttgttccctttttcagaccatatrtgataatttctggaagctgccgtgggactggtgggagtttctttattatattaatgtattataattagcatataacgaccagtgagcacaagcagatgtcacttttgtggccatctttgttttggcaggttttgactggcttcttcacctcatcctgtttcaccagtggggtcttagcgattggtttctggtaaaacaagtcctgccagattcctatctcaggagcaacagaatgcctaaaatataaaaccaatatgtaaaatcagtttcctaaattcctaaatttgtcacacagtagataaaagagtttattattttttatcatcttgatcctgacaatccaactgcaaaatgatctaaatgatctaaattgtttgttcct

SEQ ID NO: 281830 - DNA, 554 bp, Homo sapiens
cagcacacaggaaaatatagctaaaaaattacccaatatacaggtaaaaatattttctaaaatatgttagaaaaataaagatacatagagaatggaaggaaaaatatgacatttgtatactttgagttctagaaaaaagagaaggaataatacatgaaatctttttataaattacagaacatatgaatgctcaagttgagagagatcaccggattccatttagaattaaaccacatgcacacataaatacacatatgcacacaaacacccaaagtaagggtattgcaaaaactaataaatataaatttatcttaaattcagtcrgagcggaaaaaacagattccctataataaaacaataattttactggtagaagaactcttttttctttattatcattatactttaagttctagggtacatgtgcacaacgtacaggtatattacatatgtatacatgtgctatgttggtctggtgcacccattaacttgtcatttacattaggtatatctcctaacgctatccctcccaccttcccccatcccatgacagg

SEQ ID NO: 281831 - DNA, 609 bp, Homo sapiens
catactgttatctgtctgcaagtcgtagggaatattttattttcaatatttttaaattaacatattcatgcttctgagctcccatttagtaggcttatggaaaatccaatcctgggaattctcaacctgtgatcaccaccacccacccaaatatcatcaatctcaggaagacaaattcctggggttttatttagtgacatgacagtgaagaatttgccaacaaaataccatgtatgtgaagactagaaccccatgcagccaytagcagtcacagagtatagtgggtgagtgcaagggcagtggtgctaagtagttctggctcaaatatagtctctactgttagttccatggccttggctattatataacctctcttcatctcagatttcttcatttgtaaaatttaaattataatacttgatatcaaaagatttttgtggagattagatgaataaacacaggtgaagttcacagagcagggatatgatacatagctagctttagactcacgttgtttattataacttctgaggtcctatattctccctggggtgaattcaagtacacatattacttagcttccttttcatctcaattccattcccatgt

SEQ ID NO: 281832 - DNA, 540 bp, Homo sapiens
tatcaagatagaccatattctgggtcataaaataaactttaaaatatttacaataattgtaataacaaaaagtgtgtctctgaccaaaatgaaattaaattactagtcaataacagaaaactatctataaaatttccatatatttagaaatgaaaaaatactcytaaataactagcacaccatacaaaatgacacaagggaaattagaaaatatttgtaattgaataaataggtaaacataatatatcaaaattagtggatgcaatcaatgtgatagagtaaagaagaaaaaccatatgaccatctcaacgaatgcagaatatgcatatgccaagttaaacatcaattcattacagaataaatggattttaagtatttgctgaagaactctttaattcctcagcaagctagaaatgaaagaaaaggtttttatcttcaaaaattgtttcttgccatagagctatactaacatacctaagagtgaaaggcctcttttctaagataaaaatgtcaactctatgttgttttctcagtcttatt

SEQ ID NO: 281833 - DNA, 1129 bp, Homo sapiens
ggcattgtgtgtaagtttagggaacagaaagatcttgtttgttgttgttgttgttgttgttgactataatgcagatcaaacatttttttaaaaaaatatttctcactactttcttattttcatgtcctttagtatgtatccaccttaatgtttctaaacatgaagaaatttacagcataatgtccttgcttttaaaggaattttaccaaattgagtatctcaaggaaatacacatgtaggcaagaaggatgaaaaatttaaccagcacaaaaaactgcaaagaagaatattaaaagttagatgtagctcaggtttctctgatyaattttttaaattgatgactggctttatgccaccttcaccacctaacgccttctggtaattatgaaaggaattcacaaaagttgtgtgattggggcctgcaaaggatgtgaactactgtctcatggacattgtgtggggcctgccatttgaccccaagagagggcagagagaatgacattaagagtacttgtgttggagctacawtataagcttaagtgcctgcatcaaaaaagaagaaaaacttcaaataaacaacctaataatgcatcttaaagaattagaaaagcaagagcaaaccaaacccaaagttagtagtagaaaagaaataataaagatgacacaataaataaatgaacttgaaatgaagaaaacaattaaaaagttggttttctgaaaagataagcaaaattggcaaacttttagccagactaagaaaaaaagagagaagtctcaaataaatwaaatcacagataaaaaagaagatattacaactgatcctatagaaattcaaaggatgattagagggtactataagcaactttatgccaataaatttgaaaacttaggaaaaagcagataaattcctagacacatacaacctaccaagatcgaacgacaaaatcccaaacctgaacataccgataacaagtaatgagatcaaagctgtaataaaaagtttcctagtaaagaaaagcttggaactcaatggcttcactgctgaattttaccaaacatttcaagaactattatgaatcctactcaaactattctgaaaaacagaagaagaggaatacttccaaactca

SEQ ID NO: 281834 - DNA, 601 bp, Homo sapiens
tataagcttaagtgcctgcatcaaaaaagaagaaaaacttcaaataaacaacctaataatgcatcttaaagaattagaaaagcaagagcaaaccaaacccaaagttagtagtagaaaagaaataataaagatgacacaataaataaatgaacttgaaatgaagaaaacaattaaaaagttggttttctgaaaagataagcaaaattggcaaacttttagccagactaagaaaaaaagagagaagtctcaaataaattaaatcacagataaaaaagaagatattacaactgatcctatagaaattcaaaggatgattagagggtactataagcaactttatgccaataaatttgaaaacttaggaaaaagcagataaattcctagacacatacaacctaccaagatcgaacgacaaaatcccaaacctgaacataccrataacaagtaatgagatcaaagctgtaataaaaagtttcctagtaaagaaaagcttggaactcaatggcttcactgctgaattttaccaaacatttcaagaactattatgaatcctactcaaactattctgaaaaacagaagaagaggaatacttccaaactca

SEQ ID NO: 281835 - DNA, 548 bp, Homo sapiens
gcaaattttgtgctcttttcactttttgccttctcaaagagaagctaaaaagatgttaaatccacgtacttgtagcccagggcagcccaaccagatagattgtggatrggaagtacgagaatgcccttctgacatgatacaaagagctcagatatctgctttagtttcccttcaagacttcaaactagtaattaaagattcacacggtgattcagcatcagcatgcaaatcccactgagtgcaatattaatatgaaaaatgtgtcctctaaatgaaactcggttcaaatagttggatcaaaaatagtgaaaatgatattcttttttacagactggtagtctttgtacccttgagcacaacagtaaacatttcaatttgcatccattttaattccaagttgtgttatgtttcaacacaatagctagcattgaggtaaacatcagtacttgaacagcatcatagccaccactgaaatggaaattcaaagatttattcagtataaaagatttgcatacttgcagaaaagatgattgtcttatatttctctc

SEQ ID NO: 281836 - DNA, 577 bp, Homo sapiens
ccttcataattacagcttttaatacttatataagtgtacttcagctacagcatcatgatttttaacattttaatatgtatcttcataaacatgccataaatatgttatcagcattgagggcattgctttacttagcagaattacccagtaatcttattttgctgatagctctgagtttctgaaaaatatcatttaaaactcattagcaaaatctcttaatgtatataatgcttcatgktctatttacttattgtttatatcattatctgtcttatttctcttactaagacaattttatcaggacacttaagcactgtaattttctagttactccaatttctcctgtgtattttatcagatacagttcaataatgtgttgtcagttaaatcattataatttttaatatttgatttcttattgaaaaatattaattgtatatatttatagggcatattatatttatatatagttttgatatctgtatacattgtggaatgattaaatcagctaattaagatacctatcacttcacctacttattttttgtggtgggagtatttaaaatgtatttttatt

SEQ ID NO: 281837 - DNA, 560 bp, Homo sapiens
aatcttaaatatgtatgcatctaacattggagctcccaaatttataaaaaaaattattactagacctaagaaatgagatagcaacacaataatagtgggagatctcaatactccactgacagccctagacaggtcatcaaaatataaagtcaacaaagaaacaatggacttaaactataccctacaacaaatggacttaacagatatttacagaatattctatccaacaaatgcagaatatacattctattcaccagcacatggaacattttccaagatagaccatataataggmcccaaaacaaagtctcaacaaatttaagaaaatcgaaattatagcaagcactctctcagatcacagtggaataaaataggaaatcaactccaaaaggaaccctcgaacccatgcaaatacatggaaattaagtaacttgctcctgaatgatcgttgggtcaacaatgaaatcaagatggaaattaaaaatctctttgaactgaacaataatagtgacacaacatatcaaaacctctgcgacatggcaaaggtggtgctaacagga

SEQ ID NO: 281838 - DNA, 560 bp, Homo sapiens
aatcttaaatatgtatgcatctaacattggagctcccaaatttataaaaaaaattattactagacctaagaaatgagatagcaacacaataatagtgggagatctcaatactccactgacagccctagacaggtcatcaaaatataaagtcaacaaagaaacaatggacttaaactataccctacaacaaatggacttaacagatatttacagaatattctatccaacaaatgcagaatatacattctattcaccagcacatggaacattttccaagatagaccatataataggccccaaaacaaagtctcaacraatttaagaaaatcgaaattatagcaagcactctctcagatcacagtggaataaaataggaaatcaactccaaaaggaaccctcgaacccatgcaaatacatggaaattaagtaacttgctcctgaatgatcgttgggtcaacaatgaaatcaagatggaaattaaaaatctctttgaactgaacaataatagtgacacaacatatcaaaacctctgcgacatggcaaaggtggtgctaacagga

SEQ ID NO: 281839 - DNA, 582 bp, Homo sapiens
ttgaacattttttcatgtgttgactgacgacttcaatttttttctttatgaatcacctccccatttcctttgcttggaagaactatttaattatgtgaaaatagttattgacacatttacgtttaaatttttttaaaaagcttatttttctacatttaaaaataaaatgtaatgrgtttcttaggaagtgaggtcagcaggttagtttcacttcttagcaaattttatcactattatgggaacactaacaaatgcagaacataacttggagattgacaagtacaaattattttctcctctatattcatcacagcacacacctttatctccgcagtgtggtggtggtatttaaagatgaatcatgctgtttctgtctccttgttgcacctacttcagaagtattgaagcagaagcagtttgctatttatcatataaacaccagctatgattatttggtcattatttaaggagcgtcaatatttaacggcatcttattagtagaatatttctccaaagaaaaaaaatgcttccaaagaatgtaatgcgcagtatgtagctaaacatcaatcatcttttttatat

SEQ ID NO: 281840 - DNA, 565 bp, Homo sapiens
taaaggtgaggttgtaatctacgtatctcttctttatctttttttttttttttgtttattttggaggcagagtctcacactgtcacccaggctggagtgcaatggtgcgatcttggctcactgcatcactgcaacctctgcgtcccgggttcaaatggttctcctgcctcagcctcctgagtagctgggattacaggtacctggcatcatgccccactaatcttttttgtatttttagatatagggttcaccatgttgaccagacttgtcttgaactcctcacctcgtgatctgcccgctcggcctcccaaagtgctaggattacaggcgtgagccaacacgcccggcctaatctatatatttcttaactgattctcaatattctcaamtgatcccgaaatcaaacagataacaaaattgtatttgaagactttccttagaccctatgactagaatttatgctgttttcaagcaggcaatgcatcctatatattttaaacttataattcaggtctagttatacaaaagttatcaaattatttaatcatgatggtaagtattattt

SEQ ID NO: 281841 - DNA, 574 bp, Homo sapiens
gcagtttcccccatgctgttcttgtgctagtgagtgatttctcaagatatctgatggttttataagtgttttggcattccccctgcttgctctctctctatcctgctgccctgtgaagaaggtgcctgttactcctttgccttctgccatgattataagtttcctcaggcctccccagcaatgtggaacrtaagtcaattaaacctctttcctttgtaaattacccagtcttgggcggttctttatagtagtgtgagaacagcctaatacatatagaaagcagatattcccaagtaatatcttgaaaaaagtaaagagtaaattataacaatctattcttttaagtgtcattacttcatgattccaggtgaaatgataatggtagtgcttttattttattttcactctcccttggaaaatatctgcacaactttggctttaaatgaaattccaaaacactacttataaatttagtgttttcaaagggtctttcttatttatgcaatgttttgtaaaaggaggtttgggccagtattaacccttgtgaggcattaattgatttttcacaaaaaaa

SEQ ID NO: 281842 - DNA, 574 bp, Homo sapiens
gcagtttcccccatgctgttcttgtgctagtgagtgatttctcaagatatctgatggttttataagtgttttggcattccccctgcttgctctctctctatcctgctgccctgtgaagaaggtgcctgttactcctttgccttctgccatgattataagtttcctcaggcctccccagcaatgtggaacgtaagtcaattaaacctctttcctttgtaaattacccagtcttgggcrgttctttatagtagtgtgagaacagcctaatacatatagaaagcagatattcccaagtaatatcttgaaaaaagtaaagagtaaattataacaatctattcttttaagtgtcattacttcatgattccaggtgaaatgataatggtagtgcttttattttattttcactctcccttggaaaatatctgcacaactttggctttaaatgaaattccaaaacactacttataaatttagtgttttcaaagggtctttcttatttatgcaatgttttgtaaaaggaggtttgggccagtattaacccttgtgaggcattaattgatttttcacaaaaaaa

SEQ ID NO: 281843 - DNA, 608 bp, Homo sapiens
ctttctgccattatttttcattctttccttctcttatgcggtaacttttattgaagtataagataagtagagacaaatgaaccaatcataatgtacaaactcacaaacattcataagaaaccaacataacctgaacctcaaaaagcaatgcttctctttctctctccctccctccctcactctcccactctgtcttaatctttctcccctccactgtatttccatctgcctgactcrgaggcttaccgctagtttgtttttgaaattgagtcatgaaaatttatgagatttatgagtttccctagaaccctaagaaacatgtagcctcggtttttcatcaataaaatgggggatgtttacaataatgcccacctcattttgaacttctgtaaaagttaaatgagaaaaatgcatgtaaagtacttgctacagtttttggtatacaaaaatgttaaagaaatgtaaattgtattgaatattcctctgtttgatattaggactcactggattactcaaacagcttcataatttgtctccatatcccttatagctatcaactcaaatctaccttaaacatttctgccagagtttttatctcccaccaccca

SEQ ID NO: 281844 - DNA, 623 bp, Homo sapiens
atgaaaaggaaaagaggggaaagaaagcattaaaaaaatccctgttgatgataaacattagcaaagtttactcctactacaagacaatttccaatggctatatttcaaaggaagtgaaagcatagagagtggtattaacttattttaatactattactaacttattttttctataacaagtgctaatagagtacttttgggaagggtacaaagtttttcaatgaacatttaacaaagtgatttattattgtggttctaaatctggttctagattagattgaatgtattatttgcattatggtaaattcacatttggtatagactttatgttttcacttaagcagcagatcaccacttgaagccaagtacaatatggataagtttctgttctgagtatatcaggaaagtgattttctttttcactstgtaccttcaaatcctctagactcatacattaagtcgaagtgcagctattctcaatctaggtttctcaagcattacttcgatgcatttcatatcacaaaatcacttcctgtgttcatttataagcctgaaagaatatatgtaaagaacctaaacatatttttttctctgttacacattgttggatggattggagtcat

SEQ ID NO: 281845 - DNA, 456 bp, Homo sapiens
aaaagtaatacttcagaattgcagcctgtacttgtaaagtgaaaatgtrtatgttgattctccattaaaggagttggatattttattgttcttgtcactgggaaagcattttattcctttaacagaattattagtaccatcaccctatcttatcaaggatttaaggcaattatacaatggaacgatacgcaagtatcaaaggaaagaggccattaagaccaaatgtatttcaggttcaaaaagactttagttcatacaacaacaaaactatattaaaaggtaaaatttatttctgtgagattctgtggccaatttccaatgataaattttcttattgagcactgtatgaacccaaagatgcctacatatacaagtgctaatcttgagaaggaaatgataaatgctaaagaggaaaagaaatactagacatcaatactgaggcaatatcatttcaag

SEQ ID NO: 281846 - DNA, 625 bp, Homo sapiens
tttcacctaattgaaaaagtaatacttcagaattgcagcctgtacttgtaaagtgaaaatgtatatgttgattctccattaaaggagttggatattttattgttcttgtcactgggaaagcattttattcctttaacagaattattagtaycatcaccctatcttatcaaggatttaaggcaattatacaatggaacgatacgcaagtatcaaaggaaagaggccattaagaccaaatgtatttcaggttcaaaaagactttagttcatacaacaacaaaactatattaaaaggtaaaatttatttctgtgagattctgtggccaatttccaatgataaattttcttattgagcactgtatgaacccaaagatgcctacatatacaagtgctaatcttgagaaggaaatgataaatgctaaagaggaaaagaaatactagacatcaatactgaggcaatatcatttcaagaaaactttagtacttttcttgttgtattcattcacctactgatttttctttgaagttaagaaaggttatctaattattcaacaagcatttaatggctcttggggagtgcaatatttacaacaatgacaggcatttttttctttacatttattcaa

SEQ ID NO: 281847 - DNA, 456 bp, Homo sapiens
aaaagtaatacttcagaattgcagcctgtacttgtaaagtgaaaatgtatatgttgattctccattaaaggagttggatattttattgttcttgtcactgggaaagcattttattcctttaacagaattattagtaccatcaccctatcttatcaaggatttaaggcaattatacaatggaacgataygcaagtatcaaaggaaagaggccattaagaccaaatgtatttcaggttcaaaaagactttagttcatacaacaacaaaactatattaaaaggtaaaatttatttctgtgagattctgtggccaatttccaatgataaattttcttattgagcactgtatgaacccaaagatgcctacatatacaagtgctaatcttgagaaggaaatgataaatgctaaagaggaaaagaaatactagacatcaatactgaggcaatatcatttcaag

SEQ ID NO: 281848 - DNA, 456 bp, Homo sapiens
aaaagtaatacttcagaattgcagcctgtacttgtaaagtgaaaatgtatatgttgattctccattaaaggagttggatattttattgttcttgtcactgggaaagcattttattcctttaacagaattattagtaccatcaccctatcttatcaaggatttaaggcaattatacaatggaacgatacgcaagtatcaaaggaaagaggccattaagaccaaatgtatttcaggktcaaaaagactttagttcatacaacaacaaaactatattaaaaggtaaaatttatttctgtgagattctgtggccaatttccaatgataaattttcttattgagcactgtatgaacccaaagatgcctacatatacaagtgctaatcttgagaaggaaatgataaatgctaaagaggaaaagaaatactagacatcaatactgaggcaatatcatttcaag

SEQ ID NO: 281849 - DNA, 620 bp, Homo sapiens
aaaagtaatacttcagaattgcagcctgtacttgtaaagtgaaaatgtatatgttgattctccattaaaggagttggatattttattgttcttgtcactgggaaagcattttattcctttaacagaattattagtaccatcaccctatcttatcaaggatttaaggcaattatacaatggaacgatacgcaagtatcaaaggaaagaggccattaagaccaaatgtatttcaggttcaaaaagactttagttcatacaacaacaaaactatattaaaaggtaaaatttatttctgtgagattctgtggccaatttccaatgataaattttcttattgagcactgtatgaacccaaagatgcctacatatacaagtgctaatcttgagaaggaaatgataaatgctaaagaggaaaagaaatactagacatyaatactgaggcaatatcatttcaagaaaactttagtacttttcttgttgtattcattcacctactgatttttctttgaagttaagaaaggttatctaattattcaacaagcatttaatggctcttggggagtgcaatatttacaacaatgacaggcatttttttctttacatttattcaatagtttagc

SEQ ID NO: 281850 - DNA, 587 bp, Homo sapiens
gaattaatgagttttaataaatccacatactatagattttctactaattggaaacctaacaaaattaaatatgtatgacatttaaaaattatttttcagaactactttggaactgttaaatttagaggaaactttcctaatagatataaaatatatagtgaaagagccagcaatttttaaaaattttaccattttattagtttttaagtacacagttctaagactgtatgcatttacattattgtacaatcattattaccatccatctccagaaatttatcatcttccctaactgaaactctgttaccccttaaatactaactctctatcccaccttccccactccctgcccagttcctgacaaccaccattctgcttttcatctctgagattttgaccattcagggaatcttacgtaagaagaatcatagaatatttgtccttaygtaactggcttatttcacttggcataacatctgcaattaggatattattttagagcaagagttttaagctggagtctatagagccagctatatttgttttactaggttgatctactttaatgatatttaaatgtctatttg

SEQ ID NO: 281851 - DNA, 588 bp, Homo sapiens
gtgcagttgtacaatggaagtatactatctcaagatgtccttaaatttggaatattaatatttggaattcatgtttggaatgttcatttggtatattactagtacctcttccctagaaaaatatttattgacaacctagcccttctgttcagtgatgagtctcaatcctcccccaggtagtggataactgagaatcctcagtaaccctcagtagccatgtcccaccatgaaaagtgagatagagcagctgcagtggccacttgaaatcttccacttttcaaagcaacttgtgctgaagcatgaagtaggtacttcagattgtcagttcaataaatccccaaatataaaatttttattagaagatagctaatttgtcctttggcactactgacaacttgcatcatggcccagatctcttacttgtccagctttcattctttgctccttgtttaacacaatagcctatacctcacagaattccagaaaaacataggctagttttgtcrtaatgcaaattagcttataatactaattcaattaatatttaaatttggccatttacaataaaatttttcaaatgttgggatg

SEQ ID NO: 281852 - DNA, 561 bp, Homo sapiens
ggctatcatgagaatgtgccctgcagaccatcaactactggaagagtcattgttcaaaggctagctgctacactctgtaatcattatattttgcaaaaactgtgatttgcaactgatggctgaatgaagcagggatactcargcagacccattcgtgggagaaaaagcactcctttgatgactgagtttgacttgaggactttagatgatcttagactacatgacagtgtcaggggctgcatgctagcatagagtgcttccactcattatcctctccatgtttccttcagtctgggtcagacttgcttcacagtgtgagagctctctcagtacattttttgcttccttgccatcttttctctcacaggaatttccgctaataaaatctttcatatttaattctccaggctagagagctaaagaatcaattcctggcttgcaaccatttaaccccattgctattgtttagcatcttttttcttcctcttctttctacattttgcctcttttgaccagatagcaacttccactccactgggcataccaatggtttttatgtcc

SEQ ID NO: 281853 - DNA, 608 bp, Homo sapiens
tatctataatctattttgttaacaattctttgacacactgttataatctgttttacagtttatgaaactgtagtactcaaaggctttatgatgatgcctttaattctagaagtgtctgttttattaaaagcagaaaatattttatccttatcactgtatagttaaaatacatcaatgcaatatatttttactttgtacgatatatrtagtgttttatagaatttttacttaaactaatagattgagtcatttatttatgagtaaagtatccacttgctactgtggtgaacaagctaaaaccttgggttacagttgcaattccccattttgtttgtattctatggcttgctagctgtgtgatctggaggaagttatttaatatgactgtgcctccttttctcagctgtaaaatggggagcaataaagcacttgccacataagcttgctcagagtattaatacaggcaatccctgtaagaggcttagcacagggcctggcatactgtaggtttttcagtagttgtgaactattattttaccaagtttacacatggaaataaatatgacaacttttttttcagtttacacaaacttcctttcaaacatcaa

SEQ ID NO: 281854 - DNA, 608 bp, Homo sapiens
tatctataatctattttgttaacaattctttgacacactgttataatctgttttacagtttatgaaactgtagtactcaaaggctttatgatgatgcctttaattctagaagtgtctgttttattaaaagcagaaaatattttatccttatcactgtatagttaaaatacatcaatgcaatatatttttactttgtacgatatatatagtgttttatagaatttttacttaaactaatagattgagtcatttatttatgagtaaagtatccacttgctactgtggtgaacaagctaaaaccttgggttacagttgcaattccccattttgtttgtattctatggcttgctagctgtgtgatctggagkaagttatttaatatgactgtgcctccttttctcagctgtaaaatggggagcaataaagcacttgccacataagcttgctcagagtattaatacaggcaatccctgtaagaggcttagcacagggcctggcatactgtaggtttttcagtagttgtgaactattattttaccaagtttacacatggaaataaatatgacaacttttttttcagtttacacaaacttcctttcaaacatcaa

SEQ ID NO: 281855 - DNA, 608 bp, Homo sapiens
tatctataatctattttgttaacaattctttgacacactgttataatctgttttacagtttatgaaactgtagtactcaaaggctttatgatgatgcctttaattctagaagtgtctgttttattaaaagcagaaaatattttatccttatcactgtatagttaaaatacatcaatgcaatatatttttactttgtacgatatatatagtgttttatagaatttttacttaaactaatagattgagtcatttatttatgagtaaagtatccacttgctactgtggtgaacaagctaaaaccttgggttacagttgcaattccccattttgtttgtattctatggcttgctagctgtgtgatctggaggaarttatttaatatgactgtgcctccttttctcagctgtaaaatggggagcaataaagcacttgccacataagcttgctcagagtattaatacaggcaatccctgtaagaggcttagcacagggcctggcatactgtaggtttttcagtagttgtgaactattattttaccaagtttacacatggaaataaatatgacaacttttttttcagtttacacaaacttcctttcaaacatcaa

SEQ ID NO: 281856 - DNA, 622 bp, Homo sapiens
tgacatagttcattgtctatcttctagcgctttgaaaacttcctttaaaataagtcaatcgcgcaagttttattattgctgtycaaaatacacttatcaattattcctcaagaatacccccaggccaaattctaaggacctgcagtttctacctctctaggggaaaaagtgacactgatgctatgaccttaatatcttaaaacagagaccacttcttatataaaacaggataggtagtaagcccacatgcatatggtgtaatttcaggaggtcatttttagagcccactcaccttcatatttcagttttctcgaacataatacttccacattaaagattgctatatgaaattccataattagcaatagatccgatgacatgacttatctgtctcccttcgtatcagcaacaaaacttgtgtgcaagcaacagaactgtctctgattttcttaagaaaggaaagataatatctattggaaatatgtacagttgataatataggagataaccagacatggaaaattggccaacattaaggtagttttaaaatgtttaaggagcacaaaactttttatttaggaaaaaaatcagtaattttttagcctggatatcacatcaatgg

SEQ ID NO: 281857 - DNA, 615 bp, Homo sapiens
cttttttttcagtttacacaaacttcctttcaaacatcaacaaatagtattctatttctcaataacaagtatctgatgtcagagactaagggagagacacatggactaagtataaaagaatggattttgcttcaaagcactctttttcagtgtcttacattatctctcggccctaacgtcggtgttgaaaatagctaggagggtctacccctgtgccttctgggttctccccattcttttttctctggtggattttttggcatcacatgagttgctgtttctaagaaagtaaaygagtgacaagtagactacaggactactgatgcatttatcatcctcataggagtgcagtcaagtcctatttccagctcttccattatgctgtgatatattatagtaacattatttggtattacatacctaatggaattatccaatcaggtttataaacctgttaacagactcttaatgaaaggtttgaccctgcctttccatataagaagtgaatcaaaccccaatccaacatttgtagaatgccacactcaaaaatctcaataatctcctaaaggaacacatgcaatggtactgctttctttctttctttttttgttgttg

SEQ ID NO: 281858 - DNA, 622 bp, Homo sapiens
tgacatagttcattgtctatcttctagcgctttgaaaacttcctttaaaataagtcaatcgcgcaagttttattattgctgtccaaaatacacttatcaattattcctcaagaatacccccaggccaaattctaaggacctgcagtttctacctctctaggggaaaaagtgacactgatgctatgaccttaatatcttaaaacagagaccacttcttatataaaacaggataggtagtaagcccacatgcatatggtgtaatttcakgaggtcatttttagagcccactcaccttcatatttcagttttctcgaacataatacttccacattaaagattgctatatgaaattccataattagcaatagatccgatgacatgacttatctgtctcccttcgtatcagcaacaaaacttgtgtgcaagcaacagaactgtctctgattttcttaagaaaggaaagataatatctattggaaatatgtacagttgataatataggagataaccagacatggaaaattggccaacattaaggtagttttaaaatgtttaaggagcacaaaactttttatttaggaaaaaaatcagtaattttttagcctggatatcacatcaatgg

SEQ ID NO: 281859 - DNA, 622 bp, Homo sapiens
tgacatagttcattgtctatcttctagcgctttgaaaacttcctttaaaataagtcaatcgcgcaagttttattattgctgtccaaaatacacttatcaattattcctcaagaatacccccaggccaaattctaaggacctgcagtttctacctctctaggggaaaaagtgacactgatgctatgaccttaatatcttaaaacagagaccacttcttatataaaacaggataggtagtaagcccacatgcatatggtgtaatttcaggaggtcatttttagagcccactcaccttcatatttcagttttctcgaacataatayttccacattaaagattgctatatgaaattccataattagcaatagatccgatgacatgacttatctgtctcccttcgtatcagcaacaaaacttgtgtgcaagcaacagaactgtctctgattttcttaagaaaggaaagataatatctattggaaatatgtacagttgataatataggagataaccagacatggaaaattggccaacattaaggtagttttaaaatgtttaaggagcacaaaactttttatttaggaaaaaaatcagtaattttttagcctggatatcacatcaatgg

SEQ ID NO: 281860 - DNA, 587 bp, Homo sapiens
tgcaatgtctccaaccagaagattctgaattcacttgcaacttcccacagtaacaaatgaaaatcatactctagaacactgggtttgctgggtaaagacacttagtgtagcaagctccacttataatgggagcctctgtctctcctctgcctgatgctcttcaggcagtagtgtctatatttattatttactaaaatcatggatgacagttctctgaattttctgcctggtcattcagttggatatctataaaaaacatagtgggagaaaatatttattaaaaacttacaaggtaggcaatttgctacattatttgctcatctaattctcataactacataaagcaacatgatacagtgatgccttagtcttctcacctataaaagggagaaaagmaatggtgaagttttgcgagaataaatgaaataatacaaagcactgtacctaataagtatctttgatgtgtgactgctctatattaacataatgatgagcacatgataagtgtttaaatatgcccactgaattgacctgagttgaatgaaattgaaatgcagataaatgatttttattttctccactactgc

SEQ ID NO: 281861 - DNA, 338 bp, Homo sapiens
ggtttatgaggattcccttcctccaaaaattgctagttgatggggtactttgatctaaaatgaaagcmtaaaccagagcattttaaaatcagtcttctgaatttcaacaaagaaaatattgtaaatttaaaataacaattattttcaaaatttctgggcatcgtaaaaaataattttaaaatattattaaaaatttgaatggaaatttgctttcttcaaaaaaagttgtaagtttaaaacgcgcaaagcctcaagaatttaaacattaccttccaaagctcaagaccatcttcagaatgcatatataacacattttcagtgaaaaataggttgataaa

SEQ ID NO: 281862 - DNA, 585 bp, Homo sapiens
atttctgtgaaaaacatcattgggattttcataggaattgcattgaatttgtaggtttttggggggctagtattgatattttaacaagattaagtcctccatcccatgaacatgaggtgtccttttatttatgtcttcttcaacttttttcagcartgttttttagtttttattgtccacgtctttacttctttggttaattcctgactttttattccttttgatgctattataaatggaattgttttaataatttcctttttagattgctcattgttagtatacagaaatgaaactaattcttgtgttcactttgtatcctgctactttgctaaatttgcttagtagttctaatagttttttgtagagtctttagggttttctatgtataagattatataatttgtgaacaaacacaattttaattcttccattctagtttagatgtgttttatttccttttgttgcctaattgttttggctaggacttctagtagtattttaaatagaagtggtgtaaacaggcatcgttgccttcttgatcttaccagaaaagctttcattctttcaccattgagtatgatg

SEQ ID NO: 281863 - DNA, 630 bp, Homo sapiens
gaatctcagtatttttagagacactgtagagagataaattgtatttcccataaggaagaagattgctgagataatccccaaacgtcaaaaactgagaaggaaaggtggaatctaatagatttatagcctgtgaatcattgcccagtttatattcactcagtatgtgtcaatatgttaccttccttacagcagagagcccttctaacagagaatattacagtttctgcaaggacaatcagtatcttttaaagttttattttcgtacttgtgttgggtgaaaaataggtatctatatgtgactctaaaaaatattaaataatgcaatttctcacatctcaaatttatggaagccaaagtcartcactcaaaaatataaattttaacttgcgttgacaaggtactttgttatgaaggattcattaattaaactacagtttatccacctaatgcgatcctgggtagctgagttatctatgtatggatgtgaggaaaaaataaagaataaaatgttaaataaaaaatcgtactttactgataataatgtactgtatctttttaaataaaggtaatggaaattaagaatatgtattttcatgtgaatgtgtacaactaaaagacaataagtgaata

SEQ ID NO: 281864 - DNA, 395 bp, Homo sapiens
attgtcttataaggtttctttacttttgccattgttatcactgaagtggcttattgaaagaaaaaaataaagactcttatttatttgtctaaattcctcaaaaaggcaaattaatattttagatatagttagtgtttactttgtgcatttactttagcttaaaacctaaggccatgttggatggcaatgagtcaaacttattttgaattcatttctatttaatctraacaaatgtgtatttagcatgtaatatgcacttatgaatcttatactttggttgtgtgtgagggtgagacgattaacaagaaaaacaataaataagtcaattatacagtgttaatattaagtaagtctcagaggaaaatgaaaaaatagtatcagagttcaagttaaat

SEQ ID NO: 281865 - DNA, 556 bp, Homo sapiens
ggaaacttacttcaaatcactaggattaatttttttcatttacagattaaagttaaaaataataaccatctcaaagtattattgttagaataaaactatataacatttaaacacagtgaacagtacacattatacaatgttagcaattagtataattactaatgtcttcaaggagaacatagtcacatccacttctatgataaactttaaaacaaatgatgctagaaagatcctatcaaaattataccctagtatttagtaataactctgagattttataattttgatcttgagaatttagtattttcaaagttagattaaaaacaaatttagtttaaaaactgtgtttgaatcaaattaaaatttatgtttagtcaacaaattagagcagctttttgtaaaarcaatagcctaataatcaatgttcatccggttaaaaaaattatagtacattccaacactggaacaaaatgcaggcttaaaaataaataagaattttttttacatactaatatacaacaatctgtaggatacactattatgtgaaaaatgctgg

SEQ ID NO: 281866 - DNA, 572 bp, Homo sapiens
taggcagcccaaacaaaaatacacaaataggattatagcaaactaaaattccgcaaagcaaaggaagcagtcaacagagtgaaaagacaatctatagaataggagaaaatgtttgcaagctatacatctgataagggttaatgtctaaagtatgtaaggagctcaacttaatatcaagaaaaaaaatcacctgatattaaaatgggcaaaaaacctgagtagacatttctcagaagaagacgtataaatgaccaacagatacatgcaaaaatattcagcatcactaatcatcagggaaaacaaatcaaaaccacaagatatcatctgagacctgttagaatgggcattaaaaaaagacaaaagataacaaatgttgatgaaactgtggaattaagggaacattattcgccattatggaaagcagtgtgcargttcctcaaaaaattaaaataaaactactgtataatccagttctctcactacggggtatgtatccaaaggaaatgaaatcagtacgttgaagtgatatctgcactccaatgtttattgcagcactattcacaaaaggatat

SEQ ID NO: 281867 - DNA, 549 bp, Homo sapiens
gtaattagatctaacacctaaatagagcttagaaagtcctctcccaaatgtttcctcacttccctgataattccttaaaaaagaaaamaaatgcacttcactctttccttccacgtcactttcacatttcaatcaccaaatcagcaagatggacttttcatctcaatccaaacaaggttaaaaagaaagagttcttctgttgggtgtcttgatgctgcagccatgagtctggggatcctgggtactgttctgctctgtaagaaggtcgtttaatggaataaaagtctacataatttgtggtcgatttcagtccatacttgttgactaatcagtagaagctggaaagtgaactcagtcatcaaaataagggtcttcatagctatgaggagactgcaaatacaatctgtatgaatcaaagttattttgttggagttatcttgactataatacagctgttgatgctgtagctgtctatttagttctcttgctggtgaggaatatgaactgatgtaaattggtgaaggtttgctggagcctgactgaatgatg

SEQ ID NO: 281868 - DNA, 549 bp, Homo sapiens
gtaattagatctaacacctaaatagagcttagaaagtcctctcccaaatgtttcctcacttccctgataattccttaaaaaagaaaaaaaatgcacttcactctttccttccacgtcactttcacatttcaatcaccaaatcagcaagatggacttttcayctcaatccaaacaaggttaaaaagaaagagttcttctgttgggtgtcttgatgctgcagccatgagtctggggatcctgggtactgttctgctctgtaagaaggtcgtttaatggaataaaagtctacataatttgtggtcgatttcagtccatacttgttgactaatcagtagaagctggaaagtgaactcagtcatcaaaataagggtcttcatagctatgaggagactgcaaatacaatctgtatgaatcaaagttattttgttggagttatcttgactataatacagctgttgatgctgtagctgtctatttagttctcttgctggtgaggaatatgaactgatgtaaattggtgaaggtttgctggagcctgactgaatgatg

SEQ ID NO: 281869 - DNA, 549 bp, Homo sapiens
gtaattagatctaacacctaaatagagcttagaaagtcctctcccaaatgtttcctcacttccctgataattccttaaaaaagaaaaaaaatgcacttcactctttccttccacgtcactttcacatttcaatcaccaaatcagcaagatggacttttcatctcaatccaaacaaggttaaaaagaaagagttcttctgttgggtgtcttgatgctgcagccatgagtctggggatcctgggtactgttctgctctrtaagaaggtcgtttaatggaataaaagtctacataatttgtggtcgatttcagtccatacttgttgactaatcagtagaagctggaaagtgaactcagtcatcaaaataagggtcttcatagctatgaggagactgcaaatacaatctgtatgaatcaaagttattttgttggagttatcttgactataatacagctgttgatgctgtagctgtctatttagttctcttgctggtgaggaatatgaactgatgtaaattggtgaaggtttgctggagcctgactgaatgatg

SEQ ID NO: 281870 - DNA, 410 bp, Homo sapiens
taagcaatcataaatgtaacaaaaattttgttayttattaacctataatatcaagttgcaggtgttctcaaaatgagataactaaggtcatctgtttaatttctgtgatatcatactatccacatactatggttagatttaactgaattactgattaagtgaactttgcatttatctctaaaattaaattctcaagtacttgtgtttaaatttgcaaattccaatttctcctaaatatattcatttcttatttcactataacaagtttaagctttaaaaagacaggtttattttaagagaattaatcccaacaattaaaaactaaaaacagctttcaatttgcttttcagctgctaaataaattagggaaatacaaagtggtcatccctcaaacacaaaggtaaagaaag

SEQ ID NO: 281871 - DNA, 1117 bp, Homo sapiens
acccattggaccacgtgcccattgtagctttgcccagtgcccaccagacctgattattatgtgcctgccacctccatggcacatgctccagcatgttcagtagactaggcattcactgtagctgtatgtatatrcacacacacccaccagacttaacctctgtacccccacccccaagacagttccctcatatgcctttagaacttgtgtccctgtgcattactaaatacatatctggatgtagaacagccacacacttcaccccacctgcccacaaaagaaagtttttttcctaccaaggccacattataaacaaattgtcaaaagtcaaagagagagagttttaaaaattattatttttattattaacattatttttgactaagttacaattatatgcatgtatggagtaaaacatgaggttttgatatatgtatacaatgtggcatggttaaaccaagctaattaacatatccatcaccttatctttttttataacaaaacatttgaaatttactttawttttgtgaagagcaatgaggaagacaaagatgtaagtctgggaaagttgagaatttccagtgccaacagtataagaagcaggagaataaaacctcactgcacactagaaaagaccaacatcttcagtwataacattcttgaatccttactatgcagaggaagctcttctcattgccagagatcaaaatctaaaacatatctcagagcctttatagggagataagacaagagaaatgtgaacaggaacaagaaaacaaaaaataagtcaaacaaagaaacaccaaacagagaaatcttttgggaaagtatttgccttctttgtctgttctctagcagagaacattccttttcctctgtagaattcatttgatttgatctattaaaaaggacagagctgattgaaatgagagtttaaatgtatcactagaaagacctttcgatctttggctccccaactctgcttcagagcactctgttctttctgtcctcatttctcaccagtatttctttatcccaaagagtcaagtaccaaaagtaattttaaaatagataagtgcaagtgttccggaaccaaactgaggttcgggctgctgtt

SEQ ID NO: 281872 - DNA, 595 bp, Homo sapiens
ttttgtgaagagcaatgaggaagacaaagatgtaagtctgggaaagttgagaatttccagtgccaacagtataagaagcaggagaataaaacctcactgcacactagaaaagaccaacatcttcagtaataacattcttgaatccttactatgcagaggaagctcttctcattgccagagatcaaaatctaaaacatatctcagagcctttatagggagataagacaagagaaatgtgaacaggaacaagaaaacaaaaaataagtcaaacaaagaaacaccaaacagagaaaycttttgggaaagtatttgccttctttgtctgttctctagcagagaacattccttttcctctgtagaattcatttgatttgatctattaaaaaggacagagctgattgaaatgagagtttaaatgtatcactagaaagacctttcgatctttggctccccaactctgcttcagagcactctgttctttctgtcctcatttctcaccagtatttctttatcccaaagagtcaagtaccaaaagtaattttaaaatagataagtgcaagtgttccggaaccaaactgaggttcgggctgctgtt

SEQ ID NO: 281873 - DNA, 468 bp, Homo sapiens
cagtactgagacagttgttatggaggcctgtgtgaaacctggcctgccacacaaggttagggaaaaaaatggattcaaccaacagattgtttcttctccctaagaaattacttttgcaatgaagaacaagaaagaagcctttttaaaatcacagtttsaggtgagaagagattccatttaactttgaattgaatgaactctgacatgtttgtactgcattttccaacaatttgggctaaaatttaatacttttaaaaaatcttaatagtgcatccctactactacatttccttgctttttaacaccaattccactgctttagattgctaagagatcaagttctaggttaaaaattagaaaaccaggcttctgtttgcatgtctgttactgacttggtagaacttcgtaggacttggtagaaattctgcacatccatttgttcagaaaaatcattttttaaacaacctc

SEQ ID NO: 281874 - DNA, 541 bp, Homo sapiens
gaaaaagctttcataaccaagagaatgcatttctcatactacattagcattcttctagggaaatttttgttgstttgttgaacattttttcccatttttttgaagatggtagcaggtattcttcatagtcccactcaaaagaaaaaaatattcaaaattggcttgcatacatagttttttcatagcttacctttattatctttttaatcaaaaactgaggctcaatttgacaactcacctaattcatccccctaatcattagttttgatgaaaaagccagttttacattccataggaaatttaccatcatggataaattatgaaaagaatatgtcaaatgctttagggatttttaaaaagagaataataaaaaaactttttttaacaataaaaacatcacagtaaaaatgcaaataaccccctagcacaattactttgaaaaaaacccacacaaattttagtgtttaattatttgtttaaaatatgagtcatgatactgtacaaataaatgttttgcaggcagtaactttggttatttttc

SEQ ID NO: 281875 - DNA, 579 bp, Homo sapiens
tatgagctactaaggtttttagcaaaactgtgtaactttattgtattcaaagttaggacaggacatttagttcaattttatagctgaagagatgggagatataaaaacaaatttgcaattccccaagtcattttgacagcttaagtctatattggaaatctgagtattccaaaaacaaagccaaacatttacccctccatgccaatttaatgtcgaagtaacttgacatrcaatttaattctgtcaaaatcaatgttaggagataaagaaaagaatttaagctgagtttaaatgtatttatctaaattaaagataatcaaagtttaatcatattccttgatagtttttggtctgagtatatccttttatctcaaagatattccttttatattaactaaatgtcaacatcatattaatcacaggtcccagagaaaagacacgttcattgctctcaaacagtgcctcataagcagaaagacaaacacaaacagtgggtttcatagaatatggtaaagttgaaagtgagtcattgggaacgtggaaaacagaacacatctgcacctgtacaagccaatcaga

SEQ ID NO: 281876 - DNA, 579 bp, Homo sapiens
tatgagctactaaggtttttagcaaaactgtgtaactttattgtattcaaagttaggacaggacatttagttcaattttatagctgaagagatgggagatataaaaacaaatttgcaattccccaagtcattttgacagcttaagtctatattggaaatctgagtattccaaaaacaaagccaaacatttacccctccatgccaatttaatgtcgaagtaacttgacatacaatttaattctgtcaaaatcaatgttaggagataaagaaaagaatttaagctgagtttaaatgtatttatctaaattaaagataatcaaagtttaatcatattccttgatagtttttggtctragtatatccttttatctcaaagatattccttttatattaactaaatgtcaacatcatattaatcacaggtcccagagaaaagacacgttcattgctctcaaacagtgcctcataagcagaaagacaaacacaaacagtgggtttcatagaatatggtaaagttgaaagtgagtcattgggaacgtggaaaacagaacacatctgcacctgtacaagccaatcaga

SEQ ID NO: 281877 - DNA, 522 bp, Homo sapiens
ttctgacttgggtcctttttctcatctctctacatgtagccaattccagctctcagtagtgacccccgcatctatgtccccagtccatgaatctctcctgaggtccagttccctacaattgttctcctggtaggggtgactctacaatggtgagttaggtgctgtcaagggtcttaaaaaactggccaaacttgctctgaatcacgataaacactctaagagcagagggcaaatyggaaacatattctcactcctgtaagataagtttgcttaaatcatgaaggataaattattttcagccatttggaggaagaatgtgtttgtggtcatttacttacaaatccaatggaattgaatatttttatacactttacgtggagcaaattaaaatatgtgctgtggggtgtgtgtttgtgtgtatgagtgtgtgcagcacatatgttttgtggatgccaaagcaactctaccttgagtgctaagtgtccgtgttgacttctgattaaccccaattctgggaaaacc

SEQ ID NO: 281878 - DNA, 557 bp, Homo sapiens
acatgcccctctaagcttttctatttgggtatgtcaggaaagctatactgaatatttgccaaaagatggctctcatttatgtttgggtcctaaatgaactaatttccctggttgccttgaattctcttcgttgtttttttcaataaaggcagcaatcagtgtatcatggaagatggagaaagatctctccccaaacacacaccacacacacacacacacacacacacacacacacgcacatacacacacacatacaccatctatttttgtctggtttgccatttctatgactggtatgtaatagttcctctctagatcgctcacagttcattaaggggttgctcaatttattaggaaccaatcatgcatttatacattcttttatctgaagtgcatttttaaatgttagaccatacactaatcaagttgaacatgataatgagcgcacgttcacattgttaaggtaaatgacccaatgcacttacagtgaagacatatttgarctacaatttgccttttcatcgcaatatggaacactcccagcaagggtcaggatg

SEQ ID NO: 281879 - DNA, 220 bp, Homo sapiens
caaggaaagacgagctgtatgtgttcattgacaaccagtgattatagctatgatctatgcaaccaggtaaacatcacctcagatgactgccccccaggtgacagaaccaagacctgcactggtcacagacagagttcccagaggcagaaagccatcactgttctctctcctcagttstaggttaaaaaaatataatgcttaaaatacgagatgctacaag

SEQ ID NO: 281880 - DNA, 570 bp, Homo sapiens
ataaaaattttgatacttccctaacacaagcagagggtaacttttttatgatgcaataaactctcattcctcagcatggcagataaggttgcatgagtgctaagggatccttgcagtgatcaaatttgtactgttgaacatttcaaataaaattaccatagtgaaaacctttttgcacaggctaatgagactttaagtgagatcaagcaggaggcaratccaatcattcacgtaagccttcatatgtaactcagggctctctggtttaagaaacagactgctcaatgagaaaaagaccaacaacccaatggaaaaacgagtatagcacttgggaaaaaacgctcaacttcacttataataaaataaaagtaaacttcaagaaactatttttacctgtcagattgataaagatcaagaagttgtgataggcaagagtcctgtacgtcgttgctgagaatataaattgaaagacaggttttggaaggacggttgacaatgtctatcaaaaatttaagtgtaatgaaatagactcagcaatttcacttctatgaattctttattcttttagaa

SEQ ID NO: 281881 - DNA, 570 bp, Homo sapiens
ataaaaattttgatacttccctaacacaagcagagggtaacttttttatgatgcaataaactctcattcctcagcatggcagataaggttgcatgagtgctaagggatccttgcagtgatcaaatttgtactgttgaacatttcaaataaaattaccatagtgaaaacctttttgcacaggctaatgagactttaagtgagatcaagcaggaggcaaatccaatcattcacgtaagccttcatatgtaactcagggctctctggtttaagaaacagactgctcaatgagaaaaagaccaacaacccaatrgaaaaacgagtatagcacttgggaaaaaacgctcaacttcacttataataaaataaaagtaaacttcaagaaactatttttacctgtcagattgataaagatcaagaagttgtgataggcaagagtcctgtacgtcgttgctgagaatataaattgaaagacaggttttggaaggacggttgacaatgtctatcaaaaatttaagtgtaatgaaatagactcagcaatttcacttctatgaattctttattcttttagaa

SEQ ID NO: 281882 - DNA, 563 bp, Homo sapiens
aaatgcaaatactgttaaatatactacagtgtagtttttttcccttcttccatgatctctctttctctctctcaacttcttatagtctgtgtttttttaaaaaaatgtatctaatgtcattctcagaaacagaatttacatttcaaattattggcataaattttactgttcaactttatattgtgcaatgccacttttaaatgcaaatataagaacatttaacttgtatgcagaatcactgaaattatacaatttgtatttcatagtttacacatgcatatgtattttgttcttaccagaacagtggaaacgctacatgcacatacacaaaactacctcractctttttattttgcatcttgtttgatacacaagcattctaccaacactttctatcttcagcttactgatgagtaagaaagaactgaaaggaaaaagaattatgggttgctctatctttctctttcctttgatgtcatcttttttagcataagtggttggctaatataggaaagtgatgcgagtaggttagaatctaatagtgtcccttggccattcgtgtt

SEQ ID NO: 281883 - DNA, 560 bp, Homo sapiens
taatacactgtcttctgaccagtcttccagacaaatcacyggttgctatatatatatattttttaatagctaatatcttacactgatatatttatattatatataaataattttgtgctttatgtttatgctatatatacagatgtagttagttatttatgttatatataatataaacatgatgtatattcttatatttctctggggactcactgtcttcttaatacactgtcttctgaccaaattcttccagacaaatcagctgttgctatatatatatatatgctatatattttattgcatagaatatattatatattatatattaattatagaatatattatatattatatattaattatataatatatgttacacattacatattatatataatatattatgctatatcttatatattatatatgttatatatgtatatatattatatgtacacatatacacatacatacacacatgtatactttaatagctaatatcttacactggtatatttatattacatatgattatatacaaatatttttgtactttatgt

SEQ ID NO: 281884 - DNA, 546 bp, Homo sapiens
accccttgcctttttatagagaacggaaaagctctacagtcttcattgtcatgtactcggcctcatcaggttttgttgttcccaggaataaatgtcccccttgtctttgggtggggcccccttgtggcttaccagctctgtcaaccccactgcagtggccagcacggaagcccttcctggggccacgctttcccccaaaggcacacagttaaggtttctgaaacagagaacgaatggccttttatcatctgtgaaaggagagacactggcaatttcctgcctctggcctagtgtcagaatttctcctgattgctagaggctgtattgcacattttaagtgggctcgctacacatgtattcccagcccaaccctcagccagagggagcagtaagtcagatcacttcagcagcctgttcaaataaacagggataatagttgagtggtcctcccaactmatcagtacatgaaaggaaacatctgcctgggcttaattgctgttttttttggttacacttttccctcctcttcttcccccatcccccact

SEQ ID NO: 281885 - DNA, 546 bp, Homo sapiens
accccttgcctttttatagagaacggaaaagctctacagtcttcattgtcatgtactcggcctcatcaggttttgttgttcccaggaataaatgtcccccttgtctttgggtggggcccccttgtggcttaccagctctgtcaaccccactgcagtggccagcacggaagcccttcctggggccacgctttcccccaaaggcacacagttaaggtttctgaaacagagaacgaatggccttttatcatctgtgaaaggagagacactggcaatttcctgcctctggcctagtgtcagaatttctcctgattgctagaggctgtattgcacattttaagtgggctcgctacacatgtattcccagcccaaccctcagccagagggagcagtaagtcagatcacttcagcagcctgttcaaataaacagggataatagttgagtggtcctcccaactcatcagtacrtgaaaggaaacatctgcctgggcttaattgctgttttttttggttacacttttccctcctcttcttcccccatcccccact

SEQ ID NO: 281886 - DNA, 413 bp, Homo sapiens
aaagaaagaatcatctattgctccaactgcyctttactaaaggtaatttgtctttttaacctcatcaggctccttttaagctctcaaactgaccttttttttttttttacagattcaatgcattaagtcaatttattacttatgatgaatttatttatgtatttattttcgctatcacaagtagaaaaagcctataagttgctatgccaaaaacctgcctctagatggcaaacaaaccccgcaatacacaaaagagagccaaattcttagaaaccctgggaaaggaagagggctactgtcccattaacaacttggagcccttaagccaagaatgaggtggaacatctgggaggagacacaagggtgcggagtagtggggaacctgctctgtgctctgagactgaaagcccagc

SEQ ID NO: 281887 - DNA, 1047 bp, Homo sapiens
aaagaatcatctattgctccaactgccctttactaaaggtaatttgtctttttaacctcatcaggctccttttaagctctcaaactgaccttttttttttttttacagattcaatgcattaagtcaatttattayttatgatgaatttatttatgtatttattttcgctatcacaagtagaaaaagcctataagttgctatgccaaaaacctgcctctagatggcaaacaaaccccgcaatacacaaaagagagccaaattcttagaaaccctgggaaaggaagagggctactgtcccattaacaacttggagcccttaagccaagaatgaggtggaacatctgggaggagacacaagggtgcggagtagtggggaacctgctctgtgctctgagactgaaagcccagccttgcctctcaccgctgccttgactgtgtccccatctgctgtgaagtgaatggtgtcttctaaattcgtgctgagccctaattgctgaaaactgtaagacatgcaatggggggattatgtgcatcttcccgacaccaacatgatgctcaggaaggagacttcttgttttctcttaggattctwttaagctctcaaactgaccttttttttttttttacagattcaatgcattaagtcaatttattacttatgatgaatttatttatgtatttattttcgctawcacaagtagaaaaagcctataagttgctatgccaaaaacctgcctctagatggcaaacaaaccccgcaatacacaaaagagagccaaattcttagaaaccctgggaaaggaagagggctactgtcccattaacaacttggagcccttaagccaagaatgaggtggaacatctgggaggagacacaagggtgcggagtagtggggaacctgctctgtgctctgagactgaaagcccagccttgcctctcaccgctgccttgactgtgtccccatctgctgtgaagtgaatggtgtcttctaaattcgtgctgagccctaattgctgaaaactgtaagacatgcaatggggggatta

SEQ ID NO: 281888 - DNA, 591 bp, Homo sapiens
aaagaatcatctattgctccaactgccctttactaaaggtaatttgtctttttaacctcatcaggctccttttaagctctcaaactgaccttttttttttttttacagattcaatgcattaagtcaatttattacttatgatgaatttatttatgtatttattttcgctatcacaagtagaaaaagcctataagttgctatgccaaaaacctgcctctagatggcaaacaaaccccgcaatacacaaaagagagccaaattcttagaaaccctgggaaaggaagagggctactgtcccattaacaacttggagcccttaagscaagaatgaggtggaacatctgggaggagacacaagggtgcggagtagtggggaacctgctctgtgctctgagactgaaagcccagccttgcctctcaccgctgccttgactgtgtccccatctgctgtgaagtgaatggtgtcttctaaattcgtgctgagccctaattgctgaaaactgtaagacatgcaatggggggattatgtgcatcttcccgacaccaacatgatgctcaggaaggagacttcttgttttctcttaggattct

SEQ ID NO: 281889 - DNA, 540 bp, Homo sapiens
atgtgcatcttcccgacaccaacatgatgctcaggaaggagacttcttgttttctcttaggattcttttactaaccaagattttgcctctactgcatatttccctttgctgattgtccctcccttttgacagaagatggcccagggcattcactactaagtctcaacctcttacccaaagccctcagtctagtgttgctctttccttcrtgctatttttgtttctttcttttcttgtaatcatcttggcaataaaataatcagttttttctttctacctattaaagatgttaccttagttaattacaggggtttccttcagaatgataaatggtctttcaaaatgatgtaaagagatctaaatccgtgtgctccagaacttgaatgaagctctgtctagcacgggtgccagtgactctcccagagtgctccatgcagctggacccacagagtccctctgtgctgtcatatcacccactgccttctgtgaatgagatattctgattagaatcctggtggatgctatttgagccagtgcccc

SEQ ID NO: 281890 - DNA, 540 bp, Homo sapiens
atgtgcatcttcccgacaccaacatgatgctcaggaaggagacttcttgttttctcttaggattcttttactaaccaagattttgcctctactgcatatttccctttgctgattgtccctcccttttgacagaagatggcccagggcattcactactaagtctcaacctcttacccaaagccctcagtctagtgttgctctttccttcgtgctatttttgtttctttcttttcttgtaatcatcttggcaataaaataatcagttttttctttctacctattaaagatgttaccttagttaattacaggggtttccttcagaatgataaatggtctttcaaaatgatgtaaagagatctaaatccgtgtgctccagaasttgaatgaagctctgtctagcacgggtgccagtgactctcccagagtgctccatgcagctggacccacagagtccctctgtgctgtcatatcacccactgccttctgtgaatgagatattctgattagaatcctggtggatgctatttgagccagtgcccc

SEQ ID NO: 281891 - DNA, 529 bp, Homo sapiens
cgtgtgctccagaacttgaatgaagctctgtctagcacgggtgccagtgactctcccagagtgctccatgcagctggacccacagagtccctctgtgctgtcatatcacccactgccttctgtgaatgagatattctgattagaatcctggtggatgctatttgagccagtgcccccacaactcctaygaaagccgaggaccacaggcccctgaagacaatcacaggtctctagactcacagctcatgaccgtcctctgcagacacagcttctccccggatggctgagggttgtcattggctgtgtccttccttgtgcatgacaacaggagacatagaaggtctgtaagcagccctgcaagccaggttctgagcaagccctcctgtgtggggccctcttacctggacataggtgtgtaaaccaaaaatgaaactctaagctccctaaccaactgaatgaactcctcctctcagccaagcacacaccaaaatcaacctgaaatacaatgcagcccatgatcggaacggat

SEQ ID NO: 281892 - DNA, 995 bp, Homo sapiens
cgtgtgctccagaacttgaatgaagctctgtctagcacgggtgccagtgactctcccagagtgctccatgcagctggacccacagagtccctctgtgctgtcatatcacccactgccttctgtgaatgagatattctgattagaatcctggtggatgctatttgagccagtgcccccacaactcctacgaaagccgaggaccacaggcccctgaagacaatcacaggtctctagactcacagctcatgaccgtcctctgcagacacagcttctccycggatggctgagggttgtcattggctgtgtccttccttgtgcatgacaacaggagacatagaaggtctgtaagcagccctgcaagccaggttctgagcaagccctcctgtgtggggccctcttacctggacataggtgtgtaaaccaaaaatgaaactctaagctccctaaccaactgaatgaactcctcctctcagccaagcacacaccaaaatcaacctgaaatacaatgcagcccatgatcggaacggatwcctaaccaactgaatgaactcctcctctcagccaagcacacaccaaaatcaacctgaaatacaatgcagcccatgatcggaacggatgattggatatgccttaacttaccctcttccctttaaaattcaggcacaactgaccagcttttaatatgaagacagagaccttgagactgacaaagaaaactctttatagcaataagwtaccaatgtgacagataccacgtcctaagagaaatcaaagtattttccccaagatattgttatttaatgtattgaaaaatgcctctgcaaagctggttcttgtgggaaaaatctacattctgtagagactcctttttaagtctctttcctgacccagagagatttaactaagagtttggcaccttttaagtctactaagaaacaattacaatctattctctctgaagcctgctacctggaggctccatctgcatgatgcaa

SEQ ID NO: 281893 - DNA, 465 bp, Homo sapiens
cctaaccaactgaatgaactcctcctctcagccaagcacacaccaaaatcaacctgaaatacaatgcagcccatgatcggaacggatgattggatatgccttaacttaccctcttccctttaaaattcaggcacaactgaccagcttttaatatgaagacagagaccttgagactgacaaagaaaactctttatagcaataagataccaatgtgacagataccacgtcctaagagaaatcaaagtattttccccaagatattgttatttaatgtattkaaaaatgcctctgcaaagctggttcttgtgggaaaaatctacattctgtagagactcctttttaagtctctttcctgacccagagagatttaactaagagtttggcaccttttaagtctactaagaaacaattacaatctattctctctgaagcctgctacctggaggctccatctgcatgatgcaa

SEQ ID NO: 281894 - DNA, 497 bp, Homo sapiens
tagcaataagataccaatgtgacagataccacgtcctaagagaaatcaaagtattttccccaagatattgttatttaatgtattgaaaaatgcctctgcaaagctggttcttgtgggaaaaatctacattctgtagagactcctttttaagtctctttcctgacccagagagatttaactaagagtttggcaccttttaagtctrctaagaaacaattacaatctattctctctgaagcctgctacctggaggctccatctgcatgatgcaaccttggctccaaaaccctttttctaaacccagaaactcccttgtgttgattacaggtcattagataaactctttcaaccacctatgaaatctttgaatccacctataacctggaagtccccaacatcccccctccttcgggctgtcctgccttttcatgtcaaagcaatgtacagcttacacgtattgattgatatcttatgtctccctaaaacgtgtaaaacca

SEQ ID NO: 281895 - DNA, 497 bp, Homo sapiens
tagcaataagataccaatgtgacagataccacgtcctaagagaaatcaaagtattttccccaagatattgttatttaatgtattgaaaaatgcctctgcaaagctggttcttgtgggaaaaatctacattctgtagagactcctttttaagtctctttcctgacccagagagatttaactaagagtttggcaccttttaagtctactaagaaacaattacaatctattctctctgaagcctgctacctggaggctccatctgcrtgatgcaaccttggctccaaaaccctttttctaaacccagaaactcccttgtgttgattacaggtcattagataaactctttcaaccacctatgaaatctttgaatccacctataacctggaagtccccaacatcccccctccttcgggctgtcctgccttttcatgtcaaagcaatgtacagcttacacgtattgattgatatcttatgtctccctaaaacgtgtaaaacca

SEQ ID NO: 281896 - DNA, 497 bp, Homo sapiens
tagcaataagataccaatgtgacagataccacgtcctaagagaaatcaaagtattttccccaagatattgttatttaatgtattgaaaaatgcctctgcaaagctggttcttgtgggaaaaatctacattctgtagagactcctttttaagtctctttcctgacccagagagatttaactaagagtttggcaccttttaagtctactaagaaacaattacaatctattctctctgaagcctgctacctggaggctccatctgcatgatgcaaccttggctccaaaaccctttttctaaacccagaaactcccttgtgttgattacaggtcattagataaactctttcaaccacctatgaaatctttgaatccacctakaacctggaagtccccaacatcccccctccttcgggctgtcctgccttttcatgtcaaagcaatgtacagcttacacgtattgattgatatcttatgtctccctaaaacgtgtaaaacca

SEQ ID NO: 281897 - DNA, 475 bp, Homo sapiens
atttttgagaacttgttacagtagcccgaggacactaacacaaatgggctccaggaaaatccagactaaaggtgttgtgttggtttgcaatctccttgcttaactttctgatactagacgtaaatagattggtgaaaaattttgtgattgaagaaatgtacatgaaacctacagtgtacagagaagcatctgttagttataagataaataytgataattttagttgaaaatgacatatgactgttaatatctcacataacattctgagttactcaagaatgcataaaagaggcactagatactcttctcatgtatgtgtgtgtgtctgtctatacatggatgtacacttcatggtgcatcagctggcggaaccctcaggacaccccttcacatcctcagtgccccatttcacacatgaggaaactgttcatgacagcacatggctgatttgcataaaagtcacttggtcagcagt

SEQ ID NO: 281898 - DNA, 475 bp, Homo sapiens
atttttgagaacttgttacagtagcccgaggacactaacacaaatgggctccaggaaaatccagactaaaggtgttgtgttggtttgcaatctccttgcttaactttctgatactagacgtaaatagattggtgaaaaattttgtgattgaagaaatgtacatgaaacctacagtgtacagagaagcatctgttagttataagataaatactgataattttagttgaaaatgacatatgactgttaatatctcacataacattctgagttactcaagaatgcataaaagaggcactagatactcttctcatgtatgtgtgtgtgtctgtctatacatgkatgtacacttcatggtgcatcagctggcggaaccctcaggacaccccttcacatcctcagtgccccatttcacacatgaggaaactgttcatgacagcacatggctgatttgcataaaagtcacttggtcagcagt

SEQ ID NO: 281899 - DNA, 581 bp, Homo sapiens
ggacaaaaaaccaatcactgcatgttctcactcataggtgggaattgaacaatgagaacacktggacacaggaaggggaatatcacacaccggggactgttgtggggtgtggggaggggggagggatagcattaggagatatacctaatgtaaatgacgagttaatggtgcagcgcaccaacatggcacatgtatacatatgtaacaaacctgcatgttgtgcacatgtaacctagaacttaacaataataataataataaaaagaatgggtcttgtacatccaatttgccctatgaatgttaaaacagcaaacccgcatccccttcctcttctcatgtgctgtgagagatgacctccaggctctcagataccaagattgtacaagacctaacccagagaattactcaagacactttctacgtaagaagaattgtggtactagctctcctcatagaaaaatgttttctgtctcttgttgaaattgacagcaaacacaaaaacacagaactacttgggagaacagaggacagtgatacactagggaagtaaaacacaccccttccccttgcattggtttcct

SEQ ID NO: 281900 - DNA, 581 bp, Homo sapiens
ggacaaaaaaccaatcactgcatgttctcactcataggtgggaattgaacaatgagaacacttggacacaggaaggggaatatcacacaccggggactgttgtggggtgtggggaggggggagggatagcattaggagatatacctaatgtaaatgacgagttaatggtgcagcgcaccaacatggcacatgtatacatatgtaacaaacctgcatgttgtgcacatgtaacctagaacttaacaataataataataataaaaagaatgggtcttgtacatccaatttgccctatgaatgttaaaacagcaaacccgcatccccttcctcttctcatgtgctgtgagagatgacctycaggctctcagataccaagattgtacaagacctaacccagagaattactcaagacactttctacgtaagaagaattgtggtactagctctcctcatagaaaaatgttttctgtctcttgttgaaattgacagcaaacacaaaaacacagaactacttgggagaacagaggacagtgatacactagggaagtaaaacacaccccttccccttgcattggtttcct

SEQ ID NO: 281901 - DNA, 515 bp, Homo sapiens
acctccaggctctcagataccaagattgtacaagacctaacccagagaattactcaagacactttctacgtaagaagaattgtggtactagctctcctcatagaaaaatgttttctgtctcttgttgaaattgacagcaaacacaaaaacacagaactayttgggagaacagaggacagtgatacactagggaagtaaaacacaccccttccccttgcattggtttcctgttgctgctgtaacaaattaccacaactttactgctccacatcacacaagtgtattatcttacatttctggaggtcagaagtctcaatgaagtaaaatcaaggagtaatagggctctattcattctaggcttcaagagagagaatccaatgtcgagcattccatctttctgatgttcccacattcctagcagcatggccccttcctccatcactccagtttccctgtccattgtcccaggtcctctctggctgttaccttcctccctccctattgtaaggaccctt

SEQ ID NO: 281902 - DNA, 515 bp, Homo sapiens
acctccaggctctcagataccaagattgtacaagacctaacccagagaattactcaagacactttctacgtaagaagaattgtggtactagctctcctcatagaaaaatgttttctgtctcttgttgaaattgacagcaaacacaaaaacacagaactacttgggagaacagaggacagtgatacactagggaagtaaaacacaccccttccccttgcattggtttcctgttgctgctgtaacaaattaccacaactttactrctccacatcacacaagtgtattatcttacatttctggaggtcagaagtctcaatgaagtaaaatcaaggagtaatagggctctattcattctaggcttcaagagagagaatccaatgtcgagcattccatctttctgatgttcccacattcctagcagcatggccccttcctccatcactccagtttccctgtccattgtcccaggtcctctctggctgttaccttcctccctccctattgtaaggaccctt

SEQ ID NO: 281903 - DNA, 1031 bp, Homo sapiens
acctccaggctctcagataccaagattgtacaagacctaacccagagaattactcaagacactttctacgtaagaagaattgtggtactagctctcctcatagaaaaatgttttctgtctcttgttgaaattgacagcaaacacaaaaacacagaactacttgggagaacagaggacagtgatacactagggaagtaaaacacaccccttccccttgcattggtttcctgttgctgctgtaacaaattaccacaactttactgctccacatmacacaagtgtattatcttacatttctggaggtcagaagtctcaatgaagtaaaatcaaggagtaatagggctctattcattctaggcttcaagagagagaatccaatgtcgagcattccatctttctgatgttcccacattcctagcagcatggccccttcctccatcactccagtttccctgtccattgtcccaggtcctctctggctgttaccttcctccctccctattgtaaggacccttwacctccaggctctcagataccaagattgtacaagacctaacccagagaattactcaagacactttctacgtaagaagaattgtggtactagctctcctcatagaaaaatgttttctgtctcttgttgaaattgacagcaaacacaaaaacacagaactacttgggagaacagaggacagtgatacactagggaagtaaaacacaccccttccccttgcattggtttcctgttgctgctgtaacaaattaccacaactttactgctccacatcacacaagtgtattatcttacatttctggaggtcagaagtctcaatgaagtaaaatcaaggwgtaatagggctctattcattctaggcttcaagagagagaatccaatgtcgagcattccatctttctgatgttcccacattcctagcagcatggccccttcctccatcactccagtttccctgtccattgtcccaggtcctctctggctgttaccttcctccctccctattgtaaggaccctt

SEQ ID NO: 281904 - DNA, 555 bp, Homo sapiens
gcattccatctttctgatgttcccacattcctagcagcatggccccttcctccatcactccagtttccctgtccattgtcccaggtcctctctggctgttaccttcctccctccctattgtaaggacccttgtgattatgatggtctcacccagataattcaggatattctcctgacctcaaaattctcaaccaygtctgccaagttatttttgacttgttcataagtaatgatcatagattccagatattaggacaatgatgtctttagtgggtgtattattcattccacaaacaactctcatcatccacacaatggccttcccctaaggtagaataaaaatatcacaaggcagatttatgaggcgatcgacctagaaaaaacatgagactctaggactgtctgatgtgtggatgtcaaatcctgggagattctgagcctctgctctatgtggactctatattgtgtagccatttgtggaaggcttctgtgattttgtgacctagagaaaacgaatctctgctaaaatcaaatctaagaaagattggcaaaggg

SEQ ID NO: 281905 - DNA, 433 bp, Homo sapiens
accaacgatgccctccaagaatgaggatttttccaatgcattaggttgggtcccctcagtgagaaggatgccaaagattcgcatgcrggcagtatatttacaaagtgcgggaaacaagcaagtgagcaagggaggggaggagggaaagggaaagtgaaaagtgcctcagaaggagccacctctgaggatgacgagcgctcaagcccacatagaaacacaggaaaaatgcctctgttattccacctgagaggtgagggagctgggggatgtgtacacctcccttgtcatcactgattgacaaccgtcctaggggatgctaattccaggccatgaggtctgcctcatttgcagcctgagctgcttccccaggttcagatagagcagtgaaggggagaaagggccatagagagtcagctgaagtataatgtctaga

SEQ ID NO: 281906 - DNA, 604 bp, Homo sapiens
aatttttggaatttccctaggcattaaaacatgagaagtggcaataattcaaaccaacgatgccctccaagaatgaggatttttccaatgcattaggttgggtcccctcagtgagaaggatgccaaagattcgcatgcaggcagtatatttacaaagtgcgggaaacaagcaagtgagcaagggaggggaggagggaaagggaaagtgaaaagtgcctcagaaggagccacctctgaggatgacgagmgctcaagcccacatagaaacacaggaaaaatgcctctgttattccacctgagaggtgagggagctgggggatgtgtacacctcccttgtcatcactgattgacaaccgtcctaggggatgctaattccaggccatgaggtctgcctcatttgcagcctgagctgcttccccaggttcagatagagcagtgaaggggagaaagggccatagagagtcagctgaagtataatgtctagaatccccaaggcatagtaacaatgactgctaaaattatgcacaaagaaaaagtgcatttgaatccagagatgtatctctctgaatctggatatatggatcctggcagcctgtttggtagc

SEQ ID NO: 281907 - DNA, 604 bp, Homo sapiens
aatttttggaatttccctaggcattaaaacatgagaagtggcaataattcaaaccaacgatgccctccaagaatgaggatttttccaatgcattaggttgggtcccctcagtgagaaggatgccaaagattcgcatgcaggcagtatatttacaaagtgcgggaaacaagcaagtgagcaagggaggggaggagggaaagggaaagtgaaaagtgcctcagaaggagccacctctgaggatgacgagcgctcaagcccacatagaaacacaggaaaaatgyctctgttattccacctgagaggtgagggagctgggggatgtgtacacctcccttgtcatcactgattgacaaccgtcctaggggatgctaattccaggccatgaggtctgcctcatttgcagcctgagctgcttccccaggttcagatagagcagtgaaggggagaaagggccatagagagtcagctgaagtataatgtctagaatccccaaggcatagtaacaatgactgctaaaattatgcacaaagaaaaagtgcatttgaatccagagatgtatctctctgaatctggatatatggatcctggcagcctgtttggtagc

SEQ ID NO: 281908 - DNA, 511 bp, Homo sapiens
ttaaagatgcttctgataaattctttttatattcatttcaaacaagaagcaayttcacactgacattgttattatagcactaaatacttttacactcatcaaattcctttgagactaactgaaatttctgacagccccacattctacaactttattgtaaattttctgccaaaaatgatgctttcctatacactcctaatacaagtataaatatattatttaatctagtcttaggttgatttaaaattttgaaaattcactccaaacatatgttctgtaaccatatggccaccaatgagaaatgcattctttcaaggtaaatctgtgctgccctggtttgacctgggactctggggatactgcgcccctgtgctgagttactgagatgagccagccctgcagctgtgctcagcctgccccatcccctgctgatttgcctgttcctagagcacagccccctgccctgaagactttttataggctggtcacacccggtgcaggagtcagcccc

SEQ ID NO: 281909 - DNA, 605 bp, Homo sapiens
aggattatactcggtcagtgtgctcagtactgtctggaacttcagggaagtcctctgataacatgattaattgcgacaatatttgtttttatgtttccaacttcaggtgccagatgtgacatccagatgacccagtctccatcctccctgtctgcatctgtaggagacagagtcaccatcacttgccgggcgagtcagggcattagcaataatttaaattggtatcagcagaaaccagggaaaactcctaagctcctgatctatgctgcayccagtctgcaaagtgggattccctctcggttcagtgacagtggatctggggcagactacactctcaccatccgcagcctgcagcctgaagattttgcaacttattactgtcaacagagtgacagtacccctcccacagcgttacaagtcataacataatccccaaggaagcagatgtgtgaggctgggctgccccaatgctccttccggtgcctctatctgctgagggaagttctcaaactcagtcaggtttggaaagtcattgggagattttcctagaggaggccagggaggttcctctgaaccctaagcctctttcaccctcatccccagca

SEQ ID NO: 281910 - DNA, 605 bp, Homo sapiens
aggattatactcggtcagtgtgctcagtactgtctggaacttcagggaagtcctctgataacatgattaattgcgacaatatttgtttttatgtttccaacttcaggtgccagatgtgacatccagatgacccagtctccatcctccctgtctgcatctgtaggagacagagtcaccatcacttgccgggcgagtcagggcattagcaataatttaaattggtatcagcagaaaccagggaaaactcctaagctcctgatctatgctgcatccagtctgcaaagtgggattccctctcggttcagtgacagtggatctggggcagaytacactctcaccatccgcagcctgcagcctgaagattttgcaacttattactgtcaacagagtgacagtacccctcccacagcgttacaagtcataacataatccccaaggaagcagatgtgtgaggctgggctgccccaatgctccttccggtgcctctatctgctgagggaagttctcaaactcagtcaggtttggaaagtcattgggagattttcctagaggaggccagggaggttcctctgaaccctaagcctctttcaccctcatccccagca

SEQ ID NO: 281911 - DNA, 535 bp, Homo sapiens
gacatccagatgacccagtctccatcctccctgtctgcatctgtaggagacagagtcaccatcacttgccgggcgagtcagggcattagcaataatttaaattggtatcagcagaaaccagggaaaactcctaagctcctgatctatgctgcatccagtctgcaaagtgggattccctctcggttcagtgacagtggatctggggcagactacactctcacyatccgcagcctgcagcctgaagattttgcaacttattactgtcaacagagtgacagtacccctcccacagcgttacaagtcataacataatccccaaggaagcagatgtgtgaggctgggctgccccaatgctccttccggtgcctctatctgctgagggaagttctcaaactcagtcaggtttggaaagtcattgggagattttcctagaggaggccagggaggttcctctgaaccctaagcctctttcaccctcatccccagcagaaaagatgtgacaatgcctgtcctgactgaataaagaagagagata

SEQ ID NO: 281912 - DNA, 605 bp, Homo sapiens
aggattatactcggtcagtgtgctcagtactgtctggaacttcagggaagtcctctgataacatgattaattgcgacaatatttgtttttatgtttccaacttcaggtgccagatgtgacatccagatgacccagtctccatcctccctgtctgcatctgtaggagacagagtcaccatcacttgccgggcgagtcagggcattagcaataatttaaattggtatcagcagaaaccagggaaaactcctaagctcctgatctatgctgcatccagtctgcaaagtgggattccctctcggttcagtgacagtggatctggggcagactacactctcaccatccgcagcctgcagcctgaagattttgcaacttattactgtcaacagagtgacagtacccctcccacagcgttacaagtcataacataatccccaaggaagcagatgtgtgaggctgggctgccccaatgctccttccggtgcctctatctgctgagggaagttctcaaactcagtcaggtttgsaaagtcattgggagattttcctagaggaggccagggaggttcctctgaaccctaagcctctttcaccctcatccccagca

SEQ ID NO: 281913 - DNA, 611 bp, Homo sapiens
ggaggttcctctgaaccctaagcctctttcaccctcatccccagcagaaaagatgtgacaatgcctgtcctgactgaataaagaagagagataagtccaactgaggagtctgtgttatgggataatcggaatttgtacagcaaaagagaagctattctcagtatttcaaggagaaattattcaagttgaataaattagagcctaaaccacagtctttccgaagcctatggaatgttattcatgaagcaggtactagacacaggggattctcaggtgctacttcagaagccagggtgcacctgcccctggtggtatgtgytgaacaccgtgtgatgatcctcagtcctgtctgggaagcccaggtcttcccagacaggaatgctttgataaatccactgctaggtaggtaattcttctgtaacattaataattcggttttacttttggatcctaaagtggaactacttagaaaatctgcaaaaatcatgcaaagaaaatcatgtaaaatcatgatctttacttaggcacttacaggtgaaatgacgaggtatctggaattgcattaaaatagatcaaggtgaaaaagactgacaaaaacattaactgttaaa

SEQ ID NO: 281914 - DNA, 588 bp, Homo sapiens
attaactgttaaaacttggggctatatatcaaagacattagtttctctatgagtatatttcaaattttcctcaataaattttttaaaaattcaatttaaaattcaagccacaaataaatgctttttaaaaatttcttagattatacaaatagtgccataacatcaagaataatcccaaatcattccatatacttcaaaagatacaaaaccaggctgggtgcggtggctcacgtctgtaatcccaacactttgggaggccgaggtgggcggatcacctgaggttgtgagtttgaaaccagtctgaccaacatggagaaaccccgtctctaccaaaaatacaaaattagctgggtgtggtggtgcatgcctgtaatcccagctactggggaggctgaggcaggagaatcacttgaactcgggaagtggaggttgcagtgagccgagattgygccattgcactccagcctgggcgacaagagcaaaactccatctcaaaaaaaaaaaaaaaaaaaaaaaaaagacacaaaagcaggaactcttttccaggagcaatcccatttagttaagaaaaagaagaaaaaaatattc

SEQ ID NO: 281915 - DNA, 294 bp, Homo sapiens
acttcgaattctctttccaataagtggccatacgctgttcatttctccttcatgatatgtctggcatctgtctccttcttttcattcctcctgtcactgctaccacatctcaggctcttattaccctgtcctggaattagaggcccagtctttyagaaatagcagcaatattttatcatttccctatgagtaggtcttccatcgttccctagtgctctcagaatgaagttcaaactccaagtttggcattcgaggctcttttcggctttgtttcaagctgctctcctcattaac

SEQ ID NO: 281916 - DNA, 294 bp, Homo sapiens
acttcgaattctctttccaataagtggccatacgctgttcatttctccttcatgatatgtctggcatctgtctccttcttttcattcctcctgtcactgctaccacatctcaggctcttattaccctgtcctggaattagaggcccagtctttcrgaaatagcagcaatattttatcatttccctatgagtaggtcttccatcgttccctagtgctctcagaatgaagttcaaactccaagtttggcattcgaggctcttttcggctttgtttcaagctgctctcctcattaac

SEQ ID NO: 281917 - DNA, 642 bp, Homo sapiens
actacatttcacttgtgtcttatttaatgattttataatttaaaccctaaattataaatctagaatttagaaagtatatttccccactggattacatttttggaaatattattttatatgtgcacaaatattacaaaatcactgtagacacctgaaaactatattatcttttaaaggcaatatttacattaaactggtataacaaaattgtttggtgcatttttttccagtacattttgtatatattacatgtttaaccttttttattcagcaaataatttttgagtatctactaagtgctaggttctgcaytactaactgaatttaaagagtgaaataacagacatggtctcagacaataaaaattaacattaggtcacctatttatatattttaaaatggtaattatgaaaactttttgagatttttaactagataacattataataatacacttgatgttgttaatatttgccagtgagcaaaaaagaaaataaaaagatggttttattcaatatacactttaaaattgcagaaaatagtcaagtttctctgctttgcagttgaatgtctatgtggttttctccgcaacttgccttttgtggagtgaacaattattcttccagcccaataaaggcagaa

SEQ ID NO: 281918 - DNA, 642 bp, Homo sapiens
actacatttcacttgtgtcttatttaatgattttataatttaaaccctaaattataaatctagaatttagaaagtatatttccccactggattacatttttggaaatattattttatatgtgcacaaatattacaaaatcactgtagacacctgaaaactatattatcttttaaaggcaatatttacattaaactggtataacaaaattgtttggtgcatttttttccagtacattttgtatatattacatgtttaaccttttttattcagcaaataatttttgagtatctactaagtgctaggttctgcattactaactgaatttaaagagtgaaataacagacatggtctcagacaataaaaattaacattaggtcacctatttatatattttaaaatggtaattatgaaaactttttgagatttttaactagataacattataataatacacttgatgttgttaatatttgccagtgagcaaaaaagaaaataaaaagatggttttattcaatatacactttaaaattgcagaaaatagtcaagtttctctgctttgcrgttgaatgtctatgtggttttctccgcaacttgccttttgtggagtgaacaattattcttccagcccaataaaggcagaa

SEQ ID NO: 281919 - DNA, 642 bp, Homo sapiens
actacatttcacttgtgtcttatttaatgattttataatttaaaccctaaattataaatctagaatttagaaagtatatttccccactggattacatttttggaaatattattttatatgtgcacaaatattacaaaatcactgtagacacctgaaaactatattatcttttaaaggcaatatttacattaaactggtataacaaaattgtttggtgcatttttttccagtacattttgtatatattacatgtttaaccttttttattcagcaaataatttttgagtatctactaagtgctaggttctgcattactaactgaatttaaagagtgaaataacagacatggtctcagacaataaaaattaacattaggtcacctatttatatattttaaaatggtaattatgaaaactttttgagatttttaactagataacattataataatacacttgatgttgttaatatttgccagtgagcaaaaaagaaaataaaaagatggttttattcaatatacactttaaaattgcagaaaatagtcaagtttctctgctttgcagttgaatgtctatgtgkttttctccgcaacttgccttttgtggagtgaacaattattcttccagcccaataaaggcagaa

SEQ ID NO: 281920 - DNA, 534 bp, Homo sapiens
cctagggataatgatatgactatcaaaaattaaaaattaaaggacattytgagtattataagaatgagaacttattacccaatgaacaggggttaattcattatgctccatatccattgaattaaaagacaggcccattacctggataatttgaaagtttaattttatttaaaagtcttgtttcattcatcaagctaaaggattagctcccagaaatattctaggattgcatatccccaactctgtaggaagtatagaaagaatgttataagggccaccatctaaacattattatgtaaataatttagtaccattccatttgcccttgtagatttaaaaatgtaaatggctttctcatattaggaaacatcacttttcaaaactcagataaacatagtacattgcaagagaataattattttctttattaaaaaagaaatactggatgctaagtccaaaagacataaattattttatactaataactactaatattttattcattaaaatataaaggtcaaagatttcaaaatg

SEQ ID NO: 281921 - DNA, 534 bp, Homo sapiens
cctagggataatgatatgactatcaaaaattaaaaattaaaggacattctgagtattataagaatgagaacttattacccaatgaacaggggttaattcattatgctccatatccattgaattaaaagacaggcccattacctggataatttgaaagtttaattttatttaaaagtcttgtttcattcatcaagctaaaggattagctcccagaaatattctaggattgcatatccccaactctgtaggaagtatagaaagaatgttataagggccaccatctaaacattattatgtaaataatttagtaccattccatttgccyttgtagatttaaaaatgtaaatggctttctcatattaggaaacatcacttttcaaaactcagataaacatagtacattgcaagagaataattattttctttattaaaaaagaaatactggatgctaagtccaaaagacataaattattttatactaataactactaatattttattcattaaaatataaaggtcaaagatttcaaaatg

SEQ ID NO: 281922 - DNA, 534 bp, Homo sapiens
cctagggataatgatatgactatcaaaaattaaaaattaaaggacattctgagtattataagaatgagaacttattacccaatgaacaggggttaattcattatgctccatatccattgaattaaaagacaggcccattacctggataatttgaaagtttaattttatttaaaagtcttgtttcattcatcaagctaaaggattagctcccagaaatattctaggattgcatatccccaactctgtaggaagtatagaaagaatgttataagggccaccatctaaacattattatgtaaataatttagtaccattccatttgcccttgtagatttaaaamtgtaaatggctttctcatattaggaaacatcacttttcaaaactcagataaacatagtacattgcaagagaataattattttctttattaaaaaagaaatactggatgctaagtccaaaagacataaattattttatactaataactactaatattttattcattaaaatataaaggtcaaagatttcaaaatg

SEQ ID NO: 281923 - DNA, 534 bp, Homo sapiens
cctagggataatgatatgactatcaaaaattaaaaattaaaggacattctgagtattataagaatgagaacttattacccaatgaacaggggttaattcattatgctccatatccattgaattaaaagacaggcccattacctggataatttgaaagtttaattttatttaaaagtcttgtttcattcatcaagctaaaggattagctcccagaaatattctaggattgcatatccccaactctgtaggaagtatagaaagaatgttataagggccaccatctaaacattattatgtaaataatttagtaccattccatttgcccttgtagatttaaaaatgtaaatggctttctcatattaggaaacatcacttttcaaaacycagataaacatagtacattgcaagagaataattattttctttattaaaaaagaaatactggatgctaagtccaaaagacataaattattttatactaataactactaatattttattcattaaaatataaaggtcaaagatttcaaaatg

SEQ ID NO: 281924 - DNA, 608 bp, Homo sapiens
attatgtatatttacctttgtctcattttttctcttttaaatttactttaattgacatataataaatgtrcatgttatggggtacagagtgatattttgatatatttatgcaatgcgtaaagatcaagtcagagtcattatcatatccattaccttaaatcatgtattatttctttgcagtgagaatattcaaaatcttttattttagttatttgaaaacacacaataaattcccgttaactacagtcacccaacagtgctgtagagaactagaacttcttccttctctccagctgtaattttgtatgtattaaccacatttttcttatactcttctttctcctactctttccaggatatggtaaccaaaactctactatctacttctacgagattaaacattttagcttccatacataagtgagaacacgtagttatgtggtgtttatgtttctatgccaggcttatttcacctaacataatgccctccacttgcattcttgttgccacaaataacaggattttgttctttattatgactaaatagtattccattatatatgtatgtcacatttctttatccattcatctgttgatggacacttttg

SEQ ID NO: 281925 - DNA, 495 bp, Homo sapiens
atttatgcaatgcgtaaagatcaagtcagagtcattatcatatccattaccttaaatcatgtattatttctttgcagtgagaatattcaaaatcttttattttagttrtttgaaaacacacaataaattcccgttaactacagtcacccaacagtgctgtagagaactagaacttcttccttctctccagctgtaattttgtatgtattaaccacatttttcttatactcttctttctcctactctttccaggatatggtaaccaaaactctactatctacttctacgagattaaacattttagcttccatacataagtgagaacacgtagttatgtggtgtttatgtttctatgccaggcttatttcacctaacataatgccctccacttgcattcttgttgccacaaataacaggattttgttctttattatgactaaatagtattccattatatatgtatgtcacatttctttatccattcatctgttgatg

SEQ ID NO: 281926 - DNA, 559 bp, Homo sapiens
gaatattcaaaatcttttattttagttatttgaaaacacacaataaattcccgttaactacagtcacccarcagtgctgtagagaactagaacttcttccttctctccagctgtaattttgtatgtattaaccacatttttcttatactcttctttctcctactctttccaggatatggtaaccaaaactctactatctacttctacgagattaaacattttagcttccatacataagtgagaacacgtagttatgtggtgtttatgtttctatgccaggcttatttcacctaacataatgccctccacttgcattcttgttgccacaaataacaggattttgttctttattatgactaaatagtattccattatatatgtatgtcacatttctttatccattcatctgttgatggacacttttgttgattccacatcttggctattgtgaatagtgctgtaataaacatgggggtgcaggtaagtctttgatatactgattttctttcctttggatatatactgaaaaccatatgattaaattaataaacacaataaa

SEQ ID NO: 281927 - DNA, 608 bp, Homo sapiens
attatgtatatttacctttgtctcattttttctcttttaaatttactttaattgacatataataaatgtacatgttatggggtacagagtgatattttgatatatttatgcaatgcgtaaagatcaagtcagagtcattatcatatccattaccttaaatcatgtattatttctttgcagtgagaatattcaaaatcttttattttagttatttgaaaacacacaataaattcccgttaactacagtcacccaacagtgctgtagagaactagaacttyttccttctctccagctgtaattttgtatgtattaaccacatttttcttatactcttctttctcctactctttccaggatatggtaaccaaaactctactatctacttctacgagattaaacattttagcttccatacataagtgagaacacgtagttatgtggtgtttatgtttctatgccaggcttatttcacctaacataatgccctccacttgcattcttgttgccacaaataacaggattttgttctttattatgactaaatagtattccattatatatgtatgtcacatttctttatccattcatctgttgatggacacttttg

SEQ ID NO: 281928 - DNA, 495 bp, Homo sapiens
atttatgcaatgcgtaaagatcaagtcagagtcattatcatatccattaccttaaatcatgtattatttctttgcagtgagaatattcaaaatcttttattttagttatttgaaaacacacaataaattcccgttaactacagtcacccaacagtgctgtagagaactagaacttcttccttctctccagctgtaattttgtatgtattaaccacatttttcttatactcttctktctcctactctttccaggatatggtaaccaaaactctactatctacttctacgagattaaacattttagcttccatacataagtgagaacacgtagttatgtggtgtttatgtttctatgccaggcttatttcacctaacataatgccctccacttgcattcttgttgccacaaataacaggattttgttctttattatgactaaatagtattccattatatatgtatgtcacatttctttatccattcatctgttgatg

SEQ ID NO: 281929 - DNA, 495 bp, Homo sapiens
atttatgcaatgcgtaaagatcaagtcagagtcattatcatatccattaccttaaatcatgtattatttctttgcagtgagaatattcaaaatcttttattttagttatttgaaaacacacaataaattcccgttaactacagtcacccaacagtgctgtagagaactagaacttcttccttctctccagctgtaattttgtatgtattaaccacatttttcttatactcttctttctcctactctttccaggatatggtaaccaaaactctactatctayttctacgagattaaacattttagcttccatacataagtgagaacacgtagttatgtggtgtttatgtttctatgccaggcttatttcacctaacataatgccctccacttgcattcttgttgccacaaataacaggattttgttctttattatgactaaatagtattccattatatatgtatgtcacatttctttatccattcatctgttgatg

SEQ ID NO: 281930 - DNA, 559 bp, Homo sapiens
gaatattcaaaatcttttattttagttatttgaaaacacacaataaattcccgttaactacagtcacccaacagtgctgtagagaactagaacttcttccttctctccagctgtaattttgtatgtattaaccacatttttcttatactcttctttctcctactctttccaggatatggtaaccaaaactctactatctacttctacgagattaaamattttagcttccatacataagtgagaacacgtagttatgtggtgtttatgtttctatgccaggcttatttcacctaacataatgccctccacttgcattcttgttgccacaaataacaggattttgttctttattatgactaaatagtattccattatatatgtatgtcacatttctttatccattcatctgttgatggacacttttgttgattccacatcttggctattgtgaatagtgctgtaataaacatgggggtgcaggtaagtctttgatatactgattttctttcctttggatatatactgaaaaccatatgattaaattaataaacacaataaa

SEQ ID NO: 281931 - DNA, 559 bp, Homo sapiens
gaatattcaaaatcttttattttagttatttgaaaacacacaataaattcccgttaactacagtcacccaacagtgctgtagagaactagaacttcttccttctctccagctgtaattttgtatgtattaaccacatttttcttatactcttctttctcctactctttccaggatatggtaaccaaaactctactatctacttctacgagattaaacattttagcttccatacataagtgagaacacgtagttatgtggtgtttatgtttctatgccaggcttatttcacctaacataatgccctccacttgcattcttgttgccacaaataacaggattttgttctttattatgactaaatagtattccattatatatgtatgtcacatttctttatccattcatctgttgatggacacttttgttgattccayatcttggctattgtgaatagtgctgtaataaacatgggggtgcaggtaagtctttgatatactgattttctttcctttggatatatactgaaaaccatatgattaaattaataaacacaataaa

SEQ ID NO: 281932 - DNA, 1134 bp, Homo sapiens
gaatattcaaaatcttttattttagttatttgaaaacacacaataaattcccgttaactacagtcacccaacagtgctgtagagaactagaacttcttccttctctccagctgtaattttgtatgtattaaccacatttttcttatactcttctttctcctactctttccaggatatggtaaccaaaactctactatctacttctacgagattaaacattttagcttccatacataagtgagaacacgtagttatgtggtgtttatgtttctatgccaggcttatttcacctaacataatgccctccacttgcattcttgttgccacaaataacaggattttgttctttattatgactaaatagtattccattatatatgtatgtcacatttctttatccattcatctgttgatggacacttttgttgattccacatcttggctattgtgaatagtgctgtaataaacatgggggtgcaggtaagtctttgatatactgrttttctttcctttggatatatactgaaaaccatatgattaaattaataaacacaataaawaaattaaaattaatgaattataatttttgttgcttgggaaaaagaatagacacacacgtgacagtgcatcacttcaccccatcatttcatctcatcatttcatcatttcatctcatcattttatctcatttcatctcatcccatctcatctcatcatttcatatcatctcatcatttcatcaaatctcatctcatttccatttcattttcattatttcatttcatcatttcatttcactatttcatttcatttcatctaatttcatttawttcattatgtcatttcatataatctcatttcatttcatctcatatttttgatatcatttttcatctcatttcatctcaattcatctcatcatttcatctcctcatctcatcatttcctcctttcattacaacatttcatctcatttcttctcatctcatttcaatttcattatttcatctcatttcattatttcacctaatttcattatgtcatctcatctcatctcagttcatctgatctcatttcatctcagcatttcatctcatcatttttcatctcatcatttttcatctcatcatttaa

SEQ ID NO: 281933 - DNA, 604 bp, Homo sapiens
actgtcatcacagaagcatggtatattcgattccaaaacatattctttgtaagttttaatatatttatgtattatttatacttagattgtaacccataatgtacagatattatttttccttcaactcttaagaatattcttaaataataaaattaaaattaatgaattataatttttgttgcttgggaaaaagaatagacacacacgtgacagtgcatcacttcaccccatcatttcatctcatcatttcatcatttcatctcatcattttatctcatttcatctcatcccatctcatctcatcatttcatatcatctcatcatttcatcaaatctcatctcatttccatttcattttcattatttcatttcatcatttcatttcactatttcatttcatttcatctaatttcatttaattcattatgtcatttcatatmatctcatttcatttcatctcatatttttgatatcatttttcatctcatttcatctcaattcatctcatcatttcatctcctcatctcatcatttcctcctttcattacaacatttcatctcatttcttctcatctcatttcaatttcattatttcatctcattt

SEQ ID NO: 281934 - DNA, 574 bp, Homo sapiens
aaattaaaattaatgaattataatttttgttgcttgggaaaaagaatagacacacacgtgacagtgcatcacttcaccccatcatttcatctcatcatttcatcatttcatctcatcattttatctcatttcatctcatcccatctcatctcatcatttcatatcatctcatcatttcatcaaatctcatctcatttccatttcattttcattatttcatttcatcatttcatttcactatttcatttcatttcatctaatttcatttaattcattatgtcatttcatataatctcatttcatytcatctcatatttttgatatcatttttcatctcatttcatctcaattcatctcatcatttcatctcctcatctcatcatttcctcctttcattacaacatttcatctcatttcttctcatctcatttcaatttcattatttcatctcatttcattatttcacctaatttcattatgtcatctcatctcatctcagttcatctgatctcatttcatctcagcatttcatctcatcatttttcatctcatcatttttcatctcatcatttaa

SEQ ID NO: 281935 - DNA, 574 bp, Homo sapiens
aaattaaaattaatgaattataatttttgttgcttgggaaaaagaatagacacacacgtgacagtgcatcacttcaccccatcatttcatctcatcatttcatcatttcatctcatcattttatctcatttcatctcatcccatctcatctcatcatttcatatcatctcatcatttcatcaaatctcatctcatttccatttcattttcattatttcatttcatcatttcatttcactatttcatttcatttcatctaatttcatttaattcattatgtcatttcatataatctcatttcatttcatctcatatttttgatatcatttttcatmtcatttcatctcaattcatctcatcatttcatctcctcatctcatcatttcctcctttcattacaacatttcatctcatttcttctcatctcatttcaatttcattatttcatctcatttcattatttcacctaatttcattatgtcatctcatctcatctcagttcatctgatctcatttcatctcagcatttcatctcatcatttttcatctcatcatttttcatctcatcatttaa

SEQ ID NO: 281936 - DNA, 567 bp, Homo sapiens
ccagcatgaaataactgtcatcacagaagcatggtatattcgattccaaaacatattctttgtaagttttaatatatttatgtattatttatacttagattgtaacccataatgtacagatattatttttccttcaactcttaagaatattcttaaataataaaattaaaattaatgaattataatttttgttgcttgggaaaaagaatagacacacacgtgacagtgcatcacttcaccccatcatttcatctcatcatttcatcatttcatctcatcattttatctcatttcatctcatcccatctcatctcatcatttcatatcatctcatcatttcatcaaatctcatctcatttccatttcattttcattatttcatttcatcatttcatttcactatttcatttcatttcatctaatttcatttaattcattatgtcatttcatataatctcatttcatttcatctcatatttttgatatcatttttcatcycatttcatctcaattcatctcatcatttcatctcctcatctcatcatttcctcctttcattacaacatt

SEQ ID NO: 281937 - DNA, 1075 bp, Homo sapiens
atacttagattgtaacccataatgtacagatattatttttccttcaactcttaagaatattcttaaataataaaattaaaattaatgaattataatttttgttgcttgggaaaaagaatagacacacacgtgacagtgcatcacttcaccccatcatttcatctcatcatttcatcatttcatctcatcattttatctcatttcatctcatcccatctcatctcatcatttcatatcatctcatcatttcatcaaatctcatctcatttccatttcattttcattatttcatttcatcatttcatttcactatttcatttcatttcatctaatttcatttaattcattatgtcatttcatataatctcatttcatttcatctcatatttttgatatcatttttcatctcatttcatctcaattcatctcatcatttcatctcctcatctcatcatttcytcctttcattacaacatttcatctcatttcttctcatctcatttcaatttcattatttcatctcatttcattatttcawatacttagattgtaacccataatgtacagatattatttttccttcaactcttaagaatattcttaaataataaaattaaaattaatgaattataatttttgttgcttgggaaaaagaatagacacacacgtgacagtgcatcacttcaccccatcatttcatctcatcatttcatcatttcatctcatcattttatctcatttcatctcatcccatctcatctcatcatttcatatcatctcatcatttcatcaaatctcatctcatttccatttcattttcattatttcatttcatcatttcatttcactatttcatttcatttcatctaatttcatttaattcattatgtcatttcatataatctcatttcatttcatctcatatttttgatatcatttttcatctcatttcatctcaattcatctcatcatttcatctcctcatctcatcatttcctcctttcattwcaacatttcatctcatttcttctcatctcatttcaatttcattatttcatctcatttcattatttca

SEQ ID NO: 281938 - DNA, 574 bp, Homo sapiens
aaattaaaattaatgaattataatttttgttgcttgggaaaaagaatagacacacacgtgacagtgcatcacttcaccccatcatttcatctcatcatttcatcatttcatctcatcattttatctcatttcatctcatcccatctcatctcatcatttcatatcatctcatcatttcatcaaatctcatctcatttccatttcattttcattatttcatttcatcatttcatttcactatttcatttcatttcatctaatttcatttaattcattatgtcatttcatataatctcatttcatttcatctcatatttttgatatcatttttcatctcatttcatctcaattcatctcatcatttcatctcctcatctcatcatttcctcctttcattacaacatttcatctcatttcttctcatctcatttcaatttcattatttcatctcatttcattatttcacctaatttcattatktcatctcatctcatctcagttcatctgatctcatttcatctcagcatttcatctcatcatttttcatctcatcatttttcatctcatcatttaa

SEQ ID NO: 281939 - DNA, 661 bp, Homo sapiens
tctcatttcattatttcacctaatttcattatgtcatctcatctcatctcagttcatctgatctcatttcatctcagcatttcatctcatcatttttcatctcatcatttttcatctcatcatttaatctcatttcatttcatttgatctcatcatttcagctcatttcaagtcacatctattcatttcatcatttcatttcaacatttcatcatttcatcgcatcatttcatctcatctttcactttcatttcaatatcatttcatcatttcatttcatctcatttcattatttcattatttcatttcatttcatctcatcatttcatctcatcatttttcatctcatcatttttcatctcatcatttttcatctcatcatctcatctcatcatttcatctcatttcttctcatctcatttcaatttcattatttcatttcatttcacttcatttcatttcatctcattttatctcatctcatttcatctcatcatttcttctcgtctcatctcatcatttcaycatttcatctcgtttcatctcatttcatctcatctcacctcatatcatcatttcatctcatcctttcatttcatctcatcgtttcatctcctcatttcatctcatctcacctcagcatttcatcatttcacctcat

SEQ ID NO: 281940 - DNA, 469 bp, Homo sapiens
catttcaagtcacatctattcatttcatcatttcatttcaacatttcatcatttcatcgcatcatttcatctcatctttcactttcatttcaatatcatttcatcatttcatttcatctcatttcattatttcattatttcatttcatttcatctcatcatttcatctcatcatttttcatctcatcatttttcatctcatcatttttcatctcatcatctcatctcatcatttcatctcatttcttctcatctcatttcaatttcattatttcatttcatttcacttcatttcatttcatctcattttatctcatctcatttcatctcatcatttcttctcgtctcatctcatcatttcaccatttcatctcgtttcatctcatttcatctcatctcayctcatatcatcatttcatctcatcctttcatttcatctcatcgtttcatctcctcatttcatctcatct

SEQ ID NO: 281941 - DNA, 1131 bp, Homo sapiens
catttcaagtcacatctattcatttcatcatttcatttcaacatttcatcatttcatcgcatcatttcatctcatctttcactttcatttcaatatcatttcatcatttcatttcatctcatttcattatttcattatttcatttcatttcatctcatcatttcatctcatcatttttcatctcatcatttttcatctcatcatttttcatctcatcatctcatctcatcatttcatctcatttcttctcatctcatttcaatttcattatttcatttcatttcacttcatttcatttcatctcattttatctcatctcatttcatctcatcatttcttctcgtctcatctcatcatttcaccatttcatctcgtttcatctcatttcatctcatctcacctcatmtcatcatttcatctcatcctttcatttcatctcatcgtttcatctcctcatttcatctcatctwtctcatttcattatttcacctaatttcattatgtcatctcatctcatctcagttcatctgatctcatttcatctcagcatttcatctcatcatttttcatctcatcatttttcatctcatcatttaatctcatttcatttcatttgatctcatcatttcagctcatttcaagtcacatctattcatttcatcatttcatttcaacatttcatcatttcatcgcatcatttcatctcatctttcactttcatttcaatatcatttcatcatttcatttcatctcatttcattatttcattatttcatttcatttcatctcatcatttcatctcatcatttttcatctcatcatttttcatctcatcatttttcatctcatcatctcatctcatcatttcatctcatttcttctcatctcatttcaatttcattatttcatttcatttcacttcatttcatttcatctcattttatctcatctcatttcatctcatcatttcttctcgtctcatctcatcatttcaccatttcatctcgtttcatctcatttcatctcatctcacctcatatcatcatttcawctcatcctttcatttcatctcatcgtttcatctcctcatttcatctcatctcacctcagcatttcatcatttcacctcat

SEQ ID NO: 281942 - DNA, 1266 bp, Homo sapiens
tctcatttcattatttcacctaatttcattatgtcatctcatctcatctcagttcatctgatctcatttcatctcagcatttcatctcatcatttttcatctcatcatttttcatctcatcatttaatctcatttcatttcatttgatctcatcatttcagctcatttcaagtcacatctattcatttcatcatttcatttcaacatttcatcatttcatcgcatcatttcatctcatctttcactttcatttcaatatcatttcatcatttcatttcatctcatttcattatttcattatttcatttcatttcatctcatcatttcatctcatcatttttcatctcatcatttttcatctcatcatttttcatctcatcatctcatctcatcatttcatctcatttcttctcatctcatttcaatttcattatttcatttcatttcacttcatttcatttcatctcattttatctcatctcatttcatctcatcatttcttctcgtctcatctcatcatttcaccatttcatctcgtttcatctcatttcatctcatctcacctcatatcatcatttcatctcrtcctttcatttcatctcatcgtttcatctcctcatttcatctcatctcacctcagcatttcatcatttcacctcatwcatctcatcacatctcatcattttatcattttatttcatcatctcatttcatctcatgtcatttcaattttatttatttatttcaatttcatttcatctcatcagttcatctcatcatttcatctcatcatctcatctcatctcatcatttcatctcatcattcatctcatttcatatcattttatctcatctcatttcatctcatttcatcattacatttcatctcattttatgtcatcatttcatgtcatcatttcatcacatctcatctcatcatttcatctcatcatttcatcatttcatctcatttcaactcattgcatctcatctcwtttccatttcattattccatttcatcatttcatttcattatgtcatttcacctcatcatatttcatctcatttcatctcatctcatcatttcatttcatctcatcatttcatctcattttatctcatctcatctcatcatttccatttcattttcatttcattatttcatcatttcattatttcatctcatttcattatttcatttcattatgtcatttcatttcatctcattacatttcatctcatttcatctcatcatttcatccatca

SEQ ID NO: 281943 - DNA, 376 bp, Homo sapiens
ttcttccctgggaagctaatatttcaaaaactgaaagagtatatagatttccaacttgtatccaatttataaaactatctctaggctgctgatttcaggaggaggctcatgaatattctctttgcagagaatatatcaggagttaacaacagcttcaatatttgtggacgaccagttaactaartcacctcttagtgtatttagatgggaaatcttagctgaagatattcaataatgaaccaacagtgactaaaaaattcaacatttaagtatatttcattgtaattaatttgaattgaagtagcagctagtatttactacattgaacaatgcaaataagaggaaaaaattaataaccatctctaataccacatgc

SEQ ID NO: 281944 - DNA, 376 bp, Homo sapiens
ttcttccctgggaagctaatatttcaaaaactgaaagagtatatagatttccaacttgtatccaatttataaaactatctctaggctgctgatttcaggaggaggctcatgaatattctctttgcagagaatatatcaggagttaacaacagcttcaatatttgtggacgaccagttaactaaaycacctcttagtgtatttagatgggaaatcttagctgaagatattcaataatgaaccaacagtgactaaaaaattcaacatttaagtatatttcattgtaattaatttgaattgaagtagcagctagtatttactacattgaacaatgcaaataagaggaaaaaattaataaccatctctaataccacatgc

SEQ ID NO: 281945 - DNA, 375 bp, Homo sapiens
acatgtcatttcagttttgaacatcttgagttaaattgtcctaacatatcttatgaatttgattttcttccctgggaagctaatatttcaaaaactgaaagagtatatagatttccaacttgtatccaatttataaaactatctctaggctgctgatttcaggaggaggctcatgaatattctctttgcagagaatatatcaggagttaacaacagcttcaatatttgtggacgaccagttaactaaatcacctcttagtgtatttagatgggaaatcttagctgaagatattcaataatgaaccaacagtgactaaaaaattcaayatttaagtatatttcattgtaattaatttgaattgaagtagcagctag

SEQ ID NO: 281946 - DNA, 544 bp, Homo sapiens
atcttgagttaaattgtcctaacatatcttatgaatttgattttcttccctgggaagctaatatttcaaaaactgaaagagtatatagatttccaacttgtatccaatttataaaactatctctaggctgctgatttcaggaggaggctcatgaatattctctttgcagagaatatatcaggagttaacaacagcttcaatatttgtggacgaccagttaactaaatcacctcttagtgtatttagatgggaaatcttagctgaagatattcaataatgaaccaacagtgactaaaaaattcaacatttaagtatatttcattgtaattaatttgaattgaagtagcagctagtatttactacattgaacaatgcaaataagaggaaaaaattaataacyatctctaataccacatgccaaaatcctcatcaatttattctagctaaaggagttgatcagaagcagcagttgaaagcaccaactaaaccagctggggttggttcactgtcattctctcagaaccatctcttctctgaacaaaac

SEQ ID NO: 281947 - DNA, 382 bp, Homo sapiens
gctaaaggagttgatcagaagcagcagttgaaagcaccaactaaaccagctggggttrgttcactgtcattctctcagaaccatctcttctctgaacaaaacaagtacaggagttcattgtgaatctgcattctccttgcctattttaaggttttgatgttgacgcaaatttgtgaaatccctcctgtggtgtgatatttcgttttccttgctttgtgttaggacaagaatgcttcagctcttaatttaaaattatgtttctccctcctaggttgagtgaacttagaatgcattctctgacatatccaagattttgttaatatgaatttcgggaaaaaagcatacttaattagctaagacgtcttattctaagcttgaccct

SEQ ID NO: 281948 - DNA, 593 bp, Homo sapiens
ttgtgaaatccctcctgtggtgtgatatttcgttttccttgctttgtgttaggacaagaatgcttcagctcttaatttaaaattatgtttctccctcctaggttgagtgaacttagaatgcattctctgacatatccaagattttgttaatatgaatttcgggaaaaaagcatacttaattagctaagacgtcttattctaagcttgaccctatgttcgacatcttttgaatttctggttgcgtgggctgctctctgacactggttagtgacctggaagctctattaatgttaggggaggtggtgtatgagcattagaggtatccttgcaaggaaagacttgtcttatctcaatacttctttttttttgcacacaagaaagtcaatgtctgagtcttctaaaatcttcctatttccaaattgcagattatgattgattcctaaacaaagacctaatttttgactcagagacgtggcaagctagtgaatcaccgttataatttaacaatcttcaagataaaattatctctgatatttagattttgcccaattattaagatatttgggtgttycgttaagaatggaaaactctag

SEQ ID NO: 281949 - DNA, 300 bp, Homo sapiens
tattccattactatgctctatagtgtatacaatttctgttctttgtcatgttattaactaaattatttattgggtccagtaacgtattccataaatattgtacacataaaaattgtgttatttttattcctgtatgctcagctgcccaataacagtctgaggattaacatatttgttaaatgcacaaatacattctttcacaaatattagtttaataattttatrttaaactccctctatacttacaatatgaattagataattcagaataaacattccattggaaaaagctacacaatt

SEQ ID NO: 281950 - DNA, 505 bp, Homo sapiens
aatttacatcttaattaaatctacaaagactccatttccaaatagggccacaatcagaggaaccaggggttaagatttcaacagatcttctggtgagmaaaaatttaatctataacacacaaatgatagtcaagatatggaattaacctgtgcatccatcaatggatgaatgaatggacaaagaaaatgtgtgtatgtatacacattgtatacatacacaacagaatattattcaaccttaaaaagaaggaaatggccgggcacaatggctcacgcttgtaaacccaacactttgggaggccatggtgggtggactgcttgtgcccaggagttcaagaccacctgggcaacatggcaaaacctcaactctacaaaaaaataaaaataaaaaggctgagtgtggtggctcatgcctgtaatcccagcactttgggaggctgaggcagttggatcacctgaggtcaggaatttgagaccagcctgaccaacatggagaaaccccttc

SEQ ID NO: 281951 - DNA, 505 bp, Homo sapiens
aatttacatcttaattaaatctacaaagactccatttccaaatagggccacaatcagaggaaccaggggttaagatttcaacagatcttctggtgagcaaaaatttaatctataacacacaaatgrtagtcaagatatggaattaacctgtgcatccatcaatggatgaatgaatggacaaagaaaatgtgtgtatgtatacacattgtatacatacacaacagaatattattcaaccttaaaaagaaggaaatggccgggcacaatggctcacgcttgtaaacccaacactttgggaggccatggtgggtggactgcttgtgcccaggagttcaagaccacctgggcaacatggcaaaacctcaactctacaaaaaaataaaaataaaaaggctgagtgtggtggctcatgcctgtaatcccagcactttgggaggctgaggcagttggatcacctgaggtcaggaatttgagaccagcctgaccaacatggagaaaccccttc

SEQ ID NO: 281952 - DNA, 505 bp, Homo sapiens
aatttacatcttaattaaatctacaaagactccatttccaaatagggccacaatcagaggaaccaggggttaagatttcaacagatcttctggtgagcaaaaatttaatctataacacacaaatgatagtcaagatatggaattaacctgtgcatccatcaatggatgaatgaatggacaaagaaaatgtgtgtatgtatacacattgtatacatacacaacagaatattattcaaccttaaaaagaaggaaatggccgggcacaatggctcacgcttgtaaacccaacactttgggaggccatggtgggtggactgcttgtgcccaggagttcaagaccacctgggcaacatggcaaaacctcaactctacaaaaaaataaaaataaaaaggctgagtgtggtggctcatgcctgtaatcccagcactttgggagrctgaggcagttggatcacctgaggtcaggaatttgagaccagcctgaccaacatggagaaaccccttc

SEQ ID NO: 281953 - DNA, 1163 bp, Homo sapiens
tcaaaaaaaaaaaaaaatcagctaaacccagtggtgtgcacctgtagtcccagctacttgggaggctgaggtaggaggatcatttgagcctgggaggtccaggtttcagtgagctgagattgtgccactgcactccagccttggtgacagagccagaccctgtctcaaaaaagaaaaaaaaggaaatcctgacatttgtaacagtatggmtatgaacctggaagatactatgttaagtgacataagccaagcacagaaagacaaatgtcacatgatctcatttatatgtagatctaaaaaagctgaggtcatataggtagagagtagaagagtggctaccaggggctgggcagcaggtggaatttgtgggttgggagatgttggtcaaagggtacaaaatttcatttaagtaagaagagtaagttcaagagatctattgtacagcttagtaattatagttaataacaatttatagcattttaaaaattgtgaagagtagattttaagaaatctcaccacaaaaaataagtatgcaaagtaatgcatatattaatgaactccatctagccattccacatgtawtcaaaaaaaaaaaaaaatcagctaaacccagtggtgtgcacctgtagtcccagctacttgggaggctgaggtaggaggatcatttgagcctgggaggtccaggtttcagtgagctgagattgtgccactgcactccagccttggtgacagagccagaccctgtctcaaaaaagaaaaaaaaggaaatcctgacatttgtaacagtatggatatgaacctggaagatactatgttaagtgacataagccaagcacagaaagacaaatgtcacatgatctcatttatatgtagatctawaaaagctgaggtcatataggtagagagtagaagagtggctaccaggggctgggcagcaggtggaatttgtgggttgggagatgttggtcaaagggtacaaaatttcatttaagtaagaagagtaagttcaagagatctattgtacagcttagtaattatagttaataacaatttatagcattttaaaaattgtgaagagtagattttaagaaatctcaccacaaaaaataagtatgcaaagtaatgcatatattaatgaactccatctagccattccacatgta

SEQ ID NO: 281954 - DNA, 581 bp, Homo sapiens
tcaaaaaaaaaaaaaaatcagctaaacccagtggtgtgcacctgtagtcccagctacttgggaggctgaggtaggaggatcatttgagcctgggaggtccaggtttcagtgagctgagattgtgccactgcactccagccttggtgacagagccagaccctgtctcaaaaaagaaaaaaaaggaaatcctgacatttgtaacagtatggatatgaacctggaagatactatgttaagtgacataagccaagcacagaaagacaaatgtcacatgatctcatttatatgtagatctaaaaaagctgaggtcatataggtagagagtagaakagtggctaccaggggctgggcagcaggtggaatttgtgggttgggagatgttggtcaaagggtacaaaatttcatttaagtaagaagagtaagttcaagagatctattgtacagcttagtaattatagttaataacaatttatagcattttaaaaattgtgaagagtagattttaagaaatctcaccacaaaaaataagtatgcaaagtaatgcatatattaatgaactccatctagccattccacatgta

SEQ ID NO: 281955 - DNA, 558 bp, Homo sapiens
catttatatgtagatctaaaaaagctgaggtcatataggtagagagtagaagagtggctaccaggggctgggcagcaggtggaatttgtgggttgggagatgttggtcaaagggtacaaaatttcatttaagtaagaagagtaagttcaagagatctattgtacagcttagtaattatagttaataacaatttatagcattttaaaaattgtgaagagtagattttaagaaatctcaccacaaaaaataagtatgcaaagtaatgcatatattaatgaactccatctagccattccacatgtacccttggacttcaaaacttggaaaaaatgaattgaaaatataaactttatgtctcaacataagctccatcaagttcaagacacttgtataagtcatgctacagccatttagcccatccttaaggaactgaaggtcctgagaatttaaccatatcaatgcagtcttttacacattaactgaaaagggtatcctttacagattaagattaygaaacaaaaagaagttaggaggagccaaatcaggactgtaatgatt

SEQ ID NO: 281956 - DNA, 1003 bp, Homo sapiens
aagcaattctcctgcctcagcctcctgagtagctgggactacaggcgtgtgccatcaggcccggctaatttttgtatttttagtagagatggggtttcactatgttggccatgctggtctcgaattcctgacctcagctgatccacccacctcggcctctcaaagtgctgggattacaggtgtgagccaccgtgcccagccctcattstttatttctactgctctatgtagttagatgtcagccctgggtggcagcagcaaagaacccaggagccatcactgctcaagattaactagttggagaccccttaacatatattttcagcatctagtaacagctaatctctcaggcagtcaatattgagataccgctgccttgtgagttttgggtagaaataaagcaagtaagaaatatagttccatcctgcttggagttttctatttagttagggactttgaagtccctgaatgtttatatactttttcctatttcatcccattwaagcaattctcctgcctcagcctcctgagtagctgggactacaggcgtgtgccatcaggcccggctaatttttgtatttttagtagagatggggtttcactatgttggccatgctggtctcgaattcctgacctcagctgatccacccacctcggcctctcaaagtgctgggattacaggtgtgagccaccgtgcccagccctcattgtttatttctactgctctatgtagttagatgtcagccctgggtggcagcagcaaagaacccaggagccatcactgctcaagattaactagttggagaccccttaacatatattttcagcatctagtaacagctaatctcwcaggcagtcaatattgagataccgctgccttgtgagttttgggtagaaataaagcaagtaagaaatatagttccatcctgcttggagttttctatttagttagggactttgaagtccctgaatgtttatatactttttcctatttcatcccatt

SEQ ID NO: 281957 - DNA, 501 bp, Homo sapiens
aagcaattctcctgcctcagcctcctgagtagctgggactacaggcgtgtgccatcaggcccggctaatttttgtatttttagtagagatggggtttcactatgttggccatgctggtctcgaattcctgacctcagctgatccacccacctcggcctctcaaagtgctgggattacaggtgtgagccaccgtgcccagccctcattgtttatttctactgctctatgtagttagatgtcagccctgggtggcagcagcaaagaacccaggagccatcactgctcaagattaactagttggagaccccttaacatatattttcagcatctagtaacagctaatctctcaggcagtcaatattgagataccgctgccttgtgagttttgggtagaaataaagcaagtaagaaatatagttccatcctgcttggagttttctatttagttagggactttgaagtccctraatgtttatatactttttcctatttcatcccatt

SEQ ID NO: 281958 - DNA, 606 bp, Homo sapiens
ccatgttccacctaacaacagttgctaggtaggatgtggctttcaggcctgctctttggggaccaatagaaaaaccaaaggctaccaccctttttccctctacgcaattgcctttgctaggctatagagagggcacatttcattttattaaaactctttgagtaatctgaccataattgggtctgattggagtggttatctgatttgctgggttaaataatgggccttaattgagtctgggttatttgtagagccagtgtggcttttgccttygttgctccctcctctctcttctgtttcccaattaaccttcattcctctttccttgcagagtaaagaagtcggccagcagctccaagatgatttgatgaaggtcctgaacgagctctactcggtaaatcagatgggttgcttggctctttaacaagcagagggaagcagcatttggcagcttgcagccatagtacatcagcaacagaactgaactgaggttgaggacaagtgcatggtccccactgggggtgaccccacccatctcttttttcacactcgtcttttcaaaacggaatgagtcaaaaaatacttcctcaaaataagttttctcct

SEQ ID NO: 281959 - DNA, 474 bp, Homo sapiens
gcttggctctttaacaagcagagggaagcagcatttggcagcttgcagccatagtacatcagcaacagaactgaactgaggttgaggacaagtgcatggtccccactgggggtgaccccacccatctcttttttcacactygtcttttcaaaacggaatgagtcaaaaaatacttcctcaaaataagttttctcctcagctatgcaagctcaccctggctttatttggggcataattactagagaccagccaaagtctaggtcattggcacaatggaccccgttagcagcaaaccagggaccctgaactaatggcaaggaacgtagcctgcattgcactattaatatgtgcctgtcggaaaggctttattgttctaggtttttcatcagatcttggattgatgtatggctttgagactagaacaaatgctctagagggcagcacagagtcctaaatgcccccagtaagagggac

SEQ ID NO: 281960 - DNA, 485 bp, Homo sapiens
ccagctacttgggatgctgaggcaggagaatcccttgaaccagggaggcagaggttgcagtgagccgagatcatgccatggcactcctgggcaacaagagcgaaactctgtctccaaaaatcgatcaatcaacaatgacaaaagccaatttaaaaattggcaaaggacttgaataaacatatctccaaagaagacataaagatggccagcaagtacatgaaaagatgttcaccatcactaattattagagagatgcaaatcaaaactrcaaaatactttcacactatcaggatggctactatcaaaaaaaaaaaaaaagaaaataatagaaaataaccagcattggtgaggatatagagaaatagtgctctgttggtaggaatgtaaattggtacagctactactgaaaacagtagggagggccttcaaaaaattgaaaataccattatggcatgatctggcattttcacttctgagtatatacc

SEQ ID NO: 281961 - DNA, 485 bp, Homo sapiens
ccagctacttgggatgctgaggcaggagaatcccttgaaccagggaggcagaggttgcagtgagccgagatcatgccatggcactcctgggcaacaagagcgaaactctgtctccaaaaatcgatcaatcaacaatgacaaaagccaatttaaaaattggcaaaggacttgaataaacatatctccaaagaagacataaagatggccagcaagtacatgaaaagatgttcaccatcactaattattagagagatgcaaatcaaaactacaaaatactttcacactatcaggatggctactatcaaaaaaaaaaaaaaagaaaataatagaaaataaccagcattggtgaggatatagagaaatagtgctctgttggtaggaatgtaaattggtacagctactactgaaaacagtagggagggccttcaaaaaattgaaaatacyattatggcatgatctggcattttcacttctgagtatatacc

SEQ ID NO: 281962 - DNA, 647 bp, Homo sapiens
ttgggtgtgctttttcctacaggagagaggataatcctgttttctctttttacttagctggaacacactaaaagtacctctgactttgctttctcaaatcactgtttctagcccttcacagctgctcacacttaagcttggaagctggtcagttcagacagtgctaaggctcagttgcatccttgtttttacagcactgcagtgaactgtactcctgytttgctgttaggactcttaagtttctatggcaaaaatttaggttaaattgaaaaagccaagtcagattccctatagaccagtagctttcaactttgcctgggcatgaaagttacttggggagttttaaaaaaatctttgtgaccttgaataaacaaaggtttcttagaatataaaaagcatgaaccataaaattttataaaggataagtcagacttcatcaagtcttggacttttgttcctagaaagactttatttacaaaatgaaagacaagacgcagactgggagaaaatatttgtaatatgtatctgacatggacttatatcagattatagaataaagaactctgagaactcagtaataagacaaactacccaaatttttaaaaatggaaacaggttttaataaacatttcactaataaaaatata

SEQ ID NO: 281963 - DNA, 549 bp, Homo sapiens
gaaaaggcaaggaaacggattcttcctgagagcctccggagcagaagcagccctgctgactcactggtttcagcccagtgaaattggttttggagttctgacctccagaactctaagagaacaaatgtatgttgttttaagccaccatgtttgcagtaatttgttacagctgccttaggtactttattcataatagcccaaactggaaacaacccaaatgtccatcaacagatgagtggaaaaacatattgtagtgtatccatatatcaatactactcagcaataagaagggaaatgctgatacaatataaatgagctcaaaaaacattatgytgataaaaagaagccaagcacaatgagtacattctgtatgattctgtttctataaaattttagaaaaaacaaatctgatctatagtgatagagaatagatcattgattgccttggggccaggatggggatgaaggattgactgctaagggacacaagggagtttgtagggtttttatagcctacattatataacattttaaacaatgctttataac

SEQ ID NO: 281964 - DNA, 349 bp, Homo sapiens
tgtttttttactttttcccataaggctaagatcatctccagaaatattaattttttagacagtgtgattatagttatttaatactcatacttatcaaaatattrtatgttaaaaccaataaccatctgaacttatttgaatatagtttttcctattctgttcttagaaatttcagtcactaacaatctttacacttagaaagtgttttaattttactttgatgacaggaatagtgttcttctcaatgaaatatagaatagcagcttataagtgataactgttttcattctgtttttaagagaaaatactttggtcttttttaccatgatagtttagtgtgtgatgtcat

SEQ ID NO: 281965 - DNA, 349 bp, Homo sapiens
tgtttttttactttttcccataaggctaagatcatctccagaaatattaattttttagacagtgtgattatagttatttaatactcatacttatcaaaatattatatgttaaaaccaataaccatctgaacttatttgaatatagtttttcctattctgttcttagaaatttcagtcaytaacaatctttacacttagaaagtgttttaattttactttgatgacaggaatagtgttcttctcaatgaaatatagaatagcagcttataagtgataactgttttcattctgtttttaagagaaaatactttggtcttttttaccatgatagtttagtgtgtgatgtcat

SEQ ID NO: 281966 - DNA, 349 bp, Homo sapiens
tgtttttttactttttcccataaggctaagatcatctccagaaatattaattttttagacagtgtgattatagttatttaatactcatacttatcaaaatattatatgttaaaaccaataaccatctgaacttatttgaatatagtttttcctattctgttcttagaaatttcagtcactaacaatctttacacttagaaagtgttttaattttactttgatgacaggaatagtgttcttctcaatgaaatatakaatagcagcttataagtgataactgttttcattctgtttttaagagaaaatactttggtcttttttaccatgatagtttagtgtgtgatgtcat

SEQ ID NO: 281967 - DNA, 456 bp, Homo sapiens
cagtttctattaagccatgtcaactcctattargagacctttagtggttccagttccagggccttcttgaagaaattgtgatacttgtgtaagtatatctagagttttctttccagcattggctaagtcacatagctgagaaatatgatacatggagaaggttgctgactggatgaacttttctacattgaatactttaaatctggattctagaataaaatatattgatgcatatttgagttgtcaactgtttatgtcttgttcttttcagcttcaacattgctttatggcatgtgtggtcgtttttcactccattgttgttgtttacccagtttatgggggttgtaatgtttatcacactccttggatgatttccgaaggtaagatatctggaatggtttttctaaaaatgaactcatttgaaaaatgtcttttatgacaattttcagtggatgg

SEQ ID NO: 281968 - DNA, 556 bp, Homo sapiens
ttctgacttcctcataaaaatgtgttggatgacacaatcagcttttgtttggtgttatttatagaatttctgcctccctacagatcaccccatcctgagatctgctgccttacacagtggaggctgttttctgagtgtcggataactctgttattaaataagtgcatattgagaatactcactccagatgcttagaggcaagttgagaaggacaaagatagtgcctcctgtcaggtcacttacatcagaacttgcaggaaacctgctttatacagcagttgacaggtgtggaaattgaagctcatggaaatgaaagttaatacrctaaattttcaaggagttaatgaaaactgacatttctgctaaaaacagcatgttctccctgtgggattttaaaggaaggtcaatggtaactgtacaaagaagaaatggacacagtctcattgttagcagtctgaaaatagttgctagcacctccatgcccacgccaatgtctccagcctctttcaggcaccttgctgtgtcttggaaccactgggagccctcacaggaggcc

SEQ ID NO: 281969 - DNA, 411 bp, Homo sapiens
ttttacttgttacataaatgctggttttctttcagatttaaggatatatactttttttttttttaagagatagggtcttctatgttgyccaggctggctttgaactcctgggatcaagtgatcctcctgcctcagccttcaaagtagttgggactacaggcccacgccaccgtgcatggctggacacgtaaatttgaagtgaatggttaaacatccagctagctgaaagcatgacagaccctaacagaaaagctacagtgtgtttttgcagctatgaagtgaatggtttcctggggaaaattgtgactttgtataactatttttgaaaccagaataaattatatttcacttgcatattcttaaattattaaaattttcagaagtcagtgatacagaaatactattttgcaa

SEQ ID NO: 281970 - DNA, 411 bp, Homo sapiens
ttttacttgttacataaatgctggttttctttcagatttaaggatatatactttttttttttttaagagatagggtcttctatgttgcccaggctggctttgaactcctgggatcaagtgatcctcctgcctcagccttcaaagtagttgggactacaggcccacgccaccgtgcatggctggacacgtaaatttgaaktgaatggttaaacatccagctagctgaaagcatgacagaccctaacagaaaagctacagtgtgtttttgcagctatgaagtgaatggtttcctggggaaaattgtgactttgtataactatttttgaaaccagaataaattatatttcacttgcatattcttaaattattaaaattttcagaagtcagtgatacagaaatactattttgcaa

SEQ ID NO: 281971 - DNA, 411 bp, Homo sapiens
ttttacttgttacataaatgctggttttctttcagatttaaggatatatactttttttttttttaagagatagggtcttctatgttgcccaggctggctttgaactcctgggatcaagtgatcctcctgcctcagccttcaaagtagttgggactacaggcccacgccaccgtgcatggctggacacgtaaatttgaagtgaatggttaaacatccagctagctgaaagcatgrcagaccctaacagaaaagctacagtgtgtttttgcagctatgaagtgaatggtttcctggggaaaattgtgactttgtataactatttttgaaaccagaataaattatatttcacttgcatattcttaaattattaaaattttcagaagtcagtgatacagaaatactattttgcaa

SEQ ID NO: 281972 - DNA, 411 bp, Homo sapiens
ttttacttgttacataaatgctggttttctttcagatttaaggatatatactttttttttttttaagagatagggtcttctatgttgcccaggctggctttgaactcctgggatcaagtgatcctcctgcctcagccttcaaagtagttgggactacaggcccacgccaccgtgcatggctggacacgtaaatttgaagtgaatggttaaacatccagctagctgaaagcatgacagaccctaacagaaaagctacagtgtgtttttgcarctatgaagtgaatggtttcctggggaaaattgtgactttgtataactatttttgaaaccagaataaattatatttcacttgcatattcttaaattattaaaattttcagaagtcagtgatacagaaatactattttgcaa

SEQ ID NO: 281973 - DNA, 613 bp, Homo sapiens
ccctaaaaaacttaaagaactttcttgttaaaagagagtaaaacgctactttgcctaagaaactatacattcttcacgctaagctctacttcttttgtgttttcttctcacagtggagaaatatgtcatatacacaatggtagttttacaaagtggttgcccaaatgactgaatgacactgaatctctcttctgggtaaatactggagaagctttattagtgccttccagctcaagagaaaactgaggtacctagaagctgaagcttaaataagtgatgcmaaaacaattgaaaaaataggaaagtcaagacaggacttagaaatgtatatagatacagatatacatgttaaatatatatttataaatatatatttatagtcaagataggacttagagaaagccaagataggacttagatatatatatctatgtacatatacatatgtaaatatatgtatatctatatatctatgtcttagacatatagctactcatatatgtatatatagatatgtatacataaagatatacatatacatacttctatctatatatagataggcaaatgcaaactatggggaaaaactgaaaagtctaaattctcagttctg

SEQ ID NO: 281974 - DNA, 1227 bp, Homo sapiens
ccctaaaaaacttaaagaactttcttgttaaaagagagtaaaacgctactttgcctaagaaactatacattcttcacgctaagctctacttcttttgtgttttcttctcacagtggagaaatatgtcatatacacaatggtagttttacaaagtggttgcccaaatgactgaatgacactgaatctctcttctgggtaaatactggagaagctttattagtgccttccagctcaagagaaaactgaggtacctagaagctgaagcttaaataagtgatgcaaaaacaattgaaaaaataggaaagtcaagacaggacttagaaatgtatatagatacagatatacatgttaaatatatatttataaatatatatttatagtcaagataggacttagagaaagccaagataggacttagatatatatatctatgtacatatacatatgtaaatrtatgtatatctatatatctatgtcttagacatatagctactcatatatgtatatatagatatgtatacataaagatatacatatacatacttctatctatatatagataggcaaatgcaaactatggggaaaaactgaaaagtctaaattctcagttctgwccctaaaaaacttaaagaactttcttgttaaaagagagtaaaacgctactttgcctaagaaactatacattcttcacgctaagctctacttcttttgtgttttcttctcacagtggagaaatatgtcatatacacaatggtagttttacaaagtggttgcccaaatgactgaatgacactgaatctctcttctgggtaaatactggagaagctttattagtgccttccagctcaagagaaaactgaggtacctagaagctgaagcttaaataagtgatgcaaaaacaattgaaaaaataggaaagtcaagacaggacttagaaatgtatatagatacagatatacatgttaaatatatatttataaatatatatttatagtcaagataggacttagagaaagccaagataggacttagatatatatatctatgtacatatacatatgtaaatatatgtatatctatatatctatgtcttagacatatagctacwcatatatgtatatatagatatgtatacataaagatatacatatacatacttctatctatatatagataggcaaatgcaaactatggggaaaaactgaaaagtctaaattctcagttctg

SEQ ID NO: 281975 - DNA, 465 bp, Homo sapiens
tttattctgttagagagggtccatggactaggggatacaaggttcagctgaggatasgggtatactgaacttcaacaggaggattagctgaagtctatgttaaattttgagatggtctaggcctcttcacaactcagctcccagacatgagtgggagatcaaaagtgtgatctctcagcaatctgaccatccaagataagagacctagaaatactaaagttggggcttccacaaggacacagcccagttagaacaccctactgtgaaggccacagctgacatagaatcttttagtgcctcactttaaaatgtgaataggcagctaagaatgaccaggcatttaaaggaaatgtctaatatgaaagaccaagaccaaaactagcaatttagaagaaatattatacaacaagaagaaaagtttgaaaacaatatatccataatagccctggagagataaatgagaaa

SEQ ID NO: 281976 - DNA, 980 bp, Homo sapiens
tttattctgttagagagggtccatggactaggggatacaaggttcagctgaggatacgggtatactgaacttcaacaggaggattagctgaagtctatgttaaattttgagatggtctaggcctcttcacaactcagctcccagacatgagtgggagatcaaaagtgtgatctctcagcaatctgaccatccaagataagagacctagaaatactaaagttggggcttccacaaggacacagcccagttagaacaccctactgtgaaggccacagctgacataraatcttttagtgcctcactttaaaatgtgaataggcagctaagaatgaccaggcatttaaaggaaatgtctaatatgaaagaccaagaccaaaactagcaatttagaagaaatattatacaacaagaagaaaagtttgaaaacaatatatccataatagccctggagagataaatgagaaawccggcctctgggactgttcttttccttgctccttaacagactatttcctgctttttgttttgttttgttttgctttgctttgttttttgtttttggccttctaactgtgttacaaatggtttaagtcagtggttctccaagggtggtcccagatcagcagcattatcacctgggtacttactagaaatgcaaattcttgggccccactccagacctactgaatgagcaactctgagggtagaacctaaaaaattgtgttttaacaagtcatctgggtgattctgwtggtaaagtttgatgtcaccaaatgataatgatgctttttttttaaattgagatggagtcttgctctgtcgcccagtctggagtgcagtggcgtgatcttggtttactgcaacttccacctcccaggttcaagcaattctcctgtctcagcctcctgagtagctgggactacaggcacacgccaccatgtctggctaatttttgtatttttagtagagatggggtttca

SEQ ID NO: 281977 - DNA, 548 bp, Homo sapiens
ccattatcttacagattagaaaactaagtcctagacaggttacaaagttaggcggcattcacagtcaaagttaggctgtgagtcagtgtgaaacgtaggataagattctcattcccagatcaggaattttttttctttaattcataaactacaagagcmtctttcctccaaccaacaaataccacaggatgtgtacaggcagaattgtctgggcctggtgtggtgcttggggaaagcatttaataaacacttgctaaaacgagctgaatcaccagggagcagcacctcaattccttatttcactcaggttgaacctgaacaaggtgtgactctaaggtctaacctaacctgactacatcttgtgaggaatgcgcagccagaatacactagtcttaagtgagaaggcctgattttccaactaagagatctctgattcagagagcaggatcctggctttcctccagggctgatgggaggatgaggcagacactgcatagccccgagctatgtggtatcaggccagaggcaacaagctcagatcacttcct

SEQ ID NO: 281978 - DNA, 548 bp, Homo sapiens
ccattatcttacagattagaaaactaagtcctagacaggttacaaagttaggcggcattcacagtcaaagttaggctgtgagtcagtgtgaaacgtaggataagattctcattcccagatcaggaattttttttctttaattcataaactacaagagcctctttcctccaaccaacaaataccacaggatgtgtacaggcagaattgtctgggcctggtgtggtgcttggggaaagcatttaataaacacttgctaaaacgagctgaatcaccagggagcagcacctcaattccttatttcactcaggttgaacctgaacaaggtgtgactctaaggtctaacctaacctgactacatcttgtgaggaatgcgcagccagaatacactagtcttaagtgagaaggcctgattttccaactaagagatctctgattcagagagcaggatcctggctttcctccagggctgatgggaggatgaggcagacactgcatagcccygagctatgtggtatcaggccagaggcaacaagctcagatcacttcct

SEQ ID NO: 281979 - DNA, 661 bp, Homo sapiens
taatgacatttgttcagttcccattcttcctgaccccttcatagaactcatcattgagtcttcttctctcttaagtcctttgagccatattactctcattttccttttgcccattttaatttgttcttctctcttctttgctagctcttcaaagtcttctttctaggcctcaactaccctttactctgaataccctttcatgacctcaactggtcttttgtgtggttaattttcaagtcttcttctagctcttgccctcactaaaccttccctttaccatgtctaaagctgaagtcagaaatatggtatgtactggacagagcagtgagtagaatttagaagacctggtagtttcagtcacatctcaactactacctaactgggtaaactaaggcaagttacttctcattggctctcagattcttcatgaattacagggcttgactagaatcagtggctcttccacacacttccctcaataaatggcaattccaacttcgaatcgttcaggccagaatgcttggggtcatctttgactgctatttttttcatacaccrtatcaatcaagcagcaaatcctattggctccatcttcaaaatatatcccagaatttgaccacttctcaccatctccaaagctccaccctgtttcaatccacta

SEQ ID NO: 281980 - DNA, 551 bp, Homo sapiens
gctaattgagaatcctggaagcaggtaattaaaakaacatcggcccaattctttcccctctatgaagctctcctgacttacttttcatgaatctgttttttttccaagatcctatagacaacaaattgtctgtacgactcattacattgctatctaaattgtaacctgctttgggagtctatggtctgtctttcacctgagatgtaagaaatctaagatcttgaaccatgttttaagcttgctctgcaggccttttatactgccaacttgaataccgagcaattacagacaataaaataatattattaaactcaactgaatgggttggtagtggttatttgtggtcctgaatttgagtaaagcaatactttttttttttccttcagtccctgaaagctcaggtagactatgtggttttccttgcctgagaacttaaaggtccagaaagaccactgactctgagagcagcaaaaagagaatgctttttctactctccaccctcaaaatgaacatcaaaagaaaaacaaggtcatgggaagaggcaaggcagg

SEQ ID NO: 281981 - DNA, 551 bp, Homo sapiens
gctaattgagaatcctggaagcaggtaattaaaataacatcggcccaattctttcccctctatgaagctctcctgactyacttttcatgaatctgttttttttccaagatcctatagacaacaaattgtctgtacgactcattacattgctatctaaattgtaacctgctttgggagtctatggtctgtctttcacctgagatgtaagaaatctaagatcttgaaccatgttttaagcttgctctgcaggccttttatactgccaacttgaataccgagcaattacagacaataaaataatattattaaactcaactgaatgggttggtagtggttatttgtggtcctgaatttgagtaaagcaatactttttttttttccttcagtccctgaaagctcaggtagactatgtggttttccttgcctgagaacttaaaggtccagaaagaccactgactctgagagcagcaaaaagagaatgctttttctactctccaccctcaaaatgaacatcaaaagaaaaacaaggtcatgggaagaggcaaggcagg

SEQ ID NO: 281982 - DNA, 590 bp, Homo sapiens
tttctaaaacccacccatgacttgcaagctcccacttcaagatgtcccarcttttcaggccaaaccaatgtataccttttatgtattgatttatatctttgcctgtaactcctgtccctctaaaatgtgtaaaaccaaagtgtaacctgactcctcaggcacactttctcaggacctcttgagactattcccctggccatggtcactcatatgggctcagaataaacttctttaatatatttcacagagtttggtttttctgtttacaagccaatacccaggctatatgtgaggctgggggctctttgctttttctcttttggattctgtttctgggaattttttttagttgattgacacctcttacaaaaaaaaagtttgatccctctgctttctggttggcatgattttgctgatgaaaatgtaaaacttaattggctttttagaaagcttaaaacctccccaaattggctcctctaagatttgttcttccatttcctgccacttctggtcctctataacccacactctatagctcaacactgtacagccaatcattaatcaatgttatttctgtaaaccaatgagaa

SEQ ID NO: 281983 - DNA, 1085 bp, Homo sapiens
tttctaaaacccacccatgacttgcaagctcccacttcaagatgtcccaacttttcaggccaaaccaatgtatacmttttatgtattgatttatatctttgcctgtaactcctgtccctctaaaatgtgtaaaaccaaagtgtaacctgactcctcaggcacactttctcaggacctcttgagactattcccctggccatggtcactcatatgggctcagaataaacttctttaatatatttcacagagtttggtttttctgtttacaagccaatacccaggctatatgtgaggctgggggctctttgctttttctcttttggattctgtttctgggaattttttttagttgattgacacctcttacaaaaaaaaagtttgatccctctgctttctggttggcatgattttgctgatgaaaatgtaaaacttaattggctttttagaaagcttaaaacctccccaaattggctcctctaagatttgttcttccatttcctgccacttctggtcctctataacccacactctatagctcaacactgtacagccaatcattaatcaatgttatttctgtaaaccaatgagaawaacagcaacaaaaacaaaacaaaacaaaaaacaaagtaacttaataaagctaaaataataggatgaataatcatccagcaaactgatataaatagaaatcaaataagagacaaaactcaaaaaagggcaaagtttgccattttataatctgtattggattagtccttttaaacttttaaaaaacaggctgggcgtgctggctcacgcctgtaatccagcacttagagaggctgacgcaggagtatcacttgaagttaggagttcaagwtcagcctggccaacatggtgaaacctcatctctatcaaaaatacaaaaattagccaggcatggggtggtgggcacctgtaatcccagctacttcggaggctgaggcaggagaatcgcttgaacctgggaggtggaggttgcagtgagccgagatcacaccactgcactctagccagagtgacagagcgagactccatttcaaaaaaatttaaaaaattaaaaaata

SEQ ID NO: 281984 - DNA, 560 bp, Homo sapiens
gatttattactcagcttttgtctccttgctcactctcaccttctacctagcctttactttttttttaagtcaatctatccttatcagctcagtccaagtctccactaagggaaaccccattttctttgccataattcaggaagccaagctcatgcctatctgaacataaaattttcctggccaccagatgtttaggaatgggcacatgcttctgcatgagtcagtaaacttcaagggaatgtttactggaggattctgccartgacgatccctcaccattaggagagaattactggaacgaatgggttctctctatctctgtgtattgttgcatatagctatcaggctcagatctgcaagccctcttaccactggttgaaaaacagaggcaataggccaagtagagcaaatcaagacactacagagaaataaaatcagaacacttattcaatctcatctgattccaaccccatccctgaatttttttcaactatataaacctgtaatttccctttatttttaaacttagtttgagttgggtttctaactatttaaaactg

SEQ ID NO: 281985 - DNA, 560 bp, Homo sapiens
gatttattactcagcttttgtctccttgctcactctcaccttctacctagcctttactttttttttaagtcaatctatccttatcagctcagtccaagtctccactaagggaaaccccattttctttgccataattcaggaagccaagctcatgcctatctgaacataaaattttcctggccaccagatgtttaggaatgggcacatgcttctgcatgagtcagtaaacttcaagggaatgtttactggaggattctgccaatgacgatccctcaccattaggagagaattackggaacgaatgggttctctctatctctgtgtattgttgcatatagctatcaggctcagatctgcaagccctcttaccactggttgaaaaacagaggcaataggccaagtagagcaaatcaagacactacagagaaataaaatcagaacacttattcaatctcatctgattccaaccccatccctgaatttttttcaactatataaacctgtaatttccctttatttttaaacttagtttgagttgggtttctaactatttaaaactg

SEQ ID NO: 281986 - DNA, 1111 bp, Homo sapiens
aaaggagaaactcataactgggaaaatgtaagatttattttcaacactgtgacagtttatgtaacatgaataccctagccatttaggtgatttttcacactttcttttgcaccttatcaaattgttcaattcattattatgtttattataaaactaaatatgtttctatttatattgctgaagttctatcagtcttcttaaaaataaatcaaaaaagtgagaaagatatttctgaaatgtcaggggaaataatgttcatgtagttgaatgggaaataagacamcagattcagataaatattcacccggtaattttctataagaaaaaaattaatttagtaagtatttattgaacatcttaaaaatgtaggcaccagagctgaaggaatgaacaagttacaaccactaccctgaaattcacagagtagagggtgggtgtgggaaggtagagatgctctctgctgccatttcttacctcacttctctcatacttcagccacactagcccccttgcttttccttgagaatatcaattatgtttcttcttcatagctttwaaaggagaaactcataactgggaaaatgtaagatttattttcaacactgtgacagtttatgtaacatgaataccctagccatttaggtgatttttcacactttcttttgcaccttatcaaattgttcaattcattattatgtttattataaaactaaatatgtttctatttatattgctgaagttctatcagtcttcttaaaaataaatcaaaaaagtgagaaagatatttctgaaatgtcaggggaaataatgttcatgtagttgaatgggaaataagacaccagattcagataaatattcacccggtaattttctataagaaaaaaattaatttagtaagtatttattgaacatcttaaaaatgtaggcaccagagctgaaggaatgaacaagwtacaaccactaccctgaaattcacagagtagagggtgggtgtgggaaggtagagatgctctctgctgccatttcttacctcacttctctcatacttcagccacactagcccccttgcttttccttgagaatatcaattatgtttcttcttcatagcttt

SEQ ID NO: 281987 - DNA, 555 bp, Homo sapiens
aaaggagaaactcataactgggaaaatgtaagatttattttcaacactgtgacagtttatgtaacatgaataccctagccatttaggtgatttttcacactttcttttgcaccttatcaaattgttcaattcattattatgtttattataaaactaaatatgtttctatttatattgctgaagttctatcagtcttcttaaaaataaatcaaaaaagtgagaaagatatttctgaaatgtcaggggaaataatgttcatgtagttgaatgggaaataagacaccagattcagataaatattcacccggtaattttctataagaaaaaaattaatttagtaagtatttattgaacatcttaaaaatgtaggcaccagagctgaaggaatgaacaagttacaaccactaccctgaaattcacagagtagagggtgggtgtgggaaggtagagatgctctctgctgccatttcttacctcacttctctcatacttcagccacrctagcccccttgcttttccttgagaatatcaattatgtttcttcttcatagcttt

SEQ ID NO: 281988 - DNA, 574 bp, Homo sapiens
gactaaggtctttgaggcaggcrgactggggcgaattccaaatttaggacttacctgccttgccaccatggttaatttaatgtgttagatttgcagtttctggatttagaaaatggagtaataattaccttagagctgctatacattttgcattgcatatgtgacggatctggcgtagaatttctagaaaataacagaattctcatgattacctcaaatgaagtacgctgaaaacagattgcatttgaatgcattgctttttcccaattctttttcgtcttttcccttcaggtcttgtcttagatattagaactagattgggtctcctgtcctagtatagcctgaaattcgcgaaggcagtactttaaacacaaattgattactgacaatcatatgttgatagtttgtaggctacacaaagagaaaaggtttgtcttagcaactatggtcctcctaggaaccagtgcagtgcctggccatcagtaagttctgaagatttaggactaatggatgaatgttgcaaccctacttatctccaatctggctccctcaccatttttccattgccttgtaa

SEQ ID NO: 281989 - DNA, 574 bp, Homo sapiens
gactaaggtctttgaggcaggcggactggggcgaattccaaatttaggacttacctgccttgccaccatggttaatttaatgtgttagatttgcagtttctggatttagaaaatggagtaataattaccttagagctgctatacattttgcattgcatatgtgacggatctggcrtagaatttctagaaaataacagaattctcatgattacctcaaatgaagtacgctgaaaacagattgcatttgaatgcattgctttttcccaattctttttcgtcttttcccttcaggtcttgtcttagatattagaactagattgggtctcctgtcctagtatagcctgaaattcgcgaaggcagtactttaaacacaaattgattactgacaatcatatgttgatagtttgtaggctacacaaagagaaaaggtttgtcttagcaactatggtcctcctaggaaccagtgcagtgcctggccatcagtaagttctgaagatttaggactaatggatgaatgttgcaaccctacttatctccaatctggctccctcaccatttttccattgccttgtaa

SEQ ID NO: 281990 - DNA, 562 bp, Homo sapiens
aagacaatatatctgataagaaaaatgcaatgamaaaattttctttttctctttcaacttctattttagaatcggggggtacatgtgcaggtttgttacaaaggtatgttgcatgatgctgaggtttggggtgtgactgaacccatcatccatatagtgaacacagtacccagtaggtagtttttcagccctttccccactttagtggtctccagtgtctatatccatgtgtacccaatgtttagttcccacttataaatgagaaaacttggtacttggttttctgtttctatgttagttagcttaggataatgtccttcattgcatccatgttgctgcaaaggtcatgatttcattcttgttatgactgtgtagtagtccatatatttatgtactacattttccttatccattcaccattgatggacatctatgttgattccatttctttgtaattgtgaatagctcagcgattaatactcaggtgcatttgtccttttggtagaatgatttattttcctgtgtgtatatactcagtaatgggattgctgggtcaagttgt

SEQ ID NO: 281991 - DNA, 490 bp, Homo sapiens
cttttgggtctcatatgtatgaaaagttttatatttgccattaagtatagggtgatcagttttattagtccattctcatactgctataaagatcatacctgagacgggttaatttataaagaaaagaggtttaattgactcacagttctgtatggctggggaggccttgggaaacttagagtcatggtggaaggcgaagaagaagtaagcacyttcacaaggtggcaggagagaaacagagatggggaagcaccagaaacttttcaaataaccagatctcatgaaaacccactgactatcattagaacagcaaggaagaaatccacttccatgatccaattacctcccattaggtccatccctcaatacatggggattacaatttgagatgagatttgggtggagacacagagccaaatcatagcattccacctctggcccactcccaaatttcatgtcatttcacatttctaaaccaatcatattgtcc

SEQ ID NO: 281992 - DNA, 536 bp, Homo sapiens
atgtactttgactccatgtctaacatccagggtacattgactcaaggggtgggctcccacactcttgagcagctctacctttgtggctctgtagggtacagtccccatggctgctttcatggactggcattgagtgcctgtggcttttccaggctcacagtgcaagctgtcagtgaccattctggagtctgaaggatggtggccctcttctcacagctcccctaggcagtgctccagtgagaattctgtatggtgtctccaatcycacatttctctgctgcactgcactagcagaggttctccatgagggttccacacctgcagcagacttctacctagacattcaggagtttccatacatcttctgaaacctaggcagagtctcccaaagctcaactcttgtcttcttcatacctgcaggcccaacaccacatggaaagtcgccaaggcttggggcttgttccctctgaagcaatggcccaagctgtaccttggtcccttttagccacagctggagctggagcagctgggactta

SEQ ID NO: 281993 - DNA, 590 bp, Homo sapiens
atttctcctctcttggatatgtataaacttccttttgaggatagtagtttttcatcttatgacttaaggatgtcttttgtgaaatgttatcatmaaggaagatagtgtccctatctcacagcttctgtgagagtgctggagcctagctttcgtgggtctcttgctcccagtttcaaaattacctcctgccatagagatataagataggatgcattgtgtgtgacaaatggtactcttaagtcctcttacttgaggactagttattatttatcttgaaagcttgtgtgtaatggagtatatctgcttggctatacacacggatgaaactcttttctgtctctgcaaatatctgttagcagatttcctatgatgcacattgcattctgcttcagtgtttattcaataataaaagtggtttctttcttcactatctttgtggagcgatttctgagttggaataagaatttgcttttcattatatttccaaaatttcctactgaggtttccttcctccttctacataatttttgtcatttatgagcttatctctgtactgtgaaggttgacaacattaccttatcttgataatc

SEQ ID NO: 281994 - DNA, 517 bp, Homo sapiens
tgcaaggcaaaagaaactatcaacagagtaaaaagacaatcaacggaatgagagaaaacatttacaaactatgcatctgacaaaggtttaatatccagaatctataagtaacttaaacaaatcaacaagagaacaaatgaccccattaaaaagtgggcaaagaacatgaacamacacctctcaaagaagatcatacaactggtcaacaaataaatgaaaaattgctaatcactaatcatcagaaagatgcaaatcaaaactacaatgagacaccatctcacaccagtcagaatggttatttttaaaaagacaaaaagtaacagatgttggcaagcttgcagggaataggctgttggtgggaatgtaaattagtacagccactgtagaaagcagtttgaagattcctcaaagaacttaaaagagaactaccatttgatccagcaattacactcctgggtatatatccaatggaaaataaatttttctatcaaaaagacacataaacccatatattcat

SEQ ID NO: 281995 - DNA, 657 bp, Homo sapiens
aatgtaagaccccaaactatgaaaatcctgaaaaacataggaaatatcattctgaatatcagccttggcaaagaatttatgactaagtccccaaaagcaattttgacaaagccagaaattgacaaatgggactaaattaacccatttataccagaggttgcaaatttctgtgtgaaaaatcagaccttggtgatgaccttgggcggtaggatataaatcactcccacaagcttggcattccaataatggaacactagaaataaatgtaaagagcttctgcaaggcaaaagaaactatcaacagagtaaaaagacaatcaacggaatgagagaaaacatttacaaactatgcatctgacaaaggtttaatatccagaatctataagtaacttaaacaaatcaacaagagaacaaatgaccccattaaaaagtgggcaaagaacatgaacacacacctctcaaagaagatcatacaactggycaacaaataaatgaaaaattgctaatcactaatcatcagaaagatgcaaatcaaaactacaatgagacaccatctcacaccagtcagaatggttatttttaaaaagacaaaaagtaacagatgttggcaagcttgcagggaataggctgttggtgggaatgtaaattagtacagcca

SEQ ID NO: 281996 - DNA, 657 bp, Homo sapiens
aatgtaagaccccaaactatgaaaatcctgaaaaacataggaaatatcattctgaatatcagccttggcaaagaatttatgactaagtccccaaaagcaattttgacaaagccagaaattgacaaatgggactaaattaacccatttataccagaggttgcaaatttctgtgtgaaaaatcagaccttggtgatgaccttgggcggtaggatataaatcactcccacaagcttggcattccaataatggaacactagaaataaatgtaaagagcttctgcaaggcaaaagaaactatcaacagagtaaaaagacaatcaacggaatgagagaaaacatttacaaactatgcatctgacaaaggtttaatatccagaatctataagtaacttaaacaaatcaacaagagaacaaatgaccccattaaaaagtgggcaaagaacatgaacacacacctctcaaagaagatcatacaactggtcaacaaataaatgaaaaattgctaatcactaatcatcagaaagatgcaaatmaaaactacaatgagacaccatctcacaccagtcagaatggttatttttaaaaagacaaaaagtaacagatgttggcaagcttgcagggaataggctgttggtgggaatgtaaattagtacagcca

SEQ ID NO: 281997 - DNA, 655 bp, Homo sapiens
atagtagggtgccaaatatgtaattgtcagtgtttatcacagtaggaaggggctatcatatagctaaattaattacatgaattaataatatcagtgtctaaagccagtttttgtgattcatctgacatttaccttggtaattagcatactttacaatccacaattgtgaacaaaaaaactatgaaaaataatgtaaaaggtattatatgytaattaatgtttatattatattgaggctaaaattaatcttcaaagttttgattatgaaaaagtattaaaaagacgatgcaaaacatttttagtaagttttgaatagcccacaattggaatgaggttctcaacagagtttctctattacactgctagtctgaaatgactatttagataaagcaaatgacagtaagaatgataatgataataatgtgaatctcttttatgctaataaaaccctgagataaaacaggctatttaaattagatcatacagttattcaattgaggaagattttaaaataccctttataatagtatttttgcagccttaactcaatttaaagtcagcttcaaaaatttgtattctgaaagatattttaagaatttttaaatctaagattttattcctctgacattttcccctatgtgaagtgtcagtatac

SEQ ID NO: 281998 - DNA, 655 bp, Homo sapiens
atagtagggtgccaaatatgtaattgtcagtgtttatcacagtaggaaggggctatcatatagctaaattaattacatgaattaataatatcagtgtctaaagccagtttttgtgattcatctgacatttaccttggtaattagcatactttacaatccacaattgtgaacaaaaaaactatgaaaaataatgtaaaaggtattatatgctaattaatgtttatattatattgaggctaaaattaatcttcaaagttttgattatgaaaaagtattaaaaagacgatgcaaaacatttttagtaagttttgaatagcccacaattggaatgaggttctcaacagagtttctctattacactgctagtctgaaatgactatttagataaagcaaatgacagtaagaatgataatgataataatgtgaatctcttttatgctaataaaaccctgagataaaacaggctatttaaattagatcatacarttattcaattgaggaagattttaaaataccctttataatagtatttttgcagccttaactcaatttaaagtcagcttcaaaaatttgtattctgaaagatattttaagaatttttaaatctaagattttattcctctgacattttcccctatgtgaagtgtcagtatac

SEQ ID NO: 281999 - DNA, 608 bp, Homo sapiens
aatgactggtaacccagtacgtataatgcaagaactgcattctagatacgcctgaaattaatgtttcctgggcaaaaacattttcattatcttttttttaatccctggacattagctacaggtggttacttgcagatttactgctgtagagctccaaaattgagattacacttttcagattctgcrtaccctaaggctaagaggttgggctattgagtttgggtggtctctttggtcctgattgctacttccaaaccatttctgctcttttctgcttcaaaaatatttgaagttcatatcttctggctaaatcactttctactctccttcctgccatcatccacgagcctcctggtcactttccagaaattatagagctgcttgccgtaggttttcctcaccatccctcttgtctacattctatctgaattcagcatgcttgtaggtgacccatgcaacaccaacacttggcctcttagacctctgacctcttcatctccaacaatttgttcctctcttgcgtcttaaccacttcggtatcagtcagattctgaaccttgtcatcagttgaaatctcagtttcaagcttcccaattgtcaatcactag

SEQ ID NO: 282000 - DNA, 378 bp, Homo sapiens
cttctggctaaatcactttctactctccttcctgccatcatccacgagcctcctggtcactttccagaaattatagagctgcttgccgtaggttttcctcaccatccctcttgtctacattctatctgaattcagcatgcttgtaggtgacccatgcaacaccaacacttggcctcttagacctctgacctcttcatctscaacaatttgttcctctcttgcgtcttaaccacttcggtatcagtcagattctgaaccttgtcatcagttgaaatctcagtttcaagcttcccaattgtcaatcactagcctttttttcccagctaatttatggtactctcacttacctaattaagacctccacgctattaaccccaa

SEQ ID NO: 282001 - DNA, 588 bp, Homo sapiens
ggagtttcactcttgttgcccaggctggagtgcagtggcacaatctcggctcactgcaacctctgtatcctgggttcaagcgattctactgcctcagcctccctagtagtgggattacaggtgccyaccatcacacccggctaattttttgtatttttagcagagatgaggtttcaccatgttggccaggctgatctcgactcctgacctcaggtgatccacctgccttggcctcccaaagtactgggattacaggcgtgagccaccgcgcccagcccggatgataccttttaacagagatactgagaaatggaaataactacgatgatgacagaggttggaaatagtcgcaagagagaaacagctgaaaatgttttggtttgatgaaggcatgcaaggggtcagagaggtagatgtctttgggaaaggctgtccagataggttgacagtaccttgagtcctcttagttcttggtcttgcaggtgcaaggatttcactttatcagttaattagtattcagagttgatcttggcaactgactcattctaaccaaacttgtaagagactgttgcatataccagaatgcca

SEQ ID NO: 282002 - DNA, 594 bp, Homo sapiens
cacattgtaaaccagtcgcagagtcttcataaaactctaccttctgcagattgtgttgtcacttcccaccattgttctgttagatatgggctccacaagggcaggagttattgactactttgtctatgaatttacgtggtgtccccaactgcagtaacactgcctgtcacagagtgggtgattaatacattatttattcacaaaagtgtgtttgtgatctctatactattggccaagtgccccacagccatgtgacaacacataactggttatacccatgtgcatatgcagtgggtcagctctrtcacatactttgcccaagttttccctaccaggcagctgatacttgtgaattctctgggcgcatttgcaggatgttcttcttccctggaaccacccagtttcagccattctttgctgaaaccccagcctgagccttgctcaggtaggaatgtgagggggagacctccactgttctctgggcaggtcttgcttgctatcttgtctgttatgccacccccacacagcacccagtccagggctaggcatccaacagccggctgctaagagatcttgcagtttcctgccaggaac

SEQ ID NO: 282003 - DNA, 318 bp, Homo sapiens
accacaaaccattggcttaaacaatgggaatttattggctcacagttttggcggccagaagtgcaaaatcaaggtgtggcggggttagttccatctgagggctgtgaggaagaatctgtttcaggcctctcccctaacgtttgatgattggctggcagtctttggctttccttggcttatagatgcatcactccaatctccrccttcatcttcatatggtgcactcctttttgtccatgtctgtgttaaaatttccccctttaataacagtaacagtcatactggatcagggaccagtgaccctaagggtgacctcat

SEQ ID NO: 282004 - DNA, 646 bp, Homo sapiens
ctgctctgcttgaacaaaattcagaaggttcacgattcctattttcaactctttaaaggactgtcaagtgaaagggagtaaacacagtgtcttctacccaagagttaaaattagcattaaatcctccttattttgtgtctttccatattttgagccaaagaacaacagtatagctgcccagagttggaacaactgcattggaaggaaatgcagaagtgagttccccacaagcagaggtatcccagccgatgttggacaccagcttataagaggttttctcaaggaggcttgagcattggctgagtgatgagaagtcatgactataccaagatcccatttgcctccacacatctaagtctccatgacaagcgcattcccagaagacccaaggtgggaggrggagagatgacagtaggaggaggagactgtcacagtgtcctgtgcagcatggaagtggaggaggaagtagaatgagactggtccactggtctggcatctcaggggtcgctggtgacctttgagagagcagcagggcacttttcatttcaagggatgccactcccactatctctcaagtcttcaccatgatacagaaaaccatttccaaaattaaatctcccttgagagcacacattaataacacacc

SEQ ID NO: 282005 - DNA, 559 bp, Homo sapiens
cacagtgtcctgtgcagcatggaagtggaggaggaagtagaatgagactggtccactggtctggcatctcaggggtcgctggtgacctttgagagagcagcagggcacttttcatttcaagggatgccactcccactatctctcaagtcttcaccatgatacagaaaaccatttccaaaattaaatctcccttgagagcacacattaataacacaccaaaggatgcataaattacacctacragtcatattccattgcagatgaatacattgaataatgtcacattccagccacatcaaaaggcataccataattaagctaccacaggtggcttgaagagcaatgttggaaacgctatggacacacacagcaatctagattaacaaagcctgaaaagtctcccaatttggagctgcaccattgtagtgtaggattaaaattgtgggtactggagtcctggattttaaccctgatcccaccatatacctgtttttaaaccttgagcaagttactcaacctcactgagcctcagtttcctgatctgtaaaatgggaagcta

SEQ ID NO: 282006 - DNA, 520 bp, Homo sapiens
agaaccaaccactagccccttcctagggagctcacagtccagggtgggaagctgatgtgtagagagtcatgtgctacccagggtagaatctgctgaagacagtagatttcagtgctgatacagatggacactcagagaaaggatttcaacccaggtatggggagagagtcagaatgagagggcttccaggaggaggtagagaatgacatgagttgaacctttaagaatgagtgagtgaacttgtgggatcaggggtgagggtacagaaggccttggcgggacacatgactggtatgaggcagaataagactcagagtaggtggcttcccgggcacccactgcttttcaagggaggttgaggtaactggttgagtggggcatctcgatgggcattcctgggacccacatctggcatttagtggaaacagaaacaaatgcacatgcacacacacgcacatcaacacatttaggtaacacacatgtatactcacacatrcttgtgcttccaacacagacacac

SEQ ID NO: 282007 - DNA, 521 bp, Homo sapiens
cgaggtagccatccaacctgtcagcacgggaatgcccaaggtaagccactctctatggtgttaatgtacagtcctctctgcagatgcccggggttgatgatagccgggctcacacagggtggctgtaagatccctcattttacaggatgagtactgggtgtgtaggggatgaagtgataaccatggccattgygctgtcaggtctgagagtcagaacctatctccagtgttcgcttctactgttcctagccgggtcctctctccccactcttgaccctgctccctttcattgctcagcagcctaacccccaagcccgtgaaaggcagtggacccaaatgatagccaggccacagggccaggcaccacaggaatcaggaccagggcagagaataaaaaggtccctcagcagagaggagtctccacacactggccccagtggtggtgagtttattaccacctcatttggctgcgtgtgtctgatgactgaaatggctggctttccccaccagggcaccgccag

SEQ ID NO: 282008 - DNA, 549 bp, Homo sapiens
cttgaccctgctccctttcattgctcagcagcctaacccccaagcccgtgaaaggcagtggacccaaatgatagccaggccacagggccaggcaccacaggaatcaggaccagggcagagaataaaaaggtccctcagcagagaggagtctccacacactggccccagtggtggtgagtttattaccacctcatttggctgcgtgtgtctgatgactgaaatggctggctttccccaccagggcaccgccagggaccaaagaatacaagaactagcttggagtttatgtgtctagtgttaaaaatcartagcttccctcttcgggatgcaccctcaggggcaaaatagaacaaattgcttattagcttctgcctgcacactggcagatgatgaagcagccaagaaactggtcatacatcgtaataaagcacccttcacctgccatccatccgtagaccagccagcgcatacctctatcccagcggcattaacccacacggtgctggcgtcactcacccctaatcactgagagcaggtctgcaatggtgg

SEQ ID NO: 282009 - DNA, 462 bp, Homo sapiens
  misc_feature (1)...(462): n = A,T,C or G
ctgcaatcataggcagcagctccagaaaacaaactcattcccttagcaagcagcagagatgttctggttggccccagttggcttctttgggcaggaggattgatggcctctgctgttacatcctggtgagaataaccactcatgaacaccccatatttaatctttattttggagtcttcttaagcgagaaattgcagtaaaacaaaatagccatgttgctccaagggttaattagacatagcccagaaaaagcgatttccctctttctgccttanattttagggttttcatgctgagtgactgttggcttctgcccaatggaataagataaatgggagytcctgattcggattcccctctgttcccagctgttatttctcagttntctaaaaagggggaaactctttgaacctgctgctgttcacaaacctgggacttgactctctccccttttggttttgg

SEQ ID NO: 282010 - DNA, 620 bp, Homo sapiens
acaacatttctgaaaaaaatatagaagcttgtaacagccattcccctgccaaggagactgaagtatcagatgtctccaggaagaagaagagttatatgttcacttacatttttaatatttgaatcgtttactgggtgtgatgacatattcaatattaaactaattaatgagagttgaaaaaagaaagagaggaagttcttgagtgagctttgggttttccccgtgaaatagaagggagggcctctgagggtgagcagagagggctcaaggcagatcaggctcctgcaaagatgaggtctttmggtcagaggctgagggaaaaggggaggggctgaccaaccccaaatgaaggaagcctggggtgcagggagcacactgttcaggtggaggccagaatctcgagggatggaagccacacagttcagtgtgatattcaccagcagcccgagtatagagactaagtcaaacaattggattatccccaaaagttgtaagctagaattaaggaagaagggatggactggatttggagatatgaaaaaggcagaatcgacaggatctggtggccggtgtgacatggggaccgagtgagagatcatcttaggatggctctcgatttc

SEQ ID NO: 282011 - DNA, 538 bp, Homo sapiens
atgtcattaatacattcactggtatcactgaactttattttatatcaagtgagataactactataccatccagggagataatgtgtgtgaagcccatagcacaatgcttgacaaatagttttcagggaatgttagcttctatctaagcaggtcccattggaaaaaaaaaaagttgtatttttatatagttctagttagtttctcatctgtgatctatgctatttttaattgaaaaaaaaaagtgtttccatacattgtcaggaggagccgttcccctgtcccagcctctcacaaagcacaccctcactccctcatttttccagtagtcccagggctagaccacctgtagagacaggaagcctgcctaaagagcagaagcatctgctcagaaagatctagttgtttgctggagcctcagcttgaagaaggctccaagtttattrtaaagtcccagccacacagtttgcttgagactttataaagagagaatgagatgtagaggctgggcccaaacccactaccaggctgtgggaatggg

SEQ ID NO: 282012 - DNA, 485 bp, Homo sapiens
taattctcaggtagtgacgatcaaagatgtaacagttcatccagggtttacctagttaattccagcacagaaccagaggcccccaaatacaaacaagatttctggcctctctagcactaacctctccagatgccttccatgaggcatatgtgtgtgctagaggcatggaggagctaagtttgggtctctatactgttcccttctcatctgtttaacctccaaagtattgtaccatgttctctgtgtccagtggaaaatgatgtttttacattgcatcatctgtcattcttaaccccagagtggggctggagtgttggaacacttcagcacaggactctgtttaaagctgtgagaagctctttttgtttttctaagtcggctgaactagtaaaacagttttacaactgtgttttcaagttctgttcagaaagrcaagcttgaaaaaataggtgatgctgaagtgtcattttagtaaattttttttc

SEQ ID NO: 282013 - DNA, 577 bp, Homo sapiens
agctttctccccgcctccccaccccgccacccggcgtttttttgttttgttttgttttttgtttttttgagacagggtcttgctctggggtacagtggtgcaatctcagctcactgcaacctccacctcctgggttcaagcgattctcatgccccagcctccccagtagctgggactacaggtgtgcaccaccatgcctggctaatttttgtatttttagtggagacagggtttcaccatgttggccaggctggtcttcaactcctggcctcaagtgatyggcctgcctcagcctcccaaagtgctgagattacaggcgtgagccactgcgcctggctaacctttttggattcttaaatgtgttcatgggctgcatcaggaagccaggccaccgctggtccctaggtctggggtgttcacaagaagagaagatcataaacatcatgtcaaaggcaggaaaaacaaaactctgccctctgtggtattaagtcccagtacttgaaattccaaatgtccaaaggggagcagagagcagcacacacatgtatcagttgcttgtccacctggtagttgagtg

SEQ ID NO: 282014 - DNA, 565 bp, Homo sapiens
aaaactggggtactctgactgaaaatatctactgcttagccgtttctatgtcgattagagaaggtgtttatagctcagaactagaggagaagaaaccatttctttgtcactgagaaactccttgccagggtctctcagtgagaaacagsacatgtggagcccaagatagggcaaagccaagtctccttatcttatttagtgacatttttttaagagtaaaaaataatcacatgctttttgccaaatccagccctaaggcatggatccaacaaaacatcacattaattagataatctaatttccaaaaacagaccccagcgcagacacccactgtctagcagtgatgacaaagggatcagacagctgacatcgtggcttcctccttcagagttcatgtggacacctaccaagaataaggccttggccagagctttatctgtccttggactagaatgtttcttagtgatgccataacaacggggttgacttaaaacaatgttaatttattgtctcacagttcagaaggctggaaggcttaaatcaagatgtcagcagggccagcctc

SEQ ID NO: 282015 - DNA, 563 bp, Homo sapiens
gtctcctttggttccatttgaaaagcaacctagaaagtacgttagaggtggagcccagatgttgccatttctgaattagaaataatttggcctcttctgaaacccactcatcccattccctttgtggctggggagtatggrggtgggaagggggcaggcaggaaggagagtgttgatccaggaacatctgcacacatcatcacaacacacatcccaaccagctctgatttctcccctggctcaaagcagggagagatgggtatttgggaaaagctcaccaccccaaaatatctccctaaaccctgaaggctaagtcaacccatgggctctctgaaagtggccaggggacagcaggagaggcagtactcggaaaagggcagcggtacctatcttcggagccctttcacctgctccagtgggattttattctcactctgtggccctgatacctcctgtgtcttttagctgcattcgtgggatgggagggttgtcagggaggtttcccacctggggcctcttcgtacacctcaaggggataccatgcccacagaatgcaatgtgaa

SEQ ID NO: 282016 - DNA, 563 bp, Homo sapiens
gtctcctttggttccatttgaaaagcaacctagaaagtacgttagaggtggagcccagatgttgccatttctgaattagaaataatttggcctcttctgaaacccactcatcccattccctttgtggctggggagtatgggggtgggaagggggcaggcaggaaggagagtgttgatccaggaacatctgcacacatcatcacaacacacatcccaaccagctctgatttctcccctggctcaaagcagggagagatgggtatttgggaaaagctcaccaccccaaaatatctccctaaaccctgaaggctaagtcarcccatgggctctctgaaagtggccaggggacagcaggagaggcagtactcggaaaagggcagcggtacctatcttcggagccctttcacctgctccagtgggattttattctcactctgtggccctgatacctcctgtgtcttttagctgcattcgtgggatgggagggttgtcagggaggtttcccacctggggcctcttcgtacacctcaaggggataccatgcccacagaatgcaatgtgaa

SEQ ID NO: 282017 - DNA, 563 bp, Homo sapiens
gtctcctttggttccatttgaaaagcaacctagaaagtacgttagaggtggagcccagatgttgccatttctgaattagaaataatttggcctcttctgaaacccactcatcccattccctttgtggctggggagtatgggggtgggaagggggcaggcaggaaggagagtgttgatccaggaacatctgcacacatcatcacaacacacatcccaaccagctctgatttctcccctggctcaaagcagggagagatgggtatttgggaaaagctcaccaccccaaaatatctccctaaaccctgaaggctaagtcaacccatgggctctctgaaagtggccaggggacagcaggagaggcagtactcggaaaagggcagcggtacctatcttcggagccctttcacctgctccagtgggattttattctcactctgtggccctgatacctcctgtgtcttttagctgcattcgtgggatgggagggttgtcagggaggtttcmcacctggggcctcttcgtacacctcaaggggataccatgcccacagaatgcaatgtgaa

SEQ ID NO: 282018 - DNA, 578 bp, Homo sapiens
cctgaattaagtgtgtgcacagagcaaacatcatcatctggatggatccaaaccagggcttgcctggggcattcagagcytttcagatggccctgcccagagctgctcagcactcttggaagatgtctgggtttggggaggctcaagggctgttcttctacccctgccccagaaaaggatttgttcttcaccccctgacccgtctgtctccataccagcccatttcctccatgacatggtgaccgggctcacacacacaataacaaaaataataataaccatgcttatcaagcactaaccatgtcagaggcactgttctaaatattttacatgcattaactcattaagaggcagggactattattgtccccattttgtagatgaggaaactgaggtatgagacaatgaagccactcgcccagggtaaaagccaagcccctgagacagatggagctgggagtcaggagtctgcagaggctgggcttccaactgcccagccgcaccacacacagcagctccttcccaagatgggtgtcccagggagagaggcaatgcaagagctgaagtgagttttgagg

SEQ ID NO: 282019 - DNA, 539 bp, Homo sapiens
ccaggcttggccagatcagggcacctggggaagggtttgtctctgcctcttactaccacatgaagtactcagagtctgggtgattgtggacagggcttcagatcaaggaaacttaagattctcaatcagccattgacatatgccaagaccaatcaatctttttcatctcatctcccattatccacccttcccacagccatraccacccactggtcactgtgcatgtctccctcctttgtcttctggtgtccctgccatggttccttcaggcaaagatgcttcttcaacctatccctaaataattctgcttgaaccttcagggtcaagctgaaagtggtacctttttcacagtcttcctgggcccaccaactggaagcaatcactgcctctactaaagtccacatcaattaaatagtcaattagatagatccagagtgaaaatggaaaccaccttctttttgcatcagtgggatggatgactggaaacatggatgaccagacaggtgaaaagaagaatggaaggaaacatgagtggaagg

SEQ ID NO: 282020 - DNA, 545 bp, Homo sapiens
ttgaataagtgcagtgggccatgtggtgacacatcttgagtgtccagctggagaactggaagtgcatatcataacaggggtggaaaactcagaggttgatagggaatggtgaggttgcaatgaggggaccggtggggactttgaccagtggagcaagagtctttccgagatgaagggagcagctgcctcacagctctggccagctgtggacatttggccagtttgtaatttgtcaaaagaagtcagaaatctgcmttgttgtgaaatctccagattttttacatgttgtcaatttaattaaaatattaaaatcagcccaggggtcaagactgctgacccatgcatggggcctggggggaaacttgtggggctccagcttgtggcttctctgttggcggtgcagctgttgaagattcctacacacaggtgccacaggggaagatggcacaggaaaggagtgtggacctggagaatcaagtaaggagcaggcagcaactgaggcagggccatatgcaactgtggccaggggtcacatatcatactga

SEQ ID NO: 282021 - DNA, 580 bp, Homo sapiens
cagacgacattcaattggttcatattttggggggcaatatgtcatgccccaccttgctgtagctgagacatgcctttaacatttccaaggagccacagaaaaagacatagaaaaccttcgattgcatttagagattagaagaggatttttctcctaaatatggagctgtttccttgactcagcaggtatgtgagatggatatgaaagcaaaagatgttcccttgccatgaagcaagtatttttgagtcatagatcttattgatcagactcattcaattggacatttctcttgtgtgcacacatgttccctctctcctctgtctcctcctgcctcagtaacttgyagagagacttccaaaaagagagcaggtttttagagttgagagttaaaacttctggaatgttgttctagctcctggggttgggcagggaaaggtaatcctcaaatataggtggggcctcagaggaagtttggtgaatctgtcaactagaattttttcttgaaaattctcattgaagtaacctctatcctcaaaggattccaatatacatctagggttgaaaaggaatgaactgatgg

SEQ ID NO: 282022 - DNA, 559 bp, Homo sapiens
ttatagccaggatatataaagaactctcaaaattcaacaggaagagaacaagctacccaactggaaaatgggcaaaagacttgaatagacacatgatcaaagaggatatttggatggcaaataagctcagaaaaagaacatcagcatctttagccattagggaaatgcaagtgtaagcaatgatgagatgtgaacacacctattataatggctgaaataaaaataccaacaataccaagtagtgatgaggatggggggcaactggaactctcagacattactaatgggaatgcaaaacaatgtygctattcaggaaaacagtttagaagttttcttataaaattaagcatatacttagcatattaccagaaattcaatgtctagatatttaccctagggaaatgaaaacttaagtttacagaaaaaacattcatatacatgtttgtagcatctctattcataattacccaaaactaggaagaatctcagtgggtgaatggctaaaacaactgtgatacatccttaccatgaatacatgcagtagcaaaaaagaatgaac

SEQ ID NO: 282023 - DNA, 497 bp, Homo sapiens
gctcagctctgcagtcttgccagggggaggaggaatcaggctggggggcagggatagagggccgtgtgcatcagggaaggaggccctgagatgacaagctccatgagtcactcaactggccgctccagccagagagcatcaaggaggggtttatgacactgcctcatgcagcagtgatcagccatgaggtggcatccatccattgtcaggggacagtccatcctcctcaggcacatgcacagaggattgggtgcagaggagttcaccctcaacacctctgggtgttgggaggcaggagagcagtggggctggaggcacagctctgccaagcattcctgaaccaaagcaagccatcaatgagtgctcacaccgtgcaggcactgtgagcctgtgtccacatgatctcatcttgtcctcagggccatgccaagaggaggcactattcttcttcttctcagtttatggatratgataatggaggcatagagaggttaagc

SEQ ID NO: 282024 - DNA, 591 bp, Homo sapiens
ccggcagttagcaaaacgtctggcatatggcaggtgcaaggcaaatgtttgctgaaggagggaggctgcatggaggagactgggccctctttccagtgccagctctgcctgcatcgagcmctatgtggcgcatctagaccaggatccacatccatggtgtggtttccccaggctgcagaagtgcactgtggaagcaggtctgtgtgcttgagatcagggaaagctgaccaagaagatgggacacagttgattctggagaggcagggaacagacaggggactctcctaacaggctggatcttccaggacagttgaaggacaacatccagtaggaccctagaccaagagtatagacactgtcgctatgggtgtttctctgagccctgagacttcccatgtttaagataagctggttggattactggttattgattatgttgaatcttttggtggcacagaccaacttgagaatctgaagatatcaactttctttctggagaaatgcatgtgcttacatagagacaaaatatgcctgcacttcctagaagggcaaggacccctccgaagttcattcacagccccaggatgacag

SEQ ID NO: 282025 - DNA, 588 bp, Homo sapiens
tgaaggagggaggctgcatggaggagactgggccctctttccagtgccagctctgcctgcatcgagccctatgtggcgcatctagaccaggatccacatccatggtgtggtttccccaggctgcagaagtgcactgtggaagcaggtctgtgtgcttgagatcagggaaagctgaccaagaagatgggacacagtygattctggagaggcagggaacagacaggggactctcctaacaggctggatcttccaggacagttgaaggacaacatccagtaggaccctagaccaagagtatagacactgtcgctatgggtgtttctctgagccctgagacttcccatgtttaagataagctggttggattactggttattgattatgttgaatcttttggtggcacagaccaacttgagaatctgaagatatcaactttctttctggagaaatgcatgtgcttacatagagacaaaatatgcctgcacttcctagaagggcaaggacccctccgaagttcattcacagccccaggatgacagcctctcacttaaaggctcttgggccgccctgctagtcattggcctgctt

SEQ ID NO: 282026 - DNA, 621 bp, Homo sapiens
gtgtggtttccccaggctgcagaagtgcactgtggaagcaggtctgtgtgcttgagatcagggaaagctgaccaagaagatgggacacagttgattctggagaggcagggaacagacaggggactctcctaacaggctggatcttccaggacagttgaaggacaacatccagtaggaccctagaccaagagtatagacactgtcgctatgggtgtttctctgagccctgagacttcccatgtttaagataagctggttggattactggttattgattatgttgaatcttttggtggcacagaccaacttgagaatctgaagatatcaactttctttctggagaaatgcatgtgcttacatagagacaaaatatgcctgcrcttcctagaagggcaaggacccctccgaagttcattcacagccccaggatgacagcctctcacttaaaggctcttgggccgccctgctagtcattggcctgcttgctctgagacccagtctttacccctcgtctgtagactgtggactacactccccaggctccctcgctctttcttctagggaagtttgttctattcagcaggaatgcaggcagaagtctgcagggtgggggcaggcaga

SEQ ID NO: 282027 - DNA, 572 bp, Homo sapiens
gctgatttttctgaagttatccataggaaaattcatttatgtgagaggctaattagtcatgacagtgctttgctccagacataattgcattggtcccatgcagtctctgtgggtcagcctgtaatggaatttccattacctattgtgttttggttactggagaaaaatgtgtgattggggaagaaagagggatgaagagaaaacatgaaaggctggaataccttgaatatccataaaaaccatctgtgattttaaaacttcataaagatgatggatctctaagagccagatagtcttcttggaatctgagctctgtctgcgggaactgctcctggcaggcagtgggttttgaaatccaagtttgtcagaccacagagcaaagcgagctgccccagcttggccactaggggtggaaacragacccaggaaagggagactaaatgttcttctcaactagccaccagctctcgggctgccaggaatgctgggctgtggtaaatgaatatatagatatatagatatatgggtctggtgccagaaatgtgcaggtctgcagggatgagtatgaaagg

SEQ ID NO: 282028 - DNA, 572 bp, Homo sapiens
gctgatttttctgaagttatccataggaaaattcatttatgtgagaggctaattagtcatgacagtgctttgctccagacataattgcattggtcccatgcagtctctgtgggtcagcctgtaatggaatttccattacctattgtgttttggttactggagaaaaatgtgtgattggggaagaaagagggatgaagagaaaacatgaaaggctggaataccttgaatatccataaaaaccatctgtgattttaaaacttcataaagatgatggatctctaagagccagatagtcttcttggaatctgagctctgtctgcgggaactgctcctggcaggcagtgggttttgaaatccaagtttgtcagaccacagagcaaagcgagctgccccagcttggccactaggggtggaaacgagacccaggaaagggagactaaatgttcttctcaactagccaccagctctcrggctgccaggaatgctgggctgtggtaaatgaatatatagatatatagatatatgggtctggtgccagaaatgtgcaggtctgcagggatgagtatgaaagg

SEQ ID NO: 282029 - DNA, 591 bp, Homo sapiens
accaaaccacctaatcccccaagtgttagagccaggaacagaagggggttttaagttcagggtttctcaacctcagcacaattgtcactttggctagatggataaactttttgttgtgggaggctgtcctgtatattgcaggaggtttggcagcatccctggcatctatccagtagctattctcctccattccacccccatccytaattgtgacaactaaaatgtctcccaacatggccaaacgtcccctcgagggcaaaatcgccaccatttgaacatcgctggtctacccttacaattcccaaagtagaattccaaggaatattaatttcataagcttctccccaacacaagtattctatggtcaactaagtttgagaatcactgcatattgcaccctcttttggaaattccccatagtagtctattaaaggccctaaaaagttctgcaataagaagaacactatttaattgttttgtttgacctaacatcttgcaagctttctcaaacaaaacccctttattcctatatttgcatctttcagagttcctgttccaaagaatattgtgatttatatatatgttaatatg

SEQ ID NO: 282030 - DNA, 591 bp, Homo sapiens
accaaaccacctaatcccccaagtgttagagccaggaacagaagggggttttaagttcagggtttctcaacctcagcacaattgtcactttggctagatggataaactttttgttgtgggaggctgtcctgtatattgcaggaggtttggcagcatccctggcatctatccagtagctattctcctccattccacccccatccctaattgtgacaactaaaatgtctcccaacatggccaaacgtcccctcgagggcaaaatcgccaccatttgaacatcgctggtctacccttacaattcccaaagtagaattccaaggaatattaatttcataagcttctccccaacacaagtattctatggtcaactaagtttgagaatcactgcatattgyaccctcttttggaaattccccatagtagtctattaaaggccctaaaaagttctgcaataagaagaacactatttaattgttttgtttgacctaacatcttgcaagctttctcaaacaaaacccctttattcctatatttgcatctttcagagttcctgttccaaagaatattgtgatttatatatatgttaatatg

SEQ ID NO: 282031 - DNA, 566 bp, Homo sapiens
ggcctctccaggctgcagggaactactccttttaggatggcagctccccgcttccctgacacatctactgtcatctcttcacttgcgccagttcagaaagataaaagatcaatttccagctcagatcagccagcccaatgtccctcctgaagacagtacatcaagrgaccagtttcctatcattctaggtagaaaacatgcagtgactggtcattcagtctcttgatggtctctcttgccaaaagcaggcactggagaggccatagattggctcccattctcagattgcaaacaatagaactaatattgacagagaaactggatggtatgacattctacaattttgcatggggattgaaatgtaatcataccttgaggcctctggtattccaggaatcctctttcagccctgggaacagaacagtgtcctagggatttctctaatccttttatgacattctaagcagagtgtatggatgcaggaacagccaagagtctcagccagagggcagacctggggccccctcttggtttaccttggctccagccagtccaaagaatacaca

SEQ ID NO: 282032 - DNA, 579 bp, Homo sapiens
cctggcgctctgggaaatggggggtgcagaccccaaagtctggggaagtgtcctggagacagcctggtggggctttaaaggccatgctaaagaattttggggccaggcgtggtggcttacrcctgtaatcccagcactttgggaggctcaggtgggtggatcacgaggtccggagatcgagaccatcctggctaacacagtgaaaccccatctctactaaaaatacaaaaaattagccagtgtggtggcgggtgcctgtagtcccagctactcgagaggctgaggcaggataatggcacggacccaggaggcggaacttgcagtgagcggctctgctgagatcgccccactgcattccagcctgggtgacagagcaagactccgtctcaaaaaaaaaaaaatgaatttttgaagtttgtagaacaaggagattttgaggcagggggtgttgtacagagagagctgggggacaagtggagactgaatgggtgaggctagagcttggaggctataggacaagttagggcagtaagctactgctttagtgatggcatgggagcagattcctgatgtggtcct

SEQ ID NO: 282033 - DNA, 584 bp, Homo sapiens
cggtatatccgacttgagccttaagtccaagccaccgttccactattaactcccaccaggacaagtgcagtggcctgaggggcccttctgcttccactcctgcccttactccctggccttactgttacaagagtgaacttcaccagtgttaaccagatcacacgygtggctgcctaaattcctccaatatgtcacctaatactgagaaggaaatccaagctcctcaccatggccaacaaagccctgaaaaacggcccctgccagcctccccctacccagcatttcccccacccccaccatcaccacctcatgccctaaactccactcagagtggcgtttttgctgtttcagaaacaagcaagctaatccttgccaccaggcctttgcactagctggtgctactacgtggaacgctcttcccccaaatttcctcctggctggcttcctctgagttcaaatgtcttctcctcggagaggcttttcccatccatcacaaagaaaccctcagcatcatctcacgctattgtcttcctacaagttagcagtagcttatcactgtctccctgagagcagccaccgtagct

SEQ ID NO: 282034 - DNA, 584 bp, Homo sapiens
cggtatatccgacttgagccttaagtccaagccaccgttccactattaactcccaccaggacaagtgcagtggcctgaggggcccttctgcttccactcctgcccttactccctggccttactgttacaagagtgaacttcaccagtgttaaccagatcacacgcgtggctgcctaaattcctccaatatgtcacctaatactgagaaggaaatccaagctcctcaccatggccaacaaagccctgaaaaayggcccctgccagcctccccctacccagcatttcccccacccccaccatcaccacctcatgccctaaactccactcagagtggcgtttttgctgtttcagaaacaagcaagctaatccttgccaccaggcctttgcactagctggtgctactacgtggaacgctcttcccccaaatttcctcctggctggcttcctctgagttcaaatgtcttctcctcggagaggcttttcccatccatcacaaagaaaccctcagcatcatctcacgctattgtcttcctacaagttagcagtagcttatcactgtctccctgagagcagccaccgtagct

SEQ ID NO: 282035 - DNA, 637 bp, Homo sapiens
catccctgttatccctgcagccagcgcagatcttggaacacagagcagctccacacagaactgaaccagcaacttctccaggagcaaatgttttctgagcactggcctataccaggtgcatgcgaagggtgcataaggccactgagatgaatttgacatatccaggggcttcagaggatcacagtctcttgggtctgacagatgtttaagaaatccccatcatgtagagtacccacagcccacccccctactccgccccgccacagccaccctcctcccatccttcctgggtcttggccacacttgctcttccttctgcctgcaacatggccctttcctgaaatctgctccaaactccccttaacaaagagctttctctccatgcaccctccatagcactattttttcccattccctgtttcatttrtgcttgtgcacttatggccacctggcttctcctgtttccctatttgtcctgtctgtggtctgtctccactactagacctaacccaatgagggcagggcctgcatctgcttcgttttctgcagtatgcccggtgcagaggacagcgcctgacccatggtaggtgcacagtaaacagtggttacccgaatgaatttaagaatgagaaagtaa

SEQ ID NO: 282036 - DNA, 554 bp, Homo sapiens
gcctgcactgtatgaatgcacgcttggagaagactgtctccctgctgcccagcacccactgtccacgcatggttactattagaaagttaatcatggaaaatgctgaggtctctttccccagccctgcacctctcagctccacactacaatttcatcttccatatagtgttaccagacagtgccattggctccgtccactcccttgtcccaggcctttatgacctttccattcaagccacacaccaygtctgctccacagagctgtaagacacactggcttcagcccgcctggcctgggccagcacgctgacattttccatgagtccacatcagccagtgaaatgctcagaggggattaaggcaaccttctccatcacccccgagttgctttaggaaagagaataacagcactgacccctccattggcagctggtgatatccacacaccatctctatccagagatgaaaggctccttctccatccttgacttgcaaaacagggattatttcccacctcacgctttctgaaatatcaccaaagatgcagctgtgtt

SEQ ID NO: 282037 - DNA, 573 bp, Homo sapiens
acattacttccttgcttaaaacacttccatggtgcctatgcaaaaatgtaaaatactttctctggcacacaaagcccacatgctcttgccctcctctccagcctccttcatgccagtcactggcttggccatccaattcagactccctggcttcacttctccttccttgactgtgcgtagctctttcttgctttgtagtgagacatacactcctccccgtctttgtccagttaattcctgctcccttttctggtctcagctcaaatgttgcctcctcaagaaaaactcccctgactgcttcccagtacaatttattcccactcctgcccccttctctcctatagttccctgttctttttaaaatggacttgtcmatatgcatgacgatatgtttttgtgtttattgtcctcgctctctgaccatgtaaactctatgaagccagagagaatatcttattctctcgaccagtttgcacaatgcctgacacctagcagatcctcaacaacctttgttgaataaatgtgtccatttattcagttctccaatgtctgacttcattcaatcacttataa

SEQ ID NO: 282038 - DNA, 613 bp, Homo sapiens
gtagaactctcatgcacaatcttctttggttgggggcagaggaggggtaacttggagcaggtgatagtgtggctcccgacaggctagccactttacaaggattcaccttctgtcccttcactatgtatcagaagctacactttatggccacgttttgtttcctcttttcttcctcttcctctttactgtacctccatccatccttttatagtgccgctttcaccttggtgtgtgaacttgccgctgacttcccaaatgagttctgagaaccgatttcctgtgctttgtgctctgtgatggttcagsccactcatcacacctctcatggagatctctggcactttggtgggccctacttagaaaccatcttcctccttgatccttcactaacaagttctataatcttaacctcccagggtctcagttatactacctgcaagatgggcagaagaattccagcctagatccccacacaaatgtaggaaatccaaagacaataatatataagggcttggagaaaagaataaaactcagactgcagtgaggtgaataattcagtgcatcctccttatgcagctggagttaattccaaggaagcactttgcaaattctc

SEQ ID NO: 282039 - DNA, 557 bp, Homo sapiens
ctgttttacaaatagtttcactttttccagttctttcttagaactgctgaatatctcaatgaagaaactttaaaccttttcagttgccaagtgcttatcttcccaatagggagtgaaaaacccaagccaattctaatgccagggaagcagtagtgacctttgtctgagtgggatacccccaggataactcagtttctcgaggagttaatcaagatatcacttacgcttatgtttacggacagctgttttgaagataccattaactattctttcagagtcattttaagtcattaagagtaacttaaacactaacttcttcaaatacattaatacaaactcctttttagctaatgatagagaaaataaagccaatgttcaacaactaatttcaatataatacagatgctccttgacttatgatggggttatgtcccaataaacccattttaagttgaaactgctgtaagtaaaaatgcatttaatatacrtaacctactgaacatcacatcttagcctagcctaccttaaacatgttctgaacacttacattcgcctac

SEQ ID NO: 282040 - DNA, 576 bp, Homo sapiens
agttactttgatttgctgtgagaattaaagagctaaaatatatacaaagtgccccagaataccctggcagatagaaagtgccatggaagtgtttgctattattattatcttcattagcaggaccagcatcatcgaccaagccaccatgtaaaacacatctgctatgttctcaaagaagtacaagttactgtctccacccttaacaagtttacagctcatggttgagttagaaatacaagtcacactcctctccccttttcacctttccttccttgttctgtctcctcctgtctccttctttcttgcccctttgccctttcctgctctcatcctttgcttttctctttctttctacagcttcttcctccttccctccctgggtcatcatcttctttcctttttctttctctcctttgtcttatcttctccgtctcttttagaaacagaaagtgttattgtcaracaagatctcacatgacccccaatacatgaaatacaccaggaatttccctagatgaagcaggagcccacttggatagatttcttcctctcctgaggcactcccctagaatccca

SEQ ID NO: 282041 - DNA, 444 bp, Homo sapiens
aaagcagttaattcatttttttacttgagatattctcaaggtcagtctagttatagtctcattctttgcacatatgtggggaagtaagcacccttagagaattcttttctagggactctccctccactgcaaccccctccccaacacacacacacacacacacacacacacacacacacacacacayacacacagagtagaagtggcactgggtttaaatgactaaaaaaataacttgtctcaaggatactgggaccattttgagttttcctgtctcagggactttggttattccaggcatctgcattctgaagaatagcaatttgaggcctcaagaatagtctagatctacaatgagacaactcagctaaatcaacataaatccaatgaagaagataggtgcagaatccatcagaatcttgggagaggaaatctgtcactgaa

SEQ ID NO: 282042 - DNA, 625 bp, Homo sapiens
tcttcaatttcaaatcggatttcagaagtctcattaaagcagtagtggtactttcccgcaaacaagttaactcccatgatgctgaaaatcagccagaagatgagacacaccagcagcacattcatgatggaggggatggcgcccaccaaggcattcaccaccacctgcattggaaggggaggttgctcagtgttgggtggaaatgagagcaagcacattttttgatttccaggaggggaatgacattgtgtggcttgttctgtatggaaacattacattccctttggaattagagtaactggacagactgacaagtaggaccaaaaatttctaagtctaggactatattgaaggaattttaaaaagttacayctttattttgactaacacaaattccccagccaagctgacctaggtcttctttcctatgcatcagcctgggactgaaaaattatttcttagtccagtctccctcttcctcaattcataaaatatgcccaatgggaaaatatgagtaactttcagcttgctagttgcctttcaacagacattccccctctgaaaaacaaggtataattgttcaaaatcacagagaactacccgttgtggttaatagagagccagt

SEQ ID NO: 282043 - DNA, 1099 bp, Homo sapiens
agacatctggcagaatgagatggcatcaccgccaaggcagggaatgaatgcataacagggagaccaggaggtacagagaaaagctgctagtacacaaccttgctagggctggcaggatcatgggaaaggctcttctgacctcagctcatgctctgtgtctgagatgggtccataccagcagtgctacccatgccctgaatccttgctttcttgggatcctgtagccaccacggsatgagttgatgtctgagtgtcctacacacaggcaagaggtgggcttccctgggtgttcctgatttgttgccgaggacatcactgatgacaaaagtcttgaatcccactaccatctggcctacattgtaagtgtgaggtggcatgtactccatagtaatgcaaatatcgtgagcattcagtatgctgaaccttccccatattcatcattgtattttggtaaggtattctcactttcttctgtggagtgttaccgccattattatatgtatctcaaaacctattataactggagcagtgtgtctgtwcatcttcccccccaccatctccctctcacacccctttgaaagcttaaattatattttataaaagtactttatatattgttcctcaaggaagagatcaatatacagttacctaccccattcccatatatgcctttwaaaaaaaaatcactttactaattaccgagtagcatacagaagtaaaaccaagttttaaaaaaatgcaccgcagttctgaagatagaattcatttttctcatctggtagacatagctttgcaggtcttcatttaatttgctggaagaaagttatttaatagatcagtaatagactttttaaaagtcttgtccattcatactgagctatctgatattttagtaatagaagattctttaataaaaaattattaggagggaaaatcctagcatttacctttgtgtatctgaagatacaatgctaactttttaattctaatataatgcagatgtcatttagaaaaattcacgttttatacatatacatacattatatatacatttatatgtatacatatatacatacatacatatatatacacgtgtgtg

SEQ ID NO: 282044 - DNA, 479 bp, Homo sapiens
atcttttaacaaacttaggaagcttccaacatcttcaagcytgggaatacacagtgttttaatttgatgaccagcaaactaaaggtcaacctgagaaagttgattcttgacatacttccaacaagggtcacttgtttcatcccaatggactcaaagttaagaattaaaaacctcaactgtagtaaattacatgtttgaaaaactgagagttctaattacatgtacatcccaaatgccagtggggcccactctattcatgtactcatagctttatgaaaaactgtttgtttggaatgtggtttttaaaagtaatttaccttcaggtttagttgaagaatggaatatgtgtgagaaaataattttccaacttttgttgactcagcaatgaaaaggaaaatatgtttatatgaatatggctacttgttgatctcagacacttgaaatttcatttgctaaatgctaaatccaatgataaattt

SEQ ID NO: 282045 - DNA, 1205 bp, Homo sapiens
agactgcctgaaactctgaacaatttcacctcccttgccctttgccacaggggattcagaaacctacaactgagagcagggaaatatacggacaggcttggcacgtaggaacattacttccttcactggagtgtagttctccagacaactttttaattaygattattcccttccattgcactcctggaaatttcaaagcactttctaaaacatcattttttttatgtcagtcatacatttagaggtaaggggttgatgggattaactgaaaggctaatgactgtctcaaaagcacatgctgttgctagggaacccaagctcctgctgctctctaatcaccagcgtgttccgtggaaatcaaactgctcagggtgttattaaaatgaatggcatcgggttaaaggcattcttgcttatgttgtagcatcctggattattatcgattgcctcacacccacatatcttgttttcctaatttgatttctgtatttgcgtcactgccagggacactcagactagaccagtcagttcacttcctgtttctcagaactggtttatatttggtctcgtagcactagctggtaaaacattatcaaactgatwagactgcctgaaactctgaacaatttcacctcccttgccctttgccacaggggattcagaaacctacaactgagagcagggaaatatacggacaggcttggcacgtaggaacattacttccttcactggagtgtagttctccagacaactttttaattatgattattcccttccattgcactcctggaaatttcaaagcactttctaaaacatcatttttttwatgtcagtcatacatttagaggtaaggggttgatgggattaactgaaaggctaatgactgtctcaaaagcacatgctgttgctagggaacccaagctcctgctgctctctaatcaccagcgtgttccgtggaaatcaaactgctcagggtgttattaaaatgaatggcatcgggttaaaggcattcttgcttatgttgtagcatcctggattattatcgattgcctcacacccacatatcttgttttcctaatttgatttctgtatttgcgtcactgccagggacactcagactagaccagtcagttcacttcctgtttctcagaactggtttatatttggtctcgtagcactagctggtaaaacattatcaaactgat

SEQ ID NO: 282046 - DNA, 604 bp, Homo sapiens
atgggactggagatgattttagggtggaggtgatgtgaggcctggatgctgtatgataaacaggactctgaaaggcagagaggggatatcaagagcagtgcaggctgagatcacaagrtttaaggaaaggggagtgaacatccacacaagatgatacagtgttggtggctaagtgggaaagctatggttgattaaggctgccttaggagaacctggttatttttattaaagaattgggattttgtcttatagatcctggggaaattgatgattttgtttaaggtataacccctttctaagatacttgatgaaaagaaatccacaagtaagaatccttgacccctgaggccacaaaataaatatataacatgctcgtgggatgcttcttaattaactttaaaacagaataaatattacagtatctatttgtaaacattaatcttatgaaaagggcaccctgtgatacggaaaaaatattccagaattttaggtacttcactctgaacatctaggtacatgttcaatgcttctggtcaacaatcaaatgaaaagaaaggtaaagacttaaaaggaataactaaataaagcatttgaagaaaaggtt

SEQ ID NO: 282047 - DNA, 1785 bp, Homo sapiens
tatacagaagttatttggaggactccagttctctctaatcattaccctctgctcctgcttttttaggagcagctataaattcaagaagaggtggaaaatcggcagactgccaaccaaattcaacccacagacatatgttgttgggcctgaacaatgttttggaatgttttgaatcaatttccaattgaaaaatgagggttgttacttttaaaaaaaaacagaaaagtatgtctatatgtcttctcttgaaaattcataaaatgtggcaaactgatccaggtgtgtatggtaagagacagctgcgggtggacagcttctacatcctatagacaaggcatcatatagacgttctcttgtctacaggtcctctcctacccacttatcttgtatagatatcccaactggcctgcaggcattcccgactgtggctcgtagtgtcaatcacccctaggaasattgctcctctgatgtatgggttgaatggtgattgtgctgcctattaagtcaatattattttcagtatttcattatttttaaatctaagctggtaagatcgcaaatgaagagwctttgctatccttagacttttcacacataaaagaatatctcttttgcctaggctagtttgaactcattttctatcgtttgccaacaaagaagttttgcacactctaagctcaaatttagaatacttacaagggcattttaaagwctaattatgtagcatttattgtacagtgtaaaaaatatgcttttagtatccaaagaattaaattcagagtgttcaatgacttttaaaatacatctattaaaaactaattatgttaaataatttctaagtgtatgggaatatcaaaattgcctgaaaatgtagtgcaatatttttttttttttacctgctgcaagaaaggtgtttatttcttcaggactatcttaaagaaatggatacatcactgggatggatccttcatatgagacacttccagaaattctgtgtttaaatgccacaggcaggaccaatggttaacaaaacactctccctctaaagtcttcccccaaccatttaccatggcatcagtctcctcacttgagatccaacatttagctaatcctttgggccctgtctgctgaggaaacatattaaaattccactggggggagaaagggaggcctggctaggaawgctatcaggacactctgcatattgactttggaagcaaggaagccacctccaattcacagagctggtgcctctgcctcattcatgaaaggacccaccaaaacctgatccagttawcaggttcatcaggccttgggagggttgcattagaacttcagaaaacacagcccagagccacgccgccatctgagcatctggggaaaaggcaggtgttcatcatgctcgtcgaacacaccctgtggcatttgctgtgactgtggctctcatacggatgtgtccactctggcaatttcctaagcagttctgaaacctgctgaagagcttttgctctagctgagtgattctttgtgtggtctgacttaaaaagaaaaaaaatatatattataataaaggatccaaacaatatcattttggcatgctgctgaatgccctcttgtgtcaaacttcaacaaacccaagacatatttgtaaggggtctcagaaataactctaggatgtgcatctttattgagccatggagttcaagaataagctcctggattttcaggcttggctggttttgtgagatttgcagcttaatcataaaaggaagagaggaaaagctt

SEQ ID NO: 282048 - DNA, 1205 bp, Homo sapiens
gctatcaggacactctgcatattgactttggaagcaaggaagccacctccaattcacagagctggtgcctctgcctcattcatgaaaggacccaccaaaacctgatccagttaacaggttcatcaggccttgggagggttgcattagaacttcagaaaacacagcccagagccacgccgccatctgagcatctggggaaaaggcaggtgttcatcatgctcgtcgaacacaccctgtggcatttgctgtgactgtggctctcatacggatgtgtccactctggcaatttcctaagcagttctgaaacctgctgaagagcttttgctctagctgartgattctttgtgtggtctgacttaaaaagaaaaaaaatatatattataataaaggatccaaacaatatcattttggcatgctgctgaatgccctcttgtgtcaaacttcaacaaacccaagacatatttgtaaggggtctcagaaataactctaggatgtgcatctttattgagccatggagttcaagaataagctcctggattttcaggcttggctggttttgtgagatttgcagcttaatcataaaaggaagagaggaaaagcttwgctatcaggacactctgcatattgactttggaagcaaggaagccacctccaattcacagagctggtgcctctgcctcattcatgaaaggacccaccaaaacctgatccagttaacaggttcatcaggccttgggagggttgcattagaacttcagaaaacacagcccagagccacgccgccatctgagcatctggggaaaaggcaggtgttcatcatgctcgtcgaacacaccctgtggcatttgctgtgactgtggctctcatacggatgtgtccactctggcaatttcctaagcagttctgaaacctgctgaagagcttttgctctagctgagtgattctttgtgtggtctgacttaaaaagaaaaaawatatatattataataaaggatccaaacaatatcattttggcatgctgctgaatgccctcttgtgtcaaacttcaacaaacccaagacatatttgtaaggggtctcagaaataactctaggatgtgcatctttattgagccatggagttcaagaataagctcctggattttcaggcttggctggttttgtgagatttgcagcttaatcataaaaggaagagaggaaaagctt

SEQ ID NO: 282049 - DNA, 466 bp, Homo sapiens
aaataataaaaaagaatcatgcaaaacctaagactgtattattgcaaggttaatgaatgaaatcacaagggctatcctgtcatctagccagctggaagttctgggagatccatccacccaaagaatccaaattggcgtcagtttcatctgtggtttggcgccatcttgtggcacttgtttacattagcttaattagagatggggaccatkctgcctttcgtggccacctggtacttcctgtagggaggttgtaaattcagaaatctcacagttacatggctctatagttagttggagactcggttacttcgatcagccatatatgaagagatttgggcagaaaaaaatactggaaatgtagaacacactgtctcctgagtcatgcttcctgtggttgagttagcccacttcatgacaaaagattgaatagtagagaactaatgccattctttttatatctgagttt

SEQ ID NO: 282050 - DNA, 537 bp, Homo sapiens
ctagttttccaggtcattataagggaatgtatgtcatggtgggaagagagaaccatgttttatttaatagtttattaataatttgttttacaacttttaattatttggtaatatgatatatgggtctctatttttactcctgctctgggctctgcaaccgttcaaagtggatttaggaggtgagtggggaaaagacagcatgattttcctaggtctgtaataccagatatcatctcgttcatttggacacagaagggcaatcgaactttgatatattytcatacagtttttcatcttcctccatgcttgtctatagaccacatcaaatgctgccaactactacttctaagttcctgatctttttttaaagaaaaaagctcaagagagagaagttggcaaatggaaattagaatcaaagtaaattaagacatataatctgaaattaatcaatcaacgtgatgaatcttgaccaaattaaattcaaatgtaaaatctaccaaacaaagctctcctcaattcaagcaagaatctaaaact

SEQ ID NO: 282051 - DNA, 507 bp, Homo sapiens
gctgttggtccagggaccacactttaagaaccactactcaagacatcatggtgagattcaaaacagagaaatgctgtaagtagggcattcatctgaagggagcctagggagatttttttttttttttttttttttttttaatgacagaaacttcaaacaaagattgggctgaggaraaattgggctgaggcagaagaaaatccctacacaatactgatgacccaaaggaagaaaggctttttgttttgatgcctttttaaaactctgagtggaagcctgcctagcagagtgacctgcacctaactggggtagctaaaaaagagccgacatctggcacctgataggactattgtgaagattaaaggagtttgtatatatacagatcaatgagaaggcacctagcacagagtaaacgcttaacaagttacttactattattatttatttatttattttccaggacatgtttatagctaaggagttgttggcataggatggctcagatat

SEQ ID NO: 282052 - DNA, 507 bp, Homo sapiens
gctgttggtccagggaccacactttaagaaccactactcaagacatcatggtgagattcaaaacagagaaatgctgtaagtagggcattcatctgaagggagcctagggagatttttttttttttttttttttttttttaatgacagaaacttcaaacaaagattgggctgaggagaaattgggctgaggcaraagaaaatccctacacaatactgatgacccaaaggaagaaaggctttttgttttgatgcctttttaaaactctgagtggaagcctgcctagcagagtgacctgcacctaactggggtagctaaaaaagagccgacatctggcacctgataggactattgtgaagattaaaggagtttgtatatatacagatcaatgagaaggcacctagcacagagtaaacgcttaacaagttacttactattattatttatttatttattttccaggacatgtttatagctaaggagttgttggcataggatggctcagatat

SEQ ID NO: 282053 - DNA, 507 bp, Homo sapiens
gctgttggtccagggaccacactttaagaaccactactcaagacatcatggtgagattcaaaacagagaaatgctgtaagtagggcattcatctgaagggagcctagggagatttttttttttttttttttttttttttaatgacagaaacttcaaacaaagattgggctgaggagaaattgggctgaggcagaaraaaatccctacacaatactgatgacccaaaggaagaaaggctttttgttttgatgcctttttaaaactctgagtggaagcctgcctagcagagtgacctgcacctaactggggtagctaaaaaagagccgacatctggcacctgataggactattgtgaagattaaaggagtttgtatatatacagatcaatgagaaggcacctagcacagagtaaacgcttaacaagttacttactattattatttatttatttattttccaggacatgtttatagctaaggagttgttggcataggatggctcagatat

SEQ ID NO: 282054 - DNA, 660 bp, Homo sapiens
attcaatgcaaggagacacatgtcccttctcattggaaatatgaagacagcagctttattttaccctgtgggaaagaaagcaggtttagtgtccaaaagtagtggaggaaagttggtgtcatcactattcttccttcacagagataatgtaagagcataaggcaagaacagcactggtttcttcacaaaggaataaaaagagatcagtactttggtcatttatgtttatggtactgtggaaaggtacttacacaaaacaaaactaccatttctcaacactttcaaatacattttaaatctaataacatcttggaatctcagaaaaaaagtttattgaaatcacctcgtaagggatacataaaaaagaataatgattaatcatttggcttcyttgatttaggaagtaaaagcatgatttatttccgtttgattttcagggtttctgacatctaaaacattttgatacttacacatttatacttaattttgttttataatttccaaaaatttcactaaaatagtgatatataaaataatttggacataaactgataacacgtctgtgtcagcccatgtaatttttgttatcaatggtttttgcacatggaaaactgcaccagatataacagtgactatagtgcttactggaagcaacatgct

SEQ ID NO: 282055 - DNA, 1119 bp, Homo sapiens
ttcttactttactccttctatgctaagaatgacaaattacctccttgtttaatagcacctcaatcttcatctttatggatacttcataaacgaaagcagtgcagccaaccgtaaagactatctagatgtctcgcaagatggttcacagccactatgaataaatcagggtctaagtctggctctcagccatggaggcaataaaaattgactttgtcaaaaacagaggacaattctgttttttagtggcagactcacattaaccaaacttgaaaacctgrtatataaaataagaatgccaacctatttatttatttagacaggacctcgatctgtcacctaggctagagtgcagtagcacaatcatagctcactgcagcctcaaactcctgacctcaagcaatcctcctgccttggcctctcgaagccctaggattacaggtgtgggccatcatgcctggcctccagtgtatttatttacaatgagatacattactttcatatggactgagataattgtagtgatgtaatgagcacgttcttttcttcaagcaggtttaggggaaaacaaattgtagtwaatgcttactatatttcagatgccatgtctaagtcacacactctttaaaggacctaatatcctgctctaagggcaaaatgataaaacaagcacctcttctttttttcctattgggagggacaataggaaagcagagcttctaagatttaaatggtgtctactcaggtttgccagtgcaaagacaaaatcctaccctcaaggattctgccaacgagagagagagagagagagagagaaagatactttcwtcttaatcattttatcttacttcatcttaccattttttttcctagggaatttctagcttcgtgtatataaagaatgaacttatttatttaatagcctgatgatatgttccaaatgatatacttgaaatacaaattcctttggcccaatggccacaaacttttataacagcagaaatttctaagtgcaaattatatacgatttaacacgtttcccatcaaatacactttgaaatttatatgttcaaatagctcaacagatggagagaaatctaaaagtataccagggtttaggct

SEQ ID NO: 282056 - DNA, 588 bp, Homo sapiens
ttacccttccgccatgattgtaaatttcctgaggccttcccagccatgcagcactgtgagtcaattaaacctctttcctttataaattacccattcttgggtatttcttcacagcagcatgagaactgactaacacactatgtctcccctggattgagcaaatgagggagccyagcaattgtcaggcagctaggatctgtgaggagtgcttagacctacacttactatttcctgaattaacagtctagaagacaggagcctagttatacagacagggtgaccataaaatgtgtcatctaaaccaggattcagtttgttaataatttctccacaacgacaggtataaatcaagatggttccaggtaaactgggatgcacagtcactccacttctaagggtcaagaaacttctacatttaatcagtctattcaattaaattgttcatgattttgttgcctaagtgttagaaagttaaaatgtgaaatgacctatcaattagacaaagggcattcagctaagctgctccaattactggccttgataaatccatcaaccgaaatctctaatgattcttgttgaatccttagt

SEQ ID NO: 282057 - DNA, 606 bp, Homo sapiens
taataatctctgcttcagaaatgtatataaacttttgtcctaatcaaatctaactcaaacgtcacttcctttataatgttctctctgttttcacatgcagcatatacttccattmtactctgcacctatctctacacttgtaatgtgaagtagccagatatatgtggacctgggtcatctgtcatatttaattgtgtactatataaggacagatattgttttgtatggttctatcaagctacccagtatctacatatactgccctccataggaggtaatacatatgctgagctctactcatttaaaacttcaatcaaggtactattggaatttcttagttttacaacataactatgtcctacttcaagtgacctattaaaatagctctcaatagtttgctttaatacaactgcctttaatagcttttaaatttagtgtttgtttgagtagactttatggtgatttgtaaaatgatatggatatagtatatagaaaattttaacagaaatgtaaataataattataatttagggaaacggtgccctcttgctctatttcacacacacacacacacacacacacacacacaggcacacatatacacac

SEQ ID NO: 282058 - DNA, 488 bp, Homo sapiens
aataggaacacttttacactgtttgtgggactgtaaactagttcaaccaatgtggaagtcagtgtggcgattcctcagggatctagaactagaaataccatttgacccagccatcccattactgggtatatacccaaaggactataaatcatgctgctataaagacacatgcacacgtatgtttattttcattttttatttttattatttttttttgagacagagtctccctctgttgcccagattggagtagagtggcgcgatcttggctcactgcttcaagtgattctccagtctcagcctcccaggtagctgggattacaggcatgggctacctaccrtgcccagctaatttttctaatttctgtagagacagggtttcacatcacgttggccaggccagtttcgaactcctgacctcaagtgatctgcccgcctcagcctcccaaagtactgggattacaagcatgagccaacacacccagcca

SEQ ID NO: 282059 - DNA, 623 bp, Homo sapiens
acagctatatctctgtaactgttttcagttaaggccctaaaaatcaatgggattgtttttggtacattttaatctagtttcagcattgtcaggtaagttggaaatgtttgttatgatgttgtctaacctactatgattgataggctattttttgctgattgaatccctatgatgggagcaagcattttataatgattaaaaaacaaaacaaaacaaaatactccacaaaaatacrgagcaccttagcaaaacttaattgagattcaaggtctcttgatactcaaatttgattaatctcatcaacaaggaagtgatgtaatttttatgtactgcagaaacagaatgcaaaatggggcatattgatctaagttaagatggaaaattccacaattcagtgtcctcatgtagaacataaagcagtatgcaataatttgagcagtaataaactagtctgtagatattctaaatttattttaatgagcaaattataagctctccacaaaacattctgtgtaatcatctatgatctataatatagtcctaagtcagcttagcaccaatgatagaaattctttctttctctctcacatgctctttctctgcatatatattaaacatatgta

SEQ ID NO: 282060 - DNA, 501 bp, Homo sapiens
gtttcaccatgatggtcaagctggcctcgaactcccaacctcaggtgatctgcccgccctggcctcccaaagccctgagattacaggcatgagccaccatgcccagcccagaactagtgttttgaaacatttgagtgtatgtgaatcactctgagagttaaaaatatatatttttaggtcccagattttggaatatggattcaggaagtagcagataggactctggaatctgaattttcctgacacattccaggtgaccctaacacagggtggacctcatcctacactcagagaaatactaacttggtcttacattaatccctaggatggctgagtataatcacctcaatacacctatgttctgaaactgtctctggaaactgaaaatcggtctacacagtattggttgggagtrtgtggtacgtgtgtacatccactatgtatctgggacatgcctttaatttggatatttttatgtcaggtattttcaaaggcgttcca

SEQ ID NO: 282061 - DNA, 579 bp, Homo sapiens
ttatctctcaaagcattatttttagggtataattctgactcaagattgttatgattagaagcatttgcaattcrtagcacatgaaattctaatggtgccaaatagtgttcaaagccaaaattgtacttatcacagattttgtaactaattattctttacatcagacatatgtaaacaatacattaacttactaatccataaaacttactaaacatcaaataattgaaactagtttttactcttttacttaaaactatgctgaagaaccaggtagttggcattaaatcagagcaaaaatagactacctttgatgctgttctcttcaagaacatttaggtcataatttcattctaatgtatcacggcatgaccctatgcaagcaaaatggagactcaccatagtccagttctcttaatcaaaggataaagacaaaacccaaagaacacttcttttcaaaatttatatgtatgttacgatcacaactttggataacaaaggcagaaacccattctcaaagaaaataagtttatctggggtctcaaaatggaaaatgtaaacaagagattccaaaactctcat

SEQ ID NO: 282062 - DNA, 579 bp, Homo sapiens
ttatctctcaaagcattatttttagggtataattctgactcaagattgttatgattagaagcatttgcaattcatagcacatgaaattctaatggtgccaaatagtgttcaaagccaaaattgtacttatcacagattttgtaactaattattctttacatcagacatatgtaaacaatacattaacttactaatccataaaacttactaaacatcaaataattgaaactagtttttactcttttacttaaaactatgctgaagaaccaggtagttggcattaaatcagagcaaaaatagactacctttgatgctgttctcttcaagaacatttaggtcataatttcattctaatgtatcacggcatgaccctatgcaagcaaaatggagactcaccatagtccagttctcttaatcaaaggataaagacaaaacccaaagaacacttcttttcaaaatttatatgtatgttacratcacaactttggataacaaaggcagaaacccattctcaaagaaaataagtttatctggggtctcaaaatggaaaatgtaaacaagagattccaaaactctcat

SEQ ID NO: 282063 - DNA, 583 bp, Homo sapiens
aaaactattcttttcaaaatattactgctcattgacaatgcacctagtcactcaagagctctgatggagatctgcaaggagattaacgttttcatgcccgcaytccatggatcaaggagtcattttgatctgcaagtcttattaagaaatccattttggccgggcgcagtggctcacgcctataatcctagcactttgggaggccgaggcaggcggatcatgaggtcaggagatagagaccatcccggctaacacggtgaaaccttgtctctactaaaaatacaaaaaattagccgggcatggtggcgggcgcctgtagtcccagctactcgggaggttgaggtgggagaatggcgggaacccagaagatggagcctgcagcgagctgagccgaaatcatgccactgcactccagcctgagtgacagatcaagactccgtctcaaaaaaaaaaaaaaaaaaaaaaaaatccatttttagggctacaggtgccatacataatgattccgtgaatgggtctgggcaaagtaagttggaaaacttttggaaagaattcaccattctgaatgtcattaagaacataa

SEQ ID NO: 282064 - DNA, 583 bp, Homo sapiens
aaaactattcttttcaaaatattactgctcattgacaatgcacctagtcactcaagagctctgatggagatctgcaaggagattaacgttttcatgcccgcactccatggatcaaggagtcattttgatctgcaagtcttattaagaaatccattttggccgggcgcagtggctcacgcctataatcctagcactttgggaggccgaggcaggcggatcatgaggtcaggagatagagaccatcccggctaacacggtgaaaccttgtctctactaaaaatacaaaaaattagccgggcatggtggcgggcgcctgtagtcccagctactcgggaggttgaggtgggagaatggcgggaacccagaagatggagcctgcagcgagctgagcygaaatcatgccactgcactccagcctgagtgacagatcaagactccgtctcaaaaaaaaaaaaaaaaaaaaaaaaatccatttttagggctacaggtgccatacataatgattccgtgaatgggtctgggcaaagtaagttggaaaacttttggaaagaattcaccattctgaatgtcattaagaacataa

SEQ ID NO: 282065 - DNA, 590 bp, Homo sapiens
ctctgctttttactttattctgccatttttttcttcttggattttgaaattctactttgttatacccttttaagattgtcatgccttgttacaaattggcctttttttccccaataaaatgaccatttttatctgtgttagtatcctttgtcttaaaatctacttttttgatattcatatagccatatcagctttcttttgcttagtgttttcatgctgtatcttttactgatttttttactttcaacctgtctgtgttatatttaaaatatgtgttgaaaacagcataccactgaactttgctctttatccagtctgacaatcttaagagtagtgaaaatatacacccacaaaaagacctatgcaagaatgttcatagtaaacttttttatamtagttaaaacttaggaacaactcaaatgctcatcaataggtaaatgaaacattattataacatacttatataggagagtgctactcaacaacaaaaagttatgatatacttacatatgcaacaaaatggttaaatctaaaaaaaaaaactgttaagtgacaaaagccaggaaaaaaagtaacatgctttatgattc

SEQ ID NO: 282066 - DNA, 469 bp, Homo sapiens
gctcttacaaaatgaacagtctccaacagcatggagagattttccaggaatcatcatataaacttttatatgacagtgctaccagtcatataaaagtatagcaatacaattattacatatagccattatatttgataataataaatgactacattactggtttatgtatttactatagtgtactttttgttattttagaatataccttttctacttacttaaaaaaaattcctataaaaaagcctcaggaaggtcctttgggaagtattcaaaaagaaagcattgttatcacaggagatgacaacttcatgtatgttattgcccctgaagaccttccagggggactagatgtagagatggaagacagtaatattgatgatcccatcatcaatatgtgggcytaggctaatttgtatgtttatatcttagtttttaaccaaaaaagtaaaaaaagtttttaaaagtttaa

SEQ ID NO: 282067 - DNA, 513 bp, Homo sapiens
ccagaacacctccaatgggtragctccactcatggtaagtgccccatccacaggtgtagtattttttatctatctatctatctatctatctatctatctatctatcatttatttattttgaggcagggtctcactctgtcaggctggagtgcagtggtgtgatcacagttcattgcagccttgatctcccaggctcaagcaatcctcctactttagcctcccaagtagctgggactacagacacaccaccaggcatgcaccaccatgcctggttaattttgtaaaaattgtttgtagagacagggtctcactaaagttgtccaggctggcctcaaactcctgggctcaagtgagcctcccaccttggtctcacaaaatgtacttttagccaggtgcggtggctcacacctgtaatcccagtgctttggaaggccgaggcaggtgcatcacctgaggtcaggagttcaagaccagcctgaccaacatggagaaactccaattctactaaaaata

SEQ ID NO: 282068 - DNA, 739 bp, Homo sapiens
tggaattattctgagcacccctatttcagcttgagtttgtattctcacctctctattgtagctctccagaaatattcgggtagtattcttgcatttgagtattcccatgcctcaagattgttccttaaatatttcaagggtctattataatccatacgtaaaataatgtgacaatgttcactcaagaaaaatgtcaaactagtatttaagatcatttttttctggcctccaaaattcacgttcttcctttgctaaccactaagcttcccttaatgctggggataaaactgcagcaataatcactgtttcccataaatctacagtcccataaggaagggggtacctctcacagcagcacactrtgcttcaggcaggccgaagataactccagagtcaaccaggcaacaatgaagctttgttacaaaattaactccctcctaacgaccaaaaggataagaagagcaaatgcaaatcactcaattaaatcagtcaaacaaccagtttaataacaggtagagatttgtggcctgaggagaacatgaattaattatgaaaaattgacaaagaaaccaaaattaagaagcaatggcctaagttctgccaaactcagagatagtctatgactcagacagactggttcaccagcttcttggtaagttggaggagtttcataaaacttcattgttctagttcataataaggtggagcgtgaagtgttccagttgttttcagcaacaag

SEQ ID NO: 282069 - DNA, 1131 bp, Homo sapiens
acattatgagactttcaaagtcagtaattactcttagattgaatactgctcagatgttaaaacgttcatcccagcacaatggaaaatattcttgcccaattattaagtaaacttgaaaaggcatgatattaatgaaccgcacattctctttttcattctagaaacaaaatgcagtttccagacccaagatggctttttgagacaaaaacgtgttctcctgtgtgtcaggtttctcctggggcctggaatttgcctatcttgattgcagaggcataaagtagtttgctattgaaccagaaatcaattacagtacagttcacaaacattagtataccttgagcatcaagaaaaagccagttttccaatttgtaaaatgatgggaatggaccatatgatctccaagktttctttcatgtctaatatcctaaaacctatgagatttcataaagtcataattcgaaagtcataaaacagcagagcgattggaaagaggagtagtaacagcaaattctggcactgcataaacagtgatgtcagaaataaacttaaatgccwgattacaggcatgagccactgcacctagccaggatccacttcttacactatattgtattttgataatatagagtaaaatgcattgatccattggcagatagaaatgaagtcagaaataaaaggcattcaaccccacacaaaactaacctgaggcaaccttctactctaatgcccctacgttcagtgcataagaaatcatgacttggcagggtgggacggaaaatgcatatatatawaatacatatacacacacacataatacagaaacataaatgttttgttgtaacaaaatcaggcagagtgccacacaagagaaaaaacataaaaagcataattacctagtgttagagacattcctcttttgcactcctttgcagcggaaaggagtaaaaatccactaaaccttatatgattgtagttgctgctgtttgtttaatccaactttctcatgagaacttcctttgcttgacttactgtaaagttgggataagcatgtgtcacctttcttgtgggacttttaatgaacatgacaaaatatcctcctggaacaaccacggtgccactggttttctggca

SEQ ID NO: 282070 - DNA, 576 bp, Homo sapiens
gattacaggcatgagccactgcacctagccaggatccacttcttacactatattgtattttgataatatagagtaaaatgcattgatccattggcagatagaaatgaagtcagaaataaaaggcattcaaccccacacaaaactaacctgaggcaaccttctactctaatgcccctacgttcagtgcataagaaatcatgacttggcagggtgggacggaaaatgcatatatatataatacatatacacacacacataatacagaaacataaatgttttgttgtaayaaaatcaggcagagtgccacacaagagaaaaaacataaaaagcataattacctagtgttagagacattcctcttttgcactcctttgcagcggaaaggagtaaaaatccactaaaccttatatgattgtagttgctgctgtttgtttaatccaactttctcatgagaacttcctttgcttgacttactgtaaagttgggataagcatgtgtcacctttcttgtgggacttttaatgaacatgacaaaatatcctcctggaacaaccacggtgccactggttttctggca

SEQ ID NO: 282071 - DNA, 580 bp, Homo sapiens
ggataagcatgtgtcacctttcttgtgggacttttaatgaacatgacaaaatatcctcctggaacaaccacggtgccactggttttctggcaaatctgacctcctaacctattaaccaaaggtcacataaaccataatcagaacttggaagagaggcatcttcttcctctaagagcaaggccagaccacaggctgagaatttcagatactattyccatcacatgttattaatacttaatatttactgaattaaactgggggaacaaactattgctttttatttattaagggttgtttcactaggtttctacttagcatcatcagctgttggaattaaaacaaactcacaccaattccactttgtttacatgtatttgcagagtcacccctgtgtaagcctctggtaagataggagcttgcttttctaaaatgtcatctataaactgctatttcttagagaaccaataatgtagcttaacaatttctcaaaggtattgggtatagatttcctcttccagtggtttccatccatgtcttaaggatgatccaatataagtttccaatttaaaaggaaaataac

SEQ ID NO: 282072 - DNA, 580 bp, Homo sapiens
ggataagcatgtgtcacctttcttgtgggacttttaatgaacatgacaaaatatcctcctggaacaaccacggtgccactggttttctggcaaatctgacctcctaacctattaaccaaaggtcacataaaccataatcagaacttggaagagaggcatcttcttcctctaagagcaaggccagaccacaggctgagaatttcagatactattcccatcacatgttattaatacttaatatttactgaattaaactgggggaacaaactattgctttttatttattaagggttgtttcactaggtttctacttagcatcatcagctgttggaattaaaacaaactcacaccaattccactttgtttacatgtatttgcagagtcacccctgtgtaagcctctggtaagataggagcttgcttttctaaaatgtcatctataaactgctatttcttagagaaccaataatgtagcttaacaatttctcaaaggyattgggtatagatttcctcttccagtggtttccatccatgtcttaaggatgatccaatataagtttccaatttaaaaggaaaataac

SEQ ID NO: 282073 - DNA, 484 bp, Homo sapiens
gcattaactaacactcatggggaaagatcttcgatgtaaayaacgttttcattaaagcatgtgtacttggatgatttatttctttaactgcttgacaaaactggaagttggcttaatacaactggctagaacgaaaggaaataaaaaattgcgcaactgtgttgtaagactatgcattctcacttacccaagtagagagagaatgaccaaggtagagaaggaattttgcagaggtcaggtagtcggccaaggatcctgcaaagacacaggcggggtgacaaaaagcgatggtagtcacttaatgagctgagggcagaatgcttatccatttgatctcattagaacatgattattaaaaactactttgcaggacaaaccacgtacattttatcaagttacctatgaaccgatgtatttcgttcacttaataccattcactaaattcagttattgacctagtcaataactgcccaacttcacattt

SEQ ID NO: 282074 - DNA, 484 bp, Homo sapiens
gcattaactaacactcatggggaaagatcttcgatgtaaataacgttttcattaaagcatgtgtacttggatgatttatttctttaactgcttgacaaaactggaagttggcttaatacaactggctagaacgaaaggaaataaaaaattgcgcaactgtgttgtaagactatgcattctcacttacccaagtagagagagaatgaccaaggtagagaaggaattttgcagaggtcaggtagtcggccaaggatcctgcaaagacacaggcggggtgasaaaaagcgatggtagtcacttaatgagctgagggcagaatgcttatccatttgatctcattagaacatgattattaaaaactactttgcaggacaaaccacgtacattttatcaagttacctatgaaccgatgtatttcgttcacttaataccattcactaaattcagttattgacctagtcaataactgcccaacttcacattt

SEQ ID NO: 282075 - DNA, 597 bp, Homo sapiens
ccactgcatctactatggcgtattggtcagagacagcctgaattcagggctctgccctttggtaggaagagtagcatgcatttataggagtggagaaatcatggcagctatctatggagactactgcttttgctctcccctttgtctgtggctctcagttgtggcttcttatgggtacttagttctcaatttaaacrtctcctcagaaaggaaatttctgagccccatataatattggtctcacccattttattttatttatgaatttatcacttccctaaatctccttgctggggaaaaaataaaccaaaaaaagaaattctgcctggattttattatgagtgcaaaaggaagtcattgtagggttttaagcaggggtgtaatgtcatctgacaatcattttgagaagatacctctagctactggataataagatactaagaataaaattaggaagatttctcaggaagaaattagtgattcatgtaagaaatcaggtggcttgaaaaaggctattggcattgaaactggaaggcaatagacagatacaggatgcattttagaggatgaaccaacaaaatactttgatggcctgga

SEQ ID NO: 282076 - DNA, 494 bp, Homo sapiens
ttatcaattcttaaaaaacattatgtaccttaacattggattccaagaaatgatgcatttttaatcactaatgtgatgtgacacatgtcaacagcagggaaagggttacatcagttatgctgttctaggagtagtcagcactgaagaattcctgcacctcaggaaaatctaaacacgttcatagcaaaaaaaaaagagataggatttacatattttcaaacaataaaaccaacatgtttcactaagtmagctaaaaggacaattaaaaaatataaagagaataagaaagtcacgtataatcccactctctaaagaaaactgctgtttctattttattgtatttcatttaaagctctctttgatttatatgttgtatatatatgttctgtctctatgcatgcctatatatatatatatacatatatatgcatgtttatacatgtacatagtgtggttatataaaagctgaaggacttttttttttttgcttttaa

SEQ ID NO: 282077 - DNA, 494 bp, Homo sapiens
ttatcaattcttaaaaaacattatgtaccttaacattggattccaagaaatgatgcatttttaatcactaatgtgatgtgacacatgtcaacagcagggaaagggttacatcagttatgctgttctaggagtagtcagcactgaagaattcctgcacctcaggaaaatctaaacacgttcatagcaaaaaaaaaagagataggatttacatattttcaaacaataaaaccaacatgtttcactaagtaagctaaaaggacaattaaaaaatataaagagaataagaaagtcacgtataatcccactctctaaagaaaactgctgtttctattttattgtatttcatttaaagctctctttgatttatatgttgtatatatatgttctgtctctatgcatgyctatatatatatatatacatatatatgcatgtttatacatgtacatagtgtggttatataaaagctgaaggacttttttttttttgcttttaa

SEQ ID NO: 282078 - DNA, 494 bp, Homo sapiens
ttatcaattcttaaaaaacattatgtaccttaacattggattccaagaaatgatgcatttttaatcactaatgtgatgtgacacatgtcaacagcagggaaagggttacatcagttatgctgttctaggagtagtcagcactgaagaattcctgcacctcaggaaaatctaaacacgttcatagcaaaaaaaaaagagataggatttacatattttcaaacaataaaaccaacatgtttcactaagtaagctaaaaggacaattaaaaaatataaagagaataagaaagtcacgtataatcccactctctaaagaaaactgctgtttctattttattgtatttcatttaaagctctctttgatttatatgttgtatatatatgttctgtctctatgcatgcytatatatatatatatacatatatatgcatgtttatacatgtacatagtgtggttatataaaagctgaaggacttttttttttttgcttttaa

SEQ ID NO: 282079 - DNA, 494 bp, Homo sapiens
ttatcaattcttaaaaaacattatgtaccttaacattggattccaagaaatgatgcatttttaatcactaatgtgatgtgacacatgtcaacagcagggaaagggttacatcagttatgctgttctaggagtagtcagcactgaagaattcctgcacctcaggaaaatctaaacacgttcatagcaaaaaaaaaagagataggatttacatattttcaaacaataaaaccaacatgtttcactaagtaagctaaaaggacaattaaaaaatataaagagaataagaaagtcacgtataatcccactctctaaagaaaactgctgtttctattttattgtatttcatttaaagctctctttgatttatatgttgtatatatatgttctgtctctatgcatgcctatatatatatatatacatatatatgcatgtttatacatgtacrtagtgtggttatataaaagctgaaggacttttttttttttgcttttaa

SEQ ID NO: 282080 - DNA, 576 bp, Homo sapiens
tagatgtttttctcctctctgatgtgtctccatcattcaccagcccacaaatacctgggctggagggtaggggagtgggtyctgtggctcataaaaagtgccttttgcctctggttagaatacctccactagtccaggtccacacttgtaagagagatctcagtacaccaaaagctgtgcaaattaaaataactacaaaagtgagagattttaaatcatatattttaagtcctgattaagaaaattctgaacccttagcttgatgaaaaaggctgaggataaaaaattactaactttatacatcaacaacaatccagtggcaaaaagaatgacactgatgctttctgatttgaaggaattaaactaagaccagttgatggaatgtcttaggaaatttttgacttctttgtaaaatataactatctaaaaatctaagttgtccagagatggaaaggaaacgctgacttttctgttaacagaagaagaaaacattgtttggtaattaccatgagaaaagcaatgtgctggatttttaaattttgtttatgttttgttttattgttgctattattattc

SEQ ID NO: 282081 - DNA, 576 bp, Homo sapiens
tagatgtttttctcctctctgatgtgtctccatcattcaccagcccacaaatacctgggctggagggtaggggagtgggtcctgtggctcataaaaagtgccttttgcctctggttagaatacctccactagtccaggtccacacttgtaagagagatctcagtacaccaaaagctgtgcaaattaaaataactacaaaagtgagagattttaaatcatatattttaagtcctgattaagaaaattctgaacccttagcttgatgaaaaaggctgaggataaaaaattactaactttatrcatcaacaacaatccagtggcaaaaagaatgacactgatgctttctgatttgaaggaattaaactaagaccagttgatggaatgtcttaggaaatttttgacttctttgtaaaatataactatctaaaaatctaagttgtccagagatggaaaggaaacgctgacttttctgttaacagaagaagaaaacattgtttggtaattaccatgagaaaagcaatgtgctggatttttaaattttgtttatgttttgttttattgttgctattattattc

SEQ ID NO: 282082 - DNA, 576 bp, Homo sapiens
tagatgtttttctcctctctgatgtgtctccatcattcaccagcccacaaatacctgggctggagggtaggggagtgggtcctgtggctcataaaaagtgccttttgcctctggttagaatacctccactagtccaggtccacacttgtaagagagatctcagtacaccaaaagctgtgcaaattaaaataactacaaaagtgagagattttaaatcatatattttaagtcctgattaagaaaattctgaacccttagcttgatgaaaaaggctgaggataaaaaattactaactttatayatcaacaacaatccagtggcaaaaagaatgacactgatgctttctgatttgaaggaattaaactaagaccagttgatggaatgtcttaggaaatttttgacttctttgtaaaatataactatctaaaaatctaagttgtccagagatggaaaggaaacgctgacttttctgttaacagaagaagaaaacattgtttggtaattaccatgagaaaagcaatgtgctggatttttaaattttgtttatgttttgttttattgttgctattattattc

SEQ ID NO: 282083 - DNA, 578 bp, Homo sapiens
tttttaatttataaggagatttttccataaaatattcatctaaactcgagttgttcttcaagatatttttcttcttaaatcagacagtcagcttcagaaatacctcttatcaaaatatttcccacaggtattgatgtgtttctaagtctttcaagtctttccaacagtctcatctgttcttttcattttctctgacaaggccagacattcatgctacctggtgacctgccctgtgaagtggcagagccagggactaatctaaggctgatctactcatttgtcttcctcacatgactaaactactgtctgyggttgtgttgacccctttccttctggggtgttcccaggaattttgcacactggttctcatgaaaaagtcatggaagttccctcagtctcagagagaaaagaatgagggagccaaaggaagaggcagggagaggcaccaagcagagagcacagaggtgaatctgagacttgtgccgctgaagcacgagagagaggggaagcttgctctctacacagagccctaaaccagccaggaaggagtaatagctattgagtaggaagcaccataa

SEQ ID NO: 282084 - DNA, 578 bp, Homo sapiens
tttttaatttataaggagatttttccataaaatattcatctaaactcgagttgttcttcaagatatttttcttcttaaatcagacagtcagcttcagaaatacctcttatcaaaatatttcccacaggtattgatgtgtttctaagtctttcaagtctttccaacagtctcatctgttcttttcattttctctgacaaggccagacattcatgctacctggtgacctgccctgtgaagtggcagagccagggactaatctaaggctgatctactcatttgtcttcctcacatgactaaactactgtctgcggttgtgttgacccctttccttctggggtgttcccaggaattttgcacactggttctcatgaaaaagtcatggaagttccctcagtctcagagagaaaagaatgagggagccaaaggaagaggcagggagaggcaccaagcagagagcacagaggtgaatctgagacttgtgccgctgaagcacgagagagaggggaagcttgctctctacacagagccctaamccagccaggaaggagtaatagctattgagtaggaagcaccataa

SEQ ID NO: 282085 - DNA, 465 bp, Homo sapiens
aataatgacataacaaaaatctaaacatgttcagtattgatgcaaccgtccttttcttcagaacatttttcatctgtgattggctgaatctttagacgcaaaacccatgagaacaggggagcctaaaattgcttgtttatgtgaaagatggaaacgtgagtgcaagaaacaattcctgctctgaggtgctcacatgctttacagaaagaccatgratacaactgattgaatacttttgccaggtcctcttccagggattttacatgacttaacacaatattttactgaggtcattactaccatcccattcactcatattagtaaaccaaggcataaaatgatgaagtaacatgttcaagattattcatttattaaggggaagagccagaatttgaattcaagtgaactggcttcaaaattcaccctctttaaccacccatatttatgtgtctattagataagtta

SEQ ID NO: 282086 - DNA, 553 bp, Homo sapiens
aggctcccaaggggagcaaggctgtttacaaatcctcaaggcctctgtttagactactccccataccctaactctaactaaccaatgcacagattttataaaatgcactcagggaatccatatctacatatctacatacaattatttgttttgctttaagttttaaaggaattgtataatttttcttttgagatattagttatggtcagctgtgctttctcagaaatcattatggaaaattggctaagcaagtatgaaactaaggacatacagcatatgaattggttatgaatataatgaaatatttagaaattaagacttataaacatattagataatgaaattgacataaygtatattgtattagtctgttctcatgctggtaataaagacataactgagactgggtaattataaaggaaagaggtttgactgactcacagttccacatgactggggagacctcacaatcatggaaggcaaggaggagcaagtcacatcttacatggcggcaggcaagagagcatatgcaggggatctcccctttataaac

SEQ ID NO: 282087 - DNA, 493 bp, Homo sapiens
gttcaagtgagacaaagagttacatgtctctcactttaaatcaaaagctgaaaatgatcaagcttagttaggagagcacgttgaaagccaaggcagaccaagtgctaggcctcttgcaccaggttagccaacttgggaatgtacacacaaagttgttgaaggaaagtcaatgtgctactccagtgaacacatgaataataagaaaggaaacagccttgctgctgatatggaaagtgtttgagtgatctggacagaagaccaaagcagccacgccattctytaagccaaagcctaatccagagcaaggccctgattttgcttaactctgtgaagtcttagagaggtgaggaagcggcagaagaaatgtttgaagcttgcagaggctggttcatgaggtttaagggaaaaagccattttcataacataaaaatagaagatgaagtagcaagtgctgatgaagaagctgtagcaaattatccaaaggatcgagcta

SEQ ID NO: 282088 - DNA, 584 bp, Homo sapiens
agtcaatacctagcttcaaaggacaggctgcctttcttgttagtggttaatgcttctagtgactttaagttgaagccaatactcatttaccattctgaaaattctaaggcccttaagaattatgctagatctagtccgcctgtgctctgtaaatggaaacgtaaagcctggatgacaacacatctatttacagcatggtttattgaatattttaagcccactgttgatacctaatgctcaaacatttctttcaaatattactggttattgacaatgcacctggttacccaagagctctgatgaagatgtacaaggagattaatactgttttcatacttgctaacaaaacacccattctgcagtctatgtatcataattaatttttgctttcaagtcttattccttaagagatacatttcataagaccatcactgccactgatagtgatttatctgatggatgtaggcaaagtaaattgaaacccttctggaagggattcactagactccatgccactaagaayatttgtgattcatgggaagatgtcaacacatcaacactaacaggagtttggaagaacatga

SEQ ID NO: 282089 - DNA, 395 bp, Homo sapiens
tgctcaatgtgctgtcaaactgatgcagttccatctgaccacggattcaaggttgttactgattttaccaggaaggatctgtaagaagtttcataaggcttaatatttactcttgctcttttcgtgtctaaaccacttgcttatgaaggacttgtaataactaaattcagttttattttggtctcctaggtcagctcttgtttgtggcaataaatatatcactacgctattaatrttgctattaataaagtaatattaattctggaaaaatatatttccaagtcacaaaagtcaaataattcatccccagagctcctggcagagacagaactcaagcccagcttgcctcatgctaaatccccctcctttcacctttgtcaaggctgcctccatgt

SEQ ID NO: 282090 - DNA, 607 bp, Homo sapiens
gaatacttctgaaaaacgctttacagaggtgatgaaatatgaataggtcttgtaagaaaaggagtgtttctccctttaaaaataaagatggtcactctcagagggaatgtgtttcaacaaaagggctgaatgtgacagcaactcacattcaccatccttgtgtgaaattccaataacaagaagtgaaggyctatggaaggccgatggtcacaggatcttaaagcgacaaaagtgctgagacatcctcatctctctctgcaactcctcaccttctccttgccccactttctctcacaacttcccactgtgttgagcaattgtatcattgtctcttaccttttttactcactgaaatgtccattccaccagggccttggtcttgccattttgttcattagcaaatccctagtttgtaagacaatgcctggcatggaggaagtgctccataaatgcattagaaaattaagaataaaggaaagaataaacgtttgctttgggcccaaattctggctgggtgtcattaaatagcggcatgaccttagacaggtaaatccatctgaattttggctttcttactttaaaaattggaatattaataatcgttgaa

SEQ ID NO: 282091 - DNA, 607 bp, Homo sapiens
gaatacttctgaaaaacgctttacagaggtgatgaaatatgaataggtcttgtaagaaaaggagtgtttctccctttaaaaataaagatggtcactctcagagggaatgtgtttcaacaaaagggctgaatgtgacagcaactcacattcaccatccttgtgtgaaattccaataacaagaagtgaaggtctatggaaggccgatggtcacaggatcttaaagcgacaaaagtgctgagacatcctcatctctctctgcaactcctcaccttctccytgccccactttctctcacaacttcccactgtgttgagcaattgtatcattgtctcttaccttttttactcactgaaatgtccattccaccagggccttggtcttgccattttgttcattagcaaatccctagtttgtaagacaatgcctggcatggaggaagtgctccataaatgcattagaaaattaagaataaaggaaagaataaacgtttgctttgggcccaaattctggctgggtgtcattaaatagcggcatgaccttagacaggtaaatccatctgaattttggctttcttactttaaaaattggaatattaataatcgttgaa

SEQ ID NO: 282092 - DNA, 605 bp, Homo sapiens
tgaccttagacaggtaaatccatctgaattttggctttcttactttaaaaattggaatattaataatcgttgaaacactaaggttgatgaaggagtaaatcatggatgcaaaccattagcaaaatgagtacytagtagttgttaatgcaagcatgatggtggtgctggtgatgctgatgacgctgatgagattagtaggactaataggatttttggttccggtggtaatggtcatactggtggtgctatctttctctccggggattaaatcaacttcttggttggtgacagtgcatcacctcgtgtcccactggagcacaccagtgaccaataccagatacacagggaccagagctactcattttcaaacagtcactcccactcaaagagcttaaacatcttaacttgaaattaatgatgttactcattcatacaaacatctgtcgtgaaaaatcctgcctgagatgctatgtccacatctaagtgtatgcatgttcctccaagatcctgaaagtaacgtatttctaaattatcgtattaaatggtggtggggttatgacagtctctttatcatttgcatttgattacagtgcgtaatgattaga

SEQ ID NO: 282093 - DNA, 556 bp, Homo sapiens
cctctcctgggtgcagtcatatacctttgcaaaagttcatatgccttctttctaaccaaatcccaattgctggagaagtttataaaaacttccttttatgggaaataaataccattaatgtcaggattatattctattgttttgaygcaagatattcaaacagaaacgtgtgagaatttccccagaaacaggtgcaggagtatctcagaggagaacatgatacaaatctccaatctgccgcaaaagcccttttgcctaaaaatcatttttgtgggatctgtgtccataaaaattagaagaaacttgccctttgctgtccaaagtaaggttaggaagactgcgattgggtatcagcatagtccacagccattgctctgatggaataataagaggggaggaccatcctttcccatcctacactggataggtctaaggtgaagctgcccacgttcaactgactggcaggtgctgtgtgatagaagtttcctggaacccacagaccccaggccttttggaaagtatgcgcatcccatcttccggctaagctcaaaagctg

SEQ ID NO: 282094 - DNA, 570 bp, Homo sapiens
ttttcattattctcaaacatattcccattgtcttttctaggtgatctttaagtactgtatttattagacaaatagttttaaatacctactatatatcaggcattaggtaccaggcatttcaaataacagcattcataaggtagagaaattgctggccgtcttggagtatttcacttagtaggaaagaaaggtatygagtaattgaatagacaatgatagtcattgtgacaaacgctatgaagggtaattgtaagatcctggaatggtcatattcactgcatgaccaaacaataattaggagacgatcaaataaggtaaaaagtgggatgctcaggtatatcaggaagaggacagtgtggctagagaatactaatcaagggataggatgcccagagctgtggacaggtaccagctcataatgatgttttggagacctggttaccctgagcactaggagtgtttcgaaaattttaatcaaatatagagcatgattacttttacttttttcaaaatggaattcctatgaattctgtgattaaaaaaaaaagaactaggaggaggcaagagtga

SEQ ID NO: 282095 - DNA, 582 bp, Homo sapiens
gactccacttttgacgtttcatcactgagagtggtcaagctccaccccttgcccttcctctcttgccccatatctggycaagtccataaaatagcccatgtgttcccccacttgacacctgtgggtgatttcaaaccatgcaaaccctgcccctgcaaaagaaccttaaccccactccgtaagcacaacacaaatcaaagccccttggctgtcctctactcaacccacttcagatcaggttgggagtgtgccctgctctctccagaaaaccccagcacataagtttgttccttctcactcactgtgtgggtagcatcagtcttaacttctgaaccagctttgggtggggacttgaccccattatctgggaggaactgcaagatacccatctccaattctaagactacaaaattttataaatgaaacattttacaatgaaaaatacagaccaaaaccccaaaacacactaacaaacagggttttatgaagctcttaaagttctactctaatgatataagcctcactaattgctcagtattatcttcatagaaaattgtcaataattaccatgtacgtcatttt

SEQ ID NO: 282096 - DNA, 582 bp, Homo sapiens
gactccacttttgacgtttcatcactgagagtggtcaagctccaccccttgcccttcctctcttgccccatatctggccaagtccataaaatagcccatgtgttcccccacttgacacctrtgggtgatttcaaaccatgcaaaccctgcccctgcaaaagaaccttaaccccactccgtaagcacaacacaaatcaaagccccttggctgtcctctactcaacccacttcagatcaggttgggagtgtgccctgctctctccagaaaaccccagcacataagtttgttccttctcactcactgtgtgggtagcatcagtcttaacttctgaaccagctttgggtggggacttgaccccattatctgggaggaactgcaagatacccatctccaattctaagactacaaaattttataaatgaaacattttacaatgaaaaatacagaccaaaaccccaaaacacactaacaaacagggttttatgaagctcttaaagttctactctaatgatataagcctcactaattgctcagtattatcttcatagaaaattgtcaataattaccatgtacgtcatttt

SEQ ID NO: 282097 - DNA, 582 bp, Homo sapiens
gactccacttttgacgtttcatcactgagagtggtcaagctccaccccttgcccttcctctcttgccccatatctggccaagtccataaaatagcccatgtgttcccccacttgacacctgtgggtgatttcaaaccatgcaaaccctgcccctgcaaaagaaccttaaccccactccgtaagcacaacacaaatcaaagccccttggctgtcctctactcaacccacttcagatcaggttgggagtgtgccctgctctctccagaaaaccccagcacataagtttgttccttctcactcactgtgtgggtagcatcagtcttaacttctgaaccagctttgggtggggacttgaccccattatctgggaggaactgcaagatacccatctccaattctaagactacaaaattttataaatgaaacattttacaatgaaaaatacagaccaaaaccccaaaacacactaacaaacagggttttatgaagctcttaaagttctactctaatgatmtaagcctcactaattgctcagtattatcttcatagaaaattgtcaataattaccatgtacgtcatttt

SEQ ID NO: 282098 - DNA, 604 bp, Homo sapiens
aatttgtactcattcttgcacagtaggggaaaaaacttccttataaacaacctaaggtaaagacaggtgtaaattggtgcaatcttattaccatgctrcacaacttcagggctccattcaccaggcacttctgcacagaaggtcactcagcagcagtcatagtgaggttttatgagcatccctgtcaacagttcaagactctgtgccaaggaaacaactgggaaatacacaaagttatatgtagaaatcccttcagtatagcaatgttcatcctcgtaataagctaaagtcagtaaaatttccttgggtagggggtgagttaagtatgtaatggtgcatgtctctagtggaatatgaggctacaactcaaactcagaaaatcaatctgcctttaagatgaacattatcccatggtgcatacgtacctcattttctttaaccaatccactgttgagagtccacagccttataaaataatgaaattattatatattttgcagcaatatgggtgcagatagaggccataatgccataatcctaagggaattaatgcagaaacagaaaatcaaatactgcatgttctcatttgtaagtgggagctaaa

SEQ ID NO: 282099 - DNA, 520 bp, Homo sapiens
gtatattaaagtgtacaatgtgatgttttgatatacaaatgattaccacagtcatatttatcacctcacatagtcataagacttcagtagtgagaacacttaagatctgccctttcagcaaatttcaagtgtacactgyagcattgttgactgtagccaccatgtcgtacattttactccctcatcttgcattactgaaatgctgtatcctttggccaacacctcctggctttcccacacactcctagaccctgtaagcacctttctactctactatgagcttaacttttttggattctacattgtgatggtaaatattaggtgtcaactcaattggattgaaggatgtctagatggctggtaaagtactgtttcttggtgcgtctgggaggctgttgccagaggagtggatatttgagtcagtggcctgggaaaggaagacccagtctccatgttggtggggaccatccaattggctgccagcatcgctggaacaaagcagggggaggaaggtgggata

SEQ ID NO: 282100 - DNA, 520 bp, Homo sapiens
gtatattaaagtgtacaatgtgatgttttgatatacaaatgattaccacagtcatatttatcacctcacatagtcataagacttcagtagtgagaacacttaagatctgccctttcagcaaatttcaagtgtacactgcagcattgttgactgtagccaccatgtcgtacattttactccctcatcttgcattactgaaatgctgtatcctttggccaacacctcctggctttcccacacactcctagaccctgtaagcacctttctactctactatgagcttaacttttttggattctacattgtgatggtaaatattaggtgtcaactcaattggattgaaggatgtctagatggctggtaaagtactgtttcttggtgcktctgggaggctgttgccagaggagtggatatttgagtcagtggcctgggaaaggaagacccagtctccatgttggtggggaccatccaattggctgccagcatcgctggaacaaagcagggggaggaaggtgggata

SEQ ID NO: 282101 - DNA, 574 bp, Homo sapiens
gcaaatattcttggttcctttccttgaagtggcacccttgcttcattcattttcaggatgatgtttgtcaaatactccactctgaataaccaccatttgtctctcattctttcccattaaaattaaatgttataacaaagtggtagcttcagtgtgaaactcaatcacacaagagatttctcttgaggcgactattgtatttcagtacacagtagaaatgcttaatgtgtaagccccatttcatcacgtacactattgaaaagatatattcttastgttgagttttaataaagtaatgtttagtgcttcaaggattttcttcaatgaaaatggcttttcttctctatccagtgcatggagatgaaggctacaatgcctagccctgcagattggggtcaagtccttgattcatgttaaggtgccagcagtttcacccaccattgcttttgcaccaccagggcaagtaccaacacactacaaaaggcaaattatatcttcgcgttattatgaaaagagttttcacctcataggtccctgaaagtgtctcagggaccaccccccaaggaatatgcag

SEQ ID NO: 282102 - DNA, 553 bp, Homo sapiens
ttaaaagtataaatagggctcaagaatagagcatatgttacatttaaccttgggcacgtagaggctgaagtgatagtcaagttcggtttaaccttgatattaagaccaaatgaataaagcatctgctaatgaggaaatagaaaaaaagaagagtcattgtaattttgtataagattcacagaattaaattcacatagatttaagatgtatctctatgttattttaaaatactgtgaactaagattgcattttttaaaagttctatattggcgttaactagaaaacaaaggattttacttgacattttcaataatatatcttggtgagatccattgctctcttatcgactttctggtttactgtgaaaaaaaaaaaaatctctatcagtttgtctctttatttgttcttcaaatttagagtgaatcacataacatacaaagtacttgaggaattgtttggggcattaaattatcctggtatttctgycaagcattccgtctagaacatgcaaagcacacagttgttttagaacatattctcatgtaattttgat

SEQ ID NO: 282103 - DNA, 964 bp, Homo sapiens
cctaactcataggatgactgagaaaattcaatgagctacatcgtctaaagtgccttccayaatacctggcatacagtaagaactaaaacaaatgtgaactattgttgctattgccactggctatcattgacataatggctgacctaaattaaaattctattattttaaattaacttttattttaagttcaggggtacatatgaaggtttgctatacaggtaaaattgtgtcatgtgggtttgttgtatggataatttcctcaaccagataccaagcctagtacccaatagttattttttctgatcttctccctccacccacgctccatcctcaagtaggccccagtctctgttgttctcctgtctacccatgtgwttatgtattctcccttcatgtaaagaaaaacaatttagctctgatcaccaataaagtttccaataatgaccctttcaatgaagcatacaaacactgtgaaactgtgtgtgtgtgtgtgtgtgtgtgtgtgtgtgtgcatatacttgaatcagaattctctgatatgcttctttctttctgaaacctgtcccaaccctactgaattaaaggctttgcaggtaaggctcaggtgattctagcaatattcaaaataccgggtaaaaaaaawttttttgaaaggttacaccagttttgctggcagaggtctaacaaatatgtgattgttttgatatcctagaataaaaatacatttcatattgctttccaaacaatttgggtcaggggtcaatttcacagctgcaaactgttctctctgtacatatcctttgctagcatcgctcttagaaagaatggtaatgccattaatacctaccgttgcaagtgtttatggtaaatactgccagtgttgcctgcctcccataaacacaagcagcagtttatagaaagcaagagtattttaaaaacttctaaacttagtgctatttctttt

SEQ ID NO: 282104 - DNA, 589 bp, Homo sapiens
ttatgtattctcccttcatgtaaagaaaaacaatttagctctgatcaccaataaagtttccaataatgaccctttcaatgaagcatacaaacactgtgaaactgtgtgtgtgtgtgtgtgtgtgtgtgtgtgtgtgcatatacttgaatcagaattctctgatatgcttctttctttctgaaacctgtcccaaccctactgaattaaaggctttgcaggtaaggctcaggtgattctagcaatattcaaaataccgggtaaaaaaaatttttttgaaaggttacaccagttttgctggcagaggtctaacaaatatgtgattgttttgatatcctagaataaaaatacatttcatattgctttccaaacaatttgggtcaggggtcaatttcacagctgcaaactgttctctctgtayatatcctttgctagcatcgctcttagaaagaatggtaatgccattaatacctaccgttgcaagtgtttatggtaaatactgccagtgttgcctgcctcccataaacacaagcagcagtttatagaaagcaagagtattttaaaaacttctaaacttagtgctatttctttt

SEQ ID NO: 282105 - DNA, 571 bp, Homo sapiens
aactgcaaatttgtatggcagataaaagtgtctgcatgtcaaactgaatattcccacaaaatgtggaactgccaattattggatagtgagagagttgatcttctagttatccatcctggaggctcttaaarctttgagtcagaccatgtaacattaaaggaaagaagccacctacctttttaaggttataaaagatgatggtaacgtatgtgttgggggtgtttgagtgaaatatggtatagaaaggcaggtacacctacctttttgaggtggtaaaagatggggaagtatgtgctgggtgagtgcacaccccaacaccccactggcaagccaaggaggcttctttttctagcagcaccaaagcatatgtttggggttacagaaaaaataaatgcattttcatttgctttcagtatggtcgcagttccccagaaattagttaatgccattctcacaaaacttgttagatgactgactgtctccccaaagcaggggcagcagaagctggtgggctggcctctcggattccatgtcactcacagccaggctgtcataagcaaattacaaacta

SEQ ID NO: 282106 - DNA, 571 bp, Homo sapiens
aactgcaaatttgtatggcagataaaagtgtctgcatgtcaaactgaatattcccacaaaatgtggaactgccaattattggatagtgagagagttgatcttctagttatccatcctggaggctcttaaagctttgagtcagaccatgtaacattaaaggaaagaagccacctacctttttaaggttataaaagatgatggtaacgtatgtgttgggggtgtttgagtgaaatatggtatagaaaggcaggtacacctacctttttgaggtggtaaaagatggggaagtatgtgctgggtgartgcacaccccaacaccccactggcaagccaaggaggcttctttttctagcagcaccaaagcatatgtttggggttacagaaaaaataaatgcattttcatttgctttcagtatggtcgcagttccccagaaattagttaatgccattctcacaaaacttgttagatgactgactgtctccccaaagcaggggcagcagaagctggtgggctggcctctcggattccatgtcactcacagccaggctgtcataagcaaattacaaacta

SEQ ID NO: 282107 - DNA, 601 bp, Homo sapiens
gaactaccaacagagctggaagaacaattaaaacatgtgctgtgcaattattgtatcagtagacattgagtcacaggtatgtactcagtaattatagtaataaatgaaaacagtatactatgatcaaatctatttttatacatattattgaataaattttcccagcttcttttctaatactttttttttttttggctcttggcataacagtatttaagacgtagttgcctatcattacacaacctgcacatggtagaaaagagacttgaaattttgttgttgttttaaatcaacatattggagaccttgtttatctgaaaaataataatgttttgccaaagatagacagataagtagacagataaataaaagttctttttttctcctatctgtaaattcctgcagtagttggaagttttttcttttggtcaatgttcgactttatcaatcaattttattgaaytatgtcaaaggagttagaacactagtcatttagtccacttgtttttctagttaataaaactcatcttttaataaaggcatctgcatcagaacaaaagaaaaaagtcagattgcgtgagtttacatcactcttccatga

SEQ ID NO: 282108 - DNA, 605 bp, Homo sapiens
tataggtttatttagattttctatttctttataattcagccttggaaggttgattatttattggaaattgcctrgttcatctaggttatccaatttgtttgtgtgttaccattcatagcattttcttacaatcctttttatttgtataaaatcagtataatgtttccactttcgtatctgattttagttatattaatctttttcatagtcaatttagataactttattaattttgttgatatttttgaagaatcagttatttgttttgttaactttttaattgtttttctattttgtttacctctgttctaatctttattatttcctttcttctgctaattttacatttagatttgtcttcttcttaaagtgcaaagttaagttgctgatttgatatctttctctttcaattaaagtgtttgtaggtatgatttgttatattagcattactttcactgcaactcggaagttttagtaaattgcgttgtaatttttatgaagatattttctaatttttctgtaattttttttatttattgcatgtctaagggtgtgatgcttaatttcctcattgttgtgaattttccagttttccttttgatatt

SEQ ID NO: 282109 - DNA, 564 bp, Homo sapiens
tttttttttattctcttctttatctactttgggaattcttatgaagtgaataccaaagcctcttaatctatctttcatgttttaaaatttctttcacattttcctcatccttttagctttctgtatagtggtcagcagtgtattctaaaactgtattaatatactgtagatgttacatttttgaagacttttgtttcaatggtcatgtttccctactccagatttttattggaatggctctctttctatattctggttacttctcatgcagcaaaaagctatcttttcttaccaccttttctgataaatatgttttacttatctctyatttcttttttattttttgcttcatttcttctcataactcatattacttcctgaaatgtttgttcttaatttctttctttccccactccttctccctctctttttcttcccttcactcttgattttctccctcactacaagtcagtagtgacttctgtgttttgttcatgtttctttctagcacctataatagcgcctgctacatagtaatgttcaataaatacttgacgaatggat

SEQ ID NO: 282110 - DNA, 590 bp, Homo sapiens
ccctcactacaagtcagtagtgacttctgtgttttgttcatgtttctttctagcacctataatagcgcctgctacatagtaatgttcaataaatacttgaygaatggatgattctctttaattttccttctcttgatacaaatctatttttgtttttaaattcgtttggttaaaatattgttaatttctttaacttttgagagtctttaaacatgcagttattcctttctgattcttttggtagttaaattaattttttgactgtttacattagtttgctcttttacttagcctactttaatctaggggatttgggatttcagcctgcatgttccctttgaggaccgtaattcttttctcccatgttccctttgtgttctgctccctttgtgcgtattggtttaatgattgcatctacccagacacattccaaaatcaggtttccaagtggcacagaatggacagaatagcttttgtcctcagtgctatcagagcttactcactgatcctgggggtgctttggcaaggtcctgattatcaggctgtctctggtcactcccaccatcctagtcgtataggctgacataaag

SEQ ID NO: 282111 - DNA, 610 bp, Homo sapiens
tatgaacaccgtgactgtctgtttggaacactgagatgtgaaattgcctccacattgaacaagatttggctcttggtggtaggagggttgtgaataaagtgagcactggtggtacagaggaggacatgctgcaacattattttcagtaataatcctttagttaccaggaatgatcattttttctgattcattgtttagtttgaaaacaattaacaactaaaaatatcrtacatttaaagataatatttaagtaaaatatttgcatgtagaataaaggtttttacttaccaaataaaaatactacaccttgaagtttgcattctgctttactgttttacattttagacagaaattaacatttgaagtggtcacaaagaatgatagaatgaaagtcactcatattctgtttgttcttctttacagttaagacattatctggtttattttgactgctgtttagacatgagaataatgtggtcctacaggctctgaagacatgaactataatgcactgtcctctaagtgagctcaaatgattctaactccttaccaactgaccctccaaacaaacacctgtagctgagtctgtatttgtcaggggccaacagta

SEQ ID NO: 282112 - DNA, 456 bp, Homo sapiens
tagtgtttctgggattgttgcaaatatraaagaataatatatgcaaacctcttgccatgttgaaggtatctaggaaatgttccctatctagctgtggcagtaataaaaataagcatgcaaagccacagccagacctacaggaggagcccagagctatgatggcagacttgggagaagctggaagccaatagagaggggcccctgaatgactcttgttgttgaaaacctaggaccaaagtcaggagaatagatttcagctctttccttgccactggctggctgtgtgacagatggtttgctagttgtctttcctgggcctcctttagtttcttctagagcaaggttattgttattgggtcactttgtaccagtcattttatcaccaggaatattttggtcccgataatatgaatgataattgtccccatgtttaagctatgatgttaaaaacatgct

SEQ ID NO: 282113 - DNA, 1511 bp, Homo sapiens
ccttaggctaccgtctctgtgcatttccactaggctagccaatctatggccacaaatcatcacctctgcccccataacttgcaaatagatatctccactccagacaccttctctgaactgsagacatgtatatccaactgcccacttgaaatctctctttatattattcaaggcacctaaaactcaaaaatatccaagaagcaaattttgctgttcctaatttaaccttgtattcttctagtgttcatgtgttcattaaggccaccaaatcccttttgttaccaacccagaaatctaagtctcctattcttcccccatatgtattccatcacagtccagtggattttaaattctgtatcactgaagatggtttagctacgtgtaatataaatatttgtcaatttaaatttatttaagttttttttttttaatgtcaagtaataagaagtcctagtataagagatatccagggttggttaagtcagaaccagwccttaggctaccgtctctgtgcatttccactaggctagccaatctatggccacaaatcatcacctctgcccccataacttgcaaatagatatctccactccagacaccttctctgaactggagacatgtatatccaactgcccacttgaaatctctctttatattattcaaggcacctaaaactcaaaaatatccaagaagcaaattttgctgttcctaattwaaccttgtattcttctagtgttcatgtgttcattaaggccaccaaatcccttttgttaccaacccagaaatctaagtctcctattcttcccccatatgtattccatcacagtccagtggattttaaattctgtatcactgaagatggtttagctacgtgtaatataaatatttgtcaatttaaatttatttaagttttttttttttaatgtcaagtaataagaagtcctagtataagagatatccagggttggttaagtcagaaccagwagttgtttctctaagaatccacgaaatagatcagaacttgaagttaattccaaagagggcaatgcacattaggatgaacaactattcctcttgaatttctcaactcatgttataccttgttatgtcctttaccctagtttaccagaagggcacattaggagtacatatattataaaaccatgatacaattaaaatgacatggagtcaaacaaggaaactgtctttcttccagagaaattacatttcaaattgaaatttcagaggtgacatgaatggaaatattgtaaaagtgatattgctatcgtcttttggccatcagttttctgaatatgccttctaatatttagatccctggagtgaaagaggggaagtcttgggaactcaaactccaataaattagaggtcaattataaggccatataaatgtttggtgcttaaagagcacctcactaaaaaatgataggwgcaggccagatgtagtgctcacgcctgtaatcccagcactttgggagaccaaggcaggcgga

SEQ ID NO: 282114 - DNA, 605 bp, Homo sapiens
cttttgtttgtctgggaaagtctttatttctcctttacatctgaagaatatttttaccagatatactactctaggrtaaaagttttgtgtagttttttttccttcagcactttaaatatgtcacatcactcttctggcctgtaaagtgtaaactgaaaagtctagtgccagatttattggtgctccattgtatgttatttgtttcttttttcttgatgcttttaggattatttctttacccttgacctttgggagtttgattattaaatgacttgagatagtcttctttggagtaagtctgcttggtgttctgtaaccttcttatacttagatattgatatcgtctttaggtttgggaaattgtctgatattatctttgaataaattttctacctctctctctttctctaccttctctataaggccaataactcttagatttgccaatttgaggctattttctagatcctgtagcatgttttattcttttttcttttgtctcctgtatgtatgtttaaattacctgcattcaggctcgccatttctctctttctttctttcttgattagttctgctggtaagagattctgatgcattcttcagta

SEQ ID NO: 282115 - DNA, 548 bp, Homo sapiens
gcattggcttgaaaagcatatgcaacctctttgattctaagctatattctacaaaaaaaaaaacagtaattttagtacattaccgtcaactttgctatgtgattaataaattagaaggcaagtaaaagcacctccttagtctggcattgtaagcaccacataaattggattattttttctcttgttcttcttaatatagtttgtgaggtacatgtgtgtccatgtgtatgcatgtgtgttcacgtgtgcacatgtgtgtgtttgtatttgtatatgagagccacgtttttttatatttagaaggtggaaagagagaactttacatcacaggaggatagcatttcattgttgctgtctaaatatataaagtgcattaaattatgtcttataaactttttgctytctgaactttgttggttaatttcttccaagctgtgtgcatgataattagagtcctaaaggttctaaatagttctctaatagtaaagaaaaaaatgtcttaaagttgtaagaaaatgttgctaaattgactacctagcaaatcccgc

SEQ ID NO: 282116 - DNA, 534 bp, Homo sapiens
attcctgaattctgacaaagttggttctgacaatttctgcttgtttccaatgyttctgttgggagacgaaaggttggagcttcctcatccatcatttcgcacatgtctaggtcagaagtttcctgattactgtctcttcaagtatttcctctgcctcatcctgtccctgccaccctctgaagctctcattacacttctgttagacataatatgttttatctcagatatctgatgttctgtttatttcattcttttttgtcttggtatttcattctcaacagtttttatagatgtgttctcaagttcattgaactttcctctgctttgtagagtcagttgttaagagcagctaataaattcttcatttataatattttccacttctaatattttcatctgtcctttttatttctatctctctgctgaagtttgcaatttcttcacccatgttgtctacacatccactagatccttcagcattttaattacagtatttcattatcctgatttttaacaggatgtgttccctctaca

SEQ ID NO: 282117 - DNA, 534 bp, Homo sapiens
attcctgaattctgacaaagttggttctgacaatttctgcttgtttccaatgtttctgttgggagaygaaaggttggagcttcctcatccatcatttcgcacatgtctaggtcagaagtttcctgattactgtctcttcaagtatttcctctgcctcatcctgtccctgccaccctctgaagctctcattacacttctgttagacataatatgttttatctcagatatctgatgttctgtttatttcattcttttttgtcttggtatttcattctcaacagtttttatagatgtgttctcaagttcattgaactttcctctgctttgtagagtcagttgttaagagcagctaataaattcttcatttataatattttccacttctaatattttcatctgtcctttttatttctatctctctgctgaagtttgcaatttcttcacccatgttgtctacacatccactagatccttcagcattttaattacagtatttcattatcctgatttttaacaggatgtgttccctctaca

SEQ ID NO: 282118 - DNA, 549 bp, Homo sapiens
tataggttaactgattttcagcaaagatgtaaaggctattcagtgaagacagaatgatcttttgacaaatggtgctagaacaatagcatatccacttgcaaaagcaaacaaaagcaaaagcaaaaacaaacaaaaaaacccaaaaaacgaaaacacaagtaaaaccctgattcatttcttgtgccacatacaaaaattaactcaaattatatcgtaggtccaaatgaaataataaaaactaaaaatctgctggaagaaagcaggaattaggaaaagatttytaagaactaacaccaaaagcccaatttattaaaaaaaaaaaaaaaccaccactggtaaatttaaatttgtcaaaattaaaagcctatgcactttaaaagacactgttgagataatgaaagacaacttaaagatgatgaaaagtggactaaccagaactctattatactgctggtaacaatgtaaaatgacacaaccacattggaaaacagtttggcagttgtttatagagtcaaatatacacctactctatcattcaccacttctact

SEQ ID NO: 282119 - DNA, 549 bp, Homo sapiens
tataggttaactgattttcagcaaagatgtaaaggctattcagtgaagacagaatgatcttttgacaaatggtgctagaacaatagcatatccacttgcaaaagcaaacaaaagcaaaagcaaaaacaaacaaaaaaacccaaaaaacgaaaacacaagtaaaaccctgattcatttcttgtgccacatacaaaaattaactcaaattatatcgtaggtccaaatgaaataataaaaactaaaaatctgctggaagaaagcaggaattaggaaaagatttctaagaactaacaccaaaagcccaatttattaaaaaaaaaaaaaaaccaccactggtaartttaaatttgtcaaaattaaaagcctatgcactttaaaagacactgttgagataatgaaagacaacttaaagatgatgaaaagtggactaaccagaactctattatactgctggtaacaatgtaaaatgacacaaccacattggaaaacagtttggcagttgtttatagagtcaaatatacacctactctatcattcaccacttctact

SEQ ID NO: 282120 - DNA, 554 bp, Homo sapiens
agaaataaaaatttgaaaacatcaacaaaaaattcctgactattgctaccaacaatagcaataaattttcagctataaatttaccaaaagaaaatagaaacactaaattagtagaaagaaaaattaaaatgaggaaaacagtcaaccaagttctcttagtgctttggaattacctaggaaagtaaaggaaagagatgcctaaattttaaccttgtatgtggttacacttttctgtcattggagtttagatggcactggtaagtaaatcaattgggcatattgatatgaactccaaaatatttaaagccaactttcgataaaagggtaaaatcagrgcattaatacagatatggacattttaagggaacatgaatattgatcaaaatattaactgaatatataagtaggggaaattgattttgttacactgtgaggagggtggacaattgaatctccactggacaaaacattgtctgtcagtgacctatgacttatagcatataaaggaactcaaagacaatgaaagtctagtatcaggtaacctgaagtggtgt

SEQ ID NO: 282121 - DNA, 639 bp, Homo sapiens
cttattttgtgccgaagatgagtgccaggcacctttcatcagccatctagctgaccacaggtaaaatttttataattaagatacccatgcctggctttccttgcatctacccaatttggggtccaataaaattcctggatctgttggctgctgttcttaatgaattcataaaatttttcattaaaatttccytatgtatagtttctataccactctccttctctctctttctgagattccaattacattttttttgttagccttcttgacaatgtcccatattttattgaggctttgttcatttatatataaggtaacataatcagctttgttttggcttttaggtgacattacaagtaggattgcaaagcaaaaaatattcttatatacattcaaccaaagtgcttatgtctattgtcaattttttcaataaaacgataacaaagtaaaatgcaatcttttcacagaagaatgtatggcaaatattttctcccagtctgtgtcttatttttatattctttccctgatgccatattttcaataattgtatatattaatttttacaaagtccaatatactgactttttcttttatctttaattcattctgtcctaagagatactggcatatttaatttgc

SEQ ID NO: 282122 - DNA, 606 bp, Homo sapiens
acaagtagcaatgcccaggtattacctccagtgttttgggtgagacactgagacttgctggtttcaggtgagactcagcacattgccagctctggtggctacagggcaagactccttctatttgagaaaartgggaaaagttaaggagactctgccttgaaccttaggtaccagcttggccacacagagatagagtgccaagtgggcacttgtggtccccatttgcaggcattggctctgggactacagatctggacctgtcctgggccagagggttgcccattgccctgaaggatgagtcccaggccaggcatcattcaacacaaactgactgaaaagctgctggactttaagggagcattggtagtagtctgggtagaccccatgggcctgtggtagtgatagacacaggatgaggcttctctgcctttgaaaaggagagggaagagtgagaaggactgtgtcatgtagtttgagtaccagctcagccacagtctggtagaacaccaggaataattctaagtgttttactccagtctctgactcctggatggcaactctggacctgcccagggtctgaaaagacttgccaccctaaagaaaagg

SEQ ID NO: 282123 - DNA, 505 bp, Homo sapiens
tttctcattgcaatatattcagcaaatactgcatattctgtatctcttcttgatattcaatattaataaaattataagctctgaaaagccctacaatgaagaatcccactcttctatgcagttttccaagcttaatkgatcatacaacctatttttcctgtacaacatattaacatccaatataaatgctgttgtatagatgataattagttacacctttctagatttgctggataaatctaacaattgttaagattctgaattaccatacatccagggatcttcctgtctgtcaagtcacattaggatcttaattccctctgctacccagacagggtctattcctgagattatcttcagtgtgtcggtcagtcctgttaatactacacagggaatgaattcatatatcatcaagaaacttcatacacctgtctcctgccactgttcatttccactatatgctccagttattcactgacattaattgtagtacttccaatttttt

SEQ ID NO: 282124 - DNA, 1078 bp, Homo sapiens
aaaaaaaaaaaaaaagtgctggtgaaaatcataaaaaattaaatctgggaaaaggagagctcaaatattgcacagacattcttaaaatgaggataattcctactgttttattatctggagtgtttatttaactatagtaatttgtatggcaaataaagtactatggaatgtattacataaatacatgcatttcagacaaaaggatactactttgcccactgccattgtttaacagaaaactgttccagtcattttgaaaagaaaagagaaatgtttctaaaaatcttttcttctggacatatgggtctccattttaggtagcctgagtatcatatattttctttgtcattttttcctctcccatggttagtcaattacatctttctgaactgcatgttaactttaactagggaagtgaatgaaaaataygagttcagaacagttgtagtcctgtttcattataagctagaatagtactgtgataagtgctttacagaataggttagacacttgacaatgaatcaggtgacgcagtgacatgtcatcccattatatgtwttgtaaattacccagtctcagccagttttttataacagtatgaaaatggaatgatacacttatctacaaagagagtattattcctatcttctcaacatttttctttctcccttctttattttattctgttgttatacagttgaaaacataccttactaaatataatcatatatcattttctaagtatataaggatgtacatatttatcaaactattgcattttctgtgtttcacagtttttatctatatcttttaaattattattttgttacattgttattttcatcatgatttaatatactaatgtataccacaggactccaagtgaattccacttatctgtcctgctttttggatactgtctctgtgcacttagccctcaaattttagggctcatctgtttcttctctctcagggattgctggcttctawtgccacatgcccaatgtcttgaagattgttgtgtgaagtggaagtaaacctcattccttttactccatattttctagaatcacatgtc

SEQ ID NO: 282125 - DNA, 568 bp, Homo sapiens
attaaatattagtaaagatcaatataattaattggcctgtaactaggctgataaaatacaaaatctaaaatacaaattaccaatataagtaatgcaacagaatgtcatgacagatccagcgggttaaatcttaaaatacaggatcatgaaaaagactggataatatgagaatattatgaataaattataccaaaacatttgagaatctacatgaaacagaaaaattctggaaagatacacagtgccaaaactgactcaaaaggagataacaaatagaaatctaaatatctatgccatttaaataaattaaattgtaataaaaatctcctaacaactaggaaacaaaagtcctggcccagattgtttcactgataaactctatcamatatttaatagacaaataataccagcctcaaaaggattttaggaaatatagttagaggaaacatcttccaattcattttgttaggtcagcattactctgataccaatgtcaaacaaagacaacagaaatgaaaacagatttttaagagatccttataaaatgttaacaaatgaattgcagcag

SEQ ID NO: 282126 - DNA, 568 bp, Homo sapiens
attaaatattagtaaagatcaatataattaattggcctgtaactaggctgataaaatacaaaatctaaaatacaaattaccaatataagtaatgcaacagaatgtcatgacagatccagcgggttaaatcttaaaatacaggatcatgaaaaagactggataatatgagaatattatgaataaattataccaaaacatttgagaatctacatgaaacagaaaaattctggaaagatacacagtgccaaaactgactcaaaaggagataacaaatagaaatctaaatatctatgccatttaaataaattaaattgtaataaaaatctcctaacaactaggaaacaaaagtcctggcccagattgtttcactgataaactctatcaaatatttaataracaaataataccagcctcaaaaggattttaggaaatatagttagaggaaacatcttccaattcattttgttaggtcagcattactctgataccaatgtcaaacaaagacaacagaaatgaaaacagatttttaagagatccttataaaatgttaacaaatgaattgcagcag

SEQ ID NO: 282127 - DNA, 569 bp, Homo sapiens
tttcctaggttattttccagagtttttataactttaggtttttcattaaagcatttaatccatcttgaattgatttttgtatatggtaaggaagaggtccagttttgatcttcagtatatggctagccaggtatcctagcaccatttattgaatagggagtcctttctctgttgcttgtttgtgtcaactttatcaaaacttagatggttttaggtgtacagctttatttcttggctatctattctgctccattggtctatgtgtctgtttttgtatgagcaccatgctgttttggttatagtcgccttgtagtattgtttgaagttgggtaacattatgcctccagctttcctctttttgcttargattgccttggctagtcaggctcttttttggttccatgtaaattttagaatagttttttctaattatgtgaggaatgtcatttgtagtttgataggaatagcactgaatctataaattgctttagggagtatgaccatcttaacactatgaatttttcttatccatgggcatggaaagtttttccatttttttgtgacatctc

SEQ ID NO: 282128 - DNA, 530 bp, Homo sapiens
ttgtagaaaaatagatgatttctgacagagagcctcaaagttgctggaaacctgatccatctctttctccctctccctctctctctctctctmtatatataatgaagtttataaatataaacttatgttgtatatgaattatatatgtaaacatgatatatatttatcatttttgtgtatataatatatagatatttataaatttgtatgatatataaactttgcattaaaggtcttccttttttgttaacatctacaaaataaataaagtggtactcttaaaagcaagatattcaaccaaagtattagaaatttctaaatattttcaatgttatagagggaaatgaaatattattcagccttaaaaaagaaggagattctactatttgaaacaacatggatgaatgtggaggatgttacttagtgaaataattcagtcacagaagcgcagatcctggaggattcctcttatgtgagacatctagaagtagacaatagattggtgattaccagggagtgaagaaaggggg

SEQ ID NO: 282129 - DNA, 530 bp, Homo sapiens
ttgtagaaaaatagatgatttctgacagagagcctcaaagttgctggaaacctgatccatctctttctccctctccctctctctctctctctatatatataatgaagtttataaatataaacttatgttgtatatgaattatatatgtaaacatgatatatatttatcatttttgtgtatataatatatagatatttataaatttgtatgatatataaactttkcattaaaggtcttccttttttgttaacatctacaaaataaataaagtggtactcttaaaagcaagatattcaaccaaagtattagaaatttctaaatattttcaatgttatagagggaaatgaaatattattcagccttaaaaaagaaggagattctactatttgaaacaacatggatgaatgtggaggatgttacttagtgaaataattcagtcacagaagcgcagatcctggaggattcctcttatgtgagacatctagaagtagacaatagattggtgattaccagggagtgaagaaaggggg

SEQ ID NO: 282130 - DNA, 607 bp, Homo sapiens
aagagaattccttgcctgtgctatgcagatttctgaagaaagttcttaaaaaagcagaaaatgataccagactaaaatytgaatctctacaaataaatgaaaagaatcagaaataataaaacttaatagatatcaatatatttttcattaattttattactttaaaaggcaatttactatcaaacccaaaaatagtaacgttgtgataattcatacacacatatcacaaaaatacatgaaaaattggaagaaagaatttgaatatattgtaaagttattacataaatcatgaagtgatagaatactatctaaagttagactgtgttaaattatatattataagctgtatgtaaaccactgaaaagcagaaaatgaggtataaaataaagccatgatggatattaattgaaataatgagtaactcacaattcattaaaactccagaaaaagcaagatccaaccacaagctgcttaccagaaatatgctttaaatatacaggaactgataggttaaaaggatgaaaaaaggatataccattaaaaaaattaaagtaaagctgggatgactctataattatcagactaaatagattaacaaaaatgaaat

SEQ ID NO: 282131 - DNA, 607 bp, Homo sapiens
aagagaattccttgcctgtgctatgcagatttctgaagaaagttcttaaaaaagcagaaaatgataccagactaaaatttgaatctctacaaataaatgaaaagaatcagaaataataaaacttaatagatatcaatatatttttcattaattttattactttaaaaggcaatttactatcaaacccaaaaatagtaacgttgtgataattcatacacacatatcacaaaaatacatgaaaaattggaagaaagaatttgaatatattgtaaagttattacataaatcatgaagtgatagaatactatctaaagttagactgtgttaaattrtatattataagctgtatgtaaaccactgaaaagcagaaaatgaggtataaaataaagccatgatggatattaattgaaataatgagtaactcacaattcattaaaactccagaaaaagcaagatccaaccacaagctgcttaccagaaatatgctttaaatatacaggaactgataggttaaaaggatgaaaaaaggatataccattaaaaaaattaaagtaaagctgggatgactctataattatcagactaaatagattaacaaaaatgaaat

SEQ ID NO: 282132 - DNA, 607 bp, Homo sapiens
aagagaattccttgcctgtgctatgcagatttctgaagaaagttcttaaaaaagcagaaaatgataccagactaaaatttgaatctctacaaataaatgaaaagaatcagaaataataaaacttaatagatatcaatatatttttcattaattttattactttaaaaggcaatttactatcaaacccaaaaatagtaacgttgtgataattcatacacacatatcacaaaaatacatgaaaaattggaagaaagaatttgaatatattgtaaagttattacataaatcatgaagtgatagaatactatctaaagttagactgtgttaaattatatattataagctgtatgtaaaccactgaaaagcagaaaatgaggtataaaataaagccatgatggatattaattgaaataatgagtaactcacaattcattaaaactccagaaaaagcaagatccaaccacaagctgcttaccagaaatatgctttaaatatacaggaactgataggttaaaaggatgaaaaaaggatataccattaaaaaaatkaaagtaaagctgggatgactctataattatcagactaaatagattaacaaaaatgaaat

SEQ ID NO: 282133 - DNA, 449 bp, Homo sapiens
tttcacctcaaacaaaggaaataaaaattatcagcaacatgcttcttcctcatttccagaagttgatactttttaaaatttgtataaattaagtagtacaagtgcagttttttacctggatatatggggtgttggtgaaggctaggcttttcatgtatacatcacccaaataatacagtaatacattgtacccatgaartactttttcatcacccacaaccctcccaccctccaccctttggagtctccattgtctgtcatttcacactctatgtccatgcttcatcattatttacctccctcagtttattttagcagaaagagtagtataatatttgaagtcagacataactgggttttgaatgccaactctaatagtaaccatccttagctagtttcttgaactaacaaagtttcagttttctgacctgaaagctaggatgatatgt

SEQ ID NO: 282134 - DNA, 560 bp, Homo sapiens
gtagcttatacctatgaggccctcatagccttattgaaattaatttaacttcttttatttcttagctgaattagtatttttgtaaagacacaatgttgtgattgaggatgatagggactttaaattggaatgtgaggcacagcacaagagattgagttgatccagggcaggcataggcagtacaygtgtacctagaggtctggggaagtaggattgaaaagataagggtacataaagtccttaaagggacaggataagttatcaaaatcatagttctctgttttaaaaattctacttatacttatcctaggcaaagttagtctctccatttttcactgtcttttacattataatgtcattgatcccaggatatagaatttatgttagtgaaatctgatgggggaatcaaaatttattgtatcgattatgtgagaaaatttaccctaatttctaggcaaccaatttatgtatgaatttttctgatgcaacccatttatatactagagactgcctttattgactgtccatataccatttcaacagaaataaacagtatgtgt

SEQ ID NO: 282135 - DNA, 560 bp, Homo sapiens
gtagcttatacctatgaggccctcatagccttattgaaattaatttaacttcttttatttcttagctgaattagtatttttgtaaagacacaatgttgtgattgaggatgatagggactttaaattggaatgtgaggcacagcacaagagattgagttgatccagggcaggcataggcagtacatgtgtacctagaggtctggggaagtaggattgaaaagataagggtacataaagtccttaaagggacaggataagttatcaaaatcatagktctctgttttaaaaattctacttatacttatcctaggcaaagttagtctctccatttttcactgtcttttacattataatgtcattgatcccaggatatagaatttatgttagtgaaatctgatgggggaatcaaaatttattgtatcgattatgtgagaaaatttaccctaatttctaggcaaccaatttatgtatgaatttttctgatgcaacccatttatatactagagactgcctttattgactgtccatataccatttcaacagaaataaacagtatgtgt

SEQ ID NO: 282136 - DNA, 576 bp, Homo sapiens
taccctaatttctaggcaaccaatttatgtatgaatttttctgatgcaacccatttatatactagagactgcctttattgactgtccatataccatttcaacagaaataaacagtatgtgtaaagagttataaattcatgccataytatctaacagacacagatatcccttcaacaataacaacaaaatgaattaaaaatgattacatacactgcaaacatttgaaaaacttagattgtgacaaacatttaactttgaaagcatcacaaaatgtgtcacatgactaagacctcaagtgatagaatttgaatatttcagatgaaccgttagtggcagtgaactttgtaaaagactttatgacacctacagtgctgagttttatttagaacaaaattgtttggatgaataaactgtagacgctaaagataaattcaatgtatacattcacataggaacaggtggtttatagttcatattccaggaactgtaacatgactcttaaataggttttacctgtcattaatgtggaaatatgacagaagctcagaagaaggaggaatatgtccacttttctca

SEQ ID NO: 282137 - DNA, 576 bp, Homo sapiens
taccctaatttctaggcaaccaatttatgtatgaatttttctgatgcaacccatttatatactagagactgcctttattgactgtccatataccatttcaacagaaataaacagtatgtgtaaagagttataaattcatgccatactatctaacagacacagatatcccttcaacaataacaacaaaatgaattaaaaatgattacatacactgcaaacatttgaaaaacttagattgtgacaaacatttaactttgaaagcatcacaaaatgtgtcacatgactaagacctcaagtgatagaatttgaatatttcagatgaaccgttagtggcagtgaactttgtaaaagactttaygacacctacagtgctgagttttatttagaacaaaattgtttggatgaataaactgtagacgctaaagataaattcaatgtatacattcacataggaacaggtggtttatagttcatattccaggaactgtaacatgactcttaaataggttttacctgtcattaatgtggaaatatgacagaagctcagaagaaggaggaatatgtccacttttctca

SEQ ID NO: 282138 - DNA, 620 bp, Homo sapiens
cttcctgttctctgagccttccaaatctctaggaagttccaaactttcccacattttcttgtcttcttctgagccctccaaactgttccaatatctgcctgttacacagttccatagttgcttccacatttttgggtatccttatagcagcactccactcctcataccaatttactgtatcagcccatcttcatattgctataaagaartgcatgagactgggtaatttatcaaggaaagaggtttaattgactcacagttccgcatggctggagaggccaaataatttttccttcttcatttctctctacaatgctgtgactcctgtgaggcttaaaaattctaagcacaaagaagtttcttcctgtagagtagcatgtgagcatgctggctctcattctaatgtacagcctccaaaggcttttggtcattagtaactcacccaaatgcattgcagtcaacatgtccatgtttccttttgttatccagatgtcaattctgtaattgttctctttcctcctcctcatataaatcccacttttccaaatctttgtggtatattgaatagctgaatcttcttgcacagaagatcatgcagtcaaacctcagtaaatttgcct

SEQ ID NO: 282139 - DNA, 620 bp, Homo sapiens
cttcctgttctctgagccttccaaatctctaggaagttccaaactttcccacattttcttgtcttcttctgagccctccaaactgttccaatatctgcctgttacacagttccatagttgcttccacatttttgggtatccttatagcagcactccactcctcataccaatttactgtatcagcccatcttcatattgctataaagaagtgcatgagactgggtaatttatcaaggaaagaggtttaattgactcacagttccgcatggctggagaggccaaataatttttccttcttcatttctctctacaatgctgtgactcctgtgaggcttaaaaattctaagcacaaagaagyttcttcctgtagagtagcatgtgagcatgctggctctcattctaatgtacagcctccaaaggcttttggtcattagtaactcacccaaatgcattgcagtcaacatgtccatgtttccttttgttatccagatgtcaattctgtaattgttctctttcctcctcctcatataaatcccacttttccaaatctttgtggtatattgaatagctgaatcttcttgcacagaagatcatgcagtcaaacctcagtaaatttgcct

SEQ ID NO: 282140 - DNA, 1078 bp, Homo sapiens
cttcctgttctctgagccttccaaatctctaggaagttccaaactttcccacattttcttgtcttcttctgagccctccaaactgttccaatatctgcctgttacacagttccatagttgcttccacatttttgggtatccttatagcagcactccactcctcataccaatttactgtatcagcccatcttcatattgctataaagaagtgcatgagactgggtaatttatcaaggaaagaggtttaattgactcacagttccgcatggctggagaggccaaataatttttccttcttcatttctctctacaatgctgtgactcctgtgaggcttaaaaattctaagcacaaagaagtttcttcctgtagagtagcatgtgagcatgctggctytcattctaatgtacagcctccaaaggcttttggtcattagtaactcacccaaatgcattgcagtcaacatgtccatgtttccttttgttatccagatgtcaattctgtaattgttctctttcctcctcctcatataaatcccacttttccaaatctttgtggtatattgaatagctgaatcttcttgcacagaagatcatgcagtcaaacctcagtaaatttgcctwatcacggctaagcctccaatcattatgaacaaacaatgtttagttaggctccggttctggatggtaacacagctcctgtgataaagctgcatagcaaccaatgccaaaaatctagtaccttccwtaaaagcaatcatttatttaatgcttatggatctgtaggtaagtttcaatttgattaaactcaggtaggattacctgggctctgttgaactgggataaactactggctttgagttatgtgtagatctgctacaggaaaatcttcattctggggcctaaacaaaggcttcctgggcatgcattctttataaccaaggccagcaaccccaagaaagccggtggtatcttttcaagaattctaaagtctcatgttgaaattatgatttttgtacacattccatagtgtaaagcaactcacatgacaaaaccacaaattagtgggcaaaaatgtata

SEQ ID NO: 282141 - DNA, 604 bp, Homo sapiens
cttggcaaacatttttcaacctaccagcaagagaggaggtagttagaggctagttaggcagatagagagggagggtcttgggagtggaaaaatacctgtgagaccacatctgcacagcccctgtagctagtggaaataaatytgattaagaacttcctctaatgccaaatgtctgctaagaagggactgtcctggcctaggagcaggtgcaatagatcaacctaagtgtccttaacttgacccgagtcattataatgtccttaacatgacagtagcattgtggttttagtcccctaatgtgttttgcttagccattcatgggtaataaccaagattcagtcactctggccaaccccaagcatgcgcagatgcaatatcaagggagaatattacccttcccatttgggcagaaaccacagaagaataccttgtctttgccatataaaagaactcagccccatttctggcaacctgctttcagggcacgtctctttgctgagagctttccttctgcttaataaatcctactctactcattctctgctgtccatgtgccttattcttcttggtcttggtacaagaacttggacctagctgaactagg

SEQ ID NO: 282142 - DNA, 487 bp, Homo sapiens
aatagaaattgttctattataaaacacatctatgtgtatgctcatagcagcattattttcaatagcaaagatatgaattaacctaaatgtccatcactgatagattgaattaagaaataagaaaatgtggtacatatacaccatggaatgctatgcagcggtaaaaatggttgagattatgtcctttttagggacatgtttggagctcaaggccaktatccttagcaaactaatgcaggaacaaaaaaccaagtgccacatgttctcacttataagtgggaactaaatgatgagaacacatggacatattgtgagggaaaagagacactgaagcctactggaaggtagaaggtaggaagagggtgagatcaggaaaaataactaatgggcactaggcttaatacctgggtgatgatgaaataatttattataacaaagccccgtgacacaagtatacctatataacaaacctgcacatatacccctg

SEQ ID NO: 282143 - DNA, 540 bp, Homo sapiens
ttatggtggtagtgatattgatggttaccatctactctgaatgtactatatgtaaggcataatttaatgtaggtaatctaactgactatgcacagacacatgcaaggtaacataggtagtattattactcttactttagaggtgaaaaattatttgtcaaaagtcatactgtaagtggtagaaaaggaaatctgactccagaaatttagaaattaagcactttgccatactgctggatttcaagagagcaaytgaataattattttcttgaataaaatctgtaagtggtttccctttgcctttaaaataatgtcaaaactcttggccaaacatttgtgaactgctcagataatctgttttctcttccttactatttaaatgtctcagagtttactttcattacgacatcatttcaaatatagcttccacggtttacattgtgctcttctctctactttgaaaatcctgacatgattaccctgcttagataatataaggaattcttgaaattctcataattaaccctaccttcatttgcct

SEQ ID NO: 282144 - DNA, 602 bp, Homo sapiens
ttattctgcatttttatttcttgtatgtatttttctattccattattttcagtcatgctgagtcattctgctttagtttagaataaaaaagggacattcaggtttcattccaatatggaatgagcttagaggttataattactatcctttcaagaatacaaaagcttaacaaactataaacaaaaatcagagatttgaaatcaaaggaaaaattggtagtttttattatattataagatatttcattcattaaaaaaaccttcttgatatgtattggaggcattatggcctccaaatcttgtgttgaaatgtaatcaccaatgttggagatatgggctggtgagaggtgtttgagtgatggaggcaggtccttcatgaatgscttggtgccctcttcatggtaataagtgcattctcactctgaattcatctttaaaacagtatggcacctcctccttctctcttttcctccctctctcaccaagtgacatgctggctccccttcaccttctgccatgaatgaaagcttccctaggccctcaccagaagcagatgacagcactatgcttcatgtacagcctgcaaaactctgagccaataaa

SEQ ID NO: 282145 - DNA, 559 bp, Homo sapiens
ttattcccaaggagtaaaagaaaagtgaatatattttcagaaaaacaaagaaacactaattaatgcacktcaggaagaaagagtatcatctagaaaacagtgagatagcagtgacaagcaaataaactgcaaatccatgttgagtaaatctaaattaccatggacttttttttttagaaaataaattgataaaatttacttcatcaaaataaacacttatacttctcaaaagatactgttaagaaaatgagaagataatgccatggctgagaaaaaatatgtatctcctaaaggacatatgtccagaatatataatgactacaactcagtagaaggaaatcaacctgttttaacatggggaaaatatttgtcagtctttatcatcattttcttttcttaatttttttctttatttcttctaaaaaaataaaaacaggatatatatgcagaacatgcagtgttacataggtatatgtgtgccatggtgttttgctgcacctatttacctgtcctctgtgttccctcccctcaacccccatcccccaacaggtcctcctgt

SEQ ID NO: 282146 - DNA, 1147 bp, Homo sapiens
aagtgtgttttccagcttgtttccattctctccttctccttctggtactccaatcaatcgtaggtttggtctttttatgaagtcccatatttcttaaaggctttcttcattccrtttcattcttttttctcttttcttgtctgcatgtcttatttcagtaaggtggtcttcaaactctgatatccttacttctgcttggttgattcagctattgatacttgtgtatgcttcacgaatttcttatgctgtgtttttcaactccatcaggttgtttttgcttctttctaaactggttattctagttagcaattcttgtagccttttatcaaggttcttagcttctttgtattgagttagaacatacttctttagctcagtgtagttttttattatccatctcttgaagcccacttctgtcatttcgtccatctgattctccatccagttctgcgcccttgatggagagacgttgcaatcatttggagaagaggcactctggccttttgggttttcagcagttttttttgtttgtttgtgtggtttttttttttttttttggtgawtcttttattagcaattttaaacagaattgggattgcaattaataatgttttaaaacctgtcatttaacttcacatatgtataatgagaatttatagtgctaaagttctataaaataaaaaaaattcataatttaccatttcatgaatagagaaaaatatttaccaataccatattaatcatttgcatttttgacaattawgaggaaagctgtcatgaatatctgtgttcatataattgctatcattccacaaaataatcaattatatacattgattattatgactatgccatactttatttatctattctgtggtggaggggaaattgggtcgtttccagtttgggcttatgcccaaatattgtttctatgaagattttactgcctgttctttggtgaacatatgtgtacctagcagtgtaatttttggatcataaggtgttgctatttttagcccatctcacacttttatctggacctacccttgcctttattgtttctatgataagttgaattagatccccaagctatttcttctcatgggtggggcgttttcttggaaggaaattttggtcatagttgttt

SEQ ID NO: 282147 - DNA, 608 bp, Homo sapiens
atcataacagaaagtctcttggaccacagtgcgataaaaacaaaaaacacaaaaacctcgactctaaaagattcactgacagtcatacaattacatgaaaattcaataacctgcttctgaatgactttgggcaaataatacaattaaggcagaaatcaggaagttctttgaaactaatgagaaaaaagatacaacatactagtgtctctggaacacagctaaggtaagttaagagggaagttcacagcactaaatgcactcatccaaatgttagatttcaarttaaccaccttacatcacaactgaaagaattagagaagcaagaacaaatcaaccccaaagctagcagaagacaagaaataaccaacatcaaagctgaactgaaggaagtcaagacatgaaaaaccattcaaaagatcaatgaatccaggagttgattttttaaaattatttaaatagatagactgttagctagactaatgaagaaaagagagaagattcaaacacacacaatcagaaatgacaaagaagatactatcactgaccccacataaataaaaataaccatcagagaatattatgaagaactctatgcacacaaactagaa

SEQ ID NO: 282148 - DNA, 603 bp, Homo sapiens
tgcttatcccactcctctcccagcaccaagggcactgtctttagtgtctagcactgtgcctgacatatagcatatgctccataaatgttcactgacttaatgggaacttctgccagttttatcactgagctactctacatgatcaacagaagtctaggagagtaacctatagatttatttacccttattttgccattttaaattaaacctaatgcattcacagagaaactgcactgactatggctatctgatacgtgattcagattaattgttgctgcagtcattcatgagttttggcactgtttgtattttggtaagcaaaagtaggggaatttatttttggccatctacatcaaatctttatttggacaactaaatgaatcactataaaactccacagtcaaaatggttaatgkgatatggtaatacgcagagtcagtgattacctggccttatatttcctctgggttttttgctgttgatactatcacctgcatctttttattgcaagtatttggggcatggagccagtttccctttcagtacataaagctgatctgagcatccagaaaccgtaacaatcagcactttttagaaaatgaa

SEQ ID NO: 282149 - DNA, 952 bp, Homo sapiens
agattgtgagaccagttttgaagccagatccgcttggctttcaaaattctgtactcttaaatattatattctatgacttttttccaagctctaagattgacgacttctgattccaagaccttatgctttatgttgcatgaagactggcaaaatctctcaggatttgtaagaatcccagagagagagagagagagaaatggcaggtaactactttttccaaggcataaaagcgacagggacaagactagaactgggcacaagtggttttaatttaataataataaaacttctacataatgataaaagatactcattcctcagcaacaaatgataaaaagaaaggaatatacatatatatattttttatatatattaaataaatatayttaatcatgacttcagaattttgttgacattttcatacaacaggcaatggtatggagaatttctatttactcataaattttatatttgttttttaatattggttttatatttattttatacattgttttaaaaattatgtttatgattaatatttttcaatagawaagacaaataacagcagagagtaaccgtatcaggagacccatctcacgtgcagagacacacaaaggctcaaaataaagggatggaggaagatctaccaagcaaatggaaaacaataaaaagcaggggttgcaatcctagtctctgataaaacagactttaaactttctagacattggttcagaagaaggtttttgtgtttwgttttgttttcaattcccctgcactggtaagatatttggaaagaagatgtctgaggggagaggggaacaggagactagcatttcctcttatgaaaagcacattttcatccacacaggatatgtggctacgtggaggttattgtttaaatgaacagctggtgatgaaggcttctgtatgctttttatgttctcttcaatac

SEQ ID NO: 282150 - DNA, 401 bp, Homo sapiens
aagacaaataacagcagagagtaaccgtatcaggagacccatctcacgtgcagagacacacaaaggctcaaaataaagggatggaggaagatctaccaagcaaatggaaaacaataaaaagcaggggttgcaatcctagtctctgataaaacagactttaaactttctagacattggttcagaagaaggtttttgtgttttgttttgttttcarttcccctgcactggtaagatatttggaaagaagatgtctgaggggagaggggaacaggagactagcatttcctcttatgaaaagcacattttcatccacacaggatatgtggctacgtggaggttattgtttaaatgaacagctggtgatgaaggcttctgtatgctttttatgttctcttcaatac

SEQ ID NO: 282151 - DNA, 546 bp, Homo sapiens
tgcttcaactctggagtgctgagtcaatccagtcggtagttaagatgaatctctacttaatttaattagtttggattaatttcactattaaatgcaaatattctaaatacagaatcaggaattttctttcattagatcttaaaacgtaagcatgaacaacattctggagacttttttttcaattacccaaccctcaactttcccaaaagagggaggattttgctctgcttttcaacccaactgctagtkttttggattcctacaagttctttctgctttttaattctacccatgactttctgcacctaaagaaattactttctgtcttgctgctttacctaaacttgaaaggtttttccagtttagtggataggcccaaggtttctcagaaatatttttctgagctgctcggccttgaaacattcttaagaaggctctggttctcgctggaaaaaaatcttatttgcttccgaacagactctttcagctttcttactgtgcatctagtcttcatcatgttatatcatgcatgtgaaaaagcacatg

SEQ ID NO: 282152 - DNA, 549 bp, Homo sapiens
tcaatgtatatccacacaaagactggtacgtgaatgttcatagtacctttattcacaaaaccccaaagtagagactatccaaatatccatcaacaagtgaacaaataaacaaaatgtgctatatccatgcaatggaataccaccctgcagtacaaagaagctacttggggatgaatcccaaagtcatgaygctaaatgaaagagtcagacatgaaggaggagataatgtatgccatacgaaattctagaaaatgaaagtaacttatagttacagaaagcaaatcagggcaggcatagaggctcacacctgtaatcccagcactttgagaggccacgtgggaagattgctagaactcaggagttcaagaccagcctgggcaacacagtgaaactccattctccacaaaaatgggaaaaaaagaaagcaaatcagtggttgtcctgtggggaggggaaggactgcaaagagggaagaagctctggtggggtgagggtggtgattcaggttctgtatcctgactgtggtagcagtttggggtgtttacatcc

SEQ ID NO: 282153 - DNA, 1064 bp, Homo sapiens
tcaatgtatatccacacaaagactggtacgtgaatgttcatagtacctttattcacaaaaccccaaagtagagactatccaaatatccatcaacaagtgaacaaataaacaaaatgtgctatatccatgcaatggaataccaccctgcagtacaaagaagctacttggggatgaatcccaaagtcatgacgctaaatgaaagagtcagacatgaaggaggagataatgtatgccatacgaaattctagaaaatgaaagtaacttatagttacagaaagcaaatcagggcaggcatagaggctcacacctgtaatcccagcactttgagaggccacgtgggaagattgctagaactcaggagttcaagacmagcctgggcaacacagtgaaactccattctccacaaaaatgggaaaaaaagaaagcaaatcagtggttgtcctgtggggaggggaaggactgcaaagagggaagaagctctggtggggtgagggtggtgattcaggttctgtatcctgactgtggtagcagtttggggtgtttacatccwtggttagtgcaataacccctcacagaacagaattaccaccccatcgctattcgccaatacaaatgggataaaacagtgaaataacaaatgtgtgatcagagataaggacatattaataaggggagattgaaattattaccactctggtttgggttttttttgggggggggtgaggggcaagtagtgtaatatttacatcatgctcaaatttttaaagaatcaaaactggacaagcaattatttggtcatccccttctcattcagagactgtcaaaggaaaagatggaatgactgtcacacwctctaaaatttacacgtaaggaggaaaacgtggaatcgaatacagtagctgcgggaccgcaccacgtgatcctcctcccgcggtcgctccatagaatttgtgggaaggggggggagggggagtgtcgccgcaatcccgaggacaggtcagcagcccgcgggtccgactccagccggcgttcccggggttaccacaccccctcgccggcgggga

SEQ ID NO: 282154 - DNA, 514 bp, Homo sapiens
tggttagtgcaataacccctcacagaacagaattaccaccccatcgctattcgccaatacaaatgggataaaacagtgaaataacaaatgtgtgatcagagataaggacatattaataaggggagattgaaattattaccactctggtttgggttttttttgggggggggtgaggggcaagtagtgtaatatttacatcatgctcaaatttttaaagaatcaaaactggacaagcaattatttggtcatccccttctcattcagagactgtcaaaggaaaagatggaatgactgtcacactctctaaaatttacacgtaaggaggaaaacgtggaatcgaatacagtagctgcgggaccgcaccacgtgatcctcctcccgcggtcgctccatagaatttgkgggaaggggggggagggggagtgtcgccgcaatcccgaggacaggtcagcagcccgcgggtccgactccagccggcgttcccggggttaccacaccccctcgccggcgggga

SEQ ID NO: 282155 - DNA, 421 bp, Homo sapiens
cctcctttctcctccgccgactgcgctcccgcaggctggccgggcgtcctcgcacactcgcccagtttctcacagcctcgcgtcccgtcagcttctccctcaccccactcccacacactctcactcccacacactcacacccggccgctcctcgttccctcactcgcctgccgcgcgcgcgcgaccccgctcacacacagcgcgcgcatcgccggcggagaccgcyccgctccctcagaccgaacgccgcccgcccgcttgctgaggagcggcgcgcgccccggccccgccctcctggcgccgcggcggcgtgcgggggggcggcggccggaggagctgggggccgggccagcgcgccgagcactgccgagcggatctgacacctgcgtcgagagccgccctcccagctcctcgcccgcac

SEQ ID NO: 282156 - DNA, 386 bp, Homo sapiens
gtatttgtttgctctttagtaattaggcaaggagggaggattgttcaagctcaaagagcttattctgttccagaaaatttgttttataatttaaagtgagaaatatatctttcatgatggaggatcagatgtttaaaaatagtaaatcagaaaacaagtcaccactagggtgtcgattccaagtatagaaaggatgcattgctttacatyaactggcagaataggagtccacagcttgtttcctccaggggatattttgaattgtaaaatctgaaaaaaaatagatgtgatatgtaaagaaagttgtaagaaatgctccttttgtcacaaaagactgcttcctctttggtgagacggtacagtggtgtgacaagaaacgtaagctc

SEQ ID NO: 282157 - DNA, 607 bp, Homo sapiens
gtttttcttaagcagatagctacagataaaaggttaaatcctactctacgttcaccttattttatgtaaagtgctgatttactgagcatgagaggaatacataattgattattcccttacctgctccttctctcttgcaccatgtgggttaccatacccttcctctttcccctccagcccacttttccctttactgaggccctcaaaattatctttgtagaaaggcacagaccacagtttctgtgattccgtttttatttcttctgggcatgtacttatccttggaataatagacttctaaactgagtgagacttgtctcagatactttttggttgactatgggaatgaatgctctgaactatctgaatgctctccttgaggttattcagtttgtggttttgggcaactttaaagctaaacgaattggagcatacataagtatactttgggtggtgttagaacatgtcgagggtgttttttctaagacaccttagtgaatctattgtctccckttgtcaagcacttaacacagtctaaagcaatattctctttacatatttctatgtcacatctgattctgatctctttaaagacagagatggtggg

SEQ ID NO: 282158 - DNA, 634 bp, Homo sapiens
catggagcacagtaaatatgagagatcctcataatagcctctataggtttaaattatattttaaatgtaaatgcaaaasttaattattttttagaggacctgatgtcatccttgggagtaatttttaattactttttatccttcttagagttgattgtattaattatttgtactggcttaacaataccatactgaaaaagcttttatttttttttttttttttgacatttcttctgtttcagttgatttatcattagtgaataaagatgaaaatgccatctatttcttgggaaattctcttggccttcaaccaaaaatggttaaaacatatcttgaagaagaactagataagtgggccaaaatgtaagtattattttaaaagctactactctacatctcatacaaaaatttacaaaatcacattaggttgtctaatatttggaaagatgtgtaatagaatcctagtacagtcatcccttggcatctgtggaggattagttccagggcctccctatcattccaaaatccacaatggtcaagtcccttatatacaaatggcatcatatttccaaagaacctaggcctatgccatatactttaaataatctctagattacttataatacctaacaca

SEQ ID NO: 282159 - DNA, 597 bp, Homo sapiens
aattatataatgaattagattatattgccactgtgttgtctcttttcaccaaaatctactaataaatagttatgttaagaaattaaatatattgccaggtgcggtggctcacgctgtaatcccagcactttgggaagctgaggcgggcggatcacaaggtcagaagttcaagaccagcctggccaagagaccagcctggtcaatatggtgaaaccctatctctactaaaaatacaaaaattagccaggcgtggtggcaggtgcctgtaatcccaactactcaggaggctgaggcaggagaattgcttgaaccctggaggtggaggtkgcagtgagctgagattgagccattgcactccagcctgggtgatggagcaagattccgactcaaaaaataaaaaaataaaaataaataaataaataaataaataaataaataaataaataaataaaataaattatattaaaatatcacaaattaaaatcaacaccaaaaataaaagcattatgacaatggactagaaaatttaaaaacaataaaaacaaaaaaaatcaatgttgagccatatgcctgagcatcagtttactgtctagatct

SEQ ID NO: 282160 - DNA, 605 bp, Homo sapiens
tattcctcctagaccctagcatttcatagcttctatctatgattattttaaattctagctcctgtatctaactgaatgaataagcacatcccacagctcagattcctgaaagaatttgattatgtactcagctaaacatcatcactgtttggttagagcttttatagcaaataattcacagatctttgatgaaactacattgtctttagtgggtaagtgtccaacagaggtctaataaactatgaccaggcaattgataatgccaagcggtagagacacagtgatctctcttcaaaatgcagtttccttcatcagaaagctatgtgtggggagccatttagaatcaagtttcaggcatagcaaatgtttttgatctttcctatccatacatatgtccaaataaatatagtacctggcagaatgtattattatcgtaagtaaagtacataagtgtgctcttaaktgttattggtgttcagaggaagacgggctacttttgcctgagacatcctaacaggcctcttgaaaaaagcattggagcattaggtctttgaaggttggctagaatccaaacaagttgaaggggagcaaaacattttaggcaa

SEQ ID NO: 282161 - DNA, 605 bp, Homo sapiens
tattcctcctagaccctagcatttcatagcttctatctatgattattttaaattctagctcctgtatctaactgaatgaataagcacatcccacagctcagattcctgaaagaatttgattatgtactcagctaaacatcatcactgtttggttagagcttttatagcaaataattcacagatctttgatgaaactacattgtctttagtgggtaagtgtccaacagaggtctaataaactatgaccaggcaattgataatgccaagcggtagagacacagtgatctctcttcaaaatgcagtttccttcatcagaaagctatgtgtggggagccatttagaatcaagtttcaggcatagcaaatgtttttgatctttcctatccatacatatgtccaaataaatatagtacctggcagaatgtattattatcgtaagtaaagtacataagtgtgctcttaattgttattggtgttcagaggaagacrggctacttttgcctgagacatcctaacaggcctcttgaaaaaagcattggagcattaggtctttgaaggttggctagaatccaaacaagttgaaggggagcaaaacattttaggcaa

SEQ ID NO: 282162 - DNA, 510 bp, Homo sapiens
ttttggacatatactttttaatatcttcatatgaaaatgattttataatactattttccatagagaggtcagaaagaaatcaagactttttctgctacrattggttaaaaaatttactgatagtttggatgcaaaaaatatggttttacaccaagttgtatctgttacttatagtactgctactggttgctccctgccaacacagaatttctgataaatttaactttaagcacttttcatcaaaagaaggaagaaaaagagcatggcaggtttataattatgcatcctgcattataaatcatatttctaaccagaaatactttcattttgattaggcacttatgaaaaccaaatattctttttataatgtgtatatatatatttaatgattggaagatttttccacatattagctactggttctgcacattttaaacaatatttctcctttattctcatagttccagtgacagatgggagaggacaccttcatacagcagtaaatttttg

SEQ ID NO: 282163 - DNA, 559 bp, Homo sapiens
atattagctactggttctgcacattttaaacaatatttctcctttattctcatagttccagtgacagatgggagaggacaccttcatacagcagtaaatttttggccattctccttcctcctgtgttgctgggtgggtcagcacaatgagtggtaggagtacttctggaagycattcctacagcagggatgctagcaattatgaaaccattcctagaagtgtctgaaaaccacaacatattccaataaaccaaaaatgaagtatttccaactcagttgccccttagttggattccaaacatgctttgtggtcacccttacattacccaacacgaagggaagtgtgatggagcagcaatcactgtggagacagtcatcttaactgatggtgattctaacttttgaaagttttagaaaaacatatatacatgtgaacacattggcagggactctctcagagcttgggaaggagatccatgcacagaaggggcttccggtttatactatgttagcttatggtgaacatgtctctaggaaatagagcccacttctggggactg

SEQ ID NO: 282164 - DNA, 593 bp, Homo sapiens
gggcttccggtttatactatgttagcttatggtgaacatgtctctaggaaatagagcccacttctggggactggttggatatgaatgaaggatgagagaaacaggaatctaggaagtctggcagatttttctagcttgtattccatgttgaatgataatatggtaaacaacaacaacaaaaaatagaatgaccacttttcaggcttgattgtcctatttttagtattaaaaatctcacattctggggaaacacctcttcaggaagcaaaaatctcagtttttaggtaaggaagkttgcagggaagtgccatactgaaaaggcagccccaaaaatagtaactgaaagaaagccgtttttagtgtcaaatgaataccagtatagattatctgtctttcatagttgttgccgtttttacctctgatcactaatgtttgcagctatgattggcagttctccaaaatggttcatgcttggttggatcactccaagtgacacaatttgtgtgaaaccttagtgcactgtaatcacgaacattaacaatctgtctttggctttgcccgtggattaacttttgtgctttgtattgagatac

SEQ ID NO: 282165 - DNA, 593 bp, Homo sapiens
gggcttccggtttatactatgttagcttatggtgaacatgtctctaggaaatagagcccacttctggggactggttggatatgaatgaaggatgagagaaacaggaatctaggaagtctggcagatttttctagcttgtattccatgttgaatgataatatggtaaacaacaacaacaaaaaatagaatgaccacttttcaggcttgattgtcctatttttagtattaaaaatctcacattctggggaaacacctcttcaggaagcaaaaatctcagtttttaggtaaggaaggttgcagggaagtgccatactgaaaaggcagccccaaaaatagtaactgaaagaaagccrtttttagtgtcaaatgaataccagtatagattatctgtctttcatagttgttgccgtttttacctctgatcactaatgtttgcagctatgattggcagttctccaaaatggttcatgcttggttggatcactccaagtgacacaatttgtgtgaaaccttagtgcactgtaatcacgaacattaacaatctgtctttggctttgcccgtggattaacttttgtgctttgtattgagatac

SEQ ID NO: 282166 - DNA, 213 bp, Homo sapiens
acaaattctcataaggttgcagagaaaagggatgcctatacactgctggtrgggatataaattagtcttagtcactgtggaaagcagtttgatttctcatagaacttaaaacaaaactaccatttgattcagcaatcccactatgaatatacatccaaaggaatttagcatatttctactgaaagacatatgcactcataaattcattacagc

SEQ ID NO: 282167 - DNA, 543 bp, Homo sapiens
tagttaaattgagctatttcagtttgcgtcggaataagggctaacattttctttctcagtatagtggtttactaaatttaaaatgtgttgtgaattttaaagtttggtaggtgacatgtctctgaacagagcactgtggccttgggttcacaytggcatttggagctggctaaacctacacatgccagagtgtactttcccgcctgctgttccagctgaggctttaatgttggacttttaagctgagccaaacaggtaggggaaacgattgccagctatctgatactgtagagatttaggccagatggaaacttgctttaaaaatcaaaccagtttcagtcataccaacatgagctttcttggatgtctgctttggagacattatgttattatcatcatcatcatcatcatcatcatcatcattattactaaagtcagaagtcactaaaatattgtattacattttcaaaaatacctgggaggtggatacaagaatgtcatggtaaaaatactgatcctggactagaaggagtagaaaataat

SEQ ID NO: 282168 - DNA, 606 bp, Homo sapiens
taggaattacgtgttggtcacattccacttgaatgaaatctcttcaaattatgtttgagtctctagcttctgtgtaatatgcatcttattggctgagacgttagaggccggaaaagcaactgtgtattatttcaggtccgatagtttggggtaggctctgctctctagcaagactcatatgatagggcattttcaaamtgcagcaaaaataattcaaatgctgggtagccaaaaattgactagtgcccactacaaacaataagttttaaaatgagctatacaaagttttaaattatgcttaaaataagttttaaagaaattgatgactgccatggatggaggaatatttcaatttaaataatccattctctacaatttactcctttaggagaaatccgaatcagaatatttgtaccaaattagttacaaggaaatattgattattaattatgcctgataacattatgaatactgtagctattaaattaaaatcttattcaaatagaaattataccgattgtgtatagtcctgttctgacaattgaagcagaggaaaacttcctaactcagcatatgaggccagcataccctaatgcgtaaaaccag

SEQ ID NO: 282169 - DNA, 606 bp, Homo sapiens
taggaattacgtgttggtcacattccacttgaatgaaatctcttcaaattatgtttgagtctctagcttctgtgtaatatgcatcttattggctgagacgttagaggccggaaaagcaactgtgtattatttcaggtccgatagtttggggtaggctctgctctctagcaagactcatatgatagggcattttcaaactgcagcaaaaataattcaaatgctgggtagccaaaaattgactagtgcccactacaaacaataagttttaaaatgagctatacaaagttttaaattatgcttaaaataagttttaaagaaattgatgactgccatggatggaggaatatttcaatttaaataatccattctctacaatttactcctttaggagaaatccgaatcagaatatttgtaccaaattagttacaaggaaatattgattattaattatgcctgataacattatgaatactgtagctattaaattaaaatcttattcaaatagaaattataccgattgtgtatagtcctgttctgacaattgaagcagaggaaaacttcctaactcagcmtatgaggccagcataccctaatgcgtaaaaccag

SEQ ID NO: 282170 - DNA, 638 bp, Homo sapiens
aaacttcctaactcagcatatgaggccagcataccctaatgcgtaaaaccagacacacattacaagaaaagaaaaagacagataaatatctcacatgaacatagatgtaataatccttaacacagtattagcaaatcaaatccaaccatgcrtaaaaagcataataaaccacaaccaggtgggatttatctcagatgttcaagattggttcaacatttgaaaagcaattaatgtaatccattaatacattaataggctaatggagaaaaattacgtgatcatatcaatagatgcggaaaaaggacttgacaaaatcaaactaattcatataaaagctctctgtaaactagtaatagagttgaactttcttaattcaataaagaatatttaccaaaaacattatacttaatggttatcatcctaattcatggtgagaaagtcaatactttcccactaagatcaggaacaagtcaaggatgtcccctctcacaattgctttttagtttcattatggcagctctaacttatgcaataagataaaaataaataaaagatatacagattgtaaagaaaaaaaaaactgcctttgttcacagatgtcatgagtatgtagaaaatccaaaagaatcaaccaagaa

SEQ ID NO: 282171 - DNA, 638 bp, Homo sapiens
aaacttcctaactcagcatatgaggccagcataccctaatgcgtaaaaccagacacacattacaagaaaagaaaaagacagataaatatctcacatgaacatagatgtaataatccttaacacagtattagcaaatcaaatccaaccatgcgtaaaaagcataataaaccacaaccaggtgggatttatctcagatgttcaagaytggttcaacatttgaaaagcaattaatgtaatccattaatacattaataggctaatggagaaaaattacgtgatcatatcaatagatgcggaaaaaggacttgacaaaatcaaactaattcatataaaagctctctgtaaactagtaatagagttgaactttcttaattcaataaagaatatttaccaaaaacattatacttaatggttatcatcctaattcatggtgagaaagtcaatactttcccactaagatcaggaacaagtcaaggatgtcccctctcacaattgctttttagtttcattatggcagctctaacttatgcaataagataaaaataaataaaagatatacagattgtaaagaaaaaaaaaactgcctttgttcacagatgtcatgagtatgtagaaaatccaaaagaatcaaccaagaa

SEQ ID NO: 282172 - DNA, 1197 bp, Homo sapiens
aaacttcctaactcagcatatgaggccagcataccctaatgcgtaaaaccagacacacattacaagaaaagaaaaagacagataaatatctcacatgaacatagatgtaataatccttaacacagtattagcaaatcaaatccaaccatgcgtaaaaagcataataaaccacaaccaggtgggatttatctcagatgttcaagattggttcaacatttgaaaagcaattaatgtaatccattaatacattaataggctaatggagaaaaattacgtgatcatatcaatagatgcggaaaaaggacttgacaaaatcaaactaattcatataaaagctctctgtaaactagtaatagagttgaactttcttaattcaataaagaatatttaccaaaaacattatacttaatggttatcatcctaattcatggtgagaaagtcaatactttcccactaagatcaggaacaagtcaaggatgtcccctctcacaattgctttttagtttcattatggcagctctaacttatrcaataagataaaaataaataaaagatatacagattgtaaagaaaaaaaaaactgcctttgttcacagatgtcatgagtatgtagaaaatccaaaagaatcaaccaagaawgattgtaaagaaaaaaaaaactgcctttgttcacagatgtcatgagtatgtagaaaatccaaaagaatcaaccaagaaatttctggaactaataagtgattatagcaaaattgcagaatacaaagttaatatacaaaagtccattgctttccwatacatgactaatgaacaagtaaaatttgaaattaaaaacacaatatcaattatattagcacctcttacccccaaaaagaaatacagtcatctcttggtatctgtccatgggagaatggtttcaggtccctctgtgggtaccaaaattcatggatgctcaagtcccttatataatctacatatattttaccatatactttaaaacatctctagattatttataagacatagtatgatgtaaatgctacttaaatggttgttatattatttacatttttagtgtttaattactcttttatgtatttattttttctgactagtttccttagttgtttgaatctgtggatgcagaattgcagatacagggagccaactgtacttaggtataaatctaacaaaatatgt

SEQ ID NO: 282173 - DNA, 558 bp, Homo sapiens
gattgtaaagaaaaaaaaaactgcctttgttcacagatgtcatgagtatgtagaaaatccaaaagaatcaaccaagaaatttctggaactaataagtgattatagcaaaattgcagaatacaaagttaatatacaaaagtccattgctttcctatacatgactaatgaacaagtaaaatttgaaattaaaaacacaatatcaattatattagcacctcttacccccaaaaagaaatacagtcatctcttggtatctgtccatgggagaatggtttcaggtccctctgtgggtaccaaaattcatggatgctcaagtcccttatataatctacatatattttaccatatactttaaaacatctctagattatttataagacatagtatgatgtaaatgctacttaaatggttgttatattatttacatttttagtgtttaattactcttttatgtatttattttttctgactagtttccttagttgtttgaatcygtggatgcagaattgcagatacagggagccaactgtacttaggtataaatctaacaaaatatgt

SEQ ID NO: 282174 - DNA, 562 bp, Homo sapiens
gaaaacaaagttggaggacagatgctacccaaaataccttatgccttactttaaggttacagtaataaacacagtctagaaccagctaagtaacagrcaaacagatcaatggaacagaatgaaaactcagaaagactccccaaaatataatcaactgttcttcaaccttggcgttgctgatgacttttaaggtataataccaatggcactatccatttttaaaaaatggataagctggatttcattaaaattaaaaaccctgcactgtcaagaaaatcaaaagataagcctgggactgggagaaaaatatttgcaaaagacatttctgataaaggactattatccaaaatatgtaaagaactcttaaaactcaacaaaaagaaaacaacccaattaaaatataggtcagagtttttaacagacttatagatgtatatacatttgaaaagatgctccacattatgatatatcatcaggaaatgtacattaatacaacactgagatattactacatacacgttaaaatggccaaaatatgacaataacaaatgctggcaaagat

SEQ ID NO: 282175 - DNA, 582 bp, Homo sapiens
tcatttatcataatgcttaaagttggatgaagtctctgaaaagaggagcaatactaacacttagaatttattttgttctttatggttgtgaagatttttgcatccatttttttcttctgatttatcaagctacattctgaggcacagggaacaggagatagtttttagcatttctatttcatagacatagagcagaaacccacaatttcttcttttggcttggagtaaattaattttctttttgctatttttacctttggttgaggtcagacaaaagtttaattaatctcaaaaattttcttaacatcagtctatccagagtgcttagagaaagctgtaggatatgaacttatgtaagtcaatttatatttgttgacatctcrgttaagaagatgtatggatgagaggaaaaatgaagttatttttaaaaatgagcttgagtttcatatttttaagtggcccccaccatcttgcattaccctggatcattagatatacatatgatttttttctttttatattagtggagttgggttggctgaagagtaccatcttctaaggtctagaatgctcctgactaaa

SEQ ID NO: 282176 - DNA, 609 bp, Homo sapiens
catttctatttcatagacatagagcagaaacccacaatttcttcttttggcttggagtaaattaattttctttttgctatttttacctttggttgaggtcagacaaaagtttaattaatctcaaaaattttcttaacatcagtctatccagagtgcttagagaaagctgtaggatatgaacttatgtaagtcaatttatatttgttgacatctcagttaagaagatgtatggatgagaggaaaaatgaagttatttttaaaaatgagcttgagtttcatatttttaagtrgcccccaccatcttgcattaccctggatcattagatatacatatgatttttttctttttatattagtggagttgggttggctgaagagtaccatcttctaaggtctagaatgctcctgactaaacctcagagaagagcaatgcagatttgattgactttcacctgttatctttcctacaattactttgatactcaactatggcttgtattttgttgacagacattctagaaagctttgctttctgtgcatttgtttaatccaccatttactatatagaaaactcaaatgaacttaaatagtttgaagtgaaaaaagcta

SEQ ID NO: 282177 - DNA, 522 bp, Homo sapiens
tttattacagtggctactccagcctgtgccatcatgaatggatttcagcctaaatgaaagggaaatgaagaggttgcttctttccttttaaggatgttggaacctagacatgtcacttacrctcacttagcttaggcaagaaaagtactccctgtgtttagtaacatagaattccctagcaacctaagttacagcagattgaagggcatttactgtgagcagaaatggcaagcctttttgagaaaaattgtcatgaagatgtggagagtgggacagaagctggaggatgataaagatgaagagagaggattttgatgtaattaagttcttataatataaatgataaatggatacattatgaagacattgagaaaaaggggatacttgatggtggagtaactctgtctagacaagaattcagagaatattcagagaatattttcatcctgcagaatgataggaaaggatggagacaggtgcaaaaatatttgtggacttggtggcagaattttgatgtagttc

SEQ ID NO: 282178 - DNA, 588 bp, Homo sapiens
atatgtctccccctgccaccacttggagaataagataaaaaggcagctttatgaaggtttcttggaagggaagtcaatcactcttctggagggtgaaagaatccaactctagatgtcaacaagaaagcatctcatcataattcyaactggcagacgttctcagaaaatgaagactgaatttagaatgcagccagcataaaggatgattgaactaacaatggaaagaactgaagaactttattacattgttgagctctgggtcaataaaccataaagcctgatctccctgaaatttcatttacattatattatgtgtcctattgtttaagacaatttgcattttttccattacttgcaactaaaatcatcctaactgacacatatattccagagaaaagagagtttgtacaaaggcacagtgttgagaataagcttgtcatatttagggaacagcaaggatgctaccatcgagttgtaaaaaagtaaagcaggagttaaatggttctgggcactaaaaagaaaggctatgattgcaaatataaatggcttaaggaggtggaagcccagtttaatggaattaaggtggtc

SEQ ID NO: 282179 - DNA, 602 bp, Homo sapiens
acattaaagggatatgaggcatgaagagaatagctgactttggaatattacgtaacattgtcatttcagtgtaagctgagggttttgttgtgctcaggggcataaagatattagcaaacagttttgttttttttcttctatacagaaatatatgaggagattgttatgaaaaatctgaagaaattcttgttcatccttggtcagctgtgctgtggatgggattagtttctagaatcctctcctagtggaaaaaaaaaagtgtaggagcatagttgagtgaactcaaaatggttatgctccaaaaaaataacttattgttatagatcccagagagagtcttcagccacacagaaagatttgtggctttgttctctaaacggagcatacaatattgtttttatgggcagactatgttcttttaagacaggtaagataaccaragaaggaaaataagcttttcaaataattagcaatccttagacaaaacttgttttcctttcttggttatgttacctatttgttcagtagacagaggctcttagtgtatgaactaagagtagacattgtaaataaatattctttttctctgttaaaaaatgtgc

SEQ ID NO: 282180 - DNA, 575 bp, Homo sapiens
ggcacctggggaagaagcattaagtgttgattaatttagtcmaacaaatgtattgaacacaaactatgccaagcactgttgtaggttttgcacatgcagcagtacacgaagcaaaccaaaatctaccctaatggaagttgtattcctagtgaataggatacttaagaaataaataaatatgcaaaaagcatagtatgccaaatgatgagggctatacaaatatataaaagattttaaaaatatttttatatctcacagaaaagagagggggatttttagagtagacctactttacatagaatagttaagaaagtcctcacttacagggtgacgtttgcacagaaacttgaccatggcaagggagtgagctgtgagagtatctggaggaagaacatcacaactgagaagtacaatgcccctgaggtacaagagacaacaaggaggtattccagggtacagtgatcaaggaaaagagaattttaaaaatgagatttacagagagagcagagagtcaaatcttgtaataacagaaatgactgtgggctgttcaaagagtagggagagagaataactat

SEQ ID NO: 282181 - DNA, 575 bp, Homo sapiens
ggcacctggggaagaagcattaagtgttgattaatttagtccaacaaatgtattgaacacaaactatgccaagcactgttgtaggttttgcacatgcagcagtacacgaagcaaaccaaaatctaccctaatggaagttgtattcctagtgaataggatacttaagaaataaataaatatgcaaaaagyatagtatgccaaatgatgagggctatacaaatatataaaagattttaaaaatatttttatatctcacagaaaagagagggggatttttagagtagacctactttacatagaatagttaagaaagtcctcacttacagggtgacgtttgcacagaaacttgaccatggcaagggagtgagctgtgagagtatctggaggaagaacatcacaactgagaagtacaatgcccctgaggtacaagagacaacaaggaggtattccagggtacagtgatcaaggaaaagagaattttaaaaatgagatttacagagagagcagagagtcaaatcttgtaataacagaaatgactgtgggctgttcaaagagtagggagagagaataactat

SEQ ID NO: 282182 - DNA, 501 bp, Homo sapiens
taggatacttaagaaataaataaatatgcaaaaagcatagtatgccaaatgatgagggctatacaaatatataaaagattttaaaaatatttttatatctcacagaaaagagagggggatttttagagtagacctactttacatagaatagttaagaaagtcctcacttacagggtgacgtttgcacagaaacttgaccatggcaagggagtgagctgtgagagtatctggaggaagaacatcacaactgagaagtacaatgcccctgaggtacaagagacaacaaggaggtattccagggtacagtgatcaaggaaaagagaattttaaaaatgagatttacagagakagcagagagtcaaatcttgtaataacagaaatgactgtgggctgttcaaagagtagggagagagaataactatggttaatagggaatgagtcattaactcgtggtcaacataccgaagatccacatgcaagtttaggtagcagaccaggaat

SEQ ID NO: 282183 - DNA, 525 bp, Homo sapiens
gcatgagcactttggtctgatttgggtaactatagcctaggaacaaaaggtgaagccttggtaagaaaaaagctaataagaaggcaagaagcagaacacagggaataaaaaatattgtcttcagtttgaatgcaacattgcatcatttgttgcttattttgtactctgttctgcctgttgaacagttaccaaatttattctgtctttgttcccttggtaatctaagggattgtgtcatttgacattgctccagtaacagtgatttctggaagtggrtatatcatttgtaaagaatctggaagctatgcaatggaagatattacaaaaggtatgttctcctgaggtgttgaagccagaacaactcccacacctactttatgtgaatctcattcctttttacctgaactatatcacctcgaaagaaaaagaaatagcttatgaatgaattgctgcagagactgttgtgaaaaaaactcccatgggaatggatgtgctttctttctggaagcgtggttcctgacctaa

SEQ ID NO: 282184 - DNA, 525 bp, Homo sapiens
gcatgagcactttggtctgatttgggtaactatagcctaggaacaaaaggtgaagccttggtaagaaaaaagctaataagaaggcaagaagcagaacacagggaataaaaaatattgtcttcagtttgaatgcaacattgcatcatttgttgcttattttgtactctgttctgcctgttgaacagttaccaaatttattctgtctttgttcccttggtaatctaagggattgtgtcatttgacattgctccagtaacagtgatttctggaagtggatatatcatttgtaaagaatctggaagctatgcaatggaagatattacaaaaggtatgttctcctgaggtgttgaagccagaacaactcccacacctactttatgtgaatctcattcctttttacctgaactatatcrcctcgaaagaaaaagaaatagcttatgaatgaattgctgcagagactgttgtgaaaaaaactcccatgggaatggatgtgctttctttctggaagcgtggttcctgacctaa

SEQ ID NO: 282185 - DNA, 371 bp, Homo sapiens
tttgaaaaacattatgttatgcatagccaaataaacacgaattttttcaatacatcactattggattgttttctttctttagaatttcactcccaaataagttacaacaccattgtagtgaattgaaagagaaccacttcttctgagatagtgtataaattttttgcctataaaaacttaaaatacatatttaaattagataaccaaagtatgtcctyataagaattttcatgtcaataatatgaagatattcttaatattatatcttagtttattaagtaataggtaaatattataaaaacgaaagatgagtaaaaatcagtgagttttaatataactcacaataattacaaatttattaaaaagacatg

SEQ ID NO: 282186 - DNA, 1212 bp, Homo sapiens
gctatagcactgtattactttcctagggtgactgtaacaaataccacaaacttagtggcttcaaaaaaatataaatttatcactataaatacagttctggatgccagagttcaaaactgagggatkggcaaagctgcacttcctctaaaagctccaaggataaatctattccttgccttttccaacttctggtggcttcagttattttttggcttatggccatatgtttccaatatctgtctctgtacccatattgcttcttcctctgtggctgtcctctgtgcatcatttataaggacacttgccattggatttatggcccagccagataatgcagcatagtcttctcatttcaagatccttgtcttagttacatctgcaaagatcctttttctaagtaaggtaccattcgcaggttctggggataaggacattgacatatcttttgagaaccaccattgagttcactatagtctaccctctgagccctaaaaatttacatctgcctcatgcacaaaacacatttatcccattccaacatcctacaaagcttcaacgtattaaagcagtaactctatgtccacaatctwtctcttcatctgtggacctctgaaagtagaaaacaagttatttttaaaaatacaatggcaggatagggataggataacagttttaaatatttccacttcaaaagggagaaaaattaaggaataaaaggatcaccagttccaggcatgttcaaaaccaacaggccaacttcagttagatttcaaggcctgggtataatcctctgtggctaggggttctgccttctgggctcatgatttcwctagttaggtgaaatatggagcatggcagctccataagcctctatttgagacagctctatagcttctgaccccagcagcacttctgtaagcctttgtctctgtacctttagtggctcagtaggtctctgcctttgtgtttttgcttttgacttctgcacctatgaatatgcttccagcctctgccttagtgctgtagctccataggcctttgcacccatgtctctgtgggtctctgcacctgtggcacactcatctgggtatttctcgaagaacagaaaatatttgcagccaaatagtaatatcaacctgtttccatcctgtagagttttggaaatctgacaactttcttcattttgtcctctctctgtccctgtcagtccaa

SEQ ID NO: 282187 - DNA, 607 bp, Homo sapiens
tacttaatgctaataaatataatccatgcccttttgtaatgcatcgtacttattcatgtaactttttctggagtcctaaaatcttccttagggatacttctgtgtttgtctcattcttgcatacttctaagggtattttcattatactatattgtaatggtctatttgtccacttcctatatctgctagattgtgtgctttttgtggayggaagaaatgtcttatgtgttccctgtcactttaatgagttgcttttcttatgtccttgcaatgattcacgtatgcattcctctatataccttcatcatcttctacgtcttccatcacaacacttaatataaatacaactttaacatctctttcacacaatacattgtaacacaatgcttctcaaccaaggatgtttttgaaccctgggggacatttggtaaagcctggagacatgttttgtagtcaaaactgagattctattgtcatctaatgagtagaaaccagggatgctgctaagtgttctttaatgcacaggacagagcctccccattacaaataattatcccacccaaaatatcagtagtgacaacactgataaattttggtgtaaactcag

SEQ ID NO: 282188 - DNA, 607 bp, Homo sapiens
tacttaatgctaataaatataatccatgcccttttgtaatgcatcgtacttattcatgtaactttttctggagtcctaaaatcttccttagggatacttctgtgtttgtctcattcttgcatacttctaagggtattttcattatactatattgtaatggtctatttgtccacttcctatatctgctagattgtgtgctttttgtggacggragaaatgtcttatgtgttccctgtcactttaatgagttgcttttcttatgtccttgcaatgattcacgtatgcattcctctatataccttcatcatcttctacgtcttccatcacaacacttaatataaatacaactttaacatctctttcacacaatacattgtaacacaatgcttctcaaccaaggatgtttttgaaccctgggggacatttggtaaagcctggagacatgttttgtagtcaaaactgagattctattgtcatctaatgagtagaaaccagggatgctgctaagtgttctttaatgcacaggacagagcctccccattacaaataattatcccacccaaaatatcagtagtgacaacactgataaattttggtgtaaactcag

SEQ ID NO: 282189 - DNA, 478 bp, Homo sapiens
tgtgagtggtattttcttagtgaaatgggagtatttttctgattaattatttggaatctgtaatagagaaacatattgttttgaaaaataattgcacaggtgaaagcaatarcaaaatcttcattagaaaggcaaggggaactagcagcagaggaaaactaaagaaattcattgtgcttgagactaacctatttaagaaggagaaattgctgacacatctcttcaagaggatcatatctcatatatttggaggatgaaagaatttgcagctaaaggaattagctttaggctgtatttaaatctcacaaacagtctcaatgccatgtgtacaattgcaatatcttgtccaaagtacatatttttttcccaatttttgagaatacaattttatactttgagtataattttctcttttatgtattttttcaaataaactttatattttagaaaaaatgttgatatacagaaaagttgtgct

SEQ ID NO: 282190 - DNA, 478 bp, Homo sapiens
tgtgagtggtattttcttagtgaaatgggagtatttttctgattaattatttggaatctgtaatagagaaacatattgttttgaaaaataattgcacaggtgaaagcaataacaaaatcttcattagaaaggcaaggggaactagcagcagaggaaaactaaagaaattcattgtgcttgagactaacctatttaagaaggagaaattgctgacacatctcttcaagaggatcatatctcatatatttggaggatgaaagaatttgcagctaaaggaattagctttaggctgtatttaaatctcacaaacagtctcaatgccatgtgtacaattgcaatrtcttgtccaaagtacatatttttttcccaatttttgagaatacaattttatactttgagtataattttctcttttatgtattttttcaaataaactttatattttagaaaaaatgttgatatacagaaaagttgtgct

SEQ ID NO: 282191 - DNA, 459 bp, Homo sapiens
aaaaatgtggctggagctaaaggcatagtcaaggttaatgctcctttttctttattcgagttatttcttcaataatgtcatcttcartgacattcagatattctttgagagtaaagaaagtattttgtttagcaaaactgaaatttgtatgagagggccttgaacctgagagtttgtgtgtcacacagcagagaaaaaatagtttgagaggtgcaatatttttacaatatttttctagaaatattatccatactatttaaataatttaagtaatcattaataactttgaatattatagaactttcatggtatgcaataatatatgcaattccatcaattgtcattgttaagaaatgttgtatattgatttattcacactataatcaactttgagaaaagcagaaacacaaaatgataacactttactgtaacagaactaaaaaaaaatgcccatcgaga

SEQ ID NO: 282192 - DNA, 459 bp, Homo sapiens
aaaaatgtggctggagctaaaggcatagtcaaggttaatgctcctttttctttattcgagttatttcttcaataatgtcatcttcaatgacattcagatattctttgagagtaaagaaagtrttttgtttagcaaaactgaaatttgtatgagagggccttgaacctgagagtttgtgtgtcacacagcagagaaaaaatagtttgagaggtgcaatatttttacaatatttttctagaaatattatccatactatttaaataatttaagtaatcattaataactttgaatattatagaactttcatggtatgcaataatatatgcaattccatcaattgtcattgttaagaaatgttgtatattgatttattcacactataatcaactttgagaaaagcagaaacacaaaatgataacactttactgtaacagaactaaaaaaaaatgcccatcgaga

SEQ ID NO: 282193 - DNA, 459 bp, Homo sapiens
aaaaatgtggctggagctaaaggcatagtcaaggttaatgctcctttttctttattcgagttatttcttcaataatgtcatcttcaatgacattcagatattctttgagagtaaagaaagtattttgtttagcaaaactgaaatttgtatgagagsgccttgaacctgagagtttgtgtgtcacacagcagagaaaaaatagtttgagaggtgcaatatttttacaatatttttctagaaatattatccatactatttaaataatttaagtaatcattaataactttgaatattatagaactttcatggtatgcaataatatatgcaattccatcaattgtcattgttaagaaatgttgtatattgatttattcacactataatcaactttgagaaaagcagaaacacaaaatgataacactttactgtaacagaactaaaaaaaaatgcccatcgaga

SEQ ID NO: 282194 - DNA, 1247 bp, Homo sapiens
aattagtacaaataacattgctattggtgacattgttttctgaaattacacgcaattcttgataaatacttgaacaatacaaagtattgtcccttgactcacatgtcacttgcaatattgaaaaattaacagttcccaaacacaatgcagaaacactttatatttttatataaggcagggatgaagcctgggttcagatatgtataaataagataatcgcttactagaattgtctatcaggtagatcatttggaattgtgtgggattcaatctgattctgctttgtaagatactgtcctaagtcatgcaactctggccctcaatcattgagcactcaacaatgatatttgctgcgaytgacttcaatcaacactttaggaagtgtttaaattttaagtaacagaatgagttgtttacaattcaagggtgtttaattagcatttgaaagactttaatcaaaggcccacacttcagccacaagtatagcaagccattcaattagtgttatcttaatctacactagagaatttgttaattaacataaggaatggtaaaaataaattttcattatctaaatgagagttgtacaagatacatgattggttaaaaacaaaaagtacagttatcattaatgawtgtttcaaacacaatgttacctagaatttggttcatagcatcagtatcacttgggagcttttaaaaaatgtagagtcgcatgcaccatgtagaactcccaaatccaatctgtgtttttaacaggttattcaagccatttgtatgcacttaaggtttgagaagcatttcttgaaggcattactctactaaatagttattagttgcatctctagtctctcccttggctgactctgtttcactaaaaaataataaataaaaattattaccctgaaataccatcctcaatgccttccttccctcccctcaaacagataaacaaacaatgatgaacaaacacagttctcaataatatagtcatacattcatttactcatttatttattwaaaaaaattattctctaataagtattgactgtgtcagacattctctgtgcactggaaatgcagtggagagcagcggagacatgggctcttccttaaaagatttttgaataaactagaggagacggacaattaagtaaataattaatctcaagtttgattattcctctaagagaggaagcatatagtacacatatgcacatgcaatgagatcatattcattagttcaa

SEQ ID NO: 282195 - DNA, 546 bp, Homo sapiens
tttctaattttcatttcacctggtattttaaaaagctggcctgtaatttttgtttgagtattgacccagggttcttttagtctttgaagggaaaaaagagttctaaagaaaattgcttgtcctgctaattttgcctggagcatttaatttgagtgttaaatggaatgtgaccttatttgtatcacacccttggtgatgtagtaatactggctctctctatgctatttgtggtagatgaccactaacttgttgcaaattcttyctcccttggttttgatacatagtattagatattgtctcccttattttttttttgtcttttttttcttcccatctaaatgcagtaaccctcaataactaggctttaaccctctttatttcttgttgcatactttatctttggcaacttcaaatttccaagatttacactaatttaaggggttttaacgcctcataacaaaaccaactcttacctatatttctctgatttatttctgttaataattgccacaacaactctttttgatcaccatgtttctagttcct

SEQ ID NO: 282196 - DNA, 380 bp, Homo sapiens
gcctaaatcaggctataaaatgttttacttttattatgtaatcacttatgattaaatgtcatctctcatggtatgctttcctcaaactaattctcttctatgtgccccggaaatactatccagcttaataattcaaaggaatagctctgatcatacagcaatactctcctattgagaaattatcactaattgctcttacaatattattttctgaagcattctttcaaaatgggtttcaatagttaaacaagtataaaatctttgtataaatacaattacaaggtttctttactagaaaayttctcagagccttttattcactgggtactggttgttgttttgttttgttttaattattgtagagtaactcgtaatactaa

SEQ ID NO: 282197 - DNA, 602 bp, Homo sapiens
atgtaagtaaaaacttaaaaatcttaataatggtcagtggaactgggaagaagatggctctttaaatgtgtgaattgtctttaaatgtgtaagtacatatataattacacgtaaatataaaagtagatcacatataaagagcagttgatatacagaaagacttaaaaaggaaacaagtattattttagagcagtaattttggagtaataagttattcatatcaataaaacatgtattctgtgttatttttttcagtaatgatgaacagtttgggctaatatttttctgtgtttgtcagtaatgtgaatgactactttgcttaattgggcaatagttttgaatactggaaaaatatcccttccattttaaatattctatttacattgtaaaatctacagaacttacacatttttaagtttagactgcattattaacattttaaccccatatatatatatataaatatcttgatgaacttacaaacaatatatatgtaaactataaatgtacagtttacacatgcatttttacctcatcttccaccaaataaattytaagaaaataaataaatatggtgatagtatacagatattattttatac

SEQ ID NO: 282198 - DNA, 577 bp, Homo sapiens
tgttgttttaaaattattggtgtcagttaccatttatggtaggttgagttgtgtccccagaaacatgttgaagtcccaattcctggtacctatgaagatgaccctatttggaaataaggtctttgcagatgtacctaaaatgtaatttaagataagcttatgctgaaacagggtgggcccttaatccaatatgactgatggttttataagaagaggagagacaattatgaagatatatgcatggatatgttcattgcaatactattcacaatagcaaagacatggaatcaacccaaatacccatcaatgatagactggataaagaaaatgtggcacatatacaccatggaatactatgcagccataaaaaggaacaaaatcatgtcctttgcctggacacgaatggagctggaagccatcatcctcagcaaactaacgcaggagaagaaaaccaaacactgcacattatcacttataaatgggagctgaacaatgtgaacacatggacacagggatgggaataacacacactggggcctgttggggtggcrgtaggggagggagagcatcaggaaaa

SEQ ID NO: 282199 - DNA, 566 bp, Homo sapiens
ggaaaatgtgtttttagcttctgtacctgattatcacatttgtatgtactaggaatgctaaatataaattacaagggtcaatggttactgtccatttgtcactgagggtcagttggctttgatcccctccagtcgatctctccagggagcctgagccttcaccctcagttattgttgtggccctgtgaggaccatgccccactccattcttcatggcttctttccaacataatgagtctaaaatcattatagtaatagagattaattggaatagattccttgaatatttgcacttgtgctctcttgtaagggaagggtcttcatcacacagcaagggctggattttctaaggtagcagggctttgttccctagtcatgattgctaacagtattaccaagaatgattccrcctattttggttggctgattttaaatataggaaacagttgacaagagagttatgcagtctggagaacagaggcaaaacctacagttctaactttagttttgtcttaaatttgacatttctgactactttccaggatcaagctgagtgatggcagaac

SEQ ID NO: 282200 - DNA, 578 bp, Homo sapiens
ctgtttggagaattgaaaggaattcttttgtgagaatataacttaaattctagaccctcaagcaaaacttgaattaagtttcttatttctagtatttgatttgttgttataactattgttgataagtgtaacaataacctgcctatatacaatcatagtgattaacaatttaactataaaggccgggcgcatggctcacrcgtgtaatcccagcactttgggaggctgaggcgggtggatcacgaggtcaggagatcaagaccatcctggctaacatggtgaaaccccatctctactaaaaatacaaaaaaattagccgggtgtggtgtaacaaaaaaattagccgggcaactgtaatcccagctactcaggaggctgaggcaggagaatggtgtgaacctggaaggcggagcttgcagtgagccgagatcacaccactgcgctccagcctgggcgacagaatgagactgcgtctcaaaaaaaaaaaaaaaaaaaagaaaaaaaacagaaaccaaaaaaacaatttaactataagtgcacagtggtattattataaaggttaagagcttggattttag

SEQ ID NO: 282201 - DNA, 612 bp, Homo sapiens
aagttctgggcaaactccagagcggccatgcatgaaaccaaccagaatcacagggcaaaatgtatgagaactgaacgatggtgcagaatattgccaagatttcaagttggtcrttaatgaaaagcacataaacagaagagaccagaagagcactgtaaatgttttgaaatctcaattaacatttaaactacggcccacaaaagttggccaggacatgcactctgaactttaacaggcatatcacctgctttagcagatataaataggaaatattatcatatacaacttaaaatttccagaatatattaaacatcatttaccatgtcgaccatgaaaatatcaatttgagcaagaaaatcaacagacaccaaagcaagatgtatctaattacaacatgatgttgcaattatctgatgatgattttaaaatctgtatcataaaaatactctgataaaaaattagaaattatttgaatcaaatgaaaatatagaaaatcttgacaaagaaatatcagatataaagaaaaacgaaggtgaaaatttagaactgaaaaatacagtaagaaaaattgaaaactcacaagattggttcaatagcaaaatgaacatgaca

SEQ ID NO: 282202 - DNA, 624 bp, Homo sapiens
aattatccaattggaataaaaaaaaatgcaccattcctcaaaaaatatgaacaatcaaaatatatcaaagataaaaatagataacatgaataatctttattaacaaaattgagtatctagttaaaaagcttttaaaaaaacactcagcctaaatagattcaatagtaaattctatcaaacacataattaagaaatgacctcaatttgacacaattttatccagtaaatagataacacttgtcaattcttttagtgagcccagcattgccttaataccatagctagataacatcaatacaaaaaaacaaaattacaaaccaataatccctgtgaacatacatataaaaatcctcaacaaaatactagcaaatagaatccagattatagataaattaattayatacaatgataaaggcagtttatttcaggaatacaaagctggtttagtatttgaaaacttaccacattaagagtataaagaaaaaaagacaaaaagttatatcagttgatgcagaaaaaacatttgccaaaatgcaatactcactgatataaaattctcagcaaactgagaacagaatggaacttcttcaatctgataaagagtatctatcaagaatacacagt

SEQ ID NO: 282203 - DNA, 589 bp, Homo sapiens
atagtgaaaaactagaagcaatttaaatgtcctttaccaagtaagtgaggtataaaagaggtggtacatctgtgcaaagtaatcctactcaggaataagaaggaataaactattgatataagcaaatactttaatgaatctcaagggccctatgttaagtgaaagaaactgaaccaaaaatgagtacatactatatgattacatttatgctaagttctagaaaagtttaaatgataaaagtctaaaacagacccatgattgccaggggttaggtttagtggggagagtgtgaaaaggctgatttgagattatgaaacatttttctattttgattgtggtggtaattatattaatccatatytatgatgaaatttcatagaattaaactttttaaaaatatgtgtaaaaatatgaaatccaattaagttttgtagtttacttgataatactggtccaatgtcaatattttgactttgataatatacgatggttatgtaaaatgtcatcattgaggaaactgtgtaatgcaaattatctgtatttattttgcaaagttttatgagtcttaaatttttcaaaacaatttttt

SEQ ID NO: 282204 - DNA, 476 bp, Homo sapiens
taactacatacaggtagcatgagggagtttctctggagcaccagaacagttttctatmctgattttggtgggggttatacaaatctatacatgtgataatatttcatagcattttgtaacaaccaccatgaaaaacccaaaggaaaaagaaataagtaagtacaaaaactggtgaaatctgaaaaaaaaaatcagatagtttggtttataatattcaattttctgtttttaaattacactatataacatttataaaatgttatcattaggggaacctgagtgaaaggtacacagaaactctctgtactgttcttacaatatttaaatctaaaattgtttccagacagcagtttaaaaattgactcaatatagaaaatagagtgatttttggtgtgaattcttaactcagaagtctttttcctgctcctacctgatgtcatctgttgcctaacaaccttattcctcattgagaggca

SEQ ID NO: 282205 - DNA, 600 bp, Homo sapiens
tccattgtaactaccatcgtccaatccaccattatttcttacttagaccactgccacacctccaaatttgtcatcccaaatccactacagactctactcccaaccaaatcccctttctccagttatggctggaattttttttttaatttcaaatatgatttttttcactgttacaactaaatactttaaaagttatacattgttcctatattttaagtctaactttctgaacatgttgtttctgatgttaaaattcttcccacttctttcaaggtcatttctaaccactcccatcactgaatacaaattagtcattctgtgctgyctatttctataactgcccttcattgtttctcctcaaggcatgtgcattttccttgcctaaaatatttcttttcccacgttggcttattcttatttgacctcagccctcattttaattttatttctccagagaagcttttcctggccattcctcacctcctaaattagatttagtttactctcacacagcaatctttaccgtcatagggccatcaaatcataaagaaatcactaagttttcattagaccatgatatcaaagcagactggcaggata

SEQ ID NO: 282206 - DNA, 645 bp, Homo sapiens
tcaatttgctccaggaaagatactacatctaggacagcagctggaattttagccaccacctcattaagttcatagtagtcttcagtcattcttcaagacccatgcaacttttgcacagcccaactgatgagttcagtggagatgtgataactatcgccacttctttcaagtctttgatggcagcatggatttttgcaatcccctcagggatgcaatattgcttctgatttattctcttggtagaaatgaaagttctaggagcttctgcttagtccttccaacaataaaagccatcacccatgggtcagagagaaaatgtgggggtttgtcagttgtcaactttggtccctttggagaagtcttagaggaggatttatggtgtgtgcatgtggcaatggtgcagggtccttcctcaagggcacctggcttacctttcagtcaaaaggctctgtgtctataaatttacttatgtctaaaagctrggtaaggggcttcagttcctctctgtgggaattcaagtcaggttttcagctaccagagtttttgctgttatatagatcaggcactacactcacaggttgcccacatatttactttcaagagacatcatgatcaactatccactgtcaaagatctctgccaatc

SEQ ID NO: 282207 - DNA, 645 bp, Homo sapiens
tcaatttgctccaggaaagatactacatctaggacagcagctggaattttagccaccacctcattaagttcatagtagtcttcagtcattcttcaagacccatgcaacttttgcacagcccaactgatgagttcagtggagatgtgataactatcgccacttctttcaagtctttgatggcagcatggatttttgcaatcccctcagggatgcaatattgcttctgatttattctcttggtagaaatgaaagttctaggagcttctgcttagtccttccaacaataaaagccatcacccatgggtcagagagaaaatgtgggggtttgtcagttgtcaactttggtccctttggagaagtcttagaggaggatttatggtgtgtgcatgtggcaatggtgcagggtccttcctcaagggcacctggcttacctttcagtcaaaaggctctgtgtctataaatttacttatgtctaaaagctgggtaaggggcttcagttcctctctgtgggaattcaagtcaggttttcagctaccagagtttttgctgttayatagatcaggcactacactcacaggttgcccacatatttactttcaagagacatcatgatcaactatccactgtcaaagatctctgccaatc

SEQ ID NO: 282208 - DNA, 585 bp, Homo sapiens
tttttgctgttatatagatcaggcactacactcacaggttgcccacatatttactttcaagagacatcatgatcaactatccactgtcaaagatctctgccaatcgaaacattctgattactagtatgcccctcccgacctttacggtagaggtacttaccttccctttggcagttaagtgctgccgtttgaccccttttcgatggcatcrtcctgtactagagtcataacttttctagaaagaggagaaaccacagagatgttcaaggatgcagtacttccttcattaatatatttctcattgctgtcgtgaaggaaatacctctgggtcatcttgtggaatgtagttggcaggtggctgtgcaggtcacacatcgagtattcagttcaaccttcctaattccctaagcctttggattccctcctttacattgtttcagggaagctctggcatctcagccagcatggaattccttcaaattgtagtcaaccaatcaagtaagctattagagtcacctctagaagtatattaaatttatactctcaaacgcatcaaaacaataaattttgccaaaactagtatta

SEQ ID NO: 282209 - DNA, 361 bp, Homo sapiens
aacacaaatacctatgtcaaaggaacaaaatgaagtccagaaataaacccataaatatatagataactgattattaaaaagctgcagagataattcattggaaattgattggaaaaagaatgaccttttgaacaaatggtgctagaacaattgagggaaaaatatttcagcccatacctatcactgtacacaaaaattaactcgaaatataaaacctaaaactataaaacatctaggaggaaacctctgctaacttgagttagacaaaacttagacatcatcaaaatatctaataaaagaatgaaatatcaagccatasactggatgaaaatatttgcaaatcatatatctgataaaggat

SEQ ID NO: 282210 - DNA, 512 bp, Homo sapiens
aacaatattctgaagtagatataactattatcctcattttacagataagaaaacaggcacagagaagttaattgacaccaaagatcacaaagctacaagttgaccaagctaggattcagctcccagcaatcagactccagatccatgtacttaactacaacactagaatagggccaaatataggaaatgctctaaagacacaggtcggccctttaaccaggatatacacagagcaaattaagagaaaaccttagcagagtcaccaatgatggctcaaggagtgtgcaactgacctaacattaattttgtatsacccagaatccctgctctattttagtcctatactgtaacttatcagataagatagtaagaaagtttttcttactaactgcatcttcaagtgtcttgaaggcctggaaaagatttgtctaccccaaaagactgtaaggccctctcttttctttccacataggtgagcaaataaataaaaatcagcaaacatggctgttttt

SEQ ID NO: 282211 - DNA, 512 bp, Homo sapiens
aacaatattctgaagtagatataactattatcctcattttacagataagaaaacaggcacagagaagttaattgacaccaaagatcacaaagctacaagttgaccaagctaggattcagctcccagcaatcagactccagatccatgtacttaactacaacactagaatagggccaaatataggaaatgctctaaagacacaggtcggccctttaaccaggatatacacagagcaaattaagagaaaaccttagcagagtcaccaatgatggctcaaggagtgtgcaactgacctaacattaattttgtatcacccagaatccctgctctattttagtcctatactgtaactyatcagataagatagtaagaaagtttttcttactaactgcatcttcaagtgtcttgaaggcctggaaaagatttgtctaccccaaaagactgtaaggccctctcttttctttccacataggtgagcaaataaataaaaatcagcaaacatggctgttttt

SEQ ID NO: 282212 - DNA, 1119 bp, Homo sapiens
atggagaatctaactgatctccttattcaccaaatatttatgatttgtgcatagaatattgactaatctctaatgtgcagtcttcttgatgaaaagggaagggatagctggggctcrttattgtgtctcttcagtggattagagagattagatgcctaagatgtcccaaagcctgtatcgagtcaggtgatctgatcctcattcccatgaacaacttaggaggcctccctctccagttgtgacacttggaatttgtatgctcatcttcatcatgactatgtagccaactcttggtgttgtgcaatgaaaaatggaaaatataagccagatgattaaaaaaaagaccacgtggctctaggtatgatgaaagacaggcatatgttttcagacacaatctccctctctcttacacacactccttactcttaaatatttggattttttactttacatctaattttaatcccttctcagctggcaccatactattgatgaccaggggacccacagggacagctagcgacgtgccaagttgactcatctgcttgtggaggtaacacttaggaaacawagctgggcatggtggtgcatgcctgtagtcctagctatgctggatactgagatgagaggattgcttgagcctgggaagtcgaggctgcaawgagccgtgatcacaccatttgactccagcctgggtgaccccatctcaaaaaaaaaaatgtacataagagccaggcacagtggctcacacctgtaatcctagcactttgggaggccaaggtgggcagatcacctgaggtcaggagttcgagactagcctggccaacatggtgaaaccccatctctactaaaaatacaaaaattagctgggcatggtggcgtgcacctgtcgtcccagctactcgggaggctgaggcaggagaattgcttgaacccattaggcagaggttgcagtgagtggagatcgtgccactgcactccagtctagaccacagagcgagactccatctgaaaaacaaaaacaaacaaacaaaaaaagcacacataaggccttcacttttctgtctagcttagagagaacatggttttctagaagtttgtctgatttaagctctttgg

SEQ ID NO: 282213 - DNA, 548 bp, Homo sapiens
agctgggcatggtggtgcatgcctgtagtcctagctatgctggatactgagatgagaggattgcttgagcctgggaagtcgaggctgcaaagagccgtgatcacaccatttgactccagcctgggtgaccccatctcaaaaaaaaaaatgtacataagagccaggcacagtggctcacacctgtaatcctagcactttgggaggccaargtgggcagatcacctgaggtcaggagttcgagactagcctggccaacatggtgaaaccccatctctactaaaaatacaaaaattagctgggcatggtggcgtgcacctgtcgtcccagctactcgggaggctgaggcaggagaattgcttgaacccattaggcagaggttgcagtgagtggagatcgtgccactgcactccagtctagaccacagagcgagactccatctgaaaaacaaaaacaaacaaacaaaaaaagcacacataaggccttcacttttctgtctagcttagagagaacatggttttctagaagtttgtctgatttaagctctttgg

SEQ ID NO: 282214 - DNA, 589 bp, Homo sapiens
aggcaaccgttctgttacttgttctgccaatacataacttgggttctctttcctccggcttcccataggaatctcctcattgcccttctagcccccactaacagtctccttcccattcttccatatttcttcattccttctgccagactcaaagcctgtgttattacaggacctcactttcaggtaacaatttatattttagttatctattgctgcataacaaaccatccccaaatttgatggtttataataatttcttattacttcttccaattctgtgggttgaccagggggttattacacttcacatattgttgacttggagttggactgtctaaagggtctgccatggcctcatttatatggctgtaaattggtactggatgctggtyggaggttcaactggaattggcgaaggggcttcagttcttctccatgtggttgcttagggtttctcataacatggcagattggttccaagaaaaagcattccaagaaggcaagccttaaagtgcagggacctatcaagccttcccttgcatcagtcttcctaaagttgcattggccaaagctcatcaggtagccaaac

SEQ ID NO: 282215 - DNA, 1150 bp, Homo sapiens
aggcaaccgttctgttacttgttctgccaatacataacttgggttctctttcctccggcttcccataggaatctcctcattgcccttctagcccccactaacagtctccttcccattcttccatatttcttcattccttctgccagactcaaagcctgtgttattacaggacctcactttcaggtaacaatttatattttagttatctattgctgcataacaaaccatccccaaatttgatggtttataataatttcttattacttcttccaattctgtgggttgaccagggggttattacacttcacatattgttgacttggagttggactgtctaaagggtctgccatggcctcatttatatggctgtaaattggtactggatgctggtcggaggttcaactggaattggcgaaggggcttcagttcttctccatgtggttgcttagggttyctcataacatggcagattggttccaagaaaaagcattccaagaaggcaagccttaaagtgcagggacctatcaagccttcccttgcatcagtcttcctaaagttgcattggccaaagctcatcaggtagccaaacwcttaaaaaaaaaagaggaaatcctgtcatttgtgacaacatggatgaacctggaggaaattatgttaagtgaactaaaccagtcacagaaaagcaaaataccatgtgatctcagttatatgtggagtataaaaaagtcaaactcatagaaacagaggataagacagaaaaataaaatacttcaaagggacacagtgtatgcctatttaatgaagccattttaatttaaaacaggatagcctgcaatgccttatctcaagttaaattagcttcttgatgtattttggtagtgttttttctaatgtatgggtttttagggttttttcatcaatggtggtctccaagatggtaatttaaaagttacaggaaggggtgagtcacagcttttcctggcaaaggctgaaggatgaggggtgaggggagatgttggtcacagacgcaaaatttcagttacaccggaggawtgagtttacaaaatctactgcatatcgcggcaactacagtcaataacactattatggtggttcaatatacaatagttcaactttaccgtgggttcac

SEQ ID NO: 282216 - DNA, 601 bp, Homo sapiens
gtaattgccacttacatactccttcatccaccaacagcaggccacatattcttctcaagctcacatgtaacatttaccaagatagatcacattctgggtcataaaacataccttaaaaaatcaaaaagaatagagatcatataatatctgctctcagacaacaatggaaaaacgacaatggaattaaactagaaatcaataacagatatatctgaaaagtcccagatacttggagactgtacaagacatttcyaagtaacacacaggtcaaggaagaaatgaagaaaaatttcgaaatattttcagttaaaggaaaatgaagatataacttaccaatttgtgggatgtagtgaaaataaagcttaacagaaaattttatagcatgaaatgcatatattaggaaagaagaaagatctaatatcagtggcctgaacttccacttttggaaactacaacaaaaagagcaaattaaatttaaagtaagcaaaagaaaagtaataattaaaaattagagaagaaatcaatgaaagtgaaaacagaaaataatcaaaaaagctgattctttgaaaagataaataaaatcaataaacctctatccagg

SEQ ID NO: 282217 - DNA, 601 bp, Homo sapiens
gtaattgccacttacatactccttcatccaccaacagcaggccacatattcttctcaagctcacatgtaacatttaccaagatagatcacattctgggtcataaaacataccttaaaaaatcaaaaagaatagagatcatataatatctgctctcagacaacaatggaaaaacgacaatggaattaaactagaaatcaataacagatatatctgaaaagtcccagatacttggagactgtacaagacatttctaagtaacacacaggtcaaggaagaaatgaagaaaaatttcgaaatattttcagttaaaggaaaatgaagatataacttaccaatttgtgggatgtagtgaaaataaagcttaacagaaaattttatagcatgaaatgcatatattaggaaagaagaaagatctaatatcagtggcctgaacttccacttttggaaactacaacaaaaagagcaaattaaatttaaagtaagcaaaagaaaagtaataattaaaaattagagaagaaatcaatgaaagtgaaaacagaaaataatcaaaaragctgattctttgaaaagataaataaaatcaataaacctctatccagg

SEQ ID NO: 282218 - DNA, 556 bp, Homo sapiens
gatctcgtcagatcttggaagctaagcagggtctggcctggtgactacctggataagagaagaggaggagttgcctcacagatactccagttggaaagcccacgytcccaaaatgacattcagagtaagaagttgggaattttgagagattcatagacagtggattagaaactggaaaatggatgttaaccttgggcctctcgtagagatcacacctggctgttccacttcggctattctcagaatcattagagtttagatagtcttaggctgagtgaaacgtgacatattggcttccatggcaacacagttataaattgttttggcaacgaatattcgcttcagaaagcattctaggatttctccttcaacccacaagcacacaatttcctaaaacataatgagcccatttctgctcaaaagcggttgccacctaccagtgcaatgccctccatgtcttcaaccacactgtacggcaaagggccttacttagagggcctcgacataggcaactcaagaggtctcagtggtttagagacagagttggactacagaa

SEQ ID NO: 282219 - DNA, 556 bp, Homo sapiens
gatctcgtcagatcttggaagctaagcagggtctggcctggtgactacctggataagagaagaggaggagttgcctcacagatactccagttggaaagcccacgctcccaaaatgacattcagagtaagaagttgggaattttgagagattcatagacagtggattagaaactggaaaatggatgttaaccttgggcctctcgtagagatcacacctggctgttccacttcggctattctcagaatcattagagtttagataktcttaggctgagtgaaacgtgacatattggcttccatggcaacacagttataaattgttttggcaacgaatattcgcttcagaaagcattctaggatttctccttcaacccacaagcacacaatttcctaaaacataatgagcccatttctgctcaaaagcggttgccacctaccagtgcaatgccctccatgtcttcaaccacactgtacggcaaagggccttacttagagggcctcgacataggcaactcaagaggtctcagtggtttagagacagagttggactacagaa

SEQ ID NO: 282220 - DNA, 1210 bp, Homo sapiens
tggttcctttccgagtggaggagggtgaactggcccttgggagagggctggagggacgcggcgggaacgggctgagtacgcagcacccgggtcggcaagggctggggttctgagatcagagagaaaagaggacctgggagtcggaggcgatctccctggccccagccgaccctctgagctctagcgagcctgaatccggctctgggggtggcgcccaccgcctgctgcggctcccggggccagcgccctaacctttcagagcctggccctgccacctgtagaaggaaggcgcgctggtggcccgttcaagcaggcagtggcagcaccgggggccttctagaagggacgaaacggctcaggggccggggaaacttgtttggcttgacaacgcctgggctgggcggttacagcagcaatcccgggattctyggccccggggggtcctgtttacgcaggactcgcggcagactggagggagtggggcgctagagcttccttccttagcagctgagaaccatttcatccccaccaccgctatcctgagaccccctcctctccccatctgcgtcggcttcccgcgaaccttccccggcggcatcttcaaacacacagcggcggacacwagtctctcccagccctaatcccaacctacccaatgaatctcaacccaacccattccatgggagttgagtgacacagcccatttaatttcacacgtatttactgagtatcttttggggcccctgtgagagaacaaagggaacttgaacttctttacagatgtaaggctgcattctttttttttawgcatttcctttgttcttttttgcctccttctttccgatatcccccccactatagaccctgcctccttgtttacgtcctttcaccttggctacccagtgtccccacagtgctttccaggtgttcaagacctccagtgggaagcccctctccttcccggtcctacctgcctggagagtacccctagaacctccactcctgcaaagcttatctattgtagtagtcagaatttctaaaatgggctcccaaagatgcccttccctgattcctgaaacttgtgaatatgattagacatcgctcctgtgatgatgttatgttatatggtatagttggccttaagatagggaagttatcctgaagtatctggtggtcccagtggaatcagatgagcccttaaaagcagcaa

SEQ ID NO: 282221 - DNA, 545 bp, Homo sapiens
ctaatacaggaaaaaggatagagaaagtcttgggggcaatattttatatgaaatgaccagggagggcctctttgagaaggtgacgtttaagcagagatatcagaggaagtcaagaaatgtctagggaagaaagttctgggcagaaggaacaagtgcaaagccctaacaccggaagatgctagggatgtttaggagtgacaaggggaccactgtggttggcatagaataagcaaggagaagggggtagggaataatgttgsgggtagggaataatgtcagaggaaactggatcctggcaggccatggaaagcaatggtgatttcattctaagtctgatgggaaagcaaggggggctctgagcaggggaatgccatgatctgacttacattttaaagggtttgtgaccttgtcgagtgtagactggagttggtggccacagtggcaacgaggaaacctgctgggaggctggagagatgagggtggcttgctcagggtagaagcagtgggggatgaatgtggcccgtttctggatgtgttctgatagt

SEQ ID NO: 282222 - DNA, 631 bp, Homo sapiens
cacctgccctgaactgcagggtaacctctagaagaggtcacacagtgccaggttgcagaaacatcacagatgctaagagtatttcatgagaggcaccagctaaacaggcactcgtttccacaaaatcatcaacacttttgtatgcatacagcaagggcaccacgtgcaagggaaatggccacacctgggactcaagaggccaggcttcccatggcaggtctgcctccatggccttgaggaagccgttcatcttccctgaggctttgttttcatctgcaaaatgagtatcattaaaatccatctcgtggtgttacgtaatcagagagcctggaatggtggctggcacatagtaagggcttttatgataagaacccttccaccatggaagagcattttaatactgtgttctcaaatgagtgtatccagaacaatcccatgaggcagatgtattgtcccagttttacagatgagggactgaggcccttggaggtgaaatggctttcccagcatctcttagctcacagtggcagagccatactttacacccaggcctcctgaccccaaagctcttaccctttgcactgaagccccctcagagcagaagagaggaraagccagactgcagtcagca

SEQ ID NO: 282223 - DNA, 1083 bp, Homo sapiens
aatattgttgtatctgacttctttccctcagcttaatgttctcgagagtcatccatgtaggtgtgtgcctacctacagtaaacatgtttatctacagtggttaatgctttcttggtgctggatcatattctgcactatttaatatactgcatgtgcttatccactcacctgttggtgaatattaaagccatatccagtttttggctacgatgaataaggctgcaatgaacatttgtgtacrggtctttttgtggacatatgtttcaatatccttttaatcagttccatttttgcttaaatcagcaagtgttggctcctgttacttgtagctaagagatctgactgcaatagaatgagaggagggaaattagctggcagctggaaggggatgttaggtcacagagaggattttatttttaaggtgtaaaagacttaagcatgtttaaatattgatgctcataatctggttgagagggagctgttgagaagagaaaattgatcttgtgawaggcattcatttttgaaaggcagtgttgaatctaggatatttttatttacaagtttaccagtggttatatggcagtaaaattcatttatagagaaaggattttctattccctccagttcacaacgtaaaactgcagtgggccattttgtgataaatttaagatgggtaggagtttaagagcaaggcgaaagtgaggaaactcaaggatagcaatcataaccattttctcaaagttactgccatgagtctgcaagcaccaagattaaatgcctctgctataaacccctcaaggctctcttccttgatttccatgcaaatagaaacaggcaagagagaaatgagttgccwtcaataatcaaaacaaatcaatgtgctaatgagagaaagggtaaaaaacatagatagcatctccatcccaggaaggtaaatggatgtcatcataaaatcaaaatacgattgcactttattaatctagagccatcagtaaaaatcttccaatagtagctacctgcaatttagtaagataagtcttaatgcttccacctctttcaaagagaggtagagagcaaatccaa

SEQ ID NO: 282224 - DNA, 575 bp, Homo sapiens
agccacttgcccgagagggattcactgagtgaagaagactggatgagaataatactcgaagctttgagacaggctgaaaatgagcctcagtctgcaccaaaagaaaataagccctatgccttgaattcagaaaagaactttccaatggacatgagtgatgattatgagacacagcagtggccagaaagaaagcttaagcacatgcaattccctcctatgtatgaagagaattccagggataacccctttaaacgcacaaatgaaatagtggaggaacaatatactcctcaaagccttgctacattggaatctgtcttccaagagctggggaaactgacaggaccaaacaaccagaaacgtgagaggatggatgaggagcaaaaactttatacggatgatgaagatgatatctacaaggytaataacattgcctatgaagatgtggtcgggggagaagactggaacccagtagaggagaaaatagagagtcaaacccaggaagaggtgagagacagcaaagagaatatagaaaaaaatgaacaaatcaacgatgagatgaaacgctcagggcagct

SEQ ID NO: 282225 - DNA, 590 bp, Homo sapiens
tcttatttttctgccaagcttttttgttcatttttaagatatgacttgtgaactcttttcccacattgcttcctgttccaaacaccctgccttttacagcctagttaatagaaaaaaaaaagaaacaatgaaatcttttccttctttacagtaactactccaactgcacttaccatattstattgcaattgtctgtgtatatgtaactctaggataaaacattgagctctttgagaacatgcaacatgtagtgaagaactaagtaactttttgttttgttttggcatgctcagcatctcattccacctttcttctggtcatatcaccacaccttgctttggaaacctgcctctctcatgtacgcacatcaggactggtaaacttagcatctcccaacctacaaccgcaatgccacatggagcctctagattgatcaatcatggtagctcatcctctcaaccacagggaaggttcaaggatggtcatatggcccaagctgggctaatcaatatgaatgttataagagagaatgtcttgagactttgaatattttatgcctgaatatatctattgccttgttggatggccag

SEQ ID NO: 282226 - DNA, 583 bp, Homo sapiens
ctcacattacttccaggcaacaggaaagcagcagtcgccaacgtttttggcaccagggacttgtttcatggaagacasttcttccatggaccggggctgggaggggatggtttcaggatgaaactgttccacctcagatcatcaggcattagttacattctcataaggagcgcacaatgtagatccctcacaccctcagtttgcaatacagtttgcactcctgtgagaatctaatgctgtcattgatctgacaggaggcagagctcagcacataatgctttcctgctgctcctgtcattcacctcctgctgtgtggcacagttcttagcaggccacagactggtaccagttcacagcctgggggttggggacccctggcctaagagatcccctcctagctgctccccctagaaggcctacattttccccagagtcttctcagatccccaatgctgaggggtctcccaccagttttctaatgaaggatcccacctcaagattgtcaggcacacctattccttattcaactagttccaccctatacccacctctgtctgagaaagtaagctcaacaagtaccact

SEQ ID NO: 282227 - DNA, 608 bp, Homo sapiens
gtttagttttggtttggtttttttgagacaggttcttgctctgtggtccaggctagggtgtagtggcacaatgatggctcactgcagcctcagcttccctggctcaagctatcctcccacttcagctttccgagtagctgagactacaggtgcctgctaccacccctagctaattttttgcatttttggtagagacggggttttaccatcttgcccaagctggtctctaactcctgggttcaagtgaactgcccgcctcggcctcccaaagtgctggaattacakgtgtgagcccctgtgcccattcttgtttagtttataaaaagaagaaaattctgccacttgtgaaaacatggataaagctagaggacatcacgctaagtgaaataagccactcacagcagggtgaatactgcatggttccacctatatgaggtatctacaatagtcaaactcatagaagcagagaattgttgccagaggctggagggggtgggaaatgggaagctgttgtttaatgagtataaagtgtcagctacactagatgaataaattctagagagctgttgtacaatatagttcctgtagttaataacatggtattgtgc

SEQ ID NO: 282228 - DNA, 489 bp, Homo sapiens
aacagtcattggtgataaagattctgatctcaaaaacttttcaatttagtgagaagacagacaagaataaacaaatcgaaagaacaaattgatggagaagatatgagaaataggtgagtgtgatagacaaaaataaaacatcgtgggataaacattgctaataaacatctggatttcctgtacttctgagtatatgtgggttgtacttctccaccctcttggtcattcatcactatttgactagttctagccagtaacatgtgagtagaacggcaatgcaactgccaagctaaagtattggatggctggtgttcagctctccagctctttcttcctttgatgtggcaatcaggaaagcatatgttgacttgaaggtgtcatgagatgaagaaaactgaagtgctgagccacyacatggaaggtgccttagctaaagtgttgccatacttggaaaattaatgtgagtaaaaaaataactttcattattta

SEQ ID NO: 282229 - DNA, 532 bp, Homo sapiens
aacgactgttctcctaatttcagtattaaaatayataatttttgcctgggataaatgttggaatgtgtgtttacattgagctattctagttgtctcagaaagcagcagagaaacttcaatcaaccacaaatttgttctccaatttattacctcctcacaactttccccaatgaaaagagaaaaataaatctacctagagaattacattttcctcatgtacgcctctggaatttaccacacttttctaatgaagcatcacttcagaattttctaggctctctgagtcaaagcacagcagaaggatctttggagaaaaacgattggctgcttgatgtttgctaagtcatttgaaagtctaagatatctcaaatggaaatctccatctgtggtgacataaaatacatctatatttaatgttaatagtcactaatattaagtgtaaataagcagagagaaagatcgtaggacccttattcaccaaatggatgtaatccataactaattttaaaaaatgaagtcaatcttttggtag

SEQ ID NO: 282230 - DNA, 965 bp, Homo sapiens
aacgactgttctcctaatttcagtattaaaatatataatttttgcctgggataaatgttggaatgtgtgtttacattgagctattctagttgtctcagaaagcagcagagaaacttcaatcaaccacaaatttgttctccaatttattacctcctcacaactttccccaatgaaaagagaaaaataaatctacctagagaattacattttcctcatgtacgcctctggaatttaccacacttttctaatgaagcatcayttcagaattttctaggctctctgagtcaaagcacagcagaaggatctttggagaaaaacgattggctgcttgatgtttgctaagtcatttgaaagtctaagatatctcaaatggaaatctccatctgtggtgacataaaatacatctatatttaatgttaatagtcactaatattaagtgtaaataagcagagagaaagatcgtaggacccttattcaccaaatggatgtaatccataactaattttaaaaaatgaagtcaatcttttggtagwggatatggatgtctttgtaaggaggaaggaaagaattattctctctaccacagaaaagctggaagaaacagctctccattcataagtatccattcataaatatccattcataagtatctggagtgccattctttatccattcatcaatatttgcagtgcctatagaaggggtagcatcagtttcaaattggacataagcttaggctactcagacccattgtctgtcctaccagaggataagaaaattagagatcaatggcaagctggagaaagggagcagcctgaaccttttctgtggattaaccagaactgctaatatggtttggctgtgtcccgacccaaacctcaccttgaattgtaataatccccacatawcaagggcagggccaggtgaagataatcgaatcatgggagcagtctcccccctactgt

SEQ ID NO: 282231 - DNA, 546 bp, Homo sapiens
ggagtgtgactctggggataacagttgggggtgatgatgaaagaggcaaagctaggtcttctgtgccagggaacttgtgcaataggaaaacctcatggctcggtgcctccaaattgactcatgtgcatgcctctgagaaccagcacttcccctgctgcaccaagggtaacagaaaaggtcaaactgrccagaagagcaatggccatcaacaatagtgcaatcacatgggcagttaaggaaaataaagtggtgctctctttacttctatctcattttccatctctccaactccccagagaagttaatactagaaagggtggtacaggtgcctttagaaagtcatccaaattctatccctactcagaacttttagcctcaagtaagacaaagctgtgttggtgaagggataaggaagtatgagattacaatttaaaattggtctgaaccagacttttgaaaactttttactgaaatataatacacctactttaaaaagtacactgaggtgtatagattgctaaattttcacaaactgaacacaccaat

SEQ ID NO: 282232 - DNA, 546 bp, Homo sapiens
ggagtgtgactctggggataacagttgggggtgatgatgaaagaggcaaagctaggtcttctgtgccagggaacttgtgcaataggaaaacctcatggctcggtgcctccaaattgactcatgtgcatgcctctgagaaccagcacttcccctgctgcaccaagggtaacagaaaaggtcaaactgaccagaagagcaatggccatcaacaatagtgcaatcacatgggcagttaaggaaaataaagtggtgctctctttacttctatctcattttccatctctccaactccccagagaagttaatactagaaagggtggtacaggtgcctttagaaagtcatccaaattctatccctactcagaacttttagcctcaagtaagacaaagctgtgttggtgaagggataaggaagtatgagattacaatttaaaattgrtctgaaccagacttttgaaaactttttactgaaatataatacacctactttaaaaagtacactgaggtgtatagattgctaaattttcacaaactgaacacaccaat

SEQ ID NO: 282233 - DNA, 576 bp, Homo sapiens
tcatcatggctccctgcagcctcgatctcctggattcaattgatcctcgcatctcaaccacctgagtagctgggactataggcgcatgccaccgcatttggctaatgtttctatttttttgtagagatgtattctccctatgttgccaggctgatcttgaattcctgggctcaagtgatgctgctgcttcaggctctcaaagtgctgggattacaggcatgagccactgcacctgcccttattttatatatatatayatatatacacacacacacacacacacacacacacacacacacatatacacatatatatgtatatatatgtatttttttttgagacagactctcactcctgtcacccaggctggagtgcaatggtgcgatgttggctcactgcaaccttatattttttaaaatccatttgtttttagattattttctgacataagtgcatgacatgatttggctgtgtccccacccaaatctcatctggaaatgtggctcccataatccccacttgtcatgggagggatctcgtgggaggtaatggaatcctgggggcaggtttttccca

SEQ ID NO: 282234 - DNA, 576 bp, Homo sapiens
tcatcatggctccctgcagcctcgatctcctggattcaattgatcctcgcatctcaaccacctgagtagctgggactataggcgcatgccaccgcatttggctaatgtttctatttttttgtagagatgtattctccctatgttgccaggctgatcttgaattcctgggctcaagtgatgctgctgcttcaggctctcaaagtgctgggattacaggcatgagccactgcacctgcccttattttatatatatatacatatatacacacacacacacacacacacacacacacacacayatatacacatatatatgtatatatatgtatttttttttgagacagactctcactcctgtcacccaggctggagtgcaatggtgcgatgttggctcactgcaaccttatattttttaaaatccatttgtttttagattattttctgacataagtgcatgacatgatttggctgtgtccccacccaaatctcatctggaaatgtggctcccataatccccacttgtcatgggagggatctcgtgggaggtaatggaatcctgggggcaggtttttccca

SEQ ID NO: 282235 - DNA, 572 bp, Homo sapiens
gcaggggctgccagaacaaagtaccaatgggtggcttaaacaacagacatttattttcttgcagttctggattgctagaaatctgagattaaagtgttagcaggattgatttcttttgaggcctttgtccttggcttatagatggccaacttctgctgtgtcctcatttgattttccttttgtatgtcaatgtcctattctcctcttttcatgacaccagtcatattggataggcccatcgtaatgacctcattttaacttaatccctttgttaaaggacccatctccaaatataatcacattttgagatactggagttaggatgacaacatatgacttttcaggggacacaattcagtctataagattcaggaagcacaagtctccaattcccaacttgatcttgtttctgtgcaccacagtgcttactgctcaccctccattcctgagaagttgcatctgtactcagctgatttataggtaaggtgggaktcaaaagtgatattagtaatacaagaaatagaagctaatctttgcagtttagtcagtacttatgcctatctaccaagatg

SEQ ID NO: 282236 - DNA, 619 bp, Homo sapiens
agtttagtgtgttcatgtttcaacttaggtcctactcttggagctagaagatcagagcttaagtcacaggtaggctcagaccttgggaaattaactccaccacttctgagtcttaattctkgaagtcagcaattagtgtaatgattttctgccattcttaactcttggatagtgtgaaatacaaactgacagaatttgttatttttaataagtttaagagcgggctggtcagctgctgtcatctaggcttgctcatgggtctatggtcagctgtgaaaggtctaggatgatctcaggtggacaactcagctctgttccttgtgtgatcttgtgttccaacaggctagtttcctcaaagacacaggaacaagaaggagagaatagaatcaaggtatttggaggccttggctcagaactagtgccctatcacttcttcctcattgcattgggcaaaacatgtgacaagccagcccagattctccagccagcgttatgttgaaatctcaactccaaccctaagcctacctcttcctggtcatgatcacttctgctggttgtagcctttatcactactgcctaccaaaattcaaattcaaatatgggccctccccttctgcta

SEQ ID NO: 282237 - DNA, 1258 bp, Homo sapiens
tctcactatgttgcccagactggtctcaaacccctaggctcaagcaaaccttccatctcggcctctcaaagtgctgggattacagggatgaaccaccatacctggcccagaaatttttaaattggtaatatattccaagagtatagattcaactcctctctccctcaactcttcactgtaattgagacaggactaactcatgaatcttcagagttgtgtgggagcagagattgaggatcaccatcataaagaatgaytgtgtacccaggccagcccacaaacatctaattaatccataatgtggctgttctaaagattatctatttatctattgagatagaggtagagatagggacagaaataaaattggggcttgtgggacaaatgtcccagactctgcccaaatctcttttgagactatattttgcaactacagactgcacagacataataaatacccaatacatatgtgttggataaattaatgaaagtataaaggaataaaatgggattagggccaggaacaagactttacagaagggagagaaaattagagatagtggataaattagtaaaaatatattctgatgtaggtataaagcccttcccatgtcttttgwcatttataaactcagtgtttttagattagaaaaatgctgtttttgaaatgtcgatgaaggtaagttctaatcatctttatgggtgcttttaggattaaagaaaagcagcttatggattcttcctttacataataatgaaaacactgaggctgaaaccgtaagaaagcttctattgttgcttatgttagaaagaattagtcttactactccagcgaagacttgtttaatgtaaaaawtgcactgtttctcttcttctctcttccctattaactcacctgaccttatctacataatctcagaaatgtatactatgcccaaaatctcttggctatttggcccaaataattccctgaactagaagagtcaggcttaaagacatgtccttgatttaggaaaatttgataatctgtcttgcatcttctactgacacatgctgattaattactaaatcagaagtgagaagttaaattgttttccttggaaacatctctgtttctatggcttgtgcatgaaattttcatcaggcttttaccttcttctcctcctgaccataatgcatcatggcataaagcaccttatgctcactcaaagatcaccaaactcggggtcaggggactgaattctgatacagacatgac

SEQ ID NO: 282238 - DNA, 624 bp, Homo sapiens
tactaaattcctcagttaggatgggctgattcaattgcattcacttctgatttgagccatcacgttctaaggccataggtactcatatctagatctcaggcatttcacttgaccttgacaaacttcggacacctcagtgaccagagctggttaagagaccagcattgtagttatggccagctctagaatgtggttaaatctggctctacagygggatttcccaagtggaatcctggttctgccacttacttagctatatgggcgtggggccaaagaataatctcagtgtctctgtttcctcatctgtaaaatgaggataataataatacatactatatagggttgtttgtagtatcagtgcatgcagagtgcttggaacagtactgaccatgcagaaaatgcccaattttttttttatcacatttattattatggacagagtaggagtgaaagtccttgcattgcagtgtcattttgatggttaaatgagaacatatgtgtgtgtcaatgtgtatatatagcacaatgctgaacaaaaattaagcatcagcaaaagtgattaataacagctgccatctgttgtgagcttacctcatggcaaggactgtgaaagcgccttacgca

SEQ ID NO: 282239 - DNA, 624 bp, Homo sapiens
tactaaattcctcagttaggatgggctgattcaattgcattcacttctgatttgagccatcacgttctaaggccataggtactcatatctagatctcaggcatttcacttgaccttgacaaacttcggacacctcagtgaccagagctggttaagagaccagcattgtagttatggccagctctagaatgtggttaaatctggctctacagcgggatttcccaagtggaatcctggttctgccacttacttagctatatgggcgtggggccaaagaataatctcagtgtctctgtttcctcatctgtaaaatgaggataataataatacatactatatagrgttgtttgtagtatcagtgcatgcagagtgcttggaacagtactgaccatgcagaaaatgcccaattttttttttatcacatttattattatggacagagtaggagtgaaagtccttgcattgcagtgtcattttgatggttaaatgagaacatatgtgtgtgtcaatgtgtatatatagcacaatgctgaacaaaaattaagcatcagcaaaagtgattaataacagctgccatctgttgtgagcttacctcatggcaaggactgtgaaagcgccttacgca

SEQ ID NO: 282240 - DNA, 624 bp, Homo sapiens
tactaaattcctcagttaggatgggctgattcaattgcattcacttctgatttgagccatcacgttctaaggccataggtactcatatctagatctcaggcatttcacttgaccttgacaaacttcggacacctcagtgaccagagctggttaagagaccagcattgtagttatggccagctctagaatgtggttaaatctggctctacagcgggatttcccaagtggaatcctggttctgccacttacttagctatatgggcgtggggccaaagaataatctcagtgtctctgtttcctcatctgtaaaatgaggataataataatacatactatatagggttgtttgtagtatcagtgcatgcagagtgcttggaacagtactgaccatgcagaaaatgcccaattttttttttatcacatttattattatggacagagtaggagtgaaagtccytgcattgcagtgtcattttgatggttaaatgagaacatatgtgtgtgtcaatgtgtatatatagcacaatgctgaacaaaaattaagcatcagcaaaagtgattaataacagctgccatctgttgtgagcttacctcatggcaaggactgtgaaagcgccttacgca

SEQ ID NO: 282241 - DNA, 489 bp, Homo sapiens
taatccagcaatcccactactgtgtgtctacacagaggaagataagcattatttgaaaaagatacttgcacacaggtgtttatagcagcacaattcccaatagcaaagtcatggaatcaaccaaaatgcccatcaatgagtggataaagaaactctggtatatatgtgtgatggaatactactcagccataaaaaggaatgaattaacagcatttgcaatgacctagatgagattagagaccattattctaagtgaagtaactcaggaatggaaaacaraacatcgtatgttctcacttatatgtgggagctaagctatgaggatgcaaaggcataagaatgatacaatggactttgaggacttagggggaaggttgggaagagagcgagggatgacagacaacaaatatgctacagtgtatactgctcgagtgatgagtgcaccaggttatcccaaatctccactaaataacttattcatgtaaccaa

SEQ ID NO: 282242 - DNA, 489 bp, Homo sapiens
taatccagcaatcccactactgtgtgtctacacagaggaagataagcattatttgaaaaagatacttgcacacaggtgtttatagcagcacaattcccaatagcaaagtcatggaatcaaccaaaatgcccatcaatgagtggataaagaaactctggtatatatgtgtgatggaatactactcagccataaaaaggaatgaattaacagcatttgcaatgacctagatgagattagagaccattattctaagtgaagtaactcaggaatggaaaacagaacatcgtatgttctcacttatatgtgggagctaagctatgaggatgcaaaggcataagaatgatacaatggactttgaggacttagggggaaggttgggaagagagcgagrgatgacagacaacaaatatgctacagtgtatactgctcgagtgatgagtgcaccaggttatcccaaatctccactaaataacttattcatgtaaccaa

SEQ ID NO: 282243 - DNA, 639 bp, Homo sapiens
gggttctttttcttatggaacttcccacattatcaattgtttttattgcatacctataacattaatattttataggtatttttatatgtttgtgtttgtgctgttgaataaaaaacatctgtaatgtaaggcattttccaactctaaggatttcagattctctgagatagaaagtatgcttctaagatagcacagcagagtatagaaagagcattgaaatattagtctaaaaattttgattttcatcaatattctaattctgttaattatgggggtgatagagttagttaactactgtgtgcctcaatatactcatctgtraaatgtaggaattaggcttgatggtactcagtatcccattcaagtctaacatttcttgatagcatacattttttgacaaatgaatgaaaagggccatctttcctattggaacaaaattcctaagttatcatttatatattaaacttttaaaaattctttatagtcaatttggaccaacagctatttaatataattcaaaggaacaaggactaaatcatatataaatgttaatattaccttcttctatagctctttcatttgtgttctatgagtttcacttagagttattatagggaaattatgaaatatagattaatg

SEQ ID NO: 282244 - DNA, 568 bp, Homo sapiens
ggtgcccttcctggcttgctgacagccaccttctcactatgtcctcacatggcctttccttagagtgcacgaggggtggtgggcaggtgatattctctggcrtcacctcttataagtgcacgaatcctactggatcaggacctcatctctataacctcatttaatattaattacttctttggataccccatcacaaaatacagccatactgggggttaaggattcagcatatgaatttgtggaggacacaaacattcagtccataaaattgagtattcacttatacattgcttgccacaaattaataaaacataactattgtgaataatgaaatcagaatcatgaaatatctgatgtttaaggactaattaataatactaattgtaaaacacacaaatcaatgagagagaggtatataataagcctttttgttaacatatggaagaatttaagctgccgtcttcaccaaatttttttaagaacttgtttattttgattaagtgaatgctacttatataattaaaaataaaattaatatacagataaaagttcaaagtgagtagaaaga

SEQ ID NO: 282245 - DNA, 656 bp, Homo sapiens
ctaaaagataaaaaaattaagggtgatattttcctctacttctccaaagaatctataataaggcctggtgaaatatgcgtagaatattttcaaaggaatactgtattagatttgtattgttgtataacaaatcatcgcagatcaagtgacttaaaataaatacattacttaggccgagtgtggtggctcacgcctgtaatcccagcactttgggaggcggaggcaggcagatcaccaggtcaggagatcaagaccatcctagctaatatggtgaaatcccgtctctactaaaaatacaaaaaaactagccgggcgtcgtggcgggcgcctgtagccccagctacttgggaggctgaggcagcggaatggcgtgaacccaggaggcggagcttgcagtgagccgagatcgcgccactgcactctagcctgggcaacagagygagactccatctcaaataaataaataaataaataaataaataaatacattacttatttcacagttacaatgggtccctagtccaggcacaggtggtctgagttccctgcttaaggtatcacaaggttgcaatcaaggtgattataggcagggctgaagctcagagtcatcttccaagctcattcatgttgttggcaggattcagttccttgtactt

SEQ ID NO: 282246 - DNA, 656 bp, Homo sapiens
ctaaaagataaaaaaattaagggtgatattttcctctacttctccaaagaatctataataaggcctggtgaaatatgcgtagaatattttcaaaggaatactgtattagatttgtattgttgtataacaaatcatcgcagatcaagtgacttaaaataaatacattacttaggccgagtgtggtggctcacgcctgtaatcccagcactttgggaggcggaggcaggcagatcaccaggtcaggagatcaagaccatcctagctaatatggtgaaatcccgtctctactaaaaatacaaaaaaactagccgggcgtcgtggcgggcgcctgtagccccagctacttgggaggctgaggcagcggaatggcgtgaacccaggaggcggagcttgcagtgagccgagatcgcgccactgcactctagcctgggcaacagagcgagactccatctcaaataaataaataaataaataaataaataaatacattayttatttcacagttacaatgggtccctagtccaggcacaggtggtctgagttccctgcttaaggtatcacaaggttgcaatcaaggtgattataggcagggctgaagctcagagtcatcttccaagctcattcatgttgttggcaggattcagttccttgtactt

SEQ ID NO: 282247 - DNA, 560 bp, Homo sapiens
ggcttggtgggaatgcctgctggggcttctagcactgtggatctgcatctgcctgaacttttcaggcctgtgcagctccatattccaccagggtctgcccagtgaacagatcaggtgagtctgtgactccactcatgcctgctgctcctagctgggcagtacacgttggctgggacttccaacacagcagaccctcctctgcctgaactcagcagttgggcacagctccatgttcctctgggaagcacacagatggtggatcaggtgactccacccacacccacttctcctagatgggcaggactcgctggcttgggtgatgcctaagtgtaggggtcccaccttccgaacactgagaggggtgagacacccacgtttgtgagccacagaggaactgaagtatgcttyccccttcagggccagtctgggaatgatacggtctgtctgctaaccacagccccttccctagggagccctacagcccagcacatctaacagagaaaatatgagtggggtgccagggattggaagaggctccttcaatgcccaggaacagactt

SEQ ID NO: 282248 - DNA, 480 bp, Homo sapiens
ggtctgcccagtgaacagatcaggtgagtctgtgactccactcatgcctgctgctcctagctgggcagtacacgttggctgggacttccaacacagcagaccctcctctgcctgaactcagcagttgggcacagctccatgttcctctgggaagcacacagatggtggatcaggtgactccacccacacccacttctcctagatgggcaggactcgctggcttgggtgatgcctaagtgtaggggtcccaccttccgaacactgagaggggtgagacacccacgtttgtgagccacagaggaactgaagtatgcttcccccttcagggccagtctgggaatgatacggtctgtctgctaaccacagccccttccctagggagccctacagcccagcacatctaacasagaaaatatgagtggggtgccagggattggaagaggctccttcaatgcccaggaacagacttgatcaggggga

SEQ ID NO: 282249 - DNA, 607 bp, Homo sapiens
gtttcttaactgtaaagttactatttttttatttttcacatactattttttggaattgaatcactaagtctacccctaactcaaggaggaagaagtaagctctgctttctggagtggggactatctatctgttgagctatctatcatttagaatggttctataagatatatttgccccttcttcctagcttaatttttgttcactttttaatttktatgagtatggatcaatagatattttatttcttgagttataatccagtattatcattatttatttgttgcttgaatggttttacctttgcccatttagaacttttccagattatctcctgtgtccttttgaatttctctcacaattttctgtgtgtgtgtgtgtgtgtgtgtgtgtgtgtgtgtgtgcatgtctttattttctggccctaaacaaggccaggtttagcttctattttcttgcccaactcctagaatcacccatttctccaagaagccttggttccttttattggagaatggtatttctacaccaagatatgagcattcgtatgctaattgccattgaggagtcactgtttctagaccatctgagaagacataactaggaaat

SEQ ID NO: 282250 - DNA, 559 bp, Homo sapiens
ctgctacttctaaggtatgtgactttaagtagctcatctaatacttttctgtaaattggggataataacattrtcctacatattttaaaaattattcttgaaatcatattaaatgttaaaaatcacatcaactctaaaaccatttttattttaaaaaatagaatctctctaaaataacttagttaccccatgaaagtgagttggataatgccaggttattggtgatcatttactattcaagagcagtagaatttccaattcaaaatgcaggaagatattaaaattccattcatgcttttactcaagcattgctgtggatcattttaaatgaaagactataaatattttcagggagaaatggtacacatttgggactggtgcatagtttttcaactagtacttgttctgaaaggtatttaggtatttttttttttctgtttaataccaaaaaggacagaatacggcaaaaaacaaacaaaaactactattactgttataattagaaagcaatatttcgttttgttctccgtgtttaattataattactttagaaattttt

SEQ ID NO: 282251 - DNA, 492 bp, Homo sapiens
tgaaagtgcagagtagagaaacaaagaacaacacatacatacacatgtatatgtttatttatacacacgtgcatacatgtatatatatatatagtacatatttacagataaatatatacacgtataaatatatattgccttgtttggaagagtcaatgttatgaatgttttcattttggtagagattttattttgcaaactgcatgattttacagatttggtgccataatttaaacattttcatgtataatttgtrtaaatctgatggaagagtgaaagggttttggtgtttttattttttatgtttttttaatacaagaattatttaattcacataatgctggttatatatgtcaggcaattattttcctattgtgcttgggatttaagatttctgagaaagtttcactttatcattttgaacaatttctttcccattatgccgaatctcccaatgccaacagttgttgatgtctctaagaacagatggtt

SEQ ID NO: 282252 - DNA, 1720 bp, Homo sapiens
tatgattgtattgaaaatgatccattctggtataatactaaatctgatctaattcaaaaatgaactcaaattccataaaacccaagtatgaagctgaacacatttttcttcttttattgataatggttttattatgcttaaattacttctctatttttatggataatgtttaaaagtttgtcattttttttctaaacataaaaacatttattactttaacaaatcaatatggcactttttaggaaactaagaaatagtcatagctatcatttcaggaccctagagtttactgaatctcaatgtgcaaaaraagcaaaatcattacatatttggtatattaaggactgccactctgaaaggctttgcatgttaactgctttaaatttttctgctttacagaagatgcatattcatgaattataacatcattagggtacaccccaattttgataaataatagtactcaatttttcattcatttatttcacataaaagaaacatttagagtatctagtggaaattaatattttttaagtacttttttttcctgagatgtaaattttaaaggcaaggtacacgtgtatttttctatwagagataacgttctgaataatgaagaagtctcttcaatgatgtgtaatctagacaataaacgtactcacctaaaatcattgagacttcagtagttacagagtgtaagataccttgtagagwaatattagtatatacttctaaagtgatatgaaagtgaatagtcacttggaggtaaaagacatagatgaagagtcatacctccagaatttatggtatttcataaatttgtgaaattgcacattggaatagaaatagctaaagcaataaaagtatcattttaaaagtttccgtagtaaaggaaaaatcttactttgaagattgaacttagatcatttcaagacatatagaattatatttttctttcaccaatatatcatctccagtaaaaggaaggtgcttatataacacgggcaggcagagacatgcacagggcaaagaggcaggtaggtatgctcaattgggacaagaattagtggacctgacaagaataatggaaacaggcaacttcttacccatagttaccaataatgcagtaagaaaatataggtatttaataccacawtttatatatatttatatatatcttttataagttgttttattatcctctggtttttgaagatcacatatcatatgtacttgctcatttaaaggtcatacatctcccaccatccttagccttctggctgcttttaagatgttctgtgtgaagttttcagtagatttcctatcatgtactaggcatgattcgttttgtattctttatgattggagtccatagatattcaaattttggtctaatttcttttctcagctatggaaaattactattttttcaacaattacttgtgctccatttttatcctattcaattgagacttcaatgacwtacaagtgtttttttattatttaatttttgttttgtcttgtttcactgtgccaaatatagcttttatgctctttaatgtatgtctgttctctgtgaatccatttggacattttataattgactaatcttccctctttctacatctaatctattattatagcaacctataaaattctttattcccatccctttcttatttaatagattctagctttatggtaaatttgctcagttttt

SEQ ID NO: 282253 - DNA, 294 bp, Homo sapiens
atggtaaatttgctcagtttttttctattttattgtatttatcatatttgttttagttttaattattattatttttgagagacagtcccactctgtcacccaggatggagagcagtggcgccatcttggctcactgtaacctccgactcccaggctcaggtgattctcacactcctggactcaagtgatttgcccacttttgccttccaaagtgctggaattacaggggtgcacyaccacaccgagcctgtcatatttatttttaaagtacctactagaaaagtccaatatgtg

SEQ ID NO: 282254 - DNA, 563 bp, Homo sapiens
taagcaaatgctgagaaatcattaaaaaatattctgaactatttaaaatgtggttctttaattcttattgacattttacatttttaaggttagacttttccaaagttaatcaattgtttctcctgtttataactatgtacatacttgcatcaattaataacctttgttttgcaatgaaagattacacattcatttaacttagcttagtttctgtttgttttcaattaggaagggaaaaatcctttcaagcatgatatcataggttattgatatttcttttgcttcgtttataggaccaaacaaaattttcatatttatggtcattaatgctgttgacaagaaattrtattaaatgaatgggttgcagtaaaaatgaaaataatttgggagttaaaaattaaattaatttagatgatatatttgttctctaattgtaacctcaaattggtagcagtgacagtgtgagattaaaaatcataggaatttaattaattttttatttaattaatatattaggtaaaaatctctgtcaaattctgtgtcctcctccaaggcatgtgcgc

SEQ ID NO: 282255 - DNA, 1210 bp, Homo sapiens
tttttttttgaaatttttgccgttttcttcattgcttttatggaagagaggattttcagagattcttactccaacatttatcctgatatcacttgtatttcttgatattttaataatctcaatgatcctgatacatcaacaaaaatattgaatctaatttttttcaacttttattttaagttccagggtacatgcgcaggatgtgcaggtttgttacatgggtaaatttgtgttatggtggtttgctgcacagatcaactcatcatctacgtattaagcccagygtccattagctattcttcctgatgctctgcctacccctctcctcctgacaggccccagtgtgttttgttcgccttcatgtgtccatgtgtttgtgttgctcagctcccacttataagtgagaacatgtggtgtttagttttctgttcctgcgttagtttgctgaggataacggctttcagatccatccatggaatctatttttaaaacaggaacacttgcacaaatttttaatctttcaaatacaactgatattgttgaaagagtttattgaaagagtcagatgaaaaacaaatatgtaatagwtgttaatgatttctttgttctaattatgtttatttttccaaataatatattgactataataaatagctgaattcaaatgtatccaaaattatagtgaatattttaaaatataaatgtctacaattaaatgttgaaaaacatcctgctcatctcaacatggaawggtaggactttggctggaactcaggtactatggttgagttgaagaagaggaaagcacataaaatagcatttggccgattattttttcctaatacagaaataaattgaggaggctgtgaatacactgtataacaaagacactatataagaaatatcagtgtgttagcactaaaatagttcattatttatgtgattagaataaggacatttgataaacttttttgatttactgtttcttgtaaagatacattacagtttatgtgcattagcataatttcaaggccccaaaggtaaatgttatgggaagataatttattttgttcatattgtttctccttgtatttttttgtttatatctcagtaatatatgaatatttaaatttcatgatggcaactatatttacagataattgaagcctggatatttttaatttaaaaaaagatatttgcatggtcactc

SEQ ID NO: 282256 - DNA, 510 bp, Homo sapiens
aaattctcatggattaaataaaaatatattaatagaaactaaaaacattcaaatacaattgtcttcttgctttcagttcattgtaatctgaatcaagtggagaggaatttggcaaaatagctcttacttacatgccataaattagaaagataagcaaaaaaatttaagttttgatrtttacctgatgtcatgactacttctggggtttcagttgggcttcccagatatatttgggttagaaggtagaagccaagagaattggttcatggatggccaaaggtatctaagctaaaggtgaagatcaaaaagtcttataaaatattgaagacagctaatatttataagcaaggaaatgattttctataatctgagtcataattactaagaccaagccacaggagactgactaatgcttaactcaatacctctcttctagctatcactctctgctccaacttcttaacctcacaactgttgtcacttaagaatcttgcctttagggacaagtag

SEQ ID NO: 282257 - DNA, 605 bp, Homo sapiens
tttgattttgagcggtggtattaataatcttacttgccattaacttaaaaatctaaaattaatgatattgtacttcttatggtgggtgagaaaaataatgaatgtaaaatatcagtctggcatgagaacagtagtttttcattattaccaagaatttccaagcatggttacaaggaagacattttgctagctactctttggkcatataaaattatagagaagggaacctatatatcatattttggtaactttctacaagcaacaactggctaagctatttacataagtcattttattctcaccataatgctctgaagtgagttttattttatatttttcattttctcagtggaaaaatcaaagctaagaatgatttaattaacttgtatctcaactaataagcagcagagccaggaattttgactttgtaattcatttgttgaagacatgtcttccatgcaaagggacattgaaatgcatttgatagacataagacaaaaaggaagaaaaaaatgcaaaatactatgaatgacatgtcaaaaaagtgacctataagaatttagtgattaactctgaactcgtcaatagaatggttgagaaagtca

SEQ ID NO: 282258 - DNA, 593 bp, Homo sapiens
aggaataaggttatacactgagaatcatgtttaccaaaggtgtaaaagtgaccctaagactaattgtaaatagggttgacaaaatggagagcagagctatagcagttaatataactagcatgggaataaaaagggcagtttttgttgttgctgttttatttttttcttgtacaacaggctttgcttttcctgactttgaatctacagcctatttcacaagscaggagagatcatagagaagtgtgaattgtggattagccccattaacctattgtaaccaaagcaccttctgcggctcttcacgggagggaatgggctgctttacctttggaaacaaaatcagcatggtaatcagactcaaaggtaaaaatagcaaaattggacttgatcaagtaaaaaagaaaagcaaggcatataataaacgttatgttttatattttcaacaatgtttggaggtagaaagatgtatagttttgttatttactttttaacatccatctccattgatgcaaatgaggatcaaatcttgtgcttaataccatatatttaggaagtgtgtagctgaaattcaaactcctgtctgtatgattcta

SEQ ID NO: 282259 - DNA, 550 bp, Homo sapiens
tctctgaatacctacatgtactaggtatcattctgggtacatggtaaatcccttagaactcaagtaatcaaagtagagccctcatcgtgctgaaattctggtgtagaataatagacaaagtaaattattaatgaaataagtaaagaatgtaatatattcataagtgactaagtgttataggagaaagacatacatcgagaaagaccagaataagatggactcggggtgattggggagaggagttacagatgtgaataggctgattgtttccttgagaaaatgacagtggagcaaagagactcaaaagaagtgyggtccttaactctaccagcaagaaggatgggaggcagcaaagagtctgacatgacagcccacaaagttctggtttttcccagggtattttgactttttccatatcaatcattccaaaatagcattttcttttggcgtggggaggatacttctactgcattggagttcaaacacagagcaatctagatgactacctattccccagatactctcaggccacatgggctccattcattta

SEQ ID NO: 282260 - DNA, 610 bp, Homo sapiens
tatagaagcttttcaaaatttaacttaggtgtgtgacctctcatgaaggaatgttatgccattyctaagccaaatccttactgtggctgaaaaacaggcaactctgtaggcagcagggaatttcagagatgagcaatatgtctcctatagtaggtcaaaaaggaagagaaaataaggaaagtgaagaaatagaaaaatcatcatttctaatagaaaaagaggtagaaactgttgataaccctaaattgaaaccctcaaatgcaacttccagatgtcctggcccttcctgcccctcatctacatcatcagctccagttctaccacccaaaccccagatttttctatggtatttttacttccttctttcacagtttaaaatggcttctatctcttcttttataatgttattccaacctgggagaagttaatttccccaagacttaaaatgcttggcttagagttgagcttgggggaaaggaacccagaagcctcacatgctggcaaaagagtaaaagttgtttttttttttgttttttttttttttaaccagttgagcttttggcttctctctctgtgcaaactggtaaaaaggataataagaattattatc

SEQ ID NO: 282261 - DNA, 486 bp, Homo sapiens
cctaattaatattcacaaaaacgaaagaaaccattgacacttattagtcagaagataaatagaaactttaggaaaatacatgtatacattacatcagatgatcatataatttataattgcaagtgggatagagaataaaaagagggtactattaatatttacactaggacaatagcaagaaaccaggatttactgcataaatcaagacgtatggtcaccctaccaatattatttaagaatatttatgtaacatgaacagaaaagaaatgacagaataagaaatggaaaataatgaagacaaaaagttatgacatttttaaattgtggaaaaagataatatagaattgcaaaacaacaacaactaaccaaaaaatattagtggtaactgtagaagtgaaatctctgtacaacaggttgaaagcaaaagtgacattgataaaaactgaatcagtgttacagartaaagatctgaataacattctcagg

SEQ ID NO: 282262 - DNA, 567 bp, Homo sapiens
agaatataacctatctgctacataagaatgcttacatatatataagcatatatatgtaagcttatatatgcttacatatataagaatattcttatatatgtaagaatatatacatatatagagacataggtatttttacctagtcttattatcacacatgcttttattattgcttataatttatgatttagaaaatcatactcattaagttaatattaatattaatattcactaaaagatacttacattatttgcactcctagtgaacatggagtgaggtggaggtaactgagtaaggagccaaaaaaaaaaagcactaggttcttggttactggttgcttttgagaaccatgcctacaaagctttggccataatgatgggcgtgattgtgggtggtgaacaggggaaagggamccgctatcataagctttttattttttcctttacgacactccctgcttttaaatccaccctccagtgtttttatttcatttaatatgaattaaagtacaactttaacatgctgtgataccaatttgcttgatccttaagttaaaaaggaagatt

SEQ ID NO: 282263 - DNA, 625 bp, Homo sapiens
gactatatcaaattgagtaacagttgcacagcaaaaaataaaatagttctgcagtacagttgttaattaaaagataaactaaactgactttataagttgctatgaaaataatttgatttactattttccaacactacctagtttcttttgtttataactgactcctttgacctttggcaactggtatcctgttgccacaagaccttatcatcactgttaagtgtgaaccaataaagactcaaaatttaaaccttcagttggagtttacatgtttaatagtaattttttaagaacaagtatctttttatggtccaaaaaaatytatcatgttggaattcagatcttatgaaagaagagggagagatgaagtcctgtataggtctctgaccctgcatttgtgtatttttaaagaaaacagtttcatacaaacaacaactttaatgatcagatagcaggttaatatactcttatgaattaacattattatgttatagaataaaattttttgagttgagttttatcttttctttctcctgctattaactctgcactttttcctgtaaattacagtgggtgactatatgaacagaggtattcacacataaagtataattgtagttattaa

SEQ ID NO: 282264 - DNA, 1152 bp, Homo sapiens
gactatatcaaattgagtaacagttgcacagcaaaaaataaaatagttctgcagtacagttgttaattaaaagataaactaaactgactttataagttgctatgaaaataatttgatttactattttccaacactacctagtttcttttgtttataactgactcctttgacctttggcaactggtatcctgttgccacaagaccttatcatcactgttaagtgtgaaccaataaagactcaaaatttaaaccttcagttggagtttacatgtttaatagtaattttttaagaacaagtatctttttatggtccaaaaaaatttatcatgttggaattcagatcttatgaaagaagagggagagatgaagtcctgtataggtctctgaccctgcatttgtgtatttttaaagaaaacagtttcatacaaacaacaactttaatgatcagatagcaggttaatatactcttatgaattaacattattatgttayagaataaaattttttgagttgagttttatcttttctttctcctgctattaactctgcactttttcctgtaaattacagtgggtgactatatgaacagaggtattcacacataaagtataattgtagttattaawaaaggtcaaatttattaacttttagccagaataatcaggaaaaaattcaagaatacctaaattaatattatagacaaaacacactatatattttagtgcttcaaatttatggatgtaaatagagaataaaatatgtttaccaactaaatgagctacaataattgtttagaatgacactagaaataagcagtaatatggaaatgtgtactatagctaagaataaagaattaaagaagccaaaacaaaaaacaaacaaacgaaaaaccccaaacttgtgcctgaggcactagctgtcaatagaatttttaaaatcagtgttaagtgattctactccaagagtactgttttttaaaaaaattacataagagaatgacwtttacagttaattagcttccctagtagctaattaactataaaaggaaatagttgaattagtagctaattaactaaaaaaggtagaaagaaacaatctataggagaacaaaagtaagagctacactatgactaattatctcccaaaagccac

SEQ ID NO: 282265 - DNA, 546 bp, Homo sapiens
ggaattaaaagataaaattaaaaactaaattttatttctcagcataatctccatcaggctcaagatacttttgtaagtaattataacagccatttagtctattcttaaagaactaagggcctgcgaatttaaccaagtaaatgcagggtttttttttgttttttttttttttacattattagctgaagaaaattgggtgctctttaaagattctttttaaggtcagcaaacaaaaacaagttagagagaaacaaatcaggggtataaggtgaatgcctaacaatttcctatcaaarttctcacaaaatcacctttgtttgatgagagaaatgagcaggagcattgttacggtggagaaggacctgctggtgaagcttcctggccattcttctgctaaagctttagctaactttcttacaacacttcataataagcagatgttcttattctttaagaacatcaaactcaacaagcaaaatgttctgagcttcccaataaactgttgccatgacctttgcctgatccacgtttgctttgactggaaca

SEQ ID NO: 282266 - DNA, 573 bp, Homo sapiens
ctggaagctctattttgtcaagaggctagaaatcagaatcytaaaataaaggttgtagaaaatagggcgtgcaattagagacttctgatcctggtaatatcacccactccactcactgtgaaagaaatggggagatgccctctcattttgactgagacagaaagttcatggggcaactcaccttcatatgctatattgttaaaaggtgttgaacatgagggtgtattctctcattggagatttatgttcgcagatactcctcttggattttcctgccaggaaaattatcataattgccagagagcaattaggattctttcggactcagctgtatatgagtgacatacattactctcttaagtaactattttataaaatgctaacttacaaatactttttgttataaagatgggatggttctcactaattattccatcacttaactgatacctcagcataaactgatggcctgcagttgattcttcttaggagaaagtacaaatgaagaaacaagtgctataatcagagatgttttacaaaaaatcgtaaaacattttgaacaaattttgaact

SEQ ID NO: 282267 - DNA, 585 bp, Homo sapiens
tgtctcctttcccacagcccatcctgcaggactagaccagcgaggccaacacccagcttgtccacagctatcctttgaatgtttgtgccccctgcaaaattcatgctgaaacttaatccccaatrcaaccatcctaaggggtgggaactttagaaagtgattataccatgagagatgggattagcatcttataaaaggctggaggaaactagctaggccccttttcatctttcttttccttctgtcatgtaaggacaaagcattcgtcccctccagaggatgcagtaataagacaccatcctggaagcagagagcagccctcaccacacaccaaacctgctggcaccttgatcttgaacttccagccaccagtaagaaataaatttctgttatttgtaaattacctactctcaggtattttattatagcagtaggaacagattaagacacccatgctaaaattaggatgagtccatttccccacccataaaataaggatgttgagtcagatgctcttgaaggttcccttcagctttcacattttgtggtcctggctcttcttattggtgtatagaggacttttgt

SEQ ID NO: 282268 - DNA, 562 bp, Homo sapiens
gcattcgtcccctccagaggatgcagtaataagacaccatcctggaagcagagagcagccctcaccacacaccaaacctgctggcaccttgatcttgaacttccagccaccagtaagaaataaatttctgttatttgtaaattacctactctcaggtattttattatagcagtaggaacagattaagacacccatgctaaaattaggatgagtccrtttccccacccataaaataaggatgttgagtcagatgctcttgaaggttcccttcagctttcacattttgtggtcctggctcttcttattggtgtatagaggacttttgttgttgttcttcttctgtaaaatgcaacctgtgaatgcaaccaagagacaggtggctgtaaaggtatgagttgcgctgggggaactgaaaccccggattaattaaatcttctccaagtgtctcccatttatctcacccccactaacttttgggcctgtcgattgtgagaacactgagccgcagaattgaagcaagatgatccccaaccaagtcgtcagctgactgctccaccctggg

SEQ ID NO: 282269 - DNA, 605 bp, Homo sapiens
  misc_feature (1)...(605): n = A,T,C or G
gctattttaaaagtacaatagattaagagctgcacagcaaaaaaactagtaaacccctccaaccggggtctgtacttttaaattttcccaaatgtagagaccaaaaacatacatatacatttgctatataataaaggtattgttatgaattaacagaggtaaaaaaatgagaatccagtcaaagatgttgggatagtttgatagcaattggggaggggaatcatatcttaatttaacatcataaacctacacaaattgttgatgaataaaagattaattataaatacaaaaccataaagstggaagaaaatatgaagattgagaggactttctaaagattaaagaaaggaagaaaccacaaaacaaaatcaatagatttgactgcataaaattaagaacctctgtgctttagaacaagaaatgctanaagacgataagaggctagtgggaaaaattgagaacaacagtgcataatgtaacacagtttgaatatataatatccttgtataaattaacaacaacaacaaaaaaacgggcaaagggaagagtcaaatcacagaggaaaaaatagaaaaatttaaccagtgtgtgtttggaaaaatgat

SEQ ID NO: 282270 - DNA, 556 bp, Homo sapiens
cctagttggttgcagccagggttggagagttcaagaaacagtctgaagtccgttgagggaacttataatcaactatgtgatcttgggtgggtcctggccccttgcctggcctaaggatcctctgtaaaatcaagcatgtatccaccaggaggattttcagctgcaagtaataaaacactaacaagcagtggcttaagcaataaatatattaattatctctcataacaagaaatccagagttagactgctttggtcttggtgcagtggcccagtgacatcatcaaagattccaacctctttctactttcctgytctgccaccatgggcgtgttggcttgcacccaggatcacacaacgtctgctgcagctctagaacatccaatgcgctcaaggcaggacacggattcgaagacagcaccaggctcatctgaactttctattaggacagtaaaactctcgtagagtcctccaggagacatgctttgttcttcattggccatgattaagtctcacgtccccaaccccagctagaggagcatctgggaaaacggaaaca

SEQ ID NO: 282271 - DNA, 619 bp, Homo sapiens
cctagcatggccagtattttaatcactcaaaaattgaggcgtgattatggacccccacccctgccactcagtgatgagcacagcctctgtgtgtccctctggttgtaccctgcctctgcctcgatgctcttgtggcattcatttaatttttcatcctgaaatttctccttcaagyccatcatgtggaacatgtgacacccccagccctgcctggccctccttcctcccaagggcctgtgccgagtgtgacagtcatcagaggctctgcctcagctcagccacaggccctgaaaggtaactggacaaagattacttgagcttcctagagccccctacaatgcctacacagggcccatcaggtgagggactacggtcgatgactgtcacgaggaggacttgtccacatggccaccagccgacctggttccaaagttctcagggacctcgtacattaaagtttcccacatctggccaggcacagtggctcatgtctataatcccagcactttgggaggccaaggcaggtggatcacctcaggtcaggagtttgagaccagcctggccaacatggggaaaccctgtctctactaaaaatacaaaaagtagccaggtgtggtgg

SEQ ID NO: 282272 - DNA, 619 bp, Homo sapiens
cctagcatggccagtattttaatcactcaaaaattgaggcgtgattatggacccccacccctgccactcagtgatgagcacagcctctgtgtgtccctctggttgtaccctgcctctgcctcgatgctcttgtggcattcatttaatttttcatcctgaaatttctccttcaagtccatcatgtggaacatgtgacacccccagccctgcctggccctccttcctcccaagggcctgtgccgagtgtgacagtcatcagaggctctgcctcagctcagccacaggccctgaaaggtaactggacaaagattacttgagcttcctagagccccctacaatgcctacacagggcccatcaggtgagggactacggtcgatgactgtcacgaggaggasttgtccacatggccaccagccgacctggttccaaagttctcagggacctcgtacattaaagtttcccacatctggccaggcacagtggctcatgtctataatcccagcactttgggaggccaaggcaggtggatcacctcaggtcaggagtttgagaccagcctggccaacatggggaaaccctgtctctactaaaaatacaaaaagtagccaggtgtggtgg

SEQ ID NO: 282273 - DNA, 608 bp, Homo sapiens
taaacactgaccttggccaatagggaaaaatcataagtgcttctcaaactagtaatcatttgttactgttaacataatgccctccaggatcctcatcatatctatatgcttcccaaatcttgttttcaagccccattccttcaggaagccccttcagactacatctgccttccttcacctcccttcttccctgttagttttcatcaattctcctctgacactgctcctcctgaattgcttcaggaacacaggtgcagttcctgtgctgggacagagggtctctgaggtttggccctgacccagctttctctctgtacatcccacacaggctggctgaaaactgagcaggcaggagacgtggccagaccaatggattgttyctgagggattgtttttctaggttcttcccctcaaagctcagtggaacggcagtatcctcttgtggaggcacagtggccggtccaggatgagtgaatgagggaaggaagacaaaaggaaagggcagcagctgaggtttgtccttcctggtccacctcctcaccctttcccaactagaaagtatataaccgttctctcctctggagacatcgctgtgcccagtccagaag

SEQ ID NO: 282274 - DNA, 550 bp, Homo sapiens
tggcagacttttgcagctcagggaggactgggagacaggcagacagatgggagggtgggtgtactgctgggcaggccagagaacccatggtgagggtgactgtttccaggctgggcggcctggatggtcagacaggctggctaccccatcgtgggtcagcgatcaagactgccagccgcatctttcagccagcgtttttgtgtctgacagtgcagggacggtgtgcagagctgaacatgaagacactatggccccccycaagagggctcacactctgctctcgtggaagcgcagtggccctgcttctccctggctggctggctggctcctggcttctcctggacgaagagggtaatgaaatgtgaaatggaaagccctatcttctacctcaaaattagctgtaggctgcaagtgaacaagcagggagggggagaaatctcatgcttaacaggcaattaggcacctaatagatgggttttgttgatgacatagaccagaacccaaggtaagacctgtgatgggtatgtcctcaggcactttgtagatccca

SEQ ID NO: 282275 - DNA, 596 bp, Homo sapiens
tcaacgttagtattgaaatgtgaagtacccttgcattcatcatgctctttattgcctgtgtaccttgtttttttttaagtttcttgtttttgctttttaacttgtatttttgttttataagtcctgtgtgatttatgctttaaagagattctgttttgatgtgtttccaggatttgtttcaagattttgatctccttttagcagttcttgtagtggtggcttggtaattgtgaattctctcagcatttgtttgtctgaaaatgactgtatctttcttttgtatatgatgcttattttcactcsatacaaaattcttggctgataattgttttgtgtgaggaggctgaagatagggccccaatcccttctcacttatagggttaatgctgagacgtctgctgttaatctgataggttttcctttataggttacctgatgctcttacaattttttccttcatcttaactttggataacctgatgacaatgtacctaggtgaagatcttgttgcaatgaatttcccaggtgttctttgtgcttcttgtatttgaatgtcaggtctctagcaaggccagggaagttttaaagttttcctt

SEQ ID NO: 282276 - DNA, 583 bp, Homo sapiens
ctacaaatatggtgcagtgtatactgctcgagtggtgggtgcaccaaaatctcacaaatcaccactaaagaacctactcatgtaaccaaataccacctgtaccccaaaaacttatgaaaaaataaaatagaataatttaaatttaaaaagtaaaaaataaaagggaaaagtagaattatctctatttgcaggtgatgtgatcctatatatagaaaacctcaagaactctacaaaaaccctgttagaactaagaaataaatttcaacaaggttgcaggatagaaactcaacatcaaaaatcagcacttctatacacaaataatgatctagctgaaaaagacattaagaaaacaattccatttatgatagcatcagacaaaaatacctaggaataaatttaaccaaggaagtgaaagattgttacastaaaaacaataaaacaccaaagaaagaaactgaacaagacacaaatcactggaaagatatcctgtgttcatgaattggaagagataatattgttaaactattcatacaacccataggaatatacagatttaacacaactgctatcaaaataccaatag

SEQ ID NO: 282277 - DNA, 583 bp, Homo sapiens
ctacaaatatggtgcagtgtatactgctcgagtggtgggtgcaccaaaatctcacaaatcaccactaaagaacctactcatgtaaccaaataccacctgtaccccaaaaacttatgaaaaaataaaatagaataatttaaatttaaaaagtaaaaaataaaagggaaaagtagaattatctctatttgcaggtgatgtgatcctatatatagaaaacctcaagaactctacaaaaaccctgttagaactaagaaataaatttcaacaaggttgcaggatagaaactcaacatcaaaaatcagcacttctatacacaaataatgatctagctgaaaaagacattaagaaaacaattccatttatgatagcatcagacaaaaatacctaggaataaatttaaccaaggaagtgaaagattgttacagtaaaaacaataaaacaccaaagaaagaaactgaacaagacacaaatcactggaaagatatcctgtgttcatgaattggaagarataatattgttaaactattcatacaacccataggaatatacagatttaacacaactgctatcaaaataccaatag

SEQ ID NO: 282278 - DNA, 603 bp, Homo sapiens
attgcaaaccacatatctgttaagaggttaagatctaaaatttataaagaactmttgcaactcaatagcagaaaagcagataaaccaattgaaaagtgagcaaaagacctgaacagacatttctccaaagaaggcataagaatggccaataggtatatacaaaggtgctcaatatcactaatcataaggaaaatgcaaactaaaaccactgtgagttatcacctcacacccgtaaagacagctactatcaaaaggcaagagatgacagatgagggtgtggagaaaagaggaccttagttcattgttgatgggagagaagactgatacagaagactgacacatttccagctagtatggaaaagagaaaggagattcttaaagaaattaaaaaatagtactacatgacctagcaatgccactcctggatacatacccaaaggagataaaatcatcaccttgtaaagagatctgaactcccattttcgttgcagcagtattcacaagagccaggaaagctatagaacaaatttaatgtccatcaatggacaaatggataaaaaaagtggtgtttacacacacacacacacacatacacacacacac

SEQ ID NO: 282279 - DNA, 603 bp, Homo sapiens
attgcaaaccacatatctgttaagaggttaagatctaaaatttataaagaactcttgcaactcaatagcagaaaagcagataaaccaattgaaaagtragcaaaagacctgaacagacatttctccaaagaaggcataagaatggccaataggtatatacaaaggtgctcaatatcactaatcataaggaaaatgcaaactaaaaccactgtgagttatcacctcacacccgtaaagacagctactatcaaaaggcaagagatgacagatgagggtgtggagaaaagaggaccttagttcattgttgatgggagagaagactgatacagaagactgacacatttccagctagtatggaaaagagaaaggagattcttaaagaaattaaaaaatagtactacatgacctagcaatgccactcctggatacatacccaaaggagataaaatcatcaccttgtaaagagatctgaactcccattttcgttgcagcagtattcacaagagccaggaaagctatagaacaaatttaatgtccatcaatggacaaatggataaaaaaagtggtgtttacacacacacacacacacatacacacacacac

SEQ ID NO: 282280 - DNA, 561 bp, Homo sapiens
agtatgtccaggagaaggaaggaggtgatgggaaccctagaaggagggtctaggaccattcccccctccatcacctgctggggaaatcacaaacgctctgccctacctttgtccctctcagactctctcctatttctcaagcttttcttcttccactatcttcatgctgtcctctctcctttttttgcatttttttacttttaagattttaaaactcttcccctagattcrttttctttgtctctgaaccatttgaaattaagttgcagacaccgcggcgcctcatcctttggcatgcatctggagatgcaaggagaattagaatatcctttcacagacccaccacgcagcactcacctctaagaaaattaacattagttcaatatcatttccattttcccggttgtcccccaaaggatttttgtagctccctgctcccctccagcaggccaggacccaatcaaggtttctccatgacacgtggctgttatgtgacttcggtggcttttactctaaaacagccctctcagttttgtttttgtctttcatgacaccgacatt

SEQ ID NO: 282281 - DNA, 561 bp, Homo sapiens
agtatgtccaggagaaggaaggaggtgatgggaaccctagaaggagggtctaggaccattcccccctccatcacctgctggggaaatcacaaacgctctgccctacctttgtccctctcagactctctcctatttctcaagcttttcttcttccactatcttcatgctgtcctctctcctttttttgcatttttttacttttaagattttaaaactcttcccctagattcgttttctttgtctctgaaccatttgaaattaagttgcagacaccgcggcgcctcatcctttggcatgcatctggagatgcaaggagaattagaatatcctttcacagacccaccacgcagcactcacctctaagaaaattaacattagttcaatrtcatttccattttcccggttgtcccccaaaggatttttgtagctccctgctcccctccagcaggccaggacccaatcaaggtttctccatgacacgtggctgttatgtgacttcggtggcttttactctaaaacagccctctcagttttgtttttgtctttcatgacaccgacatt

SEQ ID NO: 282282 - DNA, 561 bp, Homo sapiens
agtatgtccaggagaaggaaggaggtgatgggaaccctagaaggagggtctaggaccattcccccctccatcacctgctggggaaatcacaaacgctctgccctacctttgtccctctcagactctctcctatttctcaagcttttcttcttccactatcttcatgctgtcctctctcctttttttgcatttttttacttttaagattttaaaactcttcccctagattcgttttctttgtctctgaaccatttgaaattaagttgcagacaccgcggcgcctcatcctttggcatgcatctggagatgcaaggagaattagaatatcctttcacagacccaccacgcagcactcacctctaagaaaattaacattagttcaatatcatttccrttttcccggttgtcccccaaaggatttttgtagctccctgctcccctccagcaggccaggacccaatcaaggtttctccatgacacgtggctgttatgtgacttcggtggcttttactctaaaacagccctctcagttttgtttttgtctttcatgacaccgacatt

SEQ ID NO: 282283 - DNA, 1566 bp, Homo sapiens
ctgtgtaactgcccctgggatcagccctttcattgcccccatatgctgctgacaggatgtttctaaagcacaatttgatcttgtcactttccaagtcagagcattttgrtaatttcccacttcctactaagtcaggtccaaactactgtctgcttccaaaactttccatcatcctccattgtccctagccccttaaaattttagccccaactaattgaaaaatgtatccctgtttcagactgccagtgccctcatttctcccctctacttcccccaccttcaaacacacacacacacacacacacacacacacacacacacaagcccacatctaggggtaaagcacattattgccctacctagaatgtttacattaccatctttttatctaaatcctgttcattcttcaaggctcactttcctccctcccataacaaacatctactatacttgccctgacccctcatgcagtttggtatcacttgctcactctctgtgtcacatgtgctcattatgttttcacagcagactttgtgtgccttgagtacaggaacaagctagtcatatgtgcatatgctgtcagcwatggtcatgtattccagtgacagtacaccaggagtaaagagggggcagaagaagagagatgggaagagaatgagtgaggagtgaggagggaaaaataagttagaaggacgcaggcatagaagatggaaggaaaaaaaaaacgaggcaaggggtcwatagatatgagtaaatgagtaaatggaaagagtatatgagaggagaagagaatgtgaaaactgagaagagacatgtgttgatgtggaaagaggcagggagagaactgggaaggaggagctgtcaaatagttctcaagttctgttaagcagtgagcttacaacacatgtctcccagatggagctagaaaattgccccttcctgaaggaaggagagagcaaaagcaattgctctctccttcctcaggtctggaggtccagcaaattcagggagaagggtgggaaattctgccagtctactatagaatcatgaaatcttgcaaattttaaggatccctwatggtcatgtattccagtgacagtacaccaggagtaaagagggggcagaagaagagagatgggaagagaatgagtgaggagtgaggagggaaaaataagttagaaggacgcaggcatagaagatggaaggaaaaaaaaaacgaggcaaggggtctatagatatgagtaaatgagtaaatggaaagagtatatgagaggagaagagaatgtgaaaactgagaagagacatgtgwtgatgtggaaagaggcagggagagaactgggaaggaggagctgtcaaatagttctcaagttctgttaagcagtgagcttacaacacatgtctcccagatggagctagaaaattgccccttcctgaaggaaggagagagcaaaagcaattgctctctccttcctcaggtctggaggtccagcaaattcagggagaagggtgggaaattctgccagtctactatagaatcatgaaatcttgcaaattttaaggatccct

SEQ ID NO: 282284 - DNA, 548 bp, Homo sapiens
attttgataaagattgcttagaatctgtagatggctttgggtagtattgtcattttaacaattttaagcctttcaatccattaacatgtgatgcctttttattgaactattctttaattccttttagcatgctttgtagttttcagtgtacaagacatttgcctcattggtaagttaatgcattggtattttattctttttgatgcaattgtaaatgtaactattttcttgacttcctttttggattgttcttcattagcgtataagaatgaaactaatgtttgcatgctgattattgtatcctgctactttgctaratgtatgagctctaacagttatgtgtgtgtgtctgtgtgcatgtgtgtgtgtggagtcccagctaatatggctagaacttccagtactatgttgaatagaagtggtgaaagtaggcatccttgtcttgtgatcttagggaaaaagtttcagcctttcactatttagtataatgctatctcagtttttcatatatgacttattatgttgaggtggttatattctattactag

SEQ ID NO: 282285 - DNA, 548 bp, Homo sapiens
attttgataaagattgcttagaatctgtagatggctttgggtagtattgtcattttaacaattttaagcctttcaatccattaacatgtgatgcctttttattgaactattctttaattccttttagcatgctttgtagttttcagtgtacaagacatttgcctcattggtaagttaatgcattggtattttattctttttgatgcaattgtaaatgtaactattttcttgacttcctttttggattgttcttcattagcgtataagaatgaaactaatgtttgcatgctgattattgtatcctgctactttgctagatgtatkagctctaacagttatgtgtgtgtgtctgtgtgcatgtgtgtgtgtggagtcccagctaatatggctagaacttccagtactatgttgaatagaagtggtgaaagtaggcatccttgtcttgtgatcttagggaaaaagtttcagcctttcactatttagtataatgctatctcagtttttcatatatgacttattatgttgaggtggttatattctattactag

SEQ ID NO: 282286 - DNA, 601 bp, Homo sapiens
gcatatcaaaaaaagatcacgtgaatctacctgaagggtgtgttgtaagcagaagaaaaaaaaaaatgtttccctggagagcagcacgtgtctgtctttacgcactggagaaccagcaagaagtccctttatcctcaaatttagaaagagataaacacctcaatatccgtgctcatataagatgatggtagtgtaagagaagaaaatttatttgagaaactattcttttagtccaaaaataaacaaatactaaagtaaggtttacgtattttaattgtttctaatagaatcattagaatagtcactctcaacccctgcccctgcaaggcaccctattcagagaatgggattcggaagaaaaattcacaaattagatrttgcaaaaataaagtagttacttttttctttgtacattcacctcatggaatgagttagtcacagatttgattcacacgcattcgttttcctgaaattactgtgaataatatatactttaggctgccatgccttacatttgttaggacattaatgaaaggatcagaaatttaactccattgccaaccaaactgccatttgtctgtctggatttgaactattctta

SEQ ID NO: 282287 - DNA, 553 bp, Homo sapiens
tccaaaaataaacaaatactaaagtaaggtttacgtattttaattgtttctaatagaatcattagaatagtcactctcaacccctgcccctgcaaggcaccctattcagagaatgggattcggaagaaaaattcacaaattagatgttgcaaaaataaagtagttacttttttctttgtacattcacctcatggaatgagttaktcacagatttgattcacacgcattcgttttcctgaaattactgtgaataatatatactttaggctgccatgccttacatttgttaggacattaatgaaaggatcagaaatttaactccattgccaaccaaactgccatttgtctgtctggatttgaactattcttaagtgccctcaactgaaagcagtcactgtcccaaatgaaatacagtataatgatacacgacctctatctatctctctactatcatgaagaatatgataccacatatttgataggaggtctagagcaattggtggatttatattaactttgcatataaaagttagtgaagccacaaaattgttaa

SEQ ID NO: 282288 - DNA, 615 bp, Homo sapiens
aatattgcttttctaaaaattctaataatatgagcttaaaatgttagtatgagagcagttttcagcttatttatatttgatttatggcttgttctgaaatatattctttctgctacaatgtttattttctgtaaagtggatgagtcatatgtgacaggtaaatagggaaacagtatcaatatgaagtggaaattgctttgattcacacacgatattccttagcatttcagtgctttgtgccaccaaataactactgaatgcagcaagccatgagagaatataatattatatacaatgccagctgaccccacaaatctacstgttggcttgaattaaataatgcttctgacttggaagttattattacatagtttgctaccattcttgtatattgaataaaatggtggctccccaaatatatgcccgcatcccaattcccaaagtttgtgaatattgccttatttggaaaaagggtcttagcagttgtaattaatgaatgtaaaatatagatatgataattacattatctggatgagtcctcagtccaatgacaagagtctttgtaagagaaagggagagggagatttgagagagagcaaggaacaggaaaggaca

SEQ ID NO: 282289 - DNA, 606 bp, Homo sapiens
ttaatgaaagtgactatatcttctgagttaacaataaaatatccatatatttgaggttcttacttaggtaaacacctggtattcacaggctatgatgactagttttacctaatatctgttttaataagtaatctaggtaaactgtttttaaaaagttagtaaattgggtgatagggtttggctctgtgtccgtagccaaatcttatctttaattgtaatccccatgagttgagggagggacctggtgagaggtgattggatcttgggggtggtttcccacgctgttatggcgataataagttcccataagagctgatggttttaaagcatgacacttccttgctctttctctctcctgctgccaggtaaggcgtgccttccttccccttcaccttctaccatgattgtaagtttcttgaggcctccccagccatgtataactatgagtcaattaaaccttttttcatcataaattacccagtctcagatagtatcttcatagcagtgtgaaaacagactaatacattaggtaaatgtaaatgggatagactkctataaataaacttcttaagtaatttaaaatcttaaagttatgttaaattatag

SEQ ID NO: 282290 - DNA, 597 bp, Homo sapiens
tctattaatatagacaaatattatgagaaatatgtttctaaacattataaaatgatttccatctaaaaatactgatatgtgggccaggtgcaatggatcatgcctgtaatcccagcactttgggaggccraggcatgtgggtcacctaaggttaggagttcaagatcagcatggccaacatggtgaaaccttgtctctacaaaaaatacaaaaaaattagctgggcatggtggcaggagcctgtaatcccaacagagtgagactccatctccaaaaaaaaaaaaacaaaaaaacctgatatgtgatctttaaaactgcttgctaaaaattgaagttactaatagttaaaaatctaattaatatatatgtaattcactgcagaaagtgtgcctaaaactaacttttttcttttttaataagaaaaaatgataagaaaggcaccaacatgtgttgtttattgaggaaaaattataattttgggtgatttaaagagtatttaaatgtttctcaaaaatacagatttaggatgtaattagaaacaagaaagaaaggaaggaaaggaactagtaagtaggagagagagatgtgaagaaaatt

SEQ ID NO: 282291 - DNA, 1185 bp, Homo sapiens
aatcaataaaccagcatttttcaaatgatccttatgtgatgatacaaagttatgcatcagtaaggatgcattcaaagaatatgatacatcattggatttcaagagttcaraaagttcattgatatgatttcagatttcaccttgcagttaaacattaagaaactatcatatgccaagttttggtgtagcattaaaggagaatagctacaattacatgaaaagcttttgaaaatatccatcccttttccaactacgtatctgtgtgagaccagattttctttatataggtctgcaaacacagcattgcgcaccagattgcatgcagaaacagatagaataattcagctctgttttattaagtcaaagagtacagagacctgcaaaaatgtaaaacaatgctatttttatcaattaatatttttgtctgtaaaacataatccctttttcctaaaaaaacattacttagtttagcttgtaatgagtttactactgcaattttaaattaataaagaaatattttaaattcttatatgtaaatattgataactataatctacataaatcctttagggtgtacaataatttttaagttwaatcaataaaccagcatttttcaaatgatccttatgtgatgatacaaagttatgcatcagtaaggatgcattcaaagaatatgatacatcattggatttcaagagttcagaaagttcattgatatgatttcagatttcaccttgcagttaaacattaagaaactatcatatgccaagttttggtgtagcattaaaggagaatagctacaattacatgaaaagcttttgaaaatatccatcccttttccaactacgtatctgtgtgagaccagattttctttatataggtctgcaaacacagcattgcgcaccagattgcatgcagaaacagatagaataattcagctctgttttattaagtcaaagagtacagagacctgcaaaaatgtaaaacaatgctatttttatcaattaatatttttgtctgtaaaacataatccctttttcctaaaaaaacattacttagtttagcttgtaatgagtttactactgcaattttaaattaataaagaaatattttwaattcttatatgtaaatattgataactataatctacataaatcctttagggtgtacaataatttttaagtt

SEQ ID NO: 282292 - DNA, 994 bp, Homo sapiens
catgttgttgcaaatgacaggatctcatttattttacagctgaatgatattccattgtatatatgtascatattttctttgtccattcatctgttgatggatacaggttgcttccatatattggctttatgaatagtgctggaataaacatgggagttcagatatctcttggatatactgtttcctttctttttaaattatactcagcactgggattgctggatcatatgttagttttatctttagtttttgaggaatctccttactcttccccatagtggctgtactaatttaccttctcaccaatagtgtatgaaggtttccctttctgacatcctcaccagcattcattattgccattttttggttaaaagcctagcaggggtaagatggtawaaaacactcactgtgatggttaattttatgcatcaacttgactgagctaaaggatgcccagatagctggtaaaacattacttctgwgagtatttttaagtgtgtttctggaagagattagcatttgaatcagtagacagagtaaagattgctttcaccaacattggtagacatcatccaatctgttgagggtccaaacagaaaaaaaggtagaagaaggtcaaattcgcttactgtttgcattgagctatccatcttcacctgcccttgaacattattgctcctggtttatgggtctttggattcaggcaaggacttacaccatttcttatgcacccttatgctttcatgcctttgactcagaccagaatttagaccatcagttcccctctggttatcaggcttttagacttgcatttgagactgaattgcaccccagcattcctgattttccagcttgcagacagcatatcatggaacttctcaatcttcataatcacacgagacaattctcaaaatctctctctctctctcctattctggaaaactttgactaatacactgacttaagtgcaacatcaccagcaaatatataattt

SEQ ID NO: 282293 - DNA, 563 bp, Homo sapiens
caggctagtctcaaactcctgacctcaactgatccgcctgcctcaacctcccaaagtgctgggattacaggtgtgagccaccgtgcctggcggcaaagacaacttttaaatggaatactcaaaatcacctactgcattaatatctgcttcagataaacattataaatatcttttcatttaaatgatttaatgtaaactaatgcttagcattatctctttttcatctccaaaattattctttaaatatttggtaatttttcacttattgtttctgaagaagaaaatatgcttttatatttaatgtgtgatttagcttacttttaaaaaattagaaatgtatagataaatgatttaatagtattagcactttgggcttttaaagataggcatttgcattgaaatattaatccctaaattctattttaaagtctgcaggcatcattaaaaacaaaaaaaatgcacaactttttgtttctttagtcagtatttctttggagtcatayttaataatggaaaaacatctttcatattaagaaacttcttttttcccttttaaatgtgac

SEQ ID NO: 282294 - DNA, 606 bp, Homo sapiens
tcataaatcatcatatgttatattcagcaatacaatagataagattttggattctttcatttacctatttgtctatctacagtgttggtatctgtttcagctactgtaattttcaagaattttttatgtttggttttaaagtgttactcttctccaccccaatactttttttcttcaaaagtttaacatataaatcttccaaataaacaaactttaaatgtagcatgtaaacccactcccataccaattccttttggaatttgatttcttcagtttctttgactcactgatgaaaatgaagaagttaaattcctcacaggaagtgataaccatcagggactaggttatctgggaaagagacttggacacagagacagcgtgcacaatgtttattaggaagatctttgtgcaaaagaagctaaatgaaagctttagtggtcagaggaggaagatgaggtactgcagatctagtgacagcctcagycaacagattgaaaactctggacttggaatgtcaagtcagttttgtcctgagatgggctgaaaagattaagttacttcatcagttggtcactgagtgtaagggactaggaaaaggacatagtt

SEQ ID NO: 282295 - DNA, 421 bp, Homo sapiens
tcagaattttaaaatcttctctcttactaaaaataaacaataacaaataattttaaatataaaaaaaacctttaaaccaacttcagcygactctatggaacctaatagataattctgcctctgtattgatgggaatgcacttcaaaagcactataatacagcattatttataatttgttacaaaatcatgagctcgttcaacagaagtgtatctttcagacaattgacaaatatccatctacgagctaaaggtgagattatttaataatatctgagagaacctttaaaaatattataaacttcaatggtttcttaatcagcatcattatggtcctcaattattatactaaggtttaatgcaacaattcctcatttggcattaaggtaggtatataagaatgattttcttgtatatttcagt

SEQ ID NO: 282296 - DNA, 611 bp, Homo sapiens
ctctcttttttatcactgttcttaagtccattttatctaagtatcgcttaatgttctctcttgtaaggaagtaaaaaaacaaacttaccaactagagtayagtatttacatgcctaaaggacagtaaattctctcaccccggtatactgactgtgaggtgtgatgaaaatttgttatcaaaaacaattaaaataccaatgatttacatattatttatttaaaattggagaagattcaagattattataacgtggctttaacttatcttctttaggatatactttttgatggggagagaaaagaataaagctagtcaaaattcccagtgttctgggactcatagtttaggttaggtgtactgccatccagtagtgagtcattataaataaaccattaacactaatggcaattataaattattttggtagcatggagttataattccacagtagcttatgtatacttgttaattttaccccaaataaaatttaaaaagaaggtgcctgaaaaaggtggttttaagagatcaaattttgggtgaaaaaatgcaagattttaataaaagaatgaagaaagaatattaccaactttcttatcaatgatgacacaag

SEQ ID NO: 282297 - DNA, 611 bp, Homo sapiens
ctctcttttttatcactgttcttaagtccattttatctaagtatcgcttaatgttctctcttgtaaggaagtaaaaaaacaaacttaccaactagagtacrgtatttacatgcctaaaggacagtaaattctctcaccccggtatactgactgtgaggtgtgatgaaaatttgttatcaaaaacaattaaaataccaatgatttacatattatttatttaaaattggagaagattcaagattattataacgtggctttaacttatcttctttaggatatactttttgatggggagagaaaagaataaagctagtcaaaattcccagtgttctgggactcatagtttaggttaggtgtactgccatccagtagtgagtcattataaataaaccattaacactaatggcaattataaattattttggtagcatggagttataattccacagtagcttatgtatacttgttaattttaccccaaataaaatttaaaaagaaggtgcctgaaaaaggtggttttaagagatcaaattttgggtgaaaaaatgcaagattttaataaaagaatgaagaaagaatattaccaactttcttatcaatgatgacacaag

SEQ ID NO: 282298 - DNA, 533 bp, Homo sapiens
tatctcacttatgataaaatccaaaactcacagcatagccactctccccaaagcatactatgctttaaccacactggtctttcctaaaagtttctcctattccccaatctttcttccttactctaaggccttccctacaatatgttatctgctgtgaataatccctcataccttcttcatctatccaattcctattcattgttcaaacttcagctaaaattctacttctcttaacccagtaatctaaatcagcctccactgtactttcatagcattttctacgttttcttcacagcatattttccactattttatttacatatttgttgtgtgattatgtgtttattgtgtatctytctcactcaactgtaagctccgtgtaggtatttttaatctggagcagagtagatacacaacattaaaaaaaattaatatatgcaattaatgaacctgctctaattcaacaatcctaatatagttaaaagctcaaagagaataagctctgatcattaaactggtcaaagaacattaca

SEQ ID NO: 282299 - DNA, 509 bp, Homo sapiens
caggaacagaaactagaatctgaggccatgyagcaaatgaacacagctctacagttgctaatcttagaatatagctgtacaataacagtataagaactgagacttataatgatggcccaaatgaaaaaagaagttgaattatgttttgtaattgaagaaaatagtatatgcattttagaacgtttttctgtaacgcttttttggaaagctttatgatcatctctgtactatttatactagaaaaaaatttataaataacctaaattccagaaacttagggactgattaatgaattatggcatagatattgacaatgtgctgttaaatgaaaaaagaaaacatattccaaaacattattttcaggatgactctgtttttataaactatttcatatatattaatataaaaaaattctgggatctcacacacacacacacacacacacacacacacacacacgcacactttaggtccactttaggtagtgagattaaaggctgcttttcttt

SEQ ID NO: 282300 - DNA, 540 bp, Homo sapiens
gtaggtgagccgtcgctagttaaattgtactacgcaacacactatagcattagactgcagcctgtatgcaatgccagctgaagcccatatcaacagttttgtgtttcttgccagttccttgttaatcccttaaaagggaaggtaaaaacaaggccaatagcttttattacatargatgatttatcgatcccagctattcaaacatttcacttcacccagtgtgcatgccaaaaatgtttatttcagaaatgtttatttgattaattatgccatgtaacatagatggctgatgagtaaaaaggaaatcctgtctatagctgttacatgtcatctttcatttttaaggtaaaataggtttatcttccattgagcctaatgacaaaggcttttaggattagaagaatgaaccctgtaagcctataacttcccctcatgtcttccaattatgtctggtcaaatgaatatgagctgaagcatttactaccaagtatggattttgagataagctttgaactcttcttccttgaaggtcacctggta

SEQ ID NO: 282301 - DNA, 546 bp, Homo sapiens
gcttctgttcatcatagtataaactattagagtatctttttatttaacttttattttaggttcaggggtacatgtgcaggttttttatataggtaaatttcctgtggcagggagttggcgtacagaatattttgttacccaggtaatcagcatagtacctaataggtagtttttttatccttaccctgtccttattgtaattttacctcttttgaatatagtatacagattacagattgcaggcaggctgcattgtacatcggcatctctgttccattagtcatatatcttaataaggacataaatrtattttaaatggttatttgtatcaatcctggaatttaaatatccatcatctggtgaatggataaacaaattatggtttaccaatgaaacggaatacaacttagcaataaaatgaagcaaactacagacacatgcaacaatatgaagaaatctcaaagaaaatgttaaacaaaagaatgcagaaacttaaggctgtatactgtatgattccattcagatggcttcttgtcaaaggcaaat

SEQ ID NO: 282302 - DNA, 547 bp, Homo sapiens
aatggctgaactcattcatcaataccaaggagcatgattgctggattatatggtaagagtatggttagcttggtaagaaactgtcaaaccgtcttttgtataatcgtgcccttttgcattcctggcaatgctgaatgaggttcttgtttgtttgcattctgagtagcatttgatgttgttggtgttctggatttcagccattttaayaggtatgtcatggtatctcattgtcattttaatttgcatttcgctaatgacatatgataggaaacaccttttttaatgcctatttgccacctgtgcatcttctttggagaggtgtttgttggcttgtctatttcttctcttgacagtgtctttcactgagcagacattttagattttttgtttgttttttaacatggagtctcactctgtcacccaggctggagtgcagtggctcactgcaacctctgcctcctgggttcaagtgattctcctacctcaacctcccgagtagctgggattactggtgcgtgccaccatgccctgctaatttttatgtttt

SEQ ID NO: 282303 - DNA, 547 bp, Homo sapiens
aatggctgaactcattcatcaataccaaggagcatgattgctggattatatggtaagagtatggttagcttggtaagaaactgtcaaaccgtcttttgtataatcgtgcccttttgcattcctggcaatgctgaatgaggttcttgtttgtttgcattctgagtagcatttgatgttgttggtgttctggatttcagccattttaacaggtatgtcatggtatctcattgtcattttaatttgcatttcgctaatgacatatgataggaaacaccttttttaatgcctatttgccacctgtgcatcttctttggagaggtgtttgttggcttgtctatttcttctcttgacagtgtctttcactgagcagacattttagattttttgtttgttttttaacatggagtctcactctgtcacccaggctggagtgcagtggctcactgcaacctctgcctcctgggttcaagtgattctcctacctcaacctcccgrgtagctgggattactggtgcgtgccaccatgccctgctaatttttatgtttt

SEQ ID NO: 282304 - DNA, 513 bp, Homo sapiens
tatatttttggaagacatgatttagcttaatactggttttactcttgcatagacagggtgatttatactttcttgcagtgtctatgtaacttgaagccttaattcattaagattagtgtgatttttattttgttactttttcttcatccactcatttcctttgtcactttaaaatatatatatattttaaagttgagacagcagccagggctgtaggcagagcctgactctgatggccctctggcccttcagatgggcagtttctcagtggcaatgacaagaaacccaggcagccacacgcacacacatgccacatggctttgcaaacgagcggtagaggcaggaatatcttcaaagcatatggaaagcagggagatgaggaggtgcgctggagccaggacagtgacgasgttcgcagggctctggcgtgcaggggaggggacaaaaataaccagcaaatcccttctctgcggagaaccaccagtgaagaggatcgacagacaagtgacggga

SEQ ID NO: 282305 - DNA, 513 bp, Homo sapiens
tatatttttggaagacatgatttagcttaatactggttttactcttgcatagacagggtgatttatactttcttgcagtgtctatgtaacttgaagccttaattcattaagattagtgtgatttttattttgttactttttcttcatccactcatttcctttgtcactttaaaatatatatatattttaaagttgagacagcagccagggctgtaggcagagcctgactctgatggccctctggcccttcagatgggcagtttctcagtggcaatgacaagaaacccaggcagccacacgcacacacatgccacatggctttgcaaacgagcggtagaggcaggaatatcttcaaagcatatggaaagcagggagatgaggaggtgcgctggagccaggacagtgacgacsttcgcagggctctggcgtgcaggggaggggacaaaaataaccagcaaatcccttctctgcggagaaccaccagtgaagaggatcgacagacaagtgacggga

SEQ ID NO: 282306 - DNA, 580 bp, Homo sapiens
tttatatcttatagaaaataaattaaatggaattaaaaataataagactcaaaccccagtcttctggtcataactgaggagccccaatacagattatagcatgtttctgaatgtcatccctttagagaaagtgctttctatttaagtctgcttagaaaaatcaatttgaagtctcgcttaggcaaaatgacacttctttgggaaggggaattgcataattctagagcatgactgagatgctttacctttttagggcctgttccctagggaacatttgtgaggaggagggctctcyggaataacttgtaacaagtgacactcgaagcttccaaaagcatccagagttgggggcatcaaggcaggtgcatgatgggaagatggtagatccagcagcgagtctggttgggagatgtggcaacacagcattcaacagcctcagggcaggtgcaggtggtgccataaccccagacattgcagtagggattcaagagcattactcttattttgagacaagttttacaggtgtgatttgggatgtcatccctgaaaaaggactgaatagtatcaataagtgacattt

SEQ ID NO: 282307 - DNA, 592 bp, Homo sapiens
cattaccatcataaaggcctcattagttgcaaaatatctgaataagaacactgttagtatttaggataccctgactttggattcataaaaactcagaggttatgtttactcaaatttacctttatgctactagtagtatatgcaataaaacttaatgaaagtttaggaagaattaaatacatagttgaccagaaagggaaaaagatcaaagcctgtttctaaatctctcattgttaagaactcctctatctgtattcaagctttctgagatccatatggagtatccagatagaaataatttatttccacatctctgctttctatcttaatttgcttgatcataacacccacatttaccatcagccatttattatcacaaagttataaccatccggagactctcccaaacacagaggccaaatctttcaaggacaaatcagatcctgagatgaccaggccctccattttctgtttcagtgagcctgacrtgcacgtcactcacaggagataatctcaggcttgctatttgaaggctgcatgactttagccaagtttctcaaattatgtatgtcagtttcctcaagtctgaaat

SEQ ID NO: 282308 - DNA, 494 bp, Homo sapiens
tatattttagtcataattaaactagcttttattattttatataattcgtttttgtttcttttttttgccttttatttttgayttaaaaacttttaccaatgataatttattttcttactaaaatgtcttctttaggatttctttaataaaatagtgaatattatcaattcttttaatctaaaaatcttattcaatttttgaattttttgaaactttcttttatttgaaacacagctcatctttgaataacacagaggttgggggtactgatctaccacatagtcaaaaatcaccatataacttttgactctccaaaaatttaactactaatagcctgctgctgatcagaagacttattgataatataaaatatcaattcacagagattttgtatgttctgtgaattacatacagcattcttaccataaagtaagctaaagaaaagaaactgttattaagaaaatcatcgggaagggaaaatatatttactactc

SEQ ID NO: 282309 - DNA, 570 bp, Homo sapiens
aacttttgactctccaaaaatttaactactaatagcctgctgctgatcagaagacttattgataatataaaatatcaattcacagagattttrtatgttctgtgaattacatacagcattcttaccataaagtaagctaaagaaaagaaactgttattaagaaaatcatcgggaagggaaaatatatttactactcattaaatgaaagtggatcatcataaagatcttcattttcatcttcacgttgagtaggctgaggaggaggaggtagaggaggggttggtcttcacgttgagtaggctgaggaggaggaggtagaggaggggttggtcttgccctctcaggatggcagaggcagaagaaaatctgcccttaagaggactccagtagctcaaatccattatttgaggttcaattatgtatcttcatatttttacatgctaacctactccttagtttattgtatatattatttcaataatcagatatttttattttagtgcactttaaagatactattctctaacacttatctgtcagtgtaagacaactattggtctaattgctgtt

SEQ ID NO: 282310 - DNA, 345 bp, Homo sapiens
tcagtgacatgattgggtgtgagggaatcagactgtgtgaatcaatttcctcattcagaacgttcataaactgcagcccctgtgctccagcatgctatgaatttcctgttttcaaagaacatgtatcactcttccccccacctttatatttatcatgctatattctaattgtttatttatttaccaatttgtytttctcagagtaggtaatgtggtcattaaggaagagattcatcttatttacctccatgtctcttgtgtcaataggaggcctgaaaaacagtcaaatcttggctgacaatatgcatgctccaatttcctggggcaaattcaatgatttaaaca

SEQ ID NO: 282311 - DNA, 345 bp, Homo sapiens
tcagtgacatgattgggtgtgagggaatcagactgtgtgaatcaatttcctcattcagaacgttcataaactgcagcccctgtgctccagcatgctatgaatttcctgttttcaaagaacatgtatcactcttccccccacctttatatttatcatgctatattctaattgtttatttatttaccaatttgtctttctcagagtaggtaatgtggtcattraggaagagattcatcttatttacctccatgtctcttgtgtcaataggaggcctgaaaaacagtcaaatcttggctgacaatatgcatgctccaatttcctggggcaaattcaatgatttaaaca

SEQ ID NO: 282312 - DNA, 586 bp, Homo sapiens
aaatgttcaaaaactgcaagcttattcaaagtaatatgagattattttgaagcatttgtggaggaagtcttcctaagtataataagaaagcttaaagctactgaacaaataatgaccaatttaatatttaaacattcaaacttctataaatcaaacatcacagaaacttagtcaaagaataatctacagagaaagtatgtgtaacatatgtgacgaagttttagtatcactaaaatatgtaagttcttaaaatttgttttaaagacacaaacataattagaaaaatattgagaagatatgaaaagttgattgatgaaaaaaagaagtcaaaagtcaataagtgggaaaagcaagttatacaatagattcaaggccattatttgcccataaattgataaatggaaaaaatgattgacagcatctaatgggagcataagaaattcacatacattgtagataggagtgtaaatatcctcatattctcacttctctctttctccagcttagattgatacagcttcagatgccctaagmtttcattataatgcacctgcaaaaggcctaatccaaacccctgtgaaattca

SEQ ID NO: 282313 - DNA, 548 bp, Homo sapiens
gattgtggatgcaccaatcagcactctgtatctagctcaaggtttgtggatgcaccaatcagcactctatatctatctaatctggtggggacttggacaatctttatatctagctaaggtattgtaaatacaccaatcagcactctgtgtctagctcaatgtttgtaaacacaccaatcagcaccctgtgtctagctcaaggtttgtaaatgcaccaatcagtgctctgtgtctagctaatctagggtggatttggagaacttttgtgtctagctcagggactgtaaacgcaccaaacagcaccctgtcaaaacggaccaatcagctttctgtaaaacagaccagtcagcyctctgtaaaatggaccaatcagcaggacgtgggtggggccagatgagggaataaaagcaggctgccctccctcagccatcagtggcaacttggtcgggtctgcttccgcgctgtggaggttttgttttttactctttgcagtaaatcttgctgctgctcactctttgggtccgcactgcttttgtgagctgtaacac

SEQ ID NO: 282314 - DNA, 636 bp, Homo sapiens
tgttagttcaataactttaatttcatataattcaactcaaaggtatccattatatggaagaaaacaattactttagatctttaaacaytggaaacaggatgttatttcccttgcagtcaaacttctcagcttctgaaattcgttttcaattgttagatagtctcaggaactctttgtggctcattgcattattttgagggtccttcctcacatgaggtttgactctaaagatctctataaatgtgtctcagataagcctatattcttaaaataaataaaaagtttacatcaagcttcaactataattagaaaataaacatccatatttatgcataaaggattaatctccccaaatatccttaactaatgttttagttttaggaaagaaaatagtgcccttgaaattaattcaatgatacaattttttatgaagttacataaatgttaaacttacataattaagatgaggccacctacaggaaagctaaacctccagccacttcctttttaaaatgtttatttcatctttctctaagaaatctcagttaaagctaaacagaaactgatgtgaggacaaaagaaaatacctacttacaaaatatctgaacataaactttctttccttcagaaatacca

SEQ ID NO: 282315 - DNA, 638 bp, Homo sapiens
aaagtttttatttttcaatggaggactgaggggaaaaaaacgtgaaaaaccttagggtaaatttttgtcacaaaaaaagaaaagagtgagccatcttcagtcagtgaggcggtcagaaggcagcaaggaggtggtggagctgggtgccctcagtgtgcgatggcagaggcctggggacagcatctacacagcgcttctgccgacccagtccccacacccctgccagtgagacagattgactgatgttcttttagaccagggtaaatggccactacattctatttcacttgtaatttaagccaaagatgcatctcaagttccagctttgagagcctactgcgattttgagcacttccagaaaacagatcaagagttaaatggacggaaagctgtgacacagaaacaaacaccragtaaatctccttcctcaatctgtctctcaggctcagctttccaacagcactcccaacactgcagagtcaaatcgtgtgtgaggttatatgccattagagatgtaaccccaacctggagatgacaaaaaaaacagctgctcccttggtttttttggtgcattgttgtgcatcaaatgcatttgttgatatatttatataaacttcttgttctaaaaatatagttta

SEQ ID NO: 282316 - DNA, 594 bp, Homo sapiens
cttattatttttataatgtaatgaggcatcattcagcagcagcatctagcatgaaactcaaaaaaaattttttttcactttccctatttgaagaatttggtaggtgttgatgaaacttaaaatagacaattccccaaaggaaagactgctacttttggaagtcacacagtgaaatcaacgtatgagttgctccccttactgagtgctaaatcacattatatttgctttgtaaagagatgcttgtagagaatggagtagtaaaatgtagaggagttaattgccccaggaaaattcagacacactttgtaggggttgctagaatacaaatataactatcggtgttcattatttagatgaagttgtttccaaagcaactctgacagttayaaataaagcccagaaatgttcagttaggaaaatggaaaaaaaaaagataaaaataaatgaagtttgaattgctttagaaagcattcatctatgcaagaatgtatgagaaaaaagactgggcactttgtttaggggtttggtgtattaaaaatatttaattccaacagcgatgcctaagtaagtttacattaaatgtaaaataaaatc

SEQ ID NO: 282317 - DNA, 619 bp, Homo sapiens
ccatcatgtcatgaggatccttaaagatgtggaaaggtccacatggggaggagctgatgcctcctaagaacaccagcacactcttgggaggaccatcttgaaagcagattctccagccccagtcaagccttcagatgaatgtggctccagtcaatgtcttgattgacacttcattagaaacccaacccrgaaccagccagctaagccactcctgaattcctgacccacaagaactctgtgagatagtaaatgcttgttcttattttaaaccactaagttctggggtgatttgttacatagtattacatagctattatgctgtctgtaagaaaaatatagttgttcttcttgagtgtttatataccatgcattggttttttcaccttctttttatttatttatttatttatttattttttgagatggagttttgctcttgttgcccaggctgaagtgcaatgatgcgatttcggctcactgccacctctgcctccctggttcaagtgattttcctgcctcagcctccagagtagctgggattatgggcacccaccaccatgactgactaatttttgtatgtttagtagagacagggttttaccatgttggccaggctggt

SEQ ID NO: 282318 - DNA, 619 bp, Homo sapiens
ccatcatgtcatgaggatccttaaagatgtggaaaggtccacatggggaggagctgatgcctcctaagaacaccagcacactcttgggaggaccatcttgaaagcagattctccagccccagtcaagccttcagatgaatgtggctccagtcaatgtcttgattgacacttcattagaaacccaacccagaaccagccagctaagccactcctgaattcctgacccacaagaactctgtgagatagtaaatgcttgttcttattttaaaccactaagttctggggtgatttgttacatagtattacatagctattatgctgtctgtaagaaaaatatagttgttcttsttgagtgtttatataccatgcattggttttttcaccttctttttatttatttatttatttatttattttttgagatggagttttgctcttgttgcccaggctgaagtgcaatgatgcgatttcggctcactgccacctctgcctccctggttcaagtgattttcctgcctcagcctccagagtagctgggattatgggcacccaccaccatgactgactaatttttgtatgtttagtagagacagggttttaccatgttggccaggctggt

SEQ ID NO: 282319 - DNA, 619 bp, Homo sapiens
ccatcatgtcatgaggatccttaaagatgtggaaaggtccacatggggaggagctgatgcctcctaagaacaccagcacactcttgggaggaccatcttgaaagcagattctccagccccagtcaagccttcagatgaatgtggctccagtcaatgtcttgattgacacttcattagaaacccaacccagaaccagccagctaagccactcctgaattcctgacccacaagaactctgtgagatagtaaatgcttgttcttattttaaaccactaagttctggggtgatttgttacatagtattacatagctattatgctgtctgtaagaaaaatatagttgttcttcttgagtgtttatataccatgcattggttttttcaycttctttttatttatttatttatttatttattttttgagatggagttttgctcttgttgcccaggctgaagtgcaatgatgcgatttcggctcactgccacctctgcctccctggttcaagtgattttcctgcctcagcctccagagtagctgggattatgggcacccaccaccatgactgactaatttttgtatgtttagtagagacagggttttaccatgttggccaggctggt

SEQ ID NO: 282320 - DNA, 606 bp, Homo sapiens
tgtaattggctcatggttctgcagactgtacaggaagtatgactctggcatctgctcagcttctagagagacctcaggaaatttacaatcaggctgggcacagtggctcacgcctgtaatcccagcactttgggaggccgaggcgggtggatcacgaggtcaggagatcgagaccatcctggctaacatggtgaaaccccatgtctactaaaaatacaaaaaaattagctgggtgtggtggcaggtgcctgtagtcccagctaacttgggaggctgaggcaggagaatggcatgaacctaggaggcggagtttgcagtgagccaagatcgtgccaccacactccaatctgggcgacagagsgagactctgtctcaaaaaaaaaaaaaaaaaaaaaaaaaaaaggaaatttacaatcatcacagaagatgaaggaggagcaggcatatcacatagtgaaagcaggaacaaaagggtgaggcagaaggtaacacagacttttaaatgacctgagaactcactcaccattgcaagaacagtaccaaaggggatgaagctaaaccattaatgagaaaaacacctccataatccaatcacctcccaccact

SEQ ID NO: 282321 - DNA, 606 bp, Homo sapiens
tgtaattggctcatggttctgcagactgtacaggaagtatgactctggcatctgctcagcttctagagagacctcaggaaatttacaatcaggctgggcacagtggctcacgcctgtaatcccagcactttgggaggccgaggcgggtggatcacgaggtcaggagatcgagaccatcctggctaacatggtgaaaccccatgtctactaaaaatacaaaaaaattagctgggtgtggtggcaggtgcctgtagtcccagctaacttgggaggctgaggcaggagaatggcatgaacctaggaggcggagtttgcagtgagccaagatcgtgccaccacactccaatctgggcgacagagcgagactctgtctcaaaaaaaaaaaaaaaaaaaaaaaaaaaaggaaatttacaatcatcacagaagatgaaggagkagcaggcatatcacatagtgaaagcaggaacaaaagggtgaggcagaaggtaacacagacttttaaatgacctgagaactcactcaccattgcaagaacagtaccaaaggggatgaagctaaaccattaatgagaaaaacacctccataatccaatcacctcccaccact

SEQ ID NO: 282322 - DNA, 484 bp, Homo sapiens
ttatctcctgtagagaaagagctaaaagtgtggaaaaacagatacaaggtcttatcatgcgaatggctgacctgcaatgaaatgggcatgcacagccttgccagatatcttctgttaaagtgagggcattgattagaaaagaataggaccctgcagcttggaatagggatgtgtgagaggaccctgatgaagttggagacactgagcttgtaaactctgatgaacgtttttttgacaaaaggaacagctacctcatccccagtagtggcaactttccctcccctacccatgctgccatcagcctttccacatttstctgaggagataagccctgtgcttcctgagacaatagtgatggcctcccctgaggcagttgccaggccaaataatgttgattctcttcaggagccatccccaacacccctgtttgcttctagatctaaactttacttctaggcctaacgtcctggtaggatccttgagg

SEQ ID NO: 282323 - DNA, 1234 bp, Homo sapiens
actttatatgaacagaaatctggagaacaggcatgggaatggatattaagggtatggggtaatggtggaaggaacagagttggatcaggctggatttattgatttgggcctactaagtagagactctgcttttaatgttgcagctaggggagttaaaaaatgttctaggccaggcacagtgactcacacctataatcacagcactttgggaggctgaggcaggtggatcacctgaggtcgggagttcaagaccaacctgaggtcggagttcaagaccaacctgaccaacatggagaaaccctgtctctactaaaaaacaaaacaaaacaaaattarccaggcatggttgtgcatgcttgcctgtaatcccagctactcgggaggctgaggcaggagaatcacttgaacctgggaggtggaggttgtggcatgccaagatcatgccattgcactctagcttgggcaacaagagcgaaactccacctaaaaaaaaaaaatgttctaatagtttatttgcttggttagctgaaatatggattaaaagatggcccaaaatgagcaagctgwatcatagttgattattcagagtatgattctaaaattcttcaagatgagctgctctgtaagaaatattgtwtcagtgaatttcatggaatgagtccattgtatattttattttgctatgaaatgaattatttgaccagaaacaatgttacagagaataccataatggtaaataagacattctaactctacagatggtagtactagaaggagaaatatgagctgtaaaattaaatccatactcaaaaactatttattccaatgagaacaaattattgcttcttccattgtggaaggattccaatgtaatcagtgtgccagtgagtggaagcctagttccttcagagaatgaagccatatcaggagctcagaatgagactatggagcctttttaaaaggaaacctatgttcttgagcccatgcataacctccatctgtgtcattattaacattttgtatataagactacagagcaagcactaagatgtccaggagtaagatgattaactgatatacacagaatgtatcatattgtctatctaatcagtgaaagtctagtctgcaatggatggcttttggtgggcactctggatccaaaatgtaaatatctatcccttttgtttctattctgagaggttcttccacatatctcttcccatgaccattttga

SEQ ID NO: 282324 - DNA, 667 bp, Homo sapiens
atcatagttgattattcagagtatgattctaaaattcttcaagatgagctgctctgtaagaaatattgtttcagtgaatttcatggaatgagtccattgtatattttattttgctatgaaatgaattatttgaccagaaacaatgttacagagaataccataatggtaaataagrcattctaactctacagatggtagtactagaaggagaaatatgagctgtaaaattaaatccatactcaaaaactatttattccaatgagaacaaattattgcttcttccattgtggaaggattccaatgtaatcagtgtgccagtgagtggaagcctagttccttcagagaatgaagccatatcaggagctcagaatgagactatggagcctttttaaaaggaaacctatgttcttgagcccatgcataacctccatctgtgtcattattaacattttgtatataagactacagagcaagcactaagatgtccaggagtaagatgattaactgatatacacagaatgtatcatattgtctatctaatcagtgaaagtctagtctgcaatggatggcttttggtgggcactctggatccaaaatgtaaatatctatcccttttgtttctattctgagaggttcttccacatatctcttcccatgaccattttga

SEQ ID NO: 282325 - DNA, 1081 bp, Homo sapiens
cacagatatttttggggaaactagcactgccctctacaatgtatctctcaatatcttgctgaataaagtttctttttaaaatacctttgaggaatgggtactggtaacacattataaagctgatctaacattcatatgtccctaatactttggattctttattttgctttagacaasaacaattttgtcattgcaaatcattgaacacactgaccaccatttagtccaaatttttgtcaatcaaagagtaatatatgaaagctactttaagctaagttaaacacactaaatccagcatgaaaggtaaactcacttttgtgtataaatttgtcctggtactctgaggtactctgttatctttatattgagaaacttagaatccatttgcatgcatatttcttaggtttctgctaaaataataaataaaattataaattagcaaaactttacagtttttgtgaagtgaaagctgtttcctcccatgtatattttacttctatcctggagtatgttaagatataaccawatggtaggatgagttttatggtcataaacagctagaaagaaaatattgaatatgtctaacacaaaaaaatgaaatgtttaagataacagatattttagttacccwaatctgatcaatatgcattatatatcagtatacattatgtatatgtattgaatcattactgtgtacaccataaattgtacaattattatgtgtcttttttaactctttaggttaaaaaaagcgtttactaaaaaaaaattataaagaatgtgtcctttttgtctctgcttatgtattagtctgttctcatgctgctatgaagaaataccctagacagggtaatttattaaaaaaagaggtttagttaactcagttccacatagctggggaggcctcaggaaacttacaattttggttgaaggcaactcttcacagggtggcaggagataatgagtgccaagcaaaggtggaattcccttataaaaccatcagatctcatgagaactcactcaccatagagaacagcatgggagaatctgcctccaaattacctccacctggtcccacctt

SEQ ID NO: 282326 - DNA, 1124 bp, Homo sapiens
atggtaggatgagttttatggtcataaacagctagaaagaaaatattgaatatgtctaacacaaaaaaatgaaatgtttaagataacagatattttagttacccaratctgatcaatatgcattatatatcagtatacattatgtatatgtattgaatcattactgtgtacaccataaattgtacaattattatgtgtcttttttaactctttaggttaaaaaaagcgtttactaaaaaaaaattataaagaatgtgtcctttttgtctctgcttatgtattagtctgttctcatgctgctatgaagaaataccctagacagggtaatttattaaaaaaagaggtttagttaactcagttccacatagctggggaggcctcaggaaacttacaattttggttgaaggcaactcttcacagggtggcaggagataatgagtgccaagcaaaggtggaattcccttataaaaccatcagatctcatgagaactcactcaccatagagaacagcatgggagaatctgcctccaaattacctccacctggtcccaccttwttattgctattgtccacatttgtcttgcaagtatatctagttttaaattattttcgttaatatactcttttagttttctaattcattgagtaaatwtaaaagaattgtttttatgctgaaaggcaataaatttacaatttactgtcaaaacagctgcctcttttaactgcattaaaattgtatttgaacactttccttcacttaaaaaatctacactacaaacaatggcaaacaatttttaagttacagttaaataatctttaagatgacaatgaaaatgatgatattaatagtattttccttgtttttgtcagtagcaaataagataatacatacataattaagttgccagataaaatacagttaattcctatttaatttgattttcaaataaataagaaaacattttagtacaggtacatcccaagtatttgaataaaccatactaaaaaaattggaacctataaatacaaaaatatcatttttatttatataaaattcaaatttaatgaggtaacatctatttttatttgctaaatatgagaactatatacataacactcaacac

SEQ ID NO: 282327 - DNA, 456 bp, Homo sapiens
gtgaatgagtaggctataagatccactcaattctcagtaaggagataaaaatggatcttatttactttgtagctattggaaatgaaattgttttcctaattttttcagatggtttactattcatgtgtagaaacaatattgatttttgcatgtttattttgtatcctacaactttactgaatttgtatattagttctaacatttttttagtgacgactttagggttttctatggatataagataatgttacctgcaaatggsacagtttaactttcttctttcctatttggatagcttttataactttatcttggttaattactctggctaggacttctggtattatgttgaatagaagtggaaaaagtgggtcccatttacaatagctacaaataataaaatacctgggaataagtttaaccaagtttgttgtattagtctgttctcatgctgct

SEQ ID NO: 282328 - DNA, 655 bp, Homo sapiens
agtggaatctagataaagaacagaagactattagagaaagaataagtcaaagtaacataaaatatttcatttatactattcttaattgctccaaaasgtgattgttaaaaataataatagttacaatgtattctgtcatcttatagcatatgtataagcaaaataaataaaagcaatgttataaaggatgaaagcaagaaattcagcagaattagactctgtcataaggcacctgcactacccgtgaagatctacagtattttttgaaaatgggcatagattattttaaaaatgtacaatacaaacatcaggacaccaagtacttttaaaaagaggtataagtgatatgcaaagagagaggataaaatggaattatataaagtgctcaatttaaaccatagaaagcagaaaaagattgaaaaaatgaagacaaagaaaagcaaacacccagaacaaaaagccactacaaatatggtgtcaatccacatataacaataatcactttaaataatagtggtttaaatacagttaaaagatagaccttttcaaagtggattgaaaaaatccgtaattttatcttgtctatagaacacctgcttcatatatcaagactcacatgtgttaaaagtaaaggacttgaaaagcatatactatt

SEQ ID NO: 282329 - DNA, 526 bp, Homo sapiens
tacattgttttaattaaacctaaaaataccttctgcagtcagtattatctcccttttaaaaagaacaaaagtaaggctttaagcattcatttctaaaaaagctgttgaacaaagactaaaatattgactagaggatatctagcttaagataacccaraattgtaagaacaaaactgagaaagaaattagaagaatgagagagaagagataagacccattaatatcctatgtttcaaacgagatatggctatgattctgttaaatgaactaaactttctcattggaaacacttctcataagaaaacattttttgaggtaggcgcctagggaaagttggaacacttataatcttaagtgttttagattctcatacattttctttcctatcactgctgattacaaagatatttgcatgtaaatagcaatgttcttctgtgtaatcagcaggctgttctttcagtttgatacgcatgctctcaccatagatttttttcctcagtaatcaattcagaaatcacagacactg

SEQ ID NO: 282330 - DNA, 526 bp, Homo sapiens
tacattgttttaattaaacctaaaaataccttctgcagtcagtattatctcccttttaaaaagaacaaaagtaaggctttaagcattcatttctaaaaaagctgttgaacaaagactaaaatattgactagaggatatctagcttaagataacccagaattgtaagaacaaaactgagaaagaaattagaagaatgagagagaagagataagacccattaatatcctatgtttcaaacgagatatggctatgattctgttaaatgaactaaactttctcattggaaacacttctcataagaaaacattttttgaggtaggcgcytagggaaagttggaacacttataatcttaagtgttttagattctcatacattttctttcctatcactgctgattacaaagatatttgcatgtaaatagcaatgttcttctgtgtaatcagcaggctgttctttcagtttgatacgcatgctctcaccatagatttttttcctcagtaatcaattcagaaatcacagacactg

SEQ ID NO: 282331 - DNA, 486 bp, Homo sapiens
tgagaataggcctgggaaaacttttccgtaattcaaagagactttcctttgcatcttttatgaaatggatatttgggatgctgtttaattcatagaggaaaaaagacatgttttgaacatagcatgagatattttgttcatttttaaaaatatttttgtatggagaaacaacacctcactgcagttgtaaaacttttttgtataaattttttacttgcatttttttctatatttgggaatcaacttagtgttagggaagggtccttgcttccaaattaaacttgcttcactctacyataaattatttatgaaaaaaacttttccttctaatatactgcattggagataatattccctccatagattggttgtgaggttaaaatcataatagaaattaaattactttttgttggaattattttataccaccatcactgagtaaatatgtcagatttgtttccacagaattccatagaagttatgcaa

SEQ ID NO: 282332 - DNA, 547 bp, Homo sapiens
ttttatcaacaattccaaatttatacacacacttcaatgaaatatttaacaactgtgtcaagagtttatttactcaagaagtatttattgaagtttactaartggagaccactgcaatagtagctggcatagagaggtaaagaagagaggaattacaattctgagattccaaaatgaggcataaggaaactaaaccaacctgcaaataaatattgaatactaattttaaaatagaaatatattttgcaatttaagaacataaaatagtcttatctaacttagttcagggttcagctatacttcctttaagaagatgttatttaagctgatccctgaaggatgaataggagcttcctaaggaaagtcaagtggccttgttctattccagtcatttgactattgagtaagttgcctaatgtctctaaatgtctgtgttctaatctgaaatatgccattatatttaattgatctattatgcagggttgtattaaattggtattttaggccccttaggtactataataatataccatacacttggcttaaa

SEQ ID NO: 282333 - DNA, 581 bp, Homo sapiens
tttcctctcatattttactacaatcataaaaagaacctaagctgcaccttcaatgctttgcttagaaatttcttctgctaaacattttattgcttacaacttctacctgccacaaaatactagaacacaacttaggtaagttatttgccacattataacaagtcttagcttcctccagtttccagtaaactgtttcttttcttttttttttttttttttgagatggagtttcactcttgttgcccaggctggactgcaatggggtgatcttggctcactgcaacctctgcctcctgggttcaagtgattctcctgcttcagcctcctgagtagctggggttacaggtgcatgccatcaygcctgactaatgtttatatttttagtagagatgaggtttcaccatattggccatgctggtctcgcactcctgacctcaggtgatccacccgcctcagcctcccaaagtgctgggattacaggcgtgagccactgtgcccggcctccagtaatctgtttcttatttctgagacatcaccaaaatttcctataatatctatatgtatttctagcatatacttca

SEQ ID NO: 282334 - DNA, 532 bp, Homo sapiens
gtgtcagtcttgctgtgtcaagtctccggtatttttgtatactctaaaaataattcttaataatatttgaataaattggataacagaaacatttttacaatgccatactatgtaagagagaccatatttaaatcagtgtttctggcctggtgtggtagctcatgcctgtaatcccagcactttgggaggccaaggcgggcggatcaactgaggtcaggagtttgagaccagcctggccaacatggtcaaacctcatctctactaaaaatacaaaaatttgataggtgtggtgcacttttagtcccagctactygggaggctgaggcaaaataatcacttgaacccaggaggcagaggatgcagtgagccaaaatcatgccactgcactccagcctgggtgacacagtgagatttttgtctcaaaataaataaataaataaaataaaacaatgtttctaattatgtaaacattgttatatgtacatggctgcataggcacatgtaaaatattataaatatttataaataatat

SEQ ID NO: 282335 - DNA, 546 bp, Homo sapiens
aatttaacactcagaatagccatggcactcacgtgttccataacttttcttaatatattagatgaccttaatttctgcctatatagtcaaattagaaaaccaaaaaggcaaaataggctcatatttaactatgacttactaaaagatatgtcttttaagtaaaaaagatattttctttattctttacaaatccatrcatggttgtgtatttccaaaatgaagatgaacattgagtagcaatatatggtgattttccccaatccaaaattgacagggtatgtctttactggaagatgttattaaaaaaataagaaacctgtaataacatctcattcagagatatttttattctcataggcttactaattcgatattttatagttttatcctaaattcactgcaaatcttgacaatttatagatacgattacatctaagattatgcctttgtacgtttcattgaatatgtgtttctggtaattatatacttgcatttttattgtatgttcttgtcattcaatttgaaacttttttcctttatgtagat

SEQ ID NO: 282336 - DNA, 551 bp, Homo sapiens
gttattaatgaaaataatattttaccctcacaaagttagcttacaacacgtacaatacacatactcaaaaagcttgaaataaacagtaagtccacacttaacattttctgtaggctcttggaaactgtgatgttaagcaaaatgacatgtgagactaattttatcagagcgtgattgatgtagacaagagttaagtttatgacgcatatttctggtcaaaaaaagttacaaagcttctaaagaaagaccaaaacactgtgtttaaatttttttaaatattcccctttaaagtcataaaacactattaatattaaacattgaaataaattttaactatgcagatatttaagaaaaaataattaaaaagtaagataagtatttacccagttattccagttcaaggctatgcgtaggtggctggagcctattccagaaacaggacacaaggcaggaagctaccatggaaaggataccattccattgcagcacacactcacatacacccayattcactcagactgaactgtttagacatgttaattcacctaacg

SEQ ID NO: 282337 - DNA, 661 bp, Homo sapiens
gagtgtgaatggatacaatgtgcactatacttattcagaagttttaagaggcattgtaatttctgtcgtctccttttttttcttctctgacccaaagagaagctgatccttctacctgtgttctagaatgagaagacactggagtggaactcaacttttggcaggcaaaaattattttctcatgtgaattcctgcagttttacagatttttgctaaaacatcaaagctagttaattacacacattcttagataatcacactgagactcatacttacacgtgcctgttttccacttacaattttcactgaagaacaattttgcctctaattcctttttctgagtcatgcagtaacatttacacaacatttatgtatactaatgttttattgacacctggcccacttccattctgcagaagtttactataatatttttctttmcttttctttttaaaaagattttgtgagtacatagtaggtgtatatatttataaggtacatacaatgtgaaataagtgcatcatgtagaatggggtaactatcccctcaagtatttatcttttgagttacaaacaatccaattacactcttacaaatgtaaatgcaaaatgtataattaagttactattgactatagtcactctgttgtcctatcaaatag

SEQ ID NO: 282338 - DNA, 568 bp, Homo sapiens
ataataattgtactaatttacttcartttccaactttcacttcaagttcaggggtggatgtgaaggatgtgcacatttgttacacaagtaaatgtgccatagtgatttgctgcacagattatcccataacccaggtattaagcccagcatccattacctgttcttccaaatcctcttcctcctcccatccccatcccatgacaggccccagtgtgtgttgttccccaatgtgtgaccatgtgttcttatcatttagttcccacttataagtgagaacatgcagtatttggttttctgttcctgcattactttgctaaggataatggcctccagctgcattcatatccctgaaaaggacatgatctccttttttggctgcatagcattcctcatggtgtatatgtacaacattttctttatctgatctatcatcgatgggcatttgggttgattccatgtctttgctattgtgaatagtgctgcaataaacataagcggccttgtgtctttacaaatagaatttatattcctttgggtatatacctactactgggattgttgggtcgaa

SEQ ID NO: 282339 - DNA, 568 bp, Homo sapiens
ataataattgtactaatttacttcagtttccaactttcacttcaagttcaggggtggatgtgaaggatgtgcacatttgttacacaagtaaatgtgccatagtgatttgctgcacagattatcccataacccaggtattaagcccagcatccattacctgttcttccaaatcctcttcctcctcccatccccatcccatgacaggccccagtgtgtgttgttccccaatgtgtgaccatgtgttcttatcatttagttcccacttataagtgagaacatgcagtatttggttttctgttcctgcattactttgctaaggataatggcctccagctgcattcatatccctgaaaaggacatgatctccttttttggctgcatagcattcctcatggtgtatatgtacaacattttctttatctgatctatcatcgatgggcatttgggttgattccatgtctttgctattgtgaatagtgctgcaataaacataagyggccttgtgtctttacaaatagaatttatattcctttgggtatatacctactactgggattgttgggtcgaa

SEQ ID NO: 282340 - DNA, 631 bp, Homo sapiens
aatgtaacatacttagatattttgaaagaaaattggagtgtggggtaaatggaagtttccctctttcaaacatatacctttctattctctttacaatgaaaatggacttttatgtaacctgtataattaaaaatgcaatcggctgggcgcggtggctcacgcctgtaatcccagcactttgggaggccgatgtgggcggatcatgaggtcaggagatcaagaccatgctggctaacacagtgaaaccccatctctactaaaaaaaatacaaaaaaaaattagctgggcgtggtgacaggagcctgtagtcccagctactcgggaggccaaggcaggagaatggcaygaacccgggaggcagagcttgcagtgagctgagattgcaccactgcactccagcctgggcgacagagcaagactccttctcaaaaaaagaaaaagcaatcaaagtataattaaaaaataacacaatgcatgtcccaaaagtacagcaataaaataaatatcaagtagtttcagaaacgaagatagtattgcattccataattttatacctatttgctactgagaagccccatttctggtgatgtgaactttaaaaatataaagagatcaaccacatgactaaata

SEQ ID NO: 282341 - DNA, 613 bp, Homo sapiens
tataatttttgaacatatatgaataacatgtttaataaaatataattcaaagaagattaaacatcacttattatttggcaatgcatttcatataatttaacatatcaaataatactttttatctctcttttggatgcttcaggggccctctgtagcattccaaagttagagttgaaaaaaagacctactttttaggttgaaatttgatttttggaagtctctcaaatatgtcaaagtgagagcggcaggaggaagccaaatgcccaagcagatagggaaggatccctagtgaaaccccacctccaagctgaagacagtttaaagcctgaaagccaagctaaaacttaaaccctcagactgaattgagaacttctcttactgtttggtgtgstttcctctgattgatacccatccttcatttatttaaagtatacctaccctttcctaattggtgttctatactgttgtgcccacctttaagtggtatctttgctttaacctttttttgaatactcacaaaccaatcagcaactccctattctgagtacgtaaaaggccctggacccagccacgcaggagactttctcacctttgggtaggggaaccacacccc

SEQ ID NO: 282342 - DNA, 613 bp, Homo sapiens
tataatttttgaacatatatgaataacatgtttaataaaatataattcaaagaagattaaacatcacttattatttggcaatgcatttcatataatttaacatatcaaataatactttttatctctcttttggatgcttcaggggccctctgtagcattccaaagttagagttgaaaaaaagacctactttttaggttgaaatttgatttttggaagtctctcaaatatgtcaaagtgagagcggcaggaggaagccaaatgcccaagcagatagggaaggatccctagtgaaaccccacctccaagctgaagacagtttaaagcctgaaagccaagctaaaacttaaaccctcagactgaattgagaacttctcttactgtttggtgtggtttcctctgattgatacccatccttcatttatttaaagtatacctaccctttcctaattggtgttctatactgttgtgcccacctttaagtggtatctttgctttaacctttttttgaatastcacaaaccaatcagcaactccctattctgagtacgtaaaaggccctggacccagccacgcaggagactttctcacctttgggtaggggaaccacacccc

SEQ ID NO: 282343 - DNA, 1248 bp, Homo sapiens
ggttcatcttgcccactgactagacagagccaattcatcaagacagagtaattgcaacagagaaagggtaattcacacagagctggctgtgtgggagaccggagctttattattactcaaatcagtctcctcaagcattcagggagcagagtttttaaggataacctggtggatrgggggaagccagtgagtcaggaatgctgattggtcagggatgaaatcatagggagtcaaagctgtcttctcaagctgagtcagttcctgggtgggggccagaagatcagaagagccagcttattgatctgggtggtaccagctgatctaacaagtgcaggggctgcaaaatatctcaagcactaatcttaggagcagtttagggagagtcagaatcttctagcctccagctatatgactcctaaatcataatttctaatcttgcggctactgttagtcctatgaaggcaatctagtttccaggcaagaaggaggaggtctgctttgggaaacagctgttactgtctttgtttaaaatataaactataaactgccaagtctgacctacagaccctgaccaagcggcagatgaaagacawaatcttgcggctactgttagtcctatgaaggcaatctagtttccaggcaagaaggaggaggtctgctttgggaaacagctgttactgtctttgtttaaaatataaactataaactgccaagtctgacctacagaccctgaccaagcggcagatgaaagacatacattgacacagatattttgcctgtcagcacagctaacgggctctgctgccagagtccgcagtggcctcaataagctggcaaagttcgcatttatttagtacaggttaaatgacaaatgtgtagagtaaacaccctagagggtaattaacattgccccgagtagagagcagtcatgtgcctgctgatgatcaaaggtcggtcttaggaccacatgagtaaataagctatttagataaactcccctacattcccttgttatttgctttttactattagctcaaggtaagaggatcagactgccttcagccatagccctttcacaawgcttttgtaaaaccttccacccttccaagaaagtttgcatctttctacaatttttcccaccaccctcaccgaattcctataagaagctaagtttctcctaaagttaactcagcctatacctaggaatcaacaaggatagcctggagattagaagcaagatggagttga

SEQ ID NO: 282344 - DNA, 580 bp, Homo sapiens
aaatgttgagttaagcaatttaatcaaaacattagattttgtagaactttgtaaatataaatttaacatagactttgaaaatgggaagtaagaagatgacaagaaatatgtgagtaggtttacttttatgtattttcttttctgtcattttggattaaaccgtattttatatgaacacaagtgtgttttcttaaattgccaggaggcttcaaactttttttttttttttttttgagatggagtttcactcttgtcacccaggctggagtgcagtggcgcaatctcggctcactacaacctccatctccggggttcaagcrattctcctgcctcagcctcccaagtagctgggattacaggcacatgccaccactcctggctaattttttttgtatttttagtagagatggggtttcatcatgttggccaggctggtctcgaactcctgacctcaggtgatccactcgccttggcctcccaaagtgctgagattacaggcgtgagcccccatgcctggccaaggcttctaactttaacagaaatttttattataaaaagtagagaggccgaatgtgtaaaa

SEQ ID NO: 282345 - DNA, 928 bp, Homo sapiens
tggcacatgtatacatatgtaacaaacctgcacgttgtgcacatgtaccctaaaacttaaagtataaagaaaaaaaaaaaagaaaaatctaccaaaaaaatggacaaattcctacacacatatgactgaccatgattgaaccaggaagaaattcaaaatctgaacagatcaatagcaagtaatgagatcaaatttgtaataaaaactctcccactaaagaaaagcccaagacttgatggcttcrctgttgaatcctaccaaacatttagagaagaactaacaccaaccctactcaaactattctgaataatagaggaagagggaatactttccaattcattctacgaggccagtattacccagataccaaaaccagagaaagacacattaaaaaaagaaaaatacaggtagatatctctgattaatattgatgtaaawagagatggtaggagcagaactctagctggtgcagagcccagcgtgtttggtgtgggaacatctgcaggggagcacaaccagggatgcccattccccaaggctggccttgttcccctaggagactttagccttagaggaactgtcagaactaaacagagtagaatgatcttgcccatcagacagggccagtcctacctcctgagttcacgctccctgtgttggcctcacttggggccccagcctggtcatgcctgcttgcacagcagcctgggatgaccaggtggagtgcttctcagggaccctcatcatagcttctgtgctggcagatcatgcctgacccttatagagctccaataaagtggtccccgctgacacgcaccagcctacctacaccattctcctatcgcagcctcccctgtgtcwctttgccagcacacactcaccaatggccaaaccccacatagctttgcaggcatgcatgcatgcaggc

SEQ ID NO: 282346 - DNA, 619 bp, Homo sapiens
ggtgaatattttccagaaggttttcaatttacttcacccagatctatcaaaagaatcactatctgtggcaattataagcttacaaaatgtatttcttaataaaatttgaaagtgaaaattacttctctatccatgtgctacaaaatggacattatgttagcaggcattaatacaatgtttatcttcttggacccctccattagtgctcttgcatcaccaggtacattgtcaatgagcagtaatatttttaaataaatctttcactctgagcagtaggtctcaatgataggcctacaatattcaggaaaccatacaataattgcatgtgctgtcattcargctttgttgatccatttatagagcacaagcagagtatattttgcataatttttaaggaccctagaattttaaaaatggttaatgagcactggcttcaatttaaagccatcagctacattagcttataacaagaaagtcaccatgtcctttgaatctttgaagctgggtattgacttctcctcttacctgtaaaagttctagatggcatcttccttcaatagaaggctgcttcaactacactgaaaattttttgtttagtgtagtcatcttcatcaattaa

SEQ ID NO: 282347 - DNA, 619 bp, Homo sapiens
tagtgattactcttttcctcccactgttacagccacaaggagtatcctttttgaattatggacatgaaaaccttgtgaagttcctggaggaaagttaataagaatgtgggtccccactatgattattgccagagtatatgcttaatcccatgctagtccccactcaccctctaagaactagtcaatattactaattaagtaatcttactcttcctaccatcttatggtattcagcagcttctactttaagtaagcaaatcatggacctttcatctctctggatgtgtctgtctctccrgattttatggtagccatttgctttgtgacctcagttctctgatgggttcaaaaaaagttattgacattttatttgtccagctttttttgttttgaagacaggagtaatgacttccaaattcttaatatgttagatctgaaaccagtactattatctttttaaaaaagaactaaaaatacacattgcaaaagatttagtattaattgtgagaatgagtattaattggttttataagctattaaatattatgaaaatgttagatactcttatcagatttaacttaaaatgtttttacaattagaaacctttctttcctcttca

SEQ ID NO: 282348 - DNA, 617 bp, Homo sapiens
ccgttcttggttcactttttcatgcttgtgttgaaactactrgaaacaacactttggaattgtaaaaatcaataagccttttgatctaactccttctaatgtcactttcccatctggagttttaggtacctttatgattcttctgactaaaaatatttcttttatatgtatactttttgtttttttgcttctattacttgagggaacaattgatcctcatcaacttgccaacatttccttttatttggttggcaggatgcctgctcttgttctagaactctcaaaatatttctcaactttatagaaatagaatagatttatgctacttgcagtaagctcgaacatagaattgtgaattgtggtcataaaactagtgagaaagataaagtagtgctaattagcatggaaaagtagagaatcaatggaactcagacccaggatactggctgtgtattattgcgtaaggtagtgtacctgtctgaaactctatttcccaacaccaaaaaaagtgtgttcacattgtaagttttatatggttatttaacaagcatatgttgaaaaccaactctttgccagacaccattctagatgctgagaacaggcatgaacaacaaagt

SEQ ID NO: 282349 - DNA, 556 bp, Homo sapiens
cacacaagttaattgatttaattcattaaatatttatgattggttaccaggtttcaaacacttgctaggtattgtgaaaataatgcaaaacagaacacaactgatcttcaaatgatggatttccctacagttagagttttcaagtgacttttgcttattaattgcaccctggagcasagctatggctatggcatggtgacttgaattttgccttcaacactagggagagaaacgttttaaacctctgattgtgtgtctctagccacagttgctagctactcctaggtcctggttgacccttttagtagcctgtgtagctggactgagattaaaagctcaggtgaaaagcaggaagaaaaatgattggggcacttagtgtgtgtatgcctcctctcttcataatgctacagatttaagaatgaataaggctattttttgtgatttaaaataacaaatcttcctattttcttactacatgtaaaaataatgttctttatttaaaaattctataccttcctcagacagccaaaatctgtatactaaaagaagcccagta

SEQ ID NO: 282350 - DNA, 496 bp, Homo sapiens
gaataggccaattctgtccctcattaacagaacttctagttatttctgagttcatattacttcattaaaagcatgtctttgtaacagtaattgagatagagacttaggggtgagaagtaggaaagaaagcacattctaaatcactaaaggcatgacgtttccctgccagcattttcacacttagtttagtctttarattttgtctgatgttcaatgtttatgtaaaatatcaataatcaaattattgttttgtactcactattatactaagcaattttttcaaatatttagaagaagcaagccatttaagtaaaataaaatatttttgattcataggcctttgaagatatatacattgaacagcgaaagactatcaaaaccatgctagaatatgctgacaaagtctttacctatatattcattctggaaatgcttctcaaatgggttgcttatggatttcaaacatatttcactaatgcctggtgctggctagatt

SEQ ID NO: 282351 - DNA, 501 bp, Homo sapiens
taggtgtaggtctgttctgaatctgattaccctggggtgagtagtcataggaacattgccaattatggaatctatctgacktgcagcctgtttttttattgcaagtgacggagaggcactgggacaacatgacagtcctctgattccttgtagtctgtgatattccgttgcacaaggcttcacagcctcctaacaaaacaaggtgcttcaaatactatctctagccatttcctagcaatcacaaagctccttatttttagctctaacacttgtcaatatgaatcaatgattgccatatgtgtgcctcgttctttttctcatttttgacgagtctgggtctatccagattctactcttcttcctcccacaaacacatattcacaattatataaccaaaatgtgtttaaccctttaagttgataagaaatctgctgtcaagtcacttttaatagaccagaaatgactttcaatttccttggctggcctttcattaataataga

SEQ ID NO: 282352 - DNA, 497 bp, Homo sapiens
gctggcaagttctaccactgtgttaacatgacaacgggtaacatgtttgacattagtgatgttaacaatttgagtgactgtcaggctcttggcaagcaagctcggtggaaaaacgtgaaagtaaactttgataatgttggcgctggctatcttgcactgcttcaagtggtaagtggctactgtacgagttttgaaaaagttttcaagatgtttcaaggaagattatttccctgatgttcttcgtttgaatgactaacatttgacagcatgaaaaaaagttaatgataacacctataatatcagcttgaattgatcataaaaaagatgttacaattattttataatgtrttttccttagtgttaagcttttagtatgttttaatgtgattttatatttctgctttcttttttgttatatttttgggtactggtatcatttttagttttctgtatcaattattgccaaaggagcaactttaggtactaaaataacaatg

SEQ ID NO: 282353 - DNA, 1166 bp, Homo sapiens
ttttgtaatgaatttcctgggtgttctttgagcttcttgtatttggatgtctagatctctagcaagaccaggaagttttcattgattattctctcaaatatgttttccaaactttcagatttatcttcttttttgggaatatcagttattcttagttttggtcatttaatataatgccaaacttcttggaggctttgttcattttttttttttttttcattctttcttctttgyctttgccagactgggtaattcagaagccttgtctttgagctctggagttctttcttctacttgttctattctgttattgaaactttccagtgtatcttgcattttgttaagtgtgtccttcatttccagaagttgggattgtttttgtatttatgctatctatttctattgagattttccatctatatcctgtatcatttttaaactttctttaagtttgtgtatacctttctctggtgcctccttgcatagcttaataattgaccttctgaattctttttctggcaaatcagagacttcttctggattggatccattgctggtgaactggtgtgatcttttgggggtaaaaawcatattacaatgttcagctagaagtttccttctcctagtggtctttctgcaattccactggcagccctccccaaggacccctgtgagagaaagtcagaaatggcttccctggccttccttgtgggccgggaatgcctacagggctcttccagctgctgcttctacttgtctatttcactcagctctctaaatttatatttatataaatttatatatttatatttcagctctaggtaaggwtagattcttctcccacaatatggattttcagattccccagtgaggatgtatgttcagagactgacatcctctttcacactttgagattttttggctgtctcatcgagtttgcagtggcaaaccgcttctttcaaagggtatgtgaattctttcgcttttcctggtgtgtccctgcagtagttcttggagcagaagttcacaatatgagtctgtacacactgttctgtctgtccaagtgagagctgcaagttggtcctgtttcctatagctatttttacagaaatactttattgagcaactgctatctgacagctatgtgtcacaactggaattaccta

SEQ ID NO: 282354 - DNA, 578 bp, Homo sapiens
catattacaatgttcagctagaagtttccttctcctagtggtctttctgcaattccactggcagccctccccaaggacccctgtgagagaaagtcagaaatggcttccctggccttccttgtgggccgggaatgcctacagggctcttccagctgctgcttctacttgtctatttcactcagctctctaaatttatatttatataaatttatatatttatatttcagctctaggtaaggatagattcttctcccacaatatggattttcagattccccagtgaggatgtatgttcagagactgacatcctctttcacactttgagattttttggctgtctcatsgagtttgcagtggcaaaccgcttctttcaaagggtatgtgaattctttcgcttttcctggtgtgtccctgcagtagttcttggagcagaagttcacaatatgagtctgtacacactgttctgtctgtccaagtgagagctgcaagttggtcctgtttcctatagctatttttacagaaatactttattgagcaactgctatctgacagctatgtgtcacaactggaattaccta

SEQ ID NO: 282355 - DNA, 552 bp, Homo sapiens
gaaattaactcaaaatggttcatggacctaaatgtaaaatgcaaaactatgaaattcctagaatataacaaagacgacctagatgaccttgggtatagtaataactctttagatacaacaagaagggcatgattcaaggaataaattattaataagctggactttattaaatttaaaacttctgctttgtataagacagtatcaagagactgaagacaaaccgcccactaggagaaaatatttgcaaaacacacatctgatataggattattatcctaaatatgccaaaaactcttaaaactaaacaataagaaaatgaacaacccaatttaaaaaatgggcaaaagatctgaacagaaatcttactaaagaagatatataggtggtgagtaagcatatgaacygatattcaacattatatatcctttgggaactgcatattaaagtaacaatgagataccactacgcacgtattagaatcaccaaaatccaaaacactgacagtaccaaatgctggtgaggatgtggagcaaccggaaccatcatttatgg

SEQ ID NO: 282356 - DNA, 552 bp, Homo sapiens
gaaattaactcaaaatggttcatggacctaaatgtaaaatgcaaaactatgaaattcctagaatataacaaagacgacctagatgaccttgggtatagtaataactctttagatacaacaagaagggcatgattcaaggaataaattattaataagctggactttattaaatttaaaacttctgctttgtataagacagtatcaagagactgaagacaaaccgcccactaggagaaaatatttgcaaaacacacatctgatataggattattatcctaaatatgccaaaaactcttaaaactaaacaataagaaaatgaacaacccaatttaaaaaatgggcaaaagatctgaacagaaatcttactaaagaagatatataggtggtgagtaagcatatgaaccgatattcaacattatatatcctttgggaactgcatattaaagtaacaatgagataccactacgcacstattagaatcaccaaaatccaaaacactgacagtaccaaatgctggtgaggatgtggagcaaccggaaccatcatttatgg

SEQ ID NO: 282357 - DNA, 551 bp, Homo sapiens
tttgtatatgtggcatgtgaactgatgttttattttagagcagtggctctgaaactttttaatatcaggactcctctagactcttaaatgttgttgggaaacccaatgtgtttttatgtgggttatatttattggtatttatcatattagaaattataactaataaatttttaaatatgtattgttactttaaaataacaacagtaaaacaattacatygtaacataaataacacacttgtgtgtttgtaaaaataccctctattttccaaaacaaaaacaatttggtgagaagggtggcactgttttacatttttgcagatctctttaatgcctggcttaataaaggacaattggagtcccatatctacttctacattcaatctatagtagtatgttgttttggttgaagcgtatgaagaaaatatggcctcacaaaactgcagtcagaaaaatgaggagtattttaatagctttttagataattgtggatactgctcttagatattatggtaaaactcgacaagtaggagtttttaaaagttgcaatgt

SEQ ID NO: 282358 - DNA, 557 bp, Homo sapiens
attaaaacactaagatattttgaggttgaaaatgtaatttctctacttagcacaattgtcagggattgtttttctttcttatatactataaaaataatcactgtcagaacaggaggcattttattatacaatttaactaaaatcataaactaagtaccttgaatatatttctgtatcagcaagtggtgcataatgattcatcaaaattagcatgcatatttgaatacatgttctgtgtgtattataggaatttttgaaaatcagaaacatagaataaacatgaaaaaatagcgaagtaaccattgtgaacctgtgatgctaatagcatcaatttgttttacacccctaccccagcagtcaccagcctttttggcaacagggactggtttcatggaaggcagttttttcccagacaatttcaggatgaaactgttccacctaggatcatcagatcatcaggcactggattctcataagtagcacacaacctagatcccttgcatgcacagttcacaatagggttcatgctyctatgagaatctaatgctgctgctgat

SEQ ID NO: 282359 - DNA, 546 bp, Homo sapiens
aatgcttactatatttcagatgccatgtctaagtcacacactctttaaaggacctaatatcctgctctaagggcaaaatgataaaacaagcacctcttctttttttcctattgggagggacaataggaaagcagagcttctaagatttaaatggtgtctactcaggtttgccagtgcaaagacaaaatcctaccctcaaggattctgccaacgagagagagagagagagagagagaaagatactttcttcttaatcattttatcttacttcatcttaccattttttttcctagggaatttctagcttcgtgtatataaagaatgaacttatttatttaatagcctgatgatatgttccaaatgatatacttgaaatacaaattcctkttgcccaatggccacaaacttttataacagcagaaatttctaagtgcaaattatatacgatttaacacgtttcccatcaaatacactttgaaatttatatgttcaaatagctcaacagatggagagaaatctaaaagtataccagggtttaggctagac

SEQ ID NO: 282360 - DNA, 1106 bp, Homo sapiens
aatgcttactatatttcagatgccatgtctaagtcacacactctttaaaggacctaatatcctgctctaagggcaaaatgataaaacaagcacctcttctttttttcctattgggagggacaataggaaagcagagcttctaagatttaaatggtgtctactcaggtttgccagtgcaaagacaaaatcctaccctcaaggattctgccaacgagagagagagagagagagagagaaagatactttcttcttaatcattttatcttacttcatcttaccattttttttcctagggaatttctagcttcgtgtatataaagaatgaacttatttatttaatagcctgatgatatgttccaaatgatatacttgaaatacaaattcctgtkgcccaatggccacaaacttttataacagcagaaatttctaagtgcaaattatatacgatttaacacgtttcccatcaaatacactttgaaatttatatgttcaaatagctcaacagatggagagaaatctaaaagtataccagggtttaggctagacwcttttatgtcccttaaaatgtagatattttaaatttatctccaaatacagaaattatccttcttagtcaccttatttttgwgttaataagtgtgaatatttagaatattttaaaaatgggagtggtggtggtggatccttcatcgttctgttttaacagaaatagaactgtaatgcccttgctgacccactatgtggtaagtactttcaggcctgatacagctatatatataacaattgattgaagactcaatattacagtggtagttgaatgtgacagctttgaggatagagtgttggggtgcatttagacccttgctcttctgcttattttgaccacaggcaagtttcttaacctctcaatgcatcagttgcctcatatgtaaaatgaggataataataataccttaattcatagggtttttgaggatattaaaatgagataataatgtaaagtgcttagaacagtgcccagctggcacattaataaatgctcaataaatgttatcatcatcatcatcatcattattgttaacatcatttgataaattgtttaggaa

SEQ ID NO: 282361 - DNA, 559 bp, Homo sapiens
cttttatgtcccttaaaatgtagatattttaaatttatctccaaatacagaaattatccttcttagtcaccttatttttgagttaataagtgtgaatatttagaatattttaaaaatgggagtggtggtggtggatccttcatcgttctgttttaacagaaatagaactgtaatgcccttgctgacccactatgtggtaagtactttcaggcctgatacagctatatatataacaattgattgaagactcaatattacagtggtagttgaatgtgacagctttgaggayagagtgttggggtgcatttagacccttgctcttctgcttattttgaccacaggcaagtttcttaacctctcaatgcatcagttgcctcatatgtaaaatgaggataataataataccttaattcatagggtttttgaggatattaaaatgagataataatgtaaagtgcttagaacagtgcccagctggcacattaataaatgctcaataaatgttatcatcatcatcatcatcattattgttaacatcatttgataaattgtttaggaa

SEQ ID NO: 282362 - DNA, 596 bp, Homo sapiens
cgttctgttttaacagaaatagaactgtaatgcccttgctgacccactatgtggtaagtactttcaggcctgatacagctatatatataacaattgattgaagactcaatattacagtggtagttgaatgtgacagctttgaggatagagtgttggggtgcatttagacccttgctcttctgcttattttgaccacaggcaagtttcttaacctctcaatgcatcagttgcctcatatgtaaaatgaggataataataataccttaattcatagggtttttgaggatattaaaatgagataataatgtaaagtgcttagaacagtgcccagctggcacattaataaatgctcaataaatgttatcatcatcatcatcatcattattgttaacatcatttgataaattgtttaggaatgaagaagrtatttatttcatgactattttgggcatgtggatcaagaaaattcaccttcatttatgtttcagggttcttctaatacagaatttaagtcaaccaaagaaggattttccatccctgtgtctgctgatggatttaaatttggcatttcggaaccaggaaatcaagaaaaggaa

SEQ ID NO: 282363 - DNA, 588 bp, Homo sapiens
gtgatgccaaactagagcggttggcagcaaaatttaaaacaccagagctggctgaagaattcaagcagaaatttgaggaatgccagcrgcttctgttagacataccacttcaaactccccataaacttgtagatactggcagagctgccaagttaatacagagagctgaagaaatgaagagtggactgaaagatttcaaaacatttttgacaaatgatcaaacaaaagtcactgaggaagaaaataagggttcaggtacaggtgcggccggtgcctcagacacaacaataaaacccaatcctgaaaacactgggcccacattagaatgggataactgtgatttaagggaagatgctttggatgatagtgtcagtagtagctcagtacatgcttctccattggcaagtagccctgtgagaaaaaatcttttccattttggtgagtcaacaacaggatctaacttcagttttaaatctgctttgagtccatctaagtctcctgccaagttgaatcagagtgggacttcagttggcactgatgaagaatctgatgttactcaagaagaagagagagatggacagtactttg

SEQ ID NO: 282364 - DNA, 1087 bp, Homo sapiens
tatccacccttggacaattttcttacaacaaattcccaaaagcaagaaggggataaatgcaaagtgaaatgtggacctccaagtgaattacagcatttgtccgtgtgatcggctctaaatcgaaaagtaaacttaattaaatagaaaagggaaaactcttgttgatgccgtaatgaaattcagggtttcaaggctcacagagaggaagctgtattgaaaggttcataattaattgacgggataacattatcacagggtttttacactgcatttatgcctttatttatttacttattcattgccttccaaaaatagaggctataaaactgagcacacaattgaattatacctgttgtgcccccaattagccaaatcctggcacatttcaatttktgtgttccagctgtgtgcattagaaatcgaacattagggctaggaaatgtctcctgtaagcttgtttcctggcacagaaattaaagacttggttagttaataggtccctggatgcctaagcctgtcatgctggttttgaaggtcaagcaawtatccacccttggacaattttcttacaacaaattcccaaaagcaagaaggggataaatgcaaagtgaaatgtggacctccaagtgaattacagcatttgtccgtgtgatcggctctaaatcgaaaagtaaacttaattaaatagaaaagggaaaactcttgttgatgccgtaatgaaattcagggtttcaaggctcacagagaggaagctgtattgaaaggttcataattaattgacgggataacattatcacagggtttttacactgcatttatgcctttatttatttacttattcattgccttccaaaaatagaggctataaaactgagcacacaattgaattatacctgttgtgcccccaattagccaaatcctggcacatttcaatttgtgtgttccagctgtgtgcattagaaatcgaacattagggctaggaaatgtctcctgtaagcttgtttcctggcacagaaattaaagacwtggttagttaataggtccctggatgcctaagcctgtcatgctggttttgaaggtcaagcaa

SEQ ID NO: 282365 - DNA, 640 bp, Homo sapiens
aattgttcctatacttgtactgctgtcatacttgaaatggaattggaagaattaggcaagaaataaaatgtgtgcatgtgtgtgtgtatctgtgcaagtgtgtgacagagtggaaactaatgtcagtgtgatctaatttggccaatgttggccattccttagagactccagatgtgtatgtctgtrgtttagtcaaaatttttgcatttatacacaatttaagaattatttattgagaacagactacgtatatgctaagaactctattaggcactccttgatataatcatttaaatcctatcactgcttagtaacagggaacaacttcgcatgtgtgtaaaataaatttccaaaggaacctttgtgaaccttcgaatgcattttggtatttaatgatatatgatggtaaaattcatgtacaatttgtcattttagccattttaagtggaaaattcaggagcattaatgacatttataatgttgtacatccattaccactattcccaaaactttttcatcatctccaacaaaatctctgtatatattacatgaaaatttctatatttttactaacaatgtcatttttcatatataatttcctgatcttttcttatttgtccatgttttcaattagctcttt

SEQ ID NO: 282366 - DNA, 560 bp, Homo sapiens
taaatttctctgggcatcatgtgtttggctatgcaaaggctatatttgaatcctataacttaccctgtaacattcaacggctttctctgtgttttcttccaattcataaagaagacccagaaatctgtgagctctgggatccatctctcrcacattaatgtaagtacatatgtatctgttttttaaaagtaatacaaaagtaaattaaacttggaactgtacttttaaatgctaaccgaagaatacatcttaaaccaaagcaaccactaaacttgtttatattgttactcaaaactaccactattcatacagataactcaaaaggattcatagaaagaaatgggtaatacttaaaaacacatacatagagttgaccacatactcattttaccattaaatgtcacatttaccagatttttctccagtgttatccacacataagaaatgaacatataaattgctttttcttcctgatcacattttaataaagcactaacagttttgcaaataaattagaagtgattatagtaaacatttttaaagttatcataatgcaaaat

SEQ ID NO: 282367 - DNA, 560 bp, Homo sapiens
taaatttctctgggcatcatgtgtttggctatgcaaaggctatatttgaatcctataacttaccctgtaacattcaacggctttctctgtgttttcttccaattcataaagaagacccagaaatctgtgagctctgggatccatctctcgcacattaatgtaagtacatatgtatctgttttttaaaagtaatacaaaagtaaattaaacttggaactgtacttttaaatgctaaccgaagaatacatcttaaaccaaagcaaccactaaactygtttatattgttactcaaaactaccactattcatacagataactcaaaaggattcatagaaagaaatgggtaatacttaaaaacacatacatagagttgaccacatactcattttaccattaaatgtcacatttaccagatttttctccagtgttatccacacataagaaatgaacatataaattgctttttcttcctgatcacattttaataaagcactaacagttttgcaaataaattagaagtgattatagtaaacatttttaaagttatcataatgcaaaat

SEQ ID NO: 282368 - DNA, 561 bp, Homo sapiens
gataactcaaaaggattcatagaaagaaatgggtaatacttaaaaacacatacatagagttgaccacatactcattttaccattaaatgtcacatttaccagatttttctccagtgttatccacacataagaaatgaacatataaattgctttttcttcctgatcacattttaataaagcactaacagttttgcaaataaattagaagtgattatagtaaacatttttaaagttatcataatgcaaaatactaaacagcaacaatttcccaaacaacaaagggaaatacayttaccctttaagcaagaaagtaatttctaacagtactatatatccagctaaaatcgaacagaagaaaaattactaattacagtaccaaatacaggaaatttccatttctcaaatcaagtaacaactaaaataagtaaatatcctctaggttccttgacagtattaccatcagagaaatgaggccagacctaaactaagggattaaagtctcacagtaaaaaggtacaagagttaacagtcacagtgctgctagttacataatttatgtac

SEQ ID NO: 282369 - DNA, 561 bp, Homo sapiens
gataactcaaaaggattcatagaaagaaatgggtaatacttaaaaacacatacatagagttgaccacatactcattttaccattaaatgtcacatttaccagatttttctccagtgttatccacacataagaaatgaacatataaattgctttttcttcctgatcacattttaataaagcactaacagttttgcaaataaattagaagtgattatagtaaacatttttaaagttatcataatgcaaaatactaaacagcaacaatttcccaaacaacaaagggaaatacatttaccctttaagcaagaaagtaatttctaacagtactatatatccagctaaaatcgaacagaagaaaaattactaattacagtaccaaatasaggaaatttccatttctcaaatcaagtaacaactaaaataagtaaatatcctctaggttccttgacagtattaccatcagagaaatgaggccagacctaaactaagggattaaagtctcacagtaaaaaggtacaagagttaacagtcacagtgctgctagttacataatttatgtac

SEQ ID NO: 282370 - DNA, 534 bp, Homo sapiens
acaacaagatcctgtctccagggggaaaaaaatagccaggcatagtggagcatgcctgtgttcctagctactcaggaggccaaggaaggagaatcacttgagcccaggaggttgacactgccgtgagttatgactgtgacactgcactccagcctgggtgacacagggagatcctstctctaaataataaatacataacatacaaaaaataaattcaagaaagcaagacaagcagacaacagaagttaagaattttcatcagccttggaaatcttggaaaccctgtggtaccactctctcacttaacaaacaaaagaaaccagctttctttggggaggaaaggtattccagaaatctcttctcctaccatgtgtaagcctctatgggaaagaataactaagtacttaggatctattaaggcactgaggattccctgtgcctcaatagtacatgtactgttctctctacagatcagatcagtattttacagtcaaggagtcaaaaaggcagaaataaatattgaattcttcaagt

SEQ ID NO: 282371 - DNA, 626 bp, Homo sapiens
caaaagaacagccctacagggacactcttccatactgtatacatgccgttgccactacatgtgaatactggcagacgttagtggctaaasataaacattagataaaacataggtcttcattgagcagacctgaaatagcagagcaatgaagtacattacaaatcagcatcccagtacattttaaaaaacaaaccaacaagggtgtcatgccaccagtcaaaaggtactttgcttaaactggcattctttaacatgcatgttgtagtggtaagtacttcatttcatacagccacagttattaatactttgctaagggctacccagctgctaaaaactgctgttatctcatactgagaatgctagttctatacctttgctctcaggctgtgaggaaggggtgctagtccaaaaggccatgggattagatttaaaaaggctaaaattaaatcctagaaaataaagaatatttcattttttaacattttaggaaacaaaatgaatatgcttttaaaacataaaaagccagaatccctcaatttataccaccaatctgtcttacatattcatttatccctgtagtttcattctttgctcctttaatacatgagcaagactgacatacaaca

SEQ ID NO: 282372 - DNA, 1253 bp, Homo sapiens
caaaagaacagccctacagggacactcttccatactgtatacatgccgttgccactacatgtgaatactggcagacgttagtggctaaacataaacattagataaaacataggtcttcattgagcagacctgaaatagcagagcaatgaagtacattacaaatcagcatcccastacattttaaaaaacaaaccaacaagggtgtcatgccaccagtcaaaaggtactttgcttaaactggcattctttaacatgcatgttgtagtggtaagtacttcatttcatacagccacagttattaatactttgctaagggctacccagctgctaaaaactgctgttatctcatactgagaatgctagttctatacctttgctctcaggctgtgaggaaggggtgctagtccaaaaggccatgggattagatttaaaaaggctaaaattaaatcctagaaaataaagaatatttcattttttaacattttaggaaacaaaatgaatatgcttttaaaacataaaaagccagaatccctcaatttataccaccaatctgtcttacatattcatttatccctgtagtttcattctttgctcctttaatacatgagcaagactgacatacaacawcaaaagaacagccctacagggacactcttccatactgtatacatgccgttgccactacatgtgaatactggcagacgttagtggctaaacataaacattagataaaacataggtcttcattgagcagacctgaaatagcagagcaatgaagtacattacaaatcagcatcccagtacattttaaaaaacaaaccaacaagggtgtcatgccaccagtcaaaaggtactttgcttaaactggcattctttaacatgcatgttgtagtggtaagtacttcatttcatacagccacagtwattaatactttgctaagggctacccagctgctaaaaactgctgttatctcatactgagaatgctagttctatacctttgctctcaggctgtgaggaaggggtgctagtccaaaaggccatgggattagatttaaaaaggctaaaattaaatcctagaaaataaagaatatttcattttttaacattttaggaaacaaaatgaatatgcttttaaaacataaaaagccagaatccctcaatttataccaccaatctgtcttacatattcatttatccctgtagtttcattctttgctcctttaatacatgagcaagactgacatacaaca

SEQ ID NO: 282373 - DNA, 556 bp, Homo sapiens
aaacaagtaccttttacctctctcatctccttggaagcaaatgtttataatctctggttttgtgtaaagtttataatagtatttttcattcaggttgctacctattagtggatggtgaaattaatttggtggatcacattcagaatatttttttaaaatcaaaagaatacaagctgggctcagtgactcacacctgtaagcccaacagtttgagaagaccaggcaggaggattgcttgagaacaggagttcagaatcagcctgrgcaacatggcgagaccctatgtctacaaaaattttaaaatatgcccgttctggtggcatgtgcccatagtcctagctactcgggaggctaaggcagcaggattctttgttataaggagttcgaggctgcagtcgaacttctggtcgaaatcctggtcacgccactgcatttcagcctgggcaacagagtaaaaccccatctttaaaaaaaattaagaaataaaaataatatgtgaaacattagaatatgttgaatctagtaaggctaatgttgaatctagtaaggataagca

SEQ ID NO: 282374 - DNA, 492 bp, Homo sapiens
atagattgctcttctccttgcatcacaaatgttaattcaccctgcccccacacgcattaaaactcagcatatttcacaaattgagtgtttcatttctatttgagatagacttatggtaagtcagctttgctccccaaataagttagccatatagtacttctatatgcaaaatttgaatctcaattttactactcaagccggaagtaaaagtcatttttstatatcttctttgctcccagactgggttacagtttacagatctgaatattgtcacttgtacaccatacatacacagaggtctaaaactctctacaagtaaataaagaaaaaaagcccagcaacccaataggaaaataggccaagcctgttataggctttttgatcatctccagactggcaggaagagaatgcatactcacactgtaagtgcctgatttgatttgcagaggatatagaacgttatcagaaaacaaccttccaaggcaagagcaa

SEQ ID NO: 282375 - DNA, 563 bp, Homo sapiens
aaataggccaagcctgttataggctttttgatcatctccagactggcaggaagagaatgcatactcacactgtaagtgcctgatttgatttgcagaggatatagaacgttatcagaaaacaaccttccaaggcaagagcaaatgcaccctatctaagcacagcttttctccaattcttatttacctaaggagatgaatagttrccaggaacattgtttgcacaagggcaggagcctgccagatctgagaacacagcaaaatttttattttgtcaaaaatcttatattcagcttacaccattcattgcaggtgaacatacaacagtgcatttcagtttagggaaatgtttacagtcatctggttctctttattcctgggaacaaggttacctcacttggaacacataaccagtgccaagttgtccatccctaagcaatatcgcttccttctactttctagaagttcttcagattgtggaagagagacttttcagagttctttgccctcattccctcctccagaaattcatgcctttgtataatctcttccccttcagagccagt

SEQ ID NO: 282376 - DNA, 394 bp, Homo sapiens
acttggggaggctgaggctggagaatygcttgaggctagtgagctgtgattgtaccactgcactccagctcggggaacagagcgagaccttgtctctaaaaataataatagtaataaaaataacgttttatgactatttattgcaaggtcagatttacagattgttataaattgttgagaaatttttgtgattagaatatgaaggaaaaagctttgttggtaaaagtgacatgttaaggggctatgaagtaaatatgctgcagttaattgtgctaagttaaaatacagtttagttatttgctttaaaataaactcttctttttttctttaaagtatactatctcaaaactcattatgttgtcagagccctagagctggctagtgtaacactgac

SEQ ID NO: 282377 - DNA, 394 bp, Homo sapiens
acttggggaggctgaggctggagaatcgcttgaggctagtgagctgtgattgtaccactgcactccagctcggggaacagagcgagaccttgtctctaaaaataataatagtaataaaaataacgttttatgactatttattgcaaggtcagakttacagattgttataaattgttgagaaatttttgtgattagaatatgaaggaaaaagctttgttggtaaaagtgacatgttaaggggctatgaagtaaatatgctgcagttaattgtgctaagttaaaatacagtttagttatttgctttaaaataaactcttctttttttctttaaagtatactatctcaaaactcattatgttgtcagagccctagagctggctagtgtaacactgac

SEQ ID NO: 282378 - DNA, 581 bp, Homo sapiens
ggggctatgaagtaaatatgctgcagttaattgtgctaagttaaaatacagtttagttatttgctttaaaataaactcttctttttttctttaaagtatactatctcaaaactcattatgttgtcagagccctagagctggctagtgtaacactgactatgagtaggtgggcccaccacttgagttgaggtgatttcatggtgtctttccaggctcttgatagggtgtcactgcatgcaagccatgaatctgttttgagaatcctctccattttcccaaataaaaacctatcccaacagtgactatatcactcagcattggatctaaatataaaagtggtgctttcagtgtttttggcagatagtgttccataasctttccatcagaagggattttagacaccttagaggtccgtgctacatcttcacagttcctctgaataaccttaggtggtagtgttacttgcctttgacaccgctgcatatgttttaatgactagatccaaactgtgttgttcttaaatcaaaaattggataatttttaatatttatgtattaatcacatagtatgctctctgaagt

SEQ ID NO: 282379 - DNA, 581 bp, Homo sapiens
ggggctatgaagtaaatatgctgcagttaattgtgctaagttaaaatacagtttagttatttgctttaaaataaactcttctttttttctttaaagtatactatctcaaaactcattatgttgtcagagccctagagctggctagtgtaacactgactatgagtaggtgggcccaccacttgagttgaggtgatttcatggtgtctttccaggctcttgatagggtgtcactgcatgcaagccatgaatctgttttgagaatcctctccattttcccaaataaaaacctatcccaacagtgactatatcactcagcattggatctaaatataaaagtggtgctttcagtgtttttggcagatagtgttccataagctttccatcagaagggattttagacaccttagaggtccgtgctacatcttcacagttcctcygaataaccttaggtggtagtgttacttgcctttgacaccgctgcatatgttttaatgactagatccaaactgtgttgttcttaaatcaaaaattggataatttttaatatttatgtattaatcacatagtatgctctctgaagt

SEQ ID NO: 282380 - DNA, 581 bp, Homo sapiens
ggggctatgaagtaaatatgctgcagttaattgtgctaagttaaaatacagtttagttatttgctttaaaataaactcttctttttttctttaaagtatactatctcaaaactcattatgttgtcagagccctagagctggctagtgtaacactgactatgagtaggtgggcccaccacttgagttgaggtgatttcatggtgtctttccaggctcttgatagggtgtcactgcatgcaagccatgaatctgttttgagaatcctctccattttcccaaataaaaacctatcccaacagtgactatatcactcagcattggatctaaatataaaagtggtgctttcagtgtttttggcagatagtgttccataagctttccatcagaagggattttagacaccttagaggtccgtgctacatcttcacagttcctctgaataaccttaggtggtagtgttacttgcctttgacacckctgcatatgttttaatgactagatccaaactgtgttgttcttaaatcaaaaattggataatttttaatatttatgtattaatcacatagtatgctctctgaagt

SEQ ID NO: 282381 - DNA, 581 bp, Homo sapiens
ggggctatgaagtaaatatgctgcagttaattgtgctaagttaaaatacagtttagttatttgctttaaaataaactcttctttttttctttaaagtatactatctcaaaactcattatgttgtcagagccctagagctggctagtgtaacactgactatgagtaggtgggcccaccacttgagttgaggtgatttcatggtgtctttccaggctcttgatagggtgtcactgcatgcaagccatgaatctgttttgagaatcctctccattttcccaaataaaaacctatcccaacagtgactatatcactcagcattggatctaaatataaaagtggtgctttcagtgtttttggcagatagtgttccataagctttccatcagaagggattttagacaccttagaggtccgtgctacatcttcacagttcctctgaataaccttaggtggtagtgttacttgcctttgacaccgstgcatatgttttaatgactagatccaaactgtgttgttcttaaatcaaaaattggataatttttaatatttatgtattaatcacatagtatgctctctgaagt

SEQ ID NO: 282382 - DNA, 634 bp, Homo sapiens
aatctctgggaacaaggcctggaaataattcttttttttttttttttcctgagacagtcttactctgtcgcccgggctggagggcagtggcgtgatctcggctcaatgcaagctccgcctcccgggttcacaccattctcctccctcagcctccccagtagctgggactacaggcacccgccaccagggccggctaattttttttgtgtgtgtatttttagtagagatggrgtttcactgtgttagccaggatggtcttgatctcctgacctcattatccacccagcttggcctcccaaagtgctgggattacaagcatgagccaccatgcccagctggaaataattcttaaaagctgtttaaaggaggattctgatgagccaggtttagaaatcagtgtatcagatcagagaataagagcttgtccctgttctcctatggccacttaaatccagaccttttcatctaaaatgcaaatacgtttggcatttttcatacacattcctgtcttttttcccccttctgctgtcttatgtagatactgagaatattaaacctgtactcttttcatttgctacataagcacccgttttgttgtccagctgtattttttgggttggagggttaggtctgc

SEQ ID NO: 282383 - DNA, 559 bp, Homo sapiens
agcacataatggtagtcttcagcaccttacttggcttggcttacagtggaattcattgcctgctttacctggaatccgaaaatggctaaaacagcttttccatcatttgccccaggaaacctcaaggcttgaaacaaatgcacctgaatcaatatgtattttagatcttgaagtaagcaaagattttaacaaattaaatattctgaattttgtttaatttttttttctaacttaacttttccttaaataaaacaggtatttctccttggagtagtatataccagccacttacaattaaaggagaaatgtaattctcaccacagctcctatcagccgttatgcctgccccttcctgtatgtaaacagctttgtacagaargacaaaaatcttggtgggatgcggtttgtactctgattcacagaaaagcagtgtaagtagtaaaacaaaaatattgctttcacttagtgcgtaggttttaccagggatttaatcctcatgtgaagatttaatttgtcatgtgacccattaacatatatgtatgtaagcgctgaactgtgt

SEQ ID NO: 282384 - DNA, 461 bp, Homo sapiens
acaatttctttggaaaaagaatttcctgttaagtgtctgttttgtaaggggacattttgtaggttctagggtgttgggtatggtgctgtcatttagttttcttcagcagagatsaggtagccacataactacactagacggcattgtatctatctgccatcttgtcaaggcagcagagttgtgttaagaaaacatttttggagtcagatgtggttcaaattccagctgttattccctgcatccctttctctcattttaagataggagctaatattgtttacctaacagtgtagatagtataaaaattaagagtttaagtgcattggacgtattattatatacataataaattctctgcagctactacttttttccctttcctggtggagcatttgaacatcaccttgagaattagttgtattctgtttgaacacagggttaagtgaaaagctaatttgggg

SEQ ID NO: 282385 - DNA, 558 bp, Homo sapiens
tgacctcacttgttagaactggtcggattcctgggctgatacagagaagtttgaaacttttcaaaatttacctgttttctgataccactacaatttctttggaaaaagaatttcctgttaagtgtctgttttgtaaggggacattttgtaggttctagggtgttgggtatggtgctgtcatttagttttcttcagcagagatgaggtagccacatarctacactagacggcattgtatctatctgccatcttgtcaaggcagcagagttgtgttaagaaaacatttttggagtcagatgtggttcaaattccagctgttattccctgcatccctttctctcattttaagataggagctaatattgtttacctaacagtgtagatagtataaaaattaagagtttaagtgcattggacgtattattatatacataataaattctctgcagctactacttttttccctttcctggtggagcatttgaacatcaccttgagaattagttgtattctgtttgaacacagggttaagtgaaaagctaatttggggaggtgatt

SEQ ID NO: 282386 - DNA, 594 bp, Homo sapiens
gataccactacaatttctttggaaaaagaatttcctgttaagtgtctgttttgtaaggggacattttgtaggttctagggtgttgggtatggtgctgtcatttagttttcttcagcagagatgaggtagccacataactacactagacggcattgtatctatctgccatcttgtcaaggcagcagagttgtgttaagaaaacatttttggagtcagatgtggttcaaattccagctgttattccctgcatccctttctctcattttaagataggagctaatattgtttacctaacagtgtagatagtataaaaattaagagtttaagtgcattggacgtattattatatacataataaattctctgcagctactacttttttccctttcctggtggagcatttgaacatcaccttgagaattagttgtattytgtttgaacacagggttaagtgaaaagctaatttggggaggtgatttggaatgtcaggtagtccagattgcagtgtagaaagaacacactgaaaggatggtcagtgtaatgttagaggactgtgaaagttggggaaagaagtttagtttgtaggtacttgtt

SEQ ID NO: 282387 - DNA, 347 bp, Homo sapiens
aatacattgctcccaggcagccagaaataacaaaattgttccttttatgtacgacagacttctgaaatggtagtagtagtgcccttttttttctctctctctttttagcccaggaaagatttagaataaaatctggtttagatgagcacatttgtgtgatggtycatatagttaaggcaaccccactagccttttgtgatagtatcttctcaacacaagcaaaataacagaaaatctttgtgaagtcaagcttattaaatgtcgtaagtcatagataagtatatgaaatgtctaacgttcaaaccttgttttcttaaaaccttacacatcatataggtccttgtaag

SEQ ID NO: 282388 - DNA, 1244 bp, Homo sapiens
ttttattcttgcaatgaccctgtgaaatgtgtagaagcagcayatcgtcattttacaattgagaaacatggagactccaaatggattatttacaggttcacaaaacagctttgtggcactgaaagggcgagagctaagatctcctgatttctgttcctgtgttcatagattctttttccttaataaaagtaaacatatatcaagatggtccttgttttttaaaaataagatgattaaaattaaagattaatgagctcataggagatactcagaagtactgaacagggtgaagaaaactaaaaactaaccaccttatttacatttcttatatttgagagcatttcwttttattcttgcaatgaccctgtgaaatgtgtagaagcagcacatcgtcattttacaattgagaaacatggagactccaaatggattatttacaggttcacaaaacagctttgtggcactgaaagggcgagagctaagatctcctgatttctgttcctgtgttcatagattctttttccttaataaaagtaaacatatatcaagatggtccttgttttttwaaaataagatgattaaaattaaagattaatgagctcataggagatactcagaagtactgaacagggtgaagaaaactaaaaactaaccaccttatttacatttcttatatttgagagcatttcwtctgttcctgtgttcatagattctttttccttaataaaagtaaacatatatcaagatggtccttgttttttaaaaataagatgattaaaattaaagattaatgagctcataggagatactcagaagtactgaacagggtgaagaaaactaaaaactaaccaccttattwacatttcttatatttgagagcatttccttctggttctttctctatacatatagtattttttatgagattgttaccatgttactatgttgtgtgtagatgagctagcctgttttttaaatgttactttagttctgagcatttttaaacttaaatgttttttgaatattaatgagttcatggtatcccatcacatggaagtactgtaaattctgttcctttatttatgttgtttctggtttatgccattacaaattctaggacactgtcctagttttgtagggtattcaaaatattcagtttatgctcttaccactagtatctgatagtgccattttcgcacttttgctaatgctgacttactagtttataaaatcctttgccaatt

SEQ ID NO: 282389 - DNA, 530 bp, Homo sapiens
tatgtctttgcttcctgtgttccccataatgcatattatatttttaacatttaataaagtcagtgttaccactgatgtggtctactagggagatgttgagatatgaagtaatctaaaataaataggagttattaaagcattattttcagataaatgattaaatgacattttgaaatatatgttaataactaatttgaaattaatgttgttttacatatatagtaagtctatatatgtatacctaaatatatgtagttaaacaagtttataataaaactccaacattgtgaaaattttatagtatgacctaaattcatttgaactactatattagttataaagggatcagaatcaaatttggacctcttaagcatttcatgctcaatttctgggtctgaagtattgggaaatattattaaaataaaaaatatatagattataataatygttaaactaacttggtttcataactcaatttggtgttacactaactctcatgatttttgtattaaaatttaggatggttttct

SEQ ID NO: 282390 - DNA, 536 bp, Homo sapiens
tagaggaaattaactaaacagaaaataaataattaagagagccttaaaatatgagatgtaaaaacacggtagcaaaaatatgagtaaatacaatcgactttccttctcttgaatcttctraattttgtctgatggtgaaagtgaaaactataatacagttagatgtagttctaaatgtgtgtaaaggaaatagttcagaaaggccaaggtgggaagatcacttgaggtcaggagttcaagaccagcctggccaacatggtgaaaccccatctccactaagaatacaaaaattagcagggcgtggtggcacgtgcctgtagtcctagctactcgggaggctgaggcaggaggatcacttgaacctggaggcagaggttgcagtgaacccagatcgcaccactgcactccagcctgggtgacagagcaagactccatttcaaaatatatatatatatatgtatttgacacaagtataacaaaaaattaacacttctgatcagccggaaaatcacacaataaataatccccaaaatatt

SEQ ID NO: 282391 - DNA, 608 bp, Homo sapiens
gaaggtctgaattaatgtgcaaattgaggcatatctaagtagaaagtattgggattgtttcagtttacttagctggatatatttttcagaaagtgatattttagttgtcatttcagtagattcaccactctaaattactgtatgtgattattaggatacatacttttaaaacaaggtgttagcagatttatcttaaatatttttgttaaggttaataataatgcatacatcattattattgcatctattgtcaaagtagccaagaatatacaagaatagattgaggatgaataggtgaaacttgtaaaatattatagttctgaaagttgcatttaaggatttgtgtagacaaattcttgcatatataaaatacctgtgattataaaataagtactgtttggtgttagtattgaggttctttattaaattaattatatagcctgtattagataattgaactttaaaattactgtaaggatacataaaaatgaagctaytcaagttgtttaaaataatatctaaggtcaaatagaacattgcatttaagttgtgccgaaatgagggaaagttttattattttgatgcccaaatatcagtaggtacagtca

SEQ ID NO: 282392 - DNA, 608 bp, Homo sapiens
gaaggtctgaattaatgtgcaaattgaggcatatctaagtagaaagtattgggattgtttcagtttacttagctggatatatttttcagaaagtgatattttagttgtcatttcagtagattcaccactctaaattactgtatgtgattattaggatacatacttttaaaacaaggtgttagcagatttatcttaaatatttttgttaaggttaataataatgcatacatcattattattgcatctattgtcaaagtagccaagaatatacaagaatagattgaggatgaataggtgaaacttgtaaaatattatagttctgaaagttgcatttaaggatttgtgtagacaaattcttgcatatataaaatacctgtgattataaaataagtactgtttggtgttagtattgaggttctttattaaattaattatatagcctgtattagataattgaactttaaaattactgtaaggatacataaaaatgaagctattcaagttrtttaaaataatatctaaggtcaaatagaacattgcatttaagttgtgccgaaatgagggaaagttttattattttgatgcccaaatatcagtaggtacagtca

SEQ ID NO: 282393 - DNA, 614 bp, Homo sapiens
aattatgcatttttatttgacatattttggtctggaacctttgtgaagtttatttttatgttatcctagtaataatatatatagtgtaatagtaatatagctcatttatgtaaaaactgaaaatttagaaaaatgaaagtaaaacatagccttaccagccaaaagattattgctataggaatatttccacgtgtagactgattttcttatgttgtcattatgtgtatatgattttatacatatatttcagttacaatcataagcagtttctcmtattattataaaagctttcagaaacatcatttttaatgattgtgtaaagtcccattaacattatgttaaatctacttaacttttcctctgtgttgaatatttaggttgtttataatttaatacaataaatagcactgtgacagacatctgtggtataaagttattttgtttgtttttcgtacttaagaatgtttgttcttagactgattcctagaagtattggttagagagtgaaaagtatttttaagttatttgatgtatagaatttaattcctatttaaaaagatttgccaatttatactcccatcagcagtagacaaatgttcatttcctttttatcc

SEQ ID NO: 282394 - DNA, 583 bp, Homo sapiens
agcctcaaaaacattatgccatgtgaaagaagccaggcacaaaaggtcacatcgtgaatgattccatatatatgaagtgttcagaataggcaaatccatagagacagaactgcatattggtggttgtcagagactagggggaggaataatgggtagaaactgcttaatgaatacattgctttattttggagtgatggaaatgttttggatctagatagaggtggtttgyataacattgtgagtgcatgaaatgctttagtactagattatgttcagatggctaattttatgtaatttttttaaaaattaaaaaagacaaagaatgtcagattggatttgaaaagtccacctctctgctgcttacaagaaacacaccttaaatacagatgctcctggacttacgttggggttacaccataagttgaaagtattgtatgtcagcctggtgcagtggctcacgcctgtaatcccagtactttgggaggctgagggggtggattgcttgaggccaagaaaacaacatggcataaccctgtctctactaaaaatacaaaaatcagttgggcattctggcacatgcctg

SEQ ID NO: 282395 - DNA, 1167 bp, Homo sapiens
agcctcaaaaacattatgccatgtgaaagaagccaggcacaaaaggtcacatcgtgaatgattccatatatatgaagtgttcagaataggcaaatccatagagacagaactgcatattggtggttgtcagagactagggggaggaataatgggtagaaactgcttaatgaatacattgctttattttggagtgatggaaatgttttggatctagatagaggtggtttgtataacaytgtgagtgcatgaaatgctttagtactagattatgttcagatggctaattttatgtaatttttttaaaaattaaaaaagacaaagaatgtcagattggatttgaaaagtccacctctctgctgcttacaagaaacacaccttaaatacagatgctcctggacttacgttggggttacaccataagttgaaagtattgtatgtcagcctggtgcagtggctcacgcctgtaatcccagtactttgggaggctgagggggtggattgcttgaggccaagaaaacaacatggcataaccctgtctctactaaaaatacaaaaatcagttgggcattctggcacatgcctgwagcctcaaaaacattatgccatgtgaaagaagccaggcacaaaaggtcacatcgtgaatgattccatatatatgaagtgttcagaataggcaaatccatagagacagaactgcatattggtggttgtcagagactagggggaggaataatgggtagaaactgcttaatgaatacattgctttattttggagtgatggaaatgttttggatctagatagaggtggtttgtataacattgtgagtgcatgaaatgctttagtactagattatgttcagatggctaattttatgtaawttttttaaaaattaaaaaagacaaagaatgtcagattggatttgaaaagtccacctctctgctgcttacaagaaacacaccttaaatacagatgctcctggacttacgttggggttacaccataagttgaaagtattgtatgtcagcctggtgcagtggctcacgcctgtaatcccagtactttgggaggctgagggggtggattgcttgaggccaagaaaacaacatggcataaccctgtctctactaaaaatacaaaaatcagttgggcattctggcacatgcctg

SEQ ID NO: 282396 - DNA, 588 bp, Homo sapiens
actgctgcaatattttccactataaacagaagttggttattagaatgcattgtatatgtagatgagaaccacctgcataattacttaacccattgaatttgtactgaagaaacaaagaaaacatatggtttttggtcagattgtttactgcaatccaatactagagtaatttaataaatactgctgaaaaagaaaattacaggacccaaggaaaaaactccattattttaggatacaatcaaagacagctttatattggcaatttgtgtctaggcaaaaatgtgtgactcatttaaaacttttaaatgatgtgcttatggcggaggaaggtgrgctcttgaaaacagtaatttatgttcatggttactaaaggtgatttacaagacatataaacaacacctaacttaacctaagttgggggggagcaattaaatgaaggcatttttaccttctcatttagcagttcaataaagctgtaatgccttaagggctacaattccatataaactaaaaaggcaacttagaaactattttttcatcagtgccaccttcacctctttttaaccaaacacccacaacaaaactaaa

SEQ ID NO: 282397 - DNA, 539 bp, Homo sapiens
ctgtctctacaaaaaatagaaataaagttggctgggcatggacatgcacacctgtagtcccggctattcaagaggctaaggcaggaggattgcttgagttcaagaagtcagggttgcagtgagttgtgatctggctactgtactccagctgaggtcagagagtgagaccctgtctcaaaaaaaaaaaaaaaaaaaaagtctgagagtcagtggatgaagcagaaaagaaaaattaaaaaagaaaataaaacaaaaattttttaaaagggaaaaaaagttttatttaaaaataaaatctgaaatcattgcccatcaagtacatgagtatggcttttgtggctaacagtgttgctcattctccatatttatagtgtctttggtttgcaactggaaagggtaatagtctttgtggcttagaaccatatgatgtctttgctcaaatagcaatgtmtgcttctcctattttatagctgcagatagatatgatacaaacacctggcttcactgtgtactttattttacttacttacttatttatt

SEQ ID NO: 282398 - DNA, 548 bp, Homo sapiens
taccaggtgtattaaacagaggcatcatttaatggaaatctgcacttcaaaacagcacttgaaggaccagccattggccctccaatgtaaatacttctcatttcacattatcasagaaacagtgcagtttactaaccactccttccttataagaaattcagtagctgtaaaattttttttcagtttcaaaacatttcaatacttattaattccaaagatccgaacaccatgtagttgtggcattttgggaattagtacactcaggagagaagctgtgtttaggatgaagtgagttggatcatacttcgtatagaaacttgccagaaaatatctgtagagataaaagttaagaatatatataacatccaaaaataaaattacttggaacttaaacaattttaaaggtagaaaaaaaggccactaaagcataaatacctaaaaatgaaactatttttgagcactaaaacaagaggaatcggtttggtcccaagtttatctcattaggaactaaaaaatttgtttaatggaggtccacattttccatttct

SEQ ID NO: 282399 - DNA, 385 bp, Homo sapiens
aagtgggcatcagtacagccactataggcaacacaatggcggtttctcaaaaaaataaacatagaactaccataaaatccaacctttccactactgtgtatatmtccaaaagaaagcaaatcaatacattgaagaaatatctgcactcccatgtttattgcagccctattcacaatagccaaaatatggaatcaatctaagtgtccacctcaatggatgaatggattaaaaaaagtggtactatatgcagtggaatattattcagccataaaaagaatgaaatcttgttatttgcagcaacatggatggaactggaggtcattatgttaagtgaaataagccaggcacaaagacaaatatcgcatgttctcactcatatgtggga

SEQ ID NO: 282400 - DNA, 553 bp, Homo sapiens
tgatatgttttaagcgtccctgtggtctaagccattgttggctattttacagatctgtttgtatacactacrtttccaaatgtacgtacatttcttactagactctccacacttagattatttctttttaaaagtattctagtttctgaatgtagacatcttttaatttctttatatgtacacagatatgaagcttcatgtacatgaatacatttttaaagacatactaaattcttacagttgtttttaattgtagtgatgttttgtgcagtctttttaaaatttttatctttttaattggatcatttccttctccagtaacagtccctgacttgtgatctcagatcacccatattaacaatccagcttacattattatgtataatatgtctgtacctaattacatgattatttagaaaacattatttgtgtatatatctaatctcaatatgtatatgtttggaggttttgggtcttttgaggtgcagattcagtgcttttaccaaaatggtatcatattagaaacacttctgcacttcagatttttttttcg

SEQ ID NO: 282401 - DNA, 572 bp, Homo sapiens
tagcagtgctagcagcacttcctgtgggttgaggctgggacagatctcctgccaggaaacctaagagagtgaggaagctggttgtccayctcaatctcactttttccagcgtagaaactgtgagtcagggggacattttccgtgtcctttgtgctgggcagttttggggagagggatgtcgtgaatatggaagtccaattctcttactgtcggcttggagtttttttcacttttctgtggttgcacgatctttttcctcctcatatttgagttcttgggtattgccggtgatactcttggtgctatgtatttgttgttcattctgtatgggggcaggggcaggtggagaagccagcttctatgccatcattaaagaactggaattcccccccatgtgtctcttataaggatgctcatcaatgcatttagggcccacctggataatccacactgatctccccatctccagatccttaatttagttacatctgcaaagaccctttttccaaataaagttgtattcacaggttccagagatttgacatagacctatattttggggccatttttca

SEQ ID NO: 282402 - DNA, 572 bp, Homo sapiens
tagcagtgctagcagcacttcctgtgggttgaggctgggacagatctcctgccaggaaacctaagagagtgaggaagctggttgtccacctcaatctcactttttccagcgtagaaactgtgagtcagggggacattttccgtgtcctttgtgctgggcagttttggggagagggatgtcgtgaatatggaagtccaattctcttactgtcggcttggagtttttttcacttttctgtggttgcacgatctttttcctcctcatatttgagttcttggrtattgccggtgatactcttggtgctatgtatttgttgttcattctgtatgggggcaggggcaggtggagaagccagcttctatgccatcattaaagaactggaattcccccccatgtgtctcttataaggatgctcatcaatgcatttagggcccacctggataatccacactgatctccccatctccagatccttaatttagttacatctgcaaagaccctttttccaaataaagttgtattcacaggttccagagatttgacatagacctatattttggggccatttttca

SEQ ID NO: 282403 - DNA, 572 bp, Homo sapiens
tagcagtgctagcagcacttcctgtgggttgaggctgggacagatctcctgccaggaaacctaagagagtgaggaagctggttgtccacctcaatctcactttttccagcgtagaaactgtgagtcagggggacattttccgtgtcctttgtgctgggcagttttggggagagggatgtcgtgaatatggaagtccaattctcttactgtcggcttggagtttttttcacttttctgtggttgcacgatctttttcctcctcatatttgagttcttgggtrttgccggtgatactcttggtgctatgtatttgttgttcattctgtatgggggcaggggcaggtggagaagccagcttctatgccatcattaaagaactggaattcccccccatgtgtctcttataaggatgctcatcaatgcatttagggcccacctggataatccacactgatctccccatctccagatccttaatttagttacatctgcaaagaccctttttccaaataaagttgtattcacaggttccagagatttgacatagacctatattttggggccatttttca

SEQ ID NO: 282404 - DNA, 635 bp, Homo sapiens
ggaattgtcataatagctgtagctgtctgttagttcatattttttaaaacaataagtttatcgattcagctatcttatttcttggaaacacagtcacatggaaagaagtctataaatttataagaataagaaatgagacactgaagccccctcttactttccaatctcccttttccttccccattatccttggcagaagtaagtgatgtaaatagacttacatcacccagttatttgcctttgcatttatatacattgattttcacatggrtatgtattgaatatttttaacatgaatgaagttatcctacatatgctaaaacttgtgttattgttttcgcttttcttttcttttctttgagttaggttctcactctgttgtccaggccgaagggcagtggcatgatcacagctcactgcagcctcaacctcctgggctcaagcgatcctcccacctcattctcccaagtagctgggtctacaggtgtgcaccaccatgcccggctaattttcgtatgttttgtagaggtggggttttgccgtgttgctcaggctggtctcgaactcctaagctcaagcaatctgcccacctcggcttcccaaagtgctgagattacaggcatgagccactgtgc

SEQ ID NO: 282405 - DNA, 635 bp, Homo sapiens
ggaattgtcataatagctgtagctgtctgttagttcatattttttaaaacaataagtttatcgattcagctatcttatttcttggaaacacagtcacatggaaagaagtctataaatttataagaataagaaatgagacactgaagccccctcttactttccaatctcccttttccttccccattatccttggcagaagtaagtgatgtaaatagacttacatcacccagttatttgcctttgcatttatatacattgattttcacatggatatgtattgaatatttttaacatgaatgaagttatcctacatatgctaaaacttgtgttattgttttcgcttttcttttcttttctttgagttaggttctcactctgttgtccaggccgaagggcagtggcatgatcacagctcactgcagcctcaacctcctgggctcaagcgatcctcccacctcattctcccaagtagctgggtctacaggtgtgcaccaccatgcccgkctaattttcgtatgttttgtagaggtggggttttgccgtgttgctcaggctggtctcgaactcctaagctcaagcaatctgcccacctcggcttcccaaagtgctgagattacaggcatgagccactgtgc

SEQ ID NO: 282406 - DNA, 635 bp, Homo sapiens
ggaattgtcataatagctgtagctgtctgttagttcatattttttaaaacaataagtttatcgattcagctatcttatttcttggaaacacagtcacatggaaagaagtctataaatttataagaataagaaatgagacactgaagccccctcttactttccaatctcccttttccttccccattatccttggcagaagtaagtgatgtaaatagacttacatcacccagttatttgcctttgcatttatatacattgattttcacatggatatgtattgaatatttttaacatgaatgaagttatcctacatatgctaaaacttgtgttattgttttcgcttttcttttcttttctttgagttaggttctcactctgttgtccaggccgaagggcagtggcatgatcacagctcactgcagcctcaacctcctgggctcaagcgatcctcccacctcattctcccaagtagctgggtctacaggtgtgcaccaccatgcccggctaattttcgtatrttttgtagaggtggggttttgccgtgttgctcaggctggtctcgaactcctaagctcaagcaatctgcccacctcggcttcccaaagtgctgagattacaggcatgagccactgtgc

SEQ ID NO: 282407 - DNA, 548 bp, Homo sapiens
acaaaaatattcttctatttatttgtattacttttatattttgatttcaatccatctggagtttattctttgtattatttgaggtaggattctcacttttcccccaagtaaaaagcctattgccccaaactccactggtctgaaatcccatgtttacaaacatctgttttggactctagaggttgttctactgatctgtttgtctatttctccactaacaatttagtttcaattaacatatctgacttatttaggatgtttttggctgaaagcaaccaatatttgactaaaagtggtttaaaattaatagtgctattaccatgcayaacaagcccaggactggttggtctgaaggttgtttcaagtgctcagaggtgcaggttttttcttcctcctcctcgcccctcctcagagtgttgactttcatgctcagggtggttgactcatggcatgaagatggctaccgtagctccagacatcataccttgctcccacaaagccacagacagaaaggaagggcacatggagaaaagtcctgttacttatgg

SEQ ID NO: 282408 - DNA, 600 bp, Homo sapiens
ctgtacattcacctaagtgtagatatcatgactactctgagaaatcatcattcttcttctacaagagggaaaccactggtagatctgctaggctagactctccatactcccttaaatatggagatttgcagctcactctttcaatcatcaaatcttcaaaaacgtaatttctgttagctgcagattagggtgatcatgttttcctttccctttcctgctgacccacaatattgaagcatcagcatgctctatgacaaattctgagtggttgaaaacatttgacagtaataagtttcaaagaaaaatctaaatctaaattttgacagcaaaatatagcttttggtttcctacgtagttatccgtacctggaacattatgctggcttctcttcttttgggaccagtgcattttcatactgaaaaacaatactaaaagtgtagcttaagcataatgtgtcactgagttattaagtagagtgaactaagtagagtttatttagtttcaaattactaataarctaacttgagcaaaaatatttattatgaggatagtatatttcttagagaatcaagaataagaaagtagctgaattctcaagaa

SEQ ID NO: 282409 - DNA, 567 bp, Homo sapiens
gtcagatactgcaaaacacatttttctttcctaaagtaagactattcaagatccttaaagagcagaatcagttcacatctagcaagagctttcaagagtaaacagagacctgttttacttttgacttcaaggcatttgatgctgtcatactccagacaaaattcttagttggaaagaagttaagatacctgttgttgaacatttgttcactgggatttggctgtsagcaacctcctcaacattctctctgggagtgagtttagtactcctgagagttgaaaaatatttctgttttgtaaaaaaattgagactttggattgtgtttatgtatgcatatgcatgccaactcaatttgcatcttatgatctaccaatctgaaatcaaaagcaatgtaagaccataaccagtattgctggggacattgctatgacagacagtttcaacataaaatttgaatctctttgaaaaatacttaaatgtccttaaagccaaattattttattgtttcaattcttgaactaaatcaagatactttttcttgtttaaagcaggtgcttcccaatgact

SEQ ID NO: 282410 - DNA, 567 bp, Homo sapiens
gtcagatactgcaaaacacatttttctttcctaaagtaagactattcaagatccttaaagagcagaatcagttcacatctagcaagagctttcaagagtaaacagagacctgttttacttttgacttcaaggcatttgatgctgtcatactccagacaaaattcttagttggaaagaagttaagatacctgttgttgaacatttgttcactgggatttggctgtgagcaacctcctcaacattctctctgggagtgagtttagtactcctgagagttgaaaaatatttctgttttgtaaaaaaattgagactttggattgtgtttatgtatgcatatgcatgccaactcaatttgcatcttatgatctaccaatctgaaatcaaaagcaatrtaagaccataaccagtattgctggggacattgctatgacagacagtttcaacataaaatttgaatctctttgaaaaatacttaaatgtccttaaagccaaattattttattgtttcaattcttgaactaaatcaagatactttttcttgtttaaagcaggtgcttcccaatgact

SEQ ID NO: 282411 - DNA, 602 bp, Homo sapiens
atgcatgccaactcaatttgcatcttatgatctaccaatctgaaatcaaaagcaatgtaagaccataaccagtattgctggggacattgctatgacagacagtttcaacataaaatttgaatctctttgaaaaatacttaaatgtccttaaagccaaattattttattgtttcaattcttgaactaaatcaagatactttttcttgtttaaagcaggtgcttcccaatgacttgggtagagagattaaaagaactaccttggtcagccaaatgaagtcttagtattttttttatttctaaaatgtaactatactccagtgcaagtattgttacttaaatgtattaccatcgcagtagttttaagcatataagtcgtgaaaaaaagacatatcccacscatccaacatcaaaattagtgcctcacttgtcctgggggtcagacactggcagaaaattaccagagagagggtgagtcagcatacaaaacccaagtaagtccattgaatctaaatcaaggaaagaaatagttcacattgttcttcttcttcatagtttctttttgaggcagagaattcttctaaatgattgttggaacttagaat

SEQ ID NO: 282412 - DNA, 390 bp, Homo sapiens
gttcatcagaatctcaaatggactatgacccacaaggcctcagcacctaattggcatcactgtcagctggagtgcaagaaagcaaaaaactagaatctragaaaggcacgggtgccccaggaaaccatgcttgagtgtctgtcttcaaatgaattttttatattggtaagagttaactttatacataattttatttgtttcacccaaggtagatttccctcttccttcactgggaaccagtcacctatcacagaaaatacttgaatgaagaaatagaactctttcacttagtgtttctgaaaagttactaaaatctaaggctacatatttttctcttagtttcaaataatttgtaataagaattgcaatttctgttccaagtagataaaa

SEQ ID NO: 282413 - DNA, 390 bp, Homo sapiens
gttcatcagaatctcaaatggactatgacccacaaggcctcagcacctaattggcatcactgtcagctggagtgcaagaaagcaaaaaactagaatctgagaaaggcaygggtgccccaggaaaccatgcttgagtgtctgtcttcaaatgaattttttatattggtaagagttaactttatacataattttatttgtttcacccaaggtagatttccctcttccttcactgggaaccagtcacctatcacagaaaatacttgaatgaagaaatagaactctttcacttagtgtttctgaaaagttactaaaatctaaggctacatatttttctcttagtttcaaataatttgtaataagaattgcaatttctgttccaagtagataaaa

SEQ ID NO: 282414 - DNA, 536 bp, Homo sapiens
caacatatctcctactcccagctcctggcaactaatcatctrttctctgacccgatagtattgccatcgcaacagtgacacagaaatagaatcaaacagcacgtagccatttaagtctatctagttttacttagcagagtgcaactgagattaatacttataaaagttccatatttgctttgtagctctaggactgtctgttcaacagtatttctttttgaacacaagctgtcagtattacttttatatatttgcaagaaataaatcattttttatgttggagagagtcatgttaaagtttattaaaatacagcttggcaatcaccgtgcaagcatgaatgaagattaatgggtccaacaataagggggcatagagagcaatgaatgtgactctgtggagaccacttcttttggcatggaatttataacttcttcaacactggatttatttctgttgtttcattaaatggtcttgtcagtaagaaatcctgggaaaggtatcttaggaagaagaaataggataaacaaagaaacag

SEQ ID NO: 282415 - DNA, 536 bp, Homo sapiens
caacatatctcctactcccagctcctggcaactaatcatctattctctgacccgatagtattgccatcgcaacagtgacacagaaatagaatcaaacagcacgtagccatttaagtctatctagttttacttagcagagtgcaactgagattaatacttataaaagttccatayttgctttgtagctctaggactgtctgttcaacagtatttctttttgaacacaagctgtcagtattacttttatatatttgcaagaaataaatcattttttatgttggagagagtcatgttaaagtttattaaaatacagcttggcaatcaccgtgcaagcatgaatgaagattaatgggtccaacaataagggggcatagagagcaatgaatgtgactctgtggagaccacttcttttggcatggaatttataacttcttcaacactggatttatttctgttgtttcattaaatggtcttgtcagtaagaaatcctgggaaaggtatcttaggaagaagaaataggataaacaaagaaacag

SEQ ID NO: 282416 - DNA, 591 bp, Homo sapiens
tgcaactttggttgtttttatagtatattgctgatgtacattgaaggaatgcgagctagctaaaagattttctgcccaagttgaagaatacaatcatgtcggtttaaagattagaccraatatacatgcctttgaagccctcaagtcacctgcaatggagactagtcttctgaacttttgaaattttgtgtttgtcagcacttaataaagatgtgaaccaggtccacattttcactggaagatacagtagaccttgacaaagaacaagcgggaaaggcctctaaaatgtcatttaatagagtgatgatggctcattttcaaggacagatatagtcactcaaagagacatcagaattctaccagttccgtgattgaggccaacaatatatgcatctccgaagcctgtatgcagaacaacatcagaagggcataactataactttgataaaaatgtacagttataggaaagcctaaaggtgcttgttccctgcatgtgaatgacaagaaagagtgtaagaactgaaggagcagaaagaaatgcttgcaaactttagcacataagagaacaggttgtaaatgataagtagagct

SEQ ID NO: 282417 - DNA, 591 bp, Homo sapiens
tgcaactttggttgtttttatagtatattgctgatgtacattgaaggaatgcgagctagctaaaagattttctgcccaagttgaagaatacaatcatgtcggtttaaagattagaccaaatatacatgcctttgaagccctcaagtcacctgcaatggagactagtcytctgaacttttgaaattttgtgtttgtcagcacttaataaagatgtgaaccaggtccacattttcactggaagatacagtagaccttgacaaagaacaagcgggaaaggcctctaaaatgtcatttaatagagtgatgatggctcattttcaaggacagatatagtcactcaaagagacatcagaattctaccagttccgtgattgaggccaacaatatatgcatctccgaagcctgtatgcagaacaacatcagaagggcataactataactttgataaaaatgtacagttataggaaagcctaaaggtgcttgttccctgcatgtgaatgacaagaaagagtgtaagaactgaaggagcagaaagaaatgcttgcaaactttagcacataagagaacaggttgtaaatgataagtagagct

SEQ ID NO: 282418 - DNA, 601 bp, Homo sapiens
gatgatggctcattttcaaggacagatatagtcactcaaagagacatcagaattctaccagttccgtgattgaggccaacaatatatgcatctccgaagcctgtatgcagaacaacatcagaagggcataactataactttgataaaaatgtacagttataggaaagcctaaaggtgcttgttccctgcatgtgaatgacaagaaagagtgtaagaactgaaggagcagaaagaaatgcttgcaaactttagcacataagagaacaggttrtaaatgataagtagagctagttaaaatctctgtctaaactgtgctaaagtgtgaagagaagattatatgaatgagacaaaaggaaccagactgaaacagtacgtcagaaaatgaagaccaagagtatcagtctcaagccaacaggaagaaactcatcaatactgttaaatatttccttttaaaaaaacttgagacaaaaaaaagaatatttaaaaggttatgtgaataaaatcaaatgtaggaagcacttgtagttccagtcaaaattctctaagcacagtaaacacagtgttgacaatacacagtttgaaagctagattcaaaagcttt

SEQ ID NO: 282419 - DNA, 601 bp, Homo sapiens
gatgatggctcattttcaaggacagatatagtcactcaaagagacatcagaattctaccagttccgtgattgaggccaacaatatatgcatctccgaagcctgtatgcagaacaacatcagaagggcataactataactttgataaaaatgtacagttataggaaagcctaaaggtgcttgttccctgcatgtgaatgacaagaaagagtgtaagaactgaaggagcagaaagaaatgcttgcaaactttagcacataagagaacaggttgtaaatgataagtagagctagttaaaayctctgtctaaactgtgctaaagtgtgaagagaagattatatgaatgagacaaaaggaaccagactgaaacagtacgtcagaaaatgaagaccaagagtatcagtctcaagccaacaggaagaaactcatcaatactgttaaatatttccttttaaaaaaacttgagacaaaaaaaagaatatttaaaaggttatgtgaataaaatcaaatgtaggaagcacttgtagttccagtcaaaattctctaagcacagtaaacacagtgttgacaatacacagtttgaaagctagattcaaaagcttt

SEQ ID NO: 282420 - DNA, 601 bp, Homo sapiens
gatgatggctcattttcaaggacagatatagtcactcaaagagacatcagaattctaccagttccgtgattgaggccaacaatatatgcatctccgaagcctgtatgcagaacaacatcagaagggcataactataactttgataaaaatgtacagttataggaaagcctaaaggtgcttgttccctgcatgtgaatgacaagaaagagtgtaagaactgaaggagcagaaagaaatgcttgcaaactttagcacataagagaacaggttgtaaatgataagtagagctagttaaaatctctgtctaaactgtgctaaagtgtgaagagaagattatatgaatgagacaaaaggaaccagactraaacagtacgtcagaaaatgaagaccaagagtatcagtctcaagccaacaggaagaaactcatcaatactgttaaatatttccttttaaaaaaacttgagacaaaaaaaagaatatttaaaaggttatgtgaataaaatcaaatgtaggaagcacttgtagttccagtcaaaattctctaagcacagtaaacacagtgttgacaatacacagtttgaaagctagattcaaaagcttt

SEQ ID NO: 282421 - DNA, 604 bp, Homo sapiens
tgttacttgatggtacatttgaaattttatattattttaattcctaaaatagtttccaaaatatagatagctttaatctaatttttaaatatataatatcaattccgggaacttattaaaattaaatcatgtaagtattgtattttaatttaattaactgacccactactgtttaaaccataattgaagttttacatgaccaggtggagacatctaaaacattagaaacagtttctatatgctatgaattgcartaagccatctattaaagtaacttcatttttacctcaatactgattggcattgaggtaaaataatacacaacacacacacaaataacaaacaaaaaaataaactataaatacatcctcagttgaacttactagtatttttattagattagctctaaattcataggtgaattttggggaatagacattttgcaagcgtttgtttcttattttgttttttctttctgacctttgtaatattatttatgatgttgtttgatatttaaatgtttccaaattttgcactgtgacaatattctcttttggactttggacttcattttatttctttattttttagacagggtctcact

SEQ ID NO: 282422 - DNA, 584 bp, Homo sapiens
catggaggcagttttccccttgctgttctcatgatagtgagtgagttctcatgagatctgatggcttaaaagtgtttggcagttccccctgcactctctgtctctcctgccaccatgtaagacatgccttgctttcctttcaccttccaccacgactgttagtttcctgaggcctccccagccatgtggatctgtgagtcaattaaaccttttttctttctttttttttttttcttttgagatggagttttgctcctgttgcccaggcttccgtgcaatggtgtgatctcagctcactgcaacctccgcctccctggtccaagagattctcctgactcagcctccagagtagctgagattacaggtgtccaccaccatgccccactaattttttgtatttttggtagagatgggatttatgttggccaggctggtcttgaaccgctaacttcaggtgatccacccgccttggcctcccaaagtgttgggattacaggygtgagccactccaccaggccccttttttctttataaattacccattctcaggtagttccttatagcactgtgaaaacagactaata

SEQ ID NO: 282423 - DNA, 564 bp, Homo sapiens
atatatagaagccagatccagaggctacatataaaatcttttatgaggaaaatcatctgcaactcatacactaatcccagaatgyatctgtgagtagataacaaagcccattgtttggaaaataattttgaagtccagagaatattaattttaaagtacataggaagatttttttcagaaataggaattttcagtaggccttgataaattagtaaacccagatggaatatggatgtcttattgttatttgataacttaagtggaaaaatacggtctcagataatttggtgatgtgacatttcattttataaactagttgttacttacagggtatatctatataggcatacttgtagtattgtagcaaaatggattccagaggaaactgctgaatttatattaaaataacttgttcattatcaaaacaagatcatctttaaaaatctcatattgctttgtacacttgttatagaatatccaaagaattaggaaaaatagaaattcaaattatttaaactgaacttgtattttgctttaaatgttggctgaaaactcttcatatca

SEQ ID NO: 282424 - DNA, 633 bp, Homo sapiens
ttataactgtgtcacagaactctttaaaaaaatgtattaaaacatatggtttcttgttttacagcaacctagcaaatgctgattctagaaaaagccaacttaaaaaaagcacaaaagctttgcattatttttacttgcccttgcctcccacctaccccgactcaatgacagttttgaagccagcagmctgcattctcaataaaagaccctggttcctggttcctggttccggaaagggcagagtagtagaacttattcttaaacataaatattattactttgtttggtagttttgtcctgtcgtgtagcttcctggaggacagactcaaggtattcacctttgttttgtgcaactcagaagtctcttagggcagaaaaatggctgagcagagtacattcctcaataacattataaatcaaatgaaaaaacttcatgccatctggggtgagagagttcagttgacacaaataatagagactctaaaaacctgggggaaaaatgtggaaagagttatttggggaaaattagggcattgaaaagtgccagtatactgtggagtctgtaaagccacatacattcccagggaaaaaggatgctcagaagagacccgagaagaccttcacctctggctg

SEQ ID NO: 282425 - DNA, 596 bp, Homo sapiens
ttttggtttcactgatttttctctattgtttttctatactcagttccatcaattttatatccaatctttaaaatttccttccttctgcttcytttaggtttagaatgctcttatttttacagtgtcttaaggtgcaaggttaacttgatgttcatctttttctcctatactataggcatattcctgtctatacatgtccctctaagaattactttagcagcattccatacattttgctatattgtgtcttcattttaacatttcttcaagtattttctaattttctttttcatttattctttgactcagtgattatttcggttgtttaatttccacatatttgtaaagttttttaaatttcattgttattgagttctaatttcattccattgtaatcacagaacatactttatatgaatttcatctttttgaatttcaatttttattttatgttattttatttttagaaataggatcttactatgttgcctaggctggatttgaactcctgggctgaagcaattctcccacgtcaacctccctagtagctgggtttataggaacataccaccatgcccagctttctgtctaaattt

SEQ ID NO: 282426 - DNA, 596 bp, Homo sapiens
ttttggtttcactgatttttctctattgtttttctatactcagttccatcaattttatatccaatctttaaaatttccttccttctgcttcctttaggtttagaatgctcttatttttacagtgtcttaaggtgcaaggttaacttgatgttcatctttttctcctatactataggcatattcctgtctatacatgtccctctaagaattactttagcagcmttccatacattttgctatattgtgtcttcattttaacatttcttcaagtattttctaattttctttttcatttattctttgactcagtgattatttcggttgtttaatttccacatatttgtaaagttttttaaatttcattgttattgagttctaatttcattccattgtaatcacagaacatactttatatgaatttcatctttttgaatttcaatttttattttatgttattttatttttagaaataggatcttactatgttgcctaggctggatttgaactcctgggctgaagcaattctcccacgtcaacctccctagtagctgggtttataggaacataccaccatgcccagctttctgtctaaattt

SEQ ID NO: 282427 - DNA, 556 bp, Homo sapiens
tttggtttcactgatttttctctattgtttttctatactcagttccatcaattttatatccaatctttaaaatttccttccttctgcttcctttaggtttagaatgctcttatttttacagtgtcttaaggtgcaaggttaacttgatgttcatctttttctcctatactataggcatattcctgtctatacatgtccctctaagaattactttagcagcattccatacattttrctatattgtgtcttcattttaacatttcttcaagtattttctaattttctttttcatttattctttgactcagtgattatttcggttgtttaatttccacatatttgtaaagttttttaaatttcattgttattgagttctaatttcattccattgtaatcacagaacatactttatatgaatttcatctttttgaatttcaatttttattttatgttattttatttttagaaataggatcttactatgttgcctaggctggatttgaactcctgggctgaagcaattctcccacgtcaacctccctagtagctgggttta

SEQ ID NO: 282428 - DNA, 584 bp, Homo sapiens
gtctgtgtgtctgtttttgaatgactactatgatgtttagttactgtagccttataatatagtatgaagttgggtaatgtaatgcctcaggctttattctttttgcctaagattgcttttgctattgggacacttttttggctctatatgaattttagaatagttttttttttctaattttgtaaaaaayaacattggtagtttcatagaaatagtcttgattctttagattgcttagggcatatggccatttttatgacattgattcttttttgtttgtttgattttatttttgagacagagtttcactcttgttgcccaggctggagtgtaatggcatgaccttggccaactgcaacttccatctcctgggttcaagtgattctcctgcctcagcctcccgagtagttgggattacaggcatgcaccacaacacctggctgattttgtatttttgtattttttttttttttttaagtagagatggggtttctccttgttggtcaggctggtctccaactcctggcctcaggtgatccacctgccttggcctcttggcctgccaaagtgctggaattataggc

SEQ ID NO: 282429 - DNA, 604 bp, Homo sapiens
catgcttcccaaattactaacgtgttcatcatcactcacaattttaccctatataattatacacyttttgggtgtgagttcattcttaaagtcgattttcttttaacctagaggtcatgcagctaccattggcccctggagagagatcacatcatataagattatgtcttagcaaaaggcttgttttccttattgttattcacattttataaatactgcagacacaggaatcattttcctttttaagcactaatgtaaaaagatctctggaaagacattgaaattttaacagtgtttaattttaatgtgtggcattgtggctaagtctcattatctcttttttgtttatttgctcattagtcgcttttgtgacacttcatttgtaaagaactaaaaaaaattcagaatttaaaagaaaagcttgagaaaattggaggaacttcaccacatttaaaaatatttgtgtttttctcttaaggctgatttagctgtaattgtttctagaacctcacacgaatgtgtaggtgaaacagtttccttggctgttttcctggagatcagctaacctgagcaggctgtgctccaggaggaagtgttccctatc

SEQ ID NO: 282430 - DNA, 604 bp, Homo sapiens
catgcttcccaaattactaacgtgttcatcatcactcacaattttaccctatataattatacaccttttgggtgtgagttcattcttaaagtcgattttcttttaacctagaggtcatgcarctaccattggcccctggagagagatcacatcatataagattatgtcttagcaaaaggcttgttttccttattgttattcacattttataaatactgcagacacaggaatcattttcctttttaagcactaatgtaaaaagatctctggaaagacattgaaattttaacagtgtttaattttaatgtgtggcattgtggctaagtctcattatctcttttttgtttatttgctcattagtcgcttttgtgacacttcatttgtaaagaactaaaaaaaattcagaatttaaaagaaaagcttgagaaaattggaggaacttcaccacatttaaaaatatttgtgtttttctcttaaggctgatttagctgtaattgtttctagaacctcacacgaatgtgtaggtgaaacagtttccttggctgttttcctggagatcagctaacctgagcaggctgtgctccaggaggaagtgttccctatc

SEQ ID NO: 282431 - DNA, 638 bp, Homo sapiens
gttttccttattgttattcacattttataaatactgcagacacaggaatcattttcctttttaagcactaatgtaaaaagatctctggaaagacattgaaattttaacagtgtttaattttaatgtgtggcattgtggctaagtctcattatctcttttttgtttatttgctcattagtcgcttttgtgacacttcatttgtaaagaactaaaaaaaattcagaatttaaaagaaaagcttgagaaaattggaggaacttcaccacatttaaaaatatttgtgtttttctcttaaggctgatttagctrtaattgtttctagaacctcacacgaatgtgtaggtgaaacagtttccttggctgttttcctggagatcagctaacctgagcaggctgtgctccaggaggaagtgttccctatccccaccctctcattccttttttgtactaaggctttaaagtattcaaccagaaaatcaatagattttttttctctacaggttaatacacgtggacttacataaattactatttgtaatgttttaaataatgcttatgcattacataaagcttaggaaataaagaacaggaatgcaacaacatttcttcataatctatccacacagtcataactaccg

SEQ ID NO: 282432 - DNA, 737 bp, Homo sapiens
agattttttttctctacaggttaatacacgtggacttacataaattactatttgtaatgttttaaataatgcttatgcattacataaagcttaggaaataaagaacaggaatgsaacaacatttcttcataatctatccacacagtcataactaccgttattaacattttgctattgttttatcttatttatatttcgtaatgttcatgttatatgttcaattgaaaaacatgctattctttttcagttacagttatagcattatcattttcctattattataaattcattttcataatttttgaaaataatattatgtcatacatgtatcatatttatttaaaccatcaccatatgtgtggacattcaggattttgctataataagtaattctgcaattgacgaatgtacatgtaattattgttttaattttagtgtctttagtaagattgatttttataagttaaattagtaatggttaaagtctttttgaggcttttgatacatatagttgttcatttaaaacatagtgataatttttaattccaatagcagtacataaacataccttttgcaatactgaatattctcatgtatttattaggcatttgtgtttcttttgtgaattacctatttgtacattttgcctatttgtagtcttagagtttttaaatggataatattacatggttaaaataaaataacaaatatagtataattatacataaatataacac

SEQ ID NO: 282433 - DNA, 737 bp, Homo sapiens
agattttttttctctacaggttaatacacgtggacttacataaattactatttgtaatgttttaaataatgcttatgcattacataaagcttaggaaataaagaacaggaatgcaacaacatttcttcataatctatccacacagtcataactacygttattaacattttgctattgttttatcttatttatatttcgtaatgttcatgttatatgttcaattgaaaaacatgctattctttttcagttacagttatagcattatcattttcctattattataaattcattttcataatttttgaaaataatattatgtcatacatgtatcatatttatttaaaccatcaccatatgtgtggacattcaggattttgctataataagtaattctgcaattgacgaatgtacatgtaattattgttttaattttagtgtctttagtaagattgatttttataagttaaattagtaatggttaaagtctttttgaggcttttgatacatatagttgttcatttaaaacatagtgataatttttaattccaatagcagtacataaacataccttttgcaatactgaatattctcatgtatttattaggcatttgtgtttcttttgtgaattacctatttgtacattttgcctatttgtagtcttagagtttttaaatggataatattacatggttaaaataaaataacaaatatagtataattatacataaatataacac

SEQ ID NO: 282434 - DNA, 640 bp, Homo sapiens
ctcttttagacagtgttatcaaagcagatgaacacttgattgagcaacaatgatgattatatgggtaacactcatgaacattttattactgaggttgttagactccccaagctagccgaccccaaatcacacaattatagcaaacaagtaaaatcacttagttggttattatagtagttaaaaggaaacatagttttaggttttaataacccaatatatttatatatatatgtgtgtgtgtgtgtatacacataaatatacataaatatgtatatatacacatatatataaaatacccaatctcaaaaattattttgctcgtcatagctttggaatttaaaccagtattattagaaaaattgattcctttaaatttctagcattctcagaaatctctcttaatgtcagcaaaaataataattacaataagttttctcctatggttaattttttgctgagtctgtaatgcaatcttttttcataaaaacartgacacacactccaatttcacattctgtttttaactactgttttatttccaaatgacatctaaagttgatgtaatatatcattattggccataatctcaaagcaaataatgcattattgtctactttacatgattatagaaactaagaca

SEQ ID NO: 282435 - DNA, 640 bp, Homo sapiens
ctcttttagacagtgttatcaaagcagatgaacacttgattgagcaacaatgatgattatatgggtaacactcatgaacattttattactgaggttgttagactccccaagctagccgaccccaaatcacacaattatagcaaacaagtaaaatcacttagttggttattatagtagttaaaaggaaacatagttttaggttttaataacccaatatatttatatatatatgtgtgtgtgtgtgtatacacataaatatacataaatatgtatatatacacatatatataaaatacccaatctcaaaaattattttgctcgtcatagctttggaatttaaaccagtattattagaaaaattgattcctttaaatttctagcattctcagaaatctctcttaatgtcagcaaaaataataattacaataagttttctcctatggttaattttttgctgagtctgtaatgcaatcttttttcataaaaacaatgacacacamtccaatttcacattctgtttttaactactgttttatttccaaatgacatctaaagttgatgtaatatatcattattggccataatctcaaagcaaataatgcattattgtctactttacatgattatagaaactaagaca

SEQ ID NO: 282436 - DNA, 552 bp, Homo sapiens
atgttctttttcccactgagcccctgatgtagagatcaaagcaagttacagatacataaaatataacctttaagagagattacaatttcattggcataccacatacattttcaccgtagaacattacattgtctttagtaaatataccaaacacaaggtatctatagaccttcatgtccatattataaataattaaatcagagaaacaagaagataaaaaagccaggagagagagagagagaaagagaatcatttggaatgatgcactcaagaaaagagatggctaaagagatagaggaattaagagaggtcatcttaggattgttaacagtaagcaggctcagtaatacctacctactcgctcagatttcaggagcaccacgagcaacattrtatttttaattacagcctagacatattacattataccctctctcggactatttgacacaattctacttcaagttagctctgaaaagtgtattatgcaaatattactatagtttatggagagaacagaaagaggatgatgttattgatgttttccaaaat

SEQ ID NO: 282437 - DNA, 575 bp, Homo sapiens
aatggttgtggtttgcttaaaaaattgtaatatgataattgtcagtaaaattattcaatatatagagactgttctataagagagttatactccaatggtgtcaacaggtgttaagaacctgaaggaactgatctaacgggcaagaatcctttacggttataactaaaagcttagacattttagtggaaaaatttcragaaagtgtagtagtgatgaatgtaatctgacaattcaacaagattaattacgcaacaactaggtgaaaagccagtctaagtactggggtatgcagtgacaaacaacactctctacctcatgagctgctttgcaaagggacgagagatataaacacatttaataagtaaatataagtgtatctgaggaagatacttgctgtgaagaaaactaaattgggtggaaagggaaggctgaaaagaggggttggaatttatattaaaatagagtggttacgaaaagccatttggtgagggtgacatttaacaagtactcaaagatgagggagatggtcacgtgcatacacatacggggagaagaccattgagccagcctgccct

SEQ ID NO: 282438 - DNA, 575 bp, Homo sapiens
aatggttgtggtttgcttaaaaaattgtaatatgataattgtcagtaaaattattcaatatatagagactgttctataagagagttatactccaatggtgtcaacaggtgttaagaacctgaaggaactgatctaacgggcaagaatcctttacggttataactaaaagcttagacattttagtggaaaaatttcgagaaagtgtagtagtgatgaatgtaatctgacaattcarcaagattaattacgcaacaactaggtgaaaagccagtctaagtactggggtatgcagtgacaaacaacactctctacctcatgagctgctttgcaaagggacgagagatataaacacatttaataagtaaatataagtgtatctgaggaagatacttgctgtgaagaaaactaaattgggtggaaagggaaggctgaaaagaggggttggaatttatattaaaatagagtggttacgaaaagccatttggtgagggtgacatttaacaagtactcaaagatgagggagatggtcacgtgcatacacatacggggagaagaccattgagccagcctgccct

SEQ ID NO: 282439 - DNA, 515 bp, Homo sapiens
accaataacaagtaacaaggattcaatcagtaatraaaatctcccaacaaagaaaagccctggattgctttactgttgaattttaccaacatatgaggaagaattaacaccaattctcaaactttttttaaaaaatggaataggtggaaattttttaactcattctataaggccagcactactctgatagcaaaaccagacaaaaacatcacaacaatagtaacaaaaccacaggccaatatccctaataaacatagatgcaaaaaccctcaaaaaagaatactagcaaaccaaatctaacaacacatcaaaaagataacatataattatcaaatgggatttctcttgagggcaccaggatggttcaatatatgcaaatcaataaatgtgatacattacatcaacagagtgaaggacaaaaactatatgtgtatctcaatagatgcataaaaagtatttgttaaaatttaacattcttcaggatgaaaactctcaacaaattagccgtaggagac

SEQ ID NO: 282440 - DNA, 1022 bp, Homo sapiens
accaataacaagtaacaaggattcaatcagtaataaaaatctcccaacaaagaaaagccctggattgctttactgttgaattttaccaacatatgaggaagaattaacaccaattctcaaactttttttaaaaaatggaataggtggaaattttttaactcattctataaggccagcactactctgatagcaaaaccagacaaaaacatcacaacaatagtaacaaaaccacaggccaatatccctaataaacayagatgcaaaaaccctcaaaaaagaatactagcaaaccaaatctaacaacacatcaaaaagataacatataattatcaaatgggatttctcttgagggcaccaggatggttcaatatatgcaaatcaataaatgtgatacattacatcaacagagtgaaggacaaaaactatatgtgtatctcaatagatgcataaaaagtatttgttaaaatttaacattcttcaggatgaaaactctcaacaaattagccgtaggagacwaagaactgaaagccttttttctaagaactggaacaagagaaagatgcctacttttaccagtcttaatcagcatagtactagaagtcctagccagagcaattaagaaagagaaatacagggcatccaaatwggaaaagagtaagtcaaattgcccccactttgcagatgacacgttcttgtattttgaaaaacctaaaggctccaccacaaaattcttagaacttttaatgaaataagaaaagtttcaggatagaaaatcaacttacaaaattcagtaggatttctatacatgaacaacaaactagctgaaaaaaaaaaagaaagcaattccatctaaaatagttacaaaagtataaaatacctagaataaatttaaccaaggtggtgaaagagttctacaatgaaacctacaaaacatcaacgaaggaaattaaatgctgagcaaacaaatgataaggcaacccatgctcacacgttataataattgataaggttaaaatgaccat

SEQ ID NO: 282441 - DNA, 509 bp, Homo sapiens
taaatatttttgttatctgcttttaaatttgctaataaaaaaaggaatacatttctttagttagtaaatatatgcaaatttaaagttcctttgcctagatatatgatttgaattttataacattaaatttgggaggtagataggtaraaaaatagatacagatacacttgataccttaataagttgtcaatataaaaaaatgtaatataatctgctatcgtgatcacagtaaactttttagaccacatattcatgcacatttgtaaacttgtataaagggaaattcaacactgtcttttagcagggctttctctttcttaatatacttttcataatttcttatttatttattatatcatggataaatgaattgcttttctcataagtgaattcatcttatataccttaacatataaaacatataggctccaaagagctagtcagtttgacaaacaagaagaattcaaaataaaaacaaaaggcaggagcattcattagaaaaccagtta

SEQ ID NO: 282442 - DNA, 589 bp, Homo sapiens
ttaaccaaaataaggaataaaggagaagaaacagtttatgaaagaaggtcatataatgggtagatttcaataaaatgtaagccccatactaatyagaaagaaaaaaatgacagtagatacacaaatgaaaaagagaaaggaatcaaagtttatcactacagaaaacaaccaagccacaaagataaacaatgagaagggaagaaagaaaaaataatatatacaaaacaaccagaaaacaattaacaaaatcagagagtatgtcttcaagtgttaacaataactttcagggtaaacaagttaatttccccaattaaaaaacgtagattgactgaatggattaaaaaaggactcaattatttgctacctacaagaacctcacttcacctgtaaagacacacatagactgaaaatgaagggatagaaaatgatgttccatacaaatggaaaccaaagctaaacagaagtaactatacttatttcagataaaatagacttcaaataaaaaaatgtaaaaagagacaaagaaggccattacataatgattaagaagtatattaaggaagaagatataacaatagcaaatatatgt

SEQ ID NO: 282443 - DNA, 595 bp, Homo sapiens
ggaggggtctgctcagccaatcacagccactgccaacaccagtgagcactgctcaggaataagacagtcatcttaccactgctactgccatggcccacaccatgctgtctgcacatggggctgaaaaccagtacacccacctggctcaccactgccattaccagcatctgggcaagacaygtggaggcctgataattggctcaactggacaactaacaccagtgccagcatacaccacccagggggctaaaggacaggtatactcagcctactgctgcaaccacttgggcctgaagactgacctacctgcaatcccttttcccagaaaatctccaccatagcctccactaatgaccctaagccactgaggaaatcacagataccactaacattgtttgtaggcaaagaaatcatatagagactacactactgcacacattcagaatcaaagccaaatggccccaacaaacatcatagataaatttttaggaaaaagccctaaactcaaaagaaaattcaaaaaattcaaagaagacatagatgcatagatatgtagggacacagaaaacatgaaagagcaagaaatatgacaccc

SEQ ID NO: 282444 - DNA, 578 bp, Homo sapiens
gcggtgtttggttttttgtccttgcgatagtttacaagaactatcacaatgtgtgttctttacgtagagtttgggttcatttcaygtagcattaaggccatcaactattcaaagaagcagtttcattatatcagacatcaggagagctttgcttacttgtttcacaccttggtcctacaaaaccataaggacaagtgcagagattcccagccaagcatgtgccaccatgttgacaaggtgggttacaatgttctgcagaaacagattatgttattatgtcagttcttaatttttaaaaagtcagtttatatttataaagcactgtcacaataaaatcttgttgtaagagtaatttataatacattaagctctcttttactacaaaacttagttctgtgggactgactatattaattcacactggaaacacttacaaatcaacagcatgctttgattaataaaacgttttgttaactggaagaaaatataggaccttggccttcttctgaaaagtgagatttgaacttacttattcctgccttacaaatagagcttttctatagttccatagttatttt

SEQ ID NO: 282445 - DNA, 1032 bp, Homo sapiens
catttcatgtagcattaaggccatcaactattcaaagaagcagtttcattatatcagacatcaggagagctttgcttacttgtttcacaccttggtcctacaaaaccataaggacaagtgcagagattcccagccaagcatgtgccaccatgttgacaaggtgggttacaatgttctgcagaaacagattatgttattatgtcagttcttaatttttaaaaagtcagtttatatttataaagcactgtcacaataaaatcttgttgtaagagtaatttataatacattaagctctcttttactacaaaacttagttctgtgggactgactatattaattcacactggaaacacttacaaatcaacagcatgctttgattaataaaacgttttgttaactggaagaaaatataggaccttggccttcttctgaaaagtgagatttgaacttacttattcctgccttacaaatagagcttttctatagttccatagttattttcatatgctatttttattgaatgtttctrttagttcaccctaaatttactttaatttgttaatttgtagcttgctttgccataaaaacatttwaataaattatatttaataagtattttaaaatgtagagtcctataccagctttgataagaatattttaatatatacacagtaaaactgaattgtcttgtaaaatggtttttaaagaaaattatgctatattttaggccttatatttgatttttaatttgaattatcaccttcatcacaggttgctccaccatgtcctggaagacactgacaaatgttaggcttaatacattttccatggtttttgcaatcagggtcacaaagagctgtataaaataaagcccaagttttagacatatcaattaccaaatacaatwtatcatgcaaactaatgaatgatgttacctaccagtttggcagttagaaccaatgtaaccaggtttacatttgcagatgtttggggcaacacactccctactttttccacatggatatttacaaa

SEQ ID NO: 282446 - DNA, 1147 bp, Homo sapiens
atcttttggggtacacaagataacccagaatgttaaatagtataaaagtcaaagtacaataatttatttcattaagattttgaaatggctaacaaacacctgttgatcacctcatacacatgagcctcaaaacaaaggaaagcacagcccctatgcctgagcaatttagaatattgtcaaggatagagacatgtgagccattcactatgaaacaatcattgagaactactacaagagtgataaatataaaatgaaacctacagaaacacagaagagtaagtaattttccctataaagaagacaggaactaaatgtataagcaaaaattgggaaattatataaatgctattttatatgagaggcaaagaaccacaggtctaataattttacaaatgtgataaaatcagattttatgtccccatctttcttgactgctcarctagaaattaaaacatttttacacatctttttggcgggggcgggggggttcattatttatttcacctgccaaaatacttcatttccttattgcacttttttacttctttggtatggaaaaatctaacgggttttwatcttttggggtacacaagataacccagaatgttaaatagtataaaagtcaaagtacaataatttatttcattaagattttgaaatggctaacaaacacctgttgatcacctcatacacatgagcctcaaaacaaaggaaagcacagcccctatgcctgagcaatttagaatattgtcaaggatagagacatgtgagccattcactatgaaacaatcattgagaactactacaagagtgataaatataaaatgaaacctacagaaacacagaagagtaagtaattttccctataaagaagacaggaactaaatgtataagcaaaaattgggaaattatataaatgctattttatatgagaggcaaagaaccacaggtctaataattttacaaatgtgataaaatcagattttatgtccccatctttcttgactgctcaactagaaattaaaacatttttacacatctttttggcgggggcgggggggwtcattatttatttcacctgccaaaatacttcatttccttattgcacttttttacttctttggtatggaaaaatctaacgggtttt

SEQ ID NO: 282447 - DNA, 574 bp, Homo sapiens
tttccttattgcacttttttacttctttggtatggaaaaatctaacgggttttagagtatgaacacattttaagcagtgattagatacgtttttcttgttatgctttctattgcaaatttaggatttgattytgcactgtcttcatgcaaagctcttctgaaaggtcttaaaatataaaaaacacttaatgcttctcaaagcattaagattttatgtaaatcaaaccaaaaccagaaaaagatagaagaaaatgaaccaaaaacaacaaaaataatccttaacatagttggcaacaagtgcaatgaaagatttttgaaaaatgtgaggacttcgtgaaacataaaaagcatatgggttcagactaatagaaacaagagtgcaccaaatatagccccaaacataaataagggcagtgaggtaagcacagttgtgtcaaaaaatacagcaaaagtgccctggactagcagtccccagaagaactgctttagatgatctgggccaagtcagtgtcccattccctcagcctctgtacacagaagggactccttccagaaccaaattgttttaagtgaa

SEQ ID NO: 282448 - DNA, 574 bp, Homo sapiens
tttccttattgcacttttttacttctttggtatggaaaaatctaacgggttttagagtatgaacacattttaagcagtgattagatacgtttttcttgttatgctttctattgcaaatttaggatttgattttgcactgtcttcatgcaaagctcttctsaaaggtcttaaaatataaaaaacacttaatgcttctcaaagcattaagattttatgtaaatcaaaccaaaaccagaaaaagatagaagaaaatgaaccaaaaacaacaaaaataatccttaacatagttggcaacaagtgcaatgaaagatttttgaaaaatgtgaggacttcgtgaaacataaaaagcatatgggttcagactaatagaaacaagagtgcaccaaatatagccccaaacataaataagggcagtgaggtaagcacagttgtgtcaaaaaatacagcaaaagtgccctggactagcagtccccagaagaactgctttagatgatctgggccaagtcagtgtcccattccctcagcctctgtacacagaagggactccttccagaaccaaattgttttaagtgaa

SEQ ID NO: 282449 - DNA, 629 bp, Homo sapiens
aggttatctcttcattctgttggttgttttctttgctatgcaaaagctttttaggttaagtctcttttgtctatttttgtgctgttgaggtcttatcctcaacatctytgcctagacaaatgttctgaagtgtttccctgatgtagtagttttatattttcaggtcttatgtttaagtctttgatccatcttgagctggtttttgtattaatatatggtatgagatctacagtgaacctaggggtccaggttcatgcttctgcattagagcttcatggagctctaattttcccagcaccatttatagaagaggatgtcctttcccagtgtatattcttggcaccatgaaaggaaaacaagtcttgggaccccaaaatcactaagctaaagagaaaaggcaagctgggaactgcttagggcaaacctgcctttccttctattcaaagtcatccctcttcttactgagatgaatgcatatccaattgcctcctttagaaaggaggcaaccatttgtctcttatctacctatgacctggaagccccctccccagtttgagttgtcctgcctttgcttagagttgtcctgccttttctgactgaaccagtggtcatcttacatatattgattg

SEQ ID NO: 282450 - DNA, 548 bp, Homo sapiens
gttctttttgctcaggattgctttgactattcarcttcttttttggttctatacacattttagtatggttttttttgtatttctgtgaaaattgacactggtatttcaatagggattgcattgaatatgtaaattgccttgagtagtatggtcattttaatgatgtcaagtctcccaatccatgagcatgtgacgtctttccatttctttgtgtcgtcttcaatttctttcatcagagttttatagttttcctcttagaggtcttccacctccttagttaaaaatattcctgtatattttatttatttttttagttagtatagacgggattgccttcttgatttctttctcagctagttcattattggtatataaaaacactactaatttttgtatgttgactctgtatcctgtaactttactgaatttatcagacataagagctttaggtttttctaaatataaaatcatgtcatctgcaaagtgagacaattttacttcctcttttccaatttggatgccttttattttttttctcttgcttgatt

SEQ ID NO: 282451 - DNA, 1116 bp, Homo sapiens
gttctttttgctcaggattgctttgactattcagcttcttttttggttctatacacattttagtatggttttttttgtatttctgtgaaaattgacactggtatttcaatagggattgcattgaatatgtaaattgccttgagtagtatggtcattttaatgatgtcaagtctcccaatccatgagcatgtgacgtctttccatttctttgtgtcgtcttcaatttctttcatcagagttttatagttttcctcttagaggtcttccayctccttagttaaaaatattcctgtatattttatttatttttttagttagtatagacgggattgccttcttgatttctttctcagctagttcattattggtatataaaaacactactaatttttgtatgttgactctgtatcctgtaactttactgaatttatcagacataagagctttaggtttttctaaatataaaatcatgtcatctgcaaagtgagacaattttacttcctcttttccaatttggatgccttttattttttttctcttgcttgattwtgtgctgttagtgtatggggggttctctcataagtgatgagatacttttctcatgctgcttttaaaattctctctctctgtttttcttttcttcttcttttttttttttttttttttttttgagatggtgtcttgctctgttgcccaggctggagtggagtggtgcaatctcagcttactgcagcctccgcctgccgggttcaagcaattatcctgtctcagcctcccgagtatctgggactacaggcatgcaccaccatgccaagctawttttttgtattttagtaggtacagggtttcaccattctggccaggctggtttcaaactcctgacctcatgatccgcctgcctcggcctcccaaagttctgggattacaggtgtgagtcaccatgcctggcctaaaattctctctttgacttctgacagcttgactgtaatgtgtggtagggaagacctttttgaattgtatttgtttgggaatatctgagctttttgtatttgtatgtctaaatccctggctagacttgtgagattttcagctaccattttgtttaatagattgttt

SEQ ID NO: 282452 - DNA, 587 bp, Homo sapiens
aattttttttcattggaatctgttactagataattaattctgttccactgaagatgtcatattctcatacttttttatgtttcttacattcttacattgacatctgaacatctggtgcaaccatcacctctttcatttttttttttttgaatttctttttggaggagaggacttttccctgaaaatgtgtttatggttttgttacggtggggcaccctggctttgattgtgggtttgtgaagtagtgtagtctctgtgtgatttctttggttgtaaacagtgtcactagtgtctgtgacttcctcagtggctgagggtatggttgttagtagaggcaggctgtggtgaagttttgctgtagacagggacatttggttgrccagttctcagtacccagcattggcagctgcaggtgggggatgtcagtgggactccagggatgtgtagatggatgcaggggctgttgggccttagggcatgatgcagtttggtgggggctgggttctcaaaatagtaccttgctgtagctgctaaggactcaaggggtgtgcaagacccagcatgagctccctctctggagcaatgcc

SEQ ID NO: 282453 - DNA, 592 bp, Homo sapiens
ggcagtgactttctcaagatcgaacatcacttcaagtgatccttctccaacattagcagtcaattataaactaatcraggctcaccctactcttctttctttcccctccagcttgctctcccacacaccaggagtacgcagccacatgagatgcacatgcatggtaaaaacgtaatgaacgtgtgtttcaggaaagagatgtagaattgaattgaatcagcaatggcacactcattggccatccttgggcactgcatgacattgcatctttagtatttgtttaaaaacataaagactttctataacacaccacctaaaccagaactgaaacctttccaccaattaatatttatcttatgttcctccatatgtcatccttctgtctcctcttccccaccaggggtaaccaacatcctgaatctggggttcatcataatattgcatttatgtgtgtatataacaatgtatcatttagttttcttaatctttaacaccacgttatcatcaaactctatgtatcagacttatttttcccatttagaattatgttgatattatttatccatactatgattaaattcattcactttca

SEQ ID NO: 282454 - DNA, 1225 bp, Homo sapiens
ggcagtgactttctcaagatcgaacatcacttcaagtgatccttctccaacattagcagtcaattataaactaatcaaggctcaccctactcttctttctttcccctccagcttgctctcccacacaccaggagtacgcagccacatgagatgcacatgcatggtaaaaacgtaatgaacgtgtgtttcaggaaagagatgtagaattgaattgaatcagcaatggcacactcattggccatccttgggcactgcatgacattgcatctttagtatttgtttaaaaacataaagactttctataacacaccacctaaaccagaactgaaacctttccascaattaatatttatcttatgttcctccatatgtcatccttctgtctcctcttccccaccaggggtaaccaacatcctgaatctggggttcatcataatattgcatttatgtgtgtatataacaatgtatcatttagttttcttaatctttaacaccacgttatcatcaaactctatgtatcagacttatttttcccatttagaattatgttgatattatttatccatactatgattaaattcattcactttcawcaagtacatctattgattgtctttagtgtttttgaawactgagtatgagttgttgtggacaaagcaaaacggttcacatggttgtcggacagcaccttggccaggattctgtgcaggtcttgcttggataagagggtttcttttgccttgaagtgtcttgtaggaaccgcaaactcaacatatccaaacatgaacccattttctttcatctcaaatctgatgcttcctggagtttccattcaaataaagctaccaccatctacagtgctgcccagacagaagtctagagtcctcttctgtgtctgccttctgcttacctccatccccaagcagaagcattctcagtgactgggtctgctgaaatgaccttggtgctttttctctgacaggttcctatttccccatctccactgccaacacatgccagacacaggaactggcttctaaagcttcatctctagtcctaaaaaagggatttttgtggcgatgatcatcatgtccaacatttattgaacctgtgttgcgccagcactttcatatgtatatatatgtacacacaaatatatgtgtatttcacttattttatttcacttatgaaacacttacatagtatttactctatgccgaatacc

SEQ ID NO: 282455 - DNA, 632 bp, Homo sapiens
caagtacatctattgattgtctttagtgtttttgaatactgagtatgagttgttgtggacaaagcaaaacggttcacatggttgtcggacagcaccttggccaggattctgtgcaggtcttgcttggataagagggtttcttttgccttgaagtgtcttgtaggaaccgcaaactcaacatatccaaacatgaacccattttctttcatctcaaatctgatgcttcctggagtttccattcaaataaagctaccaccatctacagtgctgcccagacagaagtctagagtcctcttctgtgtctgccttctgcttacctccatccccaagcagaagcattctcagtgactgggtctgctgaaatgaccttggtgctttttctctgacaggttcctatttccccatctccactsccaacacatgccagacacaggaactggcttctaaagcttcatctctagtcctaaaaaagggatttttgtggcgatgatcatcatgtccaacatttattgaacctgtgttgcgccagcactttcatatgtatatatatgtacacacaaatatatgtgtatttcacttattttatttcacttatgaaacacttacatagtatttactctatgccgaatacc

SEQ ID NO: 282456 - DNA, 559 bp, Homo sapiens
tgggcatgcacttttgcaaagtccctgatcaaatcacttgccccttttaaaaattagagttatttgacttttttcttattggacaaatygcttgaacatgcactttagaagaaagttatgcaaagagccaataaacccactaaaagatgctttcttcttttaccaacctcacaaacaaaacaaagatgagatacatcttgaataggtctttgccaacagagtgccctgggccctgctctctattcatgggttttattggaatcctttttgagctagagctagagctgaaggtagatgggcatgagtgggtctaaacccaatgcccagcttctagaaagctttctcttggcactcctctgcccttccaaaatggcaacttctccctaagcctactgtggcttttctggtatttggaattggcacaaattatgatgcaaaattgccattttcagcattcagggttcttttttttaccactcctacttagaattttctcatgtaatcagacagagggaacattattataattttctcatgtaatcagacagaggaaacatta

SEQ ID NO: 282457 - DNA, 562 bp, Homo sapiens
cttgcttcctctcgagcctcacctcctctgtcctggctcagcatggtcgcttctcttctgcttgttggcctcaatgtcctccttggcctcctcatctctgatctatctccattctctccatttctccctcagcagccattatgacctatttatttgagacagggtsttgccctgtcacccaggttggagtgcagtggcataatcatggctcactgcagcctggacctcctggactctatctatcctcccacctcagcctccctcgtagctgggagtacaagtgtgtgccaccatgcccagctaagttttgtatttatttttgtagagatggggtctcactatgttgctcagactggtctcaaactcctggattcaagaaatccactcacctccgaaagtgttgggattacaggcatgaaccactgtgcctagccattatgacatttatataacacagatcctatgttccatatcgttgctcaattaaaacccaatacaattccctatcttcccaagggactgttgtaagctccctgatctacgaggtcttcatgcctccttg

SEQ ID NO: 282458 - DNA, 562 bp, Homo sapiens
ctctgtccctctggctacaaacagccctcaggccttatcttgactgataatttgcagcctgttgagctcatcctgaagctgacaggtttttccctaaatagcacatttttaattgattgcactcctaaacttccttttactttccactcctaccttctgggtctacagcctttaccacatcatccagggcatggtcccacttcctgaccttactttgctctcactatagtatcctgacaagaatcagacattcaggcaggcagatctacgtttaaattccagatccgtcacttattagttgtaagatctgcagcaagttacttaatctccttgagctccgtttctccatttgtaaaacggagatagtaatacctccctcatggagttactatgagaattaaatgacatacagcatataagrcacctagcccagtgcctgcacatagtaggagcccagtaaatattcatgaggaacaagaagcataatttgtaggtagcactaatgcgcagactatgtgccctctattatgtgtatcagatgctccagaagaagaaatgtaag

SEQ ID NO: 282459 - DNA, 636 bp, Homo sapiens
ccccaaacaggtggaaaacatgctatatccaaagctcatctccttgaattcagcccacttcgacttccagggctgcaatttctcagagaagaatatgtatgcccgagaccgtagagatggccagtctaaagagggaagcggccgtgttgcaatctacaaagcctcagggataatccacaggttgggtggaagctgagatatagttgatgaaatagcttccctaaagaaaacaccgtagctgggtgtggtggtgcatgcttgtaatcccagctactgaggaggctgaggcaggagaatcgcttgaacctgggaggcagaggttgtggcgagccgagatcgygccattgcactccagcctgggcaacaagagcgaaactccgtctcaaaaaaaaaacaaaaaacaacacccagttcagggtgtttgagagggagggaaccaccttagtcttcttaaaagagaacctcacaattagcattattgtctttagtctaggactctaccttggggggactctctgggtatatggtacagtaccaaggtcagctgctagttgctatggattattagcactttcatttgtgttcacttttttccaagtgattgcctcctttgaccacctaagttgtcctctatgg

SEQ ID NO: 282460 - DNA, 565 bp, Homo sapiens
ccataggaggttttttcccaataccagagatacaaatttataagaaacgatagatctcctcattcacatcagttctaagaaggatcaacctggcctacattttggcctaccaattaatgtacacgtagaatgaaagttgccagcaaggttttgttaagcaagtagctggtttgaagcaggacacctttaaatagctcctgatgcctgcagagtttattgctggctatttctgcctttaagagaaagagagaagacagaaaattatctagaatttatcactattactatcagactctgtttgaaatctaaaacacacacagaaattcgaacgctaggaatgaaatccagttctttcagttcctatttgatgcttaactgttttatatgtatgctcgtacaaatggatttttaagggatctgactttgatcaacatgatctatttayttatttaacaaacattcacataatgcttaataagcaccaagtattcttttaagttctttacaaataataactcaattagcacttttaaagacatacgacaatggaggaacagagagatta

SEQ ID NO: 282461 - DNA, 631 bp, Homo sapiens
ttatccatcaggcagtgccaggcatttttcacacattatctcatttaaccatcacaactacagatgagaaaaaccaaggccaaggtcacatagctaggaagtgttggacccagtgcttgtgtaactccagcagggaggagggttgatgcactctctaaataagggctcattcatttcaaggcatgtaattaaaattcattcctcagcaaaattgtgtatgacttacataggtctcttgtaaacattcaaaaccatgtcaaaggtttcctgtattgtgggaatcagtcttatttcagtgccctgttccacttctagctagtttcaaatgaataatgaatgcagttggtaacaattaccaactttacagcaccttcctgtctccacctcacagccggggcagggcaggcttgcttgctccaatctaaactctagccccrcaactcacagagttaatccaccctcttagactcctctggtttgcccacttaccttggggaaagtgcagaaggatcagatttttttcaacttgcttgggtgattttactccaagatgttaagaatgcaaagtacaaggtgctaagaatacaaaggtagataagatatggtctttgagtgtgaggccctcctatgg

SEQ ID NO: 282462 - DNA, 425 bp, Homo sapiens
gtggttggctcagtgaaaaagtgaagggacattctggtgacatgtgggaagggactgggctccccatatggattctgaggaagataattatggaggtgggtggtgggggaaagggagcctctcctcccgctgtgttggagagaggccctcagagtgcatgtgtcagatgctacagggtctattccaaaaaggggattccaaggggagggcacctcaacaagtcccctcccctccacctgaacaaaacccaacaaaaacaccaggggcaggcagaaacagcttctggaataggctgtacacattgaaaatggccatgtaatggggtgctgatmactcctgcaactgcttctagtaaattcctctgcacagctccgtcccagcctcccttcccaccaacttagtcaatacagctgccccactctgct

SEQ ID NO: 282463 - DNA, 583 bp, Homo sapiens
catgctgcacaactgaagccatttacacagctcaccatgcaaagcagccacaggggctgatagcaggggacttaactaggtgggaatatgtggaaagtcaggtgcaggagtcaacctgtggaaacggaaaagctagggctgctttctttccagggccttacactgacattaccttgcctggacattttgtagtcccgtttcatgaaagccaggacctaagcagaagtatggctccctgccagtccctaccaggaaggaacaaacagcttgcagtacaggcctcaagccaggtggggcaggagcaaaagtgcattgtgttgcctgtggaattaaatggactctctrtaaacacagcctcctgccactgttcttttctctttccacctagtcagcctacctgagaataattagcccttggcctataattaggtagaatgattattttactactgtttatccatttcactagataactagcttcatgaggcagggaccatgtgagacctagcagtatctggggctcaacaaataattgcagaatgaatggatttctaaggcatatttgttgctgtccatccttaat

SEQ ID NO: 282464 - DNA, 558 bp, Homo sapiens
tttaagggttaaatgaggtcatagggcagggccgtgatctgctaggattagtgtcctggttaggagacaccagagagctcgctttctctctcaggcacaggaacagaagaaaggccgtgtgaggacacagtgagaaggcagctattgaccagccgggaggagagagctcaccacaacccgacccgcctgcaccctgatcttggacttccagcctccagaactgtgagaaaataaattcctgtagtttaagccacccagtctgtggtattttgttatgacagcctgagcagactaatacaagcatctagccttgagccatacagaaggaggggtgagctggaccccagatctaaagcagctcagtagagacaccgcagtgtgagtgatgcccagcctccaggcccaattgtgctgaattccagctttccacgtgggctgctgtcrgagcagcctgcagggcttcagcctcagggttcccaaggtcttgggacctctaagcccgcactggcttgtttggataatatcgtagcacagttgcctaacatgctccctacccag

SEQ ID NO: 282465 - DNA, 527 bp, Homo sapiens
gcagcatggtgcatgaaaaaggtggtgaaaaggactccacagcacccaactccagctctgcctctcacgacctcccaggcatgagagatcctctgggcaaaggcggcctctctttgcctgagtttcttacagtaaaatagaagcgctttttggacatcatyatgtgtatggctcgtgggcacagagcctcttgacagatgactcatggaaggggaagtgtaaatggccaacaaacatgtgaaacatgctcaacattactaataattctaaaatacctatgctgccggactgttgtgaaggttcaagctaactcaagtggagcatccgcacagaacctcacacgtgtcaattcagtgagtgacggttataggtcagaggttgttaatggaattttgacagccggggagttttaaataatctttgacatggggccggtaacaatgaaattaggtaaggagaaggggatggggactgtgatattgttaaataagtaagttgtgtgagggactgattttgtggatgccata

SEQ ID NO: 282466 - DNA, 582 bp, Homo sapiens
tgaatgactagtaagtcaatgcagaaattaagaaggaaattgaaaaatttattgaaaaaaagataatggaaacacaatatgtcaaaatctatggaatataacagagtactcagagagaagtctatagctataagtgcctacatcaaaaaagaggaaaaacttcaaataaacaatctgatgatgtatcttaaagaactagaaaagcaagagaaaaccaaacccaaaaatacttgaacaaaagaaataatagaccagagcagaaataaataaamgtcaaatgaaaaaaaaaatacaaaaatcaatataacaaaaacttgttttttaaaaaagttaaaattgacaaacttttagctggacttaagaataaaagagagaagatacaaataaataaagtcaaaaatgataaaggagacattacaacagacactgcagaaattcaaaggattattagtgctgctatgagcaactatatgccaataaattggaaaatctagaaaaaatggacaaattcttagacatatacaacctaccaagattgaaccagaaagaaacctaaaacttgaacagaccaataacaagtaa

SEQ ID NO: 282467 - DNA, 574 bp, Homo sapiens
tctgactttctttcatcattttctataagcattcagttccccaaatactctttgaagcaattttatcatcctggttgttccctcattagtgagttgaataaatctttgacttgttcttattctgtattcatatatgagttatgtcattgcattttatggcaattttacattatgtactaaattaagttgcccagttttcaaaaatcttcctaagagttgtaccataattaatttttctcaactctatagtattttccacaaaaaaactatactgaaattaaaaagaagattsatacatttcaaaacaactgctttctcctggcgcaatgcattaagtgtaagtgatgagcagagagcctcctaggcatgtaccccttcctgcatctgtttcttcagaaagatgtaaatgcaatgtcctatttttacccacaaacaagtccacgatgagatattatttatgaaatggtgaaataaataacctcaatttaactgatgtaatagcaaatgtgattaatggaatccatgcaaaagtttgacttatttatttgccttaattgaatgcctaatcatgact

SEQ ID NO: 282468 - DNA, 1174 bp, Homo sapiens
tcatgaaacaatgagtgttcagggtatgggttgggggataaatgtttttggagcaagactgtcrgaagttttagagatccaatttgaagttttaaaaagatgattagaagagtgctataaatagatggcttgaaagggacagagccacaggtaaatttcttctgcagctcatcagttacagtgtcttgattgattggtgatgcatctagagtataagatgagatcagatgagtttatgagccaagtatttgctatcctaaatcaatgtgattctatgatgaccataagatcttgtgagtctgtcatgtttttccgatttgctctttacttgtgcttttagcctctctcatcacatctcagtttgaaacccaagatcccttaagcgtcactccatgctccaactgcactgactttctggagctagaggggttttccaaacccagtcttgtctattgtccactcaactgaagtctactcagccttcaaaactacatcatcattaatctgtcacagaagtagagtaaaaacaagcaaaactatatcaccatggcttaaaaatagaggtacagtagtccwtcataccaaatgactgtttccccctaaaattaagaacaaagcaaagatatctactttcacaatttctattcaaaatcccaatacatgtcttagccagcacaataaagtaataataaaaggcacccagaattgaaagaaataaataaaagtctccttttttagatgacatgattgtgaacataaaaaatctcaaagaatctattaaaaagctattataatgactaggtaggtttagcaaagctgtaggatacaggttaaatagccccaaatcaatgacaagtttatatactagcaatgagcaactggatattaacattaaaagtataatttacaatagctccaaaatatgaaatactttgatataaatcttacaaaatatgtgtaagagctgtatgttgaaaagtacaaagtattgatggaagaaatcaaagacctaaataaatggagagctatatcatcttaataaattggaaagtwcaattttattaagatgagaattctctcaaagctcatctatagatatatataaatgtgtgcaaattaaacagcataggactaagtaatcagtgggtcaaagaggaaatcagaaaattagaaa

SEQ ID NO: 282469 - DNA, 408 bp, Homo sapiens
  misc_feature (1)...(408): n = A,T,C or G
ccccacagttgagagccagtcaagcatatttgtccaaatagagcctcagaagggcctcaccaaatcaaattcttcctaattgtagagaagtctgcgctaattgtcctctctgtctccacatccgggactacttgagagggttgactgcacaacatgatgggtatagcacgggctctgaggacaagctgcaaggtgcaaatgctgacccaaccacataccacatgtgttctttatttctaygtaagcacagttacttgcagagagacctatagtaggccaaaggaacacatctaaaactatgagtctttttcattcttctagccaggagatcataaatcatttgcagaatacaaactaaagtccagtcctaattagagaagagcagaaacacgattatctttanaatcc

SEQ ID NO: 282470 - DNA, 517 bp, Homo sapiens
cttctttctttataattttgatctctgtggatctggtgaaataatatataatcaatgattttatagttaaatacatagttcttttcaaaacatatttttaaaaaacagtgctggtctacactctcttacctgtcctttataacatgtcaaattccatgacaaaatcttaccagatatttatattaacacatcttccaaattatttaaaagatcattgctttttcaatttctaaagtgagrgttttggcactcttcctgtacttcttatagggaagtgcttttttcttgcctctgacacagctgagatcaatgaaattataagccttttattgaaagattatttatacagaagtcagaactatcttagcccttgacaatgttaaataaaaatccactaactgacagttgatattccacattatgcaaggtgagaaaccagcctgtaagaccaaagcaactgtgcatgcaggtaggaaaagagttaaagtatgcaaagaaggtgctcttttttggcctc

SEQ ID NO: 282471 - DNA, 538 bp, Homo sapiens
acagaccataaatataatttgaaactagagaagaaaacaatgacatagtctaacaggaaaggctttgttgaggaggtgggactttaattggatcttgggggatagagattcttcagtgtgattccaccattgaatatttcttatcttttttgtcacacaaagagtaatgttttttttcatttagatccctctttcaatgtcctagagccatttatgrgccacttgaaatagtgtctacacatgacagataaattgtttttcttgcctgacctaccctgagtcaggataggctttgagaagcgtaacaattcctttgcttatccatctgatgcacattgtgccacactgtgtcaggtatcaggaagatttgcatgagaaggagtccagagaagttctagatgatcacttttggatttgccaaaagtgacccaaaaagactccatggggcaagcaataacccaggctctgaggtcgctggatctgtatctaatttccaactcctccagctactggtcatgtgatcttgagaaaattactt

SEQ ID NO: 282472 - DNA, 496 bp, Homo sapiens
ctggctagttgtgtgtgtgtgtgtgtgtgtgtgtgtgtgtgtgtgtgtgtgtatgttttagtagagatggggtttcgccatgttgcccaggctggtctcaaactcctgggctcaagcgatccacccacctttgcctcccaaagtgccaggattacaggtgcaagccactgcgcccagcytaaatgacacaattttgaccctgctagtagtcacgggctctgcaggctgaagtatgggacatgctccgtgtactcggaatagagattcttcccgccagctgtactcttacattccctgccttgtcacctttggcaatgaaggacaccagtaaatacaacaccctcaggaaagcataatgagggctcatggctgtacaatcaagagaagagacaaagtcacaagtgtaggacagaacaggcaataggtttcagaacactgaattttatgattaaaaagggccagtcgctaatgaaactcagtgattatgacatgattt

SEQ ID NO: 282473 - DNA, 573 bp, Homo sapiens
caaccatcacacatcagttttaagcagtcaatgtgctcagcgaagccacagtatgacattaccagaactggacgaaaatgctgtcatctggatttgaattatgtttgaacactgrctataaatgtgaattgtggtatagatcaaatggattcatttcacatttgctgtatttgcatacttacatgatacctgattgtttttaatttattctatctgattaagaaaaaaatgctgtatgatttgggttctagtaaatgatttagtttgttaatatacatgctatatgaaaaaaatatactgatatcttctatcctaagtgaaagatataaaaagcaaaaggacactgaaacccagtgtaaaccttgagtccctactgaattggatacagcaatgggaatggctgcagcggcatcaagaacatgaatattatttgagtaaggctttacctggaaataatgcagaatgtttgactcatggaggaattcattttggcattaaaaaaaagaaaatatatgatagaacttctacctattaatatttgttttagagtgataaaatagtccacaaattaag

SEQ ID NO: 282474 - DNA, 599 bp, Homo sapiens
tacctgaggggtgtcatgaacaaggcagacacaactttggagatgtgtgcacatgaaacacacatatctctgtatgtgtatgtgtatgtgtgtgtgtgtagtctctctctctcgctatgtgtaataaactgactttatattaatgctgtcagtataatatatattatattaatatatattgtcagtttattttgataaaggaaaagaaagtgagagagaactccaaatccaaacacaaccaggaatagaaatccagagtgaacacagacaacatgaatggcttttgggtgtgcccttttcatccctttgtagtcattgtggttacctcccaaatgtagctctcctctctttaaaatcgccctatttagatgcaygtccacatctctccctgtgttttcttcaaaataatcttcactcagctctaaggcagagcacatcatttgttagcagatctcataggatgtgtgtgtaggtgtgtatatagaaagagatttattataaggaattggctcacatgattacagaggctgataaatcccaagatctgcagtcagcaagctggaaattcagaaaagctgatggtgtaaatttcagtccaa

SEQ ID NO: 282475 - DNA, 406 bp, Homo sapiens
agttctgcagattgtacaagaagcatggtgccagcatctacttctggtgaggagctcagaaggtttctactcatggcagaaggcaaagagaagctctgtgtgcaggtcacatgaagagaggggaatcaagaaataaagggaggaggtgccagtctctttttaacaatyagcttttgcaggaactaatagagtgaaaaatcactcatttaggatggcaccaagccatttatgagggatctgccctaatgacccaaacacattaaatttcaacatgagatttggagaggccaaccaaaccaaactacagcattccacctttggctccccaaatctcttgtccttctcacatggaaaatacaatcatccctttccagtagtccccaaaagtcttaccttgttccagcat

SEQ ID NO: 282476 - DNA, 657 bp, Homo sapiens
gggcaagcaagtggttacgaactaagaccatgaggacgcagcaagcctggccctgccacagttgagtcatgaccatcgtcccgggcagaggagacttgcagtcagaagaaaccgtgcagggaagatctccagagaaacatcctgggtgcagtgctgaaaggggacagcactacaggaaaacatccaggagaatgtccagaagatggtataatagaggaggagaaggagagagaaagcttcagggagtcagtactcagaagcagccccctgtggtgrgaaaaacacgggccctgggtcaaaccagagaccaattccctggagccacatggagtctccaaattgtgggggaccatgaatgctttctcaccaagatgatctgactatgaaatgagatgaagtacataaagcaccttgcacagtgcatggcccactcgagatgtgttccctgaagtcatgcatttaatacatatttaatgagcacctactatgtaccaggcagtgtcctgagaactaaaggtgcagtagtgaatgaaacaaaatctctgtcttcaggaagcttatatttgagaggaaatggcaaaagatagataaacaaatacatttactagttagaggcagggagcaaaaagagccataaaaatataagacaatgtaagt

SEQ ID NO: 282477 - DNA, 638 bp, Homo sapiens
tgttgcctccttttttcactgacttgctagaaattcaagctcctcctcacgtttctctgggctctttcttttttctcccctcagtctgaagcttcccaacttttctcaaccccagtccatagacatcggcttttagagtgcacaccagcagttgaggctggcctatgcatcgcctcagcccaccccagaccacccagtgttcccattgagtttttatgctcttcctgttctcttagagatgcccattaggaagcttycagaagggggccattctggatgctgaaagatctacccttgaatgaggtgctgctgtaagtcaggggagtagactacagctcccacagcctcacacaatgcttgggtgctgttggggctcagaaatcaatacctcaaaatatggccctttgacatgctgaactgaagaatcctcaaagtctgtctggctttcccctttctcagctccccaccaacacctcctgggtgttaatcctctgtctctcccaaagcccaggatgaagttgttctctgaagttccctaatctgtctaaagtctggaccttcctaagaagaaaacatgatccctggtcccttccctgggctttcattaactgaactcacatgtcaggaagaaagtctga

SEQ ID NO: 282478 - DNA, 638 bp, Homo sapiens
tgttgcctccttttttcactgacttgctagaaattcaagctcctcctcacgtttctctgggctctttcttttttctcccctcagtctgaagcttcccaacttttctcaaccccagtccatagacatcggcttttagagtgcacaccagcagttgaggctggcctatgcatcgcctcagcccaccccagaccacccagtgttcccattgagtttttatgctcttcctgttctcttagagatgcccattaggaagcttccagaagggggccattctggatgctgaaagatctacccttgaatgaggtgctgctgtaagtcaggggagtagactacagctcccacagcctcacacaatgcttgggtgctgttggggctcagaaatcaatacctcaaaatatggccctttgacatgctgaactgaagaatcctcaaagtctgtctggcyttcccctttctcagctccccaccaacacctcctgggtgttaatcctctgtctctcccaaagcccaggatgaagttgttctctgaagttccctaatctgtctaaagtctggaccttcctaagaagaaaacatgatccctggtcccttccctgggctttcattaactgaactcacatgtcaggaagaaagtctga

SEQ ID NO: 282479 - DNA, 608 bp, Homo sapiens
caatacaatacagcaagaaaaatagatggcataaggttgtaaggaggaaaaaaagctccctctatttgcaattgttgattgcatagaaaacgataaagaattaaccaaaacaaccactagaagtaataagtgaatttagctatgttgctcgacacaaggtcaatatataaaaatcaattgcatttctatgcaatagcaatgaaaaaattggaaatagaaaatgttaatrtaatttataaatgtataataatgccaaaaaatatgatacttaggtataactatagcaaaaatgtgaaagacctttatggtaaaaattataggatactggtaagagaaatgaaagatatcctaattaaatgttaagatatgccttgttcatggattagaagacttaatattgttaagaattcatttctgtctaaattaaaacatatatacaacccaatttcaacgaaaattctggcagaatttttagaaataggaaaagtgattctaagatttgtgtggaaaggcaaaggaactagaatagccaaaacagattttacaaaatagaaccaactttgaggaattttaataactgattcaatactcagttataaaactacatt

SEQ ID NO: 282480 - DNA, 608 bp, Homo sapiens
caatacaatacagcaagaaaaatagatggcataaggttgtaaggaggaaaaaaagctccctctatttgcaattgttgattgcatagaaaacgataaagaattaaccaaaacaaccactagaagtaataagtgaatttagctatgttgctcgacacaaggtcaatatataaaaatcaattgcatttctatgcaatagcaatgaaaaaattggaaatagaaaatgttaatataatttataaatgtataataatgccaaaaaatatgatacttaggtataactatagcaaaaatgtgaaagacctttatggtaaaaattataggatactggtaagagaaatgaaagatatcctaattaaatgttaagatatgccttgttcatggattagaagacttaayattgttaagaattcatttctgtctaaattaaaacatatatacaacccaatttcaacgaaaattctggcagaatttttagaaataggaaaagtgattctaagatttgtgtggaaaggcaaaggaactagaatagccaaaacagattttacaaaatagaaccaactttgaggaattttaataactgattcaatactcagttataaaactacatt

SEQ ID NO: 282481 - DNA, 617 bp, Homo sapiens
taatacattcaaaagtagccatggataaatgggaattgagaaagtcacatgaaggcccaggtaagaygcatgctcagaaagggcctgagaagactgttttcatcttggactgatccccaggctcagggtgaggattgcagccgcacagagccaattggcagagactggaagaggtggctgttttctcaaatgtccaatttttaacaaaaataacaaggtgaagaaacaggaaaacataacccactcaaataaatacaattaattggcagagataccatccttaaagaggaagaattggaattactagacagagactttaaaatatcttccatagtatgttcaaaagcaaaaggaaaaaatgaaccaaggactaaagaaaatcaggaaaacaatatacgaacaaaataagaataccaacaaagagacaggaattatgaaaaggaaccaagcagaaattctggagctggaaaacataatgactgaattcaaaaattcactggaaggattaagtcaatcttgacgcagaagaacaaaattagagaatttataatatcaggcttcaagacttattctaaagctacaacactcaagacagtgtgcaagtgtataaaactgaa

SEQ ID NO: 282482 - DNA, 617 bp, Homo sapiens
taatacattcaaaagtagccatggataaatgggaattgagaaagtcacatgaaggcccaggtaagatgcatgctcagaaagggcctgagaagactgttttcatcttggactgatccccaggctcagggtgaggattgcagccgcacagagccaattggcagagactggaagaggtggctgttttctcaaatgtccaatttttaacaaaaataacaaggtgaagaaacaggaaaacataacccactcaaataaatacaattaattggcagagataccatccttaaagaggaagaattggaattactagacagagactttaaaatatctkccatagtatgttcaaaagcaaaaggaaaaaatgaaccaaggactaaagaaaatcaggaaaacaatatacgaacaaaataagaataccaacaaagagacaggaattatgaaaaggaaccaagcagaaattctggagctggaaaacataatgactgaattcaaaaattcactggaaggattaagtcaatcttgacgcagaagaacaaaattagagaatttataatatcaggcttcaagacttattctaaagctacaacactcaagacagtgtgcaagtgtataaaactgaa

SEQ ID NO: 282483 - DNA, 617 bp, Homo sapiens
taatacattcaaaagtagccatggataaatgggaattgagaaagtcacatgaaggcccaggtaagatgcatgctcagaaagggcctgagaagactgttttcatcttggactgatccccaggctcagggtgaggattgcagccgcacagagccaattggcagagactggaagaggtggctgttttctcaaatgtccaatttttaacaaaaataacaaggtgaagaaacaggaaaacataacccactcaaataaatacaattaattggcagagataccatccttaaagaggaagaattggaattactagacagagactttaaaatatcttccatagtatgttcaaaagcaaaaggaaaaaatgaaccaaggactaaagaaaatcaggaaaacaatataygaacaaaataagaataccaacaaagagacaggaattatgaaaaggaaccaagcagaaattctggagctggaaaacataatgactgaattcaaaaattcactggaaggattaagtcaatcttgacgcagaagaacaaaattagagaatttataatatcaggcttcaagacttattctaaagctacaacactcaagacagtgtgcaagtgtataaaactgaa

SEQ ID NO: 282484 - DNA, 605 bp, Homo sapiens
actgaattatactgccagttattttaactataattgtagcaaaattctgtgtttatattaactacttaacaataaattccctcagctaaaccaagtaccctatttataaactgctacaacagtatatcattttactttgagacacatattacaactataataaaataattatgaagttacatttaatatctccctcccttgtggctctataaggctcattttcaaatatcattaaaaaataaaaaatgtatgtactttacaatggttgaaggcatcattgcatgtattatctcattcattcttcattataaacttgagggagytttttaaaaaaactatatttaaagaaaactaaaaattactccatttaacaggttggctcagtagtacatagtcattgaatcctatgcctataatgggttttctaaatgtatttcatattcatcctctcctatgtaatttcattgttataattctggcttatatattcatatcttgtttaccaaatttagatttacggtaagatccctggtgcttctataacctatttttaaatacacctttacaggggatttctttttaaaagttcaggatttttgcgtgtg

SEQ ID NO: 282485 - DNA, 613 bp, Homo sapiens
ttgagtatgtgcacaattacatctaagtttgggtgcaggattacatctggtcatagtttacagaagcataatcactaactcagtcacatgttatcttatgtgtaggaaaatacaaggactggggttatttatcttttaaggaatatagtgactcaggcaagagacacggaggaacttgttttctatcctgttttgtcttcaaagcatctttccagagagctgctcgtcatcacagagtcaagggttttgggaaattattctggcaagcagaaataaccaaacatggcttcttacatttgctaatttgtctcaggaccaaatcctaccattaccttgattttgaacttctagcttccagaattttcagatgacaaatttcagtttattaagccatccagattgtggcaccttttaatggcatccctaggaaataatacacagtatggctgtattcttacaagggtggcttaaaacagaatccatatactataataaattttaaagaagtatacatgttactaatgtattrttatctattatatatcagggttgaacataattaacttgtttgtaacacgatgactccagtctggattgatgcttgctggcataa

SEQ ID NO: 282486 - DNA, 642 bp, Homo sapiens
atataacacacatttttatcccaaatagtgaaacttcaccttataaatacactagtaaaagatgttggctatatgccagtatcatattttgaagtaaaattatagataataatctcactacccaaattaaaagtctatatttcaaactgtgagtttttatatttctatcaacagaagatgtgtaaaataaaacggttatattgccaacattttaggctataatgtttagaactattgttgaagaagcatataaattatatttgctaattttttaacttttagtttcaggggtacatgtgtaggtttgttaaataggtaaacttatgtcaggaggtttgttggacagattatttcatcgctaagtctagaacccaatagttattttttctgctcttatccctcgtcccaccctccaccctcaagtagaacagtgtctgtttttcccttccttgygctcatgacttctcaacatttagctcccacttacaagtgagaacatgcagtatttggttttctgctcctgctttagtttattaaggatgatggctccagctccatccatgtttctgccaaggacatgatcttattctttcttatggctgcatagtattccatggtatatatgtaccacattttctttat

SEQ ID NO: 282487 - DNA, 543 bp, Homo sapiens
ataaattctggacacaatataacacacatacaacacacatatatatttgaattatcacctattatattaatgatttctattttgtgtccatctttgagaaattgaaagctacttgatggagatttcatcttactcatctttgacactaaaatgactattgtctaacaaaatctgttaaattgaatmaaactactctaataaagctgttcaaatacaaacagctaaggcaaatgagagagttttaattatgtgactatttggaccccacaaatgtgtattttagtcatgtttatcctttattatataaacaagggtgggataatatacaaaagtaatatcatagtttattataaaactagtatttctaattaatgcagatattagtacaagaactgtgctgctgctgtaatgaaagctaaactatgggacattaacttagtggtcatatggaaggcaatgaagaattatatattgaagattggaaataagaaaaacttattttgtagtgtatcaaaacacagggaacaaactgttgactacaat

SEQ ID NO: 282488 - DNA, 586 bp, Homo sapiens
ttttataacttgggagaatacatttctgtgggtttttttcttgttgttgctttttgtttgtttgtttgtttgtttcaggcagagtcttactttgttacccaggctggagtgcagtggcatgatcttggctcactgcaacctccgccttcctgggttgaagcgattgttttgcctcagcctcccaagtagctgggactacgggcgcctgccaccacacccggctaatttttgtattttttgtagaaatggggttttatcatgttgcccagcctggtctcgaactcyagagcttaggttatctgccctcctcagcctcctatagtgctgggaatacaggcgtgagccacagcttctggccatttctgtggttttaagccgcctggtttgtggtaatttgtgatagcagtcatagtaaactaatttctagagatgaaaataaaacatatgaaataaaaatttcactggatgagattaaaagtatattagacacaacagaattttacatttgtaaacttgaaaacacaggaatagaaactgttcaatctcaggcaccaagaggaaaaaggctgtacaaaaacagacacag

SEQ ID NO: 282489 - DNA, 580 bp, Homo sapiens
ttgtaaaatgtagaattttttatttagaaaaatagggatctctctcttcctctaaattatcaaagcaatacrataaatatactaaaggtataaaactatagtgaggaattgtctctaatcctccttccctgaaaaccacttttctttctttttgtggttaatttattctaatttttactcacatgcatgcattttgaatagttataatacttatttacatgtagtcttgcttttataaaattactatttcttaagtgtttatatgaccacatggattacaattatggtcattaattgataactaccccagtcataggattcatttctatatttctaaatagcaatttctatattgttggtttaaataagagcgtaatcaacatgcgtatgcctttccccatagtttgcattatttccatataagttcctataaacagaatcagaatggtcaaagataataaacaaaaattcagctaacctaactttgtgaatattctggtgttgctacatttttattttttaacattgggtatttcatctcagattccattatatagagtttatttgctgattatttcaa

SEQ ID NO: 282490 - DNA, 608 bp, Homo sapiens
tcaatgacaatagccttctgattttttgccctaactatacttcaaatgttttaattaatgcactgtattttaaaacaagaaatccataggattggtacttatcttggtcaatgaattaacagcctcttctttgggtctcactaaagtttagtatgtcctcacttggatrgacatccttaaacccataccttttctcccttttgtagtcttgagaccttgaaaaatatttgtttacatttatatctctgaccatttttcttgtatgccttctggtgttttgctactaaacgggtgatctgggaagcagcagcatccccatcttctgggagcttattagaaatacagaatgccagggtctgaatcaaaattaacattttaacaagatgccaggtgattcatatgcatgttacatttgtatcagcattgcgttaggatagcaatcccttgactctattgctcttcaactagatgaccttaggtattaaaactacattatacttcagaagttgaatgctttttttcctctatctgtatacacaacaattactgtggatggctctcagtacctttgtcttcttttctatttattttttccacagtttttattt

SEQ ID NO: 282491 - DNA, 636 bp, Homo sapiens
acatgtgcacacacacacatgcacatacatgtatgtatatatacatacgcatatacacatatgtatgtatatgtgcttcatgtattttaacttctataatttcataaatatgcttgtttattccttcatatttttcttttttatttaaaacatacamtttgttttgccaaacttacagattcttactatgcctttctctttaaaatctctgacatgtgtatctttgcttctcacatttgttgctaagaaagtatgccaatattatcttttgaatgacctaataagtacaaacatgctgataagtattgtcagtatctggcaattctgtcatgactgataaggtataaatcatagcctatatcaatgtgagggcaaagctccgtgatagaaaattcattctgatatgtgtattgggtttctgaataacagaactaaattacctcagcaaggagcttcaatgtagtagtggatttcgattggtctgtgagagacggtatcaccaccttcattattaaatggcttaataagtcatatgaagataaaggaaaaaaagagaaacttttgcttttttaaaaaatctggactgaaactctgtgtggctgagacacactgaagtgtagaagaaagagctgagca

SEQ ID NO: 282492 - DNA, 611 bp, Homo sapiens
tgttggccaggctggtctcaaactcctgacctcgtggtctgcccacctcggcctcccaaagtgcagggattacaggcatgagccaccgctcccggccaccacctagatttctctcaccaaaagaaactgggcttaaggaggaaaaagaagaaattataatgtatattggaattcttactatcaacaccatattttatataaatacattcctattaatgagcaattaaccagtcraagcctaagaaagatgaactattccctatgtatttttttttctgtttttgtgatgctgtataacagatggaattttatgtcatgatgcattagtatactgttaaattttaatttcaattaatgatctttatacttttatgcacatgagggatattttaggcattcatttcccttctaattagcttttattgctgaattcattctgaatcaggaagtcattaaatgctaaaacattcacagctgaatttacttatccctaataaaataaattagtcctttgaacaaagaaatgtaaaatttttatttaaccaacctagatttaaattgggtacacacactcacacaaacacacaaatgtatacacacacacatataca

SEQ ID NO: 282493 - DNA, 569 bp, Homo sapiens
ctgagatatttgaatttcttatatattttggatattagtctcttatttgatggatggtctgcaaatattttctcctaatctgtgrctatctctttgtgtctggaattggttccttctggtgggttcttggtctccctgacttcaagaataaagccccacaccctcatggtgagtgttacagttcttaaagatggtgtgtccagagtttgttccttcagatgttcagatgtgtccggagtttcttctttctggtgggtttgtggtcttgctgacttcaggagtgaagccacagacctttgcagtgagtgttacagctcttaaaggtggcatgtcaggagttgtttcttccttctggtgggtttgtggtcttgctgacttcagaagtgaagctgcagaccttcacagtgagtgttacagctcataaaggtagtgcggacccaaagagtgagcagcagcaagatttactgtgaagagagaaagaacaaagcttccacagtgtggaaagggacctgagcgggttgccgctgctggctggggtggccagcttttattcccttatttggccccac

SEQ ID NO: 282494 - DNA, 569 bp, Homo sapiens
ctgagatatttgaatttcttatatattttggatattagtctcttatttgatggatggtctgcaaatattttctcctaatctgtgactatctctttgtgtctggaattggttccttctggtgggttcttggtctccctgacttcaagaataaagccccacaccctcatggtgagtgttacagttcttaaagatggtgtgtccagagtttgttccttcagatgttcagatgtgtccggagtttcttctttctggtgggtttgtggtcttgctgacttcaggagtgaagccacagacctttgcagtgagtgttacagctcttaaaggtggcatgtcaggagttgtttcttcctyctggtgggtttgtggtcttgctgacttcagaagtgaagctgcagaccttcacagtgagtgttacagctcataaaggtagtgcggacccaaagagtgagcagcagcaagatttactgtgaagagagaaagaacaaagcttccacagtgtggaaagggacctgagcgggttgccgctgctggctggggtggccagcttttattcccttatttggccccac

SEQ ID NO: 282495 - DNA, 457 bp, Homo sapiens
tagactaatgatgagtaacaagatttaagctgtaaaatagtcccccaacatatacaagcccaggaatggatggccttacttttaaattttaccaaatttttaaaaagttagcactagtttttctcaaactattcaaaaaaaaatcaaaggagagggattccttcttaacttattacaggaggtcaccattactttgttacaaaaatcagacaagagcacaacaaaaaaagaaaattactagaaaatatccctgattagcatacatgcaaaaattctcaacacaatgctctatacattcaacattatattaaaaatattatacaccataatcaagtgagatgtatcacaggaatgcaaggatggttcaacatattccaaccaataaacttgatacatcacatcaaccgaaygaaggccaaaaaactgtattgtcatctcaataaagatagaaaaagca

SEQ ID NO: 282496 - DNA, 570 bp, Homo sapiens
agaagctggtgcagctttgaatgacttaagaggggctgttcatccttacataaaataggggcctgggaataagacaagggaaatggggcagcagtgattttctggctccttataacataggctgagtttgtttggaaatgatgggaattattgtcgggtacctaaatgcttacgtcaagaataattacatagttacttcaaagtcaaatataaataatcagtagtttctttctataattatagtttctttagtatccaacttaaattcttagttcacttaaaaatgacgtayaatttaaagttgtggaggaaacattattttaagtcattaaagtatacttcacagtaatggacctagcaagcaaaatgcagcacagacaaggaaaacttcctggtgcaatatcgaaagtcaaatagccaaacaaaaactcccaaacgttgcatggtctttttgtgagcaaagaatgtggtactgtatatttttataagataaagttaggacattttgaaaaaccatttcagacggttgttcgtttattttgtgagtaggttttagttcagaattagtaa

SEQ ID NO: 282497 - DNA, 570 bp, Homo sapiens
agaagctggtgcagctttgaatgacttaagaggggctgttcatccttacataaaataggggcctgggaataagacaagggaaatggggcagcagtgattttctggctccttataacataggctgagtttgtttggaaatgatgggaattattgtcgggtacctaaatgcttacgtcaagaataattacatagttacttcaaagtcaaatataaataatcagtagtttctttctataattatagtttctttagtatccaacttaaattcttagttcacttaaaaatgacgtacaatttaaagttgtggaggaaacattattttaagtcattaaagtatacttcacagtaatggacctagcaagcaaaatgcagcacagacaaggaaaacttcctggtgcaatatcgaaagtcaaatagccaaacaaaaacycccaaacgttgcatggtctttttgtgagcaaagaatgtggtactgtatatttttataagataaagttaggacattttgaaaaaccatttcagacggttgttcgtttattttgtgagtaggttttagttcagaattagtaa

SEQ ID NO: 282498 - DNA, 558 bp, Homo sapiens
acatattgggcaaatagcactatatataagtcactgtatactgtctctcctgttcagctgtgaatttcttgagagatatcccttattcatcttttgatgtctgatatatagtcccatgtggggaatatagcggctcagtaaatgtgtgctgagtggaagaattatttctaaaagtcttggaaatctatgagtgttgggcctacaaatgaaccattatatttccttttttgtcaaattcccttggtgatctcagggaaggctataaaatgatgttcaacaattcccttaaatcagttgccaaatggtcaatggggtggtgcctaatagaaatggcctgaaaggaagactagttgcactgttcaaattccattaggctgtcgtaaaattactataattgtttgaatacattatgactactatgattggattgyaattgcatatcttttgggtatttttggtcatgacttggaccagatgaatcaaccatgcgtatgtgatctaagctattatggaaggctttcctaaatgtgttcaggaaaagtggaagtgggagggaaa

SEQ ID NO: 282499 - DNA, 599 bp, Homo sapiens
tttggctgtgtccccacccaattccaatgtgttgtgggagggactttgtgggagataactgaataaggggggaagcctttcccctgctgttcttgtgatrgtgaataagcctcacaagatctgattgtcttataaagaggagcttccctgcatgagttctctctctctttgcctgctgtcatccatgtaagacatgacttgctcctccttgccttccaccatgattgtgaaccccgctcccccccactagccatgtggaactgtaagtccattaaacttctttcttttttacatttctcagtctcaggtatgtctttatcagcagggtgaaaatggactaatacagcaccctcataaaaaaagccttgagggagcctattcatcccctctgccctgggaggacacatagaaagcactagccatgaggagaggccctaagcagacactgaatctgctgatgccttgctcttgaactttccagcctctagaattgtgagcaatacatttctattgtttatgaattacccagtctaagatactttgtaatgaccacccaaacggacctaaatcagaattgaacaccaattattctttcaaaa

SEQ ID NO: 282500 - DNA, 635 bp, Homo sapiens
ggccctaagcagacactgaatctgctgatgccttgctcttgaactttccagcctctagaattgtgagcaatacatttctattgtttatgaattacccagtctaagatactttgtaatgaccacccaaacggacctaaatcagaattgaacaccaattattctttcaaaaggtttaagttgtatatttagaaataaagatattattattgattgaggctattcttggcttcaaatgggatacttcagggactgctaaacccccagaccaaggaacagaaacactcactgtgttcatgatgttggaacttaaatatagagcaagaggtctcyttatgctcattcttgctgacacttgctcttctctccagcacaccaaccacagccctggtcccctgtactgccattgccccttctcactggacttttacaaacttttccacactttattgccctagtatgtggtgtttcatctaatttttttttaaacagtctttctctttcaccctggctggagtggagggccacatcttttcctctatctactctgccttggaaacttgagctcatttctcaatttccagctcaaagttcctcctgcctcttggcaatattctctgatcccaaagaggaagctc

SEQ ID NO: 282501 - DNA, 635 bp, Homo sapiens
ggccctaagcagacactgaatctgctgatgccttgctcttgaactttccagcctctagaattgtgagcaatacatttctattgtttatgaattacccagtctaagatactttgtaatgaccacccaaacggacctaaatcagaattgaacaccaattattctttcaaaaggtttaagttgtatatttagaaataaagatattattattgattgaggctattcttggcttcaaatgggatacttcagggactgctaaacccccagaccaaggaacagaaacactcactgtgttcatgatgttggaacttaaatatagagcaagaggtctccttatgctcattcttgctgacacttgctcttctctccagcacaccaaccacagccctggtcccctgtactgccattgccccttctcactggacttttacaaacttttccacactttattgccctagtatgtgstgtttcatctaatttttttttaaacagtctttctctttcaccctggctggagtggagggccacatcttttcctctatctactctgccttggaaacttgagctcatttctcaatttccagctcaaagttcctcctgcctcttggcaatattctctgatcccaaagaggaagctc

SEQ ID NO: 282502 - DNA, 481 bp, Homo sapiens
ttccctccctgtggcagctttagcctagaatataaaaatgtatgcccctgaggatctgattcaccaaaattaaatctcaaaaaaccacattaaaacacaggataggaaacttcagagctgctggtgtgctctgaaaaactctgggctgatggaactagctgcaaatcaagacagtcttgaccttgctccagtggtagtttgctgctgctcaccgggaagggctccttccctgcccctcactttgaccacctccctcaagttccccttacaataacagtgaagaattacaagcttagaaacttaycattttagccaaatgaaatatggatatgaatgtgtgatttgtacatacacagaagggaggataaagaggaaagtagggctccagagtcacaagaactttatgtcatgtattcctaaaactttaaaatgctgaaaatattgtgacttttcttttaaaatgtatatctgaatcattttt

SEQ ID NO: 282503 - DNA, 496 bp, Homo sapiens
agcttgctgaagattacatgatagtaatccacaattccctctaggcatattgactccagagctccagctctcatcctccacaccaatcccattgttcttgcaggatacaaaggtgggtcacatggtcacgagcagaacctctatgcatatctgcattcagatgatcaagctgtagaatggctagccgaaaaacacaatgctgaaagttcagggttgcagaaagtcagaggcacacatcagcttcaaagagaaggctgtcaatggagacgggaagtggggaaggagkgggtagccttctctctgccacacagaaatggctccaaggctatgatgcaaggtggccccagctctgtgaaaaggcactttcacctttaaagcactttgctgagagggaaaatcaatgctgatgtcctccttgaataaagcactcaggtctactggggagtccaaaaataaaagcatgacgttaagtatttctctacctgtagctactcct

SEQ ID NO: 282504 - DNA, 570 bp, Homo sapiens
atgctgaaagttcagggttgcagaaagtcagaggcacacatcagcttcaaagagaaggctgtcaatggagacgggaagtggggaaggagtgggtagccttctctctgccacacagaaatggctccaaggctatgatgcaaggtggccccagctctgtgaaaaggcactttcacctttaaagcactttgctgagagggaaaatcaatgctgatgtcckccttgaataaagcactcaggtctactggggagtccaaaaataaaagcatgacgttaagtatttctctacctgtagctactcctcacccttaagaggaggggcaaggtggagctgttaagggagcaggtagagggagaggcaggtgggggaccgtggttgaagcactagaaaagggcatctgggaagactcgcaaatgggagtgggggaagggacaggcttccagaggaagtggttttggttgaggctggctgagagcaacaatgaggctaggaacaccgaggacaccgtgggaaggtgagtgacccagaactcatcacatgtgcttctcaaaatcagaagacatctactgaca

SEQ ID NO: 282505 - DNA, 613 bp, Homo sapiens
gtgctaaacattcattatagactttttaatttaacttttaatttcacaaaagcccaatgtgggtgattatgaacagaattttgtgagtgtggagaatgaggccagaaaagtaacttgtccatcttgtcctggtcacacagcaggacgaagcaaaactggaatagaccgtcccacctcctgttgaaatcatgccagacacatactccatttctagatgcacgatgctcagctgctagccacttcctctggccccaactaatcgagaggtcaggacagaaagaagatgttgaggaagtgcttcaggggttccagctcaggagggcagaaccgacactcttatttaaaaacagtgtttcgaagccttgaaaaggtcttccaaaaccttttaagtaccagatgataaggcaggacccaatcaaaaggaatgtccacttagctctgacttctgcactttccaaaggcagktggttctaaagaaggacttagggatttcaagagcatttcatagcttgagttgcccttgcacaaatacagactaaattatggatggcaggaagtggggcaggaagtgggggtctccttttctctagtgactggcttcctgttgcagcaa

SEQ ID NO: 282506 - DNA, 594 bp, Homo sapiens
gctgctataaagcaagatgcaaggtgactccaagtttatgcccacatatgccactggccagccataaaggaagtcagggcctaaacgcaaaaataacaaattgtgatyccaagagccagagactcccatcacacctcccttttttctctatactcagcagagaaggaagagcaaaaggctgtgttgaaacaacctttgcaaaactataattgaggaaattatgacagtgaaagaaatcagacctaactgactccatcttgcttctaacctttaggctgtcctgttcattcctgggcataggccaaactaactttgggaaggaattcagttcgtgattttgctctgaaacaaaactgataacagccttattcttaaaagatccccttcttcctggggaccagtctgcctttgcaggactaacaaattagctacaagattagaaattacagtttaggggttgggcagtctctggtctcaagagtctgaacctccccagattgctcctagggattctacatcactattgtaaaacctaagatcagtgcttgggatattgtgcagaccctgcactggatggatcagctgacaccaccc

SEQ ID NO: 282507 - DNA, 594 bp, Homo sapiens
gctgctataaagcaagatgcaaggtgactccaagtttatgcccacatatgccactggccagccataaaggaagtcagggcctaaacgcaaaaataacaaattgtgattccaagagccagagactcccatcacacctcccttttttctctatactcagcagagaaggaagagcaaaaggctgtgttgaaacaacctttgcaaaaytataattgaggaaattatgacagtgaaagaaatcagacctaactgactccatcttgcttctaacctttaggctgtcctgttcattcctgggcataggccaaactaactttgggaaggaattcagttcgtgattttgctctgaaacaaaactgataacagccttattcttaaaagatccccttcttcctggggaccagtctgcctttgcaggactaacaaattagctacaagattagaaattacagtttaggggttgggcagtctctggtctcaagagtctgaacctccccagattgctcctagggattctacatcactattgtaaaacctaagatcagtgcttgggatattgtgcagaccctgcactggatggatcagctgacaccaccc

SEQ ID NO: 282508 - DNA, 534 bp, Homo sapiens
ctgatttgagtaataataaaactctggtctcccgcacagccaactctgcatgaattactctttcttcattgcaattcccctgtcttgataaattggctctgtttaggcagtgggcaaggtgaacccactgggtggctacmatatgtgcatatggtacaaaggaaatcctagggagagccaataaagggaaaagtgcaaatgaagaaagggctccaaagagtaccaatcagtgaggggaaaatatgtttttctccgtattgattttcacctcactttcccctgggaggaaaaagactccctcatcagttccaatttatattatacttgtaattcgtatttatgttgcctgctttctagagtctggggcatccaagtgacatggcccaccactccaaacttgccttgcctcaatgaagagccccagcagggagtgcaaaacccttgcaggcaactcccaacctctgcccctccctccctttgccctacacagttccatttaacaaacaaatattgaacattctctctgggcaaagg

SEQ ID NO: 282509 - DNA, 591 bp, Homo sapiens
ataaataaataaaaatatccttctggctacagtaccagggataatgcaactggggttagaccagaggtggggaaactagtgaggaaggtaccacaaagtcaagcaagagatcgggagggtctgaacaaaggcagtgatgtgggtttggaaaagacggctttgtattatttatcactcagttcctaaggtaatatttttttcctgcctaatattgtaatgtggaatcaggcaagagaatgtctgcatcttaaggcaaggattatgtgtgttttgggcttatctttattaaaaattaccttatcctgaacctaacctaagctcttccatccaaagtgagtggtggcggtggttatcattgttgacatgattgttatcatgatgatgataatgatgacaatgacaacccatttagaatatgagagcagacctttaactacyataaattaaatttgctatgctctgaatgtttgtgtccccccagaattcatatgttgaaacttaacctccaaggtgatgatagagcctttggaaggtaattagttcattagcgttctgccttcgtgaatgggattagcacccaatatggtttgg

SEQ ID NO: 282510 - DNA, 529 bp, Homo sapiens
taccaggggtttccacttttgcttcttcttcattttctcttaccatgtaagaagtgcctttcacctcctgtcatgatttttgagccctccccagccacgtggaactgcaagtccagttaaacctctgtttcttccgggtcrggtgtatgtctttatcagcagcatgaaaacggactaatacagacggatttctatttcctctttttgctccaggactttgggccacagtgggctttttttcatcccctgtcttcactaaactgtaggtctggaaagttctctctgggcgttaaaattttttcagttaaaatatgacatagatatcaacaaagaaatggcacagcctatccaaagaccataccagcaactgaataaaattttactggtggcaggtaacttctcaacagtggatgaggtcaggaggcttactggaaagtgaactcaccagggatgagaatgttgtttctcatggagcaaggaaccccaaggtctgccaccaaactaaattactctagggtaaaatgatgtg

SEQ ID NO: 282511 - DNA, 554 bp, Homo sapiens
tatcaatttgtttcaaggaggaccctttgatgcttagactggggagtaaggtggggtaggccagggagatgtctggtttctagtgtgctgagagagtgcagtgggacagggcagcccatgtccacaccttcatttcactgccttcattattctgtttctgagtgctgaaacctatcagagtctggcaaggtagatgggcgtatcgcctcccataargactctaggccatggttcctctgatctacttcatctgttttcatccatcttctagtcatttgttgaatttctattcagtgacagcccttcttttactttctttatcgttgtgcattaaatccttttaaattgtcttgctgtcattttaaagagaacccagctgaagatggagttaaacagccttccatttagagctggaattcccctgttctatcctatttaatgagccattcaaatcaagatagttttctgttgatgggactggcttttcaaaaaggcacaactagattataatccagaatggggaggaaataatgccttattttttgttttgtgga

SEQ ID NO: 282512 - DNA, 521 bp, Homo sapiens
gcagcaccactgcgaccaccatttccccagtgcagaggtaggcatgggcatgggcatggaggtggggaggtgtctgggcaaacatgggcccagagaaggctgccagagatagctaaggacatgccagaggtagctaagggcatggcagtatgcttttgctcccctagaacctccccatcaaagtgaaggggacccaaagaaaggctgggtagaaatcctgttgggactgcggtgggtgtcaygctcccatagatgccccacagcaggaggctctgggggaagtcaccaggtgacaggctgcatttgtctgagttcacctgaaggagccagcatcaaacatcgtgagaggttgagagaaacaacatgcattaaagaaaatgtggtacaaatacaccagggaatactatgcagccataaaaaggaatgagatcacgtcctttgcaaggtcatgtatgaagctgaaagccatcatccttagctaactaacacaggaacagaaaaccaaacactacatattatca

SEQ ID NO: 282513 - DNA, 577 bp, Homo sapiens
cacagccaaaccatatcaccttcctacaacagtgcacacttccacccattgaatggaatttgtcaatatcaaatattcactggaaaagcagaaggcaactttgctgagaacagcaataggccagacatggagttgtgatgacttggaacaagatagtaggaagagtgttgagaagaaggaatattcaatatccatgtaccgagtgtactgagagtaygcaaaagtgtctggagtgtggaaaggaaatagaatgtcagttttcaatactcagaaacagtaaaggaagatttgcaacttcacatgcatgtcctgtttgaattcccctaaacattctggcttaagggtctcccaggagtccctctcattcctgttgctcctcatttggtcgtgtgtggtggtggtttcattgtcctgttgagttatgcttgtgtcatgttttaaaggccactgcatttccccatggtgtgtgtgtgtgtgtgtgtgtgtgtgtgtgtgagagagagagagagagtgcatttgtttcgctttgtgtgaaaagctagaacacactggtagaaaggagactgtgtgaaggcag

SEQ ID NO: 282514 - DNA, 513 bp, Homo sapiens
gatctttgcagttccatttcagcattaccagacttaaaattaaaaacaattttttttgttagatctgtgatatatttcatgtccttgcttcaaggaaagctgagtcttcaagtcactgaagttagtgtctctggaaccccaaactttgagtgactcccctgaattcagatgcaaatcagcacatcagaaacatttaattcattgaccctacttccatgcaactaagaaccccaagttcaggtgagcaggagggggttgaatagtaaatattggacctagttaaggccaatatgtaatttaaataaacacagctgagcaaacagaagacttaagcaaaggctggatttacgtagccatttccttagtgtgttatgtgccaaatgaattcratggctttttgacgtttttccttctgatcttaattgcaacctgtttgactgagttgatgaaactgattgaaaagtcaagacattaaaaaaactggaaaaccttttttgttaagagcatgtttag

SEQ ID NO: 282515 - DNA, 488 bp, Homo sapiens
caaagtggtgaggtttcccactgaatcactgcccataataggactcgatcttgaacctttggggcaatgcagtcaatcactcattctgccactgagaaggtggcttttcctcaaaaaagtccccccagtttgctccatcactgttcacagggctttgggttggtaaatgcagggaggcgttaatgttttagtgcagaagcaccactgatgcaagttaaaacaggaaaaagacttgtaatgcacaactgctgacaaatacattactctctggagttgmtatgtgggaagaggctttgtctcttccatgggacagatccctcactcagctgcaggcagaaggcagaatgacagtggatgcttcctgggggacagttttcgtgtctgctcaacaaacagcttcttttgtccacattatttatttttatttacttattctttttcttctatagctcctttgtccctcggattcctaaaggaagaattttaac

SEQ ID NO: 282516 - DNA, 517 bp, Homo sapiens
tcattgtaaagtttgaataagatagttcatgcaaaacacttggcacataataatgacttcacccatctgtaataggtcattcttgcattgctataaagaaatacctgggactgggtaatttataaagaaaagaggtttacttggctcatggttctgcaagctgtacaagcatggtgccagcatctgtttggtttctggggaggcttcagggagcttttattcatggcagaaartgaagcaggagcaggcacgtcatacagagaaagcaggaggtagggggaggtgccacacatttacacaatcaatactcaagagaattcactccctatcaagaggattgtgccaagacatgaggaatctacccccacaatccaatcacctcccattaggcctacctccaacattgggaattacatttcaacataggatttggaggcgacatatatctaaactatatcactatccatccatccatccattcatccatccatccacccatccacccatccacccatcc

SEQ ID NO: 282517 - DNA, 598 bp, Homo sapiens
aggggtttgtatctttcttccctgaaagtgactcatgggatcagggagctgaatcctatccaaacctcaaaccaatcctagtcatttgttgtctttgaactcagtttttccttttttttttttttaaatttccttttccctagtgtctagttactgagtcaagataatggtctcttttagggtatgaatatttttaagaagaggaaaaaagtgatttggaggtgggtgaagcagaggatggatcctcacttcaactatttgtgggctgatcaggttgaggacaaaggaaaatattctaagatagccacataggggagagcaatgactcatcaaaagaggttccagggatgcagctttggctgatacaataactttcttacaatyctagccatcttgtgaggaagctctttgtccaagaaggcgtttgaatgttgagtaattgattagatcaataaatatatagtttaaatataatcaggccctggctaggttccatgagggaggcaaacatgaataagacattgtccccacagagaggggcttataacctgatagacacataccatattctacttttcaaaataattatatgctcatc

SEQ ID NO: 282518 - DNA, 507 bp, Homo sapiens
tggtgtagatgtgccacattttctttatccaatccaccatcgataggcatctgggttgactccatgtctttgccattgtgaacagtgctgcgatgaacatatgagtgcatgtgtgttcttggtagaatgatttattttcctttggatatatatccagtaatggtattgctgggttgaatggtagttctaagttctttgagaaatcaccaaactgctttctgcagtggctgaactattttacattcctaccagcygtgcataagtgtttccttttctccatagccatgtctgcatctgttgttttttgactttttaatgctagccattctgactggtgtgagatggtatctcattatggttttggtttgcatttttctgatgattagtgatgttgagcagtttttcatgtttgttgactgcatatattcttttgagaagtacctgttatatcttttgcccactttttaatgtttgtcttttttctttgcttgttgaattgtttgttcc

SEQ ID NO: 282519 - DNA, 1096 bp, Homo sapiens
aatgatcctgtcacccaggtagagagcgtagtacccaatagtttgttttaaacccttgcctccctccctctctcttcttgtagtccccagtgtctttcattgccatctttacgttcactaggactcagtgtttagctcccacttataagtgagaatatgtggcatttgattttctgttcctgcattaattcacttaggaaaacggcctccagttgtaaccatgttgctgcaaaggacatgattttattcttttttgtgtctacatagtatttaatggtgtagatgtgccacattttctttatccaatccaccatcgataggcatctgggttgactccatgtctttgccattgtgaacagtgctgcgatgaacatatgagtgcatgtgtgttcttggtagaatgatttattttcctttggatatatatccagtaatggtattgctgggttgaatggtagttctaagttctttgagaaatcaccaaactgctttctgcagtggctgaactattttacattcctaccagctgtgcataagtrtttccttttctccatagccatgtctgcatctgttgttttttgactttttwtggtgtagatgtgccacattttctttatccaatccaccatcgataggcatctgggttgactccatgtctttgccattgtgaacagtgctgcgatgaacatatgagtgcatgtgtgttcttggtagaatgatttattttcctttggatatatatccagtaatggtattgctgggttgaatggtagttctaagttctttgagaaatcaccaaactgctttctgcagtggctgaactattttacattcctaccagctgtgcataagtgtttccttttctccatagccatgtctgcatctgttgttttttgactttttaatgctagccattctgactggtgtgagatggtatctcattatggttttggtttgcatttttctgatgattagtgatgttgagcwgtttttcatgtttgttgactgcatatattcttttgagaagtacctgttatatcttttgcccactttttaatgtttgtcttttttctttgcttgttgaattgtttgttcc

SEQ ID NO: 282520 - DNA, 297 bp, Homo sapiens
agaatcaaggagggatgaagaaagtgtaaaaagaactatgtgtaaggtaccatggaagacatataatcctagataatatcgttgtgttttttttttttttttttttttaagatagggtctcactctgttacctgggctagagtgcctgagtgacagagtgtgatcatggctyactacaacctcaaactcttgggctcaacagatcctcctgccttggcctcccaaaatgttggaattacaggtgtgagccgtggcacctggccctagataacatttaataaagcacttacgacctgg

SEQ ID NO: 282521 - DNA, 514 bp, Homo sapiens
gcacaaatatctggaataaatgaaggcctctgtaccatcgactgtgtgttacactatagacagacttaaaatgcaaagacatagtatttggtactccctctgaaatcaaatgatcctccctggtttgaatcctggaactatggcttctattgtttgagatccaagactggttggcacctargcagcactcaggagatgtgggctttcatcattattatttttcaggcagaaagaggagataatcaaatatatgcatcagaagattctggtgccagtatgcaggactgcttgggtgaaagagactctaccaacagtgggatatggtttttcacactccataactcacaggaaccacaaatatttgcagaatcttacccattcttcaagaaattgatcagtattgatgtttaacaaagaggggacagttaacattggatgacatatacttaagatgaaaattacacaaaattataagtgttaaagaaaatgacttactgtttcagaaaatatttcc

SEQ ID NO: 282522 - DNA, 1052 bp, Homo sapiens
gcacaaatatctggaataaatgaaggcctctgtaccatcgactgtgtgttacactatagacagacttaaaatgcaaagacatagtatttggtactccctctgaaatcaaatgatcctccctggtttgaatcctggaactatggcttctattgtttgagatccaagactggttggcacctaggcagcactcaggagatgtgggctttcatcattattatttttcaggcagaaagaggagataatcaaatatatgcatcagaagattctggtgccagtatgcaggactgcttgggtgaaagagactctaccaacagtgggatatggtttttcacactccataactcacaggaaccacaaatatttgcagaatcttacccattcttcaagaaattgatcagtattgatgtttaacaaagaggggacagttaacattggatgacatatacttaagaygaaaattacacaaaattataagtgttaaagaaaatgacttactgtttcagaaaatatttccwaaaaataccgatgcccaggctcatctctaatgaatggaatcaaaatctctggaatgggacctgggcaacatattttttaaatcctccaacwtattttaaaaatcctctccaacatattttttaattgtgccccagggttgagaaccctacttttgtcagcccagaatctgaaggccatgtcaagggcgctgcggggcaatgggaatccctttagaatttcagtgtgtcgctgcactagcagaaagcagatcctgaagtgttaggaaagactcctaacattttgatattcgaaacagctccttgcactccacaagaatctgccccccagaggcaggcaatgaggagaatctagcgtcctggggtacccagttttaggaaagctctcaacactcagctcagcagctatgaaagttactcaagaaatgtggatgagctgtatcatccatttaccttgttttcaggctgatttattcatcagtctctttcatgactagaaataatttctattattaaccacagtaggagtatcatagccag

SEQ ID NO: 282523 - DNA, 537 bp, Homo sapiens
aaaaataccgatgcccaggctcatctctaatgaatggaatcaaaatctctggaatgggacctgggcaacatattttttaaatcctccaacttattttaaaaatcctctccaacatattttttaattgtgccccagggttgagaaccctacttttgtcagcccagaatctgaaggccatgtcragggcgctgcggggcaatgggaatccctttagaatttcagtgtgtcgctgcactagcagaaagcagatcctgaagtgttaggaaagactcctaacattttgatattcgaaacagctccttgcactccacaagaatctgccccccagaggcaggcaatgaggagaatctagcgtcctggggtacccagttttaggaaagctctcaacactcagctcagcagctatgaaagttactcaagaaatgtggatgagctgtatcatccatttaccttgttttcaggctgatttattcatcagtctctttcatgactagaaataatttctattattaaccacagtaggagtatcatagccag

SEQ ID NO: 282524 - DNA, 537 bp, Homo sapiens
aaaaataccgatgcccaggctcatctctaatgaatggaatcaaaatctctggaatgggacctgggcaacatattttttaaatcctccaacttattttaaaaatcctctccaacatattttttaattgtgccccagggttgagaaccctacttttgtcagcccagaatctgaaggccatgtcaagggcgctgcggggcaatgggaatccctttagaatttcagtgtgtcgctgcactagcagaaagcagatcytgaagtgttaggaaagactcctaacattttgatattcgaaacagctccttgcactccacaagaatctgccccccagaggcaggcaatgaggagaatctagcgtcctggggtacccagttttaggaaagctctcaacactcagctcagcagctatgaaagttactcaagaaatgtggatgagctgtatcatccatttaccttgttttcaggctgatttattcatcagtctctttcatgactagaaataatttctattattaaccacagtaggagtatcatagccag

SEQ ID NO: 282525 - DNA, 559 bp, Homo sapiens
aaggggtgaatggggtatttgcargcagtgaatgaggaggcctggaaccaatcttctgctgatattgaggcactactgaaaaaggtatattacttaaatctcttattgtattgtaaactgtataagtaatgaaattaaaaggcagaaattgtcagactgaataaaatgaaaagaccaaacaatatgctgcttacaagaaacacaattcaaatataaggacacaattagtttaaaggaaaagaactggaaaagatataccatgataacacaagtcagaagaaagctgctgtggatatattaatatgagatgtagatttcagagcagtgaatattgccaggcataaagaaagttattacataataattaaggtatcagttcatcaagaagatgtaataaccctaagtatttatacaactaatatcagagcttcaaaatacatgaagcaaaaaccagtggaattgataggagaaacacacaattacacaattatagtcagaattttcaacatatctttctcaatggagaaaacaactagacaggaaatcattaaggatatag

SEQ ID NO: 282526 - DNA, 564 bp, Homo sapiens
attctgtgtaaccaaagatgaataagcagagacggaatcagcacagatagtcatgatagaacgaatgacagttctgtaactcaagagaaataggaaaatgtgtaggaacacatatatttgccacttgtaaaataacattttctcatttgatatgccattttgtatatgtctttaggcttttaattattcaactaaacaagaatattttggatgcctactatgtgcaaggcagtgtgcaaggtgctagagaaagaaatagtatgaagcaaaacttctgtccttgaggaatgggcaaccctgatgggaaaggaggacttacacctaaaaagggaagtagtcacacgcagtgttcagagagttgaccacatggtattttatgtccttagctggagtcttagatcatttagtcctatgatagacttttcacagtgacttataacacacttcttctaccacctctgccacctggtactcagcagaattttatttscaaatacatttgaaagaaaaatattatctgactttatatactttcttctttagatggccgagcttttccttttc

SEQ ID NO: 282527 - DNA, 556 bp, Homo sapiens
aacaagcacatgatgtgtgttaaatttgtccttatgatgggtgccttaaaaaagtgcatgacactatgagagtgtgcaatgggatttgacctaatgggagaggccagggaagtattccacgaggaaataccagtacagtggtgagtaaatattccagcctttcatggattccaaaaccctgccttgtatcttgatacttgagtgtggttgccaaaacaatttgaaaataatggtgaaaagaaaacacatcaaaataaagatgtgccggacctcttcaacatggtctggggagttctaaaatttctgccttgctcatttaattaccactcattagcattatggctaatttgttattatatcaaatctggccatattaattacaaattaatttaatcatccaccttctaaaatataatctgcagcgaagttttataaccatgtgtatccataaaattcatttaatagcttatagttrcagaggaggatgttataaggttggtttctgagaaatttctacaatttaaagctgaaaagatgcagagagagagagagagtt

SEQ ID NO: 282528 - DNA, 512 bp, Homo sapiens
ccaccttgtcacaaaatctcatggacacttttccagtttttatcttttttgactagttgggaacattctacgtggctaagcactccctactttttattttttttaatttttttgagacagggtcttgctctgtcacccaggctggactgtggtggcatgatcatggctcactgcagcctcaacctgctgggctcaagcaatcctcctgcttcagcctcccaagtagctgggactacatgcacatgccaccacaccctgctaattttatgttttgtagagatagaatattgtgatrtttcccaggctgactccccacttcttgcaacactgcttctcttgatttctgggacaccacccccttctctcttcttcctacatctctgactctttcttcccagaatcgtttgcaggttccctttcctctgctattctgttaaatgctggtatttcttagggttctagcttaggctatcttctcactccaccttctgtccctgggggacacagttcat

SEQ ID NO: 282529 - DNA, 464 bp, Homo sapiens
aatagtatggagagttctcaaaaaactaaaaaaagaactactatatgatccagcaatcccactattgggtgtatatccaaaggaaattagtatgttgaaaagatatagctgcactcccacgttcattaygcattgtcgacaattggcaagatatcaacctaattgttcatcagtggatgaatggatatagaaaatatggtatatatacacatggaatactatttagcctttaataaaaaggaaatcatgtcatttgcaacgacatggatgaacctggaggcaattatgcttagtgagatcaaccagactcagaaggacaagtaccacctgccctctctcatatgcagaatctgaaaaaagtctcatggaagcaaagactagaatggtggtggctaggagctgggggaatggaggaattggggagatgctgttcaaagggcacaaaatttagttaggaggaaaac

SEQ ID NO: 282530 - DNA, 573 bp, Homo sapiens
tgccttttcctcataacagcaaggttgctgtatatttacagaccttgcatcttcattcaaggcaaggaggagaggaaaaggaggtgccaacattttatcaaagaacaaaaacatttccagaaatgccatcagcagacttcagcttgaagscagaacacgatcacagagctgccctagctccaaaggagactggaaaggcggaggatagaatcatcatgaatgggttagaccaatcatgattcatcacttgcagataggcacaaaattgaggttcacttatcaaggaaggggggatacccaactttatttttttgtttctcttgcataccgatttttgtcacctggtctcctcttattgtccaaaacacatgccatgctcaactccatcatcaaccttgttacctttgctctcttcacctagaatattctctcctccacttaccagtcctatttatgtttcatggctatgttcgtatccgacctattcaatgacacattctagtccacaatgatttcttccttgaatgaacacttcattcattaatttatccatattcagtatttacttccagg

SEQ ID NO: 282531 - DNA, 617 bp, Homo sapiens
ttttttgtttctcttgcataccgatttttgtcacctggtctcctcttattgtccaaaacacatgccatgctcaactccatcatcaaccttgttacctttgctctcttcacctagaatattctctcctccacttaccagtcctatttatgtttcatggctatgttcgtatccgacctattcaatgacacattctagtccacaatgatttcttccttgaatgaacacttcattcattaatttatccatattcagtatttacttccaggagattcctatcatgagtactacacagytgaacatttaattgttctttgtttcctctgatttggttttatttctccacaaacactgtaacctacatgaagacttgaaccatgcctcagatttcatttgtatgcctcagttccttacacagtgctgaaaacatgacatgtgcttagtaaattactgactgaaaaattctataattacctagaaataacaatatgtggattactgagtgtaaaacaaacaaacaaaaaaaacactgtggttggaacttagaaaacagaacattgtctacttatttcggtcaaaatatactctgtgagacaagaaaataacaacgattatatttg

SEQ ID NO: 282532 - DNA, 561 bp, Homo sapiens
ggtgctgaatgtggtgtccaggggtgcaaatcaaagtcagcaacacccaacacttcaacaggtctatctacactgtgaggtctcaaccatcgctcagggactgctctatcaagacaaaatttagtaatgcggtaagcacactgccaaatgctaatagtcacaaaagaaaatagtgcaaaaataattttgttaaaaaacagctactatgaatctatatgctaggctctctgttatgtaagctctttacacacacgatcctattttcccctcacaacaggtcttcgtggtggtttcattatcaccattttgcagatgaggaaactgaggctttgaaagattaagtaacctgcccaagatcacgaagtggaaagataaattgagattcaaatytggctcaaaggagagatagcttaaatgtaatcctaggtctgtctgactcagaggccttggtctccaaaaactacatagtaccagaaaagtcccactttgtcccactgatgtttgcattccgatcaaacaccaatcttttaaactaatcaatccttatgggggggaggggaa

SEQ ID NO: 282533 - DNA, 579 bp, Homo sapiens
tattgaggaacatttttaaatccagccatccaaagcaacagttgttttcattcacaacttctaatccttattttcatgaatctgtttctgtaatctaaagattaccttctaatcttatcttcatgaatctgtttctatttcatggtatctacacacaacaagctgctcacttggtattgcagagatataggggtgactatcgctcacctaaagaaccttcctaggaaaatgaaagcaggtgcctttagaaactggtaaaaggttttgggcacagctcagtttctagaaggcagatcaacaatcattccacagggtcctttgcagcaaaggcagctttctgttgctccaaagggcactaaagtaagaaaaatgctstagtctcattcttgaaatattaacactacagagacagaagcccagagcacaaagacagaatcttggctatatatcagcagcctctccaggaagagaatccttcatcacattatgtacacccaccaaaggttccagactattgggaaaatttagattctaaaaatatatgtggcaaaaataaactgcgaataaacataaatataa

SEQ ID NO: 282534 - DNA, 579 bp, Homo sapiens
tattgaggaacatttttaaatccagccatccaaagcaacagttgttttcattcacaacttctaatccttattttcatgaatctgtttctgtaatctaaagattaccttctaatcttatcttcatgaatctgtttctatttcatggtatctacacacaacaagctgctcacttggtattgcagagatataggggtgactatcgctcacctaaagaaccttcctaggaaaatgaaagcaggtgcctttagaaactggtaaaaggttttgggcacagctcagtttctagaaggcagatcaacaatcattccacagggtcctttgcagcaaaggcagctttctgttgctccaaagggcactaaagtaagaaaaatgctctagtctcattcttgaaatattaacactacagagacagaagcccagagcacaaagacagmatcttggctatatatcagcagcctctccaggaagagaatccttcatcacattatgtacacccaccaaaggttccagactattgggaaaatttagattctaaaaatatatgtggcaaaaataaactgcgaataaacataaatataa

SEQ ID NO: 282535 - DNA, 547 bp, Homo sapiens
tcaaaatacgctggaaaaggttcagttgtctgatatttctccaggtctgtcataggaaaggacaatgtctggattcagagagcaatcacgctgttctttcagtagccatgctattggctctgacaggttgggaggaggggagatggaaatggtgcctcagcggactgaagggtggacgactccaaatctccttctaagcttcaccaccaccagagtcctacacccctacatctgtattccctcaagaagatcttggcagattgatggtgagaaagtaggaatattaaggtaaacagactagaaaaagttgaaggttgagtatcagttttccttcttggtaaatacaaaacataattatgatgatgatgattgaatgagagtcaattctctcttaacacaattcaactatacacttaaaaatggttaaatggtaaattttatgttrtgtatgtattgggaagatgggtacttttggcactttccaaaagaaaccaagtttattatcagttcaggtgtgctccagccaatgtgtagctcattagatgac

SEQ ID NO: 282536 - DNA, 649 bp, Homo sapiens
tttacattcccaccaataatacacaagggttccatcttctctacatcttcaccaatgcttggtattttacgctcttttgatggtgaccatcctgatgagtatgaggtgatatttcattgtggtttttatttgcactcttctaatgattagtaatgttatcatcttttcaagtgcttatgggccatttgtatatcttctttggagaaatgtcagtttaagttctttgcctattttagaatcaatttttttgttgttgttaaagtttcttatatattttggatattaaccccttttcagatatattatttgcaattattttctcccattttataggttgcaatttcactctgttgattgtttcctttgacatgaaaaagtttttgtgtcattccatttgtttatttttgatttcgttgtctgtgcttttggtgtcatatttaagaaatcattgctaaattcaaagtcctgaggctttacycctatgtttctttctaggagtttaacagttttaagtctaatttttaggtctttaattcattttgagttaatttttatgtatggtacaaggcaagggcccaaattcactctttttgcatttgaatatcctatttttccaacactacttgttgaagaggctgtcttttctctg

SEQ ID NO: 282537 - DNA, 563 bp, Homo sapiens
gtttttgtccattttcttaatttggttattacattggttaatttttatattttgaactattctttcatttcatttataaatccctcttgatcatggtgtgatcaacgtgtgcttgaatttggtttgctattattttgtttagggtttttgcatcagtattcatcagacatattggtctacagttttttttgtgtgtctttttctggttttggtattaggataatgctagcctcatagaatgagtttggaattgttctctcttaatttttttggcagaatttgaggaggattggtaatcattattcattaartatttgatacaattattcagagaagccacatggtcctgggattttctcttttggaaggttattttttttttttattactgcttcaatctcctcactagttatagatctgtttccgtcttgataggttgtatgtttctaggaatttgtctttttttagattatccaatttgttggcatataattgctcatagtagtatattttttattgctgtgacatcagtggtaatatctcttttttcttttctaatttta

SEQ ID NO: 282538 - DNA, 655 bp, Homo sapiens
gtcttaggtagaaaagtttggggttgaaagaaaagtgatgtctgtttcaaaggaatgaaaattcttagggtgtaacaatagcttattagtgaagagcctaactttggctcaagcatcagactgcttgagttcaaatacaaattcctccatttaccatcaatgtgagcttggtcaagttattcctccaatagtcagtttcctcatctgtaaagtgagcacaatggtaggaccacaatttaattgattctgattggaattaaatgtactactctgtgtataaagaagtaattagtccagtgcctggcacatgataagctctcaataggtattagaccttttttttcttgttaattttgttgttkatgttatctttattataaccatgtgggaagttttatgctgaaaaatatataatactgaatttttttaaatagataatatgcaacagcatctgtaatgactgcataaacaattcttgcattttcctgaagtgttcattttaaatgattgattcatggctcggttcaagtatacacacagattagcctttgcaaataattcacttaatactagctacaccctgtggcagttgttttaaggtttttgatctctagggggtgtacagaagtgttctacttgtgcaaattgttttcct

SEQ ID NO: 282539 - DNA, 655 bp, Homo sapiens
gtcttaggtagaaaagtttggggttgaaagaaaagtgatgtctgtttcaaaggaatgaaaattcttagggtgtaacaatagcttattagtgaagagcctaactttggctcaagcatcagactgcttgagttcaaatacaaattcctccatttaccatcaatgtgagcttggtcaagttattcctccaatagtcagtttcctcatctgtaaagtgagcacaatggtaggaccacaatttaattgattctgattggaattaaatgtactactctgtgtataaagaagtaattagtccagtgcctggcacatgataagctctcaataggtattagaccttttttttcttgttaattttgttgtttatgttatctttattataaccatgtgggaagttttatgctgaaaaatatataatactgaatttttttaaatagataatatgcaacagcatctgtaatgactgcataaacaattcttgcattttcctgaagtgttcattttaaatgattgattcatggctcrgttcaagtatacacacagattagcctttgcaaataattcacttaatactagctacaccctgtggcagttgttttaaggtttttgatctctagggggtgtacagaagtgttctacttgtgcaaattgttttcct

SEQ ID NO: 282540 - DNA, 546 bp, Homo sapiens
cagccaattaaattttaagacttagcacagtggctcatgcctgtaatcttagcactttaggaggcccaggtgggaggattgcttgagttcaggagttcaaaactccatctctacaaaaacaaatattagctaggtgtgatggtgcatacctgtaagtcccagcgacttggggggctgaggcaaaaggattgcttgagcctgggcaacagaggcttcagtgagccatgatcccgttactgcactccagcctgggtgacaaagtgagatcctgtctcaaaataaataaattttatatatgttgtcacatggctcaaacagttttcatgtaaagttcactttgagtatgtgggctattatttgaatttttggcctttgaaataattatgaaaacattcatcgttattatcctggagtttcactcatttgcagaataacttcattctgaaaatgatataacacctcccaagactaagtaatattaacagagttaatattttatctttttgccctyaatgcctcctatattgctggggacatgatagggcc

SEQ ID NO: 282541 - DNA, 510 bp, Homo sapiens
tgaaacaaaaccaattatattaccactagcaaattttttccccttaaaatctagtttcgtcttatttctagtttcaaggcaagctttgtctacycaaggtatcaaaggtcttcaaatctcattcattttcttctgcccaagagttaagaaagtaagtctaaaacagaacaagccagatttgttgctgtgatcttctcacacgaacgccttttaaaagaaatctttcaacaaagactcaaaaaagaaacagcaaagtttggggaaagaattgtctgtctttaggtcaagcatttcctgataagtgactgaaggtctggctgccaggaatacactttgctgaccctaggaatggccaagtctcaaaacaaaatttgcctcttctgtatcttgaaagtgacctgttaggacctgatgtcaatttgacgaagaggtgatagaacatgaccaacgaggtgtctttggtggacatattcatgtaaaggaggcgagagccacagatttcagctaaac

SEQ ID NO: 282542 - DNA, 565 bp, Homo sapiens
taaaccacactgatgggcaaaatgatgaaaccctcacgcagccaagaactctgaaagcatctttcagcagacatgcaatcagtcctttgttttcttaaagattctagttgcattagaagggttcctaactctgcccagggttcagcaccagtccttaggtccgcatgagtcttggaggtaaaagcgtggactcctgaaccttatgtattcaacatggacaggactagaagatgccatcactcccatggatatccgagtcttgttcaaatatactcccgctgcacagaatgtgtagaagtgtgtgttgactagctgggcctgcagaattgattgaacagggcatgggtactttaccgaatctgagcacctggctccagtctgtaagcagggcctgtagcactgagaaggggaggggcatagaggcacagctgggtctggagarcagcagccctgatatttacgactatgatggtccttctctagtggacctgctttggaacataaataaacttaataggcttcaaataattgtgacaactgagtttaaaccccagactgtggtcta

SEQ ID NO: 282543 - DNA, 520 bp, Homo sapiens
cactggcagcactgcatgtcacctgggaacccctgcagacaaagctaacatcccagacagacagatgtgaccaggacaaacgtgcaataatgccaaatgttaaaatgtgagtttaccagcctagctatgggactgctggctcctagtccaggaatcatgggggtatgactgcctctccaaccctgtgggctgtaagcaagctcaggctagtctccccactggggctgtgcccctccctgggacggttccgtgggcagccccatcactgtgttcaatagtgtgagaatgtagctaaagcccctgctgctgctgctgcacatgccacagcaggcggtgggggctgcgtggggacaatccatcgtggagtgttctctcagcttaggtctggacaggagacttggcgggrgatgctccaggatgtgggtgattctgtacctggggaggctatctctgacctcccgacaggggacactcccaggccagcccaggggtcaggggcagaggtgcacacctcagcatg

SEQ ID NO: 282544 - DNA, 538 bp, Homo sapiens
ggatagctatgacctgagccagtggcagccaagctatttccatctctatcccccaccaaaggaagggagtgggagctattaccagaactcagaacctggaagaagaacccaggagtcatgtagagttggcacttgaagaagtgaccaaaggacaccaccagacagggtgaccccacaaggtgggacatatactctcaccacacattccgtcctcactcccccagtctcctgctgagctccccattggccaaactcaacttgaaggcagagggctaaggaactcaatgtgctcacctaagagctggtcaggagcaccccatctcacctcacatctttgggattttgtttggcttgaggggaaggcaagagaygacttttttgttcccagttccatccttagatattcagcaatttgttgttgtttgaatgaagtcacacttttgggcccaatcctgcagaaagtcccttacagcatgcattctcaacagagctaccatcattcccaaggagacaacacttggttcttgggagatggaaa

SEQ ID NO: 282545 - DNA, 538 bp, Homo sapiens
ggatagctatgacctgagccagtggcagccaagctatttccatctctatcccccaccaaaggaagggagtgggagctattaccagaactcagaacctggaagaagaacccaggagtcatgtagagttggcacttgaagaagtgaccaaaggacaccaccagacagggtgaccccacaaggtgggacatatactctcaccacacattccgtcctcactcccccagtctcctgctgagctccccattggccaaactcaacttgaaggcagagggctaaggaactcaatgtgctcacctaagagctggtcaggagcaccccatctcacctcacatctttgggattttgtttggcttgaggggaaggcaagagatgacttttttgttcccagttccatccttagatattcagcaatttgttgttgtttgaatgaagtcacacttytgggcccaatcctgcagaaagtcccttacagcatgcattctcaacagagctaccatcattcccaaggagacaacacttggttcttgggagatggaaa

SEQ ID NO: 282546 - DNA, 538 bp, Homo sapiens
ggatagctatgacctgagccagtggcagccaagctatttccatctctatcccccaccaaaggaagggagtgggagctattaccagaactcagaacctggaagaagaacccaggagtcatgtagagttggcacttgaagaagtgaccaaaggacaccaccagacagggtgaccccacaaggtgggacatatactctcaccacacattccgtcctcactcccccagtctcctgctgagctccccattggccaaactcaacttgaaggcagagggctaaggaactcaatgtgctcacctaagagctggtcaggagcaccccatctcacctcacatctttgggattttgtttggcttgaggggaaggcaagagatgacttttttgttcccagttccatccttagatattcagcaatttgttgttgtttgaatgaagtcacacttttgggcccaatcctgcagaaagtcccttamagcatgcattctcaacagagctaccatcattcccaaggagacaacacttggttcttgggagatggaaa

SEQ ID NO: 282547 - DNA, 637 bp, Homo sapiens
gatttccacatgtgacttgtgaaagcaaaagggcttgatagtcacatctcaaatcattaagggccagttaacttggtccccccaggagcatcaattccccagcaggagccccacagttcacatttttccatccagataaagacttgtttatccttactctttattccttatctctaagccagttccctatttgtttccracattctctccattcccatggtgactcaactcctttaacatgctttggtgtggcacctgtcagaggacgcttgaaagtgtaaggagattgtgtctcctgtttcccccttatccgcacacttattctgacccttcacaaagctctagtagattagggaagcatgatttctccttaccaaagacaggctgcctttccacaggaggtggagttttctcaagcacccgtaatcctgccctgagaggttctgtcagcttgcctggcatggaaactaaactctcgcaccatttcccagagacccctctggtgccttcggttcttcagcacgagggtcagtctcaagaaaaggctctcattttgtcctatgcttccatgatgtcaatcttcttatttattggcagcaggctggactggggggtggcagggggtgcagagagggga

SEQ ID NO: 282548 - DNA, 637 bp, Homo sapiens
gatttccacatgtgacttgtgaaagcaaaagggcttgatagtcacatctcaaatcattaagggccagttaacttggtccccccaggagcatcaattccccagcaggagccccacagttcacatttttccatccagataaagacttgtttatccttactctttattccttatctctaagccagttccctatttgtttccaacattctcyccattcccatggtgactcaactcctttaacatgctttggtgtggcacctgtcagaggacgcttgaaagtgtaaggagattgtgtctcctgtttcccccttatccgcacacttattctgacccttcacaaagctctagtagattagggaagcatgatttctccttaccaaagacaggctgcctttccacaggaggtggagttttctcaagcacccgtaatcctgccctgagaggttctgtcagcttgcctggcatggaaactaaactctcgcaccatttcccagagacccctctggtgccttcggttcttcagcacgagggtcagtctcaagaaaaggctctcattttgtcctatgcttccatgatgtcaatcttcttatttattggcagcaggctggactggggggtggcagggggtgcagagagggga

SEQ ID NO: 282549 - DNA, 637 bp, Homo sapiens
gatttccacatgtgacttgtgaaagcaaaagggcttgatagtcacatctcaaatcattaagggccagttaacttggtccccccaggagcatcaattccccagcaggagccccacagttcacatttttccatccagataaagacttgtttatccttactctttattccttatctctaagccagttccctatttgtttccaacattctctccattcccatggtgactcaactcctttaacaygctttggtgtggcacctgtcagaggacgcttgaaagtgtaaggagattgtgtctcctgtttcccccttatccgcacacttattctgacccttcacaaagctctagtagattagggaagcatgatttctccttaccaaagacaggctgcctttccacaggaggtggagttttctcaagcacccgtaatcctgccctgagaggttctgtcagcttgcctggcatggaaactaaactctcgcaccatttcccagagacccctctggtgccttcggttcttcagcacgagggtcagtctcaagaaaaggctctcattttgtcctatgcttccatgatgtcaatcttcttatttattggcagcaggctggactggggggtggcagggggtgcagagagggga

SEQ ID NO: 282550 - DNA, 562 bp, Homo sapiens
caatctagtactatgttgcccttatacaaataaggaaactaaggtgtagagagctaagcaactcgccaagtctagaaagagatagacccaggcaatctgactggacagactataattttgatggaggcttcaaagagatggggatgggaatatgagaggccttgaaaattgagaggcatgagtgttcaatcactgctaaagcagaaccaggaaggatagttccatcactttcaggaaacatgattatgaggaaatgcgcgttctcatgcacatcccacaagtgcacaccgccacttcgtcccagtggttcctcatgcaccttaacacacagaagcatgttctgacaaagatattttaygcactcatctactcacttcacagacacatgcttcagaaacactatggcaccaatgcattcacacagatgcgccaacattcacactcacatcttctggcaccacatgtacacacacatgcacacacacacgtgcacgctgagggggatatgagatgcagttatctcttgatgatcccttgggattctgccatgcctttgtttctc

SEQ ID NO: 282551 - DNA, 551 bp, Homo sapiens
atgagaaaacaggcctagggaggtggcacagaagggtacagccgagcttgaattcaaactgaacctgtgctctctgcatcacagtgagatgacccaggaggatatcatgttcagcctgcgggcagggtggggcagggcatgagcatggacccctctgccagctttgcctctgtggtcctcacctcccacatctgcatccagaggaagaattatgcttgcatttgctgagtgcgttatacatcatcttctttaattcccaggtcctagccaggtactgttatttgtcccrtgttacagatgtggtgacgagctcacttgctgacttttagtagtggaaccaggatttgagtctgtgtgactctctatcctgagttcttaacaaccatgcatttaaaaaaaaaatttatatattattgcttatcttgtacacctcatttattcactcattcatttggtcattcattcattcaacagatatttgagtgctagattctgggcactggttgtgacagggtgagatgggacagtgagtgtgaaagactttggaagca

SEQ ID NO: 282552 - DNA, 533 bp, Homo sapiens
gtctgacttcaccaacaacgtggtgagatgcaacattcactacacaggtcgctcgtttctgcaacaaactgcaaaattgtccagtaagagtttgcccaccacccttcctggctccgtccctttcctgcctggggagcaggcaaggccacctgaratacctaagatacctgcactttaggtcaccttgatggccgaacgcagctgcagcagggcccatcaaaaagagccttgtccgtgccaaccccaagctgagtgtttacggtggggctcaggccgtagggtgttgatctggggctgcatcctgtggctccctgagatgtcccaagtgaaaaccagcagaaggcagagtcatttgatgcaaggccatgagctctgcagtcccagttccacagcttcctcgctatgtgacattgggttacttccctgagctactttcctcaactataaaataggtatttccacataggctggcaatgaggatctacaggcctgatgtctgcatgttcacagtggcacacagtgaacagcagctg

SEQ ID NO: 282553 - DNA, 590 bp, Homo sapiens
atttgctttttttttttgtaaaatgagtataacgggcttaagtacctttaaagtaagagaaaagaatgactgatacagttttcgtagaacttgggattctagcaaaactctgttattcaccttcttttatagaccaagttgaaattactagcaaaggaggacagttatcccatgcaaagatgtgttgtaacttctaataagaaatcaacgttgaacatgacaatgtgttcagctaataagtggtttttggagtttaatttaaacttatttyaaaattttacatttttcttccaggatcagaaaaaaaatgtaaaataaaaaaactccactttttaagaaatattcaaataatgcagctgtggtagattcatctcccagtattttgtcctgtcacctctcaccaatgtacctttgatcactaagttctacctcttgtctcttcaattacgtaggggacaagaagcaccccctttcctccgtgttactggaacacttcatttcttgtgatggttattacggtgaggacttataaattttattacttattcctatttctcttctaggaaatgtatttttcttcaactagatct

SEQ ID NO: 282554 - DNA, 570 bp, Homo sapiens
aataggtatgtataaaaatgctcaacatcattaatcgtcaggaaagcacaaatcaaaactaccatgagatatcacctcatatctattggaatggccaacataaaaaagatgaaaataacacggtttagaaatgatgtggagaaagggaatccttgaacactgttgatgggaatgtaaattagtataagcattatgggaaatgatatggaggttcctcaaagaattgaaaatggaaataagtcttctcattacaaaaaatagtgtgtgaagtaatgcatacattagtttgatttagccattttacagtgaatatatatttcaaaacatcattttgtacacaataaatatctacaattttattagtcaattaaaataaataaatcaattagaaaaacaaaytttagtgtctacaaataaagttttattggaacacagccacttgcacttgtttacgtatagcctatggttgtatcacactacaacgacagagttgagtagttgttatagagacatctagctctttacagaaaaaaaaaattgctgaccattagtctagaaacatgttgtata

SEQ ID NO: 282555 - DNA, 570 bp, Homo sapiens
aataggtatgtataaaaatgctcaacatcattaatcgtcaggaaagcacaaatcaaaactaccatgagatatcacctcatatctattggaatggccaacataaaaaagatgaaaataacacggtttagaaatgatgtggagaaagggaatccttgaacactgttgatgggaatgtaaattagtataagcattatgggaaatgatatggaggttcctcaaagaattgaaaatggaaataagtcttctcattacaaaaaatagtgtgtgaagtaatgcatacattagtttgatttagccattttacagtgaatatatatttcaaaacatcattttgtacacaataaatatctacaattttattagtcaattaaaataaataaatcaattagaaaaacaaattttagtgtctacaaatraagttttattggaacacagccacttgcacttgtttacgtatagcctatggttgtatcacactacaacgacagagttgagtagttgttatagagacatctagctctttacagaaaaaaaaaattgctgaccattagtctagaaacatgttgtata

SEQ ID NO: 282556 - DNA, 571 bp, Homo sapiens
ctgcttaatgtgctactatattcttagcccatagtatatacaataagctctcagtatttgttgaatgaatgaataaatgaatgacttgatgagttttctttggaagattcactatgccttcatgactttgaatggattatggaatgttcaaatgaggtttgtgtatactttgagaaccagtgaatgtcccttttcaaatgaacaataaaaagtgaaaaaggaaagcagcatggtttagttaaaagagaatagataggaaggcaagagatagactttgtttcattagctatatgaccttggtccagtcacttcccttcagtactcagttttttgaataaaatagaacaggtgatgtgtgttctttccagttttcccgtagtatggtttgattattctggggactgtttggcaataaacgamctcaatacctaaaacttctcttttatatcacagaggaaacataaaatatgagagacatgattttttttttatttatttatttcttttctgagatggagtcttgctctgtggcccaggatggagtgcagtggcatgatcccggctcactgca

SEQ ID NO: 282557 - DNA, 571 bp, Homo sapiens
ctgcttaatgtgctactatattcttagcccatagtatatacaataagctctcagtatttgttgaatgaatgaataaatgaatgacttgatgagttttctttggaagattcactatgccttcatgactttgaatggattatggaatgttcaaatgaggtttgtgtatactttgagaaccagtgaatgtcccttttcaaatgaacaataaaaagtgaaaaaggaaagcagcatggtttagttaaaagagaatagataggaaggcaagagatagactttgtttcattagctatatgaccttggtccagtcacttcccttcagtactcagttttttgaataaaatagaacaggtgatgtgtgttctttccagttttcccgtagtatggtttgattattctggggactgtttggcaataaacgaactcaatacctaaaacttctcttttatatcacagaggaaacataaaatatgagagacatgattttttttttatttatttatttcttttctgagatggartcttgctctgtggcccaggatggagtgcagtggcatgatcccggctcactgca

SEQ ID NO: 282558 - DNA, 387 bp, Homo sapiens
tattcactgtcatgagaatagtatgggggaaatgacccctaygattcaattatctcccacctggtccctcccacaacacgtgagaattatgggagtacaattcaagatgagatttggttggggacacagagccaaaccacataagcatgcatctctataaatatgtagctctgccttatgactaatagttttatgatctatgacatctttcactctttgatcacgacttggtttatttctctgtcttcatcaaagttataggtaaacaatttctacttagaaaaaaatatgtgatttttgtaatgtaagatgttctcttatgaggcaaaagtgtcacttgaagcattctcgctttggcaaagtgaatattagaaaagatctgaaaac

SEQ ID NO: 282559 - DNA, 387 bp, Homo sapiens
tattcactgtcatgagaatagtatgggggaaatgacccctacgattcaattatctcccacctggtccctcccacaacacgtgagaattatgggagtacaattcaagatgagatttggttggggacacagagccaaaccacataagcatgcatctctataaatatgtagctctgccttatgactaatagttttatgatctatgacatctttcactctttgatcacgacttggtttatttctctrtcttcatcaaagttataggtaaacaatttctacttagaaaaaaatatgtgatttttgtaatgtaagatgttctcttatgaggcaaaagtgtcacttgaagcattctcgctttggcaaagtgaatattagaaaagatctgaaaac

SEQ ID NO: 282560 - DNA, 458 bp, Homo sapiens
tttgccatgttggccaggctgatttcaaacacctgcctagtctcgaactcctggcctgaagtgatccgcccacttcagcctcccaaagttctgggattacaggtgtgaaacactgcrcccagcccaaatttaaatgttatatccctccaatagcatactctgaagccagatcaaatactgtacaatgacaaataacaaaatcatgcaatataattataagtatagaatgggcccaactatgtacaaaatatattagaaaataccaaaggatgaaaatcatactgctaatggtggctttttccagaaatggaattgaaggccaaagaagggggaattatttacttttactttgtacatttctgtagttactttttgcaatgagaatttgttactattataataaaaaatcatataaaacacaaaaaacagaggtagacagaaggcttggcaaaaataat

SEQ ID NO: 282561 - DNA, 607 bp, Homo sapiens
tttactttgtacatttctgtagttactttttgcaatgagaatttgttactattataataaaaaatcatataaaacacaaaaaacagaggtagacagaaggcttggcaaaaataatgcctagatttaaatagaacatagcatttataatgtagtacagtgtaatgctacagaaactgaaattatggaagttggcccaaaaaaagcttagcctaagatgaaaaaaaaacctgccttgtcagcatttagctcaygtactcaccaggccagaatgaaataatagcttctcatctttatccaaaagggattagtcctagggaagaaaattccttctttttcatgaactctgtgaatggcaggtcttattaaaatattcacctaaattttgaaactgggagttcaatgtatgaatacttttagaatgaattgttatgctttgtgatatactttagtgatgattggttccactgtctttcaaggctgctgggatattatatgaaataatatatgtgaaactgttgtcaaagtgtcctgttaattgttattgttcaactgttggcttaaagcacaaaagcatcaccataagtaataaccatgagttttaaaattg

SEQ ID NO: 282562 - DNA, 561 bp, Homo sapiens
ttttttgtctgttttgttgttgacattatttatttaaacctatacccatctgtttaaactttaggcttgggcatttaattgcagaagtactattttggaaagctgtacctaccataggtatatttggctgagatttaggatttgagtttgctgcaagacartggaaggagaaatacagttattttaccatccttttcatatattaaggaaatgcatttggttgcttcagtatctcattatgattgtttttatatgaaggctttccacattcatttatttattcagtcagtcatttagtcactcacaatcaagtctctcatatatgcctcatggtgttttaggtcctcaagatacaatggtgaaaaaggcaaagcccctgtcttcgtggagcatcttgtctggtgcatagctatagctggaaaagtctggatattttattttatcacatccttcaaaaattatgaaattgtggtgaactaaatgtcatttcccaaagcttactgccaatttatttcaaatgtggcattactgtgaactgaaaaatgtttacttttgttaggc

SEQ ID NO: 282563 - DNA, 465 bp, Homo sapiens
cctggtgatgctgatgaatcctactactgccatcactttrttgaaccttctttgtaaaatggcttgaatcaaggacaccctaaagggtgatttcaaccagtgaatcaaggtagtcactagagctgatgtgtctctctaacctatttcactccagttttttatatacttttttctattagtatttctctggttaaaaattgcagatcgaatgctacctttattaagcttcatttggaattccttgcttttccaaacagaacctattttcgaagtctgttgcttctttttgtttctttctttacattaagaaaattaatttcttagaaataaatcctccaaggaagatgactataactccaaacttagacaaatttagtcccataatacactgctacctatacatctaatttccagaactttctaggatatgtttttttcctctaccatttgtcctttcaattagtt

SEQ ID NO: 282564 - DNA, 1188 bp, Homo sapiens
tgttctgcaactggaacaacaaaacccatctgaaatatcactactcattgacaacgcatttagttacccaagagcgcatgttatcatccatgtactcactggagtagcacttttaattctcttcaataactttttctttgtgttcaaaacctggtaaactctttggtgcaggaggcctaacatttggcctatctcagtttttaacatgctttcttcactaagtttaatsatttccagctttggatttaaagtgagagatgtgtaactcttcttttcacttgaatacttactgattattgaagggttattaattagcctaatttaaatattattctatttcagaaaatagtggggcctgaggaagaggaaaagattggggaacaactgtttggtggggcaattagaacacacacaacatttattgattaaattggctatttatatgggtttgtggtacccccaaaattataatagtaatatctaagatcagtactctaagagcaccataacagatataatgaaaaattgagaattactgaaatgtgacacaaagaagtgaagtgaacatacactgttggaaagtggcattgatagacttattwttgttgttctgtttaaattggttttccttgaagagagttaatcctatatttgaaaggcaattaagctgaaagcaggacaagcactaaagcaaactgaagtaccataaggaaagccaccctccataaaacagagatataaagctaagcagagaggttctttccttaaaagtgttcatgtttgaattggcctaatatagaggaaaaagcaggggggcttctgtgtcaaatgtatttgacttaaaatcttgaaattgacacttaccagctaggtaacactgtgaaagttttttgtttgcttgcttctgctttttttttaatctactttgagcctcagttttctcctctcccatctatgaattaaaataaataaaaataaaaataaaaataaawaaataaataaaacaaaataccacatgttctcatttaaaagtgggagctgaacggtgagtacacatggacacaaagaagggaacaactaacaccagggcatacttgaaggtagaggagggtggggatcaaaaaactacctgtcaggtactatgcttattacctgggtgatgaaataatctggacactaaacccctgc

SEQ ID NO: 282565 - DNA, 586 bp, Homo sapiens
ttgttgttctgtttaaattggttttccttgaagagagttaatcctatatttgaaaggcaattaagctgaaagcaggacaagcactaaagcaaactgaagtaccataaggaaagccaccctccataaaacagagatataaagctaagcagagaggttctttccttaaaagtgttcatgtttgaattggcctaatatagaggaaaaagcaggggggcttctgtgtcaaatgtatttgacttaaaatcttgaaattgacacttaccagctaggtaacactgtgaaagttttttgtttgcttgcttctgctttttttttaatctactttgagcctcagttttctcctctcccatctatgaattaaaataaataaaaataaaaataaaaataaataaataaataaaacaaaataccacatgttctcatttaaaagtgggagctgaayggtgagtacacatggacacaaagaagggaacaactaacaccagggcatacttgaaggtagaggagggtggggatcaaaaaactacctgtcaggtactatgcttattacctgggtgatgaaataatctggacactaaacccctgc

SEQ ID NO: 282566 - DNA, 562 bp, Homo sapiens
aatactagtaaactgaatgaagtagccctcaaaaagatagtacaccatgatcaagtgggttttattgcacggatgcaatggtatttcatacacaaatcaataaatgattcaacrcataaacagaactataaacaaaaccatacaatcatttcaatagatgaggaaaaaaattgataaaattcagcatcaattgctgagaaaaacccttaataaactaggcatcaaaggaacacatatcaaaataataaaagccatataagactaacccagccaacatcatactgcatgaggaaaaattgaaagctttcccccaagacctggaacaaggcaaggatggccactttcacacactcctattcaacataatactggaagtcctagcaagaggaatcaggaaagagaaagatataaaaggcattcaaattggaaaagaggaagttgaattatccttttttgctggtgatatgatcttatacctgcaaaactctaaggactccgacaaaagactcctagatttcataaataaattctgtaaggtttcaggatacaaaattaacataca

SEQ ID NO: 282567 - DNA, 560 bp, Homo sapiens
gtattgcaaacatgtagcacagtgcctgatgtatagtatttgctcaaataatataatataaaggaaaactcaatttaagtggctggagttggtaccagtgagaccmctaatcaccttgagaaggaaagtaggattgaagtttttgtggaaagagtaaactaccccggatagtctaactctcaatatgactgctgcaattgtcttgctgctttctgttcttagcttttaccacaccctgaaaaattgcattgttgctaaaaggaacttgattgtcagccaaagatagtgaaaggcttttgtctatatccaatcctcaatagcttttgcaggcataatgcaaacatcgtgctgcatcatggatgtgtttcaaagttcacctagcaaaacttgaggggcgaaaaggtagccagcacgcacacaggtggctgctcttgctctgtggcaccaacaacaaggacccctcattgtgatggctttgtgtggtggacatcagtctacagcagcaagattctccccaaattcagactcccaaatagagctttgtgagtcatcacccttgt

SEQ ID NO: 282568 - DNA, 560 bp, Homo sapiens
gtattgcaaacatgtagcacagtgcctgatgtatagtatttgctcaaataatataatataaaggaaaactcaatttaagtggctggagttggtaccagtgagacccctaatcaccttgagaaggaaagtaggattgaagtttttgtggaaagagtaaactaccccggatagtctaactctcaatatgactgctgcaattgtcttgctgctttctgttcttagcttttaccacaccctgaaaaattgcattgttgctaaaaggaacttgattgtcagccaragatagtgaaaggcttttgtctatatccaatcctcaatagcttttgcaggcataatgcaaacatcgtgctgcatcatggatgtgtttcaaagttcacctagcaaaacttgaggggcgaaaaggtagccagcacgcacacaggtggctgctcttgctctgtggcaccaacaacaaggacccctcattgtgatggctttgtgtggtggacatcagtctacagcagcaagattctccccaaattcagactcccaaatagagctttgtgagtcatcacccttgt

SEQ ID NO: 282569 - DNA, 1204 bp, Homo sapiens
acggcagtgtctgtaatatcatttaataagttataatgcttccttttgtcatttttcccctctgactgagatgggcacccttaagctggctgacagattcctgagtgctgacgatcactgctctggcaaatgggaaggagtacaatgatgctgcaaatgagtgccaatgaaagtggtagatctttcaaataaattgcatactgcttccarattggatgtaattggagtgtattcatcaaattttgaatttggactcaatagtaacaggaagttagtattgaaacattgaataagagaacacttataaaatagaagtcaatgattgtgtatatgcatatgaaagagggaaggtcattagaaagtactcagtagctggttttcccaggtctagagacaatcaacatgaagagcataatacatttatatgttaaataccctcatgtgtatgcatgtatgtgtgtgcattttatctctgtatatgcatgtatgtgtgtccatttttatctctgtatctgcttatctaggctttttttatcttcctccttttaaatttccaaagaacttaactgattaactatatccactcttagcaagacawgatgatgaagaaaaagaagaaatggtgaatggttgcagtggcaagaatacaagaattagtattwtatgatgtttgaaagacagatttaagagaaattatgaattacttgatggtcattgaaggagtctggatatttttcagtaggtcagttagattgtcttaaatatttgcctcacagaattacaggattacaagggtttatatagataggcataatggaattgcatgacagacttactatgattatacgtatatatgatagtagttcatttctacatacacatgtgtgtgcatgcacgcacacagacacacacacaggcagtccatggctggtaacaaggattctattgtcatcagagacccaaattcaacatcttctccgtatgatttacaactttttatcttgtccattccagtgaaaagataatacctcctagcctttcagaaacgagtaaagaaagacattctctgccatttaaatatatttcctggaagttgcacaaaccacttttatctacattactttaggcagaatgtaactacatctatctgggcaaggaattagaaaggtaatgtttgttctactcagtcacataaccaggtgag

SEQ ID NO: 282570 - DNA, 606 bp, Homo sapiens
gatgatgaagaaaaagaagaaatggtgaatggttgcagtggcaagaatacaagaattagtattttatgatgtttgaragacagatttaagagaaattatgaattacttgatggtcattgaaggagtctggatatttttcagtaggtcagttagattgtcttaaatatttgcctcacagaattacaggattacaagggtttatatagataggcataatggaattgcatgacagacttactatgattatacgtatatatgatagtagttcatttctacatacacatgtgtgtgcatgcacgcacacagacacacacacaggcagtccatggctggtaacaaggattctattgtcatcagagacccaaattcaacatcttctccgtatgatttacaactttttatcttgtccattccagtgaaaagataatacctcctagcctttcagaaacgagtaaagaaagacattctctgccatttaaatatatttcctggaagttgcacaaaccacttttatctacattactttaggcagaatgtaactacatctatctgggcaaggaattagaaaggtaatgtttgttctactcagtcacataaccaggtgag

SEQ ID NO: 282571 - DNA, 606 bp, Homo sapiens
gatgatgaagaaaaagaagaaatggtgaatggttgcagtggcaagaatacaagaattagtattttatgatgtttgaaagacagatttaagagaaattatgaattacttgatggtcattgaaggagtctggatatttttcagtaggtcagttagattgtcttaaatatttgcmtcacagaattacaggattacaagggtttatatagataggcataatggaattgcatgacagacttactatgattatacgtatatatgatagtagttcatttctacatacacatgtgtgtgcatgcacgcacacagacacacacacaggcagtccatggctggtaacaaggattctattgtcatcagagacccaaattcaacatcttctccgtatgatttacaactttttatcttgtccattccagtgaaaagataatacctcctagcctttcagaaacgagtaaagaaagacattctctgccatttaaatatatttcctggaagttgcacaaaccacttttatctacattactttaggcagaatgtaactacatctatctgggcaaggaattagaaaggtaatgtttgttctactcagtcacataaccaggtgag

SEQ ID NO: 282572 - DNA, 602 bp, Homo sapiens
gaattagtattttatgatgtttgaaagacagatttaagagaaattatgaattacttgatggtcattgaaggagtctggatatttttcagtaggtcagttagattgtcttaaatatttgcctcacagaattacaggattacaagggtttatatagataggcataatggaattgcatgacagacttactatgattatasgtatatatgatagtagttcatttctacatacacatgtgtgtgcatgcacgcacacagacacacacacaggcagtccatggctggtaacaaggattctattgtcatcagagacccaaattcaacatcttctccgtatgatttacaactttttatcttgtccattccagtgaaaagataatacctcctagcctttcagaaacgagtaaagaaagacattctctgccatttaaatatatttcctggaagttgcacaaaccacttttatctacattactttaggcagaatgtaactacatctatctgggcaaggaattagaaaggtaatgtttgttctactcagtcacataaccaggtgagaatttgagttgtattgctgtagaagaaaaggagaatggctactgcaag

SEQ ID NO: 282573 - DNA, 559 bp, Homo sapiens
ttcccttcttctcttgtggtatctcaaagctatcactgaaatcaacagagtagaagtacactttgggaatattacataagtctggctgtgttgcctagcttcctgcctctgggcagaactctagttaaataattctggacagatggatgcctatccttggagagcagggacacaggagtgaggatggacacaaaagcagcatgtcagcctgcttccatctggaactagtgagcacctcgttttgtacaaaggcagtagccatgctgtttaaatggcactctgcatgaytttgttgttaaatatgggcttcaggagcattatatttcccttatggcccaggcaagttatattttggggtgtgatttttcacctggtgtgattttggcgctcacttactcttttcaagtgtggacaactggttgaagccagttgtgctgttttcattgttgtgacatacatgacagatgaccttctcatgcatagtatgcccaaggctttgggctatttctgacgtgttgctcccatttaaaaggataatgaataacatcccactttatac

SEQ ID NO: 282574 - DNA, 582 bp, Homo sapiens
gggtttagagttacaaactgtgtaagcaaagcatagaacccagttatgtcattagctacaacttattgtacctaccagaaaaaactaggccaccttttagcaaagaagaaaaggataatctcaaaggcagcagtcacagacaacttattccctccaaaataaaaaggtaattatagctcaaacctaaacaaaagattgattcatgtcctttctatggccctggacaacactttgatcctatcagggtttcaccagaatctctcataattacatggatatagaattactcaaacatttactagccttccctccaaggcagactgggaaataaagaacaggagagkagagaagtcaaggacttgactgcaggatcccatgatgcataagatgaaccagatgctcacccatgattgctcaatgggtgacttcatcattgatagggaagaaaaaaaatccacaacaaatgatctctaaccatattactcccctacttctttttagaacacataaactacaattcagaaggaaaatgttagaagatattttaccacaggtagctggtgaggttttaggacacgatac

SEQ ID NO: 282575 - DNA, 593 bp, Homo sapiens
cttctaattgttttattataccttgattcaaatcaaagttaaatcacaggccataaaagtcaacggcatttagtgaaaaacttaagttataaagctgttgccagataagatggaataatcaaacaccaccttctctctcccactaaaaatgcagctataaaacctagacagaatgcataagacaggcatatgagaaaaaccaattggctaacaataaagtaccactgaatgggcagtgaggttaacattgtctcccctggttctcctgctgcttgragagcaagtgtgttgcaaggaaggataattaaagccccaattttgtcatcagaggatcaaaagggagaccccagtggaaccagaaggtactggggagatatcagatggggaggagctcagaaaagtaacatcatgaagttgttcatgaactcccaagctgcacacgtgtggatctggtccaaatcatactaaaggctttgagaactgaaataatcaacacccagattgcagactggccactgaatgtcacatacatgggacagatccaaatagcactgcaaagactttctgaaaattcatctgccattagaaccata

SEQ ID NO: 282576 - DNA, 593 bp, Homo sapiens
cttctaattgttttattataccttgattcaaatcaaagttaaatcacaggccataaaagtcaacggcatttagtgaaaaacttaagttataaagctgttgccagataagatggaataatcaaacaccaccttctctctcccactaaaaatgcagctataaaacctagacagaatgcataagacaggcatatgagaaaaaccaattggctaacaataaagtaccactgaatgggcagtgaggttaacattgtctcccctggttctcctgctgcttgaagagcaagtgtgttgcaaggaaggataattaaagccccaattttgtcatcagaggatcaaaagggagaccccagtggaaccagaaggtactggggagatatcagatggggaggagctcagaaaagtaacatcatgaagttgttcatgaactcccaagctgcacaygtgtggatctggtccaaatcatactaaaggctttgagaactgaaataatcaacacccagattgcagactggccactgaatgtcacatacatgggacagatccaaatagcactgcaaagactttctgaaaattcatctgccattagaaccata

SEQ ID NO: 282577 - DNA, 513 bp, Homo sapiens
acagctaatttttttttttttttttttttttttagtaaagacaaggtctcagtatattgcccaggctggtcttgaactcctgggctcaagtgatcctcctgcctcagcctctcaaagtgctgggattatagacgtgagccactgcacccaatttgagcatatttcctttacaaacaggggaattatttttaaagagaagcaggcaagtggctcatttctctctttcctttactaatcataaagcaytgaaccaccatgcagaagagaaactagagcttggaaatggtgacccctctctactggtgcctcccccttctggaagcctatgggcatggcccatggtgaaaattcttcctgtggttactgagccctggaagcttcagaatgaagtcagagtggtggtgctggggtaagcagagcaggaagaggaaaaggggaaatggttgtggacaggaggctggtggaatcctggcccagtcatcccctccctgcaggcacagcgctgggctccct

SEQ ID NO: 282578 - DNA, 846 bp, Homo sapiens
tttgcaacctctgcagaagcacttgggaggaaccagcctggtctgaagtctagtctctgagcagccatctctcaaacctggtgaggaaggcaagttcagactcacagtggtggctgctttggatatctgccatcacactctctctttccaagggccctagttagccagttagccagtcacctaggatgaggctgaagctccccttgctcctcttgcacaaggtggtgtggtgtcagggcctccgatacccsccctccctagtccatcctgaaaggcaggcctcccaactggggctgaggtcattccctcttcctcaaagtctctcagctgtaccttaaaatcccagtggacttttccaggccatgttgctctgtctgtgttatagctgwgttgaaaagccctttttgaagattgacctagagatataaacctcaacaagaatattttaggaaaaagcatactccatgtctcaaacagcttcctcagaccaaaaatcatatggcatggtgtttaaaagcagaggtttagaagtcagatacatctaagtttgagcgctttttcagccatttaataggcgcagacctggtcaagtcagaaaactttttagccttcatttttgaacctatatcatggggttaataaaggaacttcctatcccgtagtgaggtttgtcagagatgtcaccttggctaacaatcaacccgacacattctagtgctcaaaaagtgttcgctataattwccttatcagtttttcacttagacattatcctctatttgtaacatgggaactatatgcatcattactgaagaagagatattttgtagcttttacaaagttacaaat

SEQ ID NO: 282579 - DNA, 598 bp, Homo sapiens
aagaacacatgtacattaaagattttgttatatacatttctattatcaaagttacttgcgcttagcttacactgggatgacaggccatttacattyacagttgcctctaacagcagtctctcaagaagtatgcaggatactggcagcccaggcaagtggagtcatcatgatttggacatggggtcctacagggcaaaatttgaactgtgttgcctgttctatagaatccaggaatggaaagagactaaaatgtaatgtcagacagaaattctctggcaaggaatattccaggaaaattactatcgacatgtccaaatgacaggagcatggacaaaacaagaaagttagaagaagaaacagaactggaatggaattgaaacgtgttataaataaggaaaacagagtctttattgaggactaagaataaaactagaatatctacctgtcttcattacccactatcctcataatacatgctgggtaacactaacatcaggtaaagtaagtaagatgaagcaaaagttatgagaagtgaatgtaattttatttgagtcataaagtagcagaaaatagtgaccaaataattagccaagatttg

SEQ ID NO: 282580 - DNA, 598 bp, Homo sapiens
aagaacacatgtacattaaagattttgttatatacatttctattatcaaagttacttgcgcttagcttacactgggatgacaggccatttacatttacagttgcctctaacagcagtctctcaagaagtatgcaggatactggcagcccaggcaagtggagtcatcatgatttggacatggggtcctacagggcaaaatttgaactgtgttgcctgttctatagaatccaggaatggaaagagactaaaatgtaaygtcagacagaaattctctggcaaggaatattccaggaaaattactatcgacatgtccaaatgacaggagcatggacaaaacaagaaagttagaagaagaaacagaactggaatggaattgaaacgtgttataaataaggaaaacagagtctttattgaggactaagaataaaactagaatatctacctgtcttcattacccactatcctcataatacatgctgggtaacactaacatcaggtaaagtaagtaagatgaagcaaaagttatgagaagtgaatgtaattttatttgagtcataaagtagcagaaaatagtgaccaaataattagccaagatttg

SEQ ID NO: 282581 - DNA, 527 bp, Homo sapiens
gtttttgtatattgggtattgtgaataatgctacaatgagcatstgaatgccaatatctttaaaggtcatgatttcatttctcttgggtatatacctaacagaaagattctgcttttaacattttgaggaatatcaatattgttttccctaatggatacaccaatttacatccccaccaacagtgtacatggattcccttttatctacaccctggccaacactcgttatctcttgtctttttgataataaccatcctaacaggtgtgaggtgatattgattttaatttgtaattctttgatgattagtgatgttgagcacctctttatatacttattgaccattttgtgtttttattggagaactgtcgattcagattctttacctattgagttgtgtgaattccttatgtattttggatattaatctcttatcaaatatataatctgcaagtattttctcccaatccataaggctacctttatattttgttgattgtttcctttgctgtacagaagctttctagtt

SEQ ID NO: 282582 - DNA, 548 bp, Homo sapiens
aacatgaccttaatttacttayttacattcttactcttaataatgtctatatcgttccatattataaagcttcatttatttttatatttaaagtgatatataaaaatcgagattctaatattttcttcctgcacccaaatggatacacacactttactttgtaagccgctgtcctaagctgattaccctgcttccacttaaaggctcacccttcatttaggtataatacagttgataatagttacatttactaagttataaccaacctgcttccctgagattagactcatgtgactttcattgaaatttcagatgacctcaaactctttattcattcactaacatcttttacttttctctcacagaggcctagtctgttcagttgcaatgatgaaatactggctcaagttctttaccccttcctatagccacattttcccatctcattttgtagtgccctctcactgagagttggggttacctactacaccaagtatccatcaatttaactatgtaaattgctttagccaatgggctgttaaaacata

SEQ ID NO: 282583 - DNA, 1048 bp, Homo sapiens
aacatgaccttaatttacttatttacattcttactcttaataatgtctatatcgttccatattataaagcttcatttatttttatatttaaagtgatatataaaaatcgagattctaatattttcttcctgcacccaaatggatacacacactttactttgtaagccgctgtcctaagctgattaccctgcttccacttaaaggctcacccttcatttaggtataatacagttgayaatagttacatttactaagttataaccaacctgcttccctgagattagactcatgtgactttcattgaaatttcagatgacctcaaactctttattcattcactaacatcttttacttttctctcacagaggcctagtctgttcagttgcaatgatgaaatactggctcaagttctttaccccttcctatagccacattttcccatctcattttgtagtgccctctcactgagagttggggttacctactacaccaagtatccatcaatttaactatgtaaattgctttagccaatgggctgttaaaacatawatcatatccacttcattattaaagtcctcttctgctgaggtcacccattggtgagcactcacttgggataaaaatatcttcacagtttttaaccactcagaggggtccatccacatacttcttcctcaaatttctttgtcaccaattttccaatcatgcttcttccaagtccttgaccatccagccaaaccattagctacagcctatgaatcagtatataattgcacatctggccagttttccttccatgcaaagtgcacaaccagatgcacagttcgaagttctgcccgctggaaagatctcccttcwctgccgtccttcagggatgtcctagaacttgggctgcagtgctgcagctgtccacttttaagtggtgcctgcatatcatgcagaaccatctgtgaaccaggcctaagtcttctcttcctttgtcaactgatcatagggaactccccatgaggccatcggtgcagagagaaggcagggtagcaggagtgga

SEQ ID NO: 282584 - DNA, 609 bp, Homo sapiens
ccggacttggtggctcatgcctgtagtcccagcactttgggaggctgaggtgggcagatcacaaggtcaggagatggagaccatcctggctaacacggtgaaaccccttctctactaaaaatayaaaaaattagccgggtgtggtggcgggtgcctgtagtcccagctactagggaggctgaggcaggagaatggcatgaacccaggaggcggagctggcagtgagccgagatcatgccactgcactccggcctgggtgacagagtgagactccgtctcaaaaaacaaacaaacagaaaaactaagaaactcgaatcaaacaataacatctgttaggctgtagatttttggtgagtacagagagttcaaatgcatttcgtttcatacagaattcaaggtacatttgaagacattagctacttcttttatatcaattttagagtaattcaaactccaaaagggctatgtttggattgatcatttttctccttagttctacagatagccctgattcatttcgactttttataccagaaaacccaaatacagttgtttgaatgcataatacttttcttttcttttcccatgtggaataagtccacaagtagt

SEQ ID NO: 282585 - DNA, 482 bp, Homo sapiens
gctaacattttggaaatttaagaaatataatgatactggttgcttgttcctaatgtcactggacaaagtgatgaaagaaaaaaataagttcagtgatttgaattacaagctcaagagccacatcartgatttaagagcttctaggtgtgccctgagaaagagcattatctcctaccactggagggctgcaagtgctgaaaatcaaatgtaggacctcatcctgtgattggctgaatcacaaggcaagttgaactcctagccttactgggtgttttctgataaggtgacaacatggattaggaaagcatgggatcctataagttgagatgggacatgcagagagactttaatgaagctgggaacatttagcatctgaattctgatgagtcttctttggcagtggaagtggtctctccaccgctagtagaagtaggctttctaaccccagcaaaagcagccttcctatctccagttgcagcagc

SEQ ID NO: 282586 - DNA, 606 bp, Homo sapiens
agggggtcatctaatgaatggacagaatatgtaatcattagctatttttattcttcctacttttgtttttataacagaatgacgatccctcagctaaaagtctcagatttaatattctccaaaatctgaaatgtttcaagtgccaagatgtcattgtagatttcagatttttcagattatggatgctgtttcagatttttcagattatggatgctgaaccagtatgtattctacaaacgttccaaaatccaaaaatattcaaaagacttcttgtcccaagcattttggataagggatagtcgacctgtactaccattctaaaaaatgtatcttgctgatatgacagaaaacaacaacaacaataacaaaatcctagaataaaagatagagaaaaaggtatatgacattagttcgggtaatgattttttaggtttgactgtgaaaacayaggcaacaaaaacaaagataaatgagtgagattacatcaagataaaaagttttcatatatttaaaaaattaacagagtgataaaaatatgtgaattggtagaaaaaatttgcaagtcacacatctgaaaggtgcttcatttacaaaatatataaaaac

SEQ ID NO: 282587 - DNA, 565 bp, Homo sapiens
tcagataaatgaaatgggaagatgataaccaaagggtaccaagcctcagataggaagaataattttgatgtttttttgagaacagttgcagagtatggtaaatatagctaataattaagttctgtaacttctatttcactaagagagtatttctaatattctcattacaaaatgttaaatattagaggtgacagatatattaattagctgastttaatcttcccacatgtattaaaaatcataacatcattttgtaatctatatgtatatatacagttatgtgtcaatagagaataaaaaagaaagtatagagataagtgatatacaagactcctctttgaacactgcttttaaaagccagagtggcaaattggcctattaactgatatagaaatagtttgaaaagttgttgaatacctacatgataaataccatgacaatatcacaaaggataaagtagtgctatatattcactacaaatattctgcattaaaagtttcataattcaatttgaatgaaaatacacccagctggatttatatatcaatataaatgtaactgtata

SEQ ID NO: 282588 - DNA, 1098 bp, Homo sapiens
gagcaaattgagtttacatgaggtgtagtaccttactgaagatcatactgttagcaagtagtagagattagatacaaacccaggtaacctaactcagaagtccacactctttactgctaaattatattgctgaatctataaatgagattttctttcaaagacacttatgtctaaattgtgtatttttcaatataattaatctaacccttgcattttactggtgaagttgctaagatctttatgaattttaaagttgcatcatacattaaagtgtttaaattgcttgagaagtggctatacatagagaaaaatgggccttaaaggcaggcaagagtttgaattctgcttgtgccacagcaatgatgtgactttgctaaactgcagacgcttcctccatctgcaaaaggraaatgatattttgggggttgttggaaggaaaacctataagcatacgtgccttaaatacagagttgcccacaaatgttaaattctcccctctctacttcctttctgagcctcagtggctttatctctaaaatgggaattagaatatgcagcttatgtaattccaaagattaaatgatgtatwctccgcctcttcaccaatcttataatatatttgtgcttcccttagcataaagtcaaataccttatcatgttaaaatacagactttcatgttctacaaatagtaaatatgagtccatagatcataggaagatcccaggaaacaactattttaaaaaataattcaaatggttacaatctaagtatctataaatcacattttggggaatattattataaattctaggagggtgctgaaaaatatttgatgaatgaatgaatgttcccagtgtctattttctaactttccaaaatgtcaataaccttacagcaaccagcttctacatgctggctttaaagggagtaaacatcattaatttacttttgatacaaagggtttgccatgtttgtcacaggttttcttaatgaactacatttacaaatggcaacttctgataaaggataacagattaagttcagtgtcaattttgaccagatattaaawctcacaactctctaaacttccttgatat

SEQ ID NO: 282589 - DNA, 1079 bp, Homo sapiens
aaagggtgttctttccagtcttcagtttctttctgattttggaagtggtgacactgtggccctagaagtagatattctatctgcatttcttaattctctatcrcttgaaatcttcttttatcaatgtttaaaaaagaatttagctgtcttttattagttaataattctttatatcagattttccctgtgatgtcctgtgactggactgtgtttatatagtatgctcccatttggtagctttgtgattaactagacttcctctaaaacaactgttggcaagcctgactaaatgaggtaaataaagacagaaataaagtaggaaatctgacaagagcagagcaatctcatagaaatttttttaggctagatgaattaagggaaatgtattattagggaaaatgtctagggccttcaagattttcaaaaacctactaagatgctgaatatgcatttcatttttgagaatatatctatatttgggtgtgcatatacatactcactcacacgcatgtattctgaaatataaaaagaaaactaaawaaagggtgttctttccagtcttcagtttctttctgattttggaagtggtgacactgtggccctagaagtagatattctatctgcatttcttaattctctatcacttgaaatcttcttttatcaatgtttwaaaaagaatttagctgtcttttattagttaataattctttatatcagattttccctgtgatgtcctgtgactggactgtgtttatatagtatgctcccatttggtagctttgtgattaactagacttcctctaaaacaactgttggcaagcctgactaaatgaggtaaataaagacagaaataaagtaggaaatctgacaagagcagagcaatctcatagaaatttttttaggctagatgaattaagggaaatgtattattagggaaaatgtctagggccttcaagattttcaaaaacctactaagatgctgaatatgcatttcatttttgagaatatatctatatttgggtgtgcatatacatactcactcacacgcatgtattctgaaatataaaaagaaaactaaa

SEQ ID NO: 282590 - DNA, 392 bp, Homo sapiens
ttaatatttcaggtcaaaatatacaataatgcmagggaaaaagaagggttatgctgaagaataggattttttcctcttgtaccagaattgtgcctaagacccagagttgaaggagaaaaataaaagcacttaaatcttgacattcctgtttcaaataattttaatggactgccaacatttagtatcaaccacttccaaagaggtggggatcacccatcaaccacatggggccttacattttcagccacccaggtcaagataagaaatctctgaggtcagaggtgtggctctgatggaataaacagcatattttgtaacataaaagtggaatttaggttctctaacggaaacgtagggagctcctattaaattagctgataatgtttatgaaa

SEQ ID NO: 282591 - DNA, 392 bp, Homo sapiens
ttaatatttcaggtcaaaatatacaataatgccagggaaaaagaagggttatgctgaagaataggattttttcctcttgtaccagaattgtgcctaagacccagagttgaaggagaaaaataaaagcacttaaatcttgacattcctgtttcaaataattttaayggactgccaacatttagtatcaaccacttccaaagaggtggggatcacccatcaaccacatggggccttacattttcagccacccaggtcaagataagaaatctctgaggtcagaggtgtggctctgatggaataaacagcatattttgtaacataaaagtggaatttaggttctctaacggaaacgtagggagctcctattaaattagctgataatgtttatgaaa

SEQ ID NO: 282592 - DNA, 590 bp, Homo sapiens
aaaactcaccatatctgtatctgagacagggccaaaactggtcacgtagatgttagtgaagacttcagtaatactgtctaatatgagaaaagagattgaatatagatattatataataagagccacaggagagagaagggtttgagtacacggtatggtttgaaagctgtgtcacaaattcgggagtmctgggttttactttcttgtcaactttcgcaaccataatgactataatgctcagttatttcattggttttcaccatcctaactgcaaaatgcatagaagtattatgacattcttacttggaatccatacctgattagcgcatcctcatttatattgctcaaaatgaatagtttattaggaaacatcttaagtgaaatagtttataataaatgtgctaccagtaataaaaataaaccatggtattgtttgatataatcctacattcgatgttcaactaaatatttcagtatctcgtgatagtagagactcaatttacagattgtaaatcagtatatcttctccatacagcacaaaacagtttggtaattataaataaacataattccaattaatataaaaagct

SEQ ID NO: 282593 - DNA, 613 bp, Homo sapiens
aagctcaatcattcagtgacataaaaataaaaaataacagattactttcaaagaagcttgtttttaaatgtatttaagaatgcctgaaatgctaagactgaactaaattggattctaaaattatgtaacataataactgtaatacaattaactggattgctctatcaaccaggtaatttagatcttttattttaaataagccaaatagtgatggggaaaaggtcaaagaaagatcaaaaaacaaaaatattttcactgctcttgtagtagaaaaaaacacgtcattaatgtttatcatcatgagctaaatgtcttatccattagctgtcagatttgtaattctacacaaacaataacatgaattgttttttgtattatactagacattaatttacaaccattagagtaaactatgtctgggattttgtatccattaaggcaagaatamaaaatagaaaggatattgataaaacggggtagactttgaatgcctactacataccaggtactctttaaagcacctgaaatattataatctgcatgtcaaacctatgtggtagattctctgttacccctatgcatgtgtacaatgattcaaagaaaggtaagcaaa

SEQ ID NO: 282594 - DNA, 613 bp, Homo sapiens
aagctcaatcattcagtgacataaaaataaaaaataacagattactttcaaagaagcttgtttttaaatgtatttaagaatgcctgaaatgctaagactgaactaaattggattctaaaattatgtaacataataactgtaatacaattaactggattgctctatcaaccaggtaatttagatcttttattttaaataagccaaatagtgatggggaaaaggtcaaagaaagatcaaaaaacaaaaatattttcactgctcttgtagtagaaaaaaacacgtcattaatgtttatcatcatgagctaaatgtcttatccattagctgtcagatttgtaattctacacaaacaataacatgaattgttttttgtattatactagacattaatttacaaccattagagtaaactatgtctgggattttgtatccattaaggcaagaataaaaaatagaaaggatattgataaaacrgggtagactttgaatgcctactacataccaggtactctttaaagcacctgaaatattataatctgcatgtcaaacctatgtggtagattctctgttacccctatgcatgtgtacaatgattcaaagaaaggtaagcaaa

SEQ ID NO: 282595 - DNA, 1207 bp, Homo sapiens
ctgtcctgactcagagccttcaaaatggccattatctcgcattttctctttggttaactgctcctttgcatttaagtctcagtttaaatggtctctcttcagagcaggagttcacaaacctctatgtaatgtaagccctcttctctcatttttgctctctgacactttctttttatgggacctttcaactttgcctttattttaatgccttaatatattcttcttgctttttgtcttgtgtttggtctgtctccccatccaggatttaagctccacaaagaacagggactgcactatttctgttcactattatgtcatgagggcttactacratgtctatcacatgttacatgctgtatgtttgaacaaattatttctcattttaattcatgtagaatatcgatctttttccaaaatatatcatcaactttaaaaatggtcatgcatagctgttactagtcatgaggaaaagatgcccatcagttgtgaaggcagagtccatttccattgacaaaggcaggttgagagtataagtaataggcttccagtgaagtaacaaagctgagcaaagggaaagaatgtacttgaagacagcactgattcwctgtcctgactcagagccttcaaaatggccattatctcgcattttctctttggttaactgctcctttgcatttaagtctcagtttaaatggtctctcttcagagcaggagttcacaaacctctatgtaatgtaagccctcttctctcatttttgctctctgacactttctttttatgggacctttcaactttgcctttattttaatgccttaatatattcttcttgctttttgtcttgtgtttggtctgtctccccatccaggatttaagctccacaaagaacagggactgcactatttctgttcactattatgtcatgagggcttactacaatgtctatcacatgttacatgctgtatgtttgaacaaattawttctcattttaattcatgtagaatatcgatctttttccaaaatatatcatcaactttaaaaatggtcatgcatagctgttactagtcatgaggaaaagatgcccatcagttgtgaaggcagagtccatttccattgacaaaggcaggttgagagtataagtaataggcttccagtgaagtaacaaagctgagcaaagggaaagaatgtacttgaagacagcactgattc

SEQ ID NO: 282596 - DNA, 603 bp, Homo sapiens
ctgtcctgactcagagccttcaaaatggccattatctcgcattttctctttggttaactgctcctttgcatttaagtctcagtttaaatggtctctcttcagagcaggagttcacaaacctctatgtaatgtaagccctcttctctcatttttgctctctgacactttctttttatgggacctttcaactttgcctttattttaatgccttaatatattcttcttgctttttgtcttgtgtttggtctgtctccccatccaggatttaagctccacaaagaacagggactgcactatttctgttcactattatgtcatgagggcttactacaatgtctatcacatgttacatgctgtatgtttgaacaaattatttctcattttaattcatgtagaatatcgatctttttccaaaatatatcatcaactttaaaaatggtcatgcatagctgttactagtcatgaggaaaagatgcccatcasttgtgaaggcagagtccatttccattgacaaaggcaggttgagagtataagtaataggcttccagtgaagtaacaaagctgagcaaagggaaagaatgtacttgaagacagcactgattc

SEQ ID NO: 282597 - DNA, 631 bp, Homo sapiens
ttcccatttcattggcttgttatgtgtggataagtgttctttctctaggtgtagtagtaaagatcatcttcatctaatcctttgctgttgaccatttgcattgtagtttgagttcaagagtgtgagagtgggccaggtgcggtggctcacgcctgtaatcccagcactttgggaggccgaggcaggtggatcacctgaggtcgggagcttgagaccagcctgaccaacgtggagaaacactctctctactaaaaatagaaaattagccgggcatggtggtgcatgcctgtaatcctagctactcaggaggctgaggcaggagaattgcttgaacccaggaggcggaggttacagtgmgccaagtttgcaccattgcactccagcctgggcaagaagagtgaaactccatctcaaaaaaaaaaaaaaaaaaaaagaagtgagagtgattggcaaagctagtcaccaaacttttttacctttcttttcatgcacactgttagactacatttttcagcttacttgcacacagatttggcaattttgacatattgctagccaatgcaacttaagcaaaacagtatctatcactatctgaactgacccataaacatcttatatgtgcaacttgcaa

SEQ ID NO: 282598 - DNA, 631 bp, Homo sapiens
ttcccatttcattggcttgttatgtgtggataagtgttctttctctaggtgtagtagtaaagatcatcttcatctaatcctttgctgttgaccatttgcattgtagtttgagttcaagagtgtgagagtgggccaggtgcggtggctcacgcctgtaatcccagcactttgggaggccgaggcaggtggatcacctgaggtcgggagcttgagaccagcctgaccaacgtggagaaacactctctctactaaaaatagaaaattagccgggcatggtggtgcatgcctgtaatcctagctactcaggaggctgaggcaggagaattgcttgaacccaggaggcggaggttacagtgcgccaagtttgcaccattgcactscagcctgggcaagaagagtgaaactccatctcaaaaaaaaaaaaaaaaaaaaagaagtgagagtgattggcaaagctagtcaccaaacttttttacctttcttttcatgcacactgttagactacatttttcagcttacttgcacacagatttggcaattttgacatattgctagccaatgcaacttaagcaaaacagtatctatcactatctgaactgacccataaacatcttatatgtgcaacttgcaa

SEQ ID NO: 282599 - DNA, 614 bp, Homo sapiens
tcacattaaacttatttaatcttcagaagctatgcagtacaaatatttagattcctttttattatgagaaaaataaggctctaaagggtaatataaattgatgaagctcaaaggatcaatatcagaataaattaaaaatgattctcaagtgtgagtttttaaccaccacagaagtgtcctccataatgccactaaccagaactcccactgctagcctacaaacttgaccatgttgtatttggcatatgtctcaggaatgttttcttcagatcattgatgatgttttttaacatgttgtttgcaagagtttcttaggactgccataacaaagtatcatacactgaatggcttattctcttgcaattctgaatgctagttaacctgaaatccaaggtgttgatggggccatgctccctccaaacyttctaggagagaatctttctgtgcctctttcagcttccagtaagtcttagatactgcattgtggtaacataacgccaagctctgcctctctcttcccatcactgccttacctctgcacctgcttcttcccacggtgttctctatgtgtctctctctccttttcttacaaggtacttgtcttttagattaag

SEQ ID NO: 282600 - DNA, 1175 bp, Homo sapiens
tcacattaaacttatttaatcttcagaagctatgcagtacaaatatttagattcctttttattatgagaaaaataaggctctaaagggtaatataaattgatgaagctcaaaggatcaatatcagaataaattaaaaatgattctcaagtgtgagtttttaaccaccacagaagtgtcctccataatgccactaaccagaactcccactgctagcctacaaacttgaccatgttgtatttggcatatgtctcaggaatgttttcttcagatcattgatgatgttttttaacatgttgtttgcaagagtttcttaggactgccataacaaagtatcatacactgaatggcttattctcttgcaattctgaatgctagttaacctgaaatccaaggtgttgatggggccatgctccctccaaaccttctaggagagaatctttctgtgcctctttcagcttccagtaagtcttagatactgcattgtggtarcataacgccaagctctgcctctctcttcccatcactgccttacctctgcacctgcttcttcccacggtgttctctatgtgtctctctctccttttcttacaaggtacttgtcttttagattaagwagcaaaatggaaggtccaacagcattcatccactcactgtcaattatttattgaaatctctcaaaaacagagtcttattttacgtatgggaggtgattacaaaatgatgaagaaactttcctagaccttaaagatctcagaaacaaattgagaaaaattctcacttgtaaccatgtaattgcagaactctatagatttgtttatttttaatttattttataccaaaaagacgatttatggagcttttaaaatacatactacataatgacatattttttcaaaaaggctttagaaaaatagtctaaaataatgaaattagactacatcttaataaattattggtaatcacgggtaactagtttggagatatcttttgttatcaactctcaaggcataaattatcaatgtctcttcaactaaaagtatatctgtacatattgttttcatttctagaataacaaatagaactggaagtaatcacagttaaaaaattaacaattcttctgaagcactttggagaaaaaaataacwattacttaggtatagaatatttacaaaaa

SEQ ID NO: 282601 - DNA, 579 bp, Homo sapiens
cttgcatgttacccaatatctagtatgtgctcaataaaaacatgtcaagtgaatgaattaacacaatgtgctttctcatgaattcaagaaaargaggttgtgtaggtcaggggtccccaacccctgggccaggaacattacagttccctggactattaggaaccaggccgcacagcaggaggtgagtggccagcaggaaatcattatgcctgtgctctgcctcctgtcagataagctgcagcattagattctgcagctcgaaccctattgtgaactgcgtgtgtgagggatctaggctctgtgctccttatgacaatctaatgcctgatgatctaagatggaacagtttcatcccaaaagcatccaccacccaacatctgtggaaaaactgtcttccacaaaattggcccctggggccaaaaatgttggagaccactggtgtaggtcacagaaaactgaagatagatggcctatcatagatattggtcaccatgaaaaattcccaaattgattaaatagttaaatagagaaggggttacaaagaaatatgtatgtgataattagtttgattcttctatg

SEQ ID NO: 282602 - DNA, 559 bp, Homo sapiens
ggtccccaacccctgggccaggaacattacagttccctggactattaggaaccaggccgcacagcaggaggtgagtggccagcaggaaatcattatgcctgtgctctgcctcctgtcagataagctgcagcattagattctgcagctcgaaccctattgtgaactgcgtgtgtgagggatctaggctctgtgctccttatgacaatctaatgcctgatgatctaagatggaacagtttcatcccaaaagcatccaccacccaacatctgtggaaaaactgtcttccacaaaattggcccctggggccaaaaatgttggagaccactggtgtaggtcacagaaaactgaagatagatggcctatcatagatattggtcaccatgaaaaattcccaaattgattaaatagttaaatagagaaggggttacaaagaaatatktatgtgataattagtttgattcttctatgagacaactgtttctaagtttaaaagcagcagaaggacatcaaattaacatcagtaggtttaatgacataaaacttgaatacattcaaagta

SEQ ID NO: 282603 - DNA, 550 bp, Homo sapiens
tccaacttattttaagccactgttatttttagtcaccattaacttggatccaaacctgcttctagttgatagagctattttgtgggaagaaaagactcttccaagacatatcttctatttgtttcaatcaaaaatgaggtgaatcatcaatggagaatgaattgggaagaagacagatgttgaagttttcatcagagaggagaaatgattacttcagaaaataagcttattagggaacaagctagaattgacagagaattctaagtgaattctggcagtggtgacagtgatttgaagttgcagcaatttgccaggtggtrtaacttgtctataccacggttcagatgtttagattaaagtagagagaaggcagctagttggaatcatccagatatgagttttactctcagagaattaagaaaagaaaatacgagaaaaagctgagagcatttgccagagattaattataataaatgaagcacaagacccggatcagttcaaaaggaaaagtatataagaagttagaaaataatgagctcagaaaaactgt

SEQ ID NO: 282604 - DNA, 498 bp, Homo sapiens
tattcaactttagatatttacttcagaagcaataacaatgggggttgggttcagtggccaggcctgtaattccatctactcaggaggctaagaagggaagatggcatgattccaggagttcaagaccagcctgagcaacacagtgagaccctgactcaaaaaataacataaaattaaaaagaacaagctatcacaataaatttaaattgtgataaatttaaatacacaataaaattaaatgcatgtaatactatacatgcatacaagcaagattttatgccctcaggagacaataagtgatacataacggtaaagctggtgttcacatcccttgctytatctctccctggttgtacaatactgggaaagttactttacttaactacactgtgtcaaggctttttactggtaaaatacacataatactaatacatgcttcatattttgtatgacaattaaacgaatagattcatgtaaaattctttgtgcagtgcccat

SEQ ID NO: 282605 - DNA, 585 bp, Homo sapiens
ctatacatgcatacaagcaagattttatgccctcaggagacaataagtgatacataacggtaaagctggtgttcacatcccttgctttatctctccctggttgtacaatactgggaaagttactttacttaactacactgtgtcaaggctttttactggtaaaatacacataatactaatacatgcttcatattttgtatgacaattaaacgaatagattcatgtaaaattctttgtgcagtgcccatcgaagacaatctaggtcaataaatgttagccacttttcayaagaattgaactgtgaagaagggaagaaaaaataaaataaacctgaaaagacaacaaagaaataaataaatctggatcatcatgagctgtctgggaaggctgatgaaagtgaagacttttctatcaagaagacctgagagcagaatggggagctgactcagccaaaatgtatgagaaatctgttcccaaaccagagccttggaatgaaagcctgtggacagccaatcacctggtgatcaagggtcttcccaaatacctccaaacatgtagatgagtaacctggtaaaggatcatggc

SEQ ID NO: 282606 - DNA, 574 bp, Homo sapiens
ttttcttctgaaatgtctaatctaccaatctactgaatttttacttcatatattgtgtttttcagctgtacaagtttcatttgttttttcttaatagtttttattcctctcttcattatactcacacagttcttgaagattttaagcatatttataatagctgttttgaagatcatcattgctcagttcatcacttctgtcatttatggacatggttctattgacygatattacttcttttttaaaattttagatctggggctacatgtgcagatttgttacatggatgtattgtataatggtgaggtttgagcttctagtgaacctgtcatccaaatagtgaacattgtatccaataggtaatttttcaaccctcactcccctttcagcctcctctccttttgaagttcccagtgtctattatttccatctttatgtccatgtgtacccattacttagctcccagttatatgtgagaacatctggtatttgactttctgtttcttaattatttcacttagaataatggcctccagcttcacgcatgttactgtaaaggatatggtttcattct

SEQ ID NO: 282607 - DNA, 609 bp, Homo sapiens
tcgggttacatttttatgactagctttccttctcatgccctatttctcttttctgttataggcttcaagaagtgaacatacctttctttcctctgtaaagctgctgttttccattctgtgtcttgggtttcttctagttctgaaatggattccaagtacatggcaattctgccagctctcagctctcagcttctagaacctagccaggcagtaaaggggttgaaagcttggactctgtggccagtgaccagatttgaattttggatctgtcacatattaactgtgtaaacttggacatgtttttaaaactctctgagcctcaatttttttckttttaatccatgaaatccagatagtattaatatgtaccctctaggtttgttgtaaaggacatataaggtaatgcatatggacttagtacagtgtcctaagggaattcaatcaatgttggctgccataatcattaatcctcatcaggattaaaaatataagaataacaaaccttaagtaaattatataaactatggccatggcaatatcaccatagaggcaaagacagtgtcatgctcaaagatattagtttctctggatctacttttgttgactctg

SEQ ID NO: 282608 - DNA, 549 bp, Homo sapiens
tgccctggtcttagtgccttgaactctataaagataggaagctttcctattttgtttactgttgtatctccatcaagaagcacaagccctagtgcttaatagacaggcaataagacttgtgaactgattgaatatgtaaattactgcactggattttcctcccatagcccctggaaagtattccttttgttgtcagtgactctcagaattgcaaaactcaacactatatattcagaccttgttacttgcctcctttcaagtgcaaagaaaaagtcttttgtgttactatgtgtttcatatcagaaaattttctcctttgactacctaatgccatatccccagttttcttcctgtctttcaggccactcctgttagatctcatttctctacttgsccctgttatgcttttgtacctaatgatcatgctttcccgctgcttctatttctctttggctgatttcataaattcccatacttttaagtgctatttaccaatttctcttaaatttgtgctttgcccagaagtctcacctaaatactgaaaggaaa

SEQ ID NO: 282609 - DNA, 628 bp, Homo sapiens
taaaatcaatgttaaagaaaaatatctttaagaactcatagcaaaagtaaatatgtgatacagaagaaaaaaggtaaaaatgacatcagacttcttggtagaaacaatgcaaacaaggggtcaggaaagctgaaactttgaaatactgaaagaaaaactgttgctgaaaatatcttttagaataaaagtgaaataaagtcttttkcagacaaataaaagctgaaaaaaaaattaatcagcatacctgcatgaaagaagtgttaaaagtcctcagtttgaaggcaaatgatatcagatggaaatctggatttacacaaagaaattaagagcattagaaatgttaaatatgtgagttaatataaaacacttttcttaacaatctctttaagagataactgattatttaaaataaaagtaatgacaaattaataagaggtttataaaatatttagaaaaaatatgtgtgaaacaataacacagtggttgtgagggcaaagtgcaagtgaaggtagactgtgattagataaagatacatactataaaccaaaagcaattgtcaacgcagacacacatacacatatacaaatgagttacagccaataagccaacaaagggaacaaagtgtaat

SEQ ID NO: 282610 - DNA, 525 bp, Homo sapiens
aaataaaaattctatctagcctttttttgttggccaagatggctactacagaaagaaaaaggagtctttatgtttcctctcttgaaaccaggaaatagctcaggcttcccaaagtctttattccttcagcaatccttaacaatgtggcgtcactgatatgattcaaaggtgttatattatgtgaagctcacaaaccaatagaagcracatgcataaaatatatttgctaaaagaggtatatatcaaagtgcacagatacctaaagaatggggcagctccctctgtgtgggaactaggtagcaaagaggcaatactccctgtaggatgtcaaggggacctattgaggaattttaaacacaatcagcttgagggttaggaaatccactctggcagcaagaaaagagaaaatattagaaaaggatgaaaagaaagaccactgaggaggctattacaacattccacaagagagataataaatgtctgaactaagacaattatgccagggacagggaggacaagatgcat

SEQ ID NO: 282611 - DNA, 490 bp, Homo sapiens
tacattcacattaaaatcaaaggagtaactgcatttaaaaatttttagtgtctttaaatttttaaatgtacattattacatggatcactgtgcaatgagacaagtatttaaagaactgtaaatttagcataaagtcctttaatttttttcaagagtaagatgttcttggtgccaaacccccaataccattaaaaaatgaaaaaagaaaacccacaaaatgtcataaccctaacaaatcataattttaaatactttataacaaaggattttgattcytttattggcagaaaatttttacaatttcaggagagaaatgtaacctgaaaaacacttgcaaaagaaaagcctaccaaatcatttctaagcatgcatgagatatcaagctttaaatttttggttattcatcctccacagaaattttagagaaaattgtaggaaaaaacccaaaaggattatctcaaggtgcacaaggccaaattctaatctgttt

SEQ ID NO: 282612 - DNA, 509 bp, Homo sapiens
gtgagtgtaactatactatcctaaggtgcagatataaagttcattaaagagaatcaacactgagtacactgaattcaccaaggtaattaattggtacccacatcaatgttagatctctacctcattagacgaacctgtgatctcaaacatttcaaagttaaatgtgccagttatctatatttyagatgtgaataagaatgaagatttcctcagatgtgtttaagatggttagattttatatttcatcatattgtttcaacaaaagtgcatgacagaacttggtaataggtgattgttcatatctagaaatagattatcaactctgaggccaaagcttaaggtattgaaggtaaggcaagctctaatttagaagaaaccatgattttggtgttttttttttttcagtctatggtaaagctgaaattttgcaagtttcctcagaaaacccagctaagaaaagatagcattagagactccaggaaagcctggtgatggagtctgtggaagcc

SEQ ID NO: 282613 - DNA, 1129 bp, Homo sapiens
aatatatatatatatatatatatgcttacacatatatactttatatatatgtgtgtgtgtatacatatacacatatgtgtgtataagtgtgtatatatgtgtatatatrtgtatgtacctatatgtgtatatatgtatacatatatatgtatatatgtgtatatgcatgtgtatatatgtatgcacttaggtgatttatatgcacactacagtttgaaatgcactgctatagcacaactgctatgaggcaatggtgccttgcattactttgtgtgcataatttcagtaaaaaggtgttagagtccaaaaacacaccctagttccagtactgcctccaccttcctatgttatattttggaagtctcttaattttacttaatttcagctttctttgctacgaaaatggagaaaataatacatagcttcaagggatatttgaagattaaatggcattagttttgtgaaagtacgtttcatagtacctggtacataagtttaataaacattgattttatatttaccttccctatagtgaaatttcttagaatggaggaattgtgtctgwaatatatatatatatatatatatgcttacacatatatactttatatatatgtgtgtgtgtatacatatacacatatgtgtgtataagtgtgtatatatgtgtatatatgtgtatgtacctatatgtgtatatatgtatacatatatatgtatatatgtgtatatgcatgtgtatatatgtatgcacttaggtgatttatatgcacactacagtttgaaatgcactgctatagcacaactgctatgaggcaatggtgccttgcattactttgtgtgcataatttcagtaaaaaggtgttagagtccaaaaacacaccctagttccagtactgcctccaccttcctatgttatattttggaagtctcttaattttacttaatttcagctttctttgctacgaaaatggagaaaataatacatagcttcaagggatatttgaagattaaatggcattagttttgtgaaagtacgtttcatagtacctggtacataagtttaataaacattgattttatawttaccttccctatagtgaaatttcttagaatggaggaattgtgtctg

SEQ ID NO: 282614 - DNA, 1664 bp, Homo sapiens
ctcttgataatgtcttttataayttacttgagaggagataatctgaattcagtcaaaggttatggaccacactttgcatttagctgtatgtctttttattcacctttcatctagaacagttcctcagcatgtgtcttctatgcactgaaatttttgaagaacccatgtcagttgtttaaatgtcccacaatttaaatttcttccaattgtttttcttaacaactaaatttaggtgaaacatatttgtcaagagcactacaaaggtaaaagataatgtaatgtctggccatgaaagattaccttctgataaagaactgtacccagactctgtccccggagtgttcatttttctattaataatttgaataaattgctgggaaagcacagtcatttgctactgtcactgaaaatatgaaatcttacaattcatttaaaataatttggtttattagactttggacctggatcccttagccatttcacttgtgttacttataatgaaaatttggggtatctgaatactttgtgattaactttccttcatccaacccacccaccttctgacagctgatagaatgaccagacaaawcatatgtacacacagaattatacatactgtgtatcaataggaaaatttgctttaactaaagttctccaataatataaggaatgcaactgacctcagggagaaaaaaaaaaacatacatttactttgtttttcagaattctgacatgcctgtatttgatgacctatgaaagaaatacaggatgaaaagctagaaaatggaagctctgcttatgtcctacagccctgaattttgtccaaggtcacatgtacaatttatcctcttawcatgcatatcaaacccaaagagaggaattatctagaacatggcaaaagccaccattaattctgcataagtaatgcaaagcagcaatcaatactaatgtgtaagaagacccttcttgaattcagttaatgtgttttgttgtcgctgttgtgtatcctcatttttaattcaatttwactgtttgagtgcttagtaggtgccaggctctgttctttgtgttaaatattcaaaggtgaatgaaattcatgcgatttctattcttatggagcttatgctttctcagtgttaaattttctattctcctgaacttactttctataattcatgtctttttatctttaagtgcttccatgtcactaatgagagttttcctcatgagaagaacagatttgtattttgctattctgggataaacaagaccaatatatttacatttttcttacagatgcacatccttatctatttggaaacaatgaatgctttttgctattctctttcaaatttaaagatcaattgagtaaaatattaatatatgcwgatgtaatgttgactgtaaagtattagctcctgtctcaattgtggtttattagtcatgcttgaattttgtgtttattgattataaatatttacttttattttgtcatagattttgatttcaaatgtaatttttgcaacataaatgcccattcaaactctgtaatttggtccttatccttaatttatacattctaataagccgtagctttgtccctgtgattttttttctgtttgtttactttcttttattttaatgagtgattttttccaattatc

SEQ ID NO: 282615 - DNA, 619 bp, Homo sapiens
tgctttctcagtgttaaattttctattctcctgaacttactttctataattcatgtctttttatctttaagtgcttccatgtcactaatgagagttttcctcatgagaagaacagatttgtattttgctattctgggataaacaagaccaatatatttacatttttcttacagatgcacatccttatctatttggaaacaatgaatgctttttgctattctctttcaaatttaaagatcaattgagtaaaatattaatatatgctgatgtaatgttgactrtaaagtattagctcctgtctcaattgtggtttattagtcatgcttgaattttgtgtttattgattataaatatttacttttattttgtcatagattttgatttcaaatgtaatttttgcaacataaatgcccattcaaactctgtaatttggtccttatccttaatttatacattctaataagccgtagctttgtccctgtgattttttttctgtttgtttactttcttttattttaatgagtgattttttccaattatcaagattcttttcaacttaccatcatatttttctataggacctgaaattttcttttcaatttaccattgtatttctcta

SEQ ID NO: 282616 - DNA, 571 bp, Homo sapiens
aatgtttttaggtacaaccattatccagtgtatggtttctctgtcaattcagtttctacttcttgaaagaactctttatagggatatctggtccttctatagtgactgcatatgttraactaagaagctggtttcatgagaatatggagagtttagcatagtcagggagtctccacttaagaactgagaaactccaaagttttgaactgatccagttttctctagctgtggtgaagggacgttgaaaaaaagtactaaaagggatccagattactgcaattctgcaatgcagttctgtactcttcatgtgctaatttgataactaataatgtacattaattagaaaaagaataatgtgcatcagaaaaataataagaacgaaaagaataagatattcctaaaatatagatgcctctatatttagtaaatagagaaatgtatactaaatatatgctacacggtttttgtaaatatgtaaataaataatagctccaatgtatagcatacatgtacttcatagtgcttcctgaacaagcaaggacactgtcaaacacagaagctctgactttct

SEQ ID NO: 282617 - DNA, 571 bp, Homo sapiens
aatgtttttaggtacaaccattatccagtgtatggtttctctgtcaattcagtttctacttcttgaaagaactctttatagggatatctggtccttctatagtgactgcatatgttgaactaagaagctggtttcatgagaatatggagagtttagcatagtcagggagtctccacttaagaactgagaaactccaaagttttgaactgatccagttttctctagctgtggtgaagggacgttgaaaaaaagtactaaaagggatccagattactgcaattctgcaatgcagttctgtactcttcatgtgctaatttgataactaataatgtacattaattagaaaaagaataatgtgcatcagaaaaataataagaacgaaaagaataagatattcctaaaatatagatgcctctatatttagtaaatagagaaatgtatactaaatatatgctacacggtttttgtaaatatgtaaataaataatagctccaatgtatagcatacatgtacttcatagtgcttcctgaacaagcarggacactgtcaaacacagaagctctgactttct

SEQ ID NO: 282618 - DNA, 484 bp, Homo sapiens
acatgtacttcatagtgcttcctgaacaagcaaggacactgtcaaacacagaagctctgactttcttcttccctgttctctctgaccaattgtcctgagacatatactggttatcggctgctgctgggccaatacttcaggacagcctaactgtkctatcttgagtgcatccaagctatgctgaagaacagtaaggaaaactgatgaacattcaggtgggtcacaaagagacatatcacctgcaaaaggccgagaaagtgtaggaaatccggccctgactccaaatgcattagcccctatttagatagatgtgcatgaaatttaataaatgatttttgatctatctggggaggcattctttaacaatgcatttatttaatgaagtgtgaatatgttcttaacaaatcagactataatcagcagatttaaaattaattggatcttgttagatggtatatatccttctttagcatctgattataaa

SEQ ID NO: 282619 - DNA, 492 bp, Homo sapiens
aatttaggcacagttcacttgagtcccttttaattgcaatagcattaaacttcaagtgtctagtacttcatagttttacttcatactccatagctttcacagcctttccacacatgagagttataagccccgcaactgtgctgtgaagtattactctctcattatgcaaagtaagaaacagtggctcagagaagtggtcagaatctctgggacagaacaatggcagagtcagaactggagctcatggttctaatgcaaaatccacttctctttcctcttcccatcccatgccaacttagagcttctcactggcttgagttcaggcttcacaacaacctcttcttgccaagagacaaaccatgtagcatattcrtaactgtccttgcatcttggcttttgtgtttgtgaagcaaggtatcacccttacttctgatcaggtactgaatgctatgtttcttatgaaaagtaatctccataagaactcaaaaatat

SEQ ID NO: 282620 - DNA, 555 bp, Homo sapiens
acggttttttggaggcactacaagaaatgcgcatcaccccgctgccctttatctctcatccatgattctcattctatccgtttccagtttattgacctgggatgcgggactgctaaagatcgtcaacgacttgctgagcctgggggaggcaaagtcacgctgtgcgcactggggcccgccgctgggaaggtgcggctctctgctctggttagcagcagaatctgctctgtggggtgacgactttagaccaccccgggtgggcactttacccagcatcctcccctctcccccgactctggcaatgctagctttgcctcatcttccagggccttggaatttcagccttgttggtggggaggccttaggaaagaacccaagmggtgggcgcgtttcccacgaatgggccgctccctcgccggcggcttattccgagtggaggcctcaaaggaaaacgtgagagagatcacaggcaagcaccccaccattagtccaagactttcaccccacccccaccccatacagatggctgggccgggacacctgcacggcagccac

SEQ ID NO: 282621 - DNA, 555 bp, Homo sapiens
acggttttttggaggcactacaagaaatgcgcatcaccccgctgccctttatctctcatccatgattctcattctatccgtttccagtttattgacctgggatgcgggactgctaaagatcgtcaacgacttgctgagcctgggggaggcaaagtcacgctgtgcgcactggggcccgccgctgggaaggtgcggctctctgctctggttagcagcagaatctgctctgtggggtgacgactttagaccaccccgggtgggcactttacccagcatcctcccctctcccccgactctggcaatgctagctttgcctcatcttccagggccttggaatttcagccttgttggtggggaggccttaggaaagaacccaagcggtgggcgcgtttcccacgaatgggccgctccctcgccggcggcttattccgagtggaggcctcaaaggaaaacgtgagagagatcacaggcaagcaccccamcattagtccaagactttcaccccacccccaccccatacagatggctgggccgggacacctgcacggcagccac

SEQ ID NO: 282622 - DNA, 552 bp, Homo sapiens
ctctcccctaagccctactccttgagtcagatgcaggaagaggactcaagtcctggattcccaggacactggatcctcggggcagcattaacacttactccttatgccagtcataaatctgatgaatatttccaaacacgattttgtcctttcctcgcatatcctcagggacacccttttcttctattctcttcatgaagccctgcagcagcaaaggcaatggttagtagcatattttcacaggaaagctttctgggccatgccacacaccacagcacccctgcaagcccacactctctgcgtgagtttgcggacaaatgcttctgtggtttctcactattcaaccaggtctttaacccctggtgcagagcaatagagaaaacttttatgagtttcaggatccccttctttgtctccagtccccttaagaaagcagagcacagaagaaaacaataagctgtccctcttccttctcccaatccaarttaatcaggtctataaaggctcagaactagatacatctggcctagaaataagtcttaatatgttaat

SEQ ID NO: 282623 - DNA, 588 bp, Homo sapiens
tttattctctggatctcccttacactgctctatttttttttctttttcttgtttccaacataatacataatttattttgtttattgtctgatttctcccactagaatttaaacttgccatgagagcaaagacttatgttgttattatttgtcttattcactgatgtatcccactgatggtacatactggtgttagaccagtatttgttgaatgactaaaacttgaagacaagtaactccattctcaacttttttcttctcctggacaaatgactatttgtgttcatcttttctccacrgagctctcatttaaccctttgacgccccactgccatcttctggattgagtcttggttcgctacacccctcagcctctggcctcacatatggtttacagtgaaacacctatacaacaccctttcatcaagaccataaagtacagcaggagagaataaggatgagatatagtaagaggtatgagatactctaacagctgcattttcaagatagctcaggatgtgaagaggtgtggattttggcaagaatgagaagagggagaagagatgcgtaaagtgggcaaaagagacag

SEQ ID NO: 282624 - DNA, 588 bp, Homo sapiens
tttattctctggatctcccttacactgctctatttttttttctttttcttgtttccaacataatacataatttattttgtttattgtctgatttctcccactagaatttaaacttgccatgagagcaaagacttatgttgttattatttgtcttattcactgatgtatcccactgatggtacatactggtgttagaccagtatttgttgaatgactaaaacttgaagacaagtaactccattctcaacttttttcttctcctggacaaatgactatttgtgttcatcttttctccacagagctctcatttaaccctttgacgcccyactgccatcttctggattgagtcttggttcgctacacccctcagcctctggcctcacatatggtttacagtgaaacacctatacaacaccctttcatcaagaccataaagtacagcaggagagaataaggatgagatatagtaagaggtatgagatactctaacagctgcattttcaagatagctcaggatgtgaagaggtgtggattttggcaagaatgagaagagggagaagagatgcgtaaagtgggcaaaagagacag

SEQ ID NO: 282625 - DNA, 520 bp, Homo sapiens
ctggctgggggtgtaaaagtttccttcaatccgtctggccgggttattttgaagctctaggataaggaggccagagtagctgatgtggtagttggcggggagtggggtgcggggagtaggctggctcttcagatctgaggacatgaaaggcgggccagggaactgtaggtttgaggaaggaaaaaagtaccagctctggccgctcaaacttcccagagccaggagtggacactccagttgagtctcagaaggaaatctgcccaggccattcccgccacaccccctgaaaagtgaattkctggccaaagcacagaatcttccacgtcctcttcggtcgggatctcaatgttttcaaagtcagaagtgctggagagcaaagtcctttgttagcacaccttagacgtgcatggtgctcaaagggttacacatcactgtataaacacctgtacacttggagctgtgcaactttccagaggaacttggggctcagaaaggctaactggccagcagtctcatagct

SEQ ID NO: 282626 - DNA, 557 bp, Homo sapiens
acacagtcactgccagcagcaacagtccacacgtctagaaaaggctttattaaaaatcacacagtgaaagcagggggagccctattcctggctcaaagataatcccttaatgcaaaacccagaaaaagtgtgttagttctatctggggagatgggtgagcatctttcttaataaacaaaagcacgaattaaagaccaaggctgatagcaagaccacagaagggcccattaatgtccagaaggactcatgggtgggtggtgactcttcgggagttttatctgcactgcagataaaccctgtttttgttccttaacagtaggtcttgtgcagcagagatcctaactcaccgaggcagaagctttggtataacaaatgaccaagtgaccataaagcaccaggggcagctctgggagataggaacatgggggatctcatggcctttgggtggagccagggagccaaaygaattctaaagcagaattccgtgccgcggcttgagcaaccaataaagcggaaagactttaaggactcagtaaagtccaagaataccagatgct

SEQ ID NO: 282627 - DNA, 571 bp, Homo sapiens
agctccatcctaatgagctatccaaaaaggggccctttcaccagcattatgccaaaaccccaaacctgctcagactcatcacctatccctccaacgggctgatgggtccatgagacagtcacaggctagacaggctgccagtggcttatgttcagtttttccccccattgtagggctaggcactgactctcttaatttattgtggtgaggtatccacacacttttgcccattcccctttataatcagcagtctacttttgaaagactttgcacgctggaaggctacccaagtccccataaaatttcctagtgctgtcaaatatccaatcagtgtgttctgggtctcagcatcgcggtgtactagcttctgggctaaccaaatayatatcaatcactgactgaatgccacttgcctgtgggccgctggatcaggcttgcaatgaggtgagtttgtcttgaatagttttcaactttcatcaacactgcagcccccaaatgatgtattaattccctatacccattcccaaacaaagtcaaaaaggactctggggtacagctttttagaaaccat

SEQ ID NO: 282628 - DNA, 547 bp, Homo sapiens
ttattcctcctatctagctgtaatttgtgtcctttaaccaccccctacccttcccagcctctagtgattactattttattctctagctccatgagatcaacttttttagcttctgcatatgagcgagaacatttgrtatttatcttcctgttcctggcttgtttcactaacataatgtccttcaggttcatccaccttgctgcaaatgacaaggtttcattctttatgtgaatttaagggttattttccttaagctagaataaagtattgccttatatacacaatggagaagggatttatttgtacagattatttattgattatttctttaagggatttatttgtaaagaccaaatatgtttggattttcagattgtctagcaatattatcctcctggataaccctgataccaatcaattaaccgtcttctaactctcctccttccctcccttaccttttctacacctattacctaagcatttgaggtacgccaaaggaaataaaaaagtactcctccaggaagcagagtacagacaaaagaggtaa

SEQ ID NO: 282629 - DNA, 581 bp, Homo sapiens
gtgatgttatcagccacataaatcccctcttccatgtgagcctgatagtttgggggtctctgacctgagtttgtggaagtcctaagtatgtcatgcaactcatgtgttcatgcttgccagacacacctatgagtgtatacatgtatttgcactagctaggatscttctgcatctgtgactgatgagtagtaggttataaaagtgggtaaagggcatagagcgctttaaatctgcttagaagagagacgtgcattctccctttgttgctgcctgggaaggaaaatgagagtgaatccattccggcagatgactcaaggcattgcagtctgaggatgagggctggctgtcttgcaggcttgaggcctcacagccattgctgtattacaacacaatactgttcactgccatttaatagtcattactgtcattgccatttattgtcatataataagctgtcactattgggttaagtaagtattgttatctcagaggtgggtggtagttatcctcattttatagatgagtaaactgaggttcagaaaggtaaagaggtagaactggaactcaaatcccaaggtcac

SEQ ID NO: 282630 - DNA, 581 bp, Homo sapiens
gtgatgttatcagccacataaatcccctcttccatgtgagcctgatagtttgggggtctctgacctgagtttgtggaagtcctaagtatgtcatgcaactcatgtgttcatgcttgccagacacacctatgagtgtatacatgtatttgcactagctaggatccttctgcatctgtgactgatgagtagtaggttataaaagtgrgtaaagggcatagagcgctttaaatctgcttagaagagagacgtgcattctccctttgttgctgcctgggaaggaaaatgagagtgaatccattccggcagatgactcaaggcattgcagtctgaggatgagggctggctgtcttgcaggcttgaggcctcacagccattgctgtattacaacacaatactgttcactgccatttaatagtcattactgtcattgccatttattgtcatataataagctgtcactattgggttaagtaagtattgttatctcagaggtgggtggtagttatcctcattttatagatgagtaaactgaggttcagaaaggtaaagaggtagaactggaactcaaatcccaaggtcac

SEQ ID NO: 282631 - DNA, 581 bp, Homo sapiens
gtgatgttatcagccacataaatcccctcttccatgtgagcctgatagtttgggggtctctgacctgagtttgtggaagtcctaagtatgtcatgcaactcatgtgttcatgcttgccagacacacctatgagtgtatacatgtatttgcactagctaggatccttctgcatctgtgactgatgagtagtaggttataaaagtgggtaaagggcatagagcgctttaaatctgcttagaagagagacgtgcattctccctttgttgctgcctgggaaggaaaatgagagtgaatccattccggcagatgaytcaaggcattgcagtctgaggatgagggctggctgtcttgcaggcttgaggcctcacagccattgctgtattacaacacaatactgttcactgccatttaatagtcattactgtcattgccatttattgtcatataataagctgtcactattgggttaagtaagtattgttatctcagaggtgggtggtagttatcctcattttatagatgagtaaactgaggttcagaaaggtaaagaggtagaactggaactcaaatcccaaggtcac

SEQ ID NO: 282632 - DNA, 634 bp, Homo sapiens
gtttgggctgctgttaattttcaagataagggagaagcaacttgtcattttgaggccgccggctccggagatcccggcaatctcaagcctctttcttgtgtgctgttattttggcttaaaagaaaacctataaaaagcgacgcccagaaaccaaaaacaaacccaaagcaccttcttttaggatttttcagtagcgagggtkggcggggacagtggggaggagcaggagggggagaagaggttgctgttgaaaggtaatgtttaaaaacagtgtgtgggggtagggatgaaaataacgtggtgactgctagtgtatcagaaatcacaccgagtctaaagtcgtaagtcccatttgccttacgaggaccagctgggtgctgtgagtaggtggatagttaaggaaactgtagatctgctgaaagctcctcgtggtctgtggtctcgtgtccacgctgacctttgaacctcgtaactcttcgggtctccagcggccacctcttttaggctagcccgaatgtttgactttccggtcctcaatcttcctcacctagctgcagaccataaaactgtctttttatttacagggagatgttaaatatttgggaacatctgctcaggctgccaggttattttc

SEQ ID NO: 282633 - DNA, 493 bp, Homo sapiens
taggctttgaaagatggtttaaacattgatttactttttatttggttgggaatggaaagatctttaggacatgatgagaacaaggcccccagaagaggagacggcaaggaagctggagattcctccagaggtgggagggttattctcaccttccacaggttgtggaagcaggcctggagttgttatggctgtgggtcagagtcactatgctgaaagatgggggcaacaagggagcagaaagtgtttttttcagtggactttgggtgatattccatgtggtcatccatgagatgggacttccctaatggtcaaccaacattcactgartgtccaccatgtaacaagagatgttcttgtgggtggggttgggagcgtgccgtgttggacacagcaaagcccctgctcttacagagcttatgttttatggggggcagagtcaaaaaatgagttacaaatacatgaggcatgagtgaatttgggtcgtttgagaaac

SEQ ID NO: 282634 - DNA, 633 bp, Homo sapiens
cacaattactatgtgtctgcctacagaatcctgtacagtgatgatgggcagaaatggactgtgtacagagagcctggtgtggagcaagataaggtaaaatgattaccaaggtatttttaaaaaacattttttaartgggtggttgccaagtcacagagctctcctgtataaaagagatgtagaagtttagaatgtcttatactaccctcttgtggttattttaggtagtgttattggccttactctactgactttagaaaattctcagtagttctaggttccttttggtgattgtaacggtgagtacttttctgatttttgtcattgcatttttaattgaattgtttagacactttattaagaaagtctaaaagggaccttgtaatttcttatttttatgaagcttttttcaattcaccagatgatggagagcctttgttcccagatttctactctgtaggcaagaggtaaaaaaagaaaaaagctgaaaaccaacgtgcattaaattataggatattagagatgaaaattcatctgaagatcatctcaccaactttcatcttgggaaacttctgttttttcttacatgaagaattgctctagcatctaattatggaatctttgttttagtta

SEQ ID NO: 282635 - DNA, 596 bp, Homo sapiens
aaatctaacgctgctcttatggcaaactctgtctacactttcagacctctatccactacccycactctctgcacccaaaaaatagcactcctattctcttgggcaagagggtaagttctgccattttcctttttaatggaggccttacatctgtagactacccatattatcacactggcaccctggccaaattctaaagtgtggcttgaaactttgtgaaataaacctacctctgtaaaataagcccaacagtgaagaagtctatttttggcaattcaatttatatggggttatttaatgacaaaattgtctaaaaactaaattacttttgtagtcagaaaacatcaaagcaagtatatttgtccttcaaatgtaattctgattaaaaaagaagagagctgcttccaaaatctaataatctccttaacaagtgagacagaaagaatctcatcagtagtttggaggatgcatggaaaagtatgggaaacagcctataaagggaagccatgagctgattagcagggggtgaactaattcttaagtaggaacaacttagaaaaaaatgaatgtaggttaaaaatgtcctgatttgggac

SEQ ID NO: 282636 - DNA, 631 bp, Homo sapiens
tgtagttcattaaaagttaataaaagggaaaatttctactcaaaaagtttaacctagaggcaaggaaggagaagccacaaattaataagggtggaaaataacatgagagcaacaagggggaaaaataaaaccctaaagaacaattcgcttttttataatcaaacacaaatagacctctctagcctcacctgtgtgaaaagaatactggtttgattgagttcctcaatgccttttcttaaaatatatgcagagctctgactaaaagcacaaaaagagacaggatattcaagctcttccttaaatatggsgtgtccactttatactgctaagatttgcattaaaaaaataaacaagtgtggaaaatgattacaagcacatttagaatattttgtatgccacaggtttttctggtatatttttacctcagcagagaggcaaaagctggctttgataaacaaggctggatcttatttctccgtttcatttccacaggtgccaccctatgagacaaaaataatgtcagtcagaaaccagaatcgggcaccctgcccaaagggaagcaaatgccctgggaactcattcatgccaccactgagaggttctgtggcagcaaacaaaaatactccctgca

SEQ ID NO: 282637 - DNA, 631 bp, Homo sapiens
tgtagttcattaaaagttaataaaagggaaaatttctactcaaaaagtttaacctagaggcaaggaaggagaagccacaaattaataagggtggaaaataacatgagagcaacaagggggaaaaataaaaccctaaagaacaattcgcttttttataatcaaacacaaatagacctctctagcctcacctgtgtgaaaagaatactggtttgattgagttcctcaatgccttttcttaaaatatatgcagagctctgactaaaagcacaaaaagagacaggatattcaagctcttccttaaatatggggtgtccactttatactgctaagatttgcattaaaaaaataaacaagtgtggaaaatgattacaagcacatttagaatattttgtatgccacaggtttttctggtatatttttacctcagcagagaggcaaaagctggctttgataaacaaggctggatcttatttctccgtttcatttccacaggtgccaccctatgagacaaaaataatgtcagtcagaaaccagaaycgggcaccctgcccaaagggaagcaaatgccctgggaactcattcatgccaccactgagaggttctgtggcagcaaacaaaaatactccctgca

SEQ ID NO: 282638 - DNA, 595 bp, Homo sapiens
tatatatatatatatatatatatatatatatatatttagaacatgcatagataagtaaaatttatagctttaaagtggtttctgtaaaatacagctacccacacacagaaatatttcttggttattatataactaaaaatgaccctttgctgtttgcacataaggaaaataatgacaaagagagttaattttatggctctaactattaataactgctaattaaaatctggtccagagacaggactggtgcatcagcaccttctggaaatttagtagaaattcaaattcttgaactccatccagacttacagaatctctggcgggtggtgcccaaaaatctgttttaacaagtcctctcagtaatttcttaagcacacrgaagctgcagtagcattgctctaaagaaataaaacttctaaaatttaacattttctgcctagaaaccaatacagctgagcaagaactaatctgcctctaattaagaccaagttcataggctatgtaaaaagtggctttggttaaaaaaaaagcaaaaaaaacaaaacaaaacacaccatttcagtggcttccttctcttaggttagacagcaaagcc

SEQ ID NO: 282639 - DNA, 605 bp, Homo sapiens
aagatgggagtgcagatatcttttccatatattgaaacttatagatgttatcctaaaaagttaaaagcctcccctcagtctgaactgctttgacatctggaacttcctttttcaaacccaaagctgcctgtcataatcccaactgattcctactgcttgtctttaaattttccatcccaataggccaccagcccttctgctataaacttgcacattcttttttttttttatttttttgagacagagttttgctctgtcatccaggctagagtgcaatggccctatcttggctcactgcaacctctgcctcccaggttcaggcgattctcctgcctcagcctcccaggtagctgggattacaggcatgtgccaccacrcctgggtaattttgtatttttaggagagatggggtttcaccatgttggtcaggctggtctcgaactcctgaactcagatgatctgtccgcctcaacttcccaaagtgctgggattacaggcaggagccaccgcgcccggcatactcgcacattcttaagtccctactctttcctggcattcctcccttacctagaatgggtttctcatcaccaaaagcatcctaccca

SEQ ID NO: 282640 - DNA, 608 bp, Homo sapiens
gatgaatccaatttttaaggtaactgtagtggcagaagcagtaactaatggcatcaggctcataggaaaaatatgtttagcagctccctaggagcatgcaaaaaccagtacttcagttcttcatttctgcttcttatggggaactgtttattatactacagaacattatgaatacaagagaaacagcattaataattaaagagccatacatacagggaacatcttgcgatgaactgaatgcgttccccaaaaattcatacattgaaatcctaacctttcattcgttcccatgatggtattaggaagtgggccctttgggaggtaattaggtcatgagggtggagcactcatgaatgagaataatgcccttataaaaagggccccaaagatctctctcaaactccttctatygtgtgaggatgcgacaagaagatggcagtctgcagcctggaagaggatcttcagcagagctcagccatgatctcagacttccagcctctggaactaaaaaatgaatatccacagtttccaagccacgcaaaatctatggtactttgctgtagtaacacaaactaagacttgtgaacatctgaaatagaagtataaag

SEQ ID NO: 282641 - DNA, 573 bp, Homo sapiens
gaaaataacaatacttttctccaaggttttccaatgttaggacaaagggaagtatcccaatttacccagaatctgtaagacactgtcaaattggaattgaatcagcaattaggacaggkgaactttgccttatgaacattagaatcagccaatttattcactcaacaagcatattctttcatgccaggattcttgaggaaactggggatgcaaagatgaacatgatacactgaaggtacaaaaaatataattatttattgaagatgagcattgtgtcatgggagcacagcaaaggaaagactcattctgcttgaaggtgtctcagaataggtaaaattctacccggcccttgaaagatgagtagtaaataacccatcagcgacagggcaagataaggacaatcctggccaaggctgcagagagtgcaaatcatggaggctttaaagaggggtagaccttgacatttgagcaactcatctttgtggctagatttcatggagaaaagaaagaagtgattgtgtatcagatgtcaagaaaaagactaccataatgcctacatgtcatcctctcaag

SEQ ID NO: 282642 - DNA, 596 bp, Homo sapiens
atgttaggcctgacattagcctcaggtgcttcctctttcacctggttcatttgtctgtcactaggtttggttatctcttctcaactcaggcaccccaaatccatcatctcaacaatgctctttccgtgatcttggacagttcccaaacttgggcccatgtgataatccccattctctgctttctctggttctggatagctcatagttacaagattaagtcatgtggtcatcrtgattagatctgccacaaatgaggtctggctaatcaagtcccaagtggggattactgcttagcagactatctcactttgtaaagctgatttgtacagccgaactcctgccctgctcctaatccttgcacagtatgacttcctcctgactgaaaccttgtcctcttcctctttatcagagcactgctacattggggaatgtgaattttgttttggcatgctttacactttgatggcacttttactttatatctggaaacatgctcaaaatgccactggcttttacatatctcttttttcattgctttgtggtaccttgtatctctgcttttttcagtgacgagctttctaaatggtaatctacat

SEQ ID NO: 282643 - DNA, 596 bp, Homo sapiens
atgttaggcctgacattagcctcaggtgcttcctctttcacctggttcatttgtctgtcactaggtttggttatctcttctcaactcaggcaccccaaatccatcatctcaacaatgctctttccgtgatcttggacagttcccaaacttgggcccatgtgataatccccattctctgctttctctggttctggatagctcatagttacaagattaagtcatgtggtcatcgtgattagatctgccacaaatgaggtctggctaatcaagtcccaagtggggattactgcttagcagactatctcactttgtaaagctgatttgtacagccgaactcctgccctgctcctaatccttgcacagtatgacttcctcctgactgaaacctkgtcctcttcctctttatcagagcactgctacattggggaatgtgaattttgttttggcatgctttacactttgatggcacttttactttatatctggaaacatgctcaaaatgccactggcttttacatatctcttttttcattgctttgtggtaccttgtatctctgcttttttcagtgacgagctttctaaatggtaatctacat

SEQ ID NO: 282644 - DNA, 522 bp, Homo sapiens
gtatcctgcatttgctgttaaaggaaataattttggaaatcacaatgttcatattattaaaattcagtaatgcatatataagaatataattaatacaatttatcagtagtgatatggctaaaatctgggggtggctggaaagtcatatggaatcagcatcacaagcacatacttaaacaaaaaacacacttgatttggagtttaattagagtagcctaaaaaagcatgcattctttgttgcaataattcattrtcatttaaatacgtttaattttctttctcttttttctagggataagtagtaaaaaaaaaaaaaaaagggggggggttttcctgtaataatatcaaaatttgtatctggcttaacacatctgaccttacactcttcagaggaagtgaacacatgttctatgagtaattccctagataaatgtgcagccaaagaatcattaagatcaaattccagtgtttattcttagctgaaataaaattaaaattcaaaaattaggttaacaggcttct

SEQ ID NO: 282645 - DNA, 577 bp, Homo sapiens
ctttctcttttttctagggataagtagtaaaaaaaaaaaaaaaagggggggkgttttcctgtaataatatcaaaatttgtatctggcttaacacatctgaccttacactcttcagaggaagtgaacacatgttctatgagtaattccctagataaatgtgcagccaaagaatcattaagatcaaattccagtgtttattcttagctgaaataaaattaaaattcaaaaattaggttaacaggcttctaccctttttgatcagttatagtctggtggagaacatgtcgaggaggaagatgaaaaagagaacctgtcagtgatagtgctgatggagtttggagaaggagaaagttagtgaagttggagttggtgagaatgtatggattggtgctctgaatgttgttttttccaagagtagttttactctttttgtcaattctgccttatgagcaggaataatagtaggtggtgtagcctggtcacagatcattattcttcccagtgtacaaagctactcagaattaatagcagtcacagatgattactgttagctcctttccctcctaatgttaagagc

SEQ ID NO: 282646 - DNA, 577 bp, Homo sapiens
ctttctcttttttctagggataagtagtaaaaaaaaaaaaaaaaggggggggkttttcctgtaataatatcaaaatttgtatctggcttaacacatctgaccttacactcttcagaggaagtgaacacatgttctatgagtaattccctagataaatgtgcagccaaagaatcattaagatcaaattccagtgtttattcttagctgaaataaaattaaaattcaaaaattaggttaacaggcttctaccctttttgatcagttatagtctggtggagaacatgtcgaggaggaagatgaaaaagagaacctgtcagtgatagtgctgatggagtttggagaaggagaaagttagtgaagttggagttggtgagaatgtatggattggtgctctgaatgttgttttttccaagagtagttttactctttttgtcaattctgccttatgagcaggaataatagtaggtggtgtagcctggtcacagatcattattcttcccagtgtacaaagctactcagaattaatagcagtcacagatgattactgttagctcctttccctcctaatgttaagagc

SEQ ID NO: 282647 - DNA, 522 bp, Homo sapiens
gtatcctgcatttgctgttaaaggaaataattttggaaatcacaatgttcatattattaaaattcagtaatgcatatataagaatataattaatacaatttatcagtagtgatatggctaaaatctgggggtggctggaaagtcatatggaatcagcatcacaagcacatacttaaacaaaaaacacacttgatttggagtttaattagagtagcctaaaaaagcatgcattctttgttgcaataattcattatcatttaaatacgtttaattttctttctcttttttctagggataagtagtaaaaaaaaaaaaaaaagggggggggttttcctgtaataatatcaaaatttgtatctggcttaacacatctgaccttacactcttcagaggaagtgaacacatgttctatgagtaattccctagataaatgtgcagycaaagaatcattaagatcaaattccagtgtttattcttagctgaaataaaattaaaattcaaaaattaggttaacaggcttct

SEQ ID NO: 282648 - DNA, 532 bp, Homo sapiens
agttctaagaacaaaggatatctcgcaaacaagattgagtactaacctcgcctcccacacccctgcctccaggccatattcagtacatattagcatattaaagaaccaggtaaaaacagcaaaaaggaaagctgtttaactttccttaaatgttaaacagatctaaacaagcttgtttttgtgtcaaagacttttttattcagtattctatcataatctcctatctctatctcccaaarcaaattaaaacaacaataaaaaaaccaattgctgtagatttgggtctgtatatatccagttggaggaccaacagctgggatctttgataaaatcaactgtgactataaagggttaaagatgaaagtcactttatttcattaggaatttatttatcaatctattaatttattttagagacagggctggagtcaatggcacagttattcattgcaagctcaactcctgggctcaatcctcctgtctcagcctcctgactatctaggactaagggataatactaccacacacggca

SEQ ID NO: 282649 - DNA, 505 bp, Homo sapiens
ctgcccaatacctttgaaaaaacaacaaacaaacaaacaaacaaacagcacatttggtgttttgtcttattgcctattgaggctaaaattatggtcctatcctttcagaacaaacaccaacccaaggagaccagccaaacttcagattctccagatgaggcaggagaatagagtctggaggcagggaacctaagaccaatttgcactgacttcctagaactggatcaaaaggaaaaccccacctctccacacccaagtgacaaaagattagaggctattccctttgcaactcccctttccactgcattgtagatgaaaaatggaaaagtacctctgattggctgcaggccacacacgggccaatcctcatttgcrtaaggtgccaattcactttagcctttgagtagtcatggaacaagcctccacttcaatctttcatttacatagggtgtaaccaatgggaaacctctagagggtattcaaaccccaaaaaactttcctgcca

SEQ ID NO: 282650 - DNA, 505 bp, Homo sapiens
ctgcccaatacctttgaaaaaacaacaaacaaacaaacaaacaaacagcacatttggtgttttgtcttattgcctattgaggctaaaattatggtcctatcctttcagaacaaacaccaacccaaggagaccagccaaacttcagattctccagatgaggcaggagaatagagtctggaggcagggaacctaagaccaatttgcactgacttcctagaactggatcaaaaggaaaaccccacctctccacacccaagtgacaaaagattagaggctattccctttgcaactcccctttccactgcattgtagatgaaaaatggaaaagtacctctgattggctgcaggccacacacgggccaatcctcatttgcgtaaggtgccaattcacttyagcctttgagtagtcatggaacaagcctccacttcaatctttcatttacatagggtgtaaccaatgggaaacctctagagggtattcaaaccccaaaaaactttcctgcca

SEQ ID NO: 282651 - DNA, 587 bp, Homo sapiens
gaaattttgacaggctgaaatgagtctaactctaacaaaatgaaccttaacagatataaatgtataatctttcatttaggaccaaaacaaaataacataaaacaaaacacctactaggaaggattcaaggagaccttcccgtttaaaattgcacctggctaacatttctcagtgaagcctttatcaacttcctcactaaaacactcatggaaacatcaataaggatgaaaatcacgacactgaaaactaagactgatggaaaacttaatgacagaatctggagggaatctctgctttcaaagaggcaagcagaattgagatagaaaaaatattcccaggtttcatttcatatcacatggaagctctgcctcattgtggcagagcctgctggtgcttgccaacatctgtgctctcctctgcttcatggacccacagagccactgcattttacagcctcccttacagttgggtgtagcaacatgcytgagttctggccaaaaaatatgagcacaagagatgagggccacctcccaagcacaatactccatactctctcacttctcagactgagtggagatggtcccaaa

SEQ ID NO: 282652 - DNA, 564 bp, Homo sapiens
taaaattgcacctggctaacatttctcagtgaagcctttatcaacttcctcactaaaacactcatggaaacatcaataaggatgaaaatcacgacactgaaaactaagactgatggaaaacttaatgacagaatctggagggaatctctgctttcaaagaggcaagcagaattgagatagaaaaaatattcccaggtttcatttcatatcacatggaagctctgcctcattgtggcagagcctgctggtgcttgccaacatctgtgctctcctctgcttcatggacccacagagccactgcattttacagcctcccttacagttgggtgtagcaacatgcctgagttctggccaaaaaayatgagcacaagagatgagggccacctcccaagcacaatactccatactctctcacttctcagactgagtggagatggtcccaaagacacagaggatggtggaaacacagatagaagaagcccaggttcctctgtgagtaggttgtccaggacatggaccctgcttcactctccaacaccagtgcatactgtattgtgatgtgca

SEQ ID NO: 282653 - DNA, 551 bp, Homo sapiens
gcttttgtctctactgctcagatggcaggaacttagaggtccagcagggctctattaattggagattgttactggataaagataggtgatcctcagaatcaagaagaaaatgagtttatacccacaggaagaagaatatttttaactgtcaggctgacaaattgggaaatcttgagagacccagaattggtgtggaagcaggattataccaaatagctctgatgtagatcctgcttgccgtagatttctactatctgccaggctagagtaggtgttcaataaatatctgttgaatgagtaactaagccctcattataccaatggagataaagaatggtgagcccttttcttatagcacactttccattgtgttctttttattctcatattgactgttttatacatcactgaaatctagagagatacccagacttttacaaatgtgagactcctaacatgcatggtgtccaatttatacagtagcttcccagtcttgtatctgttgctcatggtasatgtgtagatttggtctcaggttccaatccctgtgg

SEQ ID NO: 282654 - DNA, 533 bp, Homo sapiens
tcacttagggggctacagattggtaaaatgttttctagaagtttacagtttcattgagaacttacatacatgaaattgttgagtaaaaatttaagatcatcgttgatggaagtgccaaaaatcatagtaggagtaagctatactgtagtgagcctatttcaccactagcactgatgatttcaagttcatattactagaaaccacttctatagagggtactgtgtgtactgcctacatttcacctttgggagtgcaaaacttaataccccaactgccaggattgtggactgtagataatttacagctaaatccctctccagaattttcttttggccaaagasagcttcctcgcttatggttatgccaccttcgtaagggcagcccacactcaatgatcagtcagtgtggggcttagccctcttgtctgaattttagacaactctgaaaggccacttcagcttcagaggtccccataggatcggctagtagctctcttctcagtgcactgcagttcagatttttcactctgccca

SEQ ID NO: 282655 - DNA, 620 bp, Homo sapiens
tgctctggatctgggtcatattccctgtttctccctggtgctcagaacaatgcctaggatgtggttggtggacagtacaatggaaattggatgaaattaagctaaacagtagaaggtaactccaactgcccttgtccaaattctttgttactgcacggagttagaccctctctgtctgctcaattttcatgtctcctactgcccactcagaaaggatccattgctcccacttgtcctgaggcatgagtgactgagaaggttgaatgctgggtcccttcttggggtgtttgccaatgtagaatttccagsattggaagccccagtttttggtggtggtggttgtagggggcgttggagaaggaaggctgatgattccctgatgtaccattgcaatgcaaagtgtctgggtgaagagtggcatctcttacttgtgagagcttgggggtgcatctgttggagcatgctgtgaatgcacatgtaactgtggatgctctcgtgaatacttgagctcctagagcgagagaaaaaaagtgtgaagatgaaccgcacatggtctacttctcctccagaagcaacaccattaaaggaagggccccagagggaagacacctgatgcagtt

SEQ ID NO: 282656 - DNA, 620 bp, Homo sapiens
tgctctggatctgggtcatattccctgtttctccctggtgctcagaacaatgcctaggatgtggttggtggacagtacaatggaaattggatgaaattaagctaaacagtagaaggtaactccaactgcccttgtccaaattctttgttactgcacggagttagaccctctctgtctgctcaattttcatgtctcctactgcccactcagaaaggatccattgctcccacttgtcctgaggcatgagtgactgagaaggttgaatgctgggtcccttcttggggtgtttgccaatgtagaatttccagcattggaagccccagtttttggtggtggtggttgtagggggcgttggagaaggaaggctgatgattccctgatgtaccattgcaatgcaaagtgtctgggtgaagagtggcatctcttacttgtgagagcttgggggtgcatctgttggagcatgctgtgaatgcacatgtaactgtggatgctctcgtgaatacttgagctcctagagygagagaaaaaaagtgtgaagatgaaccgcacatggtctacttctcctccagaagcaacaccattaaaggaagggccccagagggaagacacctgatgcagtt

SEQ ID NO: 282657 - DNA, 578 bp, Homo sapiens
accctgcctttttttcactttgatggaggttcctgagaaagatttatggtagatcagtctttttttagaccttgctgaacatgtaagacagagtaagagaaagtttggctggctattgaattccaggttagataaaatttatttttctcttggaatgttaaagatattggtttgttatctcctagcttctaatatttttgtagatgtatcaaatgccattttgttatctgattttttaaatgtatttttccctctgaagtttttctctttatccttgttctaaaatttcatgagcatgtgtcttgtgtggttcttttaaaacttattatattaggcacattcggtatcctcttattctttctctggaagttctattagctggatattggrcctctagattgattccccgctttaaaaaaagatagctttccatctgtttgtcttcttgtttcagtatcaaaacaattcctcacttctcccccaatctattaaaacttttatttatgctattatatttttaatttccaaaagttcttctgtgctttcaattttttatagtactctgctcttgtttcatg

SEQ ID NO: 282658 - DNA, 578 bp, Homo sapiens
accctgcctttttttcactttgatggaggttcctgagaaagatttatggtagatcagtctttttttagaccttgctgaacatgtaagacagagtaagagaaagtttggctggctattgaattccaggttagataaaatttatttttctcttggaatgttaaagatattggtttgttatctcctagcttctaatatttttgtagatgtatcaaatgccattttgttatctgattttttaaatgtatttttccctctgaagtttttctctttatccttgttctaaaatttcatgagcatgtgtcttgtgtggttcttttaaaacttattatattaggcacattcggtatcctcttattctttctctggaagttctattagctggatattggacctctagattgattccccgctttaaaaaaagatagctttccatctgtttgtcttcttgtttcagtatcaaaacaattcctcacttcycccccaatctattaaaacttttatttatgctattatatttttaatttccaaaagttcttctgtgctttcaattttttatagtactctgctcttgtttcatg

SEQ ID NO: 282659 - DNA, 638 bp, Homo sapiens
atctgtccacagctgcagctgcctctctccccatgaaacctggcatcattcccccaccctgggggattggagggggtggcaaactgtctacagtccctggggtccttcagtgaattccacaaggtattactgagcrcaattgcaggagatgagctgcccagtttgctgagagctggttgtaactaacatttactggtattaatttacatccattgaatacctcctgtgtgccaggccccatgctaaacatattacatagatgatctcatttaatcctcacaacagccttctaacattgctattgttattaaccccaatttacagatgagaaaactgaggctgtcagaggttaaataaagtactcaaagatagagctgggatttgaattttggcagtctgactccagagtctacgctcttaattgcctcttctttgtctatgtgtaggaagtacaaatgttaaatagtttttcttctttttcaccattttcctaaatagtatttttatctacaaattccattcaggcaactcctgccttggagggcatggtgctgaaaccttggttattctgtaattaacagaaggttacagatcccctagctccttggttatatcctgaagacagttaaatgaagaaa

SEQ ID NO: 282660 - DNA, 638 bp, Homo sapiens
atctgtccacagctgcagctgcctctctccccatgaaacctggcatcattcccccaccctgggggattggagggggtggcaaactgtctacagtccctggggtccttcagtgaattccacaaggtattactgagcgcaattgcaggagatgagctgcccagtttgctgagagctggttgtaactaacatttactggtattaatttacatccattgaatacctcctgtgtgccaggccccatgctaaacatattacatagatgatctcatttaatcctcacaacagccttctaacattgctattgttattaaccccaatttacagatgagaaaactgaggctgtcagaggttaaataaagtactcaaagatagagctgggatttgaattttggcagtctgactccagagtctacgctcttaattgcctcttctttgtctatgtgtaggaagtacaaatgttaaatagtttttcttmtttttcaccattttcctaaatagtatttttatctacaaattccattcaggcaactcctgccttggagggcatggtgctgaaaccttggttattctgtaattaacagaaggttacagatcccctagctccttggttatatcctgaagacagttaaatgaagaaa

SEQ ID NO: 282661 - DNA, 629 bp, Homo sapiens
atccatcatgccaggcatacttccacttcaggctctgtgcataggctgttccctttgcctgaaatgctcttcctccacatacctgcgttgcaccctcctttgcctccttcagctctttgctcccatgccagccactttctcggtgagttcttctctaccctctacctccaatttataacataactcctggcactcttatctcccttccttgttttattttccttgtgattatcactatgttgcatactatacattttacctactcatttagctttttatttgttctccacccttcttccaatagaacgttttattccataagagcakgggatttacatttgttttgtttatggctgtatccctggtgcctgaccacgataggggctccctgcatcctgttgaaagaataaatagactttacatatcggctctgggagagggagtctctgctccctgctcagaatgagggcttggggctgttctctctcccactgtgtggagagcacctccctgagtgtgtgttcccaggcacaaggagcgcagatggaggcatcaagtcctcaagacacagcatgtcctcctggacctggccagctccaccctggcttcccaatccctccagaaacctc

SEQ ID NO: 282662 - DNA, 300 bp, Homo sapiens
ttgtcatttcctctctgttcctccacttccagcaatgacttagtggctctcagaataacaagtgtcttcagggatgcctacagctagagaagtttggcgtcttatgatctctagarcatgcccttgcagggactccagatgttggtgagccaagataccccccgatgtgttctttgaactggatcccagccagggttggggaagaggcagggttgccctgtgcagggctagggtggagcaacatatctgcaagatgatgaatcatgctcctggacgctggcttaccaatcctttgagaat

SEQ ID NO: 282663 - DNA, 482 bp, Homo sapiens
aagcctctttggacatggcatttgagctgagatctgattgatgtgaaggcatcaacatgtaaagggtgggggtacaggagaggtataccagatgaagggaacaatcttgcaaargctgtaaagtaggaatgagtacaaccctgtctaccaaagcccatgggcagaatagtatgaactgctagtccaagactgatttattattgtttttgtcctcaatattttcacatatcattattatcctaatagaatataccctacccttaaggagcttcctttatacttggggaggtaacatctggaatatttagagaggaatataagatgatgggtagcaaagtgccaactggcgagaattcgaatatgctgtgaaaggtgggggcagggggaggttagtctggaaaggattaggtgtattctctttgtcatgggagatacaccaaacagtgactgtgggagagccagagatgctccaagcagtggaa

SEQ ID NO: 282664 - DNA, 568 bp, Homo sapiens
gttagcctattcttgttctacccaaacatctcccccttytcatcttcccaacttcaggatatttgggcatgtccttagtcattggggaccaccccaaaccacacctcaacaagtctctgggagcatcaagccagactgttagatggatccagagtggccactgctagtttatttactcactaaactaatcaaacactcaacatgtgtcatgctgtgggctgatggtactggaataagtatccagatgcttcccctgggattcacagtctggaaaaggcagatttatgacagatgttgatcatgtattaataggttaatgaagatgtgaaaagagatcaatggaagcacagagttgtgacagctctccctgggggagtgcagaaagcagtgcaaaggagatggcattagagctatatctgaaagggagagaatgagtttgccttggtccaacacagagaaagaaaagctgaggccaccagcttttcccaagggagttatgcttcttcaaatacagtgacaagttcttaatggttcccatccagtcacagtgtgttggctagttcacatc

SEQ ID NO: 282665 - DNA, 568 bp, Homo sapiens
gttagcctattcttgttctacccaaacatctcccccttttcatcttcccaacttcaggatatttgggcatgtccttagtcattggggaccaccccaaaccacacctcaacaagtctctgggagcatcaagccagactgttagatggatccrgagtggccactgctagtttatttactcactaaactaatcaaacactcaacatgtgtcatgctgtgggctgatggtactggaataagtatccagatgcttcccctgggattcacagtctggaaaaggcagatttatgacagatgttgatcatgtattaataggttaatgaagatgtgaaaagagatcaatggaagcacagagttgtgacagctctccctgggggagtgcagaaagcagtgcaaaggagatggcattagagctatatctgaaagggagagaatgagtttgccttggtccaacacagagaaagaaaagctgaggccaccagcttttcccaagggagttatgcttcttcaaatacagtgacaagttcttaatggttcccatccagtcacagtgtgttggctagttcacatc

SEQ ID NO: 282666 - DNA, 568 bp, Homo sapiens
attgtgaaactgtaatcaaagaagaactggctattggtgctaccacctggattcaagaagatggacaaagtgacctcaraatcaacccacaagtacttactgaccacccacagtttgtcaggtactctctatcctaagtctgtttcctctagagctgtgctgttactctagagcagggaccagcaaactatggctcttgggccaaatctagccacctgcttcagtcaataaagttttattagaatgtagccatgcccattcatttacctattgtctgtgcctgccttcatactacactggcagaggtaagtagagtcatgaatcacaatgggataaagtttgagaaatgttgggcaatttcctaattgtgtgaacatcacagagtgtacttacacaaacctagatatatagcctactgcacacctaggctatatggtatagcctattgctcctatacagcatgttactgtactgaatactctaggcaatcataacacaaaggtaagtatttgtgtatctaaacatagaaaaggcacataaaaagtatataatataaatataagacata

SEQ ID NO: 282667 - DNA, 554 bp, Homo sapiens
gattaatgtaagcactgcctaatgtacaataagtactcaggagggggaagctgttgtttttaccactaatgctgtataccaggcagtaggttaaacacctcatgtatttaatgtcagttaatccctatgaggtaggtattattatttccatgttacagaagggatttgtggcatagaacattgctttaggtcacaggacttgtaggtggcaaagtggtctatgtgaacatatatcctgtggatccctaaggagagaaaatgatatagcagtcccaaggagtcacagtaggggctgggtagggtccaaggagaatcaaaccacctcctttygagctcatgtcagtgccagtcccagctccaggaggaaactgactaggcacagaggcatgggacttcttgaagggtgaagggcagagttcactctccagcctaaggaggaaataggcctcaagtaattttattgtgagagatggagcagaagtggccagagccctgagaatccttgaatcaggtagttgatgaggtctgctttggaacatgggatggaattgtat

SEQ ID NO: 282668 - DNA, 608 bp, Homo sapiens
atggcattagagctatatctgaaagggagagaatgagtttgccttggtccaacacagagaaagaaaagctgaggccaccagcttttcccaagggagttatgcttcttcaaatacagtgacaagttcttaatggttcccatccagtcacagtgtgttggctagttcacatcttgggcaggataaggtatggaaatggaagcatggcataaagcaatagggaggtgttgtaatctactaggcagatccttaggcatttccctccctttgctcccaatctgaacagagtttccctaaaggaaggtaagamaacagagtcagcttttcccacagtgcttggcaaatcaggttcagcccagtgtggtattcagccagatcctctgaactaagtgtgtcagtcatttcttcctcatgccacctcattcttagaaaaccttcccattcacagcctgaaatggatggctttaattaccatgtgtctttacatcagtaatatctgattacatagtgtagacagctggtcctagctgagccaatagatggctcttgtagggaatttagaatgggagtgcagagattgagtcattaatttgtgggagcattcctgcaag

SEQ ID NO: 282669 - DNA, 479 bp, Homo sapiens
ggccagtggggactagccagggcctcaggacccatatgggtagggcagtgtctgtgctgccctaggccaccacagcctaggggtgctcaaaaccaacagggctgactgccaaatctcaaaggctctgccgccaccataaggaaagtctgacctsttccagattcttagcaaagttctcttaagagtcaaagtgtgagatggtactgcctgtttggctgaaccaagatcacaggctggctcctgcatggcctttgggctgggagagaggaactcccccctttggtttccatcgtgaaagaagagcagcctgcacacccagcaggcaggtgggtggggaggtcccaaacccagaatggtgcgtagctggctgagcagcacaaagaaatgacgactgttcactacaacattataatgttgtgcggtgctataaactaacagtactgtgaataataactattaaaatgagtgtgaaatgactt

SEQ ID NO: 282670 - DNA, 479 bp, Homo sapiens
ggccagtggggactagccagggcctcaggacccatatgggtagggcagtgtctgtgctgccctaggccaccacagcctaggggtgctcaaaaccaacagggctgactgccaaatctcaaaggctctgccgccaccataaggaaagtctgacctgttccagattcttagcaaagttctcttaagagtcaaagtgtgagayggtactgcctgtttggctgaaccaagatcacaggctggctcctgcatggcctttgggctgggagagaggaactcccccctttggtttccatcgtgaaagaagagcagcctgcacacccagcaggcaggtgggtggggaggtcccaaacccagaatggtgcgtagctggctgagcagcacaaagaaatgacgactgttcactacaacattataatgttgtgcggtgctataaactaacagtactgtgaataataactattaaaatgagtgtgaaatgactt

SEQ ID NO: 282671 - DNA, 608 bp, Homo sapiens
atggcattagagctatatctgaaagggagagaatgagtttgccttggtccaacacagagaaagaaaagctgaggccaccagcttttcccaagggagttatgcttcttcaaatacagtgacaagttcttaatggttcccatccagtcacagtgtgttggctagttcacatcttgggcaggataaggtatggaaatggaagcatggcataaagcaatagggaggtgttgtaatctactaggcagatccttaggcatttccctccctttgctcccaatctgaacagagtttccctaaaggaaggtaagaaaacagagtcagcttttcccacagtgcttggcaaatcaggttcagcccagtgtggtattcagccagatcctctgaactaagtgtgtcagtcatttcttcctcatgccacctcattcttagaaaaccttcccattcacagcctgaaatggatggctttaattaccatgtgtctttacatcagtaatatctgattacatagtgtagacagctggtcctagctgagccaatagatggctcttgtagggaatttagaatgrgagtgcagagattgagtcattaatttgtgggagcattcctgcaag

SEQ ID NO: 282672 - DNA, 550 bp, Homo sapiens
agacaaacttcggtaaaagctgcccctttcttttctcttcctgtaagaataaataaatcatcttaggataacaattagaaactgaatgtgccagagggaatatgtgtctgatgtgtgtgtcaaagagaaaatttagcaaattgtaaatctgtaagaaactagaacttggccctcatggcttcagtttggactggtttgaattgggttgtcaatttaattgctactaactgggttctcactttgcaaacaaacaaacaaaaacccaaaacttcttatttaatttgagaggacaaagatctctatctttasggttaacaccctgccttcagcctcttcctccaccacactcgtatttttctgggggtcccctctgttgttctccagagcagcccattcagcccccaaagaatgtgcatagattattttgtcacaggaatggctccttggagcacgcaaatgcaccctgcagcaggtgctagctcgcagaaggttgaacaccaagggggccaagcctgcaaaagggaggcaccaatgcaggatatgcaagtcc

SEQ ID NO: 282673 - DNA, 471 bp, Homo sapiens
acatacttagcagctggcagaacccccacattagctccctgactggtagggtgagagctattayggtgggaaaggccaaatggaagtcattagagctgcctctacctagaaaaatagtaaatcaaaaacaatatcacatccctggagggattgtggagattagtgccaccatcaaggacttgaaagatgcagaggtggtaattcccaccacgttcctgttcaactctctcgtttggcctgtgcagaatacagatgggtcttggagaatgacagtggattattgtaagcttaaccaagttgtgactccaattgcagctgctgtaccagatgtggtttcattgcttgagcaaattaacacatctcctggtacctggtatgcaaccattgacttggcaaatgcctttttctccattcctgtccataaggcccaccagaagcaatttgccttcagctggcaaggccagcaatata

SEQ ID NO: 282674 - DNA, 469 bp, Homo sapiens
ctcagcatattgatctctccctaggtggcatggatttgtctctcccatctccagaaaggaaaccatttacctcttctgattcctctgagtgtctgacagcagcccattagggtgacacttaggcatttatggcataattttctgggcatatttatttaggaaaaataccttaattatttaatagtccacaactcctgccaactcattataaagtctgggcatgtgaaccagatggcgaaggaaaaataaataaaagatcagtgccctgctggagccccrggtcactgaatctgctctgcacaagaccttcagtaagcaaccactctttggtatgccaggagggttccccattcactatgctcccggtgagcgctcccggtgagcacatctggggcttccccccttggacctggagggacctaagaagaacaatggacaaaacactggactaggaatccacacacaagat

SEQ ID NO: 282675 - DNA, 599 bp, Homo sapiens
ggtaatatttgtcaaatgaaattatgatggaatgacttataaatttgaggtaaaaatgaaaaggaagaaggtgtagagagagaattccaggattgaaggtgatatttattgaaatgagaaaaatgaggagaagctattttggaggataagatcaaaaacytattttttgacctcttaagttttctagatgcctgtgaggtatccaaatggttactggtctgaaaattctaatttaggtaatagctacacaggtacagcatctcaaatcatggtaacatctaatacagaatttcttgacttggagaatatagtggccaaggatctgtgcataaaggatttcataaacctgaatggaaaaaatattgtatcttcatttttactaacttctacctgaaatttagcatttttttcagttatgactgactgtaggcagcaacctacagcagtatatgcagtacctgtgacttttgtgaacaatagaatttacagatatttccatacatgttacaaccatcacagataccttgcaagatcatttgtgctcatcactacctcaacatgatagaagtcattagactcaccattatatcttcttattt

SEQ ID NO: 282676 - DNA, 1126 bp, Homo sapiens
ggtaatatttgtcaaatgaaattatgatggaatgacttataaatttgaggtaaaaatgaaaaggaagaaggtgtagagagagaattccaggattgaaggtgatatttattgaaatgagaaaaatgaggagaagctattttggaggataagatcaaaaacctattttttgacctcttaagttttctagatgcctgtgaggtatccaaatggttactggtctgaaaattctaatttaggtaatagctacacaggtacagcatctcaaatcatggtaacatctaatacagaatttcttgacttggagaatatagtggccaaggatctgtgcataaaggatttcataaacctgaatggaaaaaatattgtatcttcatttttactaacttctacctgaaatttagcatttttttcagttatgactgactgtaggcagcaacytacagcagtatatgcagtacctgtgacttttgtgaacaatagaatttacagatatttccatacatgttacaaccatcacagataccttgcaagatcatttgtgctcatcactacctcaacatgatagaagtcattagactcaccattatatcttcttatttwcacaagttcaggaatcctattatttgtctgctggtcctttggcataaggatttcaaagtgagtaagtggcaaaaataatttcaagttaattgtagcccttgtcatgttcctgaatggaatcatactctactgacacttgagagagaaaatctctaacttggtagaacctaggactacagcatggttcactgagaatggggttgtgagggttaatcctttttccatctcttggttcctggatccatgtattccagcctattagattacaggtctatctagtggcctttgwtttgacacacagaccacatcctggaagagagtgctccaaacttgcaattattatcaccaagctggaattttagatgagcctttaacaggttattccatcattctacgagactagcatctttccaggtggagatgatgggtaagagcaataaatcccatggtcatatgcccattgttacatctcttttgttgtaaagtaagtcctttggttttatatgatgccgcatgggttaatata

SEQ ID NO: 282677 - DNA, 530 bp, Homo sapiens
cttctgccttctccaattttaattttatattatttcattttcccatttctatcttatctaaagttatatttattgacataaaatttttatatttgtttggtctccttttaatgttggtaagatctatagttatggcccttctgtcattcaggatgatattggtaatttgttctgtctctctcctgatcagcctgtctataaggttatcatttttattgttatttttaaagaaagaggyttgatttcattggttttctccattatttttctgttttctatttcattgatttccactctttactatttacttcctttcactttgggtttggttttatttttctagtttcttaaagaggaagcttagtcatcgattttaaatttttctgtttttctgatataagatttaatgctacaaattatcctgtaagccctgctttagcttttttttcaaggagaaattttaatatgttatgttttcttttttttcagtcaaaatattttctgattttccttgcaatttattgtttggc

SEQ ID NO: 282678 - DNA, 478 bp, Homo sapiens
cattgtggttagagaatatgctccggattattttaatccttttaaattttttgagacktgtttcatgatgtagaatacggtaaatattggaaaatatttagtgtatacacttgaaaggaatgtattttcttctgttgggtaggatattctataaatgtcaggtcaagttggttggtagtgttgttcatgtcttctatatctttattttctgtttatggggtttatcaattatttagatagcagtatgaaatcgctgacaataattgtggatttgtcaatttctttctgcacttttatttctgcttcatgcattttagagctctgttattaggcacataaatatttattattgttatgtcttcttgatgaattgacttctttatcagggctaatttttctagttctgaagtctgctttgtctgaaattaatatggctactcctgctttcttttaattagtgttagcatgttatagattt

SEQ ID NO: 282679 - DNA, 527 bp, Homo sapiens
tgtcattcccagaattgacaaaatacagtcagaccagcataggaaagaacaggactatcacctcctttgttttagatattatrcttctactaatgcagccaaaatcacaaccgcttttgtgtcagccacattactctgttaatgaaacttctgagatttaaacatgggccaaaaataacagactataaagtgtgctagtttatcagcgccaggaaatggcttaatgtaataggtaatgatattctgtgttatggctgctgatagcagatcaaaccctgaaagctctgccaatttagaggattgtggctcagtaaactgatggttattttttcaaaggttttaaattatattaattaatctattaattgattatgtttaaaagactggttttagaaatgttttgaatatgttcaaacccgaattaacaggtaacttgtttgtcattaggacaatcatccaaataataagctattaaattcacattaacatataataattgtgtaaagaatagctaagcaattagttaa

SEQ ID NO: 282680 - DNA, 527 bp, Homo sapiens
tgtcattcccagaattgacaaaatacagtcagaccagcataggaaagaacaggactatcacctcctttgttttagatattatgcttctactaatgcagccaaaatcacaaccgcttttgtgtcagccacattactctgttaatgaaacttctgagatttaaacatgggccaaaaataacagactataaagtgtgmtagtttatcagcgccaggaaatggcttaatgtaataggtaatgatattctgtgttatggctgctgatagcagatcaaaccctgaaagctctgccaatttagaggattgtggctcagtaaactgatggttattttttcaaaggttttaaattatattaattaatctattaattgattatgtttaaaagactggttttagaaatgttttgaatatgttcaaacccgaattaacaggtaacttgtttgtcattaggacaatcatccaaataataagctattaaattcacattaacatataataattgtgtaaagaatagctaagcaattagttaa

SEQ ID NO: 282681 - DNA, 527 bp, Homo sapiens
tgtcattcccagaattgacaaaatacagtcagaccagcataggaaagaacaggactatcacctcctttgttttagatattatgcttctactaatgcagccaaaatcacaaccgcttttgtgtcagccacattactctgttaatgaaacttctgagatttaaacatgggccaaaaataacagactataaagtgtgctagtttatcagcrccaggaaatggcttaatgtaataggtaatgatattctgtgttatggctgctgatagcagatcaaaccctgaaagctctgccaatttagaggattgtggctcagtaaactgatggttattttttcaaaggttttaaattatattaattaatctattaattgattatgtttaaaagactggttttagaaatgttttgaatatgttcaaacccgaattaacaggtaacttgtttgtcattaggacaatcatccaaataataagctattaaattcacattaacatataataattgtgtaaagaatagctaagcaattagttaa

SEQ ID NO: 282682 - DNA, 617 bp, Homo sapiens
ctgtttggtgttctctggccttcctgtacctggatatttatatctttctcaagttttgaaaagttttctgttaatatttctttgaataatctaccccttgctcttgctcaactccctcttgaacaccagtgattcttagacttagtattttgagayaattttctgtatcttacatgtaattttctcctcagactgtgtattttctttctttttttattatactttaaattttagggtacatgtgcacaacgtgcaagttagttacatatgtatacatgtgccatgttggtgtgctgcacccagtaacttgtcatttaacattaggtatatctccaaatgctatccctcttgtctttgaattcactgatcccttactctgcttgatctattctgcttttgagagcctcgaataaatttttcagttcagcaaatatatttctcagttccaaggtttctggtttttattaattattgtttcaatctctttgttaaatttccctgttaaatttctgaattgcttttctgtgatatcttggagatcactgagtttccttaaagctgctcttttgaattcttgctcagagacctcacatatcaccatctcattagaatcagtt

SEQ ID NO: 282683 - DNA, 617 bp, Homo sapiens
ctgtttggtgttctctggccttcctgtacctggatatttatatctttctcaagttttgaaaagttttctgttaatatttctttgaataatctaccccttgctcttgctcaactccctcttgaacaccagtgattcttagacttagtattttgagacaattttctgtatcttacatgtaattttctcctcaractgtgtattttctttctttttttattatactttaaattttagggtacatgtgcacaacgtgcaagttagttacatatgtatacatgtgccatgttggtgtgctgcacccagtaacttgtcatttaacattaggtatatctccaaatgctatccctcttgtctttgaattcactgatcccttactctgcttgatctattctgcttttgagagcctcgaataaatttttcagttcagcaaatatatttctcagttccaaggtttctggtttttattaattattgtttcaatctctttgttaaatttccctgttaaatttctgaattgcttttctgtgatatcttggagatcactgagtttccttaaagctgctcttttgaattcttgctcagagacctcacatatcaccatctcattagaatcagtt

SEQ ID NO: 282684 - DNA, 557 bp, Homo sapiens
tctgtatttagctttggctaacaggaatgattttgctgatttgatcgatgtgtaccactaaactttctccatatcagcaataaggctgtttggctttcttatcatttctgtgttctctggagtagcacttttaattttcttcaaggacttttcttttgcattcactacttggcttactgtttggcacgaggccttgttttcagcctgtctcagcttgcgacatgccttcctccccaagcttaatcatttctagcttttgatttcaartgagagatttgagactctttcctgcactgaacacttacaggccattgtagggttattagttggcttgaattcaatactgctgtgtctcaaagaatagggaggcccaaggagagggaaagagacagggaaacagctggttagtgaggcagtcagagcacacacaacatttatcaagttcaccatcttctatgggtgtggttcatggtgccctcaaacaattacaatagtaccatcaaagatcactgatcacaaatcatcataacagacataatcctaatcaaaagtttgaa

SEQ ID NO: 282685 - DNA, 433 bp, Homo sapiens
agtatctttgtgtaccaaatgggcatacatccacactgaagcatcccccaagtatcattgtgaggcacatgtaaggaagcatattgaaagcagattttgaaactacaaaagcatcataaacctattaatttgacttatcactgctctctatgcagagaggaaaaaaataacaggcctcttttacttgaggaaggatttattttgcaattcacaaagcacagtggggaccttttctgacatttgactttaargccaagagattttccctaagcagctgggatcaaggaaggtgagaggaatgtagcaaacaaagctttggtctaatatttcattttaaccaaaaataacttatatttgtaaatcatgttagcatttacaaagtacatttcataaagtgcatctcattttatcctcacaactctgtgaggcaagt

SEQ ID NO: 282686 - DNA, 613 bp, Homo sapiens
tctaccatgcattgaagaaaaaaaataatgccgatcatatgcaaacatagatgcaaaaattcaaaacaaattattagtaaattgaatccagcaatttataaaaagaacaatacaattaacttgggcttattctaagaaagcaaagtttgtttactacttaaaaattgatcagtgtaattgattgtaattcaccaattaaaaggatgaagaagaaaaaaattacataattatctcaatagatataggaaagtcatttgmtaaaattcaatgtctgtccttgtttaaaattagaaaggaataaaaagtttagcaaattaatgacaaaaggaaatttccttaatttcataaaggacaacgacaaaaaaattgcagcaaacaccattcttaatgataaatattgaaagacttacctttgatatcaggagtgatgcaatgatgttcgttttcaccttccttattcaacattatattgcaggtcttatatagtccagggcaagaggcagaggaggataaaataattgaaaatgaatatataggataatcttgtagttcataagcatgatgattgccttttcacactcgtatgagatgtgcctcccttgaaccttgttat

SEQ ID NO: 282687 - DNA, 546 bp, Homo sapiens
aaaatgctaacagtaattgtacctaggtgctggtttatgagtcattttcactttcttctttatacctttttgtattgtctgaatactttcaatgaaaatgtattgctttcataaaagctaaaataaagttcacatttttagatggtacaatggtattgtggttatgtttaaagaataagagttcttatctccaagaaacacataaytgaagcatttacagatgaaataatatgatgtctagcagggggtagggagaagtaggaaacatagatttttttttttaatggccgtatgttggtaattgctgagactgagtgacagtccatggggattcattatactttttcctctacctatgtgtgtttgaataataaagacttgaaaaacaaacaaacagtctttcataaacatagaacttatgcatagcagacattacccatagcaaaagctatgcataatctgtatacagccgagagaagatggattattagagaacattttctcaataactgggtggagggcagctggattccaccaaaaaatgtt

SEQ ID NO: 282688 - DNA, 546 bp, Homo sapiens
aaaatgctaacagtaattgtacctaggtgctggtttatgagtcattttcactttcttctttatacctttttgtattgtctgaatactttcaatgaaaatgtattgctttcataaaagctaaaataaagttcacatttttagatggtacaatggtattgtggttatgtttaaagaataagagttcttatctccaagaaacacataactgaagcatttacagatgaaataatatgatgtctagcagggggtagggagaagtaggaaacayagatttttttttttaatggccgtatgttggtaattgctgagactgagtgacagtccatggggattcattatactttttcctctacctatgtgtgtttgaataataaagacttgaaaaacaaacaaacagtctttcataaacatagaacttatgcatagcagacattacccatagcaaaagctatgcataatctgtatacagccgagagaagatggattattagagaacattttctcaataactgggtggagggcagctggattccaccaaaaaatgtt

SEQ ID NO: 282689 - DNA, 568 bp, Homo sapiens
tgagatggggagcgaagactattacgggattttaaccttcgtcttctctttccgggcctctggaacagctgttccacaaaatggatctgtgcagacaatcatttttgctgcattacttaatatacagttgctctcggcaagagatataattgacttgcttaactaatcaatctttctataagcatagctgcttttcctctcccactgggggaggaaagcagggggagagggagaaaaagagaaattgygaggagcaacctttggcatgaattaccgtgctctaacacccagctgagctttccgagctggggggcaaacattactgtaaagcattcccatcaaggtttcttcttggaccagatgtggtctgtggtggcctggggttagcagtcacccagcatgaaataggggcacaagggccaacagaggtcaaagtgggctgtggcccaaacaatgcaaaaatcactttgggttgtctttggagtgacttgtatatttggtaagatgaatgtgttcgatgaccaggaacttcccatctgtcaagtcacgaagccatgggcaaaacctc

SEQ ID NO: 282690 - DNA, 1137 bp, Homo sapiens
tgagatggggagcgaagactattacgggattttaaccttcgtcttctctttccgggcctctggaacagctgttccacaaaatggatctgtgcagacaatcatttttgctgcattacttaatatacagttgctctcggcaagagatataattgacttgcttaactaatcaatctttctataagcatagctgcttttcctctcccactgggggaggaaagcagggggagagggagaaaaagagaaattgtgaggagcaacctttggcatgaattacmgtgctctaacacccagctgagctttccgagctggggggcaaacattactgtaaagcattcccatcaaggtttcttcttggaccagatgtggtctgtggtggcctggggttagcagtcacccagcatgaaataggggcacaagggccaacagaggtcaaagtgggctgtggcccaaacaatgcaaaaatcactttgggttgtctttggagtgacttgtatatttggtaagatgaatgtgttcgatgaccaggaacttcccatctgtcaagtcacgaagccatgggcaaaacctcwtgagatggggagcgaagactattacgggattttaaccttcgtcttctctttccgggcctctggaacagctgttccacaaaatggatctgtgcagacaatcatttttgctgcattacttaatatacagttgctctcggcaagagatataattgacttgcttaactaatcaatctttctataagcatagctgcttttcctctcccactgggggaggaaagcagggggagagggagaaaaagagaaattgtgaggagcaacctttggcatgaattaccgtgctctaacacccagctgagctttccgagctggggggcaaacattactgtaaagcattcccatcaaggtttcttcttggaccagatgtggtctgtggtggcctggggttagcagtcacccagcatgaaataggggcacaagggccaacagaggtcaaagtgggctgtggcccaaacaatgcaaaaatcactttgggttgtctttggagtgacttgtatatttggtaagatgaatgtgttcgatgaccaggaacttcccawctgtcaagtcacgaagccatgggcaaaacctc

SEQ ID NO: 282691 - DNA, 541 bp, Homo sapiens
gtcctggccctgcctcttcctcttcctaacattcaaatctgactctagtgttgactttattcagtcatccatgtgtgagacccaacctttgctaacaggtggcaacctctttcatgaaatataaggtgccatcatttgtaaaatgcaccatcatgctatgtatcactaagaaagaaatgcgtgttgtcaaataaactgtgagatggcattgatagtaagatgcatttcracttcagggatgctaaaatgtgaaccaatgtagaattgatgaaacacaaattccactcactgattccacctcttgtccccccacctcttgtccgccatcatgtatttgatgttcatcagctgcttctctgggactgagtcacctcagacctctagtttcccctcactctgaaattcctgactccctctagctgttggctaaaaagagaagaagaaaagtattcctgttctcaatcctctcagccttctccatcctaaagagctggtctggtgaaaaccttgaaaccagggaaggctgggtccaaggggccaa

SEQ ID NO: 282692 - DNA, 541 bp, Homo sapiens
gtcctggccctgcctcttcctcttcctaacattcaaatctgactctagtgttgactttattcagtcatccatgtgtgagacccaacctttgctaacaggtggcaacctctttcatgaaatataaggtgccatcatttgtaaaatgcaccatcatgctatgtatcactaagaaagaaatgcgtgttgtcaaataaactgtgagatggcattgatagtaagatgcatttcaacttcagggaygctaaaatgtgaaccaatgtagaattgatgaaacacaaattccactcactgattccacctcttgtccccccacctcttgtccgccatcatgtatttgatgttcatcagctgcttctctgggactgagtcacctcagacctctagtttcccctcactctgaaattcctgactccctctagctgttggctaaaaagagaagaagaaaagtattcctgttctcaatcctctcagccttctccatcctaaagagctggtctggtgaaaaccttgaaaccagggaaggctgggtccaaggggccaa

SEQ ID NO: 282693 - DNA, 529 bp, Homo sapiens
aaaatggccaacaagtgctatgggagatgagaccactgccacctagggaaactgagaaacacttcccagaagaggccattaaaaattaagaaatagagccggcrcgatggctcacacctgtaatcccagcactttgggagactgagacgggtggattacttgaggccaagagttcaagaccagcctggccaacatggcaaaaccccgtctctactcaaaatgcaaaaattagccgggcatggtggcacatgcctgtagtcccagctacttgggaggctgaggcacaagaatagctcgaacctaggaggcagaggttgcagtgagctgagattgcaccactacactccagcctgggtgacggagtgagattccatcttttaaaaaaattgagaaataaaggattcaaaaggagaagatgggtacagggcattttaggtccagggaattatgaagatgccatcaagatgatgatggtgatgacgacaatagcaatgataaacatcaaggatgacaatgaaaaaatgttgtc

SEQ ID NO: 282694 - DNA, 529 bp, Homo sapiens
aaaatggccaacaagtgctatgggagatgagaccactgccacctagggaaactgagaaacacttcccagaagaggccattaaaaattaagaaatagagccggcgcgatggctcacacctgtaatcccagcactttgggagactgagacgggtggattacttgaggccaagagttcaagaccagcctggccaacatggcaaaaccccgtctctactcaaaatgcaaaaattagccgggcatggtggcacatgcctgtagtcccagctacttgggaggctgaggcacaagaatagctcgaacytaggaggcagaggttgcagtgagctgagattgcaccactacactccagcctgggtgacggagtgagattccatcttttaaaaaaattgagaaataaaggattcaaaaggagaagatgggtacagggcattttaggtccagggaattatgaagatgccatcaagatgatgatggtgatgacgacaatagcaatgataaacatcaaggatgacaatgaaaaaatgttgtc

SEQ ID NO: 282695 - DNA, 585 bp, Homo sapiens
tttccttatcttccttgtgtagcaacaatcaacattccccttggcaatcaagattaatcaccccaactcatacagtaatttccttctactgattcagagacatgagaagcccaaagtggctgggtggcagtcacctagttcagtgggatcactgttgtgtctattggtggaagaattgttctctttgcaggtaagacctctagaccagcagagcctaaagttttagggatgggaagcaaatgttttgctgtgaatcactagcagtaatagttaatgaagccactcccatttccactctgatttctagatacatgaatcctggctataggagaaacaacaccatatattaaatgctgatttagaacatatacagccttctgggggaccttgtcctagccctgcaagatattgccacctagctggcactgtaaaccaagtttatgacaatccttcgccattctccaaaatccatctatcttctgcctaggtaaattaaatgggggaygtggtgggaatcactattcctgcatctttcaagtctttaatggtggcattgttggggcttagaacaagatactccaaaat

SEQ ID NO: 282696 - DNA, 523 bp, Homo sapiens
gatgtgatgattgtcttttcacttctgtatcccaacccacttgtgtggaaacatgatactccctccccttgttaggtaatttatatcagcagtgtggatatatttcaggtacatatttcaagccccaatacctcctgtgacatagataaagaagggatgggctcatgctcattacaccaagcaggaattgtggcaagaaaggtaaagtgacttttctaaggccacacagctagtgagttgcagatctgagtcttccaatttccaaaggcaaaatcagtgatgtcttccactgtgctgcagctgcccacctcctggaagcctgctctgtgtgccccacttatctgctattctggcaatgtaaacatgtgaggaaggctctttgttcagagggcatgttgagtggaatatgaggtcagggtycatctgcatttttggctacagaaggctatggagataataggagcccctttgtgttcagtggggctgggtgggagcaagtggatgtctgaaggagattacaagc

SEQ ID NO: 282697 - DNA, 516 bp, Homo sapiens
ttcaagggagactgccctatcttcttcccaggctcactattctacagttctttgtggccttggtccaagctgtttcaacaagccactctgcttcttacttcctatcacccctactcccacttcagaaatctccaggaaaaaagcaagcagaagacacagagcaagcgttcccaagagcctgctcgccatcctcaaatccagtcaaagcactgcaatgtctcattttccggggagtgagatgtaaatctctcttcttataggtacccccaatctccatcaataattcctgtagagccccctccccctcacctggctctgggagggagtgagaatgtctcaacagtctctaaaagaccattctaaaagaatggtttgctcctctctcttcttccrtagcctgggatgttgggtactaggaagtggtgaggaggtggtgacacaaccagatctgcctcttaataacccctgaagaagtccatatggttgatgtccctctttagaatgtggttcttacca

SEQ ID NO: 282698 - DNA, 601 bp, Homo sapiens
ttaatactatgagcccaacatctagcacagacacactcattgaaatacttgtttaatggatgaagagtttgggatcatagggatcaggaagtaaactctcccttctgttccataattagcttttcttaagtttcaccatcccctgttaagtaatgaagtggtgtagattaatggaaagattgtcctatgagacactctcattcccattagatttgcagtatcaagttgccagtcaagttgctctcaaatgaagacagcatagccttctgctacaaagagaagggtctgaacagtgtttgccctctgtccattttgctctgtcgttattgaattgatgcattcacttattaatgaragcacactattctcactaaggcccatctcccatttctcctcttataaacttctttctttcctaccagtctctctcttctagcctcctcttacgtcagcctctactcttccctttctcaatcttccacctccttggccaggtttcttccatccactactggtaacttacaaaatgcaacggtggtagtggtgatcatgatgatggggatggagggtgtctcctctggtggcaaaaaggtacaagctt

SEQ ID NO: 282699 - DNA, 601 bp, Homo sapiens
ttaatactatgagcccaacatctagcacagacacactcattgaaatacttgtttaatggatgaagagtttgggatcatagggatcaggaagtaaactctcccttctgttccataattagcttttcttaagtttcaccatcccctgttaagtaatgaagtggtgtagattaatggaaagattgtcctatgagacactctcattcccattagatttgcagtatcaagttgccagtcaagttgctctcaaatgaagacagcatagccttctgctacaaagagaagggtctgaacagtgtttgccctctgtccattttgctctgtcgttattgaattgatgcattcacttattaatgaaagcacactattctcactaaggcccatctcccatttctcctcttataaacttctttctttcctaccagtctctctcttctagcctcctcttacgtcagcctstactcttccctttctcaatcttccacctccttggccaggtttcttccatccactactggtaacttacaaaatgcaacggtggtagtggtgatcatgatgatggggatggagggtgtctcctctggtggcaaaaaggtacaagctt

SEQ ID NO: 282700 - DNA, 490 bp, Homo sapiens
ctctgggaactcagacaagtcaccagttctcatccttaaaatggagcagacaatgccaaacgtcatagggatgttgggtggattcatgaaaatgcaaacatcaagctctcccaggcaccaaaggtgcatagttcgtctacatggattgtgccaaagcaaattagatgtccggggaaaaggccaggtatgctgggcaaatgtcctgtgtcctcatgggtccccaggatggggcmcactgtccccattgggctcacactaaaccgtgttaatggagaaagccagcccacgtttcattcctctccataatgaaaaagaaggagggaatcacaagagaaagaaagacaaaattgaggagctgagattggggtttgtgagcacttcagcaaggaaacaaatatctttattggctctggacagtctgccaatcagccacgaaattaccagcttctctttcctcccagaagggcctgcgcggctgcacacaaaagct

SEQ ID NO: 282701 - DNA, 490 bp, Homo sapiens
ctctgggaactcagacaagtcaccagttctcatccttaaaatggagcagacaatgccaaacgtcatagggatgttgggtggattcatgaaaatgcaaacatcaagctctcccaggcaccaaaggtgcatagttcgtctacatggattgtgccaaagcaaattagatgtccggggaaaaggccaggtatgctgggcaaatgtcctgtgtcctcatgggtccccaggatggggcacactgtccccattgggctcacrctaaaccgtgttaatggagaaagccagcccacgtttcattcctctccataatgaaaaagaaggagggaatcacaagagaaagaaagacaaaattgaggagctgagattggggtttgtgagcacttcagcaaggaaacaaatatctttattggctctggacagtctgccaatcagccacgaaattaccagcttctctttcctcccagaagggcctgcgcggctgcacacaaaagct

SEQ ID NO: 282702 - DNA, 573 bp, Homo sapiens
ttgctcctgcacccatccacgctctctccatgctgcttggcactgcccagggcatgaagcttgggctctcctggaagttctgcaaaagacacatgcaccccaagcatttcctgcatttagaaacattcctggaaatgtgtggcatctgggacagaggccatggcagacacacagtctctcatgacctcacttcctcgctcttgccctttacttctctttcttctgagaaacaagctcattcttcccccttgttctgcagagaacaatttatccagtacttggggcacttggaatctcagcttcattccttccaaacactaagagaataaaagtgacatagctaggaaagagctatcaactcaacctgattataagcaccctgaggtcagggayggggtcttaaatactactggagccccactgtaactagcctagagctctgctaaataaataccacaattatagtcagttctcattactgatggtagttatgttctctaaagtcattgcacacactgaattagcaaatactgaacctttgttcctaggggaaataaagtgttaggttctgca

SEQ ID NO: 282703 - DNA, 490 bp, Homo sapiens
actattcaacaataaaaaggaacaaacaatggatacacacaagaactttgataaatctcaaaggcactgtgccaagaagccagtcacaaatggtgatacactgtatgagtccatttattcctacattcttgaaaagacagaagtagagtgatggagaacagatcagtggcagtcaggggatggaggtggagggaaggtgttgttgyaataaagggatagggcaagaaaattcaggggataacaaaactgttctgtctcatgattatagtggtagtaacacaaatctacgcatgtgttaaaattcataaaactgtacatcaagagaaagcagttaatcttattctatggtgatttaagaaataagatcaataagtaaaataccataacaatgagtaaccagagatgcaacaccccagctcaaatctggactgccccactgcacggaatgggcctcccaggcaatcttgttggagggagcacagctgccacc

SEQ ID NO: 282704 - DNA, 554 bp, Homo sapiens
gcaagtgacagaatcccaactcaagtgaacatgaccaatacagcaaatacattggtttacataatttggaaggacataggtgtatccagagactcaaaaggttgttggcgggaaattctgctcttctgcagtccttcgtctttctctgctttcatgaaagaggtcttaattttggtccccaaccagcaccaggtacctctggctatatttactccttttggcagccctagggcccagctagccagcagcggatgctgtgatggggagcagataatgggtctgacccttcaaggaggccatctaactgcacaggtgttcagatcactcaactcattcaggaagagctaagggaaaccactkcccactggattgcagccattgatgcctggcaagatgatgaactccaaggccctatgcctgcctttcttctacatagctctgagcacaaacaacttggaccccaggagaagttcaactctggacatcatcaaaccatgaaaccacctaatgacagagcattgaggcccaaggggagcagaaatcttcaggataga

SEQ ID NO: 282705 - DNA, 600 bp, Homo sapiens
tagcttttaacaaattctctaggaagtttgtgacccactagagattgagaattgagaaccctgacataaagatactgagtggcaactccccatccatgtgcagattgaactagagtctttcatttrttaaagcaataggctttatttaagcaggagtcactgcaagatgaagcatcaaagccattgaggaaagctgtaaaatcttgatggttagagacaggaatggtctgggtgctgatttgccgtaaagcacgtggaatggttttaatggcttcttggccagtccttcaaccctacacccagggcctccatgccgcccaactccagggagccctgttcagccctatgtgattagagccttttggagcccagctgcaggacttgctctcctcatattacatgtggtgctccctggagatgggcgattctcaatcctcacagctaaaggggtcagagattctctgagagcctcttgctttctccaaaactctagttgcttccttcttctgggcatgagaggagatttctgcccagagggtgaggggagggtgcatccagattgcttcttacttgattttttactttatattatctcatata

SEQ ID NO: 282706 - DNA, 592 bp, Homo sapiens
tggctgaatcttagccccttgagtcattgacaaacatgtcctatatgtgtctgtgtttcattttccatcacgtgagcaggacccatgttctcatattctccacaggacccagtcgaggaccctcaacacaataagtgctcaccaaattctttttggaatagaatcgaattccaaaattatagagcaagaaagcatctttgaagttacgcaagcagccaacaggcatattctgattgtgacggatgtgccatgcactgcgtgaacrctgacacagggatcctagcctagctcctatgagttcctggaaactataggcaaattatatctttatgtgcttgtttacagggaaaaggtccatggcttttaccggctccttcactgggccgtggcctctccctaaaaaaggaatgaacaactgctagtccaataggaagaacagatatgaaaaccaacaaccacaacagtgtgctatgacctgggacagagatcaacacaagatgcttgaggacgtaaaggaaggcccagtctaagaggacagagccctgaaatcaggattgctcctttctaaggcagatattactagtcccgtatc

SEQ ID NO: 282707 - DNA, 592 bp, Homo sapiens
tggctgaatcttagccccttgagtcattgacaaacatgtcctatatgtgtctgtgtttcattttccatcacgtgagcaggacccatgttctcatattctccacaggacccagtcgaggaccctcaacacaataagtgctcaccaaattctttttggaatagaatcgaattccaaaattatagagcaagaaagcatctttgaagttacgcaagcagccaacaggcatattctgattgtgacggatgtgccatgcactgcgtgaacgctgacacagggatcctagcctagctcctatgagttcctggaaactataggcaaattatatctttatgtgcttgtttacagggaaaaggtccatggcttttaccggctccttcaytgggccgtggcctctccctaaaaaaggaatgaacaactgctagtccaataggaagaacagatatgaaaaccaacaaccacaacagtgtgctatgacctgggacagagatcaacacaagatgcttgaggacgtaaaggaaggcccagtctaagaggacagagccctgaaatcaggattgctcctttctaaggcagatattactagtcccgtatc

SEQ ID NO: 282708 - DNA, 573 bp, Homo sapiens
gatattactagtcccgtatcactaataaggaaaatgaggttcagagaggttaggctacttgcccaaggtcacacatcagtaaagccaaaatcaaaatctaagtctctctgattccaagcttagtgctgttttgcactgtccttggcatttgagagcctggccttgagacccctcatgttctcttaggcatgggacccctgcaatggctgtctgaattctgaacagccatggagcaggattggcagataggcctctctgtctccagtgtgcacatctttgcatgcttcagcgaactttgtggagtctatttaccacatctaagaccaatttccttcccttcagttgytttgaagataattggaggtacttgcattgtctgcctgggaatgtaaaaagccagctaatgctgcaatcgatgcttcctgcttaatgctgtgcctctgcccaagcccgccctgagcagcagctaacagccttcaatgatggcttcggcagatcttcccggccggctactttgttaatcagaaaggggctgggggctgtgggggccctcaggataatggcaggcagatt

SEQ ID NO: 282709 - DNA, 604 bp, Homo sapiens
tttttaaaaggaacaagaacaagagatctcatagtctgcctattgcaatacactttttactcaggaaacataagcaatgaagaagaaaaacatttttcaaaagcaaatcatctcaaactgaaaaaaaagatgtcatcagtgtcttgataaaaatatacattcagagttaagcctttctccttggaacataacaactatagcataattgttacttctaagtttatggttaacttgacactggttgtctgtcttagaatatttagccatgccctgtctactcttctcctaagcaaaatggttaacaaatatgagtatgtgtggtgggaagagagtagagtgtaaaagagatggggagaaaaggagagtaaactaagaagcagagagatgcagggttatcaaaagcaaaagaagaagagttcgcctgctttgctggcaacccccaaaagagtcagaaatctgttggccatggagggtcctgacttaagtgtctatgactctaagagatggcatgtgttttatctgtctctcaggggcatctaacagaaracggcacaggagaaatgggtaatcctggaccagctgtttttcttcagccattcattca

SEQ ID NO: 282710 - DNA, 588 bp, Homo sapiens
tcaggcattttgtttgtaagagaatttaaactattcttgtaagataagctttaaggttcctgaaagttgcatctgttccgaagtggccttgtctccctccagggcaaggagagcttttaggttctgttttcataaagacccattaatcccctggtcagggttggaagttcccaggccagtttgcatcatactgctaagtgacacatagtttargccttgcgggacgtttgagtgggccttttggctgttagtaatcttggacgtttgagtggaccttctggctgttagtaatcttataatatgccccttatagcatactacagtccatagtttgttcctcttattattgctgagaagtatttcattgaatggatgtaccatgttttgtttatttatttaccagttgttggacatttggattgtttctgttttgggttattttgaataatactgctgtaaacattcatgtagaaatctttgtgtgaaaaatgtgtttctgttactcttgaatagatttctagtagtgaaattgctgagctgtgtggtaaacgcatgtttaatttttaaagaaaatgcaaaactttctaa

SEQ ID NO: 282711 - DNA, 432 bp, Homo sapiens
cactttgtcttgatttctgtacctttatagtacattttaaaatcaggtagtgtaagtcctatgactttgttctttttaaaaattgctttcactattctagattmtttgtattttcatacaaagtttaggataaatttgttagtttctataaaaattcctgctggaatttttatagaaattccactgaatctatagatcagtttgagcatatttgctgtttgaatactgagtctctcaacctgtgaacatggcatatctcttatttatttaaatctttaaaaatatttatcagcaatgttttgtgtcagtgtacacacaggtcttgtacttttgtttgctaaatttattacttatcagtttattcattttgatgatcattgtgaatagaatttaattttcaaatatttgctagtatattgaaatacagttgat

SEQ ID NO: 282712 - DNA, 432 bp, Homo sapiens
cactttgtcttgatttctgtacctttatagtacattttaaaatcaggtagtgtaagtcctatgactttgttctttttaaaaattgctttcactattctagattatttgtattttcatacaaagtttaggataaatttgttagtttctataaaaattcctgctggaatttttatagaaattccactgaatctatagatcagtttgagcatatttgctgtttgaatactgagtctctcaacctgtgaacatggcatatctcttatttatttaaatctttaaaaatatttatcagcaatgttttgtgtcagtgtacacacaggtcttgtacttttgtttgytaaatttattacttatcagtttattcattttgatgatcattgtgaatagaatttaattttcaaatatttgctagtatattgaaatacagttgat

SEQ ID NO: 282713 - DNA, 638 bp, Homo sapiens
tggactggtttggttttggcatttttagtttttttattcctattggtgatacctatggtttccattttttgaataaggaaacatatagttgttttattcatagcttattacacagagtgagcttatatcagaatagtttttggtttttatatataagatttgttcagtttcttcttaagtatcaatattttttcctggctaggcatagtggctcatgcctgtaatcccagcacttcgggaggccgaggcaggtggatcacytgaggtcaggagtttgagaccagcctgaccaacatggcgaaaccctgtctctactaaaaatacaaaaattagccgggtgtggtggtgggcgcctgtaatcccaactacctgggaggctgaagcaggagaatctcttgaacctgggaggcagaggttgcagtgagccgagatcgtgccactgcactccagcctgggtgacagagggagactccgtctcaaaaagacaaaatttcctttaattttgtgtaaccattttatattttgttaatttattagttattaacactgcccactaccacttgaatattatttataggttaaatgataaaacatgaaagtacccaaatacattgttatggtgaaaatgatgagagttt

SEQ ID NO: 282714 - DNA, 592 bp, Homo sapiens
gcattctggtagcttgaagtcctttggttctgatttcaccagttcggattttaagataattcagtcccagctgggcttaagtttacttttgcattgttgacctattttttaagtgttagaataaaatcatcctccttayctggagacccacagagaaattcctcctcaattgtagagctttggaacaatttaatcctcctaatggtctgatatgcttcctttgtttgtttgttttgttagtagagatggggattcaccacgttagccaggccggtctcaaactcctgacctcaagtgatctgcctgcctctacctcccaaagtgctgggaacacaggcgtgagccaccatgaccagccctttttgtttccttttttaaattaagcaacaacgaaggttttccctttttgccctggctgccagggactaaatttcatgctcagttatgatagcttcctttagcctagatttctggaccctgtaccctttttcatttgttattgcctggctttttacccacataacaacagatggattgttctatgttttctatatttacagtgccagtaagtgtatattaatgccaagtcagc

SEQ ID NO: 282715 - DNA, 638 bp, Homo sapiens
atgtagtataaccgtctttctgttccacattaatctccaaataatttggccattcttagcgcctgagaaagaatcacagatatgttcccataccttgcaaacaatctttatgtcagcatgccccaaacaaattctgcctgatcataatgaaatcactgggtttttctcctcccccatttctgactatgctaagagaaggcgtgagtcattgagaagtgaagaccctcaggggacttccacataaacaccaaatttattttttattttatttattttttttgaggtggagtcttgctctgtctcccggactggagtgcactggcacgctcctggctcactgcagtctctacctccggggttcaagygattctcctacctcagcctcccgagtggctgggattacaagcacgtgccaccatacccagctaatttttgtatttttagcagagatagggtttcgccatgttggtcaggctggtcttgaactcctgacctcagggaacaccaaacttaaaaagggaatatgtgtgtgggtgtgatgagtgaaggaggtgaactgtgtgtgtgtgatcacaggaagtgacttgctccaggctgggtgatctgattccctcctgttgcttctagggttcagcctc

SEQ ID NO: 282716 - DNA, 531 bp, Homo sapiens
ttttgattgttttatagctcaattgataaggtgtgttcctcttttttgttcaagaaaatttaaaagcaactaatttaaatatgcaaaattatcttgagttgttcatacgtgaacttaaaagccrtgcaacacaggaaaattaagtaattatgcctccaagttatttactgcaattaagctcatttatcatatgcaaattagtgcaaactggtctcattagttactaaattactcaatatgagctgaacaatgtagcactccagtttgtaatgaaaaatccctgtagaggcaagcagtatcaattaagctaatttgcatatgcaaatatattcactaactttctctctttctatatttagttttacattttcttaccattctggatcatagagacactacagggtcactcaactttctccccttcctctctcacagctaaaggaattaattcaaaatgctcctattatttgaaatcaccttattttacgttagcactgatgtccagcaggataccactttagcaaaaagagc

SEQ ID NO: 282717 - DNA, 670 bp, Homo sapiens
aagataaaaaacaatatgcaaggcaaatgcacttatcaacctgatcgatctcttgacctaagattttgataatgtttgctgagaactttgggcatagaaattggcctttggatttcaactgacttcaaaaatctaattgttatatttcttttggtctgggaaaacagcatttttaaaatgtttaggataaatatggaaaaatgatacatgtagatcctgctaacatgaaaataattcattgaacaacaaaattagtaaaaattagctaaaaaagttctagcyattaacaatcagtgaagcagcaaaagctgaagttttgctgaataggacaagccaggggctataaattctcatcaggttttggggattatagaataagatctttgctcatttgatacgttaagctttgctaagcactatattttaccttaattctggatattgtaaagagtgatattaagtaactgtgttctaggaggaaaagaaatatataccgtgcccctttagtaaaactgtttttaaattctaatagaatttcaaggttattatctatttcagatcaacagtgggggtcagagttcacagcagccagaatttacaaacctccaatgggttttgattgacagcaatcagcatctcttcagcatcactgagggaacaaagtacaggt

SEQ ID NO: 282718 - DNA, 461 bp, Homo sapiens
gctttcattcattcattcactcagtcatttatttttgaattcattaaacaagcattaattaaagaccatttaggtatcaggcactttccatagcactaattattctgcatttcatcttatctccccagataaattataagcaaatggacttgaaggcccagcggttccttcctagaccaggtgcctcctagttctggatgagtatctttgtctctcttaagtggctttgcccccattccctccagccccacccaaagtagtcaggacatccaattaacctttgacttgggcttgtttsaaggtgttgtggggaggaagcctgagaaagggatagtgaagactttgtgaacctcattgagataaatagctgacagataacttttaacccagattagcagactctggcaatatctataatgaaggctgagtctcagctcatttgagttgtaaacatcacagcc

SEQ ID NO: 282719 - DNA, 461 bp, Homo sapiens
gctttcattcattcattcactcagtcatttatttttgaattcattaaacaagcattaattaaagaccatttaggtatcaggcactttccatagcactaattattctgcatttcatcttatctccccagataaattataagcaaatggacttgaaggcccagcggttccttcctagaccaggtgcctcctagttctggatgagtatctttgtctctcttaagtggctttgcccccattccctccagccccacccaaagtagtcaggacatccaattaacctttgacttgggcttgtttgaaggtgttgtggggaggaagcctgagaaagggatagtgaagactttgtgaacctcattgagataaatagctgacarataacttttaacccagattagcagactctggcaatatctataatgaaggctgagtctcagctcatttgagttgtaaacatcacagcc

SEQ ID NO: 282720 - DNA, 539 bp, Homo sapiens
ctactgtcagcagggcagaatcaatttaaaaagccttgaccatcaatactatttatgtccttcttcatctctggctacataggtgtgaaattgtagttctagacttgttcagacaacccaacttgtcctcaaaactgctagcggagaattccgacctgccttcaaaatgtccagcggattctgctcctcatacttaaacacaggaggcaggtaatgttataactacatgtagttgttttagaaaagcactaggtatgtttttatcaagtatgtttattgctgggtggtccctccacccactctgtcttccacactgaataaactaagtgacctgatcattatggggctcttaatcagaggaagaagacaaattcattcaactgaattttaaaattccactattccatttctctccatacatctgagayggcatgtctctaagctaatatgtgctcctttgcatcaatctttgtgacttaagtattaaccaaactaacactttcaaagagagttcaacatatctataattgcttagataa

SEQ ID NO: 282721 - DNA, 583 bp, Homo sapiens
gaaattaaaaaagaaaagctttgaattttcccagaaaaaaaaaaagaggaacaaaaatacatatctgagtacaacagtaagaaaagtgttgtcctcacatatgagagagggaaaaaaagcactaaaaatactccagcaaggaattgttgttgtgatttaggctagagataaattgaccaagggatattattgaaagaaatctaacaatgatcttatkaaattggcaagctttcatactggtatttcctgttgtacgaactgcctttgctttcaagcccttatatttttaaaaaagtaatttcttctcaattttgtaactaaaacaatattttaataattacacagcactaaactgaagattccttgaacccaagattgtgtccatctctgtattcctagttcctagcacagattcgggcatatagtaggttttaaataaacatttattgaatgagcactggcagtgttatggtttacaacttactcccaaagacattatctgatttaatgctcatgactgtatgatatagttttacatccccactctacaggtaagaaaatgtcaaacagattaggtggcttg

SEQ ID NO: 282722 - DNA, 543 bp, Homo sapiens
gcctggaaggccttagaaggtcagcagtaagaaggtcttctcagaggaggcctcgtttgcttcttccagagtgcttactctggaacccgaatmgacacttgtttgacttcctccacaaagactctgctccccttcccaaccttccctctcaaatgcatttttacggtgtcagttttgccaaatcagaatgaggggcaaacacaaattatctctcttctcaatatgaacaacctccattaggccaggttaataaactctaatagatgtaagggctaatacaatattcagctactgacataaacataaatataaatttcaaagaaaataacctactttagtaaaactacctgtgcaatacaaattaatgaactccaaatgattctgcacatctccaccaaattgcattttcaggctcacatcttcaggacatgctgggtggtttgatgcattcccacaattcatcttcctgctaagccaattttaatttaaatgcaattaaaggctcaaaatgaacattatgtattagataaagcccgaatctgc

SEQ ID NO: 282723 - DNA, 572 bp, Homo sapiens
tgtcatgacaggttacaaatgccatggcaacgtcaggaagttaccctatatggtytaaaaagggaaggcatgaataatccaccccttgtttagcatatcatcaagaaacaaccataaaaatgggcaaccagcagcctttggggctgctctatggagtagcccttcttttattcctttactttcttcataaacatgctttcactttactctatggacttgccctgaattatttcttgtgcgagatccaagaaccctctcttggggtctggatcgggacccctttcctgtaacaaaactctcgtatgtaataatttaatcaaatttaatcaaactgcctagtatcctttttcttttggttacttaattactgattattattgaattggccacaatgactagtagaagactttttcatataacacaaagcatacagtttaaattttgcactgaagaacgatagacagcacaactgcaactgctttttaaagtgaaatctcatttcaaagatgttaaatttctgtttcagatatgacaattaacatgctaatgttatgtttccttcttcaagaatt

SEQ ID NO: 282724 - DNA, 572 bp, Homo sapiens
tgtcatgacaggttacaaatgccatggcaacgtcaggaagttaccctatatggtttaaaaagggaaggcatgaataatccaccccttgtttagcatatcatcaagaaacaaccataaaaatgggcaaccagcagcctttggggctgctctatggagtagcccttcttttattcctttactttcttcataaacatgctttcactttactctatggacttgccctgaattatttcttgtgcgagatccaagaaccctctcttggggtctggatcgggaccsctttcctgtaacaaaactctcgtatgtaataatttaatcaaatttaatcaaactgcctagtatcctttttcttttggttacttaattactgattattattgaattggccacaatgactagtagaagactttttcatataacacaaagcatacagtttaaattttgcactgaagaacgatagacagcacaactgcaactgctttttaaagtgaaatctcatttcaaagatgttaaatttctgtttcagatatgacaattaacatgctaatgttatgtttccttcttcaagaatt

SEQ ID NO: 282725 - DNA, 670 bp, Homo sapiens
gacttacacacgctaagggcaaggctacagcgagggatttggaaggacccagtcatttggagtggggaagcatgtctgggacatgggtttgtggggacctcttatcactttgccttaaaagaagaaggaatgaaattccttgctaaaatctgatgggaaaatagaagcaattaaggtcctcaaatgcatcctactgtaagtgagtttctgggaatgtgtcctcctcagtagtgggaggcattgctcctgctatgcccttctcagcatgcacagaggatgcagaagagaaatacacatttcaagtttagaaccctgtaaatgttgacttagaaggtgaaaaacccaaaccttgctctttgaggtcttgcagtaaaatctcttttcattctctaacatgtgttttgtggttagtactatttcactctcaattctgttgtctggcacaaaactgcccaatggcacagaagcccaacaggagggtaaaagaaaattgctgagctccagcatttctcttgtaatccttggagaaccatttagtrctgaacttgtatccaggatacagaacactttttcctatgctgagagagaatgacacaactgggcattgtggtgtgacctaaattcacagataaatatttggacggcgactcgcccttcacctggcattaat

SEQ ID NO: 282726 - DNA, 529 bp, Homo sapiens
gtctctttctcagctagtagcctcaaactgtaaaatgcatagcatctgaaaaaaaaaaagtatagcttaaaggagaactgtttatccttggtgccaattttctctgcataacattatttccagaaaattactgggggatttcctgtgaggaaagaggggatgggggcagagaattgacaaaaatgagtagagagcaagacagaccctcacgtattgaagaacagattctgtagtcttggtagctggcagaaatgttaagtgcttttcacagtcaacattcaaacagattatcagatggcatatttcaccctgttgttactttaaatgaagtgaccatgaaatcaacaaatctgctgtcaggtgcctgtcactaagatagttctttctgtcacacaatgcctcacatagcaggtaatgtgtttttaagaatcagtcctgtgtcacctcatcaagtccttgttaaaaagatgaaataagacggatggtgttgtstaccatggagttgactgaaattcagtagaatgaaatg

SEQ ID NO: 282727 - DNA, 633 bp, Homo sapiens
tctttcactgaatactgtttgctacaagcacattataaacctcatgaaagcatggactttggtttctattttttatcagtctttaacaaatattagccagccagtagaaaccacaaaattaagattaatgcatggaaatattactctttattcttttttaaaagagaggctttctttcaacacaaattaggattgagtcagtgagcaaaccaggccaaattttgctaatggttagatagtaaaggtagaaggttcccttcctattcaaattgtcgtgaaactggaggtccaggtgtttctggaatccattcaatatgtttttaatatcctgatgcagacttaccattcattatatggatcgataatattctatatttagatgataatctattatccaattagagtattttttcccatgtattcagaggccaactgaaaagagtaattttaaataatcaccaccaccaccaccgtgtattgatcctcaccatgtgtcaggtccttcatatatgttatctctaattcttatcccaactttayagacactactatcctcatttcacagtggagccaactgaaggtcaaatactttagctaagtcactcaaggtcacatacctagtctgtgtagctc

SEQ ID NO: 282728 - DNA, 458 bp, Homo sapiens
aagaactaaaaatagaagtaccattcattctagtaatcccactactgggtatctacccaaaggaaaagaaatcaatgcatcgaaataatacctacactcatatgtttatcacaacaccttcacaatagcaacgatatggaatcaacctaaatgttcatcaacagatgaatggatatagaaaatgtggcatatatatccatggaatattattcggccataagaaagaacaaaatcatgtctttttcaacaacatggatggaaattgaggttattaacttaaatgaaacaagccagacacagaaagacaaatattgcatgttctcrcccataagtgggtgccataaaatgtgttcacatttgtgcagagagttgaatgacagataatggagactttgaagggtgagggtgcggaaggagggaggatgatgagaaattagttagtactatgtacattactt

SEQ ID NO: 282729 - DNA, 490 bp, Homo sapiens
ctaagtttatggaatattttaaatctttcattgtcatttcaacagtgttcacagcatgtttaccaggagtagatttcatctcaagaaaccaatttctttacttatcaacaagaagcaattttcatatgttaaagtttaatagtgagattgcagcaattcagtcacagcttcagggtccacttttaattctagtttacttactattacaaccacatctgtcattatttccttcactgaaatcttgaactcctcaacgtcgtccatgagggttggtatcaacttcttccaaactcctgttaatgttgatatttttacttcctcccgtgaatcactaatgttcttaatggcacctrgaatggtgaatcatttccagaaggtattcaatttactttgcctagatccattagaggaattactgtctatgacagttataaccttatgaaatgtatttcttaaataataaaacttgaaagttgaaattactctttga

SEQ ID NO: 282730 - DNA, 334 bp, Homo sapiens
attctactatccagctctactgatctctgcaatgctaaggacacatcactacattcctctgtatctaaccatcctttcagcagcaactggggtccatttcctctatgtagctttgcctgattccctatacttctgaccatgatataaccaggttatgtcgtgtcgttgggcataaaagtagatgcytaataaattctttaaacttttctcttttaataaatttttggttacaagaaaacacttcttccttatttttatcattttattcactttctccccacccactgtgacaatggttgcttgagtgtgactgatattagactagctttacata

SEQ ID NO: 282731 - DNA, 404 bp, Homo sapiens
caaatgtccttggatatatatttacttacgtagataaacatttttatactatatacatattcactttcatgtaaataaacatttatatgtatgcatatatctgagagagactttaccggaaaaatgtgaaaaactattttaagtgttctttatctaaaaaaagactaaatcatacactacatttcatcaaacgaratttttttaagtgttgtttgtaagcatttggaaaggaaagaagcctttattgtgaccaaattatttcttttttatcccctccatttctaattttatttatttactgaacacatatagcactaatatgtgccaggtactattctaagcactctataaataataacttgtttaatcatacaatgaccctatgaaatatgtactattattat

SEQ ID NO: 282732 - DNA, 267 bp, Homo sapiens
atggtgcctggcacagtgatcaataaatgcagaataaatggccaaatttcaagaaatcacatatacataagaaaatgttatgcaaccaacaaaatcactgaactgtgtataatccactagtcaaggctcttcatagracaatggcagtcttacgtatagccctctcagggttttggtatcaataagaacttacatacacagcaataagatagccatgtgtgatgttaatattcacaaataactttcataaataaaagtgcaagcatg

SEQ ID NO: 282733 - DNA, 588 bp, Homo sapiens
gttacctcccaacccagtccctctcatgacacatgggggtatgggaactacaattcaagatgaaattttggtggggacacagccaaactgtaccagaggtctatcttctctccttgaatctctttacttgggtcagaatactgttttacataccttattatctccagggccaagcagcaggtctggcatatagagaaaatcaatgctaaataaattaataaactaaaaagatgcatatagaaacttctgaaatggtgcttgacttatttattgagtacatgttaggggacattgttagatgacaatggatgatcaaagaagaatagatgacatccccctttayccctgcaaatgtggactgtaaatatattcaaatgtatttgtttccacattgggtatattcttgattctatgagatggataaaagcatttactaaattacacagcaaatagtaatccttgaacaacttcaaggtcaaaaaatacatagttctttgtgatatgaaaggttttaatgaaagacacgtttccttctcttagatatctgccacatttgtccttattccccactgaatctttgaaggtctg

SEQ ID NO: 282734 - DNA, 586 bp, Homo sapiens
tcttcacagttgaggcttggttcttgcatggagtaggacaaatcgagatagcaatcagcataatgggcccaccaacccccaccccagaaaaccgactgcttaaaaaattaaattgtctaaaaatatggtggttgtaaaaaatatatataattgttgttagtaaaattacaacaaataataataatatctactgatactttatgctttcaggtaatttgaattactgtatgattacatttatgtaacactctttaaatgactaaactatagaaatagagaagagatcgggttgccagggttagggctggagttgaggtgggastgggaaaggtaggtaggggtggttatcagaaggtcaacatcctgtaatcccagctacttgggaggttgaggcaggagaattgcttgaacctgggaggcggaggttgcagtgagccaagatcgtgccactgcactccagctgctggggcaacagtgcaagactccgtctccgtctcaaaaacaaaaaacaaaacaaaacaaaaggtcaacatgaggtatcctgtggtgatgatggaattgttttggatcttgactgtaatggtag

SEQ ID NO: 282735 - DNA, 586 bp, Homo sapiens
tcttcacagttgaggcttggttcttgcatggagtaggacaaatcgagatagcaatcagcataatgggcccaccaacccccaccccagaaaaccgactgcttaaaaaattaaattgtctaaaaatatggtggttgtaaaaaatatatataattgttgttagtaaaattacaacaaataataataatatctactgatactttatgctttcaggtaatttgaattactgtatgattacatttatgtaacactctttaaatgactaaactatagaaatagagaagagatcgggttgccagggttagggctggagttgaggtgggagtgggaaaggtaggtaggggtggttatcagaaggtcaacatcctgtaatcccagctacttgggaggttgaggcaggagaattgcttgaayctgggaggcggaggttgcagtgagccaagatcgtgccactgcactccagctgctggggcaacagtgcaagactccgtctccgtctcaaaaacaaaaaacaaaacaaaacaaaaggtcaacatgaggtatcctgtggtgatgatggaattgttttggatcttgactgtaatggtag

SEQ ID NO: 282736 - DNA, 468 bp, Homo sapiens
ggctgtcctacatagcagagcactttacctctcacttcctggagaaattatttttcttttcttaarcaaaggaaactccagaatctaaagaggccatttttcatctggatcatcaagcagtggctctgaaggtgtgcttaagttcactcttaggtgtgcttgccaagcacacgatctaggtgctggcagagcacagggtcattcaagtgcataattcacaagactctagctgccagccagtgggacctggagaaccaggcaggaagtgcagttgataaaatgagcatagttaacccttcagaaacatgagatacaataacattttcaaaagtcttcaacatgtcaaatgtttgtgctgtgcccaatgttgatcttcatttattatttatctgctatctttaaattgcctggagcattaaagctcagaactttaaggatgccagtaaatgtaccattgcttctcctcat

SEQ ID NO: 282737 - DNA, 617 bp, Homo sapiens
gcttgccaagcacacgatctaggtgctggcagagcacagggtcattcaagtgcataattcacaagactctagctgccagccagtgggacctggagaaccaggcaggaagygcagttgataaaatgagcatagttaacccttcagaaacatgagatacaataacattttcaaaagtcttcaacatgtcaaatgtttgtgctgtgcccaatgttgatcttcatttattatttatctgctatctttaaattgcctggagcattaaagctcagaactttaaggatgccagtaaatgtaccattgcttctcctcatcacacttggcataaaagtttatgaggcctcaatggtttggcccatgcccgttcttcctgacccatgctccatcactcaattctcattctctccattctagtcccaacggctttcttacccacaatcaccctcccacccaccctctgaataagaccaccatcagtctctagcatatattctgctttatctttcttcactgcattgaccactcattgtttaccattgtcttcaccaccagaaggctatctctgtgaggatagggaattcgttttgttccctgccataactgaatacctaatagttatc

SEQ ID NO: 282738 - DNA, 594 bp, Homo sapiens
gctgtgaggctctttccagaaaggattagcatgaaaatcagtagactgagtaaaaaaagatcatcctcaccagtgtgggccagtatcatccatccatggagagtccaaatagtacatagagagaaaggaagtataaactcattttctcttcttaagatagaatatccatcttctcttgcccttgaacattggctgttcttcatcgtcaagccctcagatttggaacaggacttatgtatttgcctccttgtttctcaggtcttcagtgttggaccggaactacaccactaattttcccagacctccaccttgcagatggcatatcatgggactctcagcctccataatcaaatgaataagacaatygctcaaatatctctcctcctccgacttattggttttgtttctctgaaaaaccctgactgatatgagcactaaagaaatagagaaaaatcagatgggctgtggtggaatgaatgagagactatgagtaggattcgtcaaattagattgatcctaactatgacaatgcagagctttacagtccatttacagccttatcttgaagagtgattttacctaaagagagggtct

SEQ ID NO: 282739 - DNA, 594 bp, Homo sapiens
gctgtgaggctctttccagaaaggattagcatgaaaatcagtagactgagtaaaaaaagatcatcctcaccagtgtgggccagtatcatccatccatggagagtccaaatagtacatagagagaaaggaagtataaactcattttctcttcttaagatagaatatccatcttctcttgcccttgaacattggctgttcttcatcgtcaagccctcagatttggaacaggacttatgtatttgcctccttgtttctcaggtcttcagtgttggaccggaactacaccactaattttcccagacctccaccttgcagatggcatatcatgggactctcagcctccataatcaaatgaataagacaattgctcaaatatctctcctcctccgacttattggttttgtttctctgaaaaaccctgactgatatgagcactaaagaaatagagaaaaatcagatgggctgtggtggaatgaatgagagactatgagtaggattmgtcaaattagattgatcctaactatgacaatgcagagctttacagtccatttacagccttatcttgaagagtgattttacctaaagagagggtct

SEQ ID NO: 282740 - DNA, 606 bp, Homo sapiens
tatcttactacaaaatttctcttatggccacagttaaaggcagaatcttgagctataggaaatactggcatgatctagtcttaagtgacacaggaagtcttcataaatatacaaccaaagaccaaggaaaaatatayttttatattaattcaaatgctaattctaatgaaagaatgagtagttttggagaaacatgattggaccgaacgaggtatggcttaatggtaataaactaggtgggtgggccaatttggggggacccagcaaggctggaccaggaatgttgtgtatttcgttactgtagcgtctctgccagtaacagggcctgacacctagtaagtgctcagtgcttgttgagtgaatgaatatcctcactaaggaaagcttaacttccttactatactatactcaccatcctgtaggaggcagctgagactagcctgtcaatggtgggcagtgattttgcaatatttatgtttgaatcttctaataaattatctcccagtttgcacagatattgcttgaggaagtacaaacacaaattctattatgaaaagttttatgaacttttctttacaccacagccagcatagtgagtagcaaagt

SEQ ID NO: 282741 - DNA, 606 bp, Homo sapiens
tatcttactacaaaatttctcttatggccacagttaaaggcagaatcttgagctataggaaatactggcatgatctagtcttaagtgacacaggaagtcttcataaatatacaaccaaagaccaaggaaaaatatatttttatattaattcaaatgctaattctaatgaaagaatgagtagttttggagaaacatgattggaccgaacgaggtatggcttaatggtaataaactaggtgggtgggccaatttggggggacccagcaaggctggaccaggaatgttgygtatttcgttactgtagcgtctctgccagtaacagggcctgacacctagtaagtgctcagtgcttgttgagtgaatgaatatcctcactaaggaaagcttaacttccttactatactatactcaccatcctgtaggaggcagctgagactagcctgtcaatggtgggcagtgattttgcaatatttatgtttgaatcttctaataaattatctcccagtttgcacagatattgcttgaggaagtacaaacacaaattctattatgaaaagttttatgaacttttctttacaccacagccagcatagtgagtagcaaagt

SEQ ID NO: 282742 - DNA, 585 bp, Homo sapiens
tgatatcattaattattgctgccagaattcgtatgtttcttatagcctttttttttggatgatttttaccattgggaacattgttctgattgttgtataaacaatgaatcagtaattccttcagttagagtrcctaaataaccaaagttaacttcattttggaccttgtgtctaagttaagatttttagctttggggatttatataattagagtcttggtgtatagccaagtcttgaaatattattcctaaatttcatgaggttttagtacaagcaaaaaataacaggtaccctggccacaaaggaaatagtatccaatagagaaacatggagatctaggaaacaaaggaatcattcatgatgtgaagttacacccaaggtcttacattatctgagttacagttttgaatttcagttagtctctttcaggtgtcaagtatttggcttgtaattctaggatggttgttgattacaaattaagaattttctagaaaattaaaaatatttttttttttgaaagaaaggaccactaggaaagtcataatttgagtgttttttaaaattcatttgttcatgtaggtacct

SEQ ID NO: 282743 - DNA, 1171 bp, Homo sapiens
tgatatcattaattattgctgccagaattcgtatgtttcttatagcctttttttttggatgatttttaccattgggaacattgttctgattgttgtataaacaatgaatcagtaattccttcagttagagtgcctaaataaccaaagttaacytcattttggaccttgtgtctaagttaagatttttagctttggggatttatataattagagtcttggtgtatagccaagtcttgaaatattattcctaaatttcatgaggttttagtacaagcaaaaaataacaggtaccctggccacaaaggaaatagtatccaatagagaaacatggagatctaggaaacaaaggaatcattcatgatgtgaagttacacccaaggtcttacattatctgagttacagttttgaatttcagttagtctctttcaggtgtcaagtatttggcttgtaattctaggatggttgttgattacaaattaagaattttctagaaaattaaaaatatttttttttttgaaagaaaggaccactaggaaagtcataatttgagtgttttttaaaattcatttgttcatgtaggtacctwtgatatcattaattattgctgccagaattcgtatgtttcttatagcctttttttttggatgatttttaccattgggaacattgttctgattgttgtataaacaatgaatcagtaattccttcagttagagtgcctaaataaccaaagttaacttcattttggaccttgtgtctaagttaagatttttagctttggggatttatataattagagtcttggtgtatagccaagtcttgaaatattattcctaaatttcatgaggttttagtacaagcaaaaaataacaggtaccctggccacaaaggaaatagtatccaatagagaaacatggagatctaggaaacaaaggaatcattcatgatgtgaagttacacccaaggtcttacattatctgagttacagttttgaatttcagttagtctctttcaggtgtcaagtatttggcttgtaattctaggatggttgttgattacaaattaagaattttctagaaaattaaaaatawttttttttttgaaagaaaggaccactaggaaagtcataatttgagtgttttttaaaattcatttgttcatgtaggtacct

SEQ ID NO: 282744 - DNA, 629 bp, Homo sapiens
aatttttacttttctgaaatacagcattttaagttgacattttattatggaaatatttaataatgactcttaatttaactcagatctgaggtttaaattctacagttgcctgagtacctgattcatgaatgggatggatttttgtgggcaactgacttgaggaagagagagaattgaatataggaaggcaacttgaaaacaaggaatgggggcattaactaaaatgtaagtctgttttctggtgcttaagtttgtcaaattgctcattagctttgaccaaacaatcatttagagaagcgatttttgaatcagaatttcattctgggttttctgcataccaactaaaaaatgctttccattgaggytgagtgatcttgttctctgtttgtttgtttctattatgtctcttaaaagaacaacattttagagtcaaatgtgcacacaggatccactgaaggtccaaatgatccttggtaaagttatgacatttggaaagataatataatagttaacattatattcagaatacatacagaggcaggatttttttttttccacgaaggaggataatatttagccttaaaatgcttataagagctggaaatggctggttgaagtgatatatgtgc

SEQ ID NO: 282745 - DNA, 610 bp, Homo sapiens
tcattctgggttttctgcataccaactaaaaaatgctttccattgaggttgagtgatcttgttctctgtttgtttgtttctattatgtctcttaaaagaacaacattttagagtcaaatgtgcacacaggatccactgaaggtccaaatgatccttggtaaagttatgacatttggaaagataatataatagttaacattatattcagaatacatacagaggcaggatttttttttttccacgaaggaggataatatttagccttaaaatgcttataagagctggaaatggctggttgaagtgatatatgtgcacttcagatcttgggcaccccaatctgatagtttgttgcctccaaatgcagacctgacaatctatgccaccrggcaagcaaatgatcaaagaaaatactttttattcattaaagcaaagatctcaggacaaaacaaaagagatagagggagaaagattttaactgtgacccacagcaaagttcgtctgaggctgtacctatatgttatataaactcagtggtttgcgaggcctccttaaaccacaagcttacagtgtccatgcttgtgttctatcctgtggctctctttcctatgac

SEQ ID NO: 282746 - DNA, 438 bp, Homo sapiens
aatccctttattaatgcagatttttttgacaatattaaactcaattacctttgcatcaacctaatacttaagcttctcttcttctcccaggcccctgaattttacccacattaatcttcaaccagcatacagcygaacatagtctaacttcagggaataatctttcctaattaactctggtttggccccacttctccgtgctcagttctttctagacttgttcatttctccctactaaagaaaagctcttttctgccttacctttgagatgcttgcagatcttatgacctaagtagtcttcctggtgcaatagtccctctctctttattgaaaatctttttttttccttttgcaatcatcttttcatttgacaattttgcagtttaaaaattctcagaatagcttaactccatcacagggaaatctgcattgcttctt

SEQ ID NO: 282747 - DNA, 1176 bp, Homo sapiens
acagtggaaaaggtctacctggcgacaatttcttgggcgtttttctgctaaagtgcttgctaagtttctgaaaccacacccataaccagatgttatggttcttttttttttttttttttttttttttgagatgaagtctcactcttgtccctcaagctggagtgtaatggtgtaatctaggctcactgcaacatccacctcctggattcaagcaattctcctgcctcagccccctgagtagttgggattacaggtgcctgacaccacacctggctagtttttgtatttttagtagagatggggtttcaccatgttggccaggctrgtcttgaactcctgacctcaggtgatccacctgccttggcctcccaaagtcctgggattacaggcatgagccactgcacctggcctgttatggttctttgaccctccagaaagtcaacaagcaaaatgccttgagcatcccaaaaaattgttaccatgacctttgctctaaactggttctgttttgctttgactggaccacatttacatcttagtagccattggtttgattgtgcttgtcttcaggattgtactagttaagctatgttacatgccctgtwattgattctgctattaatcattgttcatcttcaattagggcaccataaaattaattttttccttgcacattgatgtggatggtctactgctgcgagcttcatctttaatattgtctcatctctacttaataggagttatccatttgtaaactactgatttatttgggtcatattccctataaacttttgttaagcatcaataataatttcaccattcttctactcaagcttcagcataagtttgatgtttgttcttgctttagttttagcagaatttatgttcttctgatagagaccctattcaaactaatgtcttatcattcttaatgtttcaaactagatgctgttcagatatgttwtaaaaagttagtatacctttattttagcataaagattttgaaatccatgcatagcttttttataacatgcattttccatgaacattttgaagacctctcatgcatgttgataaacttctatttgttttttcttgtctaatctgtcttctgttacagagtccccagctacgaacttagaagagtagagggaaaagaatattttctttttgtgt

SEQ ID NO: 282748 - DNA, 560 bp, Homo sapiens
ttccagtctcttttagttcaaatactcaatgtgtctaaacatcacacttcaggtattattttctggaacctaacagamtaaattttcttcctggtaccatttagaacttgtcccatcttttatgatacataatgcctcacttaattgcagtcctaaatatttttttgatttaaaacttatgtcattatactcctaaatgtttcagaaatttttgtcattgttattattgttgtttctgtttgctcttaattaatatgtctacacactggatcaagagattgaactttatgctacctctgatttttggaatttattacatttttgtgatcaaattacgtgcttgtgtctgtcttttaaagtatgtcacagttatttgataagagagtatattttttatttgctgattaaataaatatgtaattctttatgttatttatttcttctttgttcctactactgtttaaatgcttgatcttttttgatcagatgaaaatatgtttagctactgctattagtattttctgtcattttttctttattttcaagtatttagtgcttta

SEQ ID NO: 282749 - DNA, 515 bp, Homo sapiens
atgtttcaagtataaaagttagagttttgtgaaaaaatatatacccgtaaaaaagaggaacaagtctttagagattattcttgcaaaagactagcaaaacaactaagttctaccaaaattgataaaattttaaagagaaggcacaaactaacaatattagaaataaggaaggtaaaggcataatgtcaaaaaaagatgcttttgaaaaaaatcataaaaaatatgtacrattttatgtcaacatacttgaatattgaaatggcgaacttttttggaaaaattataaactagctaaatttactaaaaggataaaaaagggcagggcacggtggctcacgcctgtaatcccagcaccttgggaggccaagttaggtggattatgaggtcaggagttcaagaccagcctggccaacaaggtgaaaccctgtctctactaaaaaaaaaaaaaaattagctaggcatggtggtgtgtgcctgtattcccagctacttgggaggctgaggcaggagaattg

SEQ ID NO: 282750 - DNA, 504 bp, Homo sapiens
aacaatattagaaataaggaaggtaaaggcataatgtcaaaaaaagatgcttttgaaaaaaatcataaaaaatatgtacgattttatgtcaacatacttgaatattgaaatggcgaacttttttggaaaaattataaactagctaaatttactaaaaggataaaaaagggcagggcacggtggctcacgcctgtaatcccagcaccttgggaggccaagttaggtggattatgaggtcaggagttcaagaccagcctggccaacaaggtgaaaccctgtctctactaaaaaaaaaaaaaaattagctaggcatggtggtgtgtgcctgtattcccagctacttgggaggctgaggcaggagaattgattgaactgggacccaggaggcggaggttgcagtgagctgagattgtaccactgaaytccagcctggggtagcaagactctgtctaaaaaaacaaaacaaaacatgtactttaagtgaattgaattgttattcaaaaa

SEQ ID NO: 282751 - DNA, 575 bp, Homo sapiens
tatttctcatcagtatatcttcgtttattgtcactaactttggacagagaatgtccatatattttatatggtgaggtatctgttcaaatcttttgcccatttagaaaattgcattattttcttaaggctgagttttagaatttttaaaatattttagatacaagcacttcatcagatatatgttttgcaaatatttcctcccaaatggttcattgctgttatatgggaaagcaattctcttgtatattaatctaatcttgtgaactttgttaaaaatcacttattcgttctaggagatttttattaattcaatgaaattttactgcatagataatcatgcctcatggaaacaaatatatttattctttttaacatatatacttttaaytaacttttcttgtcttattgcactagctaggacttccagtacaatgttgaatagaagcagtaaaagtaaacattcttacctaactcataaacttaaggtatatgtagtttttgccatcaaatataatgctagcagtagattttttgcagatattctttaccaagttgagaaagtttcttctaatcct

SEQ ID NO: 282752 - DNA, 576 bp, Homo sapiens
ctgactattacaccacataacacaatgctttaggaactcttagtattcctgtatagttgaaacaaagtttgattgtggttgggcaatgtgaactgaggtaaagcatccaggaaataattaatatgtaatctacaacatgcatgtgtatttcagctctgctactttcttgccttgtaattttggatatgctactttggtgctctgttcctcactctccttgtctataaaatcaggtgataacattaycacccactttttagaattacgtgaggagtaaaaggaactacaccatttaaaatgcataaaacaatgcctgacacataataagcattctacttagtgctcattgtaactactatcagtatcattactactatcagtgctagatttattattatttccatggatgagctggaatatcacgtaaaggagattgacattctacctagaagcagtaggaaaccagcataagaatttaagcagggaagacaaagcataatttttttaataataaagctttgacagcacgttgaaatatggtttgaggacaggtaaaagaggaagcaattgtacctc

SEQ ID NO: 282753 - DNA, 586 bp, Homo sapiens
aactgaatacttttgtacttccaataattcatatgctgaaactataccctctactgtaacagtgttagaaggtggggtctttgggaggtaataaggattagatgaggtcatgagaattgagccctcatgaatggaatttttgtccttacagcaatcccaggagagcttgctttctctctctgccatttgaggacacsagtaggagacaagcatctaagaaccaggagagtattaggccattcttgcattgctataaagaaatacctgagactgtgtaatttattttttaaagaagaggtttaattggctcatgttttttcaggctatgcagcaagcatggcactggcatctgcccagctcctggggacccttaaggaactttgactcatgtcagaaggtgaagtgggaacaggcacttcacatgccaaaagcaggagcaaagaggggctgtggaaggtgccatatacttttaaattgacagatctcatgtagactcagagggagagctcacttatcaccaagggtatggcccaagccattcacgagaaatccactcccatgatctctacacctcccaccaggccac

SEQ ID NO: 282754 - DNA, 586 bp, Homo sapiens
aactgaatacttttgtacttccaataattcatatgctgaaactataccctctactgtaacagtgttagaaggtggggtctttgggaggtaataaggattagatgaggtcatgagaattgagccctcatgaatggaatttttgtccttacagcaatcccaggagagcttgctttctctctctgccatttgaggacaccagtaggagacaagcatctaagaaccaggagagtattaggccattcttgcattgctataaagaaatacctgagactgtgtaatttattttttaaagaagaggtttaattggctcatgttttttcaggctatgcagcaagcatggcactggcatctgcccagctcctggggacccttaaggaactttgactcatgtcagaaggtgaagtgggaacaggcacttcacatgccaaaagcaggagcaaagaggrgctgtggaaggtgccatatacttttaaattgacagatctcatgtagactcagagggagagctcacttatcaccaagggtatggcccaagccattcacgagaaatccactcccatgatctctacacctcccaccaggccac

SEQ ID NO: 282755 - DNA, 586 bp, Homo sapiens
aactgaatacttttgtacttccaataattcatatgctgaaactataccctctactgtaacagtgttagaaggtggggtctttgggaggtaataaggattagatgaggtcatgagaattgagccctcatgaatggaatttttgtccttacagcaatcccaggagagcttgctttctctctctgccatttgaggacaccagtaggagacaagcatctaagaaccaggagagtattaggccattcttgcattgctataaagaaatacctgagactgtgtaatttattttttaaagaagaggtttaattggctcatgttttttcaggctatgcagcaagcatggcactggcatctgcccagctcctggggacccttaaggaactttgactcatgtcagaaggtgaagtgggaacaggcacttcacatgccaaaagcaggagcaaagaggggctgtggaaggtgccatatacttttaaattgacagatctcatgtrgactcagagggagagctcacttatcaccaagggtatggcccaagccattcacgagaaatccactcccatgatctctacacctcccaccaggccac

SEQ ID NO: 282756 - DNA, 997 bp, Homo sapiens
gtgcttatttgaacaaactttaagctagtttagtactaaagctgcttccctggtggtatggcgaaaatatttataaactaatatcttaggttgccactgcctgaggtactagatagcaaytggaacagataaaaagctaaccaaaaagcttgagaagaaaggctcaggaacgaaatgttgttaagggttttgaaaaaccccaagatattcctggaatctaaaatcccacctacatgttcagggctgtatgtgtgttcaggaaagatataagaagactttactaagatctcatctcctgctgaccctgaagcttaatgaaagcaggaagtgaaggctaaggcaaagttgttaactgccttgataaatgtggaaaatgtgccccaaatagacacagaatccctcagcagagactaggagattttttggttctagtcacttaaagaaaaaatgaccattagctgatcatgaagaaaacataacagaaactgcaggagacatwgtgcttatttgaacaaactttaagctagtttagtactaaagctgcttccctggtggtatggcgaaaatatttataaactaatatcttaggttgccactgcctgaggtactagatagcaattggaacagataawaagctaaccaaaaagcttgagaagaaaggctcaggaacgaaatgttgttaagggttttgaaaaaccccaagatattcctggaatctaaaatcccacctacatgttcagggctgtatgtgtgttcaggaaagatataagaagactttactaagatctcatctcctgctgaccctgaagcttaatgaaagcaggaagtgaaggctaaggcaaagttgttaactgccttgataaatgtggaaaatgtgccccaaatagacacagaatccctcagcagagactaggagattttttggttctagtcacttaaagaaaaaatgaccattagctgatcatgaagaaaacataacagaaactgcaggagacat

SEQ ID NO: 282757 - DNA, 498 bp, Homo sapiens
gtgcttatttgaacaaactttaagctagtttagtactaaagctgcttccctggtggtatggcgaaaatatttataaactaatatcttaggttgccactgcctgaggtactagatagcaattggaacagataaaaagctaaccaaaaagcttgagaagaaaggctcaggaacgaaatgttgttaagggttttgaaaaaccccaagatattcctggaatctaaaatcccacctacatgttcagggctgtatgtgtgttcaggaaagatataagaagactttactaagatctcatctcctgctgamcctgaagcttaatgaaagcaggaagtgaaggctaaggcaaagttgttaactgccttgataaatgtggaaaatgtgccccaaatagacacagaatccctcagcagagactaggagattttttggttctagtcacttaaagaaaaaatgaccattagctgatcatgaagaaaacataacagaaactgcaggagacat

SEQ ID NO: 282758 - DNA, 616 bp, Homo sapiens
tccctacagcgcatgtgtgtgcaccggcagggaagcaggagaagggcagagctcagcaccgcagccagactggggccaggggagaggccaccgcccaggccggcgtggggcagatggaagtgtgtgcgtgagctgtygtgtgcaagggcagctaagggcctgactggtgttttgagactccctgtggcgtctcttttcttgcagagtaatctatgcctgcgtagtaaaaacattccagcattgtggagccacatagccaggactctgcccctaccccagcctggtagagcaagaacctcggcatggcctcccttccaaatccaagagcagctgaacggttcccaggtgctgacagctcagccttttctagcaaaacattgaacacacccgacatcagtgagctctgcgggccttccgtttggcttttgtacttgatcagtcattgggtttcatggcccggtgttccctgcattcagtgtgcccctgggcaagtcacctgctactggcctctgtgcctctgaggccctggttgtgactgatgcctgacctcctgagactcccagcccttcttgtgacctcgccagatcaccctccgccttcatggcagaacagcagt

SEQ ID NO: 282759 - DNA, 945 bp, Homo sapiens
tcaatatatcttttaaaatattcacattcaaaatccatacttgttttgataagtcttactatgtttgtaggtgcaactaaacagcccgtaaccttatgttatcttagctaatcttcatgtaactaatatgctggcacaatatatttaaatgtccaggctgatttaaaaaacaaacaaaaaactgtcataaaaaataatcactgtcataaatgcctggtaaaataatggacagacagctgcctaattagcccaccaacctytgaaaatccaggtaactaagcaataccaaaaccaagctcaagagttttgagatgtgccttatattagataataagcacagtggctcaagtctttaatcccagcactttgggagaatgaggtgggaggatcacttgagtccaggattcaagaccaacctgggcaacacagcaagactccatcactacaaaaaaggaaaaaaaaaaaaaaacacwtcaatatatcttttaaaatattcacattcaaaatccatacttgttttgataagtcttactatgtttgtaggtgcaactaaacagcccgtaaccttatgttatcttagctaatcttcatgtaactaatatgctggcacaatatatttaaatgtccaggctgatttaaaaaacaaacaaaaaactgtcataaaaaataatcactgtcataaatgcctggtaaaataatggacagacagctgcctaattagcccaccaacctctgaaaatccaggtaactaagcaawaccaaaaccaagctcaagagttttgagatgtgccttatattagataataagcacagtggctcaagtctttaatcccagcactttgggagaatgaggtgggaggatcacttgagtccaggattcaagaccaacctgggcaacacagcaagactccatcactacaaaaaaggaaaaaaaaaaaaaaacac

SEQ ID NO: 282760 - DNA, 503 bp, Homo sapiens
caactccttacaccttggaatcagatcagacaccaccacccctcattgcctgctccacatggattctttcatagcacaacttttgcatagcaaccgccaagaacccagctttgtsgagacaggacaatatcaaaaggaatatagcacaatctaatgttgaaactgtgagctacctcaagctagtatttcatgtgatgaccaataaatgtcaagtatcgctgcatttgcctcaaaaactaaaaatatccagcaaagtcccttgagtcactgcagcaacctggaatacaacagcacacagtttggaaaccatagtccaagtccttgcttatttatttctcccaatacctaatttaaaaacaaacaaaacaaaacctatcccttgaccattccaaggttttgccaaacatatgctgtctttagctctgaaagcaataatatgcactcagagaaattgtctacaaagagattaacatcagcctgctatttcttaaggtacagcatca

SEQ ID NO: 282761 - DNA, 526 bp, Homo sapiens
ccacggcactccagcctgggcgaaagagcgagactccatcttaaaaaaaagaatgttcattttgaaatgttttagaccagaggaaaaaatatccaataataggaaaatgaatcaatgaattatggtataatgaaatacaatagaagattatgtaatcttaaaaagaacrcattagatagatatttagcgatataaatattatcataatataatattacataaaatcagaataattttaatttaagaatataatggtaggtataaggaaaatgttaatattggttatgccaaaatagtaagactatgtttccattttcttttctttctttctgtaatatctttttatgaagcatgttttatattagaaatatgaatttaatttttacaattctggaactcagaagtcaatcttcctaaggtacacagtactcctctaattttctctgctaggcgtcttgaggtgcctcctctcttgagagcctcctacgctactggagctgaaaccattcaactgaggcaataagtg

SEQ ID NO: 282762 - DNA, 652 bp, Homo sapiens
tattagagccgtgacctgaatgacctccatttgaagatcagcgaaaaatctatacgagagaaagcagtaagtacaaagtccccagttygggaaatgcttggcacacctgaggagcagaaagaagggctggtgtggctggagcctaatgaaatttaaattgagaggaggatgtgtctaggccagtttatgtcatgcttgatagaccagggtaagaaatttgagttgtatttgagttgcaatggacagcattggaaggctttaaacaaggaagagacttttttttaaagaccgctggctacgatatagagaaaagactataatgatgcagagacaagttaagttttatctaagtagttatactgatttgttctgagggaaataaagtaatgcatattgtccttttaggttcaatctgagcgaattagagaaggaatggaaaaagttaccaaatagccactaacaatggcctaagattgtgaatgtggtggtcttgttttcctccttacttgtggcattaacaaagtgtatgagcttcctatttgaaatctgtggaatatgtatattgaaatctttagatttttttggtttaaatgcttttcagaattgacaaactgtttttcagttaatttcacatctaaattaaatgaaaaca

SEQ ID NO: 282763 - DNA, 625 bp, Homo sapiens
tgttaaaatgagtttttgtcctcaccttgaaaaacaaaccttcataaccaaaatattaaaaatctataaagcaatgattttaatatgattaaaacctagcaaaatgtcaaagacaactggatttaattattattgtacatgtctggttaggtctgttgatgggtcaggggtactcatattagtaataaaatagagatatacataaatgtaagttattatgtattatatataatttacttttctgccttctcagaaaaatactaaatatattgtgataatcaagattttacattatttggtggtagtgctgtttcacaacgctttgagtcattatagattgyagtaatttttatcaattcctacttgtacaaactttgcattgtctcaacacaatttataaaatgagacagcttcacaaataaatcatgaattttaaatattatattcaaacattgcagtgggctcccacaaatcaacaatagatgcttcttgacttaaaatgtgattatgtcccaataaacctatcataaattgaaataatcataagttgaaaaggcatttaataccccaatacacccaccataaagtagaaaaatcataagatgaaccatcataagtaaaggaa

SEQ ID NO: 282764 - DNA, 691 bp, Homo sapiens
acttattgccagcaaatctacattataggaaatatcaaaggtaccaatctttagccttgaatctaaccacatcaatttttataaaatatgtactcagactaaaaggctaattaaaagcaaagattttcagattggttacaaaagtaaaatgcaactaaatgtcatttatgagaaataagctttaaataaaaagacacagataggttagatgtaaagggaaaaaaaaggcatgtcataataataaatgttaataggctgggcacggtggctcaggcctgtaatcccagcactttgaaaggccaaagcaggtggatctcttgaggtcaggagttcgagaccagcctgttcaccaacatgttgaaaccccatctctactaaacatacaaaaattagccaggtgtggtggcatgcacctgtaatcccagctayttgggaggctgaggtaagagaatcacttgaatctgggaggtggaggttgcagtgagccaaaattgcaccactgcactccagcctgggtgacagagcaagactctgtttaaaaaaatgctaataacacagctgatttagctatattaatatcagacaaagtaaattccaaatcagaaagtattaccagaataaacagggacatttaataatgataaaattgtctattaattaaggagacataataatcctacttgtgtttgta

SEQ ID NO: 282765 - DNA, 1208 bp, Homo sapiens
ttcctggctcctcttaccttgttttgtacacaacctttaagctttgaattagaaaaaaattgtccaccttttttaaaaggacacttttttctagaaagaatgttttcctacaatatatttttattggaaaatacctaaataatgaaatattttagtataactttatattctaaattatgacaagtttgcctacaagtatttatccattacatctattttattttattcatttacctacattatttatgaaaactgtgatagtcatcaattaaagttatgaaactcacctttgcaaaattctgagacagtgaaaaagacaggacctaactgactccatcttgcttctaacctccaagctgtccttgcttattcccaaactttagaaggaatttaatttatattttagctttgaaacaaagacagtaatagtcctttcccccaaacaaayttccttgctgcctgtggattacactgcctaatgccacaatatcagaagttatggtaattttactaaataattcaaaatatagctgttttcattaaaccaatagcaatgtcttatttattaaagattatgaaagcaatcttgggctgggtttataggtttgtaacccctatgccaaattttgacaccttatagtatttggwtaatcatattcacagtacatttatctgacaagacttatatacataawatttatgaaattttatgcaaatcaaccataaaaacaacccaataaaaatataaacaaaaatcatcaacaaatccttcctaaaagaagatataaaaataactaataagcacatgaaaatgtgcttaactcatcagtcaacaaataaatgcaaattaaaaccacaagatactttttcacacctagtacaatggctaaaatttaaaagaccaacaccccaaatgtcacgcatgtcactggtgggacaaaagattgtacaacctctttggcaaactgtctggcagttacctacaaacacacaactactctgtttctcactaatttcagtatatgtatttactcaatttaagatggatcactgacctaaacatagaagctaaaattataaagcttctagatgaaaacataggaaaatatcctcatgaccttgggataggcaacacttcttagagagggcacaaaaaagacactaaatctaaaataaatttttgatgcattggatatcattagaattcc

SEQ ID NO: 282766 - DNA, 1073 bp, Homo sapiens
taatcatattcacagtacatttatctgacaagacttatatacataaaatttatgaaattttatgcaaatcaaccataaaaacaacccaataaaaatataaacaaaaatcatcaacaaatccttcctaaaagaagatataaaaataactaataagcacatgaaaatgtgcttaactcatcagtcaacaaataaatgcaaattaaaaccacaagatactttttcacacctagtacaatggctaaaatttaaaagaccaacaccccaaatgtcacgcatgtcactggtgggacaaaagattgtacaacctctttggcaaactgtctggcagttacctacaaacacacaactactctgtttctcactaatttcagtatatgtatttactcaatttaagatggatcactgacctaaacatagaagctaaaattataaagcttctagatgaaaacataggaaaatatcctcatgaccttgggataggcaacacttcttagagarggcacaaaaaagacactaaatctaaaataaatttttgatgcattggatatcattagaattccwttttagtgatgccattctttaatgtaataatttacttgacaatttactgggttcttactatatgccagacataaagcactctattcaggtaattctcactacaaactgtgaagtaagtatttcctcaggttcttacagataaggaatctggaactcagaaaatgtacttaatttgccaagaacatatagccagaatatatactcaatatagtagttatgtgaaccagagtacatatgatgccaaaactctatgcttttaacttctcgttacactgatttctaatttcccccaaatttttgcactacagwtgagaaatccaaaacatatttaaattttaatattaaagttgtcataattctagtataccatttcaataatccacttttaaatttgaggaccactgaacctcaaagagaaaaaataaaccaaagactacgtatattatctgtttaagcaaacaacactaatttagtgtcttgactgacagaaagaattgatatgtttaaaacat

SEQ ID NO: 282767 - DNA, 512 bp, Homo sapiens
ttttagtgatgccattctttaatgtaataatttacttgacaatttactgggttcttactatatgccagacataaagcactctattcaggtaattctcactacaaactgtgaagtaagtatttcctcaggttcttacagataaggaatctggaactcagaaaatgtacttaatttgccaagaacatatagccagaatatatactcaatatagtagttatgtgaaccagagtacatatgatgccaaaactctatgcttttaacttctcgttacactgatttctaatttcccccaaatttttgcactacagatgagaaatccaaaacatatttaaattttaatattaaagttgtcataattctagtataccatttcaataatccacttttaaatttgaggaccactgaacctcaaaragaaaaaataaaccaaagactacgtatattatctgtttaagcaaacaacactaatttagtgtcttgactgacagaaagaattgatatgtttaaaacat

SEQ ID NO: 282768 - DNA, 615 bp, Homo sapiens
tcccttcaacctgttaacctttaggttgacagcacttgaagagtactttttgtttgtagcactttgggggagttttaaagtcctatgcagctrtgaaagtaggtgtcagtgtctctgaagccacaaaagtgtcattctgctgaagtgtcatagatagagattgacagtaccaggaaatcttaatctgagactccaagaacctcctgaatggtgaaaaatctttttatgcatagttctgtttgaatttttctggtaatagcaccacaacttcccaagaagtgaaagccatagctagacctaaatagctttaatgtatgagaattcaactatacaggctggacaaaaagaatacattcatctccttatttaacaaacatttatgtgacaggtatattattaggcacttaggagacatctatgaacaaaacagggattcatgcacttgtgaagcttggtttctaactaagcaataaaccctaaaccatgagtgcagggaggagagatgaatgtttaattaatatgagtcattctattcagtgtcctggagtaagagcaaaagatgagagaaaggaatctgccattagtttcagaacctggtgccttttatgtgtatcc

SEQ ID NO: 282769 - DNA, 541 bp, Homo sapiens
aaactaaataaagcaacctagtttcttcaacaaataagtcataaggggaaaaaaggagatagaggatggaaattataaattaaaagactttagagacaaaaccaattacaacatgycaattttattaggtttttgagtctataaactgatgtaaaaaatgaagttacttatgagacaacaagaaatttgaaaaccagatgtttgctgatatgaagaaatatgttaactacatttaggttaagaatccatcttttagagacaaatactgaaatatttatgggctttgcttcacaaaaatatgagacagggaaatgcttccaacacttctccagtaagtatgatatttgctctaaactttttgcagatactctttatcaggttaaggatatgtctatttccaattaaatttttatcttatatagatgttagacatttatcaagatgatctcattcctcctttggtcttttaatgtggtaaattacataatattagatttactactgttaaaccagttatatcacagagatgtagtttgcaaaa

SEQ ID NO: 282770 - DNA, 1107 bp, Homo sapiens
aacttaactttcttcaaatcctaaaacaattctgtgaagtagaaaaggtatctacttcatcttttgaagaagaaaatgaaggctgggagatgaggtcatttgtccagagtcacaatggctgctaccatatcagagttagctgtgattcacacccagagagggttactagatttggcaactaaaagtacagtataagtatatatcaaatattgcatgagacaaacttattttaaaaattgggttttttaaatctgaaattcaaatttaactgggtagtctgtgttttatctgatacctctatgtctaggyctatctgacttcagagcaccacactacttttgacatctggaaggtaaaaacatggaaaattagtcaagtcgcctatttcagcaaattgcctctaacagtgatagcaaagaattcttctacagaaaaacgtttttcatcaactgttattcaatttcctcatctttacattgaatgcacctgtaaaccccttagcacttwgggtccaggactcaatgatattatatttagtataatattgtaatttagtataatatcataatttagtaaatatatacaagtgtgttcttttctgagacaattcatcaaattgcctcctcaaaatagctaatgtgagtcaatatattcattcattcagtgtacatttatttagtacctattaactcttcctcattaaaagacctcaatttgagtccacagtacagtcatccctaggtatacgtggtgatcggtttggttgaaaaaaatccacatataagcggacccatgtagttcaagcccaagttgttcaagggtcaactttaaatagaatgtacaggattaagaaaatgctattgttcttagtttaaaaaaaaaaaaggatatwacatgctagacactgggcaagggagtgttcattagatcccctactgtgaaaagcaatttgcctagtcaagagtatcaccttgggacattagacaaactttggttaaaatttcaaattttctacttgcttagctgtgttacttaggtcaagttacgtccttcatgatttcttaattaaatgatcaatctaatgtgtaaactgccaaaaacgaggtg

SEQ ID NO: 282771 - DNA, 547 bp, Homo sapiens
ttactgacaggccagatggccaagtaggaacagctctggtctgtagctcctagccagaccaacgcagaaggtaggtgatttctgtatttccaactgaggtacccagttcatctattcaggatggttagacagtgggtgcagccctctgagggcaagcagaagcagggtgaggacccaggaagtgcaaggagccggggacctccctcctggagccaaaggaggccatgaggagccatgccatgagggacagtgctctccagcccagatactatgcttttcccaaggtctttgcaacctacagaccaggagattccctagggtgcctacacctcaagggccctgggtttcaaccacaaaactgggtggttgtttgggcagacaccaagcgagctacaggagtttttttccataccccagtggtgcctggaacaccagcaagacagaatcattcactcycctggaaagggggctgaagccagggagccaagtggtcttgctcagcgggtcccacctccatggagcctggaaagctaagacccactggctt

SEQ ID NO: 282772 - DNA, 601 bp, Homo sapiens
gttttcattattttaagacaaagtgctaagaaagtggtgggctttgggtggtgaaatttcctgccactgtgatgtttggttttggggcttgtagttattttatgttaagcttttggttagcattttataatcatgagtgggaaggcacagagtgcttataatacattcccttcctgctatgagagaaaaaatggatatgttagtaaattgcaaataatttgaaaaaattctattgactcctttaaatacttactatgttcagatgctcttctgagtgctttacatctaattatctaatttaacccaacagcaaactataaggtagattctattatgtccattttacagatgaggaaactgaaacacattgtatttaagtgacttgtgcacttagacttaccatgatgaaactcagagtagaactaagcagtcttgccccagagcccacacttggactatgattactactccagacacacagatgaatcaactgtgtgtcttgtgacagtgctgctctgtagccagaattaaggttacrttcatgtcacatgtgactgtgcaagtcacaaggctgaactaataattatttcagcaagctgta

SEQ ID NO: 282773 - DNA, 594 bp, Homo sapiens
cacttagtcaaatattttaaacctaaataacctgggaaaaatactaccttatggggttgttgtgagcctgcttggaaccttgacatacaagtcttggtgaagaaggtaaactaaaggttggctagaggtctttgttcatgcaaatgtgggagasgatgtgctgggcaatgttttctcaatattattacaaggaattttattaaagaagcatctgctttcatccacctcccttaaaggaaagagctatgagtctactataactatgggtaacatgtagagaactctgggacctccaaaaaaaaaaccccaaaacttcaatttaaattatacttccatttgttaaaatccttctaccttatgtctcttgatgttaaagtgatgttatagcaaatgggagcagaaagtcagtgagtgtggaatcgatctaaagttgctacggaaacagtaggtgcaaccaatcagtcgagagagtgttcatccaggaagtcttcaaattgcccccaaaggccctctgactgtataattgaactgcattaccatagctggtgcactgtgcccactgtgaaaccacaaataaaagtgagagtaagagaa

SEQ ID NO: 282774 - DNA, 623 bp, Homo sapiens
ttaattctaaatgctgtgtatttaatcattataccagtttacttcatccttggaattcatatttgaaaacactttctttgttcttagctactgcttgaacatataaaataggaagtggggttgtttgggcaaagtgactgaaaatgatcatcaccaagtaacgtcttaagttcatatctgtgcattgtattgaaataagtgttaggaaaaaattccacctctagaagtttatgcttgaaaacaccagcatatcttartatttcttgtatcctttgtgtgcccctgtgtcttctttgaatgtcagggctcacatttaattgctgacatctgacttattgcataagatttactttgactaccaccacttttaagaattttttctagatctgctcaaaagaaaatttatttctttcatatacttacaatattttgtcaacattctacaaatgcaatgaaatttttacccatgacttgcctctctcacacaagggtttctggaaggcatggccaaatgttgtacatattttactcttgctgatgtcctgactggagccttacacataagggtactgtagacagctgtcaaaatgagatcatatgccttcctttaggttgaatatgac

SEQ ID NO: 282775 - DNA, 572 bp, Homo sapiens
ttttagatcttggtgaaataaggaactgttggagtgagagcactagaggaaatataggcatggtggtccaagagtgtgatgcttagtactggctatgacaaggtatatagactgtaagcaggacagtgggagagaatgactgagctaggaagatatagtcatcataggagaggaggatggaggaactgagaggcagttatatcactttcagckttttttcttttcttatgccagcacctaatttcttaataattgtacttttataataaaacctaatattcagtggggcaagttctttcactcatttttttctttaagaatgtcttggctaggcatagcctttacatttctacattttcgtagacattttttagtattggtttgtcaagttacacacacacacacacacacacacacacacacacacacacatacatacttaacattggaatttttattaggattgtattcaatctattagtgagatttggcaactttatgatattgagccttttgttcatgttcagggtatatcttctcatttactgaggttgttttgatttctttcaata

SEQ ID NO: 282776 - DNA, 440 bp, Homo sapiens
ctactgtttgagaccaaaacaattggtagaagttggccacaaaatgcaagtattaggaaacagagtgagagggaaaatccaagcagaaatcagaagaagcacagagatccagacataagagaaatgcaggtggctttgggtggctggggctgcagaggaccagcggggtctacatcaagaagacctttacatgctctgctgaggagtcagggcaaccttgaggtcaaggaagattttcctggctatcaggtggcctttgtgtctggtattgatgggatcatttgcatcattggatctcctcatcctcccaattaatagaattgcccaagtacaaggctaatgctccrtcctccattaaaaacattgacttctagttgctgcccttctgccccttgcttgtgctactttttgtcatcatgtgcttctcttggttatcactt

SEQ ID NO: 282777 - DNA, 508 bp, Homo sapiens
aattctgaaacagcagtttagagtttcagttacaatatttctgccatagatcatccaatcccagtaaagccctctatttgcaagcttcgtttcttttgcttttgcttttattggagattatattctagrggctggaaaagagtagaatacctctgactctactttccttatcttaaataagagaagaaagagaactccttttcttctgcttttataaattataaaaatgaacaaaccaacaaacatgactcatatgaaggctattcattacaggtgaacaaaatgaataatacttaatattctgggtaaagaagttctagtgttgcaacgaagatatacaaataactacatattaatataatactagcagcaataacaatagcttaaacttactgagttctcactacatttcaggcactttacatacattatttcatttatttctcgcaatagtcccttgaggaaggtaatattttcaccctcaccatgtatatgagaagagcaagat

SEQ ID NO: 282778 - DNA, 424 bp, Homo sapiens
tggcaaatataatttgtgtccaaattgtgatgtatttgagagtgaaaagagaaactattaataattaaatgtaaaaccataaataattaaatcaagttaacaggcttaaacaggtttgccacaggcaaaccrggatatatgataatcttacatataaatcagattttttctcattgtaatgtcattctttgcctggggtacaaatccctctacttcctccccagattttccactaaaagattgctaactagactgcatcacactgagcacctatttactgattgctacatttgcttgtggcttttttcattataatgccatagtaagaagttgaggtttcctattgttagaaaaagtagaaatggaatgtgtgcaatgcagtcttgactaagaccattaatttggtcagatttcttccgtgttc

SEQ ID NO: 282779 - DNA, 424 bp, Homo sapiens
tggcaaatataatttgtgtccaaattgtgatgtatttgagagtgaaaagagaaactattaataattaaatgtaaaaccataaataattaaatcaagttaacaggcttaaacaggtttgccacaggcaaaccaggatatatgataatcttacatataaatcagattttttctcattgtaatgtcattctttgcctggggtacaaatccctctacttcctccccagattttccactaaaagattgctaactagactgcatcacactgagcacctatttactgattgctacatttgcttgtggcttttttcattataatgccatagtaagaagttgaggtttcctattgttagaaaaagtagaaatggaatgtgtgcaaygcagtcttgactaagaccattaatttggtcagatttcttccgtgttc

SEQ ID NO: 282780 - DNA, 626 bp, Homo sapiens
taagatctacttccaataatgtatcttagtgctaaaatgtaaagtcatatatggggcacatttctgtttgttggagcttgtgaaacaaaagccattctaaatggtatttactgagactgatcaccaytttggcccttcacagtgttgtttaatgtctgagaatgtttacattgtagaactgcaaaatttccaccactctgctgcatttgtactggtaatgcaagaacaagataacattcagagaatagtcaaattataatagtaaccatttcagtatctcgtttatctgcaaatggtttccacaatcaaataattaaacctccaaatactttaatgtcatgaaaatgtacagctagggaattaggggaaatctggttttgtaactttccaaagaatatttagctagaaatcaggtcaagctcttcctattggttaacatagtaaaaatggcaaaagaaaatatactttgtatatttcttagaagaattcggaagccaaatctatgttaggctcagctatatagtcagcatcaataatgagttagattcaacctagggaaatggtaggctaggagagaagaaatagaaggtgggctgggggagggaaaagcatctgctgtgttaaac

SEQ ID NO: 282781 - DNA, 626 bp, Homo sapiens
taagatctacttccaataatgtatcttagtgctaaaatgtaaagtcatatatggggcacatttctgtttgttggagcttgtgaaacaaaagccattctaaatggtatttactgagactgatcaccattttggcccttcacagtgttgtttaatgtctgagaatgtttacattgtagaactrcaaaatttccaccactctgctgcatttgtactggtaatgcaagaacaagataacattcagagaatagtcaaattataatagtaaccatttcagtatctcgtttatctgcaaatggtttccacaatcaaataattaaacctccaaatactttaatgtcatgaaaatgtacagctagggaattaggggaaatctggttttgtaactttccaaagaatatttagctagaaatcaggtcaagctcttcctattggttaacatagtaaaaatggcaaaagaaaatatactttgtatatttcttagaagaattcggaagccaaatctatgttaggctcagctatatagtcagcatcaataatgagttagattcaacctagggaaatggtaggctaggagagaagaaatagaaggtgggctgggggagggaaaagcatctgctgtgttaaac

SEQ ID NO: 282782 - DNA, 581 bp, Homo sapiens
cactaatgcacgatgtcaggtgtattaaaaaccaggttttcatacactgtttccagttttggtttccagtttcaagaggcagggttaatttggcctctatttattcattacaggtggaagcaagccatcaataaatgatgtttgaaaaaatatgatagtagtaatatcattactagttatgttatatacaatattacttatatatttataataattgggtttgtaatcatgggactaatagattaaaccacatgaaattgatctagataaaaaaggtagtttcttatacttcaatcataaaaaagccaataagctctcagtctgaggaaaaaaaatagtatcaaagcaaatgcatatcatatagtttgatgaatataataagaatatatattaaacataaaaatgccacaaagccaagaaaagggttacttcttttggaaaataggatcagtgaaggctttttatagctgaagcagacacaggaactggattttatgatamgtaggtattcatgaagatgagagaaagaagacatgttcaaagtacagatacatgacatataagatttgtttgagtgaatg

SEQ ID NO: 282783 - DNA, 537 bp, Homo sapiens
ttaatgaaaataaacaatcttcacagttgatgagaatcatcaaggtttctggttttatgtgtcaagaactgaagagttgtctggaataatctcattattattttccttttgcttgcatttaactcatgaaattgttaatcttttacttttaaactgcctgagtcatttccagcaaagtgcttaagtcatacagagcatatggttgagctttttcttttaatcaattctatagagtttttttcattttcgtagatgaactcatactgtttgcatttatgaaataataaatgcaacatgttttgcactaatatagttctcttattttgtgttttctctttttaaagtttttttttttgccattttctttgtttcattttcctatatcttatgtaggattgcttttttccacctttctgaatgcctcagtagtttcraaaatataattctagttttgctaattgtgttgtacaccatttagaataaaatgcttaagtttttgtttgcaacttaccaaatgtgaaacaaagaaggcaggat

SEQ ID NO: 282784 - DNA, 555 bp, Homo sapiens
tatactgataatatatttaggatatattataactcctctgtcatttgtcacattgatcctatttattttctctccttcttttcctggatagaaatttggctagaacttccctcaactaatgagggaagggattggtgtataaatatccttccttctccattctcaaggacaattttgaagtgtttctgtgtagtattcagtttcctcacacacttgaatccagttgctcaatcctcttaattaacattaaattggcctttcttctctgttcttactttctctactacttcattggtgcttatatcatgattggcttctgtgaaacccaaactaagacagaacttcaaaaccagtatcaagtgaakggcactcaggtttaaatattattaagtaaaaatgaaaaaaaaaatccccaaatatcaaaattagcaaaacaatgctacacaatctttactatgttttatacagaagggtccaagaatgacatagtcatttcccctaataattaacctttggtcctattgaaatatgacatattaggcagaaataataatc

SEQ ID NO: 282785 - DNA, 569 bp, Homo sapiens
attttgtaacataataaaattattgtatacataaaactctataaatttagttactaaaataatttcatatctataccatataatatttaaaagtttaaaaatkttaatattcattattttcagcatgttttgagggactgatattatgtgtatacaataatgccccaaatccttcatacttcttgaacaagtcagaaatttaaggtttatattttaaacaaatgatagccaaggccataaaacaccattggcaccttaataaaacctcaattattagaaaacaggtaattaaaacatgggcaaaagacttgaatagacattttaccaaaaacaatatatttatagaaaataagcacatgaaaaaaaatcaacgtatttagttacaaggaaatgtaaattaaatccggaatgggacaccactaaacagctattaaaatgtctctaagaagcaaaacaacttactatgccacatgctggcaacactgtggaactggaattctcattacagttttaagaaatttcattaagatgtagctttgatgcagttttcttcctgtttcttctgattg

SEQ ID NO: 282786 - DNA, 582 bp, Homo sapiens
ttaacagttttagttctgataacaaatgttctagaaggtattttgtttcttaaaatacatataaatcttcccttttgttgagaaacaaactcaccatctggggctaaaataggtggggcctgttcctttattcctgtactaaaaatagatgctgccaagaaatgaaactcatcctgggatatttggatcagtcctttaagctaaaacaaagctcattatctgttaycagatatgctggctccagatacaagtatcccaacactaattgttacatagataataattcagatgtcaaattctcattttagataggttttatacagagatggatggatagatagagagagggggataggtagataaatagatagataatttttttctacctgatttcagaccaaagtatctgggtttacaaggttggccttgccataaacaaagcatgcattcttaacaatttggaaaatttttcttaaatatcttgttttaagaatatactcatggaatattttaaaaatatatttagtaatttgtcattccttttgctcattttcataattaacatgtaagaccaagatactt

SEQ ID NO: 282787 - DNA, 578 bp, Homo sapiens
agaccaagatacttataatacaaactatttgtttctaaaatggctattttaagtctttttatgatyttaaagtactgatttatggtgtatatctttaaaaaaggaaatgctctggatgttatatttaaaaattgccaataaatcaaagccatgatttgaacaagtcagaaactatatttaaaataatcaaggaaataaatgtttctaacgtttagcattaaaacagtatgtgcctaattgtacttatcttttttaatgttaaaaatcacaaagctgagacataattttctaattcatgaatatcttatgaatgtaatttctaatgtttcactatacaaagttctgatacctttctatgaaacatatttattacgatggtagcaactgatcaaacagcatgtcatctgctcaattgttacagttcccctctagtttttgctttctttatatcctcctttccaggggctcttttcttctgcctatcatgcccagatggaaaaacctgctgctaattactgccattgaaatttttaacacagcaggagatatccaaacaccaatcgttcttttttaaaaga

SEQ ID NO: 282788 - DNA, 579 bp, Homo sapiens
gcatgatctcatagagttatcatttttgtggtgagaacacttaacatccactctgttagaatttttcaaggaaacaacacaatgtaattactggtccctccttcagttcagtaggaacttactaaacaagaatgaggtgctagttgcaggtatttgatgtttgcacgtactcgaattatcactttttgaggccacaggtgatacagatattgtaaagaggtaaacaaacttagaggtgttatttagaggtaaacaaacttagacttgcatactgcccatatgatcgtgggcaagatacttaggtgtatttggtctagtttcctcatgcaggaaatggaartgataccaaagttgcaagaccactgtcaagattaaatggcaacataatcaatgtaacacaggcagcaggatgcctgacacataacagaggctcaatagttgttattattacctttaaacacaaaaccaaaacaagggtaaagttactaaggaggaaaagcttttggatttctttgtgcctacgttatcaatgattcacttcataattcacatacctacacttcaaaaaggcagagagaa

SEQ ID NO: 282789 - DNA, 589 bp, Homo sapiens
tctttgtgcctacgttatcaatgattcacttcataattcacatacctacacttcaaaaaggcagagagaaccagtctctgggaactgtcttattatacaatgtggggagagattctttgtaggaagtcactgaagcttctagactaaatgaatgrtgtcatcattaactaagataaggaattgtaactaaggactaatctgcttaggctgagcaaacttaacatgccttgcttgcttttagtccctggcttctagttaatcttaaaacccacatcagctaagtcacatagctaacccttatgttttgttgactttatagagtcaataaaaagccccttgaaaagactggcctcgtaactaccgtggttctctgacaaggtttctgtccttggtgtaagcaaaaaaatgtcactttctgacaggcccaggaacctaaagatgttttagggccacgagaagaaagaaacaccaatttatataggaattacaggcacagtctattagcaaatctttggcttggttagccctaagccttttacatgtctagttagaggttccttctgaaaaggttccaacaaagctaatttta

SEQ ID NO: 282790 - DNA, 589 bp, Homo sapiens
tctttgtgcctacgttatcaatgattcacttcataattcacatacctacacttcaaaaaggcagagagaaccagtctctgggaactgtcttattatacaatgtggggagagattctttgtaggaagtcactgaagcttctagactaaatgaatggtgtcatcattaactaagataaggaattgtaactaaggactaatctgcttaggctgagcaaacttaacatgccttgcttgcttttagtccctggcttctagttaatcttaaaacccacatcagctaagtcacatagctaacccttatgttttgttgactttatagagtcaataaaaagccccttgaaaagactggcctcgtaactaccrtggttctctgacaaggtttctgtccttggtgtaagcaaaaaaatgtcactttctgacaggcccaggaacctaaagatgttttagggccacgagaagaaagaaacaccaatttatataggaattacaggcacagtctattagcaaatctttggcttggttagccctaagccttttacatgtctagttagaggttccttctgaaaaggttccaacaaagctaatttta

SEQ ID NO: 282791 - DNA, 608 bp, Homo sapiens
cttaaagaggaggtagaggaagagatagcagcagaaagtttattcaaagggataataacagaacttcccaaacctagagaaatacataaatatccaagtacaagaaggttatagaacacagggcagatttaacccaaagaagactctacctcaaggcatttaataatcaaacttccaaaggtcaaggataaagaaaatattctaaaaacagcaagaaaaaagaaacaagtatgatataatagaactcccataggtctggcagcagacttttcagtggaaaacttacagaccaggagagagtggcatgacacatttaaagtgctgaaggaaaaaaaaaacttttaccctagaatagtattagattgttgcaatagttagtgtgatttaaggtttgtgtaaaatttattgcattaaaaggaatggcaaaaactgcaataacttttgcaccaacrtaatagatctgatgaaattatccttcaaacatgaaggagaaatagacttttccagacaaacaaaagccgagggattttatcaaaaccagacattttctgcaaaaatttccagagagagttcttcaatcagaaagaagagaatgttaatgagcaata

SEQ ID NO: 282792 - DNA, 580 bp, Homo sapiens
cattatgcaaatacatggaaatttaacagtatgaccaaactgaccaaagtaggtcaataaagaaattaaaaagaaaatttaaaaaaagcttcttgaaacaaatgacagtgcaaacacaacatactgaaacctatgggatacagcaaaagcggtactaagaagaaagtgtattgtcattagttcctacataaaaaaataaaaaaaacttcaaataagcaacctaatgttgcatcttaaagagctagaaaagcaagagcaaatcaaaccaaaattagtagaataaaataaataacaaagattagagcagaaataaatgaaattacaatgaagaaaataatacaaaaatggatgaaagaaaaagttgtttttttgagaagttaaaccaaagtgacaaaactttagccagartaactaagaaaaaatgagagaaggtccaaataaataaaatcacagatgataaaggagaccttacaactgataagtgtagaaattgaaaggatcattagtggctactatgagcaactacgtgacaataggttagaacatgtagaaaagtggataaattactagacacgtacaa

SEQ ID NO: 282793 - DNA, 639 bp, Homo sapiens
tcaaaactgtgctcatcatatttccagcccacacatttcctggtgtttgaatgttgtcttcattttcttgaacacagttttatattggaagtaatgaacctactttgtgaaatgtaaggacatatccttttttgttctaagcttaccagaaagtttatttatatataartggataacattttataacttctctctacaaattaatgacatcaaatgggttatttaaaatttgaagcgggatagcaacgatttgtcccatggaaacctatgcatgattaatatgaatgcagtgaatatcaataacatgaagaagaattggggctgaggaaatattgggactgtttggatataatcttttagtgttgtatactggctctgagacactaccaatgagagcaacataattttcaaaaacacttcaattatcttggtgatcttcacagctcacttgaatctatcaaaagagtatttcctttccctcttaaaaatttgtgagcttgtatgcttttagttcagtcttctgtttctggatgccaaggccttctcttagaagggcatattgctactcttttgtatgttgctcagatagtcctgtgtctgcttttattgctcagtaattcaattaatcctaattgttct

SEQ ID NO: 282794 - DNA, 639 bp, Homo sapiens
tcaaaactgtgctcatcatatttccagcccacacatttcctggtgtttgaatgttgtcttcattttcttgaacacagttttatattggaagtaatgaacctactttgtgaaatgtaaggacatatccttttttgttctaagcttaccagaaagtttatttatatataaatggataacattttataacttctctctacaaattaatgacatcaaatgggttatttaaaatttgaagcgggatagcaacgatttgtcccatggaaacctatgcatgattaatatgaatgcagtgaatatcaataacatgaagaagaattggggctgaggaaatattgggactgtttggatataatcttttagtgttgtatactggctctgagacactaccaatgagagcaacataattttcaaaaacacttcaattatcttggtgatcttcacrgctcacttgaatctatcaaaagagtatttcctttccctcttaaaaatttgtgagcttgtatgcttttagttcagtcttctgtttctggatgccaaggccttctcttagaagggcatattgctactcttttgtatgttgctcagatagtcctgtgtctgcttttattgctcagtaattcaattaatcctaattgttct

SEQ ID NO: 282795 - DNA, 1255 bp, Homo sapiens
tcaaaactgtgctcatcatatttccagcccacacatttcctggtgtttgaatgttgtcttcattttcttgaacacagttttatattggaagtaatgaacctactttgtgaaatgtaaggacatatccttttttgttctaagcttaccagaaagtttatttatatataaatggataacattttataacttctctctacaaattaatgacatcaaatgggttatttaaaatttgaagcgggatagcaacgatttgtcccatggaaacctatgcatgattaatatgaatgcagtgaatatcaataacatgaagaagaattggggctgaggaaatattgggactgtttggatataatcttttagtgttgtatactggctctgagacactaccaatgagagcaacataattttcaaaaacacttcaattatcttggtgatcttcacagctcacttgaatstatcaaaagagtatttcctttccctcttaaaaatttgtgagcttgtatgcttttagttcagtcttctgtttctggatgccaaggccttctcttagaagggcatattgctactcttttgtatgttgctcagatagtcctgtgtctgcttttattgctcagtaattcaattaatcctaattgttctwaactgtcatggtgctagtgaatgtgtgatttaatatgttaatgagcatataatgacgtcctagatgaaacctacgtcaaatccatgccatgttgggtccagtcagtcttagccagcttgggccataccctggtttttcagggtctcatcagctcctagcttctatgactatttcaacagtttcctttcactagttacwtgaaactgctgcctggaattttctattctcctgcaaccaacttatattattcctatctcattatcacttaaacttatcttatatatgctttgtatcttattgggatttatttcgtgtgggggaaagcagagatatttccatatataggcaaaatctatattgaagagacaaaagttaagcattccatttagctgttaaaatcatatccaaattattgcattattgattaaactgtgacttaatacccaaaacaaattaaatgggggatatgctagggacagcttaaaatgttaattttatttgcttattcatatcattgaaatcgcctcattaaaatatgtttaaaaattacatttatatatgttttatctttaaaagcatgaaaaagaggctcagagtggatcttgttgctgagct

SEQ ID NO: 282796 - DNA, 615 bp, Homo sapiens
aactgtcatggtgctagtgaatgtgtgatttaatatgttaatgagcatataatgacgtcctagatgaaacctacgtcaaatccatgccatgttgggtccagtcagtcttagccagcttgggccataccctggtttttcagggtctcatcagctcctagcttctatgactatttcaacagtttcctttcactagttacttgaaactgctgcctggaattttctattctcctgcaaccaacttatattattcctatctcattatcacttaaacttatcttatatatgctttgtatcttattgggatttatttcgtgtgggggaaagcagagatatttccatrtataggcaaaatctatattgaagagacaaaagttaagcattccatttagctgttaaaatcatatccaaattattgcattattgattaaactgtgacttaatacccaaaacaaattaaatgggggatatgctagggacagcttaaaatgttaattttatttgcttattcatatcattgaaatcgcctcattaaaatatgtttaaaaattacatttatatatgttttatctttaaaagcatgaaaaagaggctcagagtggatcttgttgctgagct

SEQ ID NO: 282797 - DNA, 615 bp, Homo sapiens
aactgtcatggtgctagtgaatgtgtgatttaatatgttaatgagcatataatgacgtcctagatgaaacctacgtcaaatccatgccatgttgggtccagtcagtcttagccagcttgggccataccctggtttttcagggtctcatcagctcctagcttctatgactatttcaacagtttcctttcactagttacttgaaactgctgcctggaattttctattctcctgcaaccaacttatattattcctatctcattatcacttaaacttatcttatatatgctttgtatcttattgggatttatttcgtgtgggggaaagcagagatatttccatatataggcaaaatctatattgaagagacaaaagttaagcattccatttagctgttaaaatcatatccaaattattgcattattgattaaactgtgacttaatacccaaaacaaattaaakgggggatatgctagggacagcttaaaatgttaattttatttgcttattcatatcattgaaatcgcctcattaaaatatgtttaaaaattacatttatatatgttttatctttaaaagcatgaaaaagaggctcagagtggatcttgttgctgagct

SEQ ID NO: 282798 - DNA, 615 bp, Homo sapiens
aactgtcatggtgctagtgaatgtgtgatttaatatgttaatgagcatataatgacgtcctagatgaaacctacgtcaaatccatgccatgttgggtccagtcagtcttagccagcttgggccataccctggtttttcagggtctcatcagctcctagcttctatgactatttcaacagtttcctttcactagttacttgaaactgctgcctggaattttctattctcctgcaaccaacttatattattcctatctcattatcacttaaacttatcttatatatgctttgtatcttattgggatttatttcgtgtgggggaaagcagagatatttccatatataggcaaaatctatattgaagagacaaaagttaagcattccatttagctgttaaaatcatatccaaattattgcattattgattaaactgtgacttaatacccaaaacaaattaaatgggggatatgctaggsacagcttaaaatgttaattttatttgcttattcatatcattgaaatcgcctcattaaaatatgtttaaaaattacatttatatatgttttatctttaaaagcatgaaaaagaggctcagagtggatcttgttgctgagct

SEQ ID NO: 282799 - DNA, 1202 bp, Homo sapiens
accttccactgaagctctgttattttttttcaggctcttgggacatcgttacatataaagaagcagaaatatattaactagcacatttctgagttttaaagagttaattcaaacacataatgacaacaaaactattgcactgaacatttataatgttattgtgaaatgtgttacattagttgaactcacctctttgtagggctatcttgatgattttggggttatattaggtcatattgagataaaatcatagcctgaatatttaagmtttatatttttccttaaatgtaagagttgggagaatattttcgaacatttacattgcatgccttgatagtctatcttttagaaaagggtactatagtgtttttatattgacgctgtttccattcagttaattttttgttttgttggagaggcaaaaagtttggctttgactggagattattaagaaatgaatatttcagatggttacccacaagctctctttttcttaggtacttcttttctgcaaatgaataaccacacaaagtttaagtcattaaaatttcagagtaaatttacagaatgatatagattttcagaggwccagttcggtatcagaatgtcagaaaaaaaaaatcttgtttggaggggtacagaggagcccagttttagtaatgcaaaatataggacatttagatagaaatattcaacagtcatttgtgaatgaagctaggggatattagaatatgtggaagcttatggcttagaaatagataaaatcattcagaaaagtaacctatagaacaaagagaaataaagaccaaatcagaaatttggagtatttgattataaaaggtgaaaataatgtgtgtgtgtgtgtgtgtgtgttttgatgagaaggawgactaaaacataatcatgaagaggaagaggaactggtctcctgggactgaggaagtaagcagaattgataagacaagtataacatttaagttagagaagaaaatctcagaatttctacctagggtattaagagacaaccgcatctaagaagctgaggaattgttattgagattaagggactaaaaagggaaaagaaacggagcaggagattacagtaaccaggttacacactgaaggctctccactgggagacagggtgaagtgagttggggttgaatgtaatagatttaattcattgaaggaaataagacaat

SEQ ID NO: 282800 - DNA, 590 bp, Homo sapiens
ttttcaaggtacactttctgctgacatatatgtactgctttagttactattaataagttttaagtctgatgactcattagaacccatttcctctcctacccctgctatacaatgagcaaatcaggagggaagatgatttgttctgactgatgtaaatcaggtatagaaaggatggtaaatgaatatataatttgtttagattattctgcctaaatgatttgttcttactgttrtaaatcaggtatagaaaggatggtaaatgaatatataatttgtttagattattcttcctaaatacattatgtaatttagatatgataaccaactagcccattcaatataagggactaaatggaatggacacagtcatgaggttccagttgtgcctggctatctctgtgaatttggcgaagtatgtcactgtattactcaatgaaatgcaaaagtatttacttaatacaactgaacaatagcatttagaaaattttctggttaatagtaggatacttagctattcaaaatctttatgatgtttcatgtttgttgcatgtttgttgttaagtagtaaaaggctaaatacgcaggctgca

SEQ ID NO: 282801 - DNA, 567 bp, Homo sapiens
ttttagttgtttttaattcaatgattggagatgttgagcatttttttcttatatctgttggtcctttatatgtcttcctttgagaaatgtttattcaggtctattcaggacacctattctgttaatgstgctgggataactggctagccacatgcagaacactgaaactagacctcttccttttaccatatgcaaaaataaactcaaggtggattaaagactcacatgtaaaacctaaaactataaaaaccctaaaagaaatgtaggaaatatcattctgggcataggcttaggcaaagattttatgacaaagactccaaaagcaactgaaataaaaattaggttgggcttaattaaatggaaagagtttctgcacagcagaagaagctatcaacagagtaaacagcccacaaaaagatgagagaaaatatttgcaaactatgtatctgacaaagatctaatatccagaatctaaaaggaatggaaacatatcaacaagcaaaaaacaaactcattaagaaacggacaaaggacatgaacttttcaaaagaacacatacaagtggtc

SEQ ID NO: 282802 - DNA, 567 bp, Homo sapiens
ttttagttgtttttaattcaatgattggagatgttgagcatttttttcttatatctgttggtcctttatatgtcttcctttgagaaatgtttattcaggtctattcaggacacctattctgttaatgctgctgggataactggctagccacatgcagaacactgaaactagacctcttccttttaccatatgcaaaaataaactcaaggtggattaaagactcacatgtaaaacctaaaactataaaaaccctaaaagaaatgtaggaaatatcattctgggcataggcttaggcaaagattttatgacaaagactccaaaagcaactgaaataaaaattaggttgggcttaattaaatggaaagagyttctgcacagcagaagaagctatcaacagagtaaacagcccacaaaaagatgagagaaaatatttgcaaactatgtatctgacaaagatctaatatccagaatctaaaaggaatggaaacatatcaacaagcaaaaaacaaactcattaagaaacggacaaaggacatgaacttttcaaaagaacacatacaagtggtc

SEQ ID NO: 282803 - DNA, 985 bp, Homo sapiens
cctttacaggaactgtgtactgtgctcctaggtacgaaaatgtaaggttttaggaatgcttaccaaattgaaataaaatttctaatattgatagtctccaacttaccaagttttgacttaaaattttttgactttatgatggtgtgaaagtgatatgcattcagtaaaaatggtatytcaaattttgaattttgatcattttcaaggctagcaataagcagtttcatactctctcgtgatgctgagcagtgccagtgaaaggcagctcccagtcagccacacaatcaagaaggtaaacagccaatactctacaataaagggtactgtattgccagatgattttgccaaatggtaggctaatgtaagtgtttgagcatgtttaaggtgggctaggttaagctatgatgttcctgtggwttctgcaattcatttttccatgtaaaaaatgtactgcaagagtaattttatgaaatttgatgttcacatgaaatttacctgatccctggcccaatggaatttttttcaagtttgatgatattwtggtaaaatcatgttagtattgacccttatgcattaatatatgagccaagtaatctctaaagtaaatatttttgaaagtgctgctcatgtgacagtgtttacaaaagtgtcccttgtctttgaaacatccaagaacaaggctatcaaacttcagtatgttgatgaataaactttattctacctaagatatatctgattcttaaattcataaaatgtgatcattgtttccttaaattagttagcaacaataaataatccccacatttggttttgttttcatatgctatgacataatatcagttagttggaaaatgttctattatgtcttttgattgatattttcctattattgtttttgtgcatattagctgaaaataatttgtcttaattagtagcttccctaattattttatattattaaatattatcatatatgtaccactgt

SEQ ID NO: 282804 - DNA, 585 bp, Homo sapiens
atcatcagtacaaaatatctaccctaaggggcagaacaagattatttgtctactcattatttcaccctaggggttctactgatttggcaaagaaatttgaaactaaaactcccttgaagattatcagatttatcatgttcattagaagagatcactactaaagatttttttttttaagaagaaaaccctttttaaactgggacatcataataatgtatgattatgtttccaaagatgacctctggcatgtatctatggatccatacagatggtttctcaggcytaatgatttactgtcattgagacaaatgaaaaaataatcctgtaaaattataattacttgctacttcttaatctagataggtttttaatgataatgctttatgaagctatattcttctgattctaatgcactatttcaaggcaacctacttcaatagcaaatgaataaaaatgattagtaggaataggaaagatacatagagcatctaagtaaatgaagcattttcatgaaaactattaaattgatgaattagactaaagtgtcactgccattaaactctgtttaataaatgtcaaataaat

SEQ ID NO: 282805 - DNA, 1131 bp, Homo sapiens
atcatcagtacaaaatatctaccctaaggggcagaacaagattatttgtctactcattatttcaccctaggggttctactgatttggcaaagaaatttgaaactaaaactcccttgaagattatcagatttatcatgttcattagaagagatcactactaaagatttttttttttaagaagaaaaccctttttaaactgggacatcataataatgtatgattatgtttccaaagatgacctctggcatgtatctatggatccatacagatggtttctcaggcctaatgatttactgtcattgagacaaatgaaaaaataatcctgtaaaattataattacttgctacttcttaatctagataggtttttaatgataatgctttatgaagctatattcttctgattctaatgcactatttcaaggcaacctacttcaatagcaaatgaayaaaaatgattagtaggaataggaaagatacatagagcatctaagtaaatgaagcattttcatgaaaactattaaattgatgaattagactaaagtgtcactgccattaaactctgtttaataaatgtcaaataaatwaaaactcactggtaatagtaagtacacatactattataacactaaccacagttagtagaaatgagttcaccatttctattaaaaaactgggtagaaattagttcataatttctattaaatggtaaaccaataaaaaataataagttgttgtagttactatttttgatgggtttatcatttctactaaatgatgtagaacccattctttcttcaaaactcagcttctgggctgtgagttcgagaaaggaaggcttttgctgccagtactacacttttgactgctctctgagtgagccccagttcaacagagtggaaattttcctggatataggtatgaggtttatttccttttacaatgttagtgatgggagccatatctttagattcaccaaaaattttattagaaaaccactctgttcgttttttgatcatawatgtgaagctcaagaggatcagagcttcctgattatctgtcctgtgattaatacaggtactccagtcccacagtttattctggggaaggtaaataaacatgtgaatgcaat

SEQ ID NO: 282806 - DNA, 498 bp, Homo sapiens
agcataataaaagccatgtatggtagacccacagctagtatcttaccaaatgggaaaaactgaaagcctttcctctgagatttagaacatgacggggatgcccactctcaccactgttatttgacatagtactgcaagtcctagctagagcaatcagaaaagagaaggacataaagggcatccaaattggaaaggaagacgtcaaattatccttgttttcagctgttrtaatcttatatttggaaaaacctaaagactccacaaacaactattggaactgatgaacaaagtcaaaaaagttgcaggatacaagattaacatacaaaaattagtagcatttctgtatgccaacagtgaacaatctgtaaaagaaataaaaatcccatttacaatagccacaattaaatatgtaagaattaacgtaatgaaaaaagcaaaaggcccctataatgacaactacaaaacagtaattacggaaattgaagaagacaccaaaaa

SEQ ID NO: 282807 - DNA, 439 bp, Homo sapiens
ctccagcttggatggcagagcaagaccccgtttcaaaacaaaatctaaaaacaaaaaaaaaagttcaatctatcttcttaaatttaactttaaaggagttattttttcttaataaactggcaaaaaaaaatctattagactttataaatatgccagctttttaaaaaagaaaacattaagttaggtgatagatatgatacttagcttgattgcggtaatcatttcacatcatatacgtatatcaaaactccatgtagtacaccttacatttatataatttttatcaattatatgtcaaaaaagcctggagaaaaaggagacratgtgtcaaatgaactcatgttgtcaaactgacaaggtacatataaaacttgcgtatgttcaatctgcaagtctgtattatgagttatttgaaattaaattcactaaatttgaaggg

SEQ ID NO: 282808 - DNA, 439 bp, Homo sapiens
ctccagcttggatggcagagcaagaccccgtttcaaaacaaaatctaaaaacaaaaaaaaaagttcaatctatcttcttaaatttaactttaaaggagttattttttcttaataaactggcaaaaaaaaatctattagactttataaatatgccagctttttaaaaaagaaaacattaagttaggtgatagatatgatacttagcttgattgcggtaatcatttcacatcatatacgtatatcaaaactccatgtagtacaccttacatttatataatttttatcaattatatgtcaaaaaagcctggagaaaaaggagacgatgtgtcaaatgaactcatgttgtcaaactgacaaggtacatataaaacttgcgtatkttcaatctgcaagtctgtattatgagttatttgaaattaaattcactaaatttgaaggg

SEQ ID NO: 282809 - DNA, 616 bp, Homo sapiens
aaaattcctgtcaaggaaataagattttcttcttatagttatgggcatactacttttttcatagaaatattgttgagttctagagataatatatgcaaaatacctatttcaatgattggtacataatagttgctcaagagaaatactattattgacttcaacatgttgcattcgtggcgagcttttactttttttagaatgtgtacttgaaaataacatgtattttataaatccaataggacctgaaacaaaattttacattakatgtttaattcaattctctgtgctttgttctgtactactttttatctcaacacatcttttttaacaaaagatgaaataatgtattaaaatgtcatatttgctcaaatatccatttcaattttttaatgtcatattctatgtttttaccttttcaagggtaagactttcttctagccttttatgttacaaacattttgaaacatacaaaaatttcaaaggatagcatgagcatctatgtactaaaaaccttgatttttttccatttgacaataaattcacacatcatgacacttcacaccataatactccgtgtatttcttctaagaataagaccatgctttacatactcaca

SEQ ID NO: 282810 - DNA, 616 bp, Homo sapiens
aaaattcctgtcaaggaaataagattttcttcttatagttatgggcatactacttttttcatagaaatattgttgagttctagagataatatatgcaaaatacctatttcaatgattggtacataatagttgctcaagagaaatactattattgacttcaacatgttgcattcgtggcgagcttttactttttttagaatgtgtacttgaaaataacatgtattttataaatccaataggacctgaaacaaaattttacattagatgtttaattcaattctctgtgctttgttctgtactactttttatctcaacacatcttttttaacaaaagatgaaataatgtattaaaatgtcatatttgctcaaatatccatttcaattttttaatgtcatattctatgtttttaccttttcaagggtaagactttcttctagccttttatgttacaaacattttsaaacatacaaaaatttcaaaggatagcatgagcatctatgtactaaaaaccttgatttttttccatttgacaataaattcacacatcatgacacttcacaccataatactccgtgtatttcttctaagaataagaccatgctttacatactcaca

SEQ ID NO: 282811 - DNA, 616 bp, Homo sapiens
aaaattcctgtcaaggaaataagattttcttcttatagttatgggcatactacttttttcatagaaatattgttgagttctagagataatatatgcaaaatacctatttcaatgattggtacataatagttgctcaagagaaatactattattgacttcaacatgttgcattcgtggcgagcttttactttttttagaatgtgtacttgaaaataacatgtattttataaatccaataggacctgaaacaaaattttacattagatgtttaattcaattctctgtgctttgttctgtactactttttatctcaacacatcttttttaacaaaagatgaaataatgtattaaaatgtcatatttgctcaaatatccatttcaattttttaatgtcatattctatgtttttaccttttcaagggtaagactttcttctagccttttatgttacaaacattttgaaacatacaaaaatttcaaaggatagcatgagcatctatgtactaaaaaccttgatttttttccatttgacaataaaytcacacatcatgacacttcacaccataatactccgtgtatttcttctaagaataagaccatgctttacatactcaca

SEQ ID NO: 282812 - DNA, 581 bp, Homo sapiens
caatctatagtttgccttgtgagatttgccaacttccaaatcccatactttttctttgacttccattaatctatgcatgatggtcctagcccttgagatagtcttttctaggccgagcgcagtggctcatgcctgtaatcccagcaatttgggaggctgaggcgggtgtttcacctgaggtcaggagtttaagaccagcctggccaaaatggtgaaaccctgtctctactaaaactacaaaacttagccaggtatggtggtgcacacctgtaatctcagctacttgggaggctgaggcaagagaatcacatgcacccaggaggcagaggttgcagtgagctyagatcacaccactgcactcaagcctatgagacagagcgagactctgtcccccccaccctgcccacccccccccaaaaaaagatggccttttctttcattgagacagcaatgaaaaaacttatataagtaaataacatacagctttttctgcaatatcttccaatttgatagttcttcgaattctacagaaaacatagagccattactatctcaggcagacagtgcagtcagatcaaatg

SEQ ID NO: 282813 - DNA, 581 bp, Homo sapiens
caatctatagtttgccttgtgagatttgccaacttccaaatcccatactttttctttgacttccattaatctatgcatgatggtcctagcccttgagatagtcttttctaggccgagcgcagtggctcatgcctgtaatcccagcaatttgggaggctgaggcgggtgtttcacctgaggtcaggagtttaagaccagcctggccaaaatggtgaaaccctgtctctactaaaactacaaaacttagccaggtatggtggtgcacacctgtaatctcagctacttgggaggctgaggcaagagaatcacatgcacccaggaggcagaggttgcagtgagcttagatcacaccactgcactcaagcctatgagacagagcgagactctgtcccccccaccctgcccaccmccccccaaaaaaagatggccttttctttcattgagacagcaatgaaaaaacttatataagtaaataacatacagctttttctgcaatatcttccaatttgatagttcttcgaattctacagaaaacatagagccattactatctcaggcagacagtgcagtcagatcaaatg

SEQ ID NO: 282814 - DNA, 536 bp, Homo sapiens
tatctggaagtatgtcatttacacctttggaaagaaccataagtctcatgatatgtagataacaatggttttagtattaggaattgcactggttgactttagggaggaaaaagagaaagttgactaagtggcagaagttgctaacagaccaagctgcaagaccaagtaatggacactgagcacccttttcatcacaagccttccccaagaatctagattgaaattcaggactgttaataaatagggcaaagttgttttgttttggggaaaagctagggtaccagaacatyattacacgtgcaaattatctaacaatctgttttgagctaccttacaaaaatatatgccgctgtatttttccagagctaaatgtgagtggaggtaattgtggagttttgttaaatggcaggtaagctattcatctaagtgcccattcatgatgtgcccaatctacccatttagatttcattctgcagagctcttaggtgatggctttgttgctcatacttgaaatttctggctttagttgaatttta

SEQ ID NO: 282815 - DNA, 578 bp, Homo sapiens
ttgtttctatatcaaaattgtagccaaaatataattatttatcctcacctctacctccaatcccttgttaaaacttaagatacccttatactccaggatatttcttcagtacaaacctaatgtttcctttaaaatttaagctagatcatatatcacttctctgtttaaaacagtccagtatttttcagctcactcagtataaaacccaagtacttagtatgacttatacaaagctgaatgaacaggctccctctcaccatttgacttcatcttccatctcatctccccttgtttacttggtttcagccacattggaatccagatgtctttagacacatcaaagatgtttccatttctagacctttgtatcttttagaaattgcttcttgcmaactctgcacagtttgtctctcacatccttgagccttctactgctagtaaaatgaacactacaaaagtattcattgactactctataaatatatagttagatggatagataaaatcttcacatatataagtgcatattatttgctaaaatttaaaaataaaacattatatatacagtgtcaaagtct

SEQ ID NO: 282816 - DNA, 394 bp, Homo sapiens
aattcaataataaatatttattatataaattattaatttaatagtatttaatacttattaatgttgycaggtgacttagtgaactactgttatttattggttttaatatttcacttggcacaggagttaatagaaatcaacagcaacttaaaaaataaggcaacaggactccaccaaattcatagatataaaccaataaaaccatccctctaggttttattcatatcccactccagatcgtgtcactagtatggaagccaaaataagagaataactaccagtatatcttgcttcagaagttaatagataacttataaactttagttttatctggaacagatacattagtaaagtacataatcatttgtttcaagatttttcagccattcactcc

SEQ ID NO: 282817 - DNA, 626 bp, Homo sapiens
tctcactctactttcaaactggttttaatttggttacttgcaacctaagacagcaaacagcattttagggatgaattgcgttcctgaagtgcatgggtcagaaagctcctacattcactttctactgtccctgcactttttctctccyacttgctgcctttccacttcccctcatttcctgcattctaatactctattgtcaaattttcctggtcttgacagcaaatcttttctttttcttgatgctttattccttctagcataagaccagaaattgatcaatagtttatttaagttccaaactgtattttgctgctgaataaacatatagctttcctagactcccatggaaaaaaatgggacttatgctgaaattcagggctaacacaccgattatcctaaagtataacaacatattttgatataacatcatatagctttaaaaaattttcataaagtaacagagtaagattgggcatctgaatcacatgtttaggaatttgcaacattcattcatcttacacaataaacctcaatgagtacctacaagtagcatgcactattaggtactagggatactgagatcaataatgccattgtgttggtccaactggggaagactggca

SEQ ID NO: 282818 - DNA, 626 bp, Homo sapiens
tctcactctactttcaaactggttttaatttggttacttgcaacctaagacagcaaacagcattttagggatgaattgcgttcctgaagtgcatgggtcagaaagctcctacattcactttctactgtccctgcactttttctctcctacttgctgcctttccacttcccctcatttcctgcattctaatactctattgtcaaattttcctggtcttgacagcaaatcttttctttttcttgatgctttattccttctagcataagaccagaaattgatcaatagyttatttaagttccaaactgtattttgctgctgaataaacatatagctttcctagactcccatggaaaaaaatgggacttatgctgaaattcagggctaacacaccgattatcctaaagtataacaacatattttgatataacatcatatagctttaaaaaattttcataaagtaacagagtaagattgggcatctgaatcacatgtttaggaatttgcaacattcattcatcttacacaataaacctcaatgagtacctacaagtagcatgcactattaggtactagggatactgagatcaataatgccattgtgttggtccaactggggaagactggca

SEQ ID NO: 282819 - DNA, 626 bp, Homo sapiens
tctcactctactttcaaactggttttaatttggttacttgcaacctaagacagcaaacagcattttagggatgaattgcgttcctgaagtgcatgggtcagaaagctcctacattcactttctactgtccctgcactttttctctcctacttgctgcctttccacttcccctcatttcctgcattctaatactctattgtcaaattttcctggtcttgacagcaaatcttttctttttcttgatgctttattccttctagcataagaccagaaattgatcaatagtttatttaagttccaaactgtattttgctgctgaataaacatatagctttcctagactcccatggaaaaaaatgggacttatgctgaaattcagggctaacacaccgattatcctaaagtataacaacatrttttgatataacatcatatagctttaaaaaattttcataaagtaacagagtaagattgggcatctgaatcacatgtttaggaatttgcaacattcattcatcttacacaataaacctcaatgagtacctacaagtagcatgcactattaggtactagggatactgagatcaataatgccattgtgttggtccaactggggaagactggca

SEQ ID NO: 282820 - DNA, 566 bp, Homo sapiens
ggctgatctctgtacttaagggagtgtatctaaacccactctgccaagccacagactaagcattttgcttaataccatggcaatggatacaagtaatgttagatgagaaagaaaataaaatgtcaccaggacatttacaagacatagtacttattgctgctgctgctcaaataaaataatagtaaatactgttatgcatgttgctaagcaatgttgcattttcagtccttaataactgcattagtaacacaagatgggaaaaactacattttgataccaatgagacgttttgctttctttgaataatcagcctcarcaaccgatgacttccagcacaaagcaaaagtggttatcttttctcccctggctaggatatatatgagaactcagtggtaaatttcctattggaaagactaagggttctctctgctaacccactcccccacaaagtctttaagtcttaagtaaaaaataaacgaattaataaataacattctttccctgaaaagtctcctctcagctattgtatatgtagcaagtgctagaaacctgtgaattttaaacac

SEQ ID NO: 282821 - DNA, 1133 bp, Homo sapiens
ggctgatctctgtacttaagggagtgtatctaaacccactctgccaagccacagactaagcattttgcttaataccatggcaatggatacaagtaatgttagatgagaaagaaaataaaatgtcaccaggacatttacaagacatagtacttattgctgctgctgctcaaataaaataatagtaaatactgttatgcatgttgctaagcaatgttgcattttcagtccttaataactgcattagtaacacaagatgggaaaaactacattttgataccaatgagacgttttgctttctttgaataatcagcctcaacaaccgatgacttccagyacaaagcaaaagtggttatcttttctcccctggctaggatatatatgagaactcagtggtaaatttcctattggaaagactaagggttctctctgctaacccactcccccacaaagtctttaagtcttaagtaaaaaataaacgaattaataaataacattctttccctgaaaagtctcctctcagctattgtatatgtagcaagtgctagaaacctgtgaattttaaacacwggctgatctctgtacttaagggagtgtatctaaacccactctgccaagccacagactaagcattttgcttaataccatggcaatggatacaagtaatgttagatgagaaagaaaataaaatgtcaccaggacatttacaagacatagtacttattgctgctgctgctcaaataaaataatagtaaatactgttatgcatgttgctaagcaatgttgcattttcagtccttaataactgcattagtaacacaagatgggaaaaactacattttgataccaatgagacgttttgctttctttgaataatcagcctcaacaaccgatgacttccagcacaaagcaaaagtggttatcttttctcccctggctaggatatatatgagaactcagtggtaaatttcctattggaaagactaagggttctctctgctaacccactcccccacaaagtctttaagtcttaagtaaaaaataaacgaattaataaataacattctttccctgaaawgtctcctctcagctattgtatatgtagcaagtgctagaaacctgtgaattttaaacac

SEQ ID NO: 282822 - DNA, 842 bp, Homo sapiens
atacaatttcccatttaagtgactttgggcaaatgaatgtctttttgcccctttttttctcacctgttactgcaatgattaaataagttgatatatataaagtacttagagcagtgcctccctctggttctggggaagagctgtttgaacacctccccatcaaaacaagcaaatactgcagttagyaaaggagtaaaaaagctgactccagaatgtacccttaggatctgtatttgtattacwggcatattatctgcctgttccactagaatttcagatccatgggaacagggattttgtcttgggtatattggctgggtgagtaaatgaatatcttctccctatcagcagwgtcattatacaattgcaaactcctttcatttttacagaagaccacaggactcatttcctgttataaactactcatgttggttcattcattcattctctactaaagtctttcatgatctggctcctgccacccctctagctttcccccataggatgcccgccttgctctccagcaatactagctttggctcaattcttagtaagctgcatgttcccttctaccttagaacctctgctctggcctttcttctgcccatctccaacaccttcagatttctgcagggaagccttccctgatccccactgagactaggtgtggtacctgcattttatagtctcatagttccttgtttttgctgttgttgttttctatcatagtacttaacacatttgtaaaatgtatttgtgtgattatttgattaacttcactcccaaccccactcttctcagccgcatgccttcctatccctattaatatccctgccacctaa

SEQ ID NO: 282823 - DNA, 598 bp, Homo sapiens
gtttttggttcaaagtactcaggaatgagtcttgtaacccaggaataacaggcacagtctccaaagagtaggaatcagctctgagcatctcacagtccacttctctggacagatgctacgcaggcaatttattacagggagaaacaggcatgctgggtaacattcaggccttatggtcttaattcaggaaggattataaacattagaataaatgaacttaaatataaatatatacatatacatatatattaaatacattatttaaatatatatcaattatttaaaagaataatatgttaaaataatgtaatgtatgtaatttttcctggaatgtatatagaaactatcacttaggaatcatttggttacaagtaacagaaaacccagctcaaactcacttatacaaataaataacaaaataaggaaatgtttgtttcattgagctggggaaaaaacccaaaagtaagaytggttttgggaaaccataagtttgttgtatcatttgattctagacaattctcttggtacaggtattctttgtgaattggcttcaccctcaggctgctcccctcctggcgcaataaaaatggctgtagca

SEQ ID NO: 282824 - DNA, 509 bp, Homo sapiens
cagtggactcttcatttcttaaagaattaccacaaatgtattcacttattcagctcctgtgtgtgcacatacatttctatcactattttcttttcttcaatcagccagtgtctagaagtaagaaccatcatctttaatttcaatctctggcttattatagacctaagatcctcacaggaatatttgttcaatttgaacatgctcttcagctgtgtttttttttttttattttgttgcttatggatgacagataatgatgtttttacacatttaagagtacttgatttccttattacatggacatatttctaattggctccaggctccttactattaatagctgttgaagatgcactatacatctaatttagcactgcctggggtgacacaattggttctcagttactttactgccaatatgtacagctaatgccacagggagcctggaactaattggtgagatccttgccctccgagaccgaacytaacacatgcttcccagacagctt

SEQ ID NO: 282825 - DNA, 595 bp, Homo sapiens
gcttggggtcccacaggtccataaggggaggtcctgactcctcatgasctccaaacatacatccaattaaattttcaacattatcacatggatgtatgataggcattagaaaattaacatggcctatactgagctactctctgctcctcaaatctacttcccatcaaggcttatttatcttaacagatggcattaccattcacccgctggttcaggcccaaattatgagaaacattcatgctggactctgcatggaagtctgccaagtgttcaaatcccaggtctgctgcttattagcttggtgactttggatcagttacttaatctttctttacttcagtttccttaactataaatgggcataatctatatctccatttttaatctgtaaagtgaggataataatactacctatttctttgaaattttgtgaagtttaaatgtaaagcactcaatttagtgcctaacacatcgtcaattctatgagaggcttgttgctattgttatgattttcccacaacacctaggtttcactagcaaatgttgtcagctctgcttccaaaatatactctaaatttgaccacttctcactatt

SEQ ID NO: 282826 - DNA, 595 bp, Homo sapiens
gcttggggtcccacaggtccataaggggaggtcctgactcctcatgacctccaaacatacatccaattaaattttcaacattatcacatggatgtatgataggcattagaaaattaacatggcctatactgagctactctctgctcctcaaatctacttcccatcaaggcttatttatcttaacagatggcattaccattcacccgctggttcaggcccaaattatgagaaacattcatgctggactctgcatggaagtctgccaagtgttcaaatcccaggtctgctgcttattagcttggtgactttggatcagttacttaatctttctttacttcagtttccttaactataaatgggcataatctatatctccatttttaatctgtaaagtgaggataataatactacctatttctttgaaattttgtgaagtttaaatgtaaagcactcaatttagtgcctaacacatcgtcaattctatgagaggcttgttgctattgttatgattttcccacaacacctaggtttcactagcaaatgttgtcagctctgcttccaaaatatacyctaaatttgaccacttctcactatt

SEQ ID NO: 282827 - DNA, 618 bp, Homo sapiens
tttgatggagctagaggctatcattcttagcacactaaggcaggaacacaaaatcaaatactgcatgttctcacttataagtgggagctaaatgatgagaacttatgaacacaaagaaggaaacaacagacactggggtctgcttgagtggggagggtgggaagagggagaggagcagaaaagasaactactggatactgagattaatacctgggtgatataataatatgtacaacaaacccccatgacatgtagttatctatgtaacaaactttcacaggtacgcccaaacctaaaataaatttttttaaaaaaagaaagaaaataactaccaagctagagagaacatgtatgcagtcaaaaatgggagaaaaatgaaaacattttctgacaaacaaaaactggaagagttttcaacccaaattatttttattaagaatttttttaagacactaagagccattgttctactataaagaaaaggactgcagatagaagaatttcaagaaaaagctaaggacaattgaaagggtaaatatatggataagtctaagtaattattgagtatgccatgcaataataatgccttttgagattttacacgtagaactaaaatat

SEQ ID NO: 282828 - DNA, 618 bp, Homo sapiens
tttgatggagctagaggctatcattcttagcacactaaggcaggaacacaaaatcaaatactgcatgttctcacttataagtgggagctaaatgatgagaacttatgaacacaaagaaggaaacaacagacactggggtctgcttgagtggggagggtgggaagagggagaggagcagaaaagagaactaytggatactgagattaatacctgggtgatataataatatgtacaacaaacccccatgacatgtagttatctatgtaacaaactttcacaggtacgcccaaacctaaaataaatttttttaaaaaaagaaagaaaataactaccaagctagagagaacatgtatgcagtcaaaaatgggagaaaaatgaaaacattttctgacaaacaaaaactggaagagttttcaacccaaattatttttattaagaatttttttaagacactaagagccattgttctactataaagaaaaggactgcagatagaagaatttcaagaaaaagctaaggacaattgaaagggtaaatatatggataagtctaagtaattattgagtatgccatgcaataataatgccttttgagattttacacgtagaactaaaatat

SEQ ID NO: 282829 - DNA, 583 bp, Homo sapiens
cacttgttccccaaaaacctattgaaatttaaaaaaaaaaaaaaaaaaaaaggaactgtacagtggaattttgtctttgggctataaagggctaacaattcttgggtttttttgtttttgtttttgtttttgagatggagtcttgctcagccacccagcctggagtgcagtggcatgatcttggctcactgcaaccaccatctcccgggttcaagcaattctcccatttcagcctccagagtagctgggattacgagcaccctccatcatgaccggctaatttttgtattttagtagagayggagtttcaccatgttggccaggctggtcttgaactcctgacctcaggtgatctgcccacttcggcctcccaaagtgctaggattataggcatgagccaccacgcccagtcttactagtttcttagcaacaaatgttcttctttggtgaatttggactatatgttaccacttatttattcaaacaaagtacactttctcccatggtggaacacaacaaaaagtccaaggtctttagttggcctcaaaggcaattaaaattttattggaaattgatgtttgat

SEQ ID NO: 282830 - DNA, 543 bp, Homo sapiens
attcatcacaagctgatgaaagagcccatgcaccttaacaraacattggcagtgatctaacagaataccccattgactggtggtggtggtgaccacaaggagaggctcctctgtctgtgaaaagggaagggaagagtgagaaagactttgtctggtgatttgagtgccaccttagccatggtagaatagaacatcaggtaaatttctatggtttttgattccaatcttttgctccaagatagcctctttggacctgtctggggccagggggagcttgctgccctgaagggaaggccataaactgagctggctttgctatctgttgattatagagccctagagccttgcataaacacaggtggtagccagatagtggttatagtgggccttgggcaagaagtgctttgctagcttcaggtctgacccagcacagtcacagtgatggtggacacaggggtgcttgcatcatcaaactcccagttccaggtggctcagcacatagagagaaactccatttgtttgggagaaagtaaaggaaaagaa

SEQ ID NO: 282831 - DNA, 601 bp, Homo sapiens
taagaattttttagatttcctaggtgacctctagaaaaactgtgacaatttttgccttataaaatggatgaggctaaaataaattgggcttctttggtatgccccatatttcttcattagttccacacatctgtgtgagttgcatgaggtcaattctaaaagactcagccttctcagttcattttacataatcttacatattaagatgaatggtggtggggtgcggtggcccacgcctgtaatcccagcactttgggaggctgaggtgggcacatcaggaggtcaagagatygagaccatcatggccaccatggtgaaaccccatctctactaaaaatacaaaaactagctgggcgtcgtggtgcatgcctgtagtctcatctattcaggaggctgaggcaggagaatcacttgaacccaggaggcagaggttgcagtgagccaagatcgcaccactgcactccagcctggtgacacagggatactctgtccaaaaaaaaaaaaaacaggtgaattgtttaggaactgtagacatttaactcacagattagagactgtaataggaaattggagaggtatatgcccccaggtgaaacactgg

SEQ ID NO: 282832 - DNA, 601 bp, Homo sapiens
taagaattttttagatttcctaggtgacctctagaaaaactgtgacaatttttgccttataaaatggatgaggctaaaataaattgggcttctttggtatgccccatatttcttcattagttccacacatctgtgtgagttgcatgaggtcaattctaaaagactcagccttctcagttcattttacataatcttacatattaagatgaatggtggtggggtgcggtggcccacgcctgtaatcccagcactttgggaggctgaggtgggcacatcaggaggtcaagagattragaccatcatggccaccatggtgaaaccccatctctactaaaaatacaaaaactagctgggcgtcgtggtgcatgcctgtagtctcatctattcaggaggctgaggcaggagaatcacttgaacccaggaggcagaggttgcagtgagccaagatcgcaccactgcactccagcctggtgacacagggatactctgtccaaaaaaaaaaaaaacaggtgaattgtttaggaactgtagacatttaactcacagattagagactgtaataggaaattggagaggtatatgcccccaggtgaaacactgg

SEQ ID NO: 282833 - DNA, 601 bp, Homo sapiens
taagaattttttagatttcctaggtgacctctagaaaaactgtgacaatttttgccttataaaatggatgaggctaaaataaattgggcttctttggtatgccccatatttcttcattagttccacacatctgtgtgagttgcatgaggtcaattctaaaagactcagccttctcagttcattttacataatcttacatattaagatgaatggtggtggggtgcggtggcccacgcctgtaatcccagcactttgggaggctgaggtgggcacatcaggaggtcaagagattgagaccatcatggccaccatggtgaaaccccatctctactaaaaatacaaaaactagctgggygtcgtggtgcatgcctgtagtctcatctattcaggaggctgaggcaggagaatcacttgaacccaggaggcagaggttgcagtgagccaagatcgcaccactgcactccagcctggtgacacagggatactctgtccaaaaaaaaaaaaaacaggtgaattgtttaggaactgtagacatttaactcacagattagagactgtaataggaaattggagaggtatatgcccccaggtgaaacactgg

SEQ ID NO: 282834 - DNA, 601 bp, Homo sapiens
taagaattttttagatttcctaggtgacctctagaaaaactgtgacaatttttgccttataaaatggatgaggctaaaataaattgggcttctttggtatgccccatatttcttcattagttccacacatctgtgtgagttgcatgaggtcaattctaaaagactcagccttctcagttcattttacataatcttacatattaagatgaatggtggtggggtgcggtggcccacgcctgtaatcccagcactttgggaggctgaggtgggcacatcaggaggtcaagagattgagaccatcatggccaccatggtgaaaccccatctctactaaaaatacaaaaactagctgggcgtcgtggtgcatgcctgtagtctcatctattcaggaggctgaggcaggagaatcacttgaacccaggaggcagaggttgcagtgagccaaratcgcaccactgcactccagcctggtgacacagggatactctgtccaaaaaaaaaaaaaacaggtgaattgtttaggaactgtagacatttaactcacagattagagactgtaataggaaattggagaggtatatgcccccaggtgaaacactgg

SEQ ID NO: 282835 - DNA, 994 bp, Homo sapiens
ggcatactacacttaaaaagaactgcttgagttttctaatttatataaacagaaatctggagaacagggatgggaatggatagtagggtatgggataatggtggaaggaacacagagttggatcaggctgaatttattgatttgggcccactaagtagggactcggatttaatattgcagcccaggaagttaaaaagagttctcatagtttatttgcttggttagctgaaacatggattaaaagatggaccactgtgagtgagctggaaatgcctaatctctcttgktgtaatgtagacaaagggatccaaaggcttagattgggatggtggagtcatttagtcactttaaacctactcatcccagctgggagggtccagaagctatacccttgaccaatgccttgtgaagwagtagatttgtgagggcagaacctgtatctttgaagagctcagtaattgtccttctctgtatgtcagatccaacagtgggaactgcagccactcaactacaatatttaaatacaataggaacaatwggatcctgaggtggcagaggccaagcagtggcactcatccatgaggtcttaactcaggcatggtgtagagttggtgctctgtacatatgtggcgaatgaagaaatgaaaaactcagggaaatatctaccagcaaccattatgcttgaaacgaaataatttccattgtaacttccccctgtgtttgtggatgggtgctatgaagtaaagcttagcataacccaacaacctagggcttttcttttcctttttaaaatgtaatccatttcgtgaaatattcaagtccatagtgaacaaagaggagctttttgccctctttgttatgtgtcttttatggtggtgtctctcatagttgttatttgtcttaagtattctttctggccttagtaatatggataatttagcctttcaattaatgtttttttataaatgtctgcctttgaaaatactgaaatgtg

SEQ ID NO: 282836 - DNA, 582 bp, Homo sapiens
agtagatttgtgagggcagaacctgtatctttgaagagctcagtaattgtccttctctgtatgtcagatccaacagtgggaactgcagccactcaactacaatatttaaatacaataggaacaataggatcctgaggtggcagaggccaagcagtggcactcatccatgaggtcttaactcaggcatggtgtagagttggtgctctgtacatatgtggcgaatgaagaaatgaaaaactcagggaaatatctaccagcaaccattatgcttgaaacgaaataatttccattgtaacttccccctgtgtttgtggatgggtgctatgaagtaaagcttagcataacccaacaacctagggcttttcttttcctttttaaaatgtaatccatttcgtgaaatattcaagtccatagtgaacaaagaggagctttttgccctctttgttatgtgtcttttatggtggtgtctctcatagttgttatttgtcttargtattctttctggccttagtaatatggataatttagcctttcaattaatgtttttttataaatgtctgcctttgaaaatactgaaatgtg

SEQ ID NO: 282837 - DNA, 436 bp, Homo sapiens
catggccccttctaggggtgaagctgctacccaacttaaatgactgggtcatgcaggggtacccgagcctggtttctttgcctcagcacagagtcattcttaagggacatccagcttcaaagctccctgtggaatcagctgaggtctttgttatgactttctctgaccaaactctccctctgctaaaccatgtttttctacaatatktcttcttacactttaagcatgagaatgacagcatcggtttcctgaggagtcgaatgtacagaagtgactatgctagtactgaccgccttatgggtcataaacagcctattttgactgcaaaacaaaatagctttaatttaaaatctattatgcgctcgttcctcattgcttcttcagctcatattgggagctcagtgcatggttattgaatgattattgaataaatgat

SEQ ID NO: 282838 - DNA, 436 bp, Homo sapiens
catggccccttctaggggtgaagctgctacccaacttaaatgactgggtcatgcaggggtacccgagcctggtttctttgcctcagcacagagtcattcttaagggacatccagcttcaaagctccctgtggaatcagctgaggtctttgttatgactttctctgaccaaactctccctctgctaaaccatgtttttctacaatatgtcttcttacactttaagcatgagaatgacagcatcggtttcctgaggagtcgaatgtacagaagtgactatgctagtactgaccgccttatgggtcataaacagcctattttgactgcaaaacaaaatagctttaatttaaaatctattatgckctcgttcctcattgcttcttcagctcatattgggagctcagtgcatggttattgaatgattattgaataaatgat

SEQ ID NO: 282839 - DNA, 1129 bp, Homo sapiens
agttttttccggaaaatgtttaaattttaatagtttttgcttacatttaatgtaaattacatgtttgcattcatgcctgtcatttcactatttggcttctgttgattccctctgattttaattcctcagtttctccttttctgccttcttttaaatgctttcaataattattagtattatattttaatccatctattaattttctactatatctttgagtaaaattttcattgagttttytagtgtttacattatatatttaatttttcacagtttacttataatcaatacttcactattccagatagaatacttatcaccatataggtgactttaccctctcttcttacgttatggttgtcacatgtatttcacctgcatgcattgaaaaccccatcagacaatattatcttcttctggacaaagtttagacttttggtattatcacgcatgactcaggttctgcttgtttttttttctcaaactattgttctctctctttcttccaatcaggtagtttaaattgttctaccttcagtgggtaattagcgatattatgaaatcattttctgagacaaattgtacttgcawtaatcacaggaaatagtatatgtagcaaaatattccactttacagatgaataccaaaaatatcatgatgcaaacatataaaaataccaatggtatcaagaaaatctgggttcaaattccaaccctgtcatttaatacctcttaatttatgttacattattagtaagatagttttccctcccacaatacagtaagtatcacattctcaggaagtgggaaaataatatccaacaagatggcaatgtggtataaatctctggaatactatttatagaccaccttagctctttttggtactgtagatgttgcaagatgagtaactacccttaagcatttggggaaatcaggatgtctttcatttttttgtccttggttcaatttattcctgcaagctacctctccacagcaacccctctctacagcgacccacawccccatttttctagcaaatttccttgatagataaagcttctttcttacatctattgagaacatagggatgtagtcaagcccattcatgcaatgttggaagcaaagaa

SEQ ID NO: 282840 - DNA, 627 bp, Homo sapiens
aaaatgcttatgtttctaacttgccattcatgtatgtatgtcatctgagtctacccaattaatatattccgagtatcctaggatgtgtcaatcggaaatcactaaagggactacaggcataaaaaggatagtaaaacataaattaccaaacagactcaagaagaaatagaaaaatatgtacaattctatgattactaacattaattcgtaactaaaaacattttcataaattcaaattttggatatggaatgcttcactggataattctatgaaacatttaggaaagagataatacatccttatgcatcattttcagaaagtagagatgcagcagatggagaaagacatatcccaaatcatctaatgagcccattattatgctcttaacaaaatcaaaaaacaaactacaagatacctctgtgtagtatgaaaaaaatttttttaactacaagaaaaaaatcaacaaatatgtgtcataaccatatatctaaaaattcttacccaaacgttatcacattgagcaatgtgataacaaatgyataacaaatttataaaacaaagcaatgtataacaaatttaacttcttctgaatggtcaatagagtgtcttagtccgttttatgttac

SEQ ID NO: 282841 - DNA, 520 bp, Homo sapiens
tgtcacctaaaactttgcttaaataaatgtgttatgtttttctcctgttaattcatcttcagttataggagtgtcagccatgaaccttgagatgagtgaaaaaaaggtattatttttctctcctatagccatataaataattttaaattttctaacagccatatttttaaaaagtaaaaaaaaaaaaaagtaaattttcactagcatattgtatttaactcaaagtatccatatattaaatgttacggaaacaggtcagggtcaccagtctcattgtctaagatgttatccaaactcgtcaactcatgaccaagagaattaaggagggtggacacaaagggtgaggtttgagagaaagtttaataagcaaaaggaaaaagctcttcacagyggagaggggagcccaactgggtgccatttttaccctggaattcaaaagcttttataagaaactcctttcatctctgtagctgttagagtaatttctcttacctgaaaagctgtctgcacaactccccct

SEQ ID NO: 282842 - DNA, 460 bp, Homo sapiens
cagctgttaggtgagactgtgtgtagagagatggggaacgcaagggcagaagccagaaggcccgtcagaggatcctgcacatcccagatgaaaggcgaygggcattttgaccaggctagaaagagtagaggtgatgagcagtgggatgtattagaaaggagacccaaggaattgacttcaaattccagttcattagtgaaaggtgtttggtctgagccactggcagaatgaaataaagaagactataacagaagccagtttaagggaaagcagggaattcagtttgggccataagtttaggaactaaattaaatatcatgtggagatataactttggggttagatttgtgagcccggacaaaaacaaaacaaaaatgttcggtattcagcaaacttgagattacctatttaccaagcaaattggggtttcatattaaccagaaattttcacagggatgta

SEQ ID NO: 282843 - DNA, 1073 bp, Homo sapiens
gagtttgtgacaagttgaaaagtcattgatcagaatcatttttctttagagaagcctatggttattcttatataaagtgcagtattatggaagaaaactatattttaaagtcaaatagaatctgattcaattgtagattaatgacccagagggggtatgtctttagatracttctttagtttctatgagtttattttttccatctgtagcttgttgattatgaggaagattcataaagctatccattttaggttaagtttgcacagtggtatagaacctagtatacatgcaataactatttttcccacaccctaagaagtaaggaatgagtcaatgactaagagattttattgagcagctattatttccatctgatttctttgttcatctctttattcaatcatctgatgtaatcaattggttacagagtccaaagatgagtaaatgccaaaaggagaacacagtccaatggaagaatcagacaattacaatgttttgggataaggtgtgtaatgtgctagtagagcatgatatgawgagtttgtgacaagttgaaaagtcattgatcagaatcatttttctttagagaagcctatggttattcttatataaagtgcagtattatggaagaaaactatattttaaagtcaaatagaatctgattcaattgtagattaatgacccagagggggtatgtctttagataacttctttwgtttctatgagtttattttttccatctgtagcttgttgattatgaggaagattcataaagctatccattttaggttaagtttgcacagtggtatagaacctagtatacatgcaataactatttttcccacaccctaagaagtaaggaatgagtcaatgactaagagattttattgagcagctattatttccatctgatttctttgttcatctctttattcaatcatctgatgtaatcaattggttacagagtccaaagatgagtaaatgccaaaaggagaacacagtccaatggaagaatcagacaattacaatgttttgggataaggtgtgtaatgtgctagtagagcatgatatga

SEQ ID NO: 282844 - DNA, 556 bp, Homo sapiens
ttatgaaactatgggcattttgtaataattttgcattatctggctgatgttgaaattctcagtaagagcgtgaaatttagccttgttactgccccgtaagggtagaagaagttcaggctccccacatagtctccacagatagcacaaaaggggactaattacctccactggagttaaagattttagctattgacattgatttggctttctctggaactactctagtgggaatttggaggcatctcactatagtctggtgacagtagaaatttaggctcctgcttggcctttgctgatatgagtgtgtggggtcaccaatgattctgtgtgtttggcagaattatagcagttattgtctaaagtcttctgtctgcagtgctgcatgtttcctagtcctttggctagagagatcaggcttcttttgtggctttgcctgcatacatgggaatttctaggtcgccatcttcttcagcgttgtgtcagggatatgtaaggcaaaaaggaaattcagagacsttgtcactattgtttcttagctcctgagtttcccatatca

SEQ ID NO: 282845 - DNA, 546 bp, Homo sapiens
tatatttatgaagtgttgtagtctgtgcctgccgctataataaaatatccaagaatggtaatttataaaagacagaaatttatttcttctagttctgggagctgggaactttaagatcaagctgccagctggtttggtgtctgctgagattctggtctctgcttccaggaaggcctcttgctgctgaaccctcacaagaggaaaacctctggcagaagacggaaaggcaaaaargtctacctatgtctctccaggtattttatcaagtcacgaatcctatatatgagtgaggagcccttgtggcctaattgcctccttaaaagctcacctcttaatactctaacattggggattaagtctcaacattaattttagaagggacaaaaatattcaaagtatagcattgaaggaaatcaaatttgtaattacaaaacttccctaaagaagctttcctacctctatgctttcactggagtagtctaccaaacatttatgaaaaattacaccaattttacagtctctgatttaaataaaatagaatagaat

SEQ ID NO: 282846 - DNA, 514 bp, Homo sapiens
ttctgtgaagctgttgttatcttatacaaagaccaaatgaatctaatacaaaactctaaaatatgtaattcaaaaaatagaccagtagtcttcatatagacagtcacaaaaatttataacaaaatattaacatttatttttataatagktttcacaaatttgttgcccagatctcatgatcatttattaatttatttaatacagatttattgattatttactatataagcaattttcatgattggctaatggggtaaataaagtgatatgggttcaacagtttgtatctttagggtcagagctgttccatcacacaaagagttggaatccgattcaaagctaaaaaaagtgatcaaaagcctttttacaggttgagaaccaaatgagaaattcctttttgtctggtagataagtgacttttaaaataggttaacattagtattttggttatctatttatgtacaacccactacctcaaaatgtattgatataaacaacaattgtattatgcctc

SEQ ID NO: 282847 - DNA, 417 bp, Homo sapiens
tgcctcttccactttctccttgctttctttatggctctggaaggcagaatgggaatttgagtttatgaagaactgtggtgccaaggctgtggatatagtagtttgcatacatcatatttatttctccattcatcctggggagaaaaatcatctcctgtttcaaaaggaagaaattaaaattcataggaattaagcaatatgttagaggtmatagagattgtaagaagctgagtcaggatattaaaccaggtactctaggctccagtgccagtacattttctaagaacccatatgtaaaactttttccagggtaattgccttttctaatacatgcattttttttcctctccctctttttctcgtctccccagtgatacctgtgttcattaggatgctgcacctttagctgcaggtgac

SEQ ID NO: 282848 - DNA, 595 bp, Homo sapiens
tttatgttttttcatagtctagctaaaggtttgttgattttgtttatcttttcaaaaaataactttttgttttgttgatatttatatattgctaattttgtctctttctggtttacttttcttctgatctttattattctttccttctattatctcaattttggcttgttcctgctttcctaattcatttacctacaatgttaagttttttgtttgaaatctgtctcctttttggatataggcattcattgttaaaactttcattactgcttttgctgtatctcataagttttggtgatgttgtgtttccatttttatttgtttctagaattttttttaaaattttcttctgaatttatttatagacccattggtgattctggaacacattgtttaatttttatgtattagcacaggtttcaaaattcctcttgttattgatttttaattttattctcttgtggtctgagaagacgcttgatatgrttttgagatttttaaatttgttgagacttgttttgtggcctaacatatagtctgtcctagataatgttccatgtgctgatgagaggaatatgtattttgcagaatgtgt

SEQ ID NO: 282849 - DNA, 595 bp, Homo sapiens
tcaactagaacatttttatttcttacagataatagattccttctttcacatcatgtcaaggaagttttgcctctgaacaagtgagttttcaagccacttactgccacacaaattaatatatgaaatccagaatctctgctaagtgactccatatcaatgaatttgtcctggactaatattgtgccccattctcattggggtaacacacttgtaatctatactcacacctaattcctaaatttacattggggtaaatacacacacaagcacacatacacaaatatataatacaaatattacatacatacatatataataccctctgaagatgttctgtgaggctttgccatcagttgtgcttgtgggraatctgtgagcaattcagaaacgtacatcattttattgattctcccttcctccctgactcgctcactttttgctatcactttcctagggttgtattcacaaatacagagtgaacatgcaagttttcgccatgggctccatttctaggaaacatgggttaatacaatgagcaatgggtattcaaaatattccattagtaaacaagtaaataaataaatcagtggatcta

SEQ ID NO: 282850 - DNA, 511 bp, Homo sapiens
cagctttatttatgtacaagctgagtattttatatgatatttatgatgattaattgtagttgtcaatttgactagactaagagatacccagacggctgggcaaacattatttcagggtatgtctggaaaggagttgctggaaaagattgggacttcaatcagtggactgagggagattcacctttatctaataygggcaggcatcaaccaatccattggaggcctggatagatcaaaagggcagaaaggtaaatttgctctcttttctggagctggaaaatctatcttctcctgcccttagacagcagatgtacttcaagttctccagtctttggactctgggatgtgcaccaatggccctctgggttcgcaggcctctggcttctaactgaaagttatgttacctggttttcaggccttcagacttagactaagccatgctactagctttcctggttctccaccttataggaggcacactgtgggacttctcagcctacataattgtgtg

SEQ ID NO: 282851 - DNA, 511 bp, Homo sapiens
cagctttatttatgtacaagctgagtattttatatgatatttatgatgattaattgtagttgtcaatttgactagactaagagatacccagacggctgggcaaacattatttcagggtatgtctggaaaggagttgctggaaaagattgggacttcaatcagtggactgagggagattcacctttatctaatacgggcaggcatcaaccaatccattggaggcctggatagatcaaaagggcagaaaggtaaatttgctctcttttctggagctggraaatctatcttctcctgcccttagacagcagatgtacttcaagttctccagtctttggactctgggatgtgcaccaatggccctctgggttcgcaggcctctggcttctaactgaaagttatgttacctggttttcaggccttcagacttagactaagccatgctactagctttcctggttctccaccttataggaggcacactgtgggacttctcagcctacataattgtgtg

SEQ ID NO: 282852 - DNA, 583 bp, Homo sapiens
aattcttcattttgttgatgttttaaattgatgttctagtttctatattatttatttctgctctgagctttaatattytcttcatcgtacaaagtttgggctttttttttcttatgtttgtagattttgtgtggtgcatcattaggttgtttattagaaaattttcttttttaaaatgtatttgtttctccagctcttctccctgcacactcctgtaatgtaaatacttgtttgtttaattaatagtgttccataagtcccacaggcttttaaaattctttttaaatttaatttggttctctgactagattatttttaaagacctgtcttcaacttcagaattttttttcttctgcttgatctagtctgctgcgaaagttctctgttgtattttgtattttattcattgaactcttcatctccaaggtttgtttggttcttttatatgacatctatctttcttgaatttcttattcagattatgaattgttttcctggtttcattaaattgcctgtgttgtcttatatctcactgaggttccttgagatcaccatttttaattccttttcagatgttttagaa

SEQ ID NO: 282853 - DNA, 555 bp, Homo sapiens
ctgtggtccatggaccaactggcaacatcagcatcacctgagagctttttttggaaatgcagagtctcaggtcccaccacatacatatttttaacaagatccccaggtgatttgggtgtgcagtcagtttgatgaagcacctgaatcgggtatacgctgcttctcagtcctgattgcatattagattgcttgagaacagtaaaagacaaaacacaaataacagtgatggcagccttaccccacgccattgaatcagatctctgatgaggcacygacgtttatattttttaaaagctgcccagattattctgattcacagtataagttgaggaccactgtggggctggaggtcctcatttctggaatatccagacttcaatattgaggttgagaattctttttgcacaggttcttctttttatttccacagtagtgcagaaactgggccaggaggggggctagtgtacggaatttatttcagagaaggcagaatattatatagcaaaggagaccacagtgcattttttttctgactttacctcttacagatactaa

SEQ ID NO: 282854 - DNA, 623 bp, Homo sapiens
cagtggggggcatcccagtggacagtgttgtgatgagcaaggggcccagaagtaggaagacttaaggagtcctaggccttaaggaagactcaacccaaacctggctacctctttaggcagcttgagtcttggcctctcctaccagctcctgaagggtagcttcatgttacatctggctgcagagaccctcctttttagaagcaggcagggagtggtgcccaggctctcaggrcctcctcttgtctgggagactgcagcctccccacacgacacagcccagcccctttgttcttgagtgcctgctgctcacgtggtcttaataaacaaaatctagaacgtgctcatcctttaaaaaaatctgttagcctggttaacgtgtatataatatgtataaatatatgtatatacactaattatatataaattatattttgtgtcagttatatttgcaatcacacacacacacatgcacgcacacgcacatgcacatgcacatgcacattcacattgtaattcctatttaaagggaaaaacgagccagttttttaaagggaaaaaacaagcaaaaggtgtagggagagggagacacccatctctgcccccatccgctgattctcttccct

SEQ ID NO: 282855 - DNA, 623 bp, Homo sapiens
cagtggggggcatcccagtggacagtgttgtgatgagcaaggggcccagaagtaggaagacttaaggagtcctaggccttaaggaagactcaacccaaacctggctacctctttaggcagcttgagtcttggcctctcctaccagctcctgaagggtagcttcatgttacatctggctgcagagaccctcctttttagaagcaggcagggagtggtgcccaggctctcaggacctcctcttgtctgggagactgcagcctccccacacgacacagcccagcccctttgttcttgagtgcctgctgctcacgtggtcttaataaacaaaatctagaacgtgctcatcctttaaaaaaatctgttagcctggttaacgtgtatataatatgtataaatatatgtatatacactaattatatataaattatattttgtgtcagttatatttgcaatcacacacacacacatgcacrcacacgcacatgcacatgcacatgcacattcacattgtaattcctatttaaagggaaaaacgagccagttttttaaagggaaaaaacaagcaaaaggtgtagggagagggagacacccatctctgcccccatccgctgattctcttccct

SEQ ID NO: 282856 - DNA, 623 bp, Homo sapiens
cagtggggggcatcccagtggacagtgttgtgatgagcaaggggcccagaagtaggaagacttaaggagtcctaggccttaaggaagactcaacccaaacctggctacctctttaggcagcttgagtcttggcctctcctaccagctcctgaagggtagcttcatgttacatctggctgcagagaccctcctttttagaagcaggcagggagtggtgcccaggctctcaggacctcctcttgtctgggagactgcagcctccccacacgacacagcccagcccctttgttcttgagtgcctgctgctcacgtggtcttaataaacaaaatctagaacgtgctcatcctttaaaaaaatctgttagcctggttaacgtgtatataatatgtataaatatatgtatatacactaattatatataaattatattttgtgtcagttatatttgcaatcacacacacacacatgcacgcacaygcacatgcacatgcacatgcacattcacattgtaattcctatttaaagggaaaaacgagccagttttttaaagggaaaaaacaagcaaaaggtgtagggagagggagacacccatctctgcccccatccgctgattctcttccct

SEQ ID NO: 282857 - DNA, 1134 bp, Homo sapiens
gcaaaccttctcgaaaagtaatttgacatgctgtgcttccagtttaatatctaagaactctttgcctaactcaaggtcatgaagactttttattatgttgtgctaaaagatttagcttaaccttctacactttagcctaggatccattttgagttaaattctatgtaccgtgtgcggtaagaatttaaatttaccttttttgcatgtggatatccaattgtcstagcactattcattgaaaagactattgaattgaattgcttttgaattgctttggtacctctgtagagaaatcaattgacaataatgtaatggtttatttctagactctcaattctgtaccattatctatgcttacaccactgtctatccttacaccagtaacacactgatttgaatagtatagctttgtagtaagttttgaaactaagaaatataagacccctaatctttttttcttccctttccgaattgttttgtttattctaggtcatctacatttctatactgttagaaacagcttgacaattttttttaaaaagatgcatactaaaattgtwaatgatgctgagacatgcgaagagtgaagtcggatcccttcctcacgtatcatatatcataattaactagaaaatgatcatagatgtaaaagctatgattatgaaactccagaaggaaatacaggaatgagtctttctgactttggattaggcaaagccttagatgtgacaacaaaagtataagtggtaaagtaaaaatagagaaaattcatgaaaattaaaaaactttcctgcttcaaaggatatcatcaagaaaatgaaaaggcaatccagagaacaggagaagatattttcaaatcataaatctagtaagcaacttgtatctagaatatataaaggacttttgccattaatwaaaagataactatccagttaaagaatggacagaggatctgactggacctttccttaaaaaagacatacgttgaaaaacacaccaaagatgctcaaaaccattagctagcagggaaatgcaaattaaaactacactgcgatatcactttatatctcttaggatggctatcattaaaaaaaaacagacaataacaagtgttagggaggatgtagagaaatg

SEQ ID NO: 282858 - DNA, 563 bp, Homo sapiens
tattgtgtgatacattctgcctccccacaacaaaatcaagtgatttcctttttttacactcttaagaatcaccaatcaatacagcctgtgggcaacccaccttcatcatctgaggcatcatctggattaagcatgttatgattctgaatgaaatacaaccatacaattcttggtttgactctgtggcgacaatgcacataaacatcttcaggmaagtccaaccatcttctggcatcactgaaaatccacctaagagcatgggctttggaagcagacacgctcaggttcaaaccaaggctccaacttagtattgcactatctgtgaaaacccctttgagcttcagtttgtgcatctgcaaaataggtcactaatatctatttcacagagttactgacattattcagtgaattaaagtgttccctacagcccttagcctatagtaagtactcaacagaccacagcaattaattaaagcctccattaatttactacttttctttaagatgaggtaaaactgctgttagctctagtttctacatctgcagccaagctcatgaagaga

SEQ ID NO: 282859 - DNA, 560 bp, Homo sapiens
gagtgtgttcacttcggcccttatgccctgcccaacccaatgatgagacagcagctgtagcctgcctgccacagctgttttaaataagaataataggaataaactcagccgtggctcttcaagttacttcccgctaattatggcatatatttacatctacaaaatagaagatttttaaaaacaccaccaagggcccctttattgtgcagattggcacccctatttgaatttcataaacatttggcacttcaaagaatcttaaaagcttgctctaattatgctatgcactggytgaaaggctgcccgtctgcactgcaaattcctacaaataccagcatttagtttttcaaaaattcaattaatatcacccacacaacttcaggtgaccactagtggcaacttcacatagtggctaggatgaaagagtcaggtctcagctccaactacaaagcagctacacgggccagttctttccaatagaggcaagtaatgaattctgggtgcccagctgagctggccccaaacctttctcattcatcaggtgtgtgaacactggccca

SEQ ID NO: 282860 - DNA, 523 bp, Homo sapiens
accgcttacaaactacacatttgccttgggttacaggggtcagaaagagatgagcaagtaaaaatgtttaaggctgcatagtgaatacaacactgctatgttagatagaagttatttctgttctaactatttctagatgaaaaagaaatatgaatgaagttttcttagtggctcattctctatgaggcaataaagatacrccacataatcactttcttaatcctctaatgagtagtttgactagccttaccactgtaactatgcctctgatcatttttctttctaatccatcctctacacagctacctaaaacacagttctcagttataagaccttccaaggctcctactgcccacatctaaaggaataaactgctttagtatggtgttcagtgttgtccccaccatctggcccctaactatttttcatgacacaccaccaccacgaccaccaccacaattcattttaccaccatcaaaatacctaccaagcttccagttccctgaacccaccctgccatgct

SEQ ID NO: 282861 - DNA, 580 bp, Homo sapiens
ggcttgctttttcttcctttaaaaataataggttaagaaagtaaattggccaggcatggtggctcacgcctgtaatcccagcactttgggaggccaaggcgggtggatcacctgaggtcaggagttcaagacmagcctggccaacatggcgaaaccccatctctaccaaaaatacaaaaattagctgggcacagtggcaggtgcctgtaatcccagctactcgggaggctgaggcaggagaatcgcttgaacccgacaggcagaggttgcagtgagccgagactgtgccactgcactccagcctgtgagacagagcgagactccatctcaaaaaaaaaaaaaaaaagcaaattaagtaactatgtagacagtattgtttacactgaatgatcataatcccaagaattttaaaatacaaaacaattttaaataagtataggataacatcatatatcctggtttctaagatatgactaatttgataatgattagagtgaaagcagaaatattaaatgtatatttaaaaatttgttataacctggcaacatgatacaaatccgtaagatttcactttcatatt

SEQ ID NO: 282862 - DNA, 580 bp, Homo sapiens
ggcttgctttttcttcctttaaaaataataggttaagaaagtaaattggccaggcatggtggctcacgcctgtaatcccagcactttgggaggccaaggcgggtggatcacctgaggtcaggagttcaagaccagcctggccaacatggcgaaaccccatctctaccaaaaatacaaaaattagctgggcacagtggcaggtgcctgtaatcccagctactcgggaggctgaggcaggagaatcrcttgaacccgacaggcagaggttgcagtgagccgagactgtgccactgcactccagcctgtgagacagagcgagactccatctcaaaaaaaaaaaaaaaaagcaaattaagtaactatgtagacagtattgtttacactgaatgatcataatcccaagaattttaaaatacaaaacaattttaaataagtataggataacatcatatatcctggtttctaagatatgactaatttgataatgattagagtgaaagcagaaatattaaatgtatatttaaaaatttgttataacctggcaacatgatacaaatccgtaagatttcactttcatatt

SEQ ID NO: 282863 - DNA, 580 bp, Homo sapiens
ggcttgctttttcttcctttaaaaataataggttaagaaagtaaattggccaggcatggtggctcacgcctgtaatcccagcactttgggaggccaaggcgggtggatcacctgaggtcaggagttcaagaccagcctggccaacatggcgaaaccccatctctaccaaaaatacaaaaattagctgggcacagtggcaggtgcctgtaatcccagctactcgggaggctgaggcaggagaatcgcttgaacccgacaggcagaggttgcagtgagccgagactgtgccactgcactccagcctgtgagacagagcgagactccatctcaaaaaaaaaaaaaaaaagcaaattaagtaactatgtagacagtattgtttacactgaatgatcataatcccaagaattttaaaatacaaaacaattttaaatargtataggataacatcatatatcctggtttctaagatatgactaatttgataatgattagagtgaaagcagaaatattaaatgtatatttaaaaatttgttataacctggcaacatgatacaaatccgtaagatttcactttcatatt

SEQ ID NO: 282864 - DNA, 581 bp, Homo sapiens
tattcttttatgtgatggtcagtcaggtgcrgccacagagcacaggagaagttcaggaaaaaaatttattacactcaaaggtccccaagacaggaagcatggcaggccatcaagggccacatggaaagatactagggtggtcaggaggcagaagacaagaggccagcttagaccagagcctttcctgggctttccatgggcagggcaggggaaacagaatgaccaattaaggattgactagttcgaataactccagctggctctaagcttcagaggtggtccctagttgtctggtaccattccagggaatgattagggcagaggaacactgtatcctggggtgcctggaccacatagaggaggtctggttctggactggttggtttgcatatgaaaagcaggctcctggactatcctctgttagacagaatcatgttcctactctaagaattggctagacccagaaaggccagtcttttcccagcaagaaaggctttttaaaaaaaatcagaacataataatatacagaacatatatatgaaaatacaccttagctcccatgtaaacacaccagagcatct

SEQ ID NO: 282865 - DNA, 581 bp, Homo sapiens
tattcttttatgtgatggtcagtcaggtgcggccacagagcacaggagaagttcaggaaaaaaatttattacactcaaaggtccccaagacaggaagcatggcaggccatcaagggccacatggaaagatactagggtggtcaggaggcagaagacaagaggccagcttagaccagagcctttcctgggctttccatgggcagggcaggggaaacagartgaccaattaaggattgactagttcgaataactccagctggctctaagcttcagaggtggtccctagttgtctggtaccattccagggaatgattagggcagaggaacactgtatcctggggtgcctggaccacatagaggaggtctggttctggactggttggtttgcatatgaaaagcaggctcctggactatcctctgttagacagaatcatgttcctactctaagaattggctagacccagaaaggccagtcttttcccagcaagaaaggctttttaaaaaaaatcagaacataataatatacagaacatatatatgaaaatacaccttagctcccatgtaaacacaccagagcatct

SEQ ID NO: 282866 - DNA, 570 bp, Homo sapiens
agttcaggaaaaaaatttattacactcaaaggtccccaagacaggaagcatggcaggccatcaagggccacatggaaagatactagggtggtcaggaggcagaagacaagaggccagcttagaccagagcctttcctgggctttccatgggcagggcaggggaaacagaatgaccaattaaggattgactagttcgaataactccagctggctctaagcttcagaggtggtccctagttgtctggtaccattccagggaatgattagggcagaggaacactgtatcctggggtgcctggaccacatagaggaggtctggttctggactggttggtttgcatatgaaaagcaggctcctggactatcctctgttagacagaatcatkttcctactctaagaattggctagacccagaaaggccagtcttttcccagcaagaaaggctttttaaaaaaaatcagaacataataatatacagaacatatatatgaaaatacaccttagctcccatgtaaacacaccagagcatctcataatgacaggacttcaaagagaaactaccaaggctg

SEQ ID NO: 282867 - DNA, 553 bp, Homo sapiens
ggtggtttatttaataaaataattgtataagccagattgaagcacgtggcccataggaaaagcagtattctgctccttcatggctcctcaccttccagttctactttttggggaccattgcttgcagccttttcagccatttctttgtattaatatatttacctccacatttctaaataacatgcttatattgtrtatctcattctattaattttaggcatcatctgttgacttcttaacatagaagactacgatttagttctctaaatttagtatatgcccccctccgtcttcctttcagtccccctatgtgcttttctctaaatttagtatatgcccccctccgtcttcctttcagtcaccctatgtgcttatatcacattaaaaaaaattagcattcagttaattttacaaacccatataaattttgcacacagcgtggttaatgttatatattggaaccatttccttaattgtaaaacgtttttttctggggtgtatggttgtcttcttaaaaaattgttcagttttacatagctacaccaattcaccc

SEQ ID NO: 282868 - DNA, 553 bp, Homo sapiens
ggtggtttatttaataaaataattgtataagccagattgaagcacgtggcccataggaaaagcagtattctgctccttcatggctcctcaccttccagttctactttttggggaccattgcttgcagccttttcagccatttctttgtattaatatatttacctccacatttctaaataacatgcttatattgtatatctcattctattaattttaggcatcatctgttgacttcttaacatagaagactacgatttagttctctaaatttagtatatgcccccctccgtcttcctttcagtccccctatgtgcttttctctaaatttagtatatgcccccctccgtcttcctttcagtcmccctatgtgcttatatcacattaaaaaaaattagcattcagttaattttacaaacccatataaattttgcacacagcgtggttaatgttatatattggaaccatttccttaattgtaaaacgtttttttctggggtgtatggttgtcttcttaaaaaattgttcagttttacatagctacaccaattcaccc

SEQ ID NO: 282869 - DNA, 629 bp, Homo sapiens
ttcatgtgatatgtagaagtggtgttgactgtctttattatccccatcttctctgtaggaatttatgagaacatatatttatttgggaaagatagaattctaagtatcgaggtaataagcttgctctgtacagtcactctgtaggttctatgaagatgagcactttgttgttagctcatggattcctggtgtctagcacagtgcctggcatgtatgatggatgataggtgtgctggttcattctattaaaatctgtaaaacaggcagagtgagtaccttttccatcgttgaccttgagatgttgataatcagttgtgcctctactgagtgcctaggggactcttttggagaagtcaaaattagcctccgttttggatattgaggaaatcgagtcttgggccttgcatatgtgagtcattgacattcgccctttttctgctcatatcttgatcccaaatgccagttttctttcccaaatgccagttttctyttatgagtatttgttttgtgccccatagaatagaattgccctttttttgttttatgtgccaccttcacttttggggaaactaccactgctggagaagaaacgagatttatttgggaaggagagaagcaaataaataatc

SEQ ID NO: 282870 - DNA, 604 bp, Homo sapiens
cagttttaacttggaatgtgagcagacttggactgctagataaagaaggcggatggagtttctcagtgaaccctatttggttctgaggcccatggagcctctgcatccccaggtttcttggtctgtgtcacattaagttggtattaatgcctattcagtgggagaggcatgcccgaagagtctggagtataacgtctagaccagtggtctcaaatttggctgtgtattggaattcactgaagaagctttaaaaattatgatgtttggcctctctcagggattccagtttaatccagattatgcccaggcctttgtgatgtttaaatgatccttgggtattctgatgtagcctgggttgagaaccattggtttggacacactcctttgtggtccagttaccatgtcttatcccaaagcaaggggaagaaaagggttcactttgtgagtgaaatgacttaaygtggtttagagttttttgtttgttttttcatgaatgagtgacctgtgttctttttcatcagccatgtatggccttgtagatcttctctgtgatctgtaccccagtcctaactttgcactgacagtgacatattgagcagccctt

SEQ ID NO: 282871 - DNA, 611 bp, Homo sapiens
agtgaacttctcagtacttaaagacttttctgatgagatccacgatgatattgacaaaatgtaatttgatattgtgttagagcaatggattttaatgtaacagagttggaaaaattcattgatatggtttcagactccatattccagcctaccattaagaaactactactgcttgttgacttttgatatagtatcaaaggaaaatgaccactgttatctgaggagtctgtcacataatgtaaagcagcactacctgtctcactaattttttaaaaatacaggcatgtttaatttttttaaaaagatgtatatcaacatgtaattagcttattatttcttaaaatgaatgaatattttaaartttgctcagttttaatttccagtacagaaaatatagatataacctgtagtaagcaaaaggtctttgaggtcctcaataatttatttggtcctgtttgcagtatcgtacatgatcaccaaactgctgctagaatgctcacacctgttacggcaaattcaaaacccaggaaaggcgtctcctgggaatttacttgaggtcagggtcaggctgtctggtacatcaataatttatttacgagtgtaaaggggtc

SEQ ID NO: 282872 - DNA, 558 bp, Homo sapiens
tctacctcttttttgctaaccattgtatgatgcgcctggtttaagggacagttccctaatggttcctattaagctttggagaaagagtagtggtgtggtgggtgtcacatacctggagctttagagccttctgagaagataattcggtaaaaatacatcattttttgattggtgttgaaggaagttgtttttcgttgcacagattaaatttaaattgttcatgagagctaaagagcttgaaagcatttctttgttttctratctttaaaagtagagaagagtgagctggctatataatatagaactttctcggctttactttaccaaagcagtctgatttaaaaacttaaagccaacatatttcacatttatagtttaagattataaaaactaaatatgcatttaatttcataaatttatgtacttaatttcataaaattatgttttttggagaaaaatactgaggctataaaatcttggcttgtaagtaaataaaattattttaaatgtcagccagttttgatgatgagagctataattctaatgagtggcaaatat

SEQ ID NO: 282873 - DNA, 621 bp, Homo sapiens
caagcgccctcctcgcttctgctgagctgtggctgatgccctggccatggaccccctcagccgctgtstgtgcgcctctcaacacgcacggctgactccagcggcacgcctgctcctcggcccttgtgtctactgagtacgactgagaatgcgtctcctctcgtcagtaatcgctttcatcgtgccactactttacagaaagtctttccggcatatgcagtggaaggccacggacctcctcatcctgctctttagggtccatccatcttcactgtgcaaagcaatggtccttctgggtgacttagacaaagtcaaaagagctgggttccagcttgccatgttctcatcctcatctgctgctatttctgtctttaagcagtttatgcaccatccctaccagtttttaaattgaatctgcataagatttgtgaaacggagcaattgggtaatggtatccggcatcttctaagcacaaaataaaagtgcttggaatggaagacttggcatctttctcctttcctctttcagagggtgcaatcttccaactcggagagatggagagatttgctgtcactgtcctctcggagcttttcctcttcaaaacactccacaagcagggca

SEQ ID NO: 282874 - DNA, 621 bp, Homo sapiens
caagcgccctcctcgcttctgctgagctgtggctgatgccctggccatggaccccctcagccgctgtctgtgcgcctctcaacacgcacggctgactccagcggcacgcctgctcctcggcccttgtgtctastgagtacgactgagaatgcgtctcctctcgtcagtaatcgctttcatcgtgccactactttacagaaagtctttccggcatatgcagtggaaggccacggacctcctcatcctgctctttagggtccatccatcttcactgtgcaaagcaatggtccttctgggtgacttagacaaagtcaaaagagctgggttccagcttgccatgttctcatcctcatctgctgctatttctgtctttaagcagtttatgcaccatccctaccagtttttaaattgaatctgcataagatttgtgaaacggagcaattgggtaatggtatccggcatcttctaagcacaaaataaaagtgcttggaatggaagacttggcatctttctcctttcctctttcagagggtgcaatcttccaactcggagagatggagagatttgctgtcactgtcctctcggagcttttcctcttcaaaacactccacaagcagggca

SEQ ID NO: 282875 - DNA, 621 bp, Homo sapiens
caagcgccctcctcgcttctgctgagctgtggctgatgccctggccatggaccccctcagccgctgtctgtgcgcctctcaacacgcacggctgactccagcggcacgcctgctcctcggcccttgtgtctactgagtacgactgagaatgcgtctcctctcgtcagtaatcgctttcatcgtgccactactttacagaaagtctttccggcatatgcagtggaaggccacggacctcctcatcctgctctttagggtccatccatcttcacygtgcaaagcaatggtccttctgggtgacttagacaaagtcaaaagagctgggttccagcttgccatgttctcatcctcatctgctgctatttctgtctttaagcagtttatgcaccatccctaccagtttttaaattgaatctgcataagatttgtgaaacggagcaattgggtaatggtatccggcatcttctaagcacaaaataaaagtgcttggaatggaagacttggcatctttctcctttcctctttcagagggtgcaatcttccaactcggagagatggagagatttgctgtcactgtcctctcggagcttttcctcttcaaaacactccacaagcagggca

SEQ ID NO: 282876 - DNA, 621 bp, Homo sapiens
caagcgccctcctcgcttctgctgagctgtggctgatgccctggccatggaccccctcagccgctgtctgtgcgcctctcaacacgcacggctgactccagcggcacgcctgctcctcggcccttgtgtctactgagtacgactgagaatgcgtctcctctcgtcagtaatcgctttcatcgtgccactactttacagaaagtctttccggcatatgcagtggaaggccacggacctcctcatcctgctctttagggtccatccatcttcactgtgcaaagcaatggtccttctgggtgacttagacaaagtcaaaagagctgggttccagcttgccatgttctcatcctcatctgctgctatttctgtctttaagcagtttatgcaccatccctaccagtttttaaattgaatctgcataasatttgtgaaacggagcaattgggtaatggtatccggcatcttctaagcacaaaataaaagtgcttggaatggaagacttggcatctttctcctttcctctttcagagggtgcaatcttccaactcggagagatggagagatttgctgtcactgtcctctcggagcttttcctcttcaaaacactccacaagcagggca

SEQ ID NO: 282877 - DNA, 628 bp, Homo sapiens
tctcccatctctaattacaactccaaatccccaggggccgagcagctggggtgatgaggtgctacttaccttcaaggtcatcctgataaatggcaatctccttctctccctccaaatgaacggctgcggasagaaaggttgacactcgatttgacatgcgaagttttccccaaaagcccgttttccctcattctgtgccagctctgcatctcctctgcattaggactacaacctgtgagtcctctgggggcatcagagctgattctggaagtgtcctggtaacagttagcacttctcagctcttggtggtggatgcaaaggaccatgtgggtaaggaaaatatagtggctcgcttacaaccataacgaagggcccagtcccattaaggaatctgtgtcatgcaaaattaaaactcagaataggatggccttctaagtgtcattatgtgttgaaattatatcaccaatggaataaaaaaaaggtctaattctgagccaatttaactggatgccagcaaagagctttctggaggagaggcacattcattttagagtgtacgtcagcccgttttcattcctgtagtgatgttggtggagatgtcagagaacgttgtaacagcctgtgctat

SEQ ID NO: 282878 - DNA, 628 bp, Homo sapiens
tctcccatctctaattacaactccaaatccccaggggccgagcagctggggtgatgaggtgctacttaccttcaaggtcatcctgataaatggcaatctccttctctccctccaaatgaacggctgcggacagaaaggttgacactcgatttgacatgcgaagttttccccaaaagcccgttttccctcattctgtgccagctctgcatctcctctgcattaggactacaacctgtgagtcctctgggggcatcagagctgattctggaagtgtcctggtaacagttagcacttctcagctcttggtggtggatgcaaaggaccatgtgggtaaggaaaatatagtggctcgcttacaaccataacgaagggcccagtcccattaaggaatctgtgtcatgcaaaattaaaactcagaataggatggccttctaagtgtcattatgtgttgaaattatatcaccaatggaataaaaaaaaggtctaattctgagccaatttaactggatgccascaaagagctttctggaggagaggcacattcattttagagtgtacgtcagcccgttttcattcctgtagtgatgttggtggagatgtcagagaacgttgtaacagcctgtgctat

SEQ ID NO: 282879 - DNA, 588 bp, Homo sapiens
atatttaggttttgggggctacaatagaatacttgagcttatcattttatttttatcatttaaacattgatgtgaacttgaacatattgcataarcttcctatcgctcaatttccctgctggtaaaatggtaacagtgagtggcttactgtgattcatatggttttggcagcaatgactttcaagacagccttggctgctggaaattgtcctaaaacacattgggctatgctcttgcaataccaaatctgactcaaagaagggatttgagtgactggtgaaggggttatgttctcacggcacctctgatcctcacgttaaatgccagtctgtcttggacgtagtagagacgggggacgaaggctaggcactttctcagctttgtgtggagcccacggctcatgctctccatgagattttcttcagcagcccccgagtgttgtattctcctaacccatgtgcatgtcttccatggggaagatcgttttgaaatcagttccttcctcctttaaaggtaaacataagtcgtggggatctcagtgagttgggcaagttctaattgagatttattgtgaaggctgctctatca

SEQ ID NO: 282880 - DNA, 645 bp, Homo sapiens
acacagcagaatttcaatttcatacccagtttgtttctgaccatggaaattgcctgttcaatgcacacaaagcgtcacgtcagagaactgaagccggggaggctgagcctcaggcagtgtccacgtctcgtcaagcaattttccatctaagtctcaccctcagcctcccataacccaccgcataaacacagacttggaaaagtcccctgaggatgaataaatcctgccacattcacaaccgcctccmacggaggaggacacaggcccagtcagccagaaacctgccttgctgaaagcaaggaaaacacgagaccatggaaaagagcatctgtgtctttactccaacgggaaatgagagctacagtgtctggatgccaaacttccactttatcaactggcaaaccaagcctcaggacacgcgctctttcttcatttgacacctcatgaacagcgggcttcgtgtaccccaccacaatcatgtctcactagaaagatagactctctccaaaaaggcagggcttctgccctggggaaggttcattccattacatgatttcccttccccagtgctcttctcaatggcctttacagaaggcaaatttcatcacagataagtgacatttataaagcaagttacaccttctc

SEQ ID NO: 282881 - DNA, 584 bp, Homo sapiens
gtggcagctgccgaaggggcaatcctcatacatagcaggtgctcaataaatgccactggctttgtgtgaagatgctagaggtggatgtgacaggttttgcattaagaatcatgagttaagacattaatgtgttttagcacagtttctacctgcatttcagaagtaaacaagtttcttccttcacaccttctttcttctgaaacaaatgtcccctgagctgctaagtgcttaattcattttcrgcactgtgggtggaaaaactatcatatattccctgtttttctatgaagtcaagactgggtacctaattttttcctccctcacacttactttcctttttatcatctcaaattctcccagagtattgcaaagtgtgaagaagacaaaacaacagttttattcatttgtgggttaaacaaagtgtgttcatcagaaaactgtgatcaagctcatgacttaaatacaaaacaaacctgaaagactgctgtattccttgtaactaaggcatatgctgtggggtcagatttttcttttcacccaaaggagatttttttcatttgttccttacacccatttccatgttt

SEQ ID NO: 282882 - DNA, 576 bp, Homo sapiens
tgctgtgattatttaaacaacagacacagcaaaacaaaatcaaacaaaaacccctgagtaaaaagaagccttaactccagaaagcttttctgagacagggtctccctctgttgcccaggctggagtacagtggcgcgatctcagttcattgcaacctctgcctcccgggctcaagcaatcctccttcctcagccttcctggtagctaggaacccaggcacatgtcaccacactctgctaattttttttgtttatatttatatttatatttatttatttgtttatttattttttgagatgtactcttgctctgtcgcccaggctggagtgcagtggcgtgaccttggctcactacaagctccgcctcccgggttcacgccattctcctkcctcagcttcccaagtagctggggccacattttgaaaattttttgtagaactggggtttcaccatgttgctgaggccagtctcagactcctcaactcaagagatctgcctgcctctgcctcccaaagtgctaggattacaggtgtgagccaccacatccagccaactccagagatctttaaaagcatt

SEQ ID NO: 282883 - DNA, 584 bp, Homo sapiens
ttgtggttataatttccttgctttcttttatagttaatctgcatgtggacgattttgtgatttgctttctttctcgcagtattttgcttttgagrtgcatccatacagctttaatgttgcaatccatcactgctgtcaatttcactgttgtgtaatattctaatgtagaatatatcgagttcttttgacatgacaatatgggtgtacatgtgcaagagttccaactctagaagatatacctaggagtggattggctcgttctctatgcatgttcaacatttctaggatgtgatgctattttgtgtttcaaaatggttgtactaaaattatcctcccactggctacatatactgattccttctccaaaaccttttcctactgcttttaaagttccgggaggacagtcagtctatctttttttgcaggtccagcttttaacagggaactttgcgcaaatttagtaactcctgattgtctgattcattatttggttgaattaaagaattgaataagtttccccattctctttgaagtactctatattaggttttatgaacaagagagagggctgtgtaggagaaagc

SEQ ID NO: 282884 - DNA, 465 bp, Homo sapiens
ttcactcctggttaatacactttggaaatcttcttgaatcccaacacacacagcccccatccctcagtttttataaatgacctgtatacacgtatgcagaggtatctactcctatgacctgctcatttgagtgggactttaaaggttttgattgtttaataaagaaaaatcatgtatccaagctctacaacatgccagaagaaggtatgtctacaagatcattctctctatatccaccctaggaaaatatacttgatcttatttttagaaagaaaaagagtaagagacagagatatttgggcaaagcactagaagttgcagtcttagtgtttcaacttgcttattagctggctgccacttggtggcactgttgattccagtttgctcccagatccaggggatgrgtgtatccactgatccaaccttaataagcacgtgcggctcctgccccatgaagaacttcat

SEQ ID NO: 282885 - DNA, 468 bp, Homo sapiens
aaatatgaaattgaagtctataccaataaaaataaaaatacatgagcaaattaaaagtttgatgaggtccaggatacatcatgtcaattaccttcatcaaatgatgaaagtgaacatcaccaggtttggtgccacctgataggataccatgaaaagaacatagcacccctttcatgaaatccctgccaaccaygcctaacctgaatataaccatgaagaaacatcacccaaaccgaaactgaggaacttaactgggcttcaaaagagtcgtgaaagtcaccaagcaacgaaggaactcttgcaggttagtggaaactgaaggaacatgatgattgagtacaaggcatcattctagattggatccttttgcaataaagaatatttatttgggcaagtggcaaaactttaatggggtctgaggattagatcacagtgataaataaatattagtgttctgatttggatggt

SEQ ID NO: 282886 - DNA, 634 bp, Homo sapiens
gtgtcaaagagacacacaagccaattagaagaagcctccactgggccaggtgcggtggctcatgcctgtaatcccagcactttgggaggccgaggcgggtggatcatgagggtcaggactttgagaccaccctgaccaacatgctgaaaccctgtctccactaaaaacaaaagaaaattagccaggtatggtggtgcacacctgtaatcccagctactcaggaggctaaggcaggrgaatcgcttgaacccagggcggggaagttctagtgagcagagatcgagccactacactccagcctgggtgacagagggagaccctgtatcaaaaaaaaaaaaaaaaaaaaaaactccactggccaaagatgggacaatatgaatatcaaaaggaattactgcaactgattcaatacactcaaacgcatccatggttttataatgagttgataagatgttcctcccactcctttccctcttcccaaaaaagtagagaacaatttcctgatccccaccgagggaggctgccaggaccccaattcattattcagaaaatggatcaataacagaaaataatgacaaatggatcttgctttttcttttcaaactatatttcaagatatcaaatacataatgat

SEQ ID NO: 282887 - DNA, 634 bp, Homo sapiens
gtgtcaaagagacacacaagccaattagaagaagcctccactgggccaggtgcggtggctcatgcctgtaatcccagcactttgggaggccgaggcgggtggatcatgagggtcaggactttgagaccaccctgaccaacatgctgaaaccctgtctccactaaaaacaaaagaaaattagccaggtatggtggtgcacacctgtaatcccagctactcaggaggctaaggcaggggaatcgcttgaacccagggyggggaagttctagtgagcagagatcgagccactacactccagcctgggtgacagagggagaccctgtatcaaaaaaaaaaaaaaaaaaaaaaactccactggccaaagatgggacaatatgaatatcaaaaggaattactgcaactgattcaatacactcaaacgcatccatggttttataatgagttgataagatgttcctcccactcctttccctcttcccaaaaaagtagagaacaatttcctgatccccaccgagggaggctgccaggaccccaattcattattcagaaaatggatcaataacagaaaataatgacaaatggatcttgctttttcttttcaaactatatttcaagatatcaaatacataatgat

SEQ ID NO: 282888 - DNA, 571 bp, Homo sapiens
taaaaaacttgttttaatcttctgtaaaagacaatgttgtgattaatataattagatacagttagataatgatcagatgaatacaataataatgtacatgtttgtctctgtgctttgttttgttctatagaaggttagaaacagtgatccttagcaatgagatttctatcctcaccctggtctataccaggttgtatgaaaatgtgtaacatgaaccatttctcagtttgtgagaaaaatctacataaagatttttaaatgctccaaagtgcagaatgcttcaatgtggaaggatgaagagattcaggatgccctggttaatgggcccgagactcattgagaaaactgggattcagggagcaggagagtgattctcctggcgggcgcygtggtgtcaaaacagccaacctggacagcttgacaaactatttctggaatcctgtttcttgaaacaatctgttcacttagaggggaaatttccaagtgctctactggctgtggtttatgtgacatggtgcatgggagaacaatgccatgaggaagaattgtgtgcctgccataaacggcccca

SEQ ID NO: 282889 - DNA, 506 bp, Homo sapiens
ggccggcgcaggcgcctccccttcccgtgcgaagcgttcacttccttscaaggtggtacgaatcaaccccgagcgcggcccgggcggcggggcacgaccggggaccccgggcagggcggggagcccctgccgccgctgccgcacgcgcacccgtaccgaccgcggggcggggaaatgtccagtgcctcccgctccccaggctggtggcttcctgtccccggaaccccttgcgcgtgctttctgtccacggtctgtcccatgcaagttgcaggaactaagccattttatttattttggcctagatttcatgtttttccatgaatgttttaagtagatctacaagactgttacaggtttcccattgggagagaacacacatatagaaaaccagaaggccaaattcccagagcacagacacattttaaagttctacgtggggatgccgagggacttaactgaattggagacgttgcactgctgtgtgaggacctcattttcgaacccag

SEQ ID NO: 282890 - DNA, 598 bp, Homo sapiens
tcagttacccacgaattaccaaaatataaaagctactctgggctcctccccagccaaatctaaccccccaacctgagattgcaaaagcgacacagatatttttccccccaaatgtaggacatgcttcacccaagggtagtttggatgcacgtggttgcgtgtgtatgaatgtgcaaatgtgtgtatgtgtatgtgtgtgtgttgggggggaactaacaggtttaaaaatctktaggaactaatgtctacttaacttagagcatatgggttttacccggtatcagccagtgggttacaataacaacactgaatgaattcctccaatgtacaatcttttatgttatgctgtattaagatttcttttttttgtcatattgtttagctccgaaaaaaagaaaacaaagcaattaaaaagattgacaggtatggtttgtgagagacctatttgtaattgtcagggtgacgttggcgagaggaggaggagtaaaaactgaagcaggaaaagcagctcgatgtgtctgtctatcagttgagactgtctgaaagctctgcgatccgaatgtgtgttatatttcactgaaaagaggagagagcgaga

SEQ ID NO: 282891 - DNA, 598 bp, Homo sapiens
tcagttacccacgaattaccaaaatataaaagctactctgggctcctccccagccaaatctaaccccccaacctgagattgcaaaagcgacacagatatttttccccccaaatgtaggacatgcttcacccaagggtagtttggatgcacgtggttgcgtgtgtatgaatgtgcaaatgtgtgtatgtgtatgtgtgtgtgttgggggggaactaacaggtttaaaaatcttyaggaactaatgtctacttaacttagagcatatgggttttacccggtatcagccagtgggttacaataacaacactgaatgaattcctccaatgtacaatcttttatgttatgctgtattaagatttcttttttttgtcatattgtttagctccgaaaaaaagaaaacaaagcaattaaaaagattgacaggtatggtttgtgagagacctatttgtaattgtcagggtgacgttggcgagaggaggaggagtaaaaactgaagcaggaaaagcagctcgatgtgtctgtctatcagttgagactgtctgaaagctctgcgatccgaatgtgtgttatatttcactgaaaagaggagagagcgaga

SEQ ID NO: 282892 - DNA, 533 bp, Homo sapiens
gtttttacacagaaaggcagggggcaagttagaggagtatttttcggctttgtgcctggctttggggaaacagggctctggcttcttccacctgcactggggaagagagattctgatgtctatggccagcctcaggggagactgagcggccagggacaggagggcaggagcaggtgagaaacatttttgcttctgaggccttcattgtgggatatcattttcttagccctcacaacrtgaacagactttgtccacagaaggaattctgactgagctggaccccacatcctgcctctcacctgctagagtcaggctcagcagcgttcctcgtcggaccagagagtcggtgaaaacctttggcagaaggtggcgatctgcaatgacctgcgggaaagtcttggaggagagcgggagccaggaattggaaggattacgtcacggctggaacatgttggttccacaatgacaaaggaaatggcaggatccagtgtaatttttagtgtaatggggccaatattgttctttgggaggaa

SEQ ID NO: 282893 - DNA, 517 bp, Homo sapiens
gcaaatgttttgtgtctagaaggtaaacagagtgatgaaggtaggaaatgaatcttacaaagaaaactcgaaaacatagaattattttcccttgtaaaagtaaaggaataaatattagaaagcctttccagtgacagtcagattgggcataggatattttaggacaagtgactaaacattattttagaataattcataacaaaaaagtttcttacatggattgttatccaaaaattgcgcttcaggatttaggtggtatgtcacatttattcttcatactagtttcccccaaaaggcattattcttttcccgcttttatggatgaatgacttgatatacagaaaggtaatgtgatacacatagtatgatgctaataaatggtaacaccttgatttaaacccacaaagtctgggaagattgtctttaggatccttgcctttaacctgtgtttgctgccacccaagtgaaaggagaaacttctygttagtggaactacacaaattgtaaatgaatagcc

SEQ ID NO: 282894 - DNA, 428 bp, Homo sapiens
caggcagtcacatgaatcagaataggttcagagcaactccctgaggctgccacacagtcagctaacatttatggacagaaaaaggaaggtgatgtaaacaaaaccgaaatgactgggtgcagtgcctcatggctataatcccagcagtttgggaggctgagatgaaaggatcgcttgaaccctggagttcaagaccagcatgrataatatatcaaaaccctgtctctaaaaatatatatttttataaaattagctggatgaggtggcacatgcctttagcccagctacttgggaggctgagatgggaggatcacctgagcccaagagctggaggctgcaatcagctatgatctcaacactgcactccaccataggtgacagagcaacataagttcctttctttaaaaaaaaaaaaaaaaaaaaggaaa

SEQ ID NO: 282895 - DNA, 428 bp, Homo sapiens
caggcagtcacatgaatcagaataggttcagagcaactccctgaggctgccacacagtcagctaacatttatggacagaaaaaggaaggtgatgtaaacaaaaccgaaatgactgggtgcagtgcctcatggctataatcccagcagtttgggaggctgagatgaaaggatcgcttgaaccctggagttcaagaccagcatgaataatatatcaaaaccctgtctctaaaartatatatttttataaaattagctggatgaggtggcacatgcctttagcccagctacttgggaggctgagatgggaggatcacctgagcccaagagctggaggctgcaatcagctatgatctcaacactgcactccaccataggtgacagagcaacataagttcctttctttaaaaaaaaaaaaaaaaaaaaggaaa

SEQ ID NO: 282896 - DNA, 543 bp, Homo sapiens
agaacttgtgagtcattcaatcagatgtatagcagtggcggtttctgtgaatttccttgagcaaaggcatgtgtctaactacttaagatctttaacttattgggactgaaacaggtgggagtgggtttcaggaggagccaagatgtttgattatactccactgctttaagggagtkttatctccctgagcaacctgtggaatgcagctgagcggttatgctctcccggcataaagacatgaatgcaataacgagacttttctcctcagaggccgcccatggctccccatgggtgtctcacacaggggagaccaactcaactggcaccccagaaactctctttccaacatatctcagttgtaactctttttttttttctctctctctctgtcacacacacacacacacacacacacaatctaggactttagaactttcagatattcctcaggatctagccttcaaatctggcacagcaaaaccaataaccctaaatactttagatattaatgtattccagaggaaggagagggtttatcctcat

SEQ ID NO: 282897 - DNA, 458 bp, Homo sapiens
gtagagtgatgggtgaatgtaggtaacagtcaaggaaaaattaaaaggccgagatttgtcctcaccccaccacacaaagaaacaggtgaatatgtctttaagaaccaacaagagatgaatcatttatcctctggaaaaaactagtgagtgcaaatcaatggtcaggaatgccaaggatagctgagggtgagggagaaaaactgtctggcagtaaaggaattaagtgaaatactaaaaattaaaygctatgattgctatcctggttctccacccaactacagttcaccccagtacaaaattgatgtaaacttgtgggtccacctaaacatggattttcttcttcctctgccacttcgagacagcaataccaactcctgctcttacccttctcctcagccttctgaatgtaaatacaacaaagataaagacctttatgatgattgatatggttttgctgt

SEQ ID NO: 282898 - DNA, 572 bp, Homo sapiens
tggttctccacccaactacagttcaccccagtacaaaattgatgtaaacttgtgggtccacctaaacatggattttcttcttcctctgccacttcgagacagcaataccaactcctgctcttacccttctcctcagccttctgaatgtaaatacaacaaagataaagacctttatgatgattgatatggttttgctgtgtccctatctaaatctcatcttgaattgtagctgttgtaatccccacatgtcatgggagggaaccagtggtaggtaaytgaatcacgggggcgagtttttcccatgctgttcttgtgatagtgaataagtcgcacaagatctgatggttttataagggcagtttccctgcacatgctcttttgcctgctgccatgtaaaacgtgactttgctcctccttcaccttccaccgtgattgtgtggcctctccaaccacgtggaacagtgagttcattaaacttatttttctttataaattacccagtcttagccatttcttcatggaatggactaatacaatgacccactaccaattatgtatagcaaatatatttc

SEQ ID NO: 282899 - DNA, 572 bp, Homo sapiens
tggttctccacccaactacagttcaccccagtacaaaattgatgtaaacttgtgggtccacctaaacatggattttcttcttcctctgccacttcgagacagcaataccaactcctgctcttacccttctcctcagccttctgaatgtaaatacaacaaagataaagacctttatgatgattgatatggttttgctgtgtccctatctaaatctcatcttgaattgtagctgttgtaatccccacatgtcatgggagggaaccagtggtaggtaactgaatcaygggggcgagtttttcccatgctgttcttgtgatagtgaataagtcgcacaagatctgatggttttataagggcagtttccctgcacatgctcttttgcctgctgccatgtaaaacgtgactttgctcctccttcaccttccaccgtgattgtgtggcctctccaaccacgtggaacagtgagttcattaaacttatttttctttataaattacccagtcttagccatttcttcatggaatggactaatacaatgacccactaccaattatgtatagcaaatatatttc

SEQ ID NO: 282900 - DNA, 572 bp, Homo sapiens
tggttctccacccaactacagttcaccccagtacaaaattgatgtaaacttgtgggtccacctaaacatggattttcttcttcctctgccacttcgagacagcaataccaactcctgctcttacccttctcctcagccttctgaatgtaaatacaacaaagataaagacctttatgatgattgatatggttttgctgtgtccctatctaaatctcatcttgaattgtagctgttgtaatccccacatgtcatgggagggaaccagtggtaggtaactgaatcacgggggcgagtttttcccatgctgttcttgtgatagtgaataagtcgcacaagatctgatggttttataagggcagtttccctgcacatgctcttttgcctgctgccatgtaaracgtgactttgctcctccttcaccttccaccgtgattgtgtggcctctccaaccacgtggaacagtgagttcattaaacttatttttctttataaattacccagtcttagccatttcttcatggaatggactaatacaatgacccactaccaattatgtatagcaaatatatttc

SEQ ID NO: 282901 - DNA, 572 bp, Homo sapiens
tggttctccacccaactacagttcaccccagtacaaaattgatgtaaacttgtgggtccacctaaacatggattttcttcttcctctgccacttcgagacagcaataccaactcctgctcttacccttctcctcagccttctgaatgtaaatacaacaaagataaagacctttatgatgattgatatggttttgctgtgtccctatctaaatctcatcttgaattgtagctgttgtaatccccacatgtcatgggagggaaccagtggtaggtaactgaatcacgggggcgagtttttcccatgctgttcttgtgatagtgaataagtcgcacaagatctgatggttttataagggcagtttccctgcacatgctcttttgcctgctgccatgtaaaacgtgactttgctcctccttcaccttccaccgtgattgtgtggcctctccaaccacgtggaacagtgagttcattaaacttatttttctttataaattacccagtyttagccatttcttcatggaatggactaatacaatgacccactaccaattatgtatagcaaatatatttc

SEQ ID NO: 282902 - DNA, 510 bp, Homo sapiens
gtgctcaactgccattcacctctaactttccttatcagctttcattttatcaatgtaataaagaataaacctacacaacccattaaagaacaaggaatggaaagaattactaataagttacttgatgackgcaatcagctgcttcagctctaacttatttagaatgtagattggatttacctactattgatgaattagcagcatttacaaatccatgggtagacacaagatgctaaattaaaactactaagctgcaaaaattaaagccagcaaagctgaaactattttattcagtaaatgaattattcttcaattggaaagaaaacaaactatattagtcaaattaatgtagtacgatgttaattatggccctaagagtccttttaaatatttatgaacaattcctttcaaatgccttgtcagctgtattcaattaaagagtgtgccatcagttttgcctttcaaaactgactttgatttttttcttatactttgactcatgccactaaa

SEQ ID NO: 282903 - DNA, 510 bp, Homo sapiens
gtgctcaactgccattcacctctaactttccttatcagctttcattttatcaatgtaataaagaataaacctacacaacccattaaagaacaaggaatggaaagaattactaataagttacttgatgacggcaatcagctgcttcagctctaacttatttagaatgtagattggatttacctactattgatgaattagcagcatttacaaatccatgggtagacacaagatgctaaattaaaactactaagctgcaaaaattaaagccagcaaagctgaaactattttrttcagtaaatgaattattcttcaattggaaagaaaacaaactatattagtcaaattaatgtagtacgatgttaattatggccctaagagtccttttaaatatttatgaacaattcctttcaaatgccttgtcagctgtattcaattaaagagtgtgccatcagttttgcctttcaaaactgactttgatttttttcttatactttgactcatgccactaaa

SEQ ID NO: 282904 - DNA, 510 bp, Homo sapiens
gtgctcaactgccattcacctctaactttccttatcagctttcattttatcaatgtaataaagaataaacctacacaacccattaaagaacaaggaatggaaagaattactaataagttacttgatgacggcaatcagctgcttcagctctaacttatttagaatgtagattggatttacctactattgatgaattagcagcatttacaaatccatgggtagacacaagatgctaaattaaaactactaagctgcaaaaattaaagccagcaaagctgaaactattttattcagtaaatgaattattcttcaattggaaagaaaacaaactatattagtcaaattaatgtagtacratgttaattatggccctaagagtccttttaaatatttatgaacaattcctttcaaatgccttgtcagctgtattcaattaaagagtgtgccatcagttttgcctttcaaaactgactttgatttttttcttatactttgactcatgccactaaa

SEQ ID NO: 282905 - DNA, 565 bp, Homo sapiens
cagactcagaaagataaactttgcatgttcttacttataagtgggagttaaataatgtgtacacatggatatagaatatatccatggtagaatatatccatggaaacctggtagattgtggttactgggagtggatgatgagaaattacttaatggacaaatgcatgttattttgttgatggaaaccctaaaagcccagatttcaccactacgagatctatgcatgtaaacaaattgcacttttaccctataaactcatacatatagaaaataaataaataacaataataaaatttaaaagtgtatgaaaattctccctagagtatattcaataaaatatactacatttctaaaagaacaagaagtgtctgtggcacttgtgccatcacctgcgtcctgaactcctcagtacagtgtgtcacaagctccatttygggtgataatggccaagagaatggggtaccctttcccccaggtagcagttatggactatgttatttcacctaaagggtcaggccatcatcatttcatgtccctccagcctggtgttgcagaggttaaattc

SEQ ID NO: 282906 - DNA, 1165 bp, Homo sapiens
ctcatgtacagggtaactccaataatattttcagctgacttaccagaaacaatgcaaaccagaaggtaaggatactacatattcaaattgctgaaagaacccttaaatccagaagagcaataataaatttcattatcttgcttataaagaaaacaaaataagcatatacatttagatttcaagtcatatgaataattcagtgttcacagaaaaaaaaatttctatatttttagcttcttcctaatgagcatgtaaaccacactgtcacctaaaatagaaaaggtaaaggacctgaacaatgaaacatgttttatgaacacttttaattggtaatgcctgtctatggagaagtaaaatggtttgtaataagacataatgtcgttttcagaaaagacatcacagacagtttcctgacaaaaagactgagatttaatcacccaaagctgcttttgcagctactgccaaagcatgttagcactgccatcagggagcaggatgcctgtcaagactgcagtaaagcaaacggaattgctgccaatgcactgcctgcggacaacmgatgatcttcatacaccatttattttatwaaccttagccatagtattaaacctcctactatttttttttcatagttccagaaaaaacwattatttgcgttcctatttaatagttcctaagaatctgggcgttgccagatcatctttgagacaattctgattggccccactaagagcaagccgctgtgtaaaaatagcaactgctgggagatattcccaagacaaagtcaaagctgccaatcaactccagccctgggcatccactccacttccacaaggtgagctgtcacagattatttacaaaaatgagtctggaaaagtctctttctttgccgtatttctttccatttattccttctttatctttacctttaccttatttaatttcataatgatttttcgttctatttaagttttctttctcttctttcctctgttggttttctaatgccctttattccttttcctattcaaaatagtctagatctaaagacaagtagtccagggaatggtcagataaaaaagaattttccataaattctattgtgagatactaattttaaaatattaatctagctagaccaggaaaaaaaataatccaaacagca

SEQ ID NO: 282907 - DNA, 656 bp, Homo sapiens
tgttgtatatagtaatactttcagccattctcatacaatagtgtctcatattctttctcttctttctcatgtattatcagggctcctatcatttgcaaaatttgtttcattaggttttactgatgttgtgtactttgtgctattttttaaccatttgcctcaagtcagttacatagcagccaaacaacagtataaatttccaggtagagactcatagctgcataaaatagagctgtttragattattttaaagtaagtagaaattttaattgtacttctttctaattacagtaagaaaacatcacttagacacatatcttcccttcatcttcataatcacagggtaaaatccagcagccggtcatatctttctgattgttctcagctcactggcctagaatagggagaggtggggcctgtggaaaaattctgtaaccttcacaggaaaagtacaggaacaacagtagtttcacctgaaaacttgtaaacccaactgatttagcaagttttacatgaccccggattaaaataagataaagcaggagaaaagaatacactgtctattttcattgtttctctatcaaccacacgatgaacagaaattgtaaaagttgatcatctgcaaagttgttccctttcactgaagtatgagccca

SEQ ID NO: 282908 - DNA, 656 bp, Homo sapiens
tgttgtatatagtaatactttcagccattctcatacaatagtgtctcatattctttctcttctttctcatgtattatcagggctcctatcatttgcaaaatttgtttcattaggttttactgatgttgtgtactttgtgctattttttaaccatttgcctcaagtcagttacatagcagccaaacaacagtataaatttccaggtagagactcatagctgcataaaatagagctgtttgagattattttaaagtaagtagaaattttaattgtacttctttctaattacagtaagaaaacatcacttagacacatatcttcccttcatcttcataatcacagggtaaaatccagcagccggtcrtatctttctgattgttctcagctcactggcctagaatagggagaggtggggcctgtggaaaaattctgtaaccttcacaggaaaagtacaggaacaacagtagtttcacctgaaaacttgtaaacccaactgatttagcaagttttacatgaccccggattaaaataagataaagcaggagaaaagaatacactgtctattttcattgtttctctatcaaccacacgatgaacagaaattgtaaaagttgatcatctgcaaagttgttccctttcactgaagtatgagccca

SEQ ID NO: 282909 - DNA, 462 bp, Homo sapiens
cagccaaacaacagtataaatttccaggtagagactcatagctgcataaaatagagctgtttgagattattttaaagtaagtagaaattttaattgtacttctttctaattacagtaagaaaacatcacttagacacatatcttcccttcatcttcataatcacagggtaaaatccagcagccggtcatatctttctgattgttctcagctcactggcctagaatagggagaggtggggcctgtggaaaaattctgtaaccttcacaggaaaagtacaggaacaacartagtttcacctgaaaacttgtaaacccaactgatttagcaagttttacatgaccccggattaaaataagataaagcaggagaaaagaatacactgtctattttcattgtttctctatcaaccacacgatgaacagaaattgtaaaagttgatcatctgcaaagttgttcccttt

SEQ ID NO: 282910 - DNA, 474 bp, Homo sapiens
ccatgattgtaagtttcctgaggcttccccagatgtagaagccactatgcttcctgtacagcctgcagaattatgagtcaattaaatttattttctttatgagttacccagtctcaagtatttctgtatagcagtgtgagaatgaactaatacacttgtccagctacatgctgtgacaatccctcagagatgagcttcaatgggataattcttttctttattgatcctggtgcctgattaatacaaaggtcagaatctcagggttaactctgttgtctccacatcytctggtctccaaatatggttgtcatcactaaatcctgggcacatatcctagctgtaaggggagggagatggaggggatattaattaagtgtcttgtatatacagtaagagaaaacaaaagagatcttcagatgagtttaatgctaagtctcataaatcaactgtgtctctggtatgtcaagtgtacta

SEQ ID NO: 282911 - DNA, 623 bp, Homo sapiens
ggagggagatggaggggatattaattaagtgtcttgtatatacagtaagagaaaacaaaagagatcttcagatgagtttaatgctaagtctcataaatcaactgtgtctctggtatgtcaagtgtactacartgcaatttctttattttggaaactaaaaaatatgctatgttaaaaattttatttagtcaatttaaaatagtatacataataacaatcaaaatctgataccgaagaaataggtatcaaataggcatgataacaaactgaaacaaaatatatactgatttctaatatgaatcatacattattaataacccagtactttcagatgttcttggaaatttcgtagcatgtatctttcaaataattttcagtcagtcattgtgatatcaggcctggacaggctaaagagaggcagagtcgattgtcacttggtacttacactttgaaaagtgtcacaaaaagcatatcaactttagccccatctagaaatatcttgctcattaagccacactctattgttgccagagccagaaatttaactcagattgagtaggaagtttgtcacagtaattgggaaatccagggttgcactggggatagcaatgtaacaatatcca

SEQ ID NO: 282912 - DNA, 600 bp, Homo sapiens
taaaaaacctgacaaataaagctagggaaggccataaaggaagggttctcatgcacaaatgcttgagagcaagaactatcacataagactgtgccaaattccacaaatttggacaaaggccatcacaatcttaaacacactcacatttccatgaggaactctgcccagcaattgcctgtccatcctctgaccggtgccatcccaacactgatctttgcagccaaaataattatctcaaacaattatgtaatactcctcattttttctttaaaaacctttgtcttcctttgcctccttaaatatgcacatagttactatagtactcatgtcccaattgcaatgcctattcacattgtttgtagaaagcttcctatctacttattacattgttgccagaaatggaagtgaagtgagctcacctcagttggattggtggcccctggaattgtgtgtggtacctaccaagtttttgtgccttctgytactgtggatcacctttactgtcctggtgaatctccttagattcttgtatctcctcccttagttttctcaatttattttggattttatttgggatctgattttgttataaggccactc

SEQ ID NO: 282913 - DNA, 545 bp, Homo sapiens
ttgatagaatatggggagagaccactgtgcctaactgatttgtcattcttgagctttggaatcattccgtttgcagccctcaccttttaccttcgggaaattttattaaaattattacaactaccttttgtaactaaagcaatgatgtcgaaattatggatggcaattatgttttttacttacgttattctgtgactgatggtagaagttgtatttgtgattaatagtcatctattgggatttttttccttttccatatagtcattaactctttacttccaatggcatttcacaattttccctggagacttctttgttgccagtgtagataacatatatgttttcagrtttagtaatctcaggaatttaaccttcatatctatccctctgaactgatagtttattttatttcttgctagttccagagaatcgatcaaagacaggacaacttttcattgtataaatccagagaaatgatcaaacacaggacgtttcattgtataaatctagtaaaataataaagtcatatcaggctttacatatca

SEQ ID NO: 282914 - DNA, 446 bp, Homo sapiens
tgttctaaaatcttcactaaaggaaatgaagtgacagtttgacaaatattcactcttttaaattaagaattttaccattattttaaaacaaattactctgaaagaaattcaacactttcctctgtgttaaataagatgctatgtataatacatctagcatactatttgggtaagcaataaacctaaagaacgaggcagaaacaccrgaatcctcaagggcatggcagttcttaggacaagacaaaaatctaattatctgccttgggctagagccagcctgacagaaagaacatctgtgtaatgaactaagtgcatgatttatctcagaacttcaggcattgctcaacctaaatgcagaggtttaaaggggctacctatatggattgggcatctaggagcaggaattaagggacgttgttatatcacataaatcaatagaacatgca

SEQ ID NO: 282915 - DNA, 646 bp, Homo sapiens
aattctacattcctagatacaaagtatatgtgagaaatcctgtaaacaagtcatatatatacagcaatgttgaaggaagagagtgggtgacataaaacttaattcagattatcctaacataaaattgctattaacataattatttctcataaaatcatccacccacaaagaattgctttcctaagtatttttcttataataaactctaatattctgagatctctaacaatcaaataactctttgctgcacagcactttcaattgcttctgaaataacatgttatttyatcaacttaaatcatagaaaacaagttgcttttatagttttgcccatgatgcgtcaaaaatcaaactcattgcttaggtcagtggaaaactagaaatgttaacattgccaactttacaaaaaaaaattaagcattcatgttaagaaagctctttgaaacaaaatattgtgtaaaatataatccttgtttacagtgatattgtatatatatacacacatatatatgtaaacaattataaatgggtatatgtgtatgtgtatgtgtatatatacatgcacacatatatacatatatatacatgcacacatatacatatatataataacaatttagaatggtttatatataatgtgcatata

SEQ ID NO: 282916 - DNA, 431 bp, Homo sapiens
tttgtctacatacttccagcgcttattctgttaaaaaattatcctcccatctgtgtatcttttcttttctcactgtgataattgagtattttaaagtatttgttttatgctctagttcagcagtgataatgcacactctcaaaaattctatgtatatattctattcaggttgaaagcatttgttattttaactaagcaytttagaaaacaattgagatcagttttctctgaattagaagctatgaactgaagctgggatcttatataaactgagatttttgttccagctcctacaggtgaaaaaatgtcataatagtgacaataacaattttggaaaagaaatgttagtttaaagccagtgcttttaagagatggcctctttactcccaaatgaaattatgctcaaaatgagtttgatgttccttcctact

SEQ ID NO: 282917 - DNA, 635 bp, Homo sapiens
tactctgcagcatctgatgcgatgttttatattacacatagccatcctctgctgtgttcagccttcctcccttgatgtgcgccaacatcaccacccctagcaagctctctagaactgtgcccaaccagcctgtctctaagccacagcactttgtagcacaaccaagcttatcttttatgcacactggccatatgtgttgggcagcatgcctaaaatatgtcatagttttgtttcctttcagatgtaacacagaaacataatatatccttttcattaaaacatcactcttgatacgctgtgtatctcttctcatcctaccttgtaacacttatctcctataataacgaggarcctctgataatatctcccttagttctaatggtcatgtgtggtgccatctctgatgccagcttgtgtgagtgctgagatactgactagaattcccagtgttttttaaaattagggacagaaaacattcaagggggcatttcaaatgtcagggtctattggtgtagactctgaacctatgaacaagaataactcttgtcttcttcaggtcaggatgaacagtgataacctgatctttgaaagttctggaatgtgcatttcttgtaatttgctggctttgctggcaa

SEQ ID NO: 282918 - DNA, 624 bp, Homo sapiens
tgtttggcacatcgtttgctttatcagtgttccagaaaagcctacagatctcttaaatgaagagcatgagttcccagttatcttttttgttcaaaagcaccaactatcaccgaatttcaaagttgaatatagaaaagccsctgatgtattgaaaaaaatggcaactgtgaaactacatgatcttattttcctgcagctcttcttccctacctctttagataaaatcaaattgttcaccaatggctgttaatctgaaaaaacaattcctccctcttttgaaaatcattaaacaattattttagacaccagaaaagtaacaaaagaactcacctttcttctccctaagtaaaacattcctttggaattgcctcagtatccataatgaaggtttctgcttaatgatgctctgagtaattttctgacagatctgctagaagtagtctggtaacttttccaccaaggaaaatgtttgtagagccatcattgttatgatttctatctcttaaagaaaacaagaatgccagttgaaatttgacaacataaattttaaaaatgtatttttagagatcatacctttttcatgcttattttaaaacatcaattgaccttaaattattattctaa

SEQ ID NO: 282919 - DNA, 634 bp, Homo sapiens
agacttttctctgtttgatgtaacaagaaacttgcagtgctaaattgtcttttaaaagatattttttcacaacagattgaggatttataaacagataagagttagtataataatggtctgatgaatagggaaacaagctagaatttaagaggtaaaccaacatgctttattaataacatggaaacactagtccaagattgactggcaaagtgaattcaatttcccttaagcttcccttagtctggctgtagggtatttcaggatgtcagtgtggcttacttgagtaaaggggccactaaaaggaagctctactttctgtatattatctaccttgagtggacaaccttgaatgagttggataatttagtccaaagaagaagaatatgtgacstttatattttatatatgatgtattcagagtaatatacatttgaataaataatatttatttttgattaattcctaatagtaccatttcatttaatgagtcagacacattaatcagaatattattattcaaaataagattcatattaatatttaaagtaagaccatttccctaaagctctctaacaatttaaagaaacatttcactttcccttaaattgaatgatttataacatttgtaaaggaa

SEQ ID NO: 282920 - DNA, 559 bp, Homo sapiens
gtattaacttcatgtgaattacttctatactgcatcatgtaaagcatattgtatggtgacacttataaggtcaccatacaatagtagtaaattaaaatgtacagatttcaaagaaatactttattaaattttcttgctaacatatcactttgacataaagagtttaaagaagggagatttacatttagataatccacataaaagaacacattttcttctcccctattgtattttcttacttcttgttccctccttctcttctcctatcactctcctcttatttttccctacttttctgtcccttcttctcctccttctttttcttcttgcacttaaatacatgatatgttctaacagcatatctacatagacaaagcaaaatactagttrtaagactttgatcttaatttctaagaatttacaatttgttcattcaatatcaactttaaaagaaccttcttcacagtcagtgaacagtttcttgataccatttgcatgttgaagaaaatagtacgtttcattattttcctggtagaataaattaccaggcaataatatc

SEQ ID NO: 282921 - DNA, 602 bp, Homo sapiens
tgtatggaatgaaagagagagaaagagacaataagaattgatcccactgacaaggattttttgctgactaaactttaktcagcctcctgaaccttctcctgggcccatttgtgcacttcattgtaaaattcagtcttagaaaataaccctgctaagtcagtttagcaagaaccctcactcttgctgtctggtcatcctcaatatctgatctatagctgagttctcatcctccaccattcccccagtactgtccgatcaccctggcctgccctcgacaagaatcctgttaggttgctttagccagaatcctctcttatttgtgatgttctctttcagtaattttacatctattgaccacccctgatcttcttccttggtcagaaatccctatttgccaagttgagcccaatctctctctctgataaattctcactgcaattgtccaatacctttcataatggtcatgaataaagcctttcttactatattttcacaaggaaacttgaataattttttaatacaagtcacttatttaattacctatcccccatccagaagaaaaacatgtaatgtagtcatctttatatgattaatgaaaatga

SEQ ID NO: 282922 - DNA, 602 bp, Homo sapiens
tgtatggaatgaaagagagagaaagagacaataagaattgatcccactgacaaggattttttgctgactaaactttagtcagcctcctgaaccttctcctgggcccatttgtgcacttcattgtaaaattcagtcttagaaaataaccctgctaagtcagtttagcaagaaccctcactcttgctgtctggtcatcctcaatatctgatctatagctgagttctcatcctccaccattcccccagtactgtccgatcaccctggcctgccctcracaagaatcctgttaggttgctttagccagaatcctctcttatttgtgatgttctctttcagtaattttacatctattgaccacccctgatcttcttccttggtcagaaatccctatttgccaagttgagcccaatctctctctctgataaattctcactgcaattgtccaatacctttcataatggtcatgaataaagcctttcttactatattttcacaaggaaacttgaataattttttaatacaagtcacttatttaattacctatcccccatccagaagaaaaacatgtaatgtagtcatctttatatgattaatgaaaatga

SEQ ID NO: 282923 - DNA, 572 bp, Homo sapiens
gcatcacaaacttaaaatgctcaacttgattcttctctcttttatcatacttaacatgtccaaaattatttttctcccttaatcataactaatacctaccatgagccaaacactagtaataagtacttttcttgcattaactccttttagtctcagagcaaaactatgagatgggtgctattacagttctcatttacacataagcgaactgaggaygagagaggctaaatagctacctcaaagcagttaatggtgaagaagggaggtcaacttggtctgatctagagtccatgctgacaaccaaaatgagtgactgaggcagatgtcccaaacaatcaaagtttattgagtcatgcctggaaaaaaaaagaaaaaaaaattcacctctatgactctttttccaaaagtttcttaggagttttggtacttatacatttttcttaaaaaaggtggggcaggcggggtaggatttgggcagcagtaagagaaatggtaacatatttgtgagactttagttagtgcttagtaaatctacattttaaataagataaaatgggaagaataaaaaaggg

SEQ ID NO: 282924 - DNA, 562 bp, Homo sapiens
tgataaatctcagtgtgatgatttggtctgtgtcaagatggaccacatggaaacaaatttttattatgatttaaggcattaaagcaggcattagttaactctgtgaaagttcaagtaactgattaactatcaaaaacaggttaatcagttaaaaactggtaggaatttctatggaaatagagaaaaaamatttgttcactgccatctttcaatcaaatctacctttcgtgagaaactacccgcactaaataagacagagtggtacctgccaattactccaatttatgtagaaaaaaacctcatacatccttcatgcaaaaattatacatttctaaaacattgaattggaacattcttatacagtcatgtaactgtcaaaattttctatctaaatccctattaccgagttctttttaggacctgcacccactctggcagttttaagtattaaataaatgtggaataagccaaacattaagaattctgctcatgagattatttacctgggttttcctttttcttgacaggtgaccttgcattttgtgttgcagcattatgtcag

SEQ ID NO: 282925 - DNA, 389 bp, Homo sapiens
acttcagtacagtgacataaccaaatgttggcaaggatgcggagctacaagacaggaactaccctgaaggttggtgaatggcctcatgtcactggtgtcccatagatactggtcccatttagaagaaatgtagacaacatgcaagaasagatgagtaatataagcattaagtggaaattctgaaaagtaacattcattgctgatgggaatgcaaaatagtacagccactttggaagacagattaataatttcttataaaattaaacatactgtaaccataagattcagaattctccttagtataaactcaaaggagttaaatacttatgtccaaacaataacatgcacgtggatgtttattacaattttattcatcattaacaaaacct

SEQ ID NO: 282926 - DNA, 562 bp, Homo sapiens
agagccagtaagaatttttccccttaaagcctcttttgtcttatatgaacagagccacaactatttctgttgagtagaatatacataatatacctattgtttttcctttcagattatgaaaatatcatcagattatttattagcacaaaaagaatgtgggtagcaatgtcttagcgtagcaaatataaagtaaccactcttttttgttagaatgttagtaaactttgcattattaccatactcagtaccacatctctttatttattggatccagatgagcatttacaaatgaatggccctcatatttgacatgacaagcagaagtaaggagaaatcattatactttgatgagatcccagtgaccaaccatggcagctactcaggattttcctgccattttcagctgtcctgctgcaagytgagacagtgtataggatattatgaagataattgggaattgtgaccttttccaaagaaactttcaaaaaccattttattctgtttttcaggctgatgtcttctctgtttctctgacctttcagtgacagccatcatgaccccc

SEQ ID NO: 282927 - DNA, 590 bp, Homo sapiens
ttcttctaggttttctagtttgtgtgtataaaggtgttcataacagtttctgggttttttttttgtatttctgtgagattggtggtcgtatcttctttgtcatttctgattgtgtttatttgtctggtttctgtttttttgtttgttattctagctagcagtctatcaatcttatttattctttcaaagaaccaatatctggttttgttgatcatttgtgtggttctgtgtctctcaattttgttcacttcagctctgattttggttatttctattcctctgccagctttggggttgatttgctcttgcttttctagttcctctaggtgtgatattagtgaggttgctaatgtgatacttctagctttttgatgtgagcatttagtgccataaacttttctctgaacattgttttacctgtatatcagagattctgctatgttctgcctttgttttcatcagttacaaagagtatcttgatttctgccttaagttcattattttcagaaaagtctttcagaagcatgttgtttaatttccatgtaattktatggctttgaaagatcttagtattgatttctgtttttact

SEQ ID NO: 282928 - DNA, 505 bp, Homo sapiens
tcaataatctttgttcctatctatattctgaattctgtttctgtcatttcagccaacacagcctggttaagaatccttgttggaggacgtggacactgaccatttgagttgctggagttcttgcattggttctttctcacctctgtgtgtgggtgtttctttaactgctgtgtagattgagtacagtcagtagatctgttttctagatgttttcacaaggccaaggctttttgcatggtctttatttgtagttgacttcttgtctttggcttcacagtgggtatgttagcaaggtatttttggtgttgaagctttggggtgtgatccagtaggtggtgcttaggggtagtggtcagttggtaggtaggcccttgctcagttgtgtggctcccctatatttctgcagttgcagctgtgctccctcgcaatgctctgaaagtgtgggctcctctcctacttgartactggctgtagatcatggcttggccctctcccaggctgccca

SEQ ID NO: 282929 - DNA, 520 bp, Homo sapiens
tttgatttcctccatactcaagtttgtatgtaaatactaacattagctgattttttgtcgtctaggtacttagcatgtagttatcttcctagccaacctataaattctagagattgtgtcttctacattttttggtatgtcttttgtgcctggtggcattacaggcacaaagtacatgttaagaaaatgttttaaattatttttaaatttttgtcggtaaatrgtaagtatatatatttatagagttcatgagatattttggtgcaggtatgcaatgtgtataatgatatcatggaaaatccatcccctcaagtatttatcctttgtgttacagacagtccaattatactgtttaagttatttttaaaatgtacagtcaaattattattgactatcgtcaccctgttatgctatcaaatactaggtcttattcattctttctgttttttttttatttttgtacccattaaccatccccaccaaactcccctccaccctcccactacccttcccagcctct

SEQ ID NO: 282930 - DNA, 626 bp, Homo sapiens
caactcggactccctagagcccaaaggcaacaatggctaaggctgtgaaataacagagatggtggcctctctctccccttgggagctccatctcagggaggtgtaatgctgccaccagtggctggcttgtttcccaagccagtgggtcttaccctgcaagatgccatggaaacaaggcctgcagactgtcactgctcggcccccaggattcagcccatttcctagggacatgtataggggtctaacctcctgctttgccagagttgcagctgcttttgctaggaagcctgggtatctaaggctgctggggctgtgtgtgtgtgtgtctgagtggctgctctgccacgactccatgtagctcagcgtgtcagactgaaggccctgatggggtggatccatgagaggatctcctgacctgagagttgcaaagattcatgggagaagtgtgggtctcaggggttgytcactcactcaccacttccctgggccgaggaggtgctcctggctccatgtcactcctgggtgggcagccatcctgccttgcttttctccattctccatgggtcagcttatttccttgatgcgtttccaatgtgtgtacttggatgtttccattgaaggtgctg

SEQ ID NO: 282931 - DNA, 597 bp, Homo sapiens
aagatggagaagaattctctggactatcaggcaaagactcttgttcttttcccttactttctctcaaaaatacagattctctctctctgtgctgagccacttggaattggggctatgctgatgtaagcactcctgtgggctgggactgtgctgggtcagacctgaagccagcacagcactgggccttcccaaggcctttcacttcgggatggtgagttccccsaggtcctgggtgtgtccagagatactgtctgagagactgtctgagagccagggattggaagagtctctgcctgtggccacgaccttcactggtcctcagggggttgtgccaagtcatcactgatgttcacttaaagcccaagggctcttctgtcagcttatagtgaatgctgccaggcctgggactatgcatccttcagggcagtaggctccccctctggcccagggcaggtccagaaatgctgtcttaagagcctaggcctggactcagagaccccaagagcctccttgttgctctacccagccatggccaagctggtacctgatttttgattcttgtgacagtacttttctgtgtgcagaaaagcaattaga

SEQ ID NO: 282932 - DNA, 563 bp, Homo sapiens
ttttagctaaatgttttaggtgtaaactttgggaaaactctctgcatgtatccaaacaactggaaaaaattggtaggtactgaatacaggcaggcagtttggccatgtctgcaatttattttgtattcactgttagtaaaattattctgtgatgattacagaccttcaaggaaggtatgtgtttgtaggcttaaataagtgctgtactttcgaaaatctgattttcctttgctcctgcttaaaggattccatttgaaatcaactgaatgatacatgagtacatgagaaacctaataaaaattaatgctgtcatttgaaaattttttctcataccaagagggaaatttggttacagtaattaggyaactatgtgatgccctctcttccacttttttgatgaatattttgttttgatctcaattacaaggtggagttagcagtcccagccattcctaattcattacagaaaattatgtcacctctttatgtcttaattttttttttgttttcaataacagtagggtattaatactgattttcatagagattctgtagacaaaaga

SEQ ID NO: 282933 - DNA, 1062 bp, Homo sapiens
aataaaccctttgtccaagaagcctttttttttaaatgatagtagttttcagagatcacaatctgtgtcctagaggagctcgttgccattgagtgattatggtctcttagatttttttcatgcatrgaggtaagtattatgtgattattttttgtcttaaaagacatcatgaattcatacttatcaaattcagagatgcagaatttatccttaaactcaattatctatatatgccttctatcatgctgagaaacttggttctcaatggctcaaaaataatagagtatcactaattttctatcctttatatacattacacacacaataaacagtctgagaatagcagcatcagactatcactcttaatatgatcataaaatttgagaattattttgcagatatttttgttcttaggctgtatcttactatcttagactgtatctcaatagtaaaattaatgtgtttaaaaatcacttggaatagatcctctgtatgtggccatgcwctgcagtgagtagtgacaggaagaacgcatttagaactattctgtgagctcatgagccttcatcwtcttccttttgaagaacacaaaagagcttccatttctgggtaggatatagttttgtggtaggccagtgcttccacagctacaactatgaaaaccttcataccttataaaattataatttttagggcatcagagatttgtggaagcactaaggactaaaggaactaaattcttaataaaaaggctaggtagaccatgccctgtaaaggggtttacatgatcagccactcaccatgtttgcctgacagagggaaagggaaacttcttctggtgaaatgtaatctggaaaccacagacacagtgtctgtcatatgataaaaaaattgtgaggcccacaaagagataagaccatatgactgataatcaactgtgtcaagaaacaagccagacatggtgacacacactggtagtcctagatattcaggaggctaaggcaggaggatttcttgagcccaggagtttgaggctgtagtgcactatgatcatgtctgtga

SEQ ID NO: 282934 - DNA, 557 bp, Homo sapiens
ctgcagtgagtagtgacaggaagaacgcatttagaactattctgtgagctcatgagccttcatcttcttccttttgaagaacacaaaagagcttccatttctgggtaggatatagttttgtggtaggccagtgcttccacagctacaactatgaaaaccttcataccttataaaattataatttttagggcatcagagatttgtggaagcactaaggactaaaggaactaaattcttaataaaaagkctaggtagaccatgccctgtaaaggggtttacatgatcagccactcaccatgtttgcctgacagagggaaagggaaacttcttctggtgaaatgtaatctggaaaccacagacacagtgtctgtcatatgataaaaaaattgtgaggcccacaaagagataagaccatatgactgataatcaactgtgtcaagaaacaagccagacatggtgacacacactggtagtcctagatattcaggaggctaaggcaggaggatttcttgagcccaggagtttgaggctgtagtgcactatgatcatgtctgtga

SEQ ID NO: 282935 - DNA, 594 bp, Homo sapiens
ttctttagtatttaagacccaaaggcaactctttattcttcattttaaaacagcaacttgcaaagcttttcttccaagtcttcccacctcaaaacaaaggttccttctctaaataacttaaatgaatcctctgggagagctaaagcaactggtacaactagagagagaattgttgatagatcagtctctggaattagactaccttgaattagaatctcaaatttgctacttactaacagcatagtcttgagcatcttacttaacctctgtaagaattaattttctcataggtgaaatggagatataataggaaccttataggcagacaaccaagggtgatgagacattttaggaaaatgtagaatgtgtgaaagtccaaaataaggaaatagaaaatggatgaaagagcaacaggataattcaggaatgtaataaaacctaatataaaactttagtaacstccgagaaattaaagattaaattgcaaccacaaaactgaataggatgccattttaaaataaaaagaaccagagcaagcacagagaagcaaaaattatgtttggaaggaaaaccggaggtctcgaacataaagtc

SEQ ID NO: 282936 - DNA, 583 bp, Homo sapiens
tttaagaagggcctgagtgaaatattcgagtcaagaactaacctgagtttctcctaattcattgatttggggactttatgtaccagcaggaattttgttgtttggctcatgtgttacaagttattgatgtgaaactgatagttgaacttatttttgtttcattaatagatacagatgaataaatctcaaagtgtggaccttaaagagtttggttttactccaaaaccttcccttcctagtatatcaaggtacaaatataatgttaatatctaaggtaaaatatttatcgtaaactctgttcctgcaggtaaccacttattcagggaaagatagtcactggctaccatcaagtcacagttatcgtttagttccatagtgaagcaataacatcataatggtttcattatctttgataccctaaatttatttmgaactctgcagttatgaaataacattcattagatcatctcttccctaggaaactacctatcctctgtcattcccttaggttctctctttatagggaatataaactaagtgacaagagtatactttaaaatggaaatcatgttggtgtacagtc

SEQ ID NO: 282937 - DNA, 559 bp, Homo sapiens
caaaggtaaattaccattgatacttacttgagagagtaaatggcttattattactttgaattgacragtagtgttattgaaacaccggcatctgaaattgttatgattattaacttggcaacatttttctcttagattactgaatcattttcaaattcttgggtctgttattgagatggtcttactctgtttgttgtactttttaaaaaaaaatctctttcctacataatgctattttaatttaaagatactatgaggaaaacctgagcaaataagggatccttgggtatatagagtattaacatactgaatgattacattcatatatcattagaattatttaaaataattttatgtttataaaactagtccagttttacaaaatatcaatgtgaccttgggcaagttatttaatctctttgggctttagtcttatctttaagatgaaggtattgaactgggtgacctttaatatctctccaattcttaaacctatgattcttacaattctatgttagtatgagaaaataacttaggttgtgggatatagctagtttgt

SEQ ID NO: 282938 - DNA, 559 bp, Homo sapiens
caaaggtaaattaccattgatacttacttgagagagtaaatggcttattattactttgaattgacgagtagtgttattgaaacaccggcatctgaaattgttatgattattaacttggcaacatttttctcttagattactgaatcattttcaaattcttgggtctgttattgagatggtcttactctgtttgttgtactttttaaaaaaaaatctctttcctacataatgctattttaatttaaakatactatgaggaaaacctgagcaaataagggatccttgggtatatagagtattaacatactgaatgattacattcatatatcattagaattatttaaaataattttatgtttataaaactagtccagttttacaaaatatcaatgtgaccttgggcaagttatttaatctctttgggctttagtcttatctttaagatgaaggtattgaactgggtgacctttaatatctctccaattcttaaacctatgattcttacaattctatgttagtatgagaaaataacttaggttgtgggatatagctagtttgt

SEQ ID NO: 282939 - DNA, 464 bp, Homo sapiens
tatccatctcctctttcccatattttcattgtttcctctccactgtgtctttccctttagcatataaatatgctgaagtctcttccttcttcagcttctggtcatgacttttttattataaatgataaaaattctactcaaaatgacttaagcacaagaaaaggaaccaattgtctcaagtaaactgaaaagtatctggcttaattctggctaaatcaargcactcatgcctctggctttctctcaatcttttagctatgcctgttgctacttggctttactttttaatagggtttctcacacagcaggtagcccctaacttacatcttaccagtttagcgcctcagtggaaaaaggtagacttccctgttagttttggcagaccagagctcattctaactggcctcatttgagtcatgtgtttatcccttgatcaatcccagtaacctgacgattgggtcgtt

SEQ ID NO: 282940 - DNA, 566 bp, Homo sapiens
tttagtacatatatacattgtgtgtctcagtgtgtgcacatcaacatacaaaagtagagtaatgtgaactgtagttataggtacagttgaagaataaggaagggtttggacaggtgaagaaattcatagaagatatttaaagtggaggaaactcagtgatatgctggagcaagtttatactaacttatgagagatgattattaaattttcaagaatctttcagccattattgaaaatttaattacataaactttcaattaarttatgttaaaaacaaaggcaaaaatactcaaaactcatcacttcctaattgttctactgcattttactcttatctgtgttctcgagattatttatccatatggtagaaatactatattatagggttctgtcgtgcattttttcccaacttcttattcaattatgtcacattaatagcttgaaatcagttatggtgggaacatttataccataggaatcagcaaatactaccaatctgggtttgatttattgttttgcttattttttagacttaagaaagtgaaggataaaattttaatattgta

SEQ ID NO: 282941 - DNA, 566 bp, Homo sapiens
tttagtacatatatacattgtgtgtctcagtgtgtgcacatcaacatacaaaagtagagtaatgtgaactgtagttataggtacagttgaagaataaggaagggtttggacaggtgaagaaattcatagaagatatttaaagtggaggaaactcagtgatatgctggagcaagtttatactaacttatgagagatgattattaaattttcaagaatctttcagccattattgaaaatttaattacataaactttcaattaaattatkttaaaaacaaaggcaaaaatactcaaaactcatcacttcctaattgttctactgcattttactcttatctgtgttctcgagattatttatccatatggtagaaatactatattatagggttctgtcgtgcattttttcccaacttcttattcaattatgtcacattaatagcttgaaatcagttatggtgggaacatttataccataggaatcagcaaatactaccaatctgggtttgatttattgttttgcttattttttagacttaagaaagtgaaggataaaattttaatattgta

SEQ ID NO: 282942 - DNA, 480 bp, Homo sapiens
agcttcattcagctgtttcttggcattttgtttcaaaatgttatctcttcacataggatttggaaacactttgagttcaagtaccaggggaagtaagctaccccttcaagagtcaaagagcaaattccaaagagaaatgtcaaacaggcaagttttagaacttaggtttgtaatatttgcaactttatatccccttgacacatagttggagatggggatcaagttattagatgtcacagatgctaaaaggtattagccaacytaaaccctcttaatcttagaggtgtatttctcaaagtgctgttgtgaaaccacctgcatcaaaatcactttgaggtgcatattaaaaatgcacattcttaagccccacattagatctaccgaatttttgtctctgggactggagcccaggaaccttcacttttaacaagacttgaaaactgaataggagtttgacaactagaacagaggcagataggc

SEQ ID NO: 282943 - DNA, 619 bp, Homo sapiens
ctccctctcactggatctttgaatcatcattcaacatcactggcaagtaatcatgccacctctaccaagacagttccagtgaccaggagctcattcacccttgttccatgttaggatttcttaaatcactgaatagctttttaaaacatttgcttaaaatgagtctttttatcactttgtttctttggttgtaactcttgagtgacatagaataaacggatataaccatccaagtgagacaaagctgtaggtgtagagaagcaaaaagtaggtaaatcataaggaggaaggtaacaaggcatatgaacagttttgtgcaccacacctttaaaaaacaacaaatacttttggaagagtttagaagggaccaacagaagatgtgtgggcttaaaaatgrattctaacaagaagcctctgagaacctggtgtagaagttgctgctggggaaaaggcctgtgggacctgaggatttggggtggaaaggagatttgcttttttacttatttaaggtagagtacagtggcataattagggcttactgcagcctcaagctcttgggctaaagagatcctcccacctcggcctcccaagtagctgggactacaggtacatacacacc

SEQ ID NO: 282944 - DNA, 552 bp, Homo sapiens
atctgttacccattgtatcatgaagaagtcctagagagataaatatggctgtattgtatttcaagggggctcattgatgacctaggtaacagtgatcaaaatgcaatacaaatatatggatctttgaaattatcaagagctttaaaaattaatatcaccaccatcaaattatattaccaaatgtctctgttttcaagttttctctggactccacagaagatgtattgtgtctaaaattcttaaggagataacatgcagacatggtcaaattttacaaaaagaaaagctacacattcttttggatagtagattttagaaagaggatgcagtaaatttggagagtaacaagaagtcactgaggaacagattgaccagcagattgtagaaggagatraagaggcaaggataggaactgaaaacactaagaaatcctcgctggcaagctgatgttagaaccatctgcatgcatgtaatgggtatagttgatatttgcaatttgggctgaaaggaattataaaatccagcacttctcaataatacatgatgaaattc

SEQ ID NO: 282945 - DNA, 562 bp, Homo sapiens
ggaacaacttagctagtagttctggcttaggctctcttgtgagaatgcgtaaagrtattgggggcctctcacaagaaggccacaatcaaaatgttagccatgctgcagtcatctgaaagcttgacaggagctatcaggtctctcttcaaggtggcttgctgtccttgactgaaaagtcagtgctggttgttggcaggagacctcagtacctctccacctgggcctcttcatagggttgtttgagtgctttctttatattgtgactagctctccacagagtgagagatctaagagaccatggggaaggggcaatgtcttttattacctagccttgtaagtcaaacatttacacttctgcagtactctgctagttagacaggccagtcctgattcagcgattcaatttgtaggagactgtaaaggggtgaggagcaggcaaggatcattgggctgttttggaggatgactgccacaaatggatttatctgagttttaggaaagtagaaagacatacttcagtggtaaactagcaagttatattttaggagaatgtttagctttt

SEQ ID NO: 282946 - DNA, 1130 bp, Homo sapiens
ccaattttcatgtctggacatttccagtgtaaatattttgagtatgtttgtgtgttctggaggtaacattgtttttgcttctttaataccctgtgtatgcctatgatagtgcacttattttgttttaattcaccagcagtttatgtgactrtttccccatgatctatgaactctttgaaggcaaacatcatgacttatttacctgcctatttccaaatacattgaaaggcagataaagtaaggcaggtaaagtaaggaaattgttctggcaaaagtagagacataagcaagggtggaggtaaaaaagtatgaaatacatttggaaagaataagctttccagtttggctaaagtgacagatatgattaaagaagtaataagaaatattagatagttatcttagaatcatatcatataatgtcatgaataccaaggtcaaaggtttttttattttatttttattttttattttttcccccagctttgttgaggtataattgacaaataaaaatggtatattttttaaggagtacaacatgatattttttaatwtgtgaaaaagtctatatgttacatgattgattactttttattttttagcttctttacacagataggaattttgtgatttgtgctccaactggttctggaaaaactgtagtgtttgaactagctataacaagattgttaatggaagtaccattgccatggttgaatattaaaattgtttacagtaagtatttattataagagtgatgactaattataataatgaaaaaccattgaagcaaaatgaagaaataaattcagtttctggcctcaggaattacttgattttctatatatttctagtaaagtctggtcttatttgtcattaaatttaaaacacattttccaaaattataaataaaaagtaatatttgaattgagaatttgacttttacatgcttattttttaaaggacaggcaaaatgaacaaataaaatcaaatattttgtaattctagaaatttgcataggaacttttactctcctttcttaggtatgtatttaaaaaawtttttttaatcaaagtaatatatgtatatggattaaaaatcaaatatcagtaaaggccttatagtgaaaagca

SEQ ID NO: 282947 - DNA, 579 bp, Homo sapiens
attgtaaacagtgaaattaatgtatctgaaacatccatgattatttccttaggatgaacttctagaatgaattaactgaatcaaaggatatataaaactctaaagaagtgcttctttcaataaatgttatattcatttacacttctaccagaggctattttcctgtatcctaacactggatagtataataatggaattattattgctattattatttttaaatatttataggatttattgttgagtgtagtatctcatttaaaaattttttacttctttgatttctactaaggtaaaattttaaatatatttatcaactactttgagttctttttttaaaacttgccaggttatgtcatttgcctttttttcacattggaatactaaatttttcttaacttatttgtaagcaattattatgtactagtactgtctaattcttgaaacttttcccctttgtgataaacactacttstgtgaatgctgtttctgtctcttttgtcagatcttcttcctccgtttttccctaaattaaggtttttattcttggccttctgctcccctctgtctgtaaattct

SEQ ID NO: 282948 - DNA, 539 bp, Homo sapiens
ttacagtcattaggagaagagacactatggctttttcagttttcagtgtttttacgttgactctttctcatctttgtgggcttatctacctttgatctttgatgttgctgacctttgaatgaggtttttatgggatcttttttgttgttgktggtggtgttttctgtttgttttgcttttaacaggccactctactgtagagctgccgcagtttgctggggatctgctccaaaccctagttgcctcagtttctcccgtacctggaaatatcaccagtgaagactgtgaaacagcaaagatgacagccagctacttcctctagaagctccatccccagggagtactgacctgttgccagtctgcatgtacctttaggaggtggctggaaaccccagttgggatgtctcacccagtcagtggaacaggatcagggacccccccaaagaaacagtctgactgtttttttggtagagcaggtgtgctgcattgccaaggccaatatcaaggtgctttgccctatgttctcttctgggagtttt

SEQ ID NO: 282949 - DNA, 626 bp, Homo sapiens
cttcattactacttcaatctcattatgtgttattggtctgtttaagctttctatttcttcctgattcaaacttagcaggttgtatttttctaggagtttgtccatttcctgtaggttatccaatttgttagtattaatayataattgttcataatagccccttatgatctctttgatttctgaggcatctgttggtgatttctccagtttcattttttattttatttgtttcttctttttttttccttagtctagctagatatttgtttattttattttttcaaagaaccaagtcttggttttattgatcattttctatgtttttttggtggatctctatttgatttatttctgttctgatctttattatttcctttcttctgctaactttgcatttagtttgttcttttgctagctcctgtaggtataatgttaggctgtctatttagtatcttctttttttaatataggcacttattgcataaaatttcctcttgagttcaagaccagcctgaccaacatggggaaaccatgtctctactaaaaatacaaaattagccaggcgtggtggtacatgcctgtaatcccagctactcaggaggctgaggcaggagaatcgcttgaac

SEQ ID NO: 282950 - DNA, 492 bp, Homo sapiens
gggttattattgatagataaggacttactcctgccattttaattgttttctggttgcttggtagatcagttgttcctttcttcctcttgttgtataagtttgtgatttgttgtttttctgtagcgctaagctttgattcctttctctttctcatctgtatcttctgtagcttcttgctttgcagttaccacaaggcttacgtaaaatatcttakagttataatagactattttaaactgaacttcagtcacatacaactactctagatttttgccctccccccacaatttatgtttgttgacacagtttacatctttttatattcagtattccttaacaactcattgtagctgtatttttgactattttgatttttcaccttcataatagagatttgaaagatttgcacaccaccattacagtggtggcacattctgaatttgactgtgtatttacctctaccagtgtgttttatgctttcatatgttttca

SEQ ID NO: 282951 - DNA, 492 bp, Homo sapiens
gggttattattgatagataaggacttactcctgccattttaattgttttctggttgcttggtagatcagttgttcctttcttcctcttgttgtataagtttgtgatttgttgtttttctgtagcgctaagctttgattcctttctctttctcatctgtatcttctgtagcttcttgctttgcagttaccacaaggcttacgtaaaatatcttagagttataatagactattttaaactgaacttcagtcacatacaamtactctagatttttgccctccccccacaatttatgtttgttgacacagtttacatctttttatattcagtattccttaacaactcattgtagctgtatttttgactattttgatttttcaccttcataatagagatttgaaagatttgcacaccaccattacagtggtggcacattctgaatttgactgtgtatttacctctaccagtgtgttttatgctttcatatgttttca

SEQ ID NO: 282952 - DNA, 547 bp, Homo sapiens
atgaacagctttgctttgtatagtattgtttactggcaatattgtcttctttcaggactttgaatgtatcatctcatgctctcctggcctgcaaggtttctgctgagaaacactgatagtctaatggagattcccctataaatcacttgacacttttctcttgctacttttaaaattctctctttgtctttgactttccacattttggttataatgtgcctcagtgaggacctttttgggtttgaacgtgtttggtgattttgagattcatggaactggatgtccatgtctctcccaagacttgggaagttttcagcaattattttrttaaataaactttctatgccttttcctcattcttctccttctggaacctccataatatgaatacttgtttgcttaatggtgtcccataagtcctataggctttgttcactcttttttgttcttttctctttcttttttttccctctgactaggctatttcagaaacctaacttcatttcacagattctttcttctgcttgttttggtttgctgttgaagc

SEQ ID NO: 282953 - DNA, 629 bp, Homo sapiens
aatgctattctgacttacataccataggctagctttatctattcttgaaaagattccgtttatatgaatataaatcttttgatgaaaggaaattattaattttaaataatgctgctgtgaacattgttatatrtatatcttttgatacacatgtatatgtatatctgtgggtatgtgcctaggagtgaaattattgtgttaaagggtatgtgtagtttcagctttagtgaatagcacaaaatggttgttattaccaaacatattttcctaggaacattcatgttataatgaaagttcattagaagatattaatcacttgatagatacttgctatgtataaaacatttggaaatttattccataccattcttgttaaaatatgatattcctgttcattgtttctgtggatatttaagccttgtttgaactcaatcagctgagatttttttttcttatataagatttcattagactgctcttcactagttaactggggtataaactgagcctgtaaagatgagctaaattctattttactttttcatgacatgcaggttttgcatctggattgaacaaagatggaattgaagcaaaattacaaggttagatgcatttcattctaaaaatta

SEQ ID NO: 282954 - DNA, 629 bp, Homo sapiens
aatgctattctgacttacataccataggctagctttatctattcttgaaaagattccgtttatatgaatataaatcttttgatgaaaggaaattattaattttaaataatgctgctgtgaacattgttatatgtatatcttttgatacacatgtatatgtatatctgtgggtatgtgcctaggagtgaaattattgtgttaaagggtatgtgtagtttcagctttagtgaatagcacaaaatggttgttattaccaaacatattttcctaggaacattcatgttataatgaaagttcattagaagatattaatcacttgatagatacttgctatgtataaaacatttggaaatttattccataccattcttgttaaaatatgatattcctgttcattgtttctrtggatatttaagccttgtttgaactcaatcagctgagatttttttttcttatataagatttcattagactgctcttcactagttaactggggtataaactgagcctgtaaagatgagctaaattctattttactttttcatgacatgcaggttttgcatctggattgaacaaagatggaattgaagcaaaattacaaggttagatgcatttcattctaaaaatta

SEQ ID NO: 282955 - DNA, 589 bp, Homo sapiens
ggtattatctaatgttaataaactgggaggaacttaacaaggcctgtttgttcagattcttcttggcctctctatgtagcattctttcttctcgggcatgagataggaccattccgtgggtatgagacaggaccattccaccctggaatgagggtcttagacttttagacaaggtaggtcagagaattcctttatgaccatgcttcacacagaaaggcagggaaagatcagagtgactttcttgtttctgaagtcctcttagtcttattgagttygaaatgccttgagtcagcattttctgagccctgctattatccttggagctctgccttaaatctgtcaggaaggatccttagcatagtatatgctgtttcctaaacttgattatactttcttgcttagtatactcttaatagcttccccgtcactcttagaataaaatacaaactttcaccacagcccacaaaatcctgcttgatatctccctgcctatttctctaactacatctcttatcactttctgtctcttttattctactctcaccaaattggccttcttgctattccttaaacacaccaagcttgttcc

SEQ ID NO: 282956 - DNA, 589 bp, Homo sapiens
ggtattatctaatgttaataaactgggaggaacttaacaaggcctgtttgttcagattcttcttggcctctctatgtagcattctttcttctcgggcatgagataggaccattccgtgggtatgagacaggaccattccaccctggaatgagggtcttagacttttagacaaggtaggtcagagaattcctttatgaccatgcttcacacagaaaggcagggaaagatcagagtgactttcttgtttctgaagtcctcttagtcttattgagttcgaaatgccttgagtcagcattttctgagccctgctattatccttggagctctgccttaaatctgtcaggaaggatccttagcatagtatatgctgtttcctaaacttgattatactttcttgcttagtatactcttaatagcttccccgtcactcttagaataaaatacaaactttcaccacagcccacaaaatcctgcttgatatctccctgcctatttctctaactacatctcttatcactttctstctcttttattctactctcaccaaattggccttcttgctattccttaaacacaccaagcttgttcc

SEQ ID NO: 282957 - DNA, 620 bp, Homo sapiens
taccaaatggcctggcaatgcaggaacaagtacgggcctctggcccaggcagatgggcgacaccaagatggccccagggaagaaaggaaagaaaagaattggagtttgattttggataaagagaggatctcaagcctgaggtttatttatttgtacctatgcctgctgtttattccctggtgaagctgctggaacaaatctgcgtccgcctcgtgtggcctcgctgcatggaagggagacagcagagctcatgctttggygaggctttccacatgttggaaatgtgacagctgcctggactgctcgtcctggtctttggcaacactgaccacctgtgtgtgaagcagcaggtcattcagtgtctttgagcctcaggatttctctgtaaaaatgaggatatatattcacaatatgaatctcagacaatattagctttgaagtttttagatataaaattgtttatgccatctgtccatggccactcatagaattaaatgaagatctaggagggcaggcgtgtgtctgaggccctctgtgtccccatggagctgtccaaccttgctgtcacacacagtcagtgttttaaaatggaattgactccttgacgatgtgctgccgtt

SEQ ID NO: 282958 - DNA, 620 bp, Homo sapiens
taccaaatggcctggcaatgcaggaacaagtacgggcctctggcccaggcagatgggcgacaccaagatggccccagggaagaaaggaaagaaaagaattggagtttgattttggataaagagaggatctcaagcctgaggtttatttatttgtacctatgcctgctgtttattccctggtgaagctgctggaacaaatctgcgtccgcctcgtgtggcctcgctgcatggaagggagacagcagagctcatgctttggcgaggctttccacatgttggaaatgtgacagctgcctggactgctcgtcctggkctttggcaacactgaccacctgtgtgtgaagcagcaggtcattcagtgtctttgagcctcaggatttctctgtaaaaatgaggatatatattcacaatatgaatctcagacaatattagctttgaagtttttagatataaaattgtttatgccatctgtccatggccactcatagaattaaatgaagatctaggagggcaggcgtgtgtctgaggccctctgtgtccccatggagctgtccaaccttgctgtcacacacagtcagtgttttaaaatggaattgactccttgacgatgtgctgccgtt

SEQ ID NO: 282959 - DNA, 593 bp, Homo sapiens
ctaccaggagacaaaaaccaggctgtgtttgttctgctgagcaactgtcttattctagggaagctataaataataaaagatataatttgtagaatcccattatgttatcatgtcacttcaattcatttaatcctcacaattaccctaacaaggagtttgttaacctgtttttgtgacatccatctacactcatcatgttgagaatgaattaaattcatcttctctgataaacctgcagcctatctggattagggggaaaaaggaaagcaaactcaggctcatccatactgtgacttgcagggaactgtgagtaatccaccaaagaaacaaagccagatagagtagtacattttctagataaacacaggtgtcacctgaccagattggtgatttacaaagatgaggctggatgcagcatagggaataaactagagaggaggaggaactgttaagagactgctgtctcctctgttctctccattcacatctagtttcttattgcacaatgaccccgggccatttgtattacccacctgaatttcatagttaacacatctggaaacaagcytgtcattatcctcagggaatcgttt

SEQ ID NO: 282960 - DNA, 630 bp, Homo sapiens
tggaggtttggatttgctaagatggaacaaagaagggagagcagtaaggagtctgagggtgtaagatcctgcagagcactcagagaatattttttggaccccagtgtgggctgttagggcaacaattcttcccacttctattttgattcctttttccccctagatccagacaagtactttgacccagagatgaagtctatcaaatttccaagtggtactcagaatctcaatcttcctctaatgattacattttgttgcagataaatatgttcactttgctgcacatgtttaattttccctacaagactgcaagttttgaagggaagaagcgctaattcttattcatctgtttcctctcagcagagggtctckctgcactggaatcacttggcagcttttacaaatcatgatgtctgggtccacccctagagaattggccttgagtgcagcctggggtactgggctcttaagaaacctcagataattctgatgggcaccaaggatggaagcctcgagactatattataaagcaatgtctcacatatagaaggtacttaataaataattgttgggaaatattaatgaatgggcctgggaaacagcttctcagctagcctcctgaactcaggt

SEQ ID NO: 282961 - DNA, 630 bp, Homo sapiens
tggaggtttggatttgctaagatggaacaaagaagggagagcagtaaggagtctgagggtgtaagatcctgcagagcactcagagaatattttttggaccccagtgtgggctgttagggcaacaattcttcccacttctattttgattcctttttccccctagatccagacaagtactttgacccagagatgaagtctatcaaatttccaagtggtactcagaatctcaatcttcctctaatgattacattttgttgcagataaatatgttcactttgctgcacatgtttaattttccctacaagactgcaagttttgaagggaagaagcgctaattcttattcatctgtttcctctcagcagagggtctctctgcactggaatcacttggcagcttttacaaatcatgatgtctgggtccacccctagagaattggccttgartgcagcctggggtactgggctcttaagaaacctcagataattctgatgggcaccaaggatggaagcctcgagactatattataaagcaatgtctcacatatagaaggtacttaataaataattgttgggaaatattaatgaatgggcctgggaaacagcttctcagctagcctcctgaactcaggt

SEQ ID NO: 282962 - DNA, 613 bp, Homo sapiens
gtaagctgttgaatacaatattttattgaatataataaaagcaaagagaaatgtcaacaataatgataccagaatgcatcctgtatttccattaatgaggaaactgttctggaattaatacatggaattgattgtatggtatattgcctatttgcagtgtcatcccatgccattatctaactatttacagaaaaaaaaaagaaaaaacttctatgtaaaagcaaggaaaatgagagaaagaataatttcaaagggggatctaatttcagatgatgaatgccagctgtcaatgaacmtataccgactgtgtttttgataaaactaatagtccaagcacctagaactgttacccctttaattgttgatccctcattttttaaatcataaatatgagtggctacctgcctccttcacaaggtcgtggtgagaagcaaattgatgccagtgccattttttccacctcaattccttgggttgcacaattttgtgggaatttcctgggaaaacttcaaagcaatttaaatagatctgtcccaaccatgcaattacaggagctgatgacgtttcagaaacagtgacaaagttcagaatcccattcttccatcctagatgg

SEQ ID NO: 282963 - DNA, 613 bp, Homo sapiens
gtaagctgttgaatacaatattttattgaatataataaaagcaaagagaaatgtcaacaataatgataccagaatgcatcctgtatttccattaatgaggaaactgttctggaattaatacatggaattgattgtatggtatattgcctatttgcagtgtcatcccatgccattatctaactatttacagaaaaaaaaaagaaaaaacttctatgtaaaagcaaggaaaatgagagaaagaataatttcaaagggggatctaatttcagatgatgaatgccagctgtcaatgaacatataccgactgtgtttttgataaaactaatagtccaagcacctagaactgttacccctttaattgttgatccctcattttttaaatcataaatatgagtggctacctgcmtccttcacaaggtcgtggtgagaagcaaattgatgccagtgccattttttccacctcaattccttgggttgcacaattttgtgggaatttcctgggaaaacttcaaagcaatttaaatagatctgtcccaaccatgcaattacaggagctgatgacgtttcagaaacagtgacaaagttcagaatcccattcttccatcctagatgg

SEQ ID NO: 282964 - DNA, 579 bp, Homo sapiens
gtggtgagccacgtggatgggtgccttttgctcagggagctgctggggttgggtggggaggggtcacagtgagagagagatcatgcacacaaataaatgatcccacagtgacacctgtcatggacagtctttaggaggtcaaggaaatgaggtggtgtacytaagctgagatgtgaaagaaaggaaagatctccatcttgggaagatcctggcaaagattccagccagaggtcagagaactaggaaggtctctgaatttggagaaccctatcctaagtttagattttattctaaatttagtagaaaaccattaaagagttataaacaggggagtgaggtaagctgatttatagtcacttaaaaaagatcattgtggctgctattggagattaaactggctaggaggtgggggccagggtggcgagaggtaagcagaaagagaatgaatgatgaatcatggcacctggactagggtggtggaggtggagagacagtgagtgagagatgctgactgtgcttgcttctttctatgaaagatcagaacacctcactcaacacttaagcgtagagcctgtggca

SEQ ID NO: 282965 - DNA, 539 bp, Homo sapiens
tgaatgatgaatcatggcacctggactagggtggtggaggtggagagacagtgagtgagagatgctgactgtgcttgcttctttctatgaaagatcagaacacctcactcaacacttaagcgtagagcctgtggcacatgatgactggatgttgtctcaaatgcattctccactctttcctatctgtgtcttgtctttgcaactagactgtcacgtcattcgatacatagataccaatcactggccctgtgtgtgacactggccctccccatctaggaactttccagaagggaggaaacataaagcaaatatacaattaaccagcaaacactacagcatctggcaggtrccataaaggcaaaaatatcagtcttgttgaaggagagggcagcagccacaggaacacacagctaattcctgaagaaaggttatttaaaatgactgggaggtcaccaaagggttttaagcaagacagtgacatgatcagattagcaaatggattggagtgagcctacactggtttgcaggcagttgcaagt

SEQ ID NO: 282966 - DNA, 1046 bp, Homo sapiens
tttctaataatcaggcatattaataataaacactatatatttaacagttttaaaaagcagatcagactcccctgggccarcaaaatggtccttgatgcctgatgggcatatgaacaagagggttcagtgaaaggttaggagcaaaagaaagtcgcagtgggacaaattccccaacctcttctgtgtttttgtctattggataatatcgccttttgagatatgaaaattgaagaagaaaatataatcttaattcagcattttgaagtatttaaatctgtatgaaaagaataccagaacatgttacagaatactgtaaaaaaaactttagcagattacagttcttttgaaggagactaggaaaaatgtgtttggtttgtatgaaaatatgccctggactttgtagcaggaaatcctcaaaggaaagaaagaatgttcagaagacactagcagaaccagtgaacttatggaaataggwgcagtagaaccaagatgcaaccctgcagttgtttaggtgtgagattgggagagwctaaactcagacagaatggaaaagaaaggtgctgtgaacaaaagaattggaaaaacttggtgattaattaaatatgagaaatgagagagaagtcagtgaatacagtgtatcttggcatcctgtaggtgtaccaaggagggcatcaggaggagtagaagaggaagaattttattttaggctactgaagggaaatacagagcctaaaaattagcagatgaataagaaaataaaactagatggtctcttaactagcatcataaaatatattcattcaatatgaattaattttaagatttacatcattattacctagaagattctccaacccacctggcatggcactgtgttagttcatattacttagttcttaaaatagcagtgtatgaaggaggtacgactgtgcattttccaggggagccctaggaagttaaagtgacagtctcaaggtcacagatcaagttaatggtggaactaaggttgtattggtcttctttgctgcctattacataattactcc

SEQ ID NO: 282967 - DNA, 485 bp, Homo sapiens
cagtagaaccaagatgcaaccctgcagttgtttaggtgtgagattgggagagtctaaactcagacagaatggaaaagaaaggtgctgtgaacaaaagaattggaaaaacttggtgattaattaaatatgagaaatgagagagaagtcagtgaatacagtgtatcttggcatcctgtaggtgtaccaaggagggcatcaggaggagtagaagaggaagaattttattttaggctactgaagggaaatacagagcctaaaaattagcagatgaataagaaaataaaactagatggtctcttaactagcatcrtaaaatatattcattcaatatgaattaattttaagatttacatcattattacctagaagattctccaacccacctggcatggcactgtgttagttcatattacttagttcttaaaatagcagtgtatgaaggaggtacgactgtgcattttccaggggagccctaggaagttaaa

SEQ ID NO: 282968 - DNA, 571 bp, Homo sapiens
gcagtagaaccaagatgcaaccctgcagttgtttaggtgtgagattgggagagtctaaactcagacagaatggaaaagaaaggtgctgtgaacaaaagaattggaaaaacttggtgattaattaaatatgagaaatgagagagaagtcagtgaatacagtgtatcttggcatcctgtaggtgtaccaaggagggcatcaggaggagtagaagaggaagaattttattttaggctactgaagggaaatacagagcctaaaaattagcagatgaataagaaaataaaactagatggtctcttaactagcatcataaaatatattcattcaatatsaattaattttaagatttacatcattattacctagaagattctccaacccacctggcatggcactgtgttagttcatattacttagttcttaaaatagcagtgtatgaaggaggtacgactgtgcattttccaggggagccctaggaagttaaagtgacagtctcaaggtcacagatcaagttaatggtggaactaaggttgtattggtcttctttgctgcctattacataattactcc

SEQ ID NO: 282969 - DNA, 525 bp, Homo sapiens
ttgcaacttcttcttcatgacctttaactcatcattttacaaggaattatacaacctcagtagaaaaatatctctttgcttggctctgctttgtttctctttaataactgtattgaccttctgattgacttctttaatttttctagttattatcatagctcagcccactgttttctctrtaattcaaaacactattctttggctcattatcttgcattatttattcaaagcaattattattacacacacttggcaatgtcatttattagagctatggtgtgcagaataaagtagcaatattagaatggaaacatttaaaagggcaagtcctcaatgttagaactttgcctagtatcaatctaaatgaaaattaatttaaatagcggacttttatcatctgaataatgaagtctttgcctacttaaaaactttctgttatttttctttttttaaaaaattattcctttaatcaaaattagccaaagttttacaaagcactaaactaactttcatttgtggattgca

SEQ ID NO: 282970 - DNA, 604 bp, Homo sapiens
  misc_feature (1)...(604): n = A,T,C or G
tataccaatattctagcagttgattttgccttgagaaagagatgcctttacaaaatttgtccaagggcattgcatgggctaatgaagcttgggccttggastagtggtgggaaggtgttgagaagtggtcaaagtagattatggagatgaaatttatagactttagaagttgacatagggaatgagatacaaagaagaatcaagaagacattatttttctgactcaaaccactaggtagtatcatttaccaagatggggcaaatgggatcatgcccatgtgacgtgggagagggatggactcaagggttcatctttaagatgtctattaaacattcaaataaagagattgagtagacagttacatatactaaattaggggttaatttctgatatgctcagtttcaatgttattgtatcatgaaatgatacaataaattgatgttacatttctccctaatagtgtaaggttactggatcgactggatgtagatctggtgcccaaagacaaaaaataggagcatttttcanaaagtgcttggaattgactatgattatctagtaanatttatagtggatgaaccacatctgggcctctagccaagt

SEQ ID NO: 282971 - DNA, 525 bp, Homo sapiens
ttgcaacttcttcttcatgacctttaactcatcattttacaaggaattatacaacctcagtagaaaaatatctctttgcttggctctgctttgtttctctttaataactgtattgaccttctgattgacttctttaatttttctagttattatcatagctcagcccactgttttctctgtaattcaaaacactattctttggctcattatcttgcattatttattcaaagcaattattattacacacacttggcaatgtcatttattagagctatggtgtgcagaataaagtagcaatattagaatggaaacatttaaaagggcaagtcctcaatgttagaactttgcctagtatcaatctaaatgaaaattaatttaaatagcggacttttatcatctgaataatgaagtctttgcctacttaaaaactttctgttatttttctttttttaaaaaattattcctttaatcaaaattagccaaagttttacaaagyactaaactaactttcatttgtggattgca

SEQ ID NO: 282972 - DNA, 779 bp, Homo sapiens
ttgtggattgcacagcatggctaaaacgataaagatgggaatcaacaaataccattgaagatatggagcaaagagaactctcacatactgctggagggaatataaattagtataaccactttggaaaactggtcgtacctgtaaaagctgaacatttgcctattcagtgacgtgtcaatttcactttttatgkatataccctaaaggaaggataacaaaaaatcatgaacaagaatgcttataagcggtacaagatattcacaatagctccaaactggaagctgtttaaatgctcatcagtattggaatggataaattgtgatatattcatacaaggcaatacttatacagcaatgataattaaattaatatgtattcacaaggctggaatgtacaaaaataacatcaaacaaaagaaactagatacaaaaaaagcatgcactcttgttctcactcataggagggaattgaacaataagaacacttggacacagggtggggaacatcacacacaggagcctgtcatggggtgggttgtagggggagggatagcattaggagaaatacctaatgtaaatgatgagttaatgggtgcagcaaaccagcatggcacacgtatacctatgtaacaaacctgcacgttgtgcacatgtaccctagaaattaaagtataataaaaaagaagaagaaaaaagcatgcactcatgacttcatttacataaagttcaaaaacaggcaatctaatttatgatgatagaagtgaggagaataccccttgg

SEQ ID NO: 282973 - DNA, 604 bp, Homo sapiens
  misc_feature (1)...(604): n = A,T,C or G
tataccaatattctagcagttgattttgccttgagaaagagatgcctttacaaaatttgtccaagggcattgcatgggctaatgaagcttgggccttggactagtggtgggaaggtgttgagaagtggtcaaagtagattatggagatgaaatttatagactttagaagttgacatagggaatgagatacaaagaagaatcaagaagacattatttttctgactcaaaccactaggtagtatcatttaccaagatggggcaaatgggatcatgcccatgtgacgtgggagagggatggactcaagggttcatctttaagatgtctattaaacattcaaataaagagattgagtagacagttacatatactaaattaggggttaatttctgatatgctcagttycaatgttattgtatcatgaaatgatacaataaattgatgttacatttctccctaatagtgtaaggttactggatcgactggatgtagatctggtgcccaaagacaaaaaataggagcatttttcanaaagtgcttggaattgactatgattatctagtaanatttatagtggatgaaccacatctgggcctctagccaagt

SEQ ID NO: 282974 - DNA, 542 bp, Homo sapiens
tatatacatttggccaccctgttcagcattaattcctgttccctttgtccctcccttgaagtgtttctttctggctttggacaggaggctgtgcttcccagcctgttggaatggccacactgcaggctgcaaccctttatgagaaagaaagatttcctttccaaactaaaaaaaggaaatgtttacctggaaaacccaagagaatcagcagaaatgcataaaaacaatgagagaattcagtaagacatcaattaatagaaatcaatagtctctgtatacataaatacatgttagaagacataatcgaagaaaagactccatttaggatagtattctcaaagataaaacaatgagaatgtggaagtaacaaccttaagccatcttggaagaataaaaagtaagacttggacaygtgaaaagatgtcccatatttttagatcaaaatatgtggcaacagaaagctatcaattctccctctcaaaatttattatgttaaatttttggagataaacttcaaatgaaccagagatttacatgtttta

SEQ ID NO: 282975 - DNA, 577 bp, Homo sapiens
tacttcatatatgaagtaaacaaatatttattgaacactctgttttggccaggcaccaggctaaaatggcaagcaacatttttcatgatcctgtcctcaaggatcttatggtctagggtgcaaagagtaatgaactaaatagatacaaaattagaattgtgtgaacaattaaagggacctcatcttcacaaaactccaagtagatccttaacaaggctagaattatgagtgcaatgaatgtgtactatgggtgtgtaaaagatttgatgcagatttagggtcaggaaggttcccttaggacatgaccctgaactagatagataaggaggcatcaactarctgaagagctggcttgggggtggggtggggcactatgtcaagtacatgggatctttgtctattttcttactaaatgatctaatcctcaatggtattagaaaaatgtccgcaaagacactaaaagcttcatggctaatatttctaattgcaagcatcctctgaaactttaatccactttataaatgaaggatatggattctagatcacacttaaggtttgtatgggggctagattacat

SEQ ID NO: 282976 - DNA, 1095 bp, Homo sapiens
attgctctttcccaagatctttatttgcagcaggaataatctttgagaacatagctgtatgcagacagacttatagtctaagataatgttcttcaactccatcttctaattcccttaggggatccacacagcaccatatcacactttcctcaggaggaggccaggcagaattttggaaagtgagagcaacagtatcttttttgtggttgtctgattgtagaaatgataactctctgattagaaccatggccaaagggagaaaatatacttctgtagagggaggagacattggggaaagatatttctttcctgacatatttgatcttgctgaagtttattttatttttcctcttcattattgtaaagtgtttggctactgatcttaatattaatggcaatgataacagtgtgtgaggcacggctctgagcacttcgtgtgtatgaacscacatgatcctcagaattatccttgtgaggtgaggctctccatttttccagtgaggagactgagctggtaagtgagcawttagaatctgataggttctcaccaaatacttgaatgaacacataaatgtggtatccgtgtaatcatcagaatacgaaaggatatttgaaattgatgctgtactggaaaatccaggacattttagttgcttaacaaacaagaacatttagaattgtctagctagtcacaggtttcaaaccgtcattctttggtttgaagaggggagagggaaagggtgttattgttcatttttcttaaacatttcaacaacttaaattctaagatatttaatcagaaggataaaaagaattccgggacctatggttttattgataagtgctattgattcttcactatgctatcttccatatggctgacattatataaaagatcaaggtaagatacttaactgggtaggcttggatgtcttataaacacatgatttagctttcaggctatcagtagagctatcagattgtggacgtcagtggtttccaactctagttgtaccatagaaccctctaggaaaatttaaaaatatatwtatgcctggattccaccacaggataattaaaatagaatatctgagt

SEQ ID NO: 282977 - DNA, 446 bp, Homo sapiens
atgtggattaaattaaataaagaaattcatcttctttgctttaagatgatgcctacatttcctgtgtattttctgggggactattccatttaaatcatcatatagcactagataaaagaatacagtaatgaatcataaagtcctagaatgtcaaactggaaggaacctcaaaagtcattgaaccctctcattttccaatcaaaggtggagagcttaggtccaacgttgctcagctgattcagcaggcagcaaggtctcctctctccctaaagacctttgctccrgagatggtcaaggagatgccacaacctacaactaactgattcacagcacctggatactgcatgccgatctccgaacgtgtgtgtcataaccgtcaccctacacccttttcttggccatgttaaagattcatctgcctcaggcctagccctcaagtccctacc

SEQ ID NO: 282978 - DNA, 537 bp, Homo sapiens
ccatctgaaggcttcacaggtttagggacttttcccagcaattatctccccaataggaggaaactgttgacagacaactstgggtgagagtccatcctaattgctggggctcagcttggctgtggggaataatgagtgaaagtttagggcatcatttcctgcagtgtagttcaggcaactgggatccagaaacaaggtttgctgatgactagacctaaaattcctcacaattaaacagagttatgtcagtctcttcctattttatagattcctgggatattctgcaattgagaaccactaacttcatcaacttaaaagaatatttgtcatagccagttcgtactctgtgctgggcgggggtactcctgtcatctcctgtcagggaatttctccttgtgaatttggcagatatattttgcccagaatagacactaattctggtctatgcttccgttgagtggaaaagcactgaaaacaagccagcctcttagtgctcattttctcttgataaatttgagaacgtactctcctaaatat

SEQ ID NO: 282979 - DNA, 537 bp, Homo sapiens
ccatctgaaggcttcacaggtttagggacttttcccagcaattatctccccaataggaggaaactgttgacagacaactctgggtgagagtccatcctaattgctggggctcagcttggctgtggggaataatgagtgaaagtttaggrcatcatttcctgcagtgtagttcaggcaactgggatccagaaacaaggtttgctgatgactagacctaaaattcctcacaattaaacagagttatgtcagtctcttcctattttatagattcctgggatattctgcaattgagaaccactaacttcatcaacttaaaagaatatttgtcatagccagttcgtactctgtgctgggcgggggtactcctgtcatctcctgtcagggaatttctccttgtgaatttggcagatatattttgcccagaatagacactaattctggtctatgcttccgttgagtggaaaagcactgaaaacaagccagcctcttagtgctcattttctcttgataaatttgagaacgtactctcctaaatat

SEQ ID NO: 282980 - DNA, 609 bp, Homo sapiens
ttgctgatgactagacctaaaattcctcacaattaaacagagttatgtcagtctcttcctattttatagattcctgggatattctgcaattgagaaccactaacttcatcaacttaaaagaatatttgtcatagccagttcgtactctgtgctgggcgggggtactcctgtcatctcctgtcagggaatttctccttgtgaatttggcagatatattttgcccagaatagacactaattctggtctatgcttccgttgagtggaaargcactgaaaacaagccagcctcttagtgctcattttctcttgataaatttgagaacgtactctcctaaatatgtgcataagcaatcaggaattgggtaggattattctgtgatgattactattgcctgttttctttactaagaaagaacataggcaaatggaatataagactatatatgatggtcaaaacaaggggccttactcactgtgtgaggtacactagaggtacactgtgtacatcaactgtccaaaaggcaatttggggcccaggatagactctacttagaactggatgccaagtggatggcactgcctgtttcccatggctgtccttcctgacca

SEQ ID NO: 282981 - DNA, 423 bp, Homo sapiens
tttatagattcctgggatattctgcaattgagaaccactaacttcatcaacttaaaagaatatttgtcatagccagttcgtactctgtgctgggcgggggtactcctgtcatctcctgtcagggaatttctccttgtgaatttggcagatatattttgcccagaatagacactaattctggtctatgcttccgttgagtggaaaagcactgaaaacaagccagcctcttagtgctcattttctcttgataaatttgagaacgtactctcctaaatatgtgcataagcaatcaggaattgggtaggattattctgtgatgattactattgcctgttttctttactaagaaagaacataggcaaatggaatataagrctatatatgatggtcaaaacaaggggccttactcactgtgtgaggtac

SEQ ID NO: 282982 - DNA, 599 bp, Homo sapiens
cagctcaaagtaaagtactgccaacaccaagtcaatcttagtaggtaaatatgaggctgtacttagtatatgctgctaactgaggcctgtgagctccrtacctgtcatatactgtgagttactgatctgatttaccttcatacaatagtttttaaatttcattttgtatcaaaataagctggagggcttagtgaaacataggatcccatctcatgtgtttctgatttagtaggtctgggatggggcctgagtgcctaggtgatgctgttgctgctggtccagggagcaaatttgggaatgatggtttgaggtgttgggcaagaaaatgttttacctgccccatttgaaaaatgggggacttcagtactggcctacatgatttcagttgtttgaatgtctatgcatgaatgggaaagagaaatatttattaagacactcttatgtgccagaaacctcatacattacctcactgaatgctcacagcagcctgataggtagttattattgtcctcacttccaagttaagagaatggaagctcagagaggtcagttaacttgcttaagtccatgaaagtagcaagtgctgaggctgaggttca

SEQ ID NO: 282983 - DNA, 597 bp, Homo sapiens
gtccccattgaccttcacattgccaattcaatagacaccatactggatctagcagcagcattggacctgctgagttctcctcctgaaactgtctgctcctttgtctttcatgacagttctcatggttctctttttatcagtctgcttggctggcttttcttctgccctcccattaagcacattggcgctccccaaggttctgtcctttccactccacttgctctcctaagataatctcattgactcccaagcttctaagtatcatgctctgccaatgatttccaaattatatttctggcccaactctcctctgagcatctgacaatgccacctggatagctccagaattatgtgacatccaacatgtccacaaccaaaactattttcctcatcttcctgccttccttatactgatttaataaaatctgaatgyatggcctcctctagacccctctttgactccctattcaatgactcctgaaagctctggtctgctgaccccacctttcatgatcactcaaagctgtcccacctcttcatcactactgctgttcttatcctcttacctgacctactgcaggaactttccaactgagc

SEQ ID NO: 282984 - DNA, 597 bp, Homo sapiens
gtccccattgaccttcacattgccaattcaatagacaccatactggatctagcagcagcattggacctgctgagttctcctcctgaaactgtctgctcctttgtctttcatgacagttctcatggttctctttttatcagtctgcttggctggcttttcttctgccctcccattaagcacattggcgctccccaaggttctgtcctttccactccacttgctctcctaagataatctcattgactcccaagcttctaagtatcatgctctgccaatgatttccaaattatatttctggcccaactctcctctgagcatctgacaatgccacctggatagctccagaattatgtgacatccaacatgtccacaaccaaaactattttcctcatcttcctgccttccttatactgatttaataaaatctgaatgtatggcctcctctagacccctctttgactccctattcaatgactcctgaaagctctggtctgctgaycccacctttcatgatcactcaaagctgtcccacctcttcatcactactgctgttcttatcctcttacctgacctactgcaggaactttccaactgagc

SEQ ID NO: 282985 - DNA, 612 bp, Homo sapiens
ttgctaaataaaaatgtgttcgattgtactattataaaactgatgttgctaaaatgatcattatgatgttatgtcacatatttaatatcatatkgtggtatcaacgtaaactcattagtaagcagaactaaagactttaagtcaaaggaaacaatgaatgaatgaaaattaatgttctgaagaaaacatggatttttaccaccactcctaccaacaaaaatctattcaactctattcaaagatccaggtttgctatccagatacctctaaaagaagaaaatacagcagtcttaagaagaatgcatatttcctcacgttgtcagcttgacatattcaggacagaatctctccttcagtgcttaacattttgattcatagactgaggtctcagaagctaaaaaaatggaaatatgtcatctaaatgtcagcactgattttatgatattccagaaggaagcaaatgggaactcatgagagcttaggtgtcctgtctgagagttcagtgcacagtgtcttggaagaacctgagtagagtgtgtgtgatatcttggaaggattggaaattggagtaatgatcatttatcttggtaaaaagcccttagcttctgtgtt

SEQ ID NO: 282986 - DNA, 593 bp, Homo sapiens
gctcagatggcaatccaaagagtkccaggcacataataagcctcacatgggtattcatttaattaagtactaaaatgtctaagtggaaacattactaagctagtttttcaatgctgaatttggaattctgaagtcaaagacgattgcacaatatatatttttaggggaaccaagaagtcctgaggcatctccttatgacttgccttggtgccaggtctttaccttagcatagttagtttgctgaatgaaggcagggtttccagaaggttcctgttaagaagacgcagtatagggaagaggctaaacttttgggttctgttgtcaatagacttgagttcaaatttcagctctatcacttttagctatgaaattatcagtatgtctgtaatcttttagtgtcttcatctataacattgtaatgaaatattaatatccatgcataagaatgttttacaaattaaataggataatgtatacagagtgtttaatagagtggtccatttcctccataggaagagggaagagctatgtgattgttgtgagtctggcttgcaatgggccatggcttccagagatggggttgctacactgaa

SEQ ID NO: 282987 - DNA, 478 bp, Homo sapiens
taaacatgttcagaaaaagactacacgaatttttacagacctgtgctgaattactaaagaatgtacttcaagaaggagaaacttctactcagatggaaagaatgggattcaaagatcaatggtgaacaaatacagttttaaactatggcaaaatctaaagaagcyttaattgaaaccataacaatataatgtaaaaacagggtagcagaaatatacacaatttgaaatataagcacatgttggttgatgggcatttaggctggttccatatttttgcaactgcaaattgttctgctataaacatgcacatgcaagtgtctttttcatacagtgacttattttcctctgggtagatacccaatagtgggattgctagatcaaatggtagttctactttcagatctttaaggaatctccatactattttccatagtggttgtactagtttaaattcccaccagcagtgtagaaagtgttc

SEQ ID NO: 282988 - DNA, 529 bp, Homo sapiens
tttgaactgagtatcaaaggctgagtaagaacttagcaggtaacagggcagaaggagrttttcaaaggtaaggctcctaagtacaaaggtacatggaacattctagaaactgcaggtagttcacaagccagtgctcgtggggaagtggcagaatacaaggctggaaggcaggctccaaatctggtcttcttcctttcaaatcaatgtgttcagaatcagcttctatgaaatgtcagattacaatcaaaaagggatatatagaaaacacatgaaattaaaacataatggaaagagaaaactcttcattttagtaatcaacagtatttcggtatttcagttcacagtttgaaaatggatctgaaaagtaaacatgtcttgagaatagagaaatacagattacaaactgtgagacatctaagacatcaattaaaatacccaaagttacaatattcaggatgtaaaccatggaacaatttataattcatttttctcttgctgcaaatctctacctgtcaatattaaaaaatag

SEQ ID NO: 282989 - DNA, 540 bp, Homo sapiens
ttaaccttcagggtcctctatatccaaaatgctggagcagaagcccaaagtaatatttccaaattaaaaaaatagaaaatggaccactggaatagtattggtgcgcattcctagcagaacaatatgcaaagtcaatggacactargtctgaaggtcaactgagatttcctcagcacttcctatgggccatgtgctttacaccatctttaccacaactccatgcagtgggaactcctcattgtgcagatgacaaactgacacccagagctggagcacaactaaatagtgatcccaagttacaaagagtttctttgatcactttaattgccaggacacaggtttatctctcagtttttgttaactgtgaaagacatcatggtcttcacatgcatcctaatctaaacccagtctttaacgttgtactcttgtttatagtttcctaacactaaagttttatttatttactttattgcaagataaaccacttaacttaaattcacctcaaattctttgaagaataatgtcagttataaacaaatg

SEQ ID NO: 282990 - DNA, 540 bp, Homo sapiens
ttaaccttcagggtcctctatatccaaaatgctggagcagaagcccaaagtaatatttccaaattaaaaaaatagaaaatggaccactggaatagtattggtgcgcattcctagcagaacaatatgcaaagtcaatggacactaggtctgaargtcaactgagatttcctcagcacttcctatgggccatgtgctttacaccatctttaccacaactccatgcagtgggaactcctcattgtgcagatgacaaactgacacccagagctggagcacaactaaatagtgatcccaagttacaaagagtttctttgatcactttaattgccaggacacaggtttatctctcagtttttgttaactgtgaaagacatcatggtcttcacatgcatcctaatctaaacccagtctttaacgttgtactcttgtttatagtttcctaacactaaagttttatttatttactttattgcaagataaaccacttaacttaaattcacctcaaattctttgaagaataatgtcagttataaacaaatg

SEQ ID NO: 282991 - DNA, 535 bp, Homo sapiens
gagcgcacacagtctgaggtttgycaagagatggttattatagtggacactgaagaaataaggatggtcaattcatttgggacaacaagatgtagttttttagtgactattaagaattttagtttctttagttctagtgttaccccattttaaatatgttttagttcaaataagcacctcgtgcaaagcatactctcagcatgcattaatgcaatcattctgatgttctacttaaagtgaggcatggagggtgagtaatttaagaggaatttcacttctgtgcatctccctgtccaattgccaatttaattaactaatcatttcataatcaaacagtataaaaagcaaaaattccaaattactagacatattcaaatcaaatacttctcagtcctctcaggcaaatgttaattctcgcaagaatatgcactgtttataacctcactaatgtcaaaagaagaagggaggttggctcttctcagcactttgggcagtttaaattttcaagtgactggtgagaaaaagacagagctct

SEQ ID NO: 282992 - DNA, 580 bp, Homo sapiens
tcacccacaagatgaaaataattttgatgtttcctctattagttatattgctgttaagtgattatacaatggatccaactgaagcttggtataactataattctcagtataatgttttataattagagtatttaaatgtgaatgtcataggttaattgtgtccatttaattttacagggataccttggagacattgcaggttaagytgcagatcaccacgataaagtaaaaatacattaaagtgagtcacaaacttcttgtttttccagtgtacaaaagagttatgtttacactatactatgaagtgtgcaatagcattatgtctaataaaaaatgtacaagccttaatttaaaatactttattatgaaaaaatgctaatgatcatctgagccttcaatgagtttttgctggtggagggtcttgccctcattgttgatggctactgactgatcagggtggtggctatgaaggttggagtagctacagcaatttcttaaaataagacaacaatgaagttcgccatattgactctactttcaatgtggcatgaatctcaatgtgcaatgaaatttcacagtt

SEQ ID NO: 282993 - DNA, 633 bp, Homo sapiens
gcctccaattctaattcttgttctcttgctatgtccaccacatttgcagtcacttcctccactgatgtcttgaacccctcaacttatttcaaattcctgttaatgttgatattttgacctcctccggtgaatcatgaatattcctaatggcatcaagaatggtgaatcttttccagaaggttttcaatttactttgcagagatccatcagaggaatcactatctatgggggctgtagccatataaaatgtatttttttatataataaaacttggaagtcaaaattactccttaatccatgggctgaaaattgaatgatgttgtgtttgcaggcatgaaaacaacattcatctccctgcacatctccatcagagaccaagtgcattgtcagygagcagtaatattttgaaaggaatctttttctgagcagtgagcctcaacagtgtacttaaaattgtcagtaaaccatgctgtaaacagatatgttgtcatccaggttttgttgttccatttattgagcataggcagagaggatttagcatcatgcttaaagccccagagtttttggaatgggaagtgaactttggcttcaacttaaaaagtcaccagctatattaacccctaacaagtgtca

SEQ ID NO: 282994 - DNA, 584 bp, Homo sapiens
atgatgctgatgctgctggtaaaagaatcagacttagaaaactagttttagaggaatttattgaaagaaactgtaattcaaatgctgcttcatgttagaaaaaaaatcatttttttaatgagaataactgcttcccaaattatctgttcagttaattttaactctctgaaattgaattttctggaatagtggaccctatttatttttctttttttctgttttcttttagygactgaggcctcactttgttgcccaggctggagcacagtggctattcacaggtgtaatcatagttcactgcagccttgaactccgggcttaagctatcctattgcttcagcctctcaagtagtgattagctggtactaaaggcacctgccactgcaccttgctgctatttctaatataagtccaatttttagggagcgatgactccctaggtaaaatctttgttgaatagcatgtgagcagcatttagttggagaattaggtaatgaaaagacatagataatatctcaggtaaaagtagaaatattaattaatgatgatgatgacgatgatgacacttactgagtgcttactat

SEQ ID NO: 282995 - DNA, 1151 bp, Homo sapiens
ctttcaatcaaggtgtcctgctctccctgaccaagtgatgggttcctgacctaggccaggccaatcagaagctccttccagtagaaggatacacttcagcagcagtgccctgatgaagctgtgcattcattcctgctacccagatcctacgagttagcctaattcrtggcattcctaaaacttagttcttctttcgattctttaatttttttaagttgcttgcaaactctccccctacttcaaataaaaatggattttattgttttcttctttctttctatactggcctggcacagtgcctagaaatcaataaacatttatggaataagtaaatgaattaatgcttacatgcatgaataatcaaaacctttgaaggggaatagaaaaaaaagtgtcagaagcaatggaaaaggcttagggacagtgccaacattgttcaatggtgatagctacttgtgtcttttacatccctgctgtttacgtcatatttcctgacattacataggaaagaataagaaagttctttcattatgccaggataaacactgttcagaaggatccacctattattaatcwctttcaatcaaggtgtcctgctctccctgaccaagtgatgggttcctgacctaggccaggccaatcagaagctccttccagtagaaggatacacttcagcagcagtgccctgatgaagctgtgcattcattcctgctacccagatcctacgagttagcctaattcgtggcattcctaaaacttagttcttctttcgattctttaatttttttaagttgcttgcaaactctccccctacttcaaataaaaatggattttattgttttcttctttctttctatactggcctggcacagtgcctagaaatcaataaacatttatggaataagtaaatgaattaatgcttacatgcatgaataatcaaaacctttgaaggggaatagwaaaaaaagtgtcagaagcaatggaaaaggcttagggacagtgccaacattgttcaatggtgatagctacttgtgtcttttacatccctgctgtttacgtcatatttcctgacattacataggaaagaataagaaagttctttcattatgccaggataaacactgttcagaaggatccacctattattaatc

SEQ ID NO: 282996 - DNA, 611 bp, Homo sapiens
acaaacaacgattcaaccacagtgggatgcaatatccatttatttagcccatgagtctgccaagactgatctgtcctggacttagctgaactcacatgtctaggacatgttacaactcaaaagttacaacccaggacagttacaactcaaaagatttggggaactcagcactatcttattctccagcaggctattgtcagtatgttcttgtgatcatggcaatgaagtaagagaggaaacagaggcgggcaagtgcattttcaagcctctgcctgtrgcacaactgctaagattatattgaccaaggcaatccatgtggctaagctcagaatcaaggggaaatcagatacactacaccttttgaagtaagaaactacagagtcacattgaaagagaaactagatacaggaaaggatggaagatggaggcattatggctggcagtctgctgtattctccttcatatattaaggctgtgatggaatttttcttatcataatttcagtggtaaggctctttttctctttggttcaatcacaagtctcataataagcaggttgctaatctgtaagtactccaaggcaataacccaacacagtgcctaatacagag

SEQ ID NO: 282997 - DNA, 555 bp, Homo sapiens
cttggaataccctgcctgatagtggtgtctttgtctacaggggccataatccacactagagagtttatgttaataatgtgatttatggtggggacttgtggtgtcaatgtggcctctggagaagctggaaactgaggaattaaggtcagcyacatgggtgcttcatgcctgtgtggctgatccccaataaaaaccttggacatcaaggctcagggcagcttccctggttgtcagtattccatatgtgttgtcacatacactgatgctgggagaattaagtgctatgtgtatgattgctggaagagggcaactggaagttcatggctggtttctcctgcattccaaactatgtgtctttttcttttgttgatttcagcccaaatccttttgtcacaataaaccataaccatgagtacaactagttttctaagttatttgagtccttctagtgaatcactaagcctgagagtggtcttggggacccccaacacagtcagtgagagcaggggctagtgagtaaggaattcatgatcatgaggaatctctgacgtgaag

SEQ ID NO: 282998 - DNA, 493 bp, Homo sapiens
ggtgtcaatgtggcctctggagaagctggaaactgaggaattaaggtcagctacatgggtgcttcatgcctgtgtggctgatccccaataaaaaccttggacatcaaggctcagggcagcttccctggttgtcagtattccatatgtgttgtcasatacactgatgctgggagaattaagtgctatgtgtatgattgctggaagagggcaactggaagttcatggctggtttctcctgcattccaaactatgtgtctttttcttttgttgatttcagcccaaatccttttgtcacaataaaccataaccatgagtacaactagttttctaagttatttgagtccttctagtgaatcactaagcctgagagtggtcttggggacccccaacacagtcagtgagagcaggggctagtgagtaaggaattcatgatcatgaggaatctctgacgtgaaggttctaaaggttatggagtttacgttttaagtgcaac

SEQ ID NO: 282999 - DNA, 559 bp, Homo sapiens
gagggacaagcagcaggtctgtgacaggcctgctctgttctttcctccccatccgacttccccagcagtttcccacttcaggtgatgacaactccaccctcccagcggttgcagctaaaagccttggagacctccttgttttttccagtcaagccctataccagtatccattgacytctcaccatccctccagcaaagaccgtggtcctcttgtttgggttatcacaaatgccacatgtctacttattccttcttctcctcttcatcctattagtgcagcacctcaagcggtcatatgcaaaagcaagtgagattatggcaagcacacagccccagtcaataccctccggtggctttccagctgatatggagtaaatgctggtgcctacctgggcctagatgttcttccccacttcctttccccttggccttttttgcccttttccttggctctcagcactgcagtctctctggctcttttttctgtctatattatactgcaggcattctcctgccacgggcttttgtctttgctgtttccttagcctatctcgacatg

SEQ ID NO: 283000 - DNA, 559 bp, Homo sapiens
gagggacaagcagcaggtctgtgacaggcctgctctgttctttcctccccatccgacttccccagcagtttcccacttcaggtgatgacaactccaccctcccagcggttgcagctaaaagccttggagacctccttgttttttccagtcaagccctataccagtatccattgacctctcaccatccctccagcaaagaccgtggtcctcttgtttgggttatcacaaatgccacatgtctacttattccttcttctcctcttcatcctattagtgcagcacctcaagcggtcatatgcaaaagcaagtgagattatggcaagcacacagccccagtcaataccctccggtggctttccagctgatatggagtaaatgctggtgcctacctgggcctagatgttcttccccacttcctttccccttggccttttttgsccttttccttggctctcagcactgcagtctctctggctcttttttctgtctatattatactgcaggcattctcctgccacgggcttttgtctttgctgtttccttagcctatctcgacatg

SEQ ID NO: 283001 - DNA, 569 bp, Homo sapiens
caatgatgttacactaacaaacagacaaactgcagttggtttttggaagtaatacttyaaaatgtttaaggtctttgtttataaaattaacaataaaaatacagaaatatgaaagctattattttttcagtgtaaataccatcctttttgattgtcctacctttcctgtttccacaccaatctatctcacataaatatctgcaccttactgcagcgtatctggcatcatgtatctcccctctcaaatagctccagtgacttttcattgttccagacagcagtcaaacttttatacttaagcaatggaaccctttcttggaaatgagtgttatactaaattataataaagatgaaagtagaaatgctttgctttaagtagggtgggagtggtgagcctatagaccaaatgactgtctaatactctaccccaacacccagcatggcacacattcagaaacatcagagcttagcgaagcagtgtgcaaaactccagcctgaagaattaagtagatttttaaagaacactgctacccaagatctaccacaaataatgattccaaattaccttc

SEQ ID NO: 283002 - DNA, 569 bp, Homo sapiens
caatgatgttacactaacaaacagacaaactgcagttggtttttggaagtaatactttaaaatgtttaaggtctttgtttataaaattaacaataaaaatacagaaatatgaaagctattattttttcagtgtaaataccatcctttttgatygtcctacctttcctgtttccacaccaatctatctcacataaatatctgcaccttactgcagcgtatctggcatcatgtatctcccctctcaaatagctccagtgacttttcattgttccagacagcagtcaaacttttatacttaagcaatggaaccctttcttggaaatgagtgttatactaaattataataaagatgaaagtagaaatgctttgctttaagtagggtgggagtggtgagcctatagaccaaatgactgtctaatactctaccccaacacccagcatggcacacattcagaaacatcagagcttagcgaagcagtgtgcaaaactccagcctgaagaattaagtagatttttaaagaacactgctacccaagatctaccacaaataatgattccaaattaccttc

SEQ ID NO: 283003 - DNA, 569 bp, Homo sapiens
caatgatgttacactaacaaacagacaaactgcagttggtttttggaagtaatactttaaaatgtttaaggtctttgtttataaaattaacaataaaaatacagaaatatgaaagctattattttttcagtgtaaataccatcctttttgattgtcctacctttcctgtttccacaccaatctatctcacataaatatctgcaccttactgcagcgtatctggcatcatgtatctcccctctcaaatagctccagtgacttttcattgttccagacagcagtcaaacttttayacttaagcaatggaaccctttcttggaaatgagtgttatactaaattataataaagatgaaagtagaaatgctttgctttaagtagggtgggagtggtgagcctatagaccaaatgactgtctaatactctaccccaacacccagcatggcacacattcagaaacatcagagcttagcgaagcagtgtgcaaaactccagcctgaagaattaagtagatttttaaagaacactgctacccaagatctaccacaaataatgattccaaattaccttc

SEQ ID NO: 283004 - DNA, 633 bp, Homo sapiens
agtgtgaatgaatgaatattttctataagtgaatttgcaatggttagggaaagaggtagattttcaatctgatttactcagtttggctctccatactatcccattaatcagataattgtgaattttcaacttgtgccatatgtgatttgtactttctagtttgcttacacccctggggtccttacaaattacacatctgggagctttttgcacacaaaacttcagaataagtgcagatttttattttgaagtacagtaagtattgtcaagtccagttcccrtagctctcagtgccaaccttaaaagatagaggcgattcacttataggttatcctgccagagttgtaataaagaaaacatgattcccagaactctgccttgagaactctccatctttcatttggcatcttggagcttatgcttagcttgttaccttcctgttgtctattgctttctctttcctgataaggcaaagtgaccatatcccataaaactacagctggttttagtttaattttgagggtggtgaggtatattatttctttctaaaataaaaatcattatttgtagatgaaattaaaatgcttgaaaacacaactacattctgcattaatgtgaagtctcaggaacatc

SEQ ID NO: 283005 - DNA, 607 bp, Homo sapiens
taattaatttatgtgaaaaacagaatgaatatatttctcagtgtactattattttaaaaatcctgtgggaagaaaaatgcttttgtggagaaaacagtatctggtttgtatcaacatatcactgctgtcacttgggcaaaatcacatttgctgatgtaagaaaatgcaagagccaaatgcaagtctacaaaaagaaacaaaattaacaggaagggtggtggaccccttggttgtccatgctgtcttcttctgccttcattctgagtcaattgattgacaggccttcttmtgacttctaacttttcttcctctcaactctgaaggcccttcttcatttagaaatgctcctctgtggaactgcattctccctctgcaactgtaacatctgtacttcccagctatcagccacacttctgctggacagctccttgctttccacactttttgatttaatgattaactttcctttttctcctaaagatgccattagtttagaattcctcaccccctaggccttctgctatctcccaccctaaataattcctatcatttgattcccctctttcaattttcatagagcagagagttactggtcaaagtcacaaaa

SEQ ID NO: 283006 - DNA, 646 bp, Homo sapiens
tatttcctgcagtctttttatctgttccttgttgacattgtgtcacatttttcatagtaggtatctaaaactttagaaaatttttcctgtcttctccatcttacctttccctactcccagccttgaaccatcctggtagatcttcacagttggcctcatctcttcatgctgatcaaagttcctgaagcttcctatttttmttctttaaaattttattgtaacatactcattacttgcttgatctctccttttctagatagaaacagttccttctgctttccaaaaccaacgttaccttcaatgctcttgattctagctcttttaacgccttgtcaaaccttatgcattaaattatctgataatattttatcatcttcaatatttccccctccaaatctcttttacttactattgggaaacagttctccataggtctcctatgtatctttctgtctttgagcagaggcatggctgcctttgttctggactagtatcctaaggatgtttatatagcaaatagccttggaagacagagagtatctcgctctctgtctcacttataaaagatttgggatctctaaacccagcatttctctcctataaagaaacccactgtgtatataggtgtcacttggccttctctctg

SEQ ID NO: 283007 - DNA, 576 bp, Homo sapiens
aggtttacgctctttggaagatgatatttgctgtggaacagaagcaaagagaagaccctgaaacctgaagtcagagcccagtggagtcctggctttgccccttactagttgggtgacctcattttatcttcctgtgaaacagagagcataatattgactgaattggatcattatgaaaattaaacaagatggcataccctttaaagcaatttgtgatctaaaaagtgcattctctaatcttgtcttaacagaatttcctcttcctcttttaaccactgaaattagcatttatgaattgctctaaattagaaacagataaaaaagaacccagatatctttctcttcagtgtcaatcctaaaaccaaattaaatttctcagcttagaaataactctttacaataaatattcaacaagtatataacataacccagacacatatgccatcaacatgtagttttctgtaragtgccagctagcacgtactttaggctttgtgggctatatggtctctgtcatgacgattcaactttgctgttatagcatggaagcagccatagatgatatgtaaacatatg

SEQ ID NO: 283008 - DNA, 1224 bp, Homo sapiens
ttcatttcacttttcaaaagatataattttggctttgggggcagatatttagaatcttctctggtcagagccatgacaagggaaatgaaattacaatgaatcacgggaggagggatccaaaaagcacctccaagttagggcccaacagagaagcctaacgttaatctggagatcataaatgcacrcaggtcaacatacatttaataatattttattatgatactttgaataaggctgaatcagaaatacaaggcggtatttgcaaactgtcaaaaatgttaagctttctttgagtgctagaagggaaatgcactagccttactactagtgtgtgttttactttgggacttttaggtaagtagtgtaaaggactttctaggcttaaagaattaaagaacgcgtgattatagcatcctcattcttagacggcttggaaaatgaatgatcttagcttggtttgaaaactatagaatagaatatatttttagcataataaatctttcaatcctttcaaaaaacagatccatagaaagagcaaacagatggaagcccatgtgctgttttgtaacatgtccagggttttcaaattggataaacactgaaaccctgcagcggcaawtcagcccataacacctgctaagtccccaactgtcaagtcccccccattccaggctgcatcccaaacctgctttggcactggaaggagctataaccgtcctgaagtccaacccttgtttccaagagaggggaagtaatttatcccacgtgatgcagcaaataaaaatatccagaaagtccaggctcctgttagcacatccagggaaaacacagtccaaagaggacaaacttgagtccctcagctgagcatatctgaaaggtgatgtcctcatgttctgtgtgttctgccagctcagcaagttttgggattgcagattcggtgagggaagggcaggggcacaagttggccttcactttttctggacagctggagagaaaactccaaccagtaacatttaggagwgcctactgtgtgctaagcactgttcaaagcactttacaagaattaacttgtttaagctccacaacaaccctatgaaatacatatgtgacaattcttataaccattttggagagggggaaactgaggcaccaagaagtgaagcaacttggccattgtcatacatctgacaatgagtgtatgtagcagcaccaggattctggctg

SEQ ID NO: 283009 - DNA, 612 bp, Homo sapiens
gaagtcactccctaggtgtgatggtctcctgttcacccactccttgccagagctccaatcccacatcaggcctcaggcatacctgtgtatctttgctcaggttatgcccctaacctggcacttccttctgccttattctgagaactcctacccatccatcaaagcccccctcatatgtccctttttctctgatgagcctgccatcccacctagcctgcccacccggctttggtygcacctctagtacaggtgtattacatttcctggctgtttgtcctggttattcattgagagctgggatcagggccatcactgcccaacttgcgcactattctgaaaggtagctttgtgactttgggcaatgtcaaatgaatgaatgaacaaatgagtgagcttttctgatgtcaaaacgtgggtgatcccaccaccccctctcaggagtttttgagaagacgggcataacctgattcctgaccttactgcacagcctgtgctgggtgggggcagccagggaagagaggaaaggggtatgtagagggatgaagtaactgagctctaacgctagagtgatgtttctcacctttttgttcataaggactcctaccccccaaa

SEQ ID NO: 283010 - DNA, 633 bp, Homo sapiens
ctctgaactcccgagaaggagacacatctgatccttagtacatgctggcgagatggcatggtgggatcgatcctgccatgtttggcctctttttcttgatttctttgcagagcctggctttagagtaacactttgccattcactagctgtgtgaccttgggcaaattcttcaacctctctgagtcttggtgtttcttctgtaaaataagggttgtaaaatagtggaccgtttgcctggttcttgtgaaaaccaagagattatatgccaggtgctgagtactgtgctagggacatgttgggtgcttgataagggatgggggttattctgagtgtcagcggtgggactgttttatcctgccatctcccctttcacccacaggaatgagcagcccagtgggtaaaggttggccagaactatagttgactcaactacagttgagtgaatgatctttgctygcttttcttcctcccacactttggttggggaaactgaggccaccctgaagttcccacctacacctcatgactttctgagatccctggagggtggcttaggaaatgtctttggagatttgggaacacactggatacatcagttggtgagccagggaaattagcaggaacgagctcatt

SEQ ID NO: 283011 - DNA, 600 bp, Homo sapiens
tgagatcacgtatgcccatacctcgtcactgatgccctcattatatagaaaagaggctctcagagatattaaatggcttgttcatccasccagttagtgaaggagctgggcccaagccctacctcaatagcatttcctctttcctttttttttttaaaaagcagtacgtgattcatgtggatcatttagaaaacaagaaaagcacaaaggaaaaacaaattacccttaatgctaccaccctaaaagaaaataattatattattcttcttaaaattatttggatgttatttttcctgtcatcctttttctttgcaaaatatgggaagtagaaatggtctctatgcagccaaatgaaaaagttcatatagctgttttgtagctcttttctcttagcaatactgaaaacattgtcttcaattcaacacatagtctgtgatttttgatggctgcttagtattccatgccatatttacttaaccaatcccccagggctggatatttaggttgttgcagtgactttttttttttaaaagaaactatcataaaacattgccgcttggtgagcatcttatgtctttgtgcacatcattggtgacttcc

SEQ ID NO: 283012 - DNA, 600 bp, Homo sapiens
tgagatcacgtatgcccatacctcgtcactgatgccctcattatatagaaaagaggctctcagagatattaaatggcttgttcatccagccagttagtgaaggagctgggcccaagccctacctcaatagcatttcctctttcctttttttttttaaaaagcagtacgtgattcatgtggatcatttagaaaacaagaaaagcacaaaggaaaaacaaattacccttaatgctaccaccctaaaagaaaataattatattattcttcttaaaattatttggatgttattttycctgtcatcctttttctttgcaaaatatgggaagtagaaatggtctctatgcagccaaatgaaaaagttcatatagctgttttgtagctcttttctcttagcaatactgaaaacattgtcttcaattcaacacatagtctgtgatttttgatggctgcttagtattccatgccatatttacttaaccaatcccccagggctggatatttaggttgttgcagtgactttttttttttaaaagaaactatcataaaacattgccgcttggtgagcatcttatgtctttgtgcacatcattggtgacttcc

SEQ ID NO: 283013 - DNA, 609 bp, Homo sapiens
catacacatggcagaatctgccagtggagattggggccagaagggacaccagagtttccgatagtccatcctcttaggtttgaggaaaccaaagcccagggcttaacttgcctaaaatcacaaagtgaattcgggcagagtggtttgcagcatgagctgtgtcctctggacagaggtgagggtggaggatgggagggagatgctccccttgtgtctgttttggctgtttcttctccctgggaagattccttcctcctcccctacagggagctttgggcccgatactcatatgttgggagggaagttctgcctcatgtctacctgagacggttgtggtgtagtggaaaaaaccctgactgggagtccttagactttgggttagcgatggggggcttctgctgctgactagctctggtgtcctgaggacatggcttaatctccctgagcctcagtttccccatctgtagtgtacgtgatagtcctcgtctcccgttcatgccataaggatctaatagagcgggcyggtgtgagacacgcaaaacacagcagacgtccagggaacaaaacttcctcaccaactgccaactccaatacgcagggtacgggagg

SEQ ID NO: 283014 - DNA, 579 bp, Homo sapiens
caaattaattatataagaaaacatgaaaaatggagtaataatgaaaacacaatgtccacacagagtatgcatacctcccatagtagcctcttcccccaacagctgtgcctgctatctgagctctctttacytcacacacttgctcttcactttatattttctttctttcctttttttgagacagggccatgctctgtcacccaggctggaatgcatggctcattgcagcctcaacctcctgggctcaggtgatcctcctacctcagcctcctgagtagctgggaccacaagcatgcaccaccatgcccagctaatttttttttttttttttcctagagacagggtttcgccctgttgcccaggctggtctcctgggctcaagcagtctgccctcctgggcctaccaaaatgctaggataataggtatgagccaccatgcccagcccattttataattttcaaagaaaagtcacatccatttgtgactgtatctgtcctcaggggatgagtgaggccaggaattaccatcaacgtattatacatatgaggaaactgaggcaagagaagagctacgacttg

SEQ ID NO: 283015 - DNA, 579 bp, Homo sapiens
caaattaattatataagaaaacatgaaaaatggagtaataatgaaaacacaatgtccacacagagtatgcatacctcccatagtagcctcttcccccaacagctgtgcctgctatctgagctctctttacttcacacacttgctcttcactttatattttctttctttcctttttttgagacagggccatgctctgtcacccaggctggaatgcatggctcattgcagcctcaacctcctgggctcaggtgatcctcctacctcagcctcctgagtagctgggaccacaagcatgcaccaccatgcccagctaatttttttttttttttttcctagagacagggtttcgccmtgttgcccaggctggtctcctgggctcaagcagtctgccctcctgggcctaccaaaatgctaggataataggtatgagccaccatgcccagcccattttataattttcaaagaaaagtcacatccatttgtgactgtatctgtcctcaggggatgagtgaggccaggaattaccatcaacgtattatacatatgaggaaactgaggcaagagaagagctacgacttg

SEQ ID NO: 283016 - DNA, 595 bp, Homo sapiens
caaaacttgaattatttgcccttttctgtagcatttcatggaaaaacctgctggtctgggagatggctgggcaggaccctctttcacagggaggytggtgttctccaggagtggaaccagcttccaatgtaaccaaatcaaaggcctgccacctccatgaggccctcaccctcacttggctgcttaaacattggcgaaatgagggtcagtcaaagcagaataatttcagggactctgagaatatttaggccatcagacatttctcacgccttacatcccaccagtaacacttaataaacaatggccagatgctgtggctcatgctggtaatcccagcactttgggaggccaaagtgggagatcacttgagccccagggggttcaagatcagactggacaacatggcaaaaccctatctcatcaagtataaaaattagccaggtgtggtgctgcgtgcctgtaatcccagctacttgggaggctgaggcaggaggattgcttgaacctgggaggcggaggttgcagtgagccaagatcacaccacagcactctagcctgggcgacagatgactctgtctcaaataaataaataatc

SEQ ID NO: 283017 - DNA, 595 bp, Homo sapiens
caaaacttgaattatttgcccttttctgtagcatttcatggaaaaacctgctggtctgggagatggctgggcaggaccctctttcacagggaggctggtrttctccaggagtggaaccagcttccaatgtaaccaaatcaaaggcctgccacctccatgaggccctcaccctcacttggctgcttaaacattggcgaaatgagggtcagtcaaagcagaataatttcagggactctgagaatatttaggccatcagacatttctcacgccttacatcccaccagtaacacttaataaacaatggccagatgctgtggctcatgctggtaatcccagcactttgggaggccaaagtgggagatcacttgagccccagggggttcaagatcagactggacaacatggcaaaaccctatctcatcaagtataaaaattagccaggtgtggtgctgcgtgcctgtaatcccagctacttgggaggctgaggcaggaggattgcttgaacctgggaggcggaggttgcagtgagccaagatcacaccacagcactctagcctgggcgacagatgactctgtctcaaataaataaataatc

SEQ ID NO: 283018 - DNA, 499 bp, Homo sapiens
ctcttattttttcttctaaattttatggtattaggttttacatttgggtgtattatctattttgagttaaattttatatatggtgcaaggtacttcaggtggtgttttgtttttttttttgcatatggatatccaattattcagtaccccacmacccccatttttttgtgggacagggttttgctctactgcccaggctggagtgcggtggtgctatcatagctcattgcagcttccaactcctgggctcaagtgttccttccacctctgccttctgaatagctgggactacaggtgcacactaccgtacctggataattttctccttcttctccttcttcttcatttttttcattaagagggagtctgactatgttgcccaggctggtctcaaacttgggttcaagtgatcctcttgccttggcctcccaaagtcctggaattacaggtgtgaaccaccatgcctggccagcactatttattgaaaagactatccttt

SEQ ID NO: 283019 - DNA, 598 bp, Homo sapiens
ataggtgtgagaagcatttacttggctacaagtaacctgacccatggcgatgttggacaagcactgacgttcaccatttgagccccactgcaagcccttgatggcatctaactagttttgtacaacctgctgaaccatacaaagatattcactgggggcccatcccctccaggccctaaaaatcatactatttctcaccttcacactgtgtaaccaccctytataactagaacatttgctagtctcttctctgcataaaagtgatgattcatatctctttcatctctgttgggggttctgacctatgtacttgtaattcagtcctcatgtttaaattctacacaaatttaaatttagggtgttgagtgcatagtggacactgtaaatatttactaattgactaagtctgtggcattaacctaaagcattatcattgtggttctctgaacagaagtttcttaccagattattacattgggcggagaggtacaggcctttatgagtaattgccacgccactgtacatcaggagagaaagctcactgtggcctgggctgtcagcagcttttggatatttaaagaacatctcaaagttcaag

SEQ ID NO: 283020 - DNA, 516 bp, Homo sapiens
agtgagaaagagagaaaggggcccatattaatacacaagcaaagaaatgaaaactattattctaaaatggctgatctctagaacagcttaaacaaaaaccgaaattcagaatcaactcaagaaaaataaagcatgagaaggtgccatttaatgaagtgataatctttggttcaatctagaaaacaagtaaaaacagaagagaaaatcaaaggtgactggattcctgcaaaaaatgaaagtggcaggcatcttttcatcaaaagggaattggctggcacastgagagtgcctatttgtcagacccacgcaggcgataaaggaaatgaaggtgagagtaaaaagggaaaaaagtgaacgaccctgactaaaatgagaggaaaaagaccattcccttgtacttgccatctggtttatttcaagctttggaaaagaacaggaaaaacacagataaaccagtgaaccagctagattgccagcacggatcagtcacacacttttgcttctgccaggccaggc

SEQ ID NO: 283021 - DNA, 516 bp, Homo sapiens
agtgagaaagagagaaaggggcccatattaatacacaagcaaagaaatgaaaactattattctaaaatggctgatctctagaacagcttaaacaaaaaccgaaattcagaatcaactcaagaaaaataaagcatgagaaggtgccatttaatgaagtgataatctttggttcaatctagaaaacaagtaaaaacagaagagaaaatcaaaggtgactggattcctgcaaaaaatgaaagtggcaggcatcttttcatcaaaagggaattggctggcacactgagagtgcctatttgtcagacccacgcaggcgataaaggaaatgaaggtgagagtaaaaagggaaaaaagtgaacgaccctgactaaaatgagaggaaaaagaccattcccttgtayttgccatctggtttatttcaagctttggaaaagaacaggaaaaacacagataaaccagtgaaccagctagattgccagcacggatcagtcacacacttttgcttctgccaggccaggc

SEQ ID NO: 283022 - DNA, 601 bp, Homo sapiens
tttctctctcaaaggagatccaaatttaaaaatatggagccaagggaatcagttcctttgcraacacactgaacgttagttttcttcttctcttttgcaaaaacttcttatttcacaaaatactcaaacaaatagacaaagtacagtgaagtccaggtagatatcatccaccttcagcaatgatcaatccatggccaatctttcatctcaacactcgtatcctcattcttgtggagcaaatgccagacattctttcatccatcagtatgtcaatatgtatctctgaaatagaaggactttttataaaacataatcataatataattaatattcattccccaattgttttgttattgtcttttacagtttaatttttgttttgttttgtttcgtttctttttgagacaggatcttgctctgttacccaggctggagtgcagtggtgcgatcatgacccattgcagcctctacctcctgggctcaggtgatcttcccacctcagcctcccaagtagctgggactacaggtgcatgccaccatgtccagctacttttttgtatttttgtagagatgaggtctcaccatgttgcccaggccagtc

SEQ ID NO: 283023 - DNA, 541 bp, Homo sapiens
ccaattgttttgttattgtcttttacagtttaatttttgttttgttttgtttcgtttctttttgagacaggatcttgctctgttacccaggctggagtgcagtggtgcgatcatgacccattgcagcctctacctcctgggctcaggtgatcttcccacctcagcctcccaagtagctgggactacaggtgcatgccaccatgtccagctacttttttgtatttttgtagagatgaggtctcaccatgttgcccaggccagtctcaaactcctgggctcaagtgatccacttgccccagccttccaaagtgctaggattacaggcatgatccataatacccagctacggtttgttttcatttggatgctaataagacccatacattccatttggttgatctatctcttcaatttcttttaaatttataattttataaggtccccttccacatttttctttgtggaagaggagaaaagacccttgttctctggatcactctgtggttaagggggtaggtcytcaaatcagatgccctggttc

SEQ ID NO: 283024 - DNA, 542 bp, Homo sapiens
actgatcaaaataacattttcaaaagtccactcaaaactcatagctagaaattctggttgcctgtgggtggtaggacagtgggttccttccttccttatgcttgtcttattggtgggttgttgtcctgatattctgtagtaagtgtgtactaattttataatttgaaaaaacctctcagttccacttttaaaaactggccaaatacaaaagtgagaagtcaattctcattatggtattcataagtaattactaattatgaatgaatatgtcataatccataatccagtagaagctgatgaacatgctggcaaaygagtgcacaacatatgtctatctgatgtactaatgaaatcccggatatgcagttacacattagtattctcttaattagtgctagagactttagcaagtgtttcttctgcatccgaaactacacaccaccagggcatcacacagataaacggccaatgctgacaatcatgcaggcagacctcttaccatccagttcccactcacatgcaaaaataccctttgcacccca

SEQ ID NO: 283025 - DNA, 618 bp, Homo sapiens
gatgggaaggataatggaaagttctcctggaggaagtaggcaaagaggtggtagttgagctttaacaagaaggcaagaaggtgactctagagacaaattccaaaagatgcctatgagactaaggaagtcaagctactgcttatgaccaagaaaaggatctagaaattagtgtagactgtttcctgagaacttcagtccaagacagtttcagacagaaaggcakgagaaatcctgggtgtcttattccttcaggctattctaacagaataccatgaacttgtattataaacaacagaaatgtatttcttatagttctggaggctgggaagtccaacaccaagttgctgacagattcagagcctggtgagggcctgtttcctggttcatagatggcaccttctcactgtgtcctcacatggtgcaagtggcaaggagtccctggggtctctctctctctctttcttttcttttttaagattactcaagtgcagcagtgagacggggagaaagagtcgaacaggaatttgatctgtaactgactatgaacactcaactgagataactctctaccttcggactagcctctggggtctcttattttttaaaatcttttcagag

SEQ ID NO: 283026 - DNA, 618 bp, Homo sapiens
gatgggaaggataatggaaagttctcctggaggaagtaggcaaagaggtggtagttgagctttaacaagaaggcaagaaggtgactctagagacaaattccaaaagatgcctatgagactaaggaagtcaagctactgcttatgaccaagaaaaggatctagaaattagtgtagactgtttcctgagaacttcagtccaagacagtttcagacagaaaggcatgagaaatcctgggtgtcttattccttcaggctattctaacagaataccatgaacttgtattataaacaacagaaatgtatttcttatagttctggaggctgggaagtccaacaccaagttgctgacagattcagagcctggtgagggcctgtttcctggttcatagatggcaccttctcactgtgtcctcacatggtgcaagtggcaaggagtccctggggtctctctctctctctttcttttcttttttaagattactcaagtgcagcagtgagamggggagaaagagtcgaacaggaatttgatctgtaactgactatgaacactcaactgagataactctctaccttcggactagcctctggggtctcttattttttaaaatcttttcagag

SEQ ID NO: 283027 - DNA, 573 bp, Homo sapiens
attagccagagaaaattatactgaggaaaagaaaatgaatacttttgaatacccattaagttccagatacttaaatatatatagactccttaaatactcctaatcttgtgatataagtattattattttcacagatgaagactttgagggtaagagaggttaaggatttgtctaatctcaaatggcaagtgaatgcaaatgatggatctaaaattcaaaccacatctgtttatcttctaaatgtattctctttacattagtcagaactctgtagggttaatgaatttgatgtagaagatgctttgcttcaacaccaatataagaggtaaaacaaaggagttatccacaagtcaagaaatgagaagtttcagcttcacatattttggcagttggcaaatgcccatcttccatagcttctctggcttttagmgagaaaagaatacattcacaaatgtagtgaaaagaatgggacttgtcaaggtgttttcagacatagaatgttgagaataaagataatgagttggagatattaaaaagagacagcctgacttcttagagagggtttacaatgtc

SEQ ID NO: 283028 - DNA, 578 bp, Homo sapiens
ggaaagcagtagtatgatcatggcttactacaacctgggcctttttggctcaagcaatcctcctaccttagcctcctgagtagttgggactacaggtatgaggtcactatacctggctaattttgtcgttgttctagagatggagtcttcctatgttccccaggctgctctcaagattctcccacctcrgcatctcaaagttctgggattacaggcatgactcaccatgtctggtccttaaaaacttttatttcaaaatgcttctctgacagctagtcatgcagtttggaaatggtcttgcaaataaatatgagcagaaaaatttacccagcaaagtaaaagatattcaagggttttctgagaaagccaattatcttctctcacctgaagtttattggtctgtttgcaaaggaataaatatatgggttaacagtgaggttgtatttgggacacggataataagaataattaacatttattaatcacttactataggttaaaagatttatataatttatcccagcaactcccctcaataactcaatagagtacatggaatttcataccagaaagtacaa

SEQ ID NO: 283029 - DNA, 511 bp, Homo sapiens
ctgcactcttcaagttaagtctccatatacacagtgactggcttataaagatgctcaataaagatgtgttgttgctgttgctgttgttgttgttgttgttgttgttgttgttgttgttgttgttacaactgcaagcccaatgctatgacctgctccctggaatttctaggcatttggctcattctgtgaacccagggaagggttagtggttatctcaatgcctctaacaacagcagagttatctgataagtcagcttttccctccagcagcagtctggatgcttcctatgacaggagataaaaagtattccaaatatgaagaaggaaggaaaactcaaatttgaagaaattgtacctaattccagcattttactacctctscctatgagattgggcctcacccaccaagctctatgcatggagcactgacactaagatgagccatgagtcaaattgccacaaaaagcactgtgatctgatgagttgaagactgaggttattgctattccaa

SEQ ID NO: 283030 - DNA, 519 bp, Homo sapiens
aatctaattacctgcctccttaaaattggagaatctttattggatgtgttcagggagaaaaaatggtcagaaagatgcaccattgctacctttgaaggtggaggaaggggtccatgagccacagaatgtgggaagcctctagaatgtggaaaaagcaaagaaattgattatctcccagagcctccaraaaagaacacagccctcctgacatcttgattttagctaagtgagaccagtgtcagaccagttttgtctaacctatagaactgtaaggtaaaaataaattggctttgttttaagccattaagcttgtggtattattttacagcagcaaaggaaaattgatacactcttttctaacctgaccaagttatgaaattgtcaaatatgaaattagccaaagaagaaaaagagggacatattttttttaacatacaacttttaagttcaggggtacatgtgcaggatatacaggtttgttacataggtaaacataggccatagtggtttgctgcacag

SEQ ID NO: 283031 - DNA, 449 bp, Homo sapiens
tgggaagcctctagaatgtggaaaaagcaaagaaattgattatctcccagagcctccagaaaagaacacagccctcctgacatcttgattttagctaagtgagaccagtgtcagaccagttttgtctaacctatagaactgtaaggtaaaaataaattggctttgttttaagccattaagcttgtggtattattttacagcagcaaaggaaaaytgatacactcttttctaacctgaccaagttatgaaattgtcaaatatgaaattagccaaagaagaaaaagagggacatattttttttaacatacaacttttaagttcaggggtacatgtgcaggatatacaggtttgttacataggtaaacataggccatagtggtttgctgcacagatcatcccattacccaggggtcccacccccaaccctctgacaggccccagtgtgtgtt

SEQ ID NO: 283032 - DNA, 506 bp, Homo sapiens
gtgactgttaaggaaacaggaatagtcaaggaggttggggtatagaatgaagcgggaagcccctaaaatgggcatgcagcaaataccccagaagccccyttctcttacttctggtgttcttcctcttcctgagtccaagcctgcactagattctacatgggaccaggccctgtcttgcaggttgagtgccaggaacccacaggcaagacccccagagaggcccaagaaactccaccagccttgtgtgagtagatgcatacctgggccgtggtgctgagtcctccccacttctgagtccactgtctatctggtggatcccactccatcccccagcctactggggcacaggtgtacttcacacagcttctgatggagatgaggaagaaaatccaaaagggaaacccaaacagtccaaaatattcaagcaaacacataaaacactgtccaccaaaccttcccttacagctaaaatagagcaacactaatttattgatttgtctccccag

SEQ ID NO: 283033 - DNA, 604 bp, Homo sapiens
caactcaacaagacacacaactgcattaaaaagtaagtgaactatttcartaaacatttccccaaggaagatacacaaatggcctgtaagcacataaaaaggcactcaaatacaccaattattttaaaaatgcaaatcaaaactacaatgagatactacttcacatgaattaggatgtctattgttttaaaaaaaaagtggaaaatagttaagtattggtgagaatgtgaagaaattggaacacttgcgccctactgatgagaatgtaaaatgataaagtcactgcacaatacagtatagtggttaccaaaaaaattaaacattaaattatcatatgatccagaaattccacccctaagtatatattcaaaagaaatgaaaccagagacttgaacagatatttgtacaccaatgttcatagcagcattattcacaatacccaaaaatggaaacaactcaaatgtctatcaatgaatgaacagataaacaaaatgtgtcatatacatacaaagcaatatagttcagcctaaaaaagaataaaattctgatacatgctacaatacaaatgaaccttaaaaacgttttgctaagtgaaataagccag

SEQ ID NO: 283034 - DNA, 1209 bp, Homo sapiens
caactcaacaagacacacaactgcattaaaaagtaagtgaactatttcagtaaacatttccccaaggaagatacacaaatggcctgtaagcacataaaaaggcactcaaatacaccaattattttaaaaatgcaaatcaaaactacaatgagatactacttcacatgaattaggatgtctattgttttaaaaaaaaagtggaaaatagttaagtattggtgagaatgtgaagaaattggaacacttgygccctactgatgagaatgtaaaatgataaagtcactgcacaatacagtatagtggttaccaaaaaaattaaacattaaattatcatatgatccagaaattccacccctaagtatatattcaaaagaaatgaaaccagagacttgaacagatatttgtacaccaatgttcatagcagcattattcacaatacccaaaaatggaaacaactcaaatgtctatcaatgaatgaacagataaacaaaatgtgtcatatacatacaaagcaatatagttcagcctaaaaaagaataaaattctgatacatgctacaatacaaatgaaccttaaaaacgttttgctaagtgaaataagccagwcaactcaacaagacacacaactgcattaaaaagtaagtgaactatttcagtaaacatttccccaaggaagatacacaaatggcctgtaagcacataaaaaggcactcaaatacaccaattattttaaaaatgcaaatcaaaactacaatgagatactacttcacatgaattaggatgtctattgttttaaaaaaaaagtggaaaatagttaagtattggtgagaatgtgaagaaattggaacacttgcgccctactgatgagaatgtaaaatgataaagtcactgcacaatacagtatagtggttaccaaaaaaattaaacattaaattatcatatgatccagaaattccacccctaagtatatattcaaaagaaatgaaaccagagacttgaacagatatttgtacaccaatgttcatagcagcattwttcacaatacccaaaaatggaaacaactcaaatgtctatcaatgaatgaacagataaacaaaatgtgtcatatacatacaaagcaatatagttcagcctaaaaaagaataaaattctgatacatgctacaatacaaatgaaccttaaaaacgttttgctaagtgaaataagccag

SEQ ID NO: 283035 - DNA, 572 bp, Homo sapiens
cctgagctttcaggatctcctgtttgaggaatcccgaaattggctgaaaatgggatggtctcttcagtattccagcatccccctgttctgtatgattcacactccaatttgcatctaggagggatttgctgacaaaaagtaagctcagttttgtctcaattattagaaagtcctcattagtagarcaaattaatgaattcttagttgtcttttaaaatactaatcatgaagtctcagcacactgctatctggcttctaacgcccacagcttcagtaactattatcaaggcaactggcaacttcctagtgttgtcacatccaagggacacttccagacatggctataagttctgtgcaattgttcatgctcttgctttccccttcagcagtgatctcagaggccatgtgtttgaggtggaagcagctggatcctcttggaggagaggcaccaaggagagctgactaccacatgaggctttgccttgagcgagaaataaacctccattatgttaggctactgagatttgaatttgtttgttatagcagctagtgtgttaccctgactactgtgg

SEQ ID NO: 283036 - DNA, 592 bp, Homo sapiens
tagtttagaaaaaaaaatggccacaagtgtgttgacactgtcccatcaagaggtggmgttgatgttctcactccttgactctagacagacttgtaactactttgaccaatagagtatgatggaagtgacactatgtgagtgctaagactaagtcacaaaagaccatgcagtgtttacttgcttctcttggaatgctcagtcttgtaacacttgtgaactccagtcatcatgctgtgagaagtgcaagccacatggagagaccacatatgagtgcttcagttgacagcactggtggagcccagtcttcaagtcatctcaacccaagtaccaggcatgggactgaagaggcctgcagatgtgtcagcccccagttgttgtagtctcccctgctgagactccagacactgtggaacagagaaaagccattcctgctatattctgctttaagtcctgacccacagcatctgtgagctaataaaatgattgttgtgttaggccactaagtttgtggtgcttcattatactgcaatagataagtggaacaacgtggacaggatgtgtacttcttgtctaggaggttgagcttcattct

SEQ ID NO: 283037 - DNA, 569 bp, Homo sapiens
ggctataggaaagctttattagtctccaacaaaaatgcaggtgctttagaggtagaaggaaattgggagagcctagccattttacctgagaaggctgcacagtcaaagatcattgttgctaaccttatgttctgctaacatgggttgtgctatgtgacttcaaacacaaacaacttattttcactacgtttatgattattattcatccttgcctaggcatgctaaattctaagaattttggaatcacacagatgtgatttcagtgcttatctggcctttagcaaggtgatttgcctcagtttcttcatccataaaatgaggggtagtaatagcacctatttatagggacattgtgaagtttggctttgttaattacacataaacaccccaacacagtgcctgacacatggcaagcactcaataaagggtagtagctctaattagtgaccaagcaataagtgagacaatactaacaggatgaaagaaamctggaggtggaagagagatggaaagctgagactttccttctctgggtgaggagggcagccctttaaggtagaaaaaaagga

SEQ ID NO: 283038 - DNA, 574 bp, Homo sapiens
aacaagatggcttgtccctttctggaactctgagaagaatttgttaaagtctcccacaaaaaaaacaaagaccaaaaccttatactacacaggaatgtggcattcaaatttatgcagcagaaatccccaagtacagaaataaacaacaacaaattttgttttaatcctaagtaagaaaaagaacctctaggacacctggctaaatcaaatgaaatcccacactctaggaactctttcacagcccagcatttgtgagactccccaaggaaaaaagaaaaaaatgataagaaaaagctctgctgaaaatgtgctcaaaatccaaaattccaaaccacacttacagtgacccagtgtagagaacaaacaggctataatataacttgtgataaataatagtcttaaaagactcaaatgataatcttcaaaatgattacatatatataaargaagaattcaagtcataaggaaagaatagacaactgtgaaaaaagaattggcaagtgaacttttagaaattaaaagattttgattagtcattaaaactgaaatttcaccgcacaaggtaagtaacaaa

SEQ ID NO: 283039 - DNA, 538 bp, Homo sapiens
ttgcaatcactataaaaaccataacttggtagtttctagctatcactcagatttctgtaacttatcttgagtttataatctatatccatcttgaatttgtagtctatgttatactttccctttgccatgactctttctaaatttcactcatgtttagcgagtccttcaggtgacctcaattgctgcctgacttcaacacrtgccttcacccttggataggcagagctttgatttccttggccttgttcagctgtggttgctacattttgtctttcactgctattacagctacagaaacaccaaaagacccctctgtgaattctccatgtttcagatgtacttttccctgcttcttctaagaagcagtaaacctatctcctcttaatcgtgagaatcctgtgctttctccagtatagtaactcctttctggcctgttgatctaaaagagatatttagaacatacaaagcctcaggttttgatttagacagtgttgctctgctgggaactgggatctctaaccagcaaagcttcagcttg

SEQ ID NO: 283040 - DNA, 565 bp, Homo sapiens
cacaatgtttttagatagcatggctatataggaagattattgattatcctggtgaatcaaaacccaacatcatttcctcaaatttataaggatggttttgtgcttattttcccccaagtttatgatatccaagttcacacattcagtacttttatgatgtaatttcttggatgcatctcctatattataatttggatagagattttccttgtaattacagcaaagtttacactatactcaaaaccatgtaaaaattatctctgacatgaaacatgaagctgttgaaatattggsatgactaagactttcacccagagaaaacaaagtgatagaatattttcattgaattttgaatcctacccctgataaaggcaaaccatcacttactccctcttattagtcacagctatttttgttacaaatgacaacacagctcaatcttacctcagcacaaaaataacttattgactcaaaggatggcactatcttcaggcatggctggctccaggaattcaaagagctgtaagaactctttatctttctatccgtatttcaatttggactc

SEQ ID NO: 283041 - DNA, 565 bp, Homo sapiens
cacaatgtttttagatagcatggctatataggaagattattgattatcctggtgaatcaaaacccaacatcatttcctcaaatttataaggatggttttgtgcttattttcccccaagtttatgatatccaagttcacacattcagtacttttatgatgtaatttcttggatgcatctcctatattataatttggatagagattttccttgtaattacagcaaagtttacactatactcaaaaccatgtaaaaattatctctgacatgaaacatgaagctgttgaaatattgggatgactaagactttcacccagagaaaacaaagtgatagaatattttcattgaattttgaatcctayccctgataaaggcaaaccatcacttactccctcttattagtcacagctatttttgttacaaatgacaacacagctcaatcttacctcagcacaaaaataacttattgactcaaaggatggcactatcttcaggcatggctggctccaggaattcaaagagctgtaagaactctttatctttctatccgtatttcaatttggactc

SEQ ID NO: 283042 - DNA, 1147 bp, Homo sapiens
cacaatgtttttagatagcatggctatataggaagattattgattatcctggtgaatcaaaacccaacatcatttcctcaaatttataaggatggttttgtgcttattttcccccaagtttatgatatccaagttcacacattcagtacttttatgatgtaatttcttggatgcatctcctatattataatttggatagagattttccttgtaattacagcaaagtttacactatactcaaaaccatgtaaaaattatctctgacatgaaacatgaagctgttgaaatattgggatgactaagactttcacccagagaaaacaaagtgatagaatattttcattgaattttgaatcctacccctgataaaggcaaaccatcacttactccctcttattagtcacagctatttttgttacaaatgacaacacagckcaatcttacctcagcacaaaaataacttattgactcaaaggatggcactatcttcaggcatggctggctccaggaattcaaagagctgtaagaactctttatctttctatccgtatttcaatttggactcwtaatgtcacaatctgctcagatgacatttatgcagtattttagatttagaatggattgaatatttttagtgtccattgcaaatcatctttaggctcctttggctaatctctctgttttatctttcccatagttttttgcattccatctttgcttgccacaaagccttgtgtctgtgcaagagcagtgtggcagcctgagagatctgcactgggatttggtgggatatttttctctttttacagatatttacaatttcagcgttgtattcaaattatgttttaggcatacatttgcataatttaactttcacttttgattttttaagaataaaaagagaactttccttttttttgatttggaaaggaaaattttggacattgtatggcaaccattatccttagttatccagaaggattgctgaattcagtttcctcatattgggttaagtatttgcttttatattcctagcagwtattatcctctaattttattttctaataaagtgttcattagattatgatgtcaaatttttcctgattttataaaatgtctccattacaaagttagggtaagataggca

SEQ ID NO: 283043 - DNA, 473 bp, Homo sapiens
gaaatgtgccccagtttaaaagtaataagaaatatttcacacctatatacaacttttaaattcttgtctaagagttttatatataacagcctgcatcatagttcaaagtactgggatgttcaatttggatttaaaatatacatattaaagatatgtatctatatctatggtcttctattacacttgagttttaagagaaattttaaattatattttaaacattctagcctattcattatatgtaatgagtattcttttattytctaaatctttcaacgtaattattgtgtcttcatacaaagaattaaactattacaaattatatttcttataatttgaaattattgacatatacataaaggtatgtatatttgatatgtatgcatgagggtgtatgtgtatgaatgtatgatttcatcgatatattttatttccttggttttgggactttttcatgcaaatttactttatca

SEQ ID NO: 283044 - DNA, 490 bp, Homo sapiens
ttttttttttttacaaaaggtagatcattttaaaatacttacatgactgtttatattattcttacattaagctttattttcagattacgtttactattctacagtgctatatttatagtctataaaggtactaagctatttatgtatttacarttcttcccaatggaaaattttttattatagaaatagtatatcattattgtctttttatatgttagtaattaattatatcaaaataactggtagaatcttataaattaccttagggtataatcagaattgcaaaaatatggtttataccgaagtaaacatcaatgtttgatgaccaacacattgaaaattacatttcaaaataacaagataagatgaaaaagtttactttttttcgtgtctaattattttaaacaggtctttactattaagtttgttttttatttctaaaaagaacccagtatgaaatgtagacagaaacaaatcttaagagaaatta

SEQ ID NO: 283045 - DNA, 598 bp, Homo sapiens
aaaatctgaattctgttgaatccacacggtaagttgacttatggcaaatctgtacaattagttgatttaagtaattcatttgcttatgtagtaacttcaatctaatctatagaacaacacatctttatacaaacagagttaggaaatcagagtaaggaaagaccaatyggaactgtgcagtttcttcctttgatcatcacaaagtttaagattggattatacagggattatgtccttatgataatctcttcggtttatattaatgggcaattaatggtaaatgtgactttttttgattaattggagtacgcctattagtatatcttcttctcagagatttatgtcaaccccttttgctgaacttagcctgtaaaccctaagaagttcaggttaagctttagattttctttgcatctcactttctttcttcaccatcaacctttcacttccttcatgatctcatccacgcccatgacagttcttactgcccatataccaatgaatcctgcatatgtatctcagctataatactgccacatatatatttttataattcaagacttctttgactacttcccctcccttacccctacatatg

SEQ ID NO: 283046 - DNA, 560 bp, Homo sapiens
tatcacaactgtacatcactttattatgtttttttctataatatccacattatttgtattattatttgtattattttgcaacaggtattactcataaatttaggaatgtattacaagtaaggtatgcagagtgaaacaatttagaatactttactggactaaaagaatctcactaattttaattagtggtctagtgttccaactaggaatgtatgcaaatgtctgtcagaaaccatctctccctgtgaccaggaaacaaggctatttgctctcttcatatacactggaatctaatcatagaacattatttactgctctgatcttagcagcaatcttctgctaaatattttgcagtcatttacatcaggaaaatgaagacattaatttcaaatggcagttttactttttggttgtgactctttttttattactcgaatgtaggacataattttcataaataacttgaaagaacaaatttaatactcttttctagatggtatttaacacaytgttttacatgaaaagatatttgttctatttcataaagatgtcttttaccc

SEQ ID NO: 283047 - DNA, 588 bp, Homo sapiens
ctacatggcatcctggaaaaattaaaactagaaagacagagtaaaagagcagtgctttccagggatttgtagggagcagaggagatgtataggagatacatgggggatttttagccagtgaatctatkcagtataatataatggtggatacatgatatttagtatttgtcaaaacccacagatctgtacaacacgaagtgctaatgtaaactgagagctttagtcagtaataatacaccaatatttgttcatcaattatagtaaatgtacctggtgcaaggtattagtgacagggagatctatgaggcagaaggagaaaggagtatataagaactctgtactatttgctggagtttttgtaaacataatactgctataaaaataaaatctattaatttaaaaaatatcctaaattgtattgaaggagagctaaggaccctatttaatacagcatgcaaatacgtactttgctttcttaagacttttctcatttatatttctgcacagtgaatttgccatatgttcatctagctggattaatgtaagaacatttctcataaagtgagcagaaatattgttagataaaag

SEQ ID NO: 283048 - DNA, 588 bp, Homo sapiens
ctacatggcatcctggaaaaattaaaactagaaagacagagtaaaagagcagtgctttccagggatttgtagggagcagaggagatgtataggagatacatgggggatttttagccagtgaatctattcagtataatataatggtggatacatgatatttagtatttgtcaaaacccacagatctgtacaacacgaagtgctaatgtaaactgagagctttagtcagtaataatacaccaatatttgttcatcaattatagtaaatgtacctggtgcaaggtattagtgacagggagatctatgaggcagaaggagaaaggagtatataagaactctgtactatttgctggagtttttgtaaacataatactgctataaaaataaaatctattaatttaaaaaatatcctaaattgtattsaaggagagctaaggaccctatttaatacagcatgcaaatacgtactttgctttcttaagacttttctcatttatatttctgcacagtgaatttgccatatgttcatctagctggattaatgtaagaacatttctcataaagtgagcagaaatattgttagataaaag

SEQ ID NO: 283049 - DNA, 588 bp, Homo sapiens
ctacatggcatcctggaaaaattaaaactagaaagacagagtaaaagagcagtgctttccagggatttgtagggagcagaggagatgtataggagatacatgggggatttttagccagtgaatctattcagtataatataatggtggatacatgatatttagtatttgtcaaaacccacagatctgtacaacacgaagtgctaatgtaaactgagagctttagtcagtaataatacaccaatatttgttcatcaattatagtaaatgtacctggtgcaaggtattagtgacagggagatctatgaggcagaaggagaaaggagtatataagaactctgtactatttgctggagtttttgtaaacataatactgctataaaaataaaatctattaatttaaaaaatatcctaaattgtattgaaggagagctaaggaccctatttaatacagcatgcaaatacgtactttgctttcttaagacttttctcatttatattyctgcacagtgaatttgccatatgttcatctagctggattaatgtaagaacatttctcataaagtgagcagaaatattgttagataaaag

SEQ ID NO: 283050 - DNA, 599 bp, Homo sapiens
aggattttcttaaagtgaaaaataactgaagaacaggcaccattataaaaatgaatgggagcgaagtcatgtatgatgagaaatcaggttggttatgaagattcaaggtcatgtgtgcttgtatttgacaaagttgtggctactttcaatggaggcagtagccagatgcataaaagttcaagtaaaacaactttaaagacagtgggtttcaataggttcagaccaaggtgtagcaatggttcccagcacgattgctggaaaattggagattttctcaggtcatacttaatactaaagraactgtaaaagtaataggaggcagagtcctagataagggaggttatctccctttatctggaaaaactcccctattaggatttgtcaaaaattgttcacttccataaaatgctaaaggctgtttgaagctggtgtgagactcagatgattttctctcctgagctgtggagaaggccaaggcaaaacttagtattgtgatagtaataaagaagtaggaaagagatcaaaatatatacattaaactaaccaaggtcaataatgtagttattcttgctctctttccttactttactgcaggaaac

SEQ ID NO: 283051 - DNA, 461 bp, Homo sapiens
ctgctttactatctgtctgttaggaataaaatgaatattacaagcttcttgaattgttaaacatctttgtttaaaaayacacaaaagcaattagttattcatgtatgccttactggtctcagagataacttttgtaacaaggacaaaattagatttatttactctcatcatcatttgtacttgttttatctggagatgtgctctttcagactattgatttaacaacttggtacattttactctgggatttgtctaagaaagacagtaagaaaaggaatataatagttctaagttaatggaaacatcagcagattgatttcgttctatttttatattttctctactttttgaaactttgttatgcaaaattcaccagtagaagacttaatatagtaattcagaataattcatttacccttgcaacatgtatgcaaaaatatctgatataaataaaaattgat

SEQ ID NO: 283052 - DNA, 461 bp, Homo sapiens
ctgctttactatctgtctgttaggaataaaatgaatattacaagcttcttgaattgttaaacatctttgtttaaaaatacacaaaagcaattagttattcatgtatgccttactggtctcagagataacttttgtaacaaggacaaaattagatttatttactctcatcatcatttgtacttgttttatctggagatgtgctctttcagactattgatttaacaacttggtacattttactctgggatttgtctaagaaagacagtaagaaaaggaatataatagttctaagttaatggaaacatcagcagattgatttcgttctatttttatattttctctactttttgaaactttgttatgcaaaattcaccagtagaagactkaatatagtaattcagaataattcatttacccttgcaacatgtatgcaaaaatatctgatataaataaaaattgat

SEQ ID NO: 283053 - DNA, 578 bp, Homo sapiens
aatactcacttgagtctttttgttgcttttccagcatacaaaattgattggaaatatgtggccaatttacatgatctttgcgcagcatgccattcatccctatagaggccatatgaatccattacgaaccgaattgggcttactggcagttatacccttttgcctactgttatcccttgtacctctagcaagtaaaggaaacgatagtgagaaggaagtcaaaagttgttttatcaatgtaatttactctcgtgcagacaaaaatcaggaaatggtcagacagctagattaaggggattatgatatattgtaagttcagttagcaatcataaatttgtgatacttgggtcttagtgcttccctgaatgacctggaaaataattttaaaatggcaaaatgatgaataatagtttacttcgttgcactatcaggcaagaatctaaaacgtagacctgctccatcactcagatgttttaaaatcacctggaaakaaattaatgtttatttgattatctactctctgaaaattaaaattctaaggaaaaggaaagcagccccccatttgtttaaggaaatta

SEQ ID NO: 283054 - DNA, 1149 bp, Homo sapiens
aaacaatttccttttgcagtggtctttctgaagatccgtgtttcctgctggcattatttttcttctgccagacagagttttttaacatactttctgtatcaaggatgtgcttttgrggatttttttaaagttttatatatcttaaaatgtctatatttcaccttaatatctaaaagatagttgcaaaaaatataaattttaggttgccaatattggcaacctaaacataacataacattctactgttttcttacttgcattgtttttggaaaaaagaaatctgcttttcatccttggctttgtcttacctgtgcagatctttttaccctgtcagctttaaagattttgtctttataaatggttttgaagaatttgaattggatgagccttagtgtggttttcatattttgtacttgaggtacattgagcaggattgtgtctcagtccataaacatttaattcctgctcctctctagttcactaaaattcttaccaacatcaccaattttttttgtatttccatatccactaaacagtttattgtgtttcatatatgtcttgctctctaagcagtwaaacaatttccttttgcagtggtctttctgaagatccgtgtttcctgctggcattatttttcttctgccagacagagttttttaacatactttctgtatcaaggatgtgcttttgaggatttttttaaagttttatatatcttaaaatgtctatatttcaccttaatatctaaaagatagttgcaaaaaatataaattttaggttgccaatattggcaacctaaacataacatawcattctactgttttcttacttgcattgtttttggaaaaaagaaatctgcttttcatccttggctttgtcttacctgtgcagatctttttaccctgtcagctttaaagattttgtctttataaatggttttgaagaatttgaattggatgagccttagtgtggttttcatattttgtacttgaggtacattgagcaggattgtgtctcagtccataaacatttaattcctgctcctctctagttcactaaaattcttaccaacatcaccaattttttttgtatttccatatccactaaacagtttattgtgtttcatatatgtcttgctctctaagcagt

SEQ ID NO: 283055 - DNA, 574 bp, Homo sapiens
aaacaatttccttttgcagtggtctttctgaagatccgtgtttcctgctggcattatttttcttctgccagacagagttttttaacatactttctgtatcaaggatgtgcttttgaggatttttttaaagttttatatatcttaaaatgtctatatttcaccttaatatctaaaagatagttgcaaaaaatataaattttaggttgccaatattggcaacctaaacataacataacattctactgttttcttacttgcattgtttttggaaaaaagaaatctgcttttcatccttggctttgtcttacctgtgcagatctttttaccctgtcagctttaaagattttgtctttataaatggtttygaagaatttgaattggatgagccttagtgtggttttcatattttgtacttgaggtacattgagcaggattgtgtctcagtccataaacatttaattcctgctcctctctagttcactaaaattcttaccaacatcaccaattttttttgtatttccatatccactaaacagtttattgtgtttcatatatgtcttgctctctaagcagt

SEQ ID NO: 283056 - DNA, 574 bp, Homo sapiens
aaacaatttccttttgcagtggtctttctgaagatccgtgtttcctgctggcattatttttcttctgccagacagagttttttaacatactttctgtatcaaggatgtgcttttgaggatttttttaaagttttatatatcttaaaatgtctatatttcaccttaatatctaaaagatagttgcaaaaaatataaattttaggttgccaatattggcaacctaaacataacataacattctactgttttcttacttgcattgtttttggaaaaaagaaatctgcttttcatccttggctttgtcttacctgtgcagatctttttaccctgtcagctttaaagattttgtctttataaatggttttraagaatttgaattggatgagccttagtgtggttttcatattttgtacttgaggtacattgagcaggattgtgtctcagtccataaacatttaattcctgctcctctctagttcactaaaattcttaccaacatcaccaattttttttgtatttccatatccactaaacagtttattgtgtttcatatatgtcttgctctctaagcagt

SEQ ID NO: 283057 - DNA, 560 bp, Homo sapiens
cctttttatttgacaataaaaagataaaaagacaatgaagtaagctgagatgcatattktgattaaaatggaaggtaggacataaaatagaacaaggaaacaaaaaatacactaatggatttaaatcctgtgtcagagacagtaaatagcccagttatgaaaatcatatttctacacactaacaataaagaacatgaaaatgaaattaagaaagcaatttcatttataatagcaccaaggagaagaaaatacttgaataaatttcacaaaagaagtacaaaactgactctgtaaagaataaaatattgttaaaaaaattaaagaagtccagaataaatggaaagacataccatgttcatgaatcaggaaagttactattgttaagatggccatactctacagattcaacaaaatcactatcaaaaatcccagctgatactttttagtaattgacaagctaatcctaaaattcacatgtacagcaaaacacccagaatagtcaaaacagaatagtcaaaaacagtcttgaaaataaaaatcataggagtatgcacacttct

SEQ ID NO: 283058 - DNA, 560 bp, Homo sapiens
cctttttatttgacaataaaaagataaaaagacaatgaagtaagctgagatgcatattgtgrttaaaatggaaggtaggacataaaatagaacaaggaaacaaaaaatacactaatggatttaaatcctgtgtcagagacagtaaatagcccagttatgaaaatcatatttctacacactaacaataaagaacatgaaaatgaaattaagaaagcaatttcatttataatagcaccaaggagaagaaaatacttgaataaatttcacaaaagaagtacaaaactgactctgtaaagaataaaatattgttaaaaaaattaaagaagtccagaataaatggaaagacataccatgttcatgaatcaggaaagttactattgttaagatggccatactctacagattcaacaaaatcactatcaaaaatcccagctgatactttttagtaattgacaagctaatcctaaaattcacatgtacagcaaaacacccagaatagtcaaaacagaatagtcaaaaacagtcttgaaaataaaaatcataggagtatgcacacttct

SEQ ID NO: 283059 - DNA, 560 bp, Homo sapiens
cctttttatttgacaataaaaagataaaaagacaatgaagtaagctgagatgcatattgtgattaaaatggaaggtaggacataaaatagaacaaggaaacaaaaaatacactaatggatttaaatcctgtgtcagagacagtaaatagcccagttatgaaaatcatatttctacacactaacaataaagaacatgaaaatgaaattaagaaagcaatttcatttataatagcaccaaggagaagaaaatacttgaataaatttcacaaaagaagtacaaaactgactctgtaaagaataaaatattgttaaaaaaattaaagaagtccagaataaatggaaagacataccrtgttcatgaatcaggaaagttactattgttaagatggccatactctacagattcaacaaaatcactatcaaaaatcccagctgatactttttagtaattgacaagctaatcctaaaattcacatgtacagcaaaacacccagaatagtcaaaacagaatagtcaaaaacagtcttgaaaataaaaatcataggagtatgcacacttct

SEQ ID NO: 283060 - DNA, 534 bp, Homo sapiens
aaaatcccagctgatactttttagtaattgacaagctaatcctaaaattcacatgtacagcaaaacacccagaatagtcaaaacagaatagtcaaaaacagtcttgaaaataaaaatcataggagtatgcacacttctcaatttgaaaacttactacaaagctacaataatgaagatactgagttactggtatgggaatagacacatagatcaatcaaatagaatcaagagttcagtaataaagaataatatttaaagtcaattgatttttggcaaagtactaagaatatctaatggagaaagaacagtctttcaacacatagaaaagtactaggagaactctatgtctacattcaaaagaacaaagttggacttctccctcactacatatgcagaaattaacttaaaatgtaccacagacctaaatataagmgctaacactataaaagtcctagaaaaaattatagaagtgatctttgggaccttgtgttatgcaaaacatttatagatatgatgataaaagcaaaagtacca

SEQ ID NO: 283061 - DNA, 534 bp, Homo sapiens
aaaatcccagctgatactttttagtaattgacaagctaatcctaaaattcacatgtacagcaaaacacccagaatagtcaaaacagaatagtcaaaaacagtcttgaaaataaaaatcataggagtatgcacacttctcaatttgaaaacttactacaaagctacaataatgaagatactgagttactggtatgggaatagacacatagatcaatcaaatagaatcaagagttcagtaataaagaataatatttaaagtcaattgatttttggcaaagtactaagaatatctaatggagaaagaacagtctttcaacacatagaaaagtactaggagaactctatgtctacattcaaaagaacaaagttggacttctccctcactacatatgcagaaattaacttaaaatgtaccacagacctaaatataagcgctaacactataaaagtcctagaaaaaattatagaagtgatctttgggaccttgtgttatgcraaacatttatagatatgatgataaaagcaaaagtacca

SEQ ID NO: 283062 - DNA, 426 bp, Homo sapiens
tgtagactgccactcctccaccccacgtcacccccattcctaaaagagcatcccaagcctagaggtccttgccacacagcacagctgtcacaggcagtacccacttgggtgccaggctggggaaactgcattcaraaaactctagagcctggggaaacaggacaggagaagactgttgtgcagtcagctttcctgagcacctactcagggcacccattttctcattacagtggcaaatccaactgaccagaaggaaggaggaagcttattggtggctgttcctgaaggaggccctgcccttacaggaacagaagaggaaagagagacacagctgcagaggccacctggattgcgcctaatgtgtttgagcatcacttaggagaagtcttctatttatttatttatttatttatttgtttgttttag

SEQ ID NO: 283063 - DNA, 621 bp, Homo sapiens
tgggggtctcctcagtattttcccttcatggtcaccagaaaaatgttaccagaagggtgccccaatttagaccctaaatgagggttcttggatctcaacagaaagaattcagggtgggtcaacaatgcaaagcgaaagtaagtttgttaagagagtaaagtggtgaaagaacagctactccatagacagagtaggacgttcctgaaagtaagaggaggaacgtgttcaccctaggtacaatgcttgtttatgtataagacaaaaatagatcaaggggagataygctctgctacaagagtttgcgaggaaggtttaattttcttaattactatattttgcaagaattgatattagtatctttaaagcaaaattaggaatgcttctgttctctagatattgggataccaggaaactcctaagtctgggtctgtttagtacatgttatcaatctgttcccttaactgtaaacttctagaggctaggaatacctaactttctgggaatgcagcccagcaagtcccagccttatgttttcttaacccttcacttaaggtggagttactctagtttgaatacctctgacatatttccccacttcctttataagaggacccttaatcc

SEQ ID NO: 283064 - DNA, 580 bp, Homo sapiens
taggacaaacctgggcacttaaccatgcaggaacaatggcgagcctttagcccgatccagagcggcaatgggaacctcgctggatcaggagcgcagcagacaccctgctggatccggaggagtggaagtcaatggagggtctgggagggcagcaaacagcagtggtggatggtgagcaaaagctcagctcgagtgtaagaaacatggaccagaagagtgtkcagtagcaagatttaatggagtgaaaacagagctcccatacaatgggaggggacccaaagcgggttgccgctccctgctcaaatgcctgggtttatatcccaatcattgtccctccctctgtgctctcaggcgatatagatttgactatttctttacctcctactttagcctaatttgtattttagtgagccgtctttactacctgattggttgagtgtgagctgagttataagcccagtgtttaaaggtaggtgcagtcaccttccccagccaggattaggaattcttagttggcctaggaaatccagctagtcctgtctctcagcttgttttggtgtttattgggtatgtttgcata

SEQ ID NO: 283065 - DNA, 509 bp, Homo sapiens
tgataattagtgaagtttatcattttcatatacctgttggccatttgtatgtcttctcttaagaaatgtcttttcaggtcattttgtgtagaatggacattttaagaattaatgttgtgacatgtttatacagttattgaaatgtcrtagaaatgccaagtagagaaaatttcaaaaactgcaaactataagaagattgcttgataaatacagtaccaacaggagattcattgtgagtgagtcaaacaattgagaaacactgttaaaattttttggacagatttgtgatgttaataaactcctgatcttctctagatctcattttcctatgatataagagtgctgcacgtgttgaattttttttctagttttaaaggtaagtgatactatcactatactaactttaacatcattaatgtaagcattatctgccagagcatttttctcagggggaaaactgatagcttctgagattcttattaacttgatgatttttgtcagtgcagcta

SEQ ID NO: 283066 - DNA, 540 bp, Homo sapiens
actcatggggctgtagtcagtttcttggtgacttgcttggagctgcctcactcacatgtctggttgttggtattacccatttcctggtcctagtgtctctagcggatcagcttggcagcagcattctaacasggtaggagagaagctcctaggcttcttgccttgttcacctggaacatctacaacatcacttttaaagtatcctagtgccaaagcaagtcataaagtcagcacagaatcaagggggttggaaaatagattctccctcttaaagtgaggagctgctaagaatgcatagctatttttaatctttcatctttctcatattttattgtcttgtttgtaagttagaaacaccccttgcaaaatttccagataacttacaaaaagtcatagagcaatgttagcacaaaggaaagtacaataaaaaaattgttattatgattgggtctcagtatagataaatattttaaagaataaaacatctttatttactttttattatcatggtagtacatgtacacagtgttagcacaaaat

SEQ ID NO: 283067 - DNA, 494 bp, Homo sapiens
tttgtgtatgattttaaaaatagtttaccatatttagataggggaaaattaaagtttttctcaattgtattccaatgttttacaaaatggtaatttattccaggaaattttattcaacaaaaaatatgagttccatcagaagattmttctcagacattgaactatttaaaattgctattatagatgtatttatttactaattctgctgtatacaaagttccacaaactagctagcttgaaacagcagaaatctgttttcacactggaaacagtggaaggaggctggaagtctgaaatcaaagtatctgtaggcccacactctgtcgactagcttctggttattgccagcagtccttggtgttcctaaggagtttgcagctgcataactccagtctttgcctctgttgttaaatggttgtcttccctctctgtcttcacttccctttttatgtgtctctgtgtcttctcttgtaaggacagaaattaaaattact

SEQ ID NO: 283068 - DNA, 548 bp, Homo sapiens
gatttaaaatactacaaaagggtaaaaaccaggtactgtgggagctcacagcagattcccagggtacagggttgggaaaacatcacaagagtgttttataagctgagacttgagcaatgtgtgggacagacttkgcaaagtggttggagaggtgagaaagggaaggaagagtgtttcaggcagagggaatattatatctgaagatctggagagaacatggtgcagttcatgaattaaaatatgactggtgtgtagtgcgcgactcactaagcacagtgttctttaacagtgaggctaaagtagctcatgcagaagtgtgtaacccataggggattgggattttagttaactttttcccccaatttctcaggtcagaaatgttagagtcatgtttgccttctgtttttctttttttcatatcctacacccaatctcagtaactcccaagggttccactctcaaaatagattcagaatcagactacttagcacctccatggctacccctttgcctaactccccatgatcccttgtttgttatactacact

SEQ ID NO: 283069 - DNA, 615 bp, Homo sapiens
tacccataaacaccagctagccaggctgtatcatgtctgctgtaattagttagcgagctgacttagcacctcagtgctataatttaaagtaaaccctgaacagtcttagacttgagtatgcacggtacagttaagtttaatctgtatacaggttgtctctttggagtctgggaatcagtttatgctattggtcttctctgacaatctccaggtcacgcagatttgtactgtctaggacataattagcctagattatactcagtgattgccagcttcacagtggcctgtgaacaaattattttgtttaatgtgagtgaatcaataatgtgtcagcagtagsatcactactcacatgctataaaatgcaagacagagttcagatgtttttatattttaaaatagaatgtatattccttactgtgttaggtgattactagtttttttaacagatgaatctgcttctataatagtgttctaccccaagaaaatattgctgacacaaattgatttatggaaagttttatttgctactacctataaatgagttgtgctggaatttgttgctgtatctgcagttcttagtatttgctaatataaaagatccttgttatctta

SEQ ID NO: 283070 - DNA, 615 bp, Homo sapiens
tacccataaacaccagctagccaggctgtatcatgtctgctgtaattagttagcgagctgacttagcacctcagtgctataatttaaagtaaaccctgaacagtcttagacttgagtatgcacggtacagttaagtttaatctgtatacaggttgtctctttggagtctgggaatcagtttatgctattggtcttctctgacaatctccaggtcacgcagatttgtactgtctaggacataattagcctagattatactcagtgattgccagcttcacagtggcctgtgaacaaattattttgtttaatgtgagtgaatcaataatgtgtcagcagtagcatcactactcacatgctataaaatgcaagacagagttcagatgtttttatattttaaaatagaatgtatattccttactgtgttaggtgattactagtttttttaacagatgaatctgcttctataatagtgttctaccccaagaaaatattgctgacacaaattgatttatggaaagttttatttgctactacytataaatgagttgtgctggaatttgttgctgtatctgcagttcttagtatttgctaatataaaagatccttgttatctta

SEQ ID NO: 283071 - DNA, 612 bp, Homo sapiens
taaaaaataattatgctgagtggaaatagctggccaaaaaagagtatgtagtatttgattcaatttttataaaattattcataatacaaaccaatatatactgaacaaaagaggtcaatggttkcctggaatggtgaattgaggagtggaatctggcagagacaggtggaatggcaaaattttaaaggtgcacctggaaagttttgggaatgatagacatgttcattttcttgactatagtgatggtttctcaggtatatacatatattaaaacttaaacttgtacatgttaaatatgtccagtttattatatgacaattatactgaataaatcttttacagaaataagacagcagaacaagattattatattgaattcatcatgacatttcatgtcttgaaagctattaaaattttaatgaagagtagacaaaattagaatcaaaagtagagtttacttagaatgtctagttgtgattgtattgtctaaccaatttgctcagttatttactcataaattatgattggtattaaaatacacttttatggtaaactaaagtggttttcaaacatggtcatacacaagaatcacatgtaggaaattattagaca

SEQ ID NO: 283072 - DNA, 529 bp, Homo sapiens
attgagaatccaaaaaacaagtcagggtggctgagatgtcatctcaggcytaagtctttgtgggcaaaataaagataactctataggagtggaatgaggtgtggctgctgcattagagacaatgggcatttgaagataaaatttaggagaactgacttatagtattgggctggcatttaatcctttcttctttactcttttcataatctcccctccttatttggttcaaacaaaatttctagggggaatgaaagtggggtagaataggaacaaaaataagccaacaaaaaggtaaggcacccagtaaaccctcattcacctcccatcttctattcatattcttcccaagctttttaaaaatataattacaagcttcacacaggtgtaaagagacaaaggggtataaaatgaaaactaaaattattctcctatctaccccatgtctcatgcaagttggaaggggaaactccttagtcttaatgtttccttccacgtggagacgtgatatttctggcctctctccactcca

SEQ ID NO: 283073 - DNA, 529 bp, Homo sapiens
attgagaatccaaaaaacaagtcagggtggctgagatgtcatctcaggcctaagtctttgtgggcaaaataaagataactctataggagtggaatgaggtgtggctgctgcattagagamaatgggcatttgaagataaaatttaggagaactgacttatagtattgggctggcatttaatcctttcttctttactcttttcataatctcccctccttatttggttcaaacaaaatttctagggggaatgaaagtggggtagaataggaacaaaaataagccaacaaaaaggtaaggcacccagtaaaccctcattcacctcccatcttctattcatattcttcccaagctttttaaaaatataattacaagcttcacacaggtgtaaagagacaaaggggtataaaatgaaaactaaaattattctcctatctaccccatgtctcatgcaagttggaaggggaaactccttagtcttaatgtttccttccacgtggagacgtgatatttctggcctctctccactcca

SEQ ID NO: 283074 - DNA, 646 bp, Homo sapiens
acaactgtgagaactcaataaatacatgtttagatttctttgtttgttttggttactataaagatctgaatataattaatggtgtattttctttgcttgcagtatatggctttcaattttacctattaattttattatcctattcattgtatacggttttaattacaatctcctcaaatctttcttggtagaaataagtgtggtagaaataaagaagataattgaatacagatattacagtaaatacatgtcaactggaatgtgaaatgctgtggctactccccaagcagatttcatcctaagacattccagataatatagataaatccctcttccctattcctgcctccaaaccccacctgtttccctgccctcaacacatttcctaaactaggacaggaacatgtgggaaaaacaaagtggaaaagggaagcaattcacagcccaaaccaagccaaaccatgtttccacccatttgttggacttttaaaaacttgctaaagcaaatttaactctgcaaatgtgtattttaaaaggtcagctattgaatgtggkacggaaattgcactgccatgcaagattgaagtgttgtgtgaaatttcagcaattgtgcccattaacagaaaaaaaaatatttactgtaggg

SEQ ID NO: 283075 - DNA, 642 bp, Homo sapiens
tgcaaagtaattgcgcacttcaacgtactacagaaccagttccaagtggaggaaagatctaaatgtgaaaggcaaaaaaataaagctttaaaaatatgacaaaagagaatatctctgtgacctggagggtaatgaagacttttacaaagatttttgtttttttttttgtttcgtttttgagacagggtctcactctgtagcccaggctggagtgcagtggctcaatcatagctcactgcaggcacaatcatagctcactgcagcctcaaactcctgggctcaagcagctcacccacttcagcctsccaagtagctggaactacaggcatgagccaccacacctgactaatttttaaatttttagtagagacaaggttttactatgtagcctgggctggtctggaactcctgagctcaagtgatcctcttgctttggcctcccaagatacagggagtatagatgtgagccactgcacccagccaaaagatttttaattgacaattttaaagaaaaagttggcaaattcagttacattaaaattaagaattcctcaaaagccatcatgaaaaagtaaaaggcaagacataaaatgtgaagaactatttcaatgcataaagacacaaaagacacaaaattcaaat

SEQ ID NO: 283076 - DNA, 491 bp, Homo sapiens
gagcggctcggccccagatcccgatccctccctccctctcccggccgccgggctccttcttcctccctctcctcctccccttcccacgttcaggcccggctccggtttctgcccagactttctctgaaactccgccggagtgcttccagccaaaacaacaagggccgggggaggagacggacgaagggagggagcaagggagggagggagcgcgagtccgagaggcaccctgggatctgtagttcgggaagcaggagcagggtcctccgccgtccggcggcccccaatcggctcctcgcccgggaagaccgcagaggcctcggctagggcagaggcacyggggcttgggcgcggggaagactgagggacattcgaatgttcagtccggggcttgccatcttgactcagcccggtgccagctcggagcttgtgctgtgctcgagatcaggagtttcgagggttttctttacttgagagcctgaaaggcaaaa

SEQ ID NO: 283077 - DNA, 1181 bp, Homo sapiens
gagcggctcggccccagatcccgatccctccctccctctcccggccgccgggctccttcttcctccctctcctcctccccttcccacgttcaggcccggctccggtttctgcccagactttctctgaaactccgccggagtgcttccagccaaaacaacaagggccgggggaggagacggacgaagggagggagcaagggagggagggagcgcgagtccgagaggcaccctgggatctgtagttcgggaagcaggagcagggtcctccgccgtccggcggcccccaatcggctcctcgcccgggaagaccgcagaggcctcggctagggcagaggcaccggggcttgggcgcggggaagactgagggacattcraatgttcagtccggggcttgccatcttgactcagcccggtgccagctcggagcttgtgctgtgctcgagatcaggagtttcgagggttttctttacttgagagcctgaaaggcaaaawgattctcctgcctcagcctcctgagtggccgggattacaggcacctgccaccatgccctgctaatttttgtatttttagtagagacggggtttctccatgttggtcaggctggtctcgaactaccgacctcaggtgatccacccgccttggcctcccaaagcgttaggattacaggcgtgagccaccgggcccggccaatgtttccatttctaattctgaactctattcctttctgaaacttgtttttatcaagataattcccacattatctgtgttagatttttgattacttaggaaaatgaagctttaaaaggattgatttttacacccatgcaactttttgtattccttctgaagtcttttgattttcactctgattaaatgaacwattattatttaacaataagctgtgattctgttagggtcaactgttttgaatcttttgacatctttggcaggtttccccaggatcaaaatcctaagttaagtcttattggcttaaacttaattttaagattatctagttgggcccctggagagtttcaaagaatatatctctcatcttatagagagagcaaatgattagacttatttggtaaattgtatgggaggcattgtcaaatggtaagtaataacaaattttctcagttacatttattggtatgttattgatgtcaatgttacaaaa

SEQ ID NO: 283078 - DNA, 689 bp, Homo sapiens
gattctcctgcctcagcctcctgagtggccgggattacaggcacctgccaccatgccctgctaatttttgtatttttagtagagacggggtttctccatgttggtcaggctggtctcgaactaccgacctcaggtgatccacccgccttggcctcccaaagcgttaggattacaggcgtgagccaccgggcccggccaatgtttccatttctaattctgaactctattcctttctgaaacttgtttttatcaagataattcccacattatctgtgttagatttttgattacttaggaaaatgaagctttaaaaggattgatttttacacccatgcaactttttgtattccttctgaagtcttttgattttcactctgattaaatgaacaattattatttaacaataagctgtrattctgttagggtcaactgttttgaatcttttgacatctttggcaggtttccccaggatcaaaatcctaagttaagtcttattggcttaaacttaattttaagattatctagttgggcccctggagagtttcaaagaatatatctctcatcttatagagagagcaaatgattagacttatttggtaaattgtatgggaggcattgtcaaatggtaagtaataacaaattttctcagttacatttattggtatgttattgatgtcaatgttacaaaa

SEQ ID NO: 283079 - DNA, 689 bp, Homo sapiens
gattctcctgcctcagcctcctgagtggccgggattacaggcacctgccaccatgccctgctaatttttgtatttttagtagagacggggtttctccatgttggtcaggctggtctcgaactaccgacctcaggtgatccacccgccttggcctcccaaagcgttaggattacaggcgtgagccaccgggcccggccaatgtttccatttctaattctgaactctattcctttctgaaacttgtttttatcaagataattcccacattatctgtgttagatttttgattacttaggaaaatgaagctttaaaaggattgatttttacacccatgcaactttttgtattccttctgaagtcttttgattttcactctgattaaatgaacaattattatttaacaataagctgtgattctgttakggtcaactgttttgaatcttttgacatctttggcaggtttccccaggatcaaaatcctaagttaagtcttattggcttaaacttaattttaagattatctagttgggcccctggagagtttcaaagaatatatctctcatcttatagagagagcaaatgattagacttatttggtaaattgtatgggaggcattgtcaaatggtaagtaataacaaattttctcagttacatttattggtatgttattgatgtcaatgttacaaaa

SEQ ID NO: 283080 - DNA, 555 bp, Homo sapiens
gaaacattattcaaggacatgctatatagagagatagctttcatttctttttagagctagaatcaccccattgtatggatagacaatagttcattagactagtcctcactgatggatggtgggttgtctgcctgctaccatctcttcaagtgttaactcctgtgggcccaggcactgcagtaggttcaggggctttactaccttaccatgaagaccaggtgttctcgtagctctttgactcctgttattcctgcatagatacctctaattcccagctgcctcctgtttctgttttggggaggcttttgcttcctctcttttctcctgcyctctcctgttactctgcaacaccttcactctactctgagtggaagggcccactgctttctatattaccctcaaggacctcattttgtcttctttctcttttggtagaagatcaaaggagctctttatttttcttcaataaccttattattttgataaaataagtagggctttcaggcagccagtgtctccaagaagtgactctccacaaaactcaaaaaaataaaa

SEQ ID NO: 283081 - DNA, 555 bp, Homo sapiens
gaaacattattcaaggacatgctatatagagagatagctttcatttctttttagagctagaatcaccccattgtatggatagacaatagttcattagactagtcctcactgatggatggtgggttgtctgcctgctaccatctcttcaagtgttaactcctgtgggcccaggcactgcagtaggttcaggggctttactaccttaccatgaagaccaggtgttctcgtagctctttgactcctgttattcctgcatagatacctctaattcccagctgcctcctgtttctgttttggggaggcttttgcttcctctcttttctcctgctctctcctgttactctgcaacaccttcactctactctgagtggaagggcmcactgctttctatattaccctcaaggacctcattttgtcttctttctcttttggtagaagatcaaaggagctctttatttttcttcaataaccttattattttgataaaataagtagggctttcaggcagccagtgtctccaagaagtgactctccacaaaactcaaaaaaataaaa

SEQ ID NO: 283082 - DNA, 679 bp, Homo sapiens
tgtgatttttctggctacttcatattgtctttgtgagaaagaccctggaagggttttctcaccagattatacttaataaacataatgaacccactctgaaaagtcataggcttaacagccaaccaaactaaacagaggttacaaaaatgcatcatgctaaaagccaaagagtccatgaagtaaataaatgccaaaagaaatccacaggaatttaaatataactaaaattggccaggcacagtggctcatgcctataatcccagcactttgggagggtgaagtagaccgattgtctgagcctaggagtttgacaccagtctggrcaacatggtgaaaccctgcctccatttttaaataataataataataataataataataataataataataaataactaaaattgctaaacaaagggaaccctcctttatggattttaactctgtattgtaattaaatagattaaggcacagttgatcatatgttttctctaaaaagcctagtgcctattcttcacaaattgacatttttataccttatcttattctgccatttccaaatactatagccttaaaaaatccaatatatatatttgaaattatttgccaccattgtaggaatcatagactatttgatctgacagagatctctttccagggtttttatttcaaaattaaa

SEQ ID NO: 283083 - DNA, 679 bp, Homo sapiens
tgtgatttttctggctacttcatattgtctttgtgagaaagaccctggaagggttttctcaccagattatacttaataaacataatgaacccactctgaaaagtcataggcttaacagccaaccaaactaaacagaggttacaaaaatgcatcatgctaaaagccaaagagtccatgaagtaaataaatgccaaaagaaatccacaggaatttaaatataactaaaattggccaggcacagtggctcatgcctataatcccagcactttgggagggtgaagtagaccgattgtctgagcctaggagtttgacaccagtctggacaacatggtgaaaccctgcctccatttttaaataataataataataataataataataataataataataaataactaaaattgctaaacaaagggaaccctcctttatggattttaactctgtattgtaattaaatagattaaggcacagttgatcatatgttttctctaaaaagcctagtgcctattcttcacaaattgacatttttataccttatcttattctgccatttccaaatactatagccttaaaaaatccaatatatatatttgraattatttgccaccattgtaggaatcatagactatttgatctgacagagatctctttccagggtttttatttcaaaattaaa

SEQ ID NO: 283084 - DNA, 555 bp, Homo sapiens
gaaacattattcaaggacatgctatatagagagatagctttcatttctttttagagctagaatcaccccattgtatggatagacaatagttcattagactagtcctcactgatggatggtgggttgtctgcctgctaccatctcttcaagtgttaactcctgtgggcccaggcactgcagtaggttcaggggctttactaccttaccatgaagaccaggtgttctcgtagctctttgactcctgttattcctgcatagatacctctaattcccagctgcctcctgtttctgttttggggaggcttttgcttcctctcttttctcctgctctctcctgttactctgcaacaccttcactctactctgagtggaagggcccactgctttctatattaccctcaaggacctcattttgtcttctttctcttttggtagaagatcaaaggagctctttatttttcttcaataaccttattattttgataaaataagtagggctttcargcagccagtgtctccaagaagtgactctccacaaaactcaaaaaaataaaa

SEQ ID NO: 283085 - DNA, 1221 bp, Homo sapiens
gttatttaaataaatgaaaagttataaatgtaacaagtgctatgaagattcatgtgttgaatgggtgttttaacaacataactcaccaaaggcactctgggaggagtaattagtatgagcaagagaaaagctttttatctgaggctttttccttttaagaggctgtagatcaaaaaggaccccagtaccrggagatagggtaaggaccatagaagcagaggaacagaaaagcaaagaaggaaacaaagggacaatttctacagcctcataaatggggacatacactcagattgaaaagcaacacaagaggaacaaaagtagatattttctatcctttcatccacctctaaatgctgaatgtgttaataattggctctgaggaatacttagctctttctggtgataaactaagtcataagggaaatggctgtgctttaatcaggagtaggccaaggctgctttctggtgcagcatgactcagcgggtttggagtgcaggcacacaaccccccacattaggtaaccatgccatgtgaggtgcattaggtgatcacccatgtgagcttgtgcttggctcacagtcactaatgtttgtaaaatgtataattaccwgttatttaaataaatgaaaagttataaatgtaacaagtgctatgaagattcatgtgttgaatgggtgttttaacaacataactcaccaaaggcactctgggaggagtaattagtatgagcaagagaaaagctttttatctgaggctttttccttttaagaggctgtagatcaaaaaggaccccagtaccaggagatagggtaaggaccatagaagcagaggaacagaaaagcaaagaaggaaacaaagggacaatttctacagcctcataaatggggacatacactcagattgaaaagcaacacaagaggaacaaaagtagatattttctatcctttcatccacctctaaatgctgaatgtgttaataattggctctgaggaatacttagctctttctggtgataaactaagtcataagggaaatggctgtgctttaatcaggagtaggccaaggctgctttctggtgcagcatgactcagcgggtttggagtgcaggcacacaaccccccacattaggtaaccatgccatgtgaggtgcattaggtgatcacccatgtgagcttgtgcttggctcacagtcactawtgtttgtaaaatgtataattacc

SEQ ID NO: 283086 - DNA, 409 bp, Homo sapiens
gaggccccacctgcaccttcaggtgtgcgttcttcaacctttcccctgtccttctcttggagcttaagactcacccagccaaagtgtgaccagagatgctactgccctttgggacaacagcactcagtggtgggcaagggaccatgaaaagcccaacagaagtcatggcgaggcaggagagtgtctaatgcttcccataggcacagcactaggcccatctgcacaagtgaccaaagtgaatccacacaaaagcatcacacagatggtatcatactcaggctgccgatgagcaagtgggggccccaagagagggagttgtccaaagcctgtgatgggtggagggtccaaagcctgtggtgggyggaggatccaggcctgttctccaacatgaccctgtccatatcacatt

SEQ ID NO: 283087 - DNA, 530 bp, Homo sapiens
aactcagaactggttttctcagaaatcccatagcacacgtggagggttcctgggagaactcttcctactaggcaccacattgttgaactgcagtgatgatagcccacaggatctaaccatcatgaagaatataatttcctaaaattccattctgagtttcaacttggacctgtgctggtccctcttcctggaaaactgctgccccagttttytcatgtcaggctccttctgtatgtttcctcttgcagagtatctcctgatcatctacccaagtagttctcactcccctcctgccagttacactgcatctcatcagccttctctacactccttatagccctagaactatataaaacatttgttcatcatctacttgctcattaccccctgaaagtaggatgtgagcttcgagagggcaggaactttacctttctgtctaccactataaccgcagcacctagaacagtgcttgggacacagcagattctctatacatatctgtctaatgaacaaatgaatgtacagaagaa

SEQ ID NO: 283088 - DNA, 620 bp, Homo sapiens
gaaggtgagggagaggtgttaagtaattctggggcaaccttaactagagaaagagttttaaaaatcagagtgaatgaatccttgtcctgaattcccagagcctcatgaaggaggcagtgtggaggtatgggccggaagctattatcacctccattttaaagagatgcatttaagtaacttgcccctaagatactcactaataaattgtagaatcgktgttaaaattcaggcagtttgaattcagagcccactctcccttttttttgtttatttgcagattttatttcatgtctgtgtgtgtatgtgtgtgttgaaatctttcaaatatacagaaatgtacagagactaataaaatgaatacacttcgcccatcacccagcactctccagtgctttgccatttaaccacaaatcagtttcattctcagtagtgtctaattgttccatttgtcttttttttttcttggtctgtcttgctaaagaattctttatctattgttttctgatttagttgctcttttctattgtctctttattttctattttgttaatttcccttctgctactttctttgaatttactcttttgttctttttcttacttcttgatttgagttcttct

SEQ ID NO: 283089 - DNA, 1241 bp, Homo sapiens
gaaggtgagggagaggtgttaagtaattctggggcaaccttaactagagaaagagttttaaaaatcagagtgaatgaatccttgtcctgaattcccagagcctcatgaaggaggcagtgtggaggtatgggccggaagctattatcacctccattttaaagagatgcatttaagtaacttgcccctaagatactcactaataaattgtagaatcgttgttaaaattcaggcagtttgaattcagagcccactctcccttttttttgtttatttgcagattttatttcatgtctgtgtgtgtatgtgtgtgytgaaatctttcaaatatacagaaatgtacagagactaataaaatgaatacacttcgcccatcacccagcactctccagtgctttgccatttaaccacaaatcagtttcattctcagtagtgtctaattgttccatttgtcttttttttttcttggtctgtcttgctaaagaattctttatctattgttttctgatttagttgctcttttctattgtctctttattttctattttgttaatttcccttctgctactttctttgaatttactcttttgttctttttcttacttcttgatttgagttcttctwgaaggtgagggagaggtgttaagtaattctggggcaaccttaactagagaaagagttttaaaaatcagagtgaatgaatccttgtcctgaattcccagagcctcatgaaggaggcagtgtggaggtatgggccggaagctattatcacctccattttaaagagatgcatttaagtaacttgcccctaagatactcactaataaattgtagaatcgttgttaaaattcaggcagtttgaattcagagcccactctcccttttttttgtttatttgcagattttatttcatgtctgtgtgtgtatgtgtgtgttgaaatctttcaaatatacagaaatgtacagagactaataaaatgaatacacttcgcccatcacccagcactctccagtgctttgccatttaaccacaaatcagtttcattctcagtagtgtctaattgttccatttgtcttttttttttcttggtctgtcttgctaaagaattctttatctwttgttttctgatttagttgctcttttctattgtctctttattttctattttgttaatttcccttctgctactttctttgaatttactcttttgttctttttcttacttcttgatttgagttcttct

SEQ ID NO: 283090 - DNA, 556 bp, Homo sapiens
cagctctcattactcagtgtcttctggggatttcccttggacagcaagataagagtgcccaaggtcaagaccatcaggagatgaagcccccaccactggaggatggaccgtgtaggggtggggaggaggctgagattgagaaagggcagtgctgtgggctgctgtgggtaactacaggaaggcatcagagccctagacatctgtaggtgaggaagcccaggccgcagtgctgaatggttggggaagaagctactgtctccaccacaacaggctgtgctggtctggtctgtgggatggctagtcatggttcccttctacatgtgtctcttgtcgaggctggctgtgaagaccctgtgtttaggaagagttgtatggcatggggcaggggtggggttccccagctcttctcctttaatggtctctcatgtattatggttacatattgggcatcagagagcactgcatggtccctcctacttgatggctttatggttctcagccttctccctttggcstagaagatctgtcctctatggctagcagccaagaggagatt

SEQ ID NO: 283091 - DNA, 409 bp, Homo sapiens
gaggccccacctgcaccttcaggtgtgcgttcttcaacctttcccctgtccttctcttggagcttaagactcacccagccaaagtgtgaccagagatgctactgccctttgggacaacagcactcagtggtgggcaagggaccatgaaaagcccaacagaagtcatggcgaggcaggagagtgtctaatgcttcccataggcacagcactaggcccatctgcacaagtgaccaaagtgaatccacacaaaagcatcacacagatggtatcatactcaggctgccgrtgagcaagtgggggccccaagagagggagttgtccaaagcctgtgatgggtggagggtccaaagcctgtggtgggtggaggatccaggcctgttctccaacatgaccctgtccatatcacatt

SEQ ID NO: 283092 - DNA, 420 bp, Homo sapiens
ttgggggcctaaggcaggtggaccacatgagcccaggagtttgagaccagctcaggcaatacagtgagacccagtctctacaaaaaaaatttaaaaattagccaggtgttgtggctcaattgacagtcccagatacttgaggacctgaggtaggaagatcacttgagcctggaaggttgaggctgcagtgaactgtgaccaactcactgtacttaagcctgagagacagagcaagaccctgtctctaaaaaaaaataactgcagtacacctgttattagattctagtcttgcctaatgtttttccatttgtattattttctaaataataaaatttttatttgractgaattctaaaatttttcctggacacaagctggaatgttttcaatttttttccttcttcttttccttttttctgt

SEQ ID NO: 283093 - DNA, 635 bp, Homo sapiens
gactggagctgttcctattcagtcatattgcccatgaatccctgaatccaaaatattaaacacaaatatggattggtattttgaaggtcagtggaaaataaattaccttctacgggtaatttctttttgtcactgttggtctccatgttgtcaaagyatagagcaatgagagtttttgaccagcagtggtctgcagatcacaccttgtgaaactttgcttagagcaaaatacagtaccttatatttttcttgccaaagttcaatgtctctggacaacattggatgagtattcatcacatctagattgttagacttttgtttttccaaatttttaaatggaatatgcttacaaacttagtatagtaagaacattttaagatattgagtgttccctgatgctttgatatacatggttattgaaaaacagctttgctcagaaattgcagtctatccctatcattcatatattagccacaagctattgttagtcatttgattttttttaagcttcaattgatatcatcatttatcttggctccatctgaaaatgttttgtttactttgtgcccatgctttggcatgttctacagctcagggtagaaacacacacacaatagacttacatacacaactat

SEQ ID NO: 283094 - DNA, 635 bp, Homo sapiens
gactggagctgttcctattcagtcatattgcccatgaatccctgaatccaaaatattaaacacaaatatggattggtattttgaaggtcagtggaaaataaattaccttctacgggtaatttctttttgtcactgttggtctccatgttgtcaaagtatagagcaatgagagtttttgaccagcagtggtctgcagatcacaccttgtgaaactttgcttagagcaaaatacagtaccttatatttttcttgccaaagttcaatgtctctggacaacattggatgagtattcatcacatctagattgttagacttttgtttttccaaatttttaaatggaatatgcttacaaacttagtatagtaagaacattttaagatattgagtgttccctgatgctttgatatacatggttattraaaaacagctttgctcagaaattgcagtctatccctatcattcatatattagccacaagctattgttagtcatttgattttttttaagcttcaattgatatcatcatttatcttggctccatctgaaaatgttttgtttactttgtgcccatgctttggcatgttctacagctcagggtagaaacacacacacaatagacttacatacacaactat

SEQ ID NO: 283095 - DNA, 635 bp, Homo sapiens
gactggagctgttcctattcagtcatattgcccatgaatccctgaatccaaaatattaaacacaaatatggattggtattttgaaggtcagtggaaaataaattaccttctacgggtaatttctttttgtcactgttggtctccatgttgtcaaagtatagagcaatgagagtttttgaccagcagtggtctgcagatcacaccttgtgaaactttgcttagagcaaaatacagtaccttatatttttcttgccaaagttcaatgtctctggacaacattggatgagtattcatcacatctagattgttagacttttgtttttccaaatttttaaatggaatatgcttacaaacttagtatagtaagaacattttaagatattgagtgttccctgatgctttgatatacatggttattgaaaaacagctttgctcagaaattgcagtctatccctatcattcatatattagccacaagctattgttagtcatttgattttttttaagcttmaattgatatcatcatttatcttggctccatctgaaaatgttttgtttactttgtgcccatgctttggcatgttctacagctcagggtagaaacacacacacaatagacttacatacacaactat

SEQ ID NO: 283096 - DNA, 1099 bp, Homo sapiens
aatgtctctggacaacattggatgagtattcatcacatctagattgttagacttttgtttttccaaatttttaaatggaatatgcttacaaacttagtatagtaagaacattttaagatattgagtgttccctgatgctttgatatacatggttattgaaaaacagctttgctcagaaattgcagtctatccctatcattcatatattagccacaagctattgttagtcatttgattttttttaagcttcrattgatatcatcatttatcttggctccatctgaaaatgttttgtttactttgtgcccatgctttggcatgttctacagctcagggtagaaacacacacacaatagacttacatacacaactatgatacacaattgttaagcaattgactattacatccatttttccataaaagatacactaatcttatagtaaatatatatttttaaatctaagtataaaggatcaaatattttaaaaatctatttagtattccttccaccaatttataattatatttgacttttattgttaccattawaatgtctctggacaacattggatgagtattcatcacatctagattgttagacttttgtttttccaaatttttaaatggaatatgcttacaaacttagtatagtaagaacattttaagatattgagtgttccctgatgctttgatatacatggttattgaaaaacagctttgctcagaaattgcagtctatccctatcattcatatattagccacaagctattgttagtcatttgattttttttaagcttcaattgatatcatcatttatcttggctccatctgaaaatgttttgtttactttgtgcccatgctttggcatgttctacagctcagggtagaaacacacacacaatagacttacatacacaactatgatacacaattgtwaagcaattgactattacatccatttttccataaaagatacactaatcttatagtaaatatatatttttaaatctaagtataaaggatcaaatattttaaaaatctatttagtattccttccaccaatttataattatatttgacttttattgttaccatta

SEQ ID NO: 283097 - DNA, 518 bp, Homo sapiens
aagaatatatttcggctttgttagtaaccccagtggcctagaggttagtaactccaagctaccaagtaccagtattgtggaataatattaaatgcccacattttgatcaataatactatttttatttaaagtctccagacctactttgagaatgctgctttaatgaatgaatacataaaatatatcttaaaccttgctctacagatagaatattatatttaatctaatctaatattatattataatattataaacacatagtattcccactgacaaagtrtgataatgttactatcaaaagaaaatacttatagcaagctttaaaattgagtctaagcagcaaaccaccatggcacgtgtatacctatgtaacaaacctgcacgttctgcacatgtaccctagaacttaaagtataataataaaaaaataaaactgagtctgtaagaagccttgataatataaacattcacaagaaaactaatatcaatatataatttataaagtcagaagaggtaac

SEQ ID NO: 283098 - DNA, 518 bp, Homo sapiens
aagaatatatttcggctttgttagtaaccccagtggcctagaggttagtaactccaagctaccaagtaccagtattgtggaataatattaaatgcccacattttgatcaataatactatttttatttaaagtctccagacctactttgagaatgctgctttaatgaatgaatacataaaatatatcttaaaccttgctctacagatagaatattatatttaatctaatctaatattatattataatattataaacacatagtattcccactgacaaagtatgataatgttactatcaaaagaaaatacttatagcaagctttaaaattgagtctaagcagcaaaccaccatggcaygtgtatacctatgtaacaaacctgcacgttctgcacatgtaccctagaacttaaagtataataataaaaaaataaaactgagtctgtaagaagccttgataatataaacattcacaagaaaactaatatcaatatataatttataaagtcagaagaggtaac

SEQ ID NO: 283099 - DNA, 518 bp, Homo sapiens
aagaatatatttcggctttgttagtaaccccagtggcctagaggttagtaactccaagctaccaagtaccagtattgtggaataatattaaatgcccacattttgatcaataatactatttttatttaaagtctccagacctactttgagaatgctgctttaatgaatgaatacataaaatatatcttaaaccttgctctacagatagaatattatatttaatctaatctaatattatattataatattataaacacatagtattcccactgacaaagtatgataatgttactatcaaaagaaaatacttatagcaagctttaaaattgagtctaagcagcaaaccaccatggcacgtgtatacctatgtaacaaacctgcacgttctgcacatgtacccyagaacttaaagtataataataaaaaaataaaactgagtctgtaagaagccttgataatataaacattcacaagaaaactaatatcaatatataatttataaagtcagaagaggtaac

SEQ ID NO: 283100 - DNA, 627 bp, Homo sapiens
atattacttcagtcaatgtgctttttaacaattctgctctaaatagaaaaatcagcagtgaaccagggggatagtaattctctgagcagtaatcttgaaacagcaatattacttcaaagcgcgtatagccatgtaaaatgaagttcagatacagttataggccatggacttctttagctctgaccacaactctcaataacaagaacaaagatgccttataaggtctagtggcagctgttcggtcacagacacagggatttagaagaccagtattaccattcaagtgccrcacagagttagaaagtttctaataaacaattttagttaatatttaaatatttgtagttcttttctacctcctttttagttttcaatgatatttgtaaccactttttattatgaccagatttcctttctttaatttaacatttttctgtattaccccaaaatctattgtgttgaaactaatttgtttacattgtctctggataaaatatggatcctgtttttttttcaagccaggcatttatataactttccttggcattgataaatggaatattagtcaagaataatgcatttcttcttatgtcccttgattatataatccataataatccaattatg

SEQ ID NO: 283101 - DNA, 627 bp, Homo sapiens
atattacttcagtcaatgtgctttttaacaattctgctctaaatagaaaaatcagcagtgaaccagggggatagtaattctctgagcagtaatcttgaaacagcaatattacttcaaagcgcgtatagccatgtaaaatgaagttcagatacagttataggccatggacttctttagctctgaccacaactctcaataacaagaacaaagatgccttataaggtctagtggcagctgttcggtcacagacacagggatttagaagaccagtattaccattcaagtgccgcacagagttagaaagtttctaataaacaattttagttaatatttaaatatttgtagttcttttctacctcctttttagttttcaatgatatttgtaaccactttttattatgaccagatttcctttctttaatttaacatttttctgtattaccccaaaatctattgtgttgaaactaatttgtttacatygtctctggataaaatatggatcctgtttttttttcaagccaggcatttatataactttccttggcattgataaatggaatattagtcaagaataatgcatttcttcttatgtcccttgattatataatccataataatccaattatg

SEQ ID NO: 283102 - DNA, 627 bp, Homo sapiens
atattacttcagtcaatgtgctttttaacaattctgctctaaatagaaaaatcagcagtgaaccagggggatagtaattctctgagcagtaatcttgaaacagcaatattacttcaaagcgcgtatagccatgtaaaatgaagttcagatacagttataggccatggacttctttagctctgaccacaactctcaataacaagaacaaagatgccttataaggtctagtggcagctgttcggtcacagacacagggatttagaagaccagtattaccattcaagtgccgcacagagttagaaagtttctaataaacaattttagttaatatttaaatatttgtagttcttttctacctcctttttagttttcaatgatatttgtaaccactttttattatgaccagatttcctttctttaatttaacatttttctgtattaccccaaaatctattgtgttgaaactaatttgtttacattgtctctggataaaatatggatcctgtttttttttcaagccaggcatttatataactttcyttggcattgataaatggaatattagtcaagaataatgcatttcttcttatgtcccttgattatataatccataataatccaattatg

SEQ ID NO: 283103 - DNA, 581 bp, Homo sapiens
acttggttataattaaaaagatataaaagtagtgttggtgaggatgtgagaggctggaagctttgtactgtgctggtaggaatgtaaaatggtactgctactttgtaaaagtctggcagtttctcaaaaagtgaaacatagaattactatatgatcccacaattccactccyagacaagtacttgagaagtaaaaatatatatacaccaagttcatagcagcactatttataataaacagggaagaaacatataaatgtccatcaactgatgaatgaataaatgtgttacgtgcagtgaaatattatttgtcaataataaaaaataaagtactgatgcatactaaattaaaaatgaatttttaaaaatattatgtcaacaaaaggaattagtcacagaagaccatgtgttgtatgatttcattcatatgaattgtcaaaattggcaaatctctaaagacagaaagcagattggtggttgcctaagactgagggtgatggtggggaaaaatgagggtgactgttaagcaagtggtatagaatttttgctttggggtaatagaagttttctaaagtttattgt

SEQ ID NO: 283104 - DNA, 581 bp, Homo sapiens
acttggttataattaaaaagatataaaagtagtgttggtgaggatgtgagaggctggaagctttgtactgtgctggtaggaatgtaaaatggtactgctactttgtaaaagtctggcagtttctcaaaaagtgaaacatagaattactatatgatcccacaattccactcctagacaagtacttgagaagtaaaaatatatatacaccaagttcatagcagcactatttataataaacagggaagaaacatataaatgtccatcaactgatgaatgaataaatgtgttaygtgcagtgaaatattatttgtcaataataaaaaataaagtactgatgcatactaaattaaaaatgaatttttaaaaatattatgtcaacaaaaggaattagtcacagaagaccatgtgttgtatgatttcattcatatgaattgtcaaaattggcaaatctctaaagacagaaagcagattggtggttgcctaagactgagggtgatggtggggaaaaatgagggtgactgttaagcaagtggtatagaatttttgctttggggtaatagaagttttctaaagtttattgt

SEQ ID NO: 283105 - DNA, 1156 bp, Homo sapiens
tgcttcttttttttctttttcttttctttctttttttttttttttgagacaaagttttgctcttgtcgtccaggctggagtgcaatggtgcgattttggctcactgcaacctctgactcctgggttcaagtgattctcctgcctcagcctcccgagttgctgggattacaggcacctgccccytcgcccacctaatttttattatttttagtagagatggggtttcaccatgtttgccaggctggtctcaaactccccacctcaggtgatccagccacctcagtctcccaaattgctaggattacaggtgtgaaccactgcacccagccaagattcttcttttaaaaaacgtactgaaaaaaattttaataagaaaataaggaaagctaagacttattagtagtttataatgtgttcagcactttatattgctttatgtttgatattttatttaatcttaataacccagtgcagtatatacttctttattgacattttacagacaagggccagggaattgagaggttaagtattgtgatgaataatatacagctatacagagaggacgtactwatataagtcatgttataaaaactctataactatgctttttgttcctttgcatttgctgaggagtgttttaattccaattatgtggtcaattttagaataatgtgatgtggtgctgagaagaatgtatattctgttgatttggggtggagagttctgtagatgtctgttaggtctgcttggtccagagctgagttcaagtcctggatatccttgttaattttctgtcttgttgatctgtctaatatcaatttagatatggtgcaaattagcatcattcattgaaaaaagtatccattgccttcccagacactagtgatttattwaaaagtcagctgtctcatgtttaaaagatggcaataaattttaaaaattcgacattgcaagttaggctaaaacataattatgtttttacctgagacacaagtaaaagtctgcaagggaatcttttccccatatctatgtcttaatgtcacaatgtactcaattttgttctgcaaggtcaagatatactcaaatatttatctgacagctgcatctaagaggtatttttatttaagaataacattttgtagcttattagaag

SEQ ID NO: 283106 - DNA, 583 bp, Homo sapiens
atataagtcatgttataaaaactctataactatgctttttgttcctttgcatttgctgaggagtgttttaattccaattatgtggtcaattttagaataatgtgatgtggtgctgagaagaatgtatattctgttgatttggggtggagagttctgtagatgtctgttaggtctgcttggtccagagctgagttcaagtcctggatatccttgttaattttctgtcttgttgatctgtctaatatcaatttagatatggtgcaaattagcatcattcattgaaaaaagtatccattgccttcccagacactagtgatttattaaaaagtcagctgtctcatgtttaaaagatggcaataaattttaaaaattcgacattgcaagttaggctaaaacataattatgtttttacctgagayacaagtaaaagtctgcaagggaatcttttccccatatctatgtcttaatgtcacaatgtactcaattttgttctgcaaggtcaagatatactcaaatatttatctgacagctgcatctaagaggtatttttatttaagaataacattttgtagcttattagaag

SEQ ID NO: 283107 - DNA, 591 bp, Homo sapiens
ggcatggttatctagtcttagtttccatttatagagcataggtagagtataattctyaagggccctagacttttctaaatggtaaatgagcattgacttctacttaaagttaatggctgcattagcctctaacaagagagtcatcctgtcctttgaagctttaaagtcaggctttgacttctcttctctagctatgaaaattctagatggcatcttcttccaatgtaaggctgtgtcatgtacattaaaatctatttagtgtagtcatcttcatcagtgatctttgctagatcttctggataacttgctgcagcttctacatcagcacttgctgcttcaccttgcactttcacgctatggaggcttatcttcttaaacttcatgaaccaacctctgctagcttcaaatttttcttctgcagcttcctcacccctctcagtcttcataaaatcgaaggcagttaggaccttttaatgaattaggctttggcttaagggaattctgtggctgattgatcttctatccaaaccactcttaactttcttcatatcagcaataaggccatttgctttcttatcatttatgtgttca

SEQ ID NO: 283108 - DNA, 615 bp, Homo sapiens
actccgccagtggtttgacaagcatgtaatttcctatgttaaatgtatttctgcatttagtatgattttggttgtagatttgttgcatatagctttaactatattgagttctgttcttccaatacctactttgttgagggttttcatcatgaagccatgctgaattttattaaatgctttttctgcatctactgagatgatcatttggttttatttttaattttgttcatatggtgaatcatgcttattgatttgcatatgttgtatatccttgcatctctgaaataaaagccacttgatcatggtatattatctttttgatgtactgttggattcagtttgctagtattttgttgaaaatgtttgtatttatgttcatcagaaatattggcctgtagtttttttcattgttgttgtgtccttgcctggcyttgttatcagggcaatagtggctccatagagtgagttagggaagatttactccttttcgatgtgtgtgtgtgtgtgtgtgtgtgtgtgtgtgtttaacagtttttagaggatggtgctagttcttctttgacacctggtataatttggctgtgaatctgtaaggtcctcgtttttttgttgttg

SEQ ID NO: 283109 - DNA, 566 bp, Homo sapiens
ttttttcattgttgttgtgtccttgcctggctttgttatcagggcaatagtggctccatagagtgagttagggaagatttmctccttttcgatgtgtgtgtgtgtgtgtgtgtgtgtgtgtgtgtttaacagtttttagaggatggtgctagttcttctttgacacctggtataatttggctgtgaatctgtaaggtcctcgtttttttgttgttgttgatgttggaaaattttttattactgattcaatctcacagttgattgttggcctgttcaaaatttccttttcttccaggttcaatcttgggagtttgtatgtttccaggaatgcatatatttcttccagtttatctaatttgtgagcacacagaggttcacagtagtctctcatgatctgttgtatttctgtggcatcagttttaattctcctttttcatttctgatcatgcctatttgaacctcttttttttttttggttagtctagctggtgatctattaattttgtttaccttttcaaagaatcaacttttaatttcattgattctttgtatttttatctcaattg

SEQ ID NO: 283110 - DNA, 566 bp, Homo sapiens
ttttttcattgttgttgtgtccttgcctggctttgttatcagggcaatagtggctccatagagtgagttagggaagatttactccttttcgatgtgtgtgtgtgtgtgtgtgtgtgtgtgtgtgtktaacagtttttagaggatggtgctagttcttctttgacacctggtataatttggctgtgaatctgtaaggtcctcgtttttttgttgttgttgatgttggaaaattttttattactgattcaatctcacagttgattgttggcctgttcaaaatttccttttcttccaggttcaatcttgggagtttgtatgtttccaggaatgcatatatttcttccagtttatctaatttgtgagcacacagaggttcacagtagtctctcatgatctgttgtatttctgtggcatcagttttaattctcctttttcatttctgatcatgcctatttgaacctcttttttttttttggttagtctagctggtgatctattaattttgtttaccttttcaaagaatcaacttttaatttcattgattctttgtatttttatctcaattg

SEQ ID NO: 283111 - DNA, 566 bp, Homo sapiens
ttttttcattgttgttgtgtccttgcctggctttgttatcagggcaatagtggctccatagagtgagttagggaagatttactccttttcgatgtgtgtgtgtgtgtgtgtgtgtgtgtgtgtgtttaacagtttttagaggatggtgctagttcttctttgacacctggtataatttggctgtgaatctgtaaggtcctcgtttttttgttgttgttgatgttggaaaattttttattactgattcaatctcacagttgattgttggcctgttcaaaatttccttttcttccaggttcaatcttgggagtttgtatgtttccaggaatgcatatatttcttccagtttatctaatttgtgagcacacagaggttcacagtagtctctsatgatctgttgtatttctgtggcatcagttttaattctcctttttcatttctgatcatgcctatttgaacctcttttttttttttggttagtctagctggtgatctattaattttgtttaccttttcaaagaatcaacttttaatttcattgattctttgtatttttatctcaattg

SEQ ID NO: 283112 - DNA, 608 bp, Homo sapiens
agttgaacaccgttcaaaaaaggctcttggtacactactggactttactaaaaaactgagtcctgagaatggaacattgagaggccaggtaggcaacattccaatcatgaagtagttattatcccaccaccagaattggaaagttgctgtactatgggaactgaatagtagccctgaaaagcagcagtgaggaaaaaaaaatttatatatatatatttatatttatataacatataatatatataatttatatattacayatattttgtttatatatatatacatacatgtctcacacatatgttacccacacacacacataaataatgtatatatattacttaatacacacatatatatgcaatttacttgaaaaagaaaaaaaacaaccactgggcctatttatttaagttatcaaaattagccaatttgtaccaatattctttgttcatttaattaactcagtgaagtttaaggattaatttttatttgtgatttaaatattcaaaatctcctcaggagtttatagaaaaaactcaatgtaagagcaaaattattttagtaagccgtattaatcatgaaataatcttatccttttaaggtgttca

SEQ ID NO: 283113 - DNA, 560 bp, Homo sapiens
aagcatgcatgtatatctacagtgtataatttttgaaggtcacaaaactaatctgcaaaatctcactttcttaattcattccagtcctaaaataaatttgtattttgagctgttattacccttggaactggaaacaatagtgccaatagatgacacttttggcaattgagtaataattcaatcatttcaaaaatgaaatttttcaatttcaggaggctaccttttcccattctttttcccagtgtgacaactaagttcttgggagaacgtttatacctgaaggttatagctaaggtgtgcccttagacgggttgtagaaaactcaggtgttcttctgtgcccctctgggcttaggaggggctcagggactctgttgggccttagctgcctgcacacctggaagccatgtttattttctgctgcaggttcttctcttttaatttgctgcttcctttgcttcaccctaggagtgaaacagatgttttctctgctttcagaaggagcaagggaaacaaggtkgaatgtggaagtctgagacagcagtacagttctagggatgt

SEQ ID NO: 283114 - DNA, 584 bp, Homo sapiens
agaaggctttgctaaggtccaggctgctgtttaagctgctgtgccacttgggccatatgacccagcagatccaatggtgtttcaggtgtcagcagcagataaggatgctgtttggaacctttggcaggttcacataggtgaatcacagcggaggcctctaggattttggagcaagtccctgccatcttttgcagataactactctctttttgagagacaggtcttggcctattactgggctttggtggaaactgaacatttgactgtgggtcatcaagtcatcatgyggcctgaactgcctatcatgaactgggtgctttctgacccatctagtcataaagtgggttgtgcacagcagcattccatcatcaaatgacagtggtatacatctgatggatcttgaccaggtcctgaaggcacaagtaagttatatgaggaagtgcctcaaattctcatggtctccactactgccaccctgccttctctcctccagcctgcactgatggcctcatggggagttgacaatataatagttgacagaggaagagaaaaatagggcctggttcacagatggttctacatga

SEQ ID NO: 283115 - DNA, 533 bp, Homo sapiens
gtggtatacatctgatggatcttgaccaggtcctgaaggcacaagtaagttatatgaggaagtgcctcaaattctcatggtctccactactgccaccctgccttctctcctccagcctgcactgatggcctcatggggagttgacaatataatagttgacagaggaagakaaaaatagggcctggttcacagatggttctacatgatatgcagacactacttgaacatggacagcagcagcactacagcctctttctagcacattcctgaaggacagcggtgaaaggaaatcttcccagtgggcagaacttcgaggagtctacctggttgtgcactttgcatggaaggagaaatggccagatgtgcaattacatactgattcatggactgtagccaatggtttggctggatggtcagggacttggaagaagcatgattggaatattgttgacaaagaaatttggggaagaggtatgtggctggacctctctgagtggtcaaaaactgtgaagatatttgtatcccatgggagt

SEQ ID NO: 283116 - DNA, 607 bp, Homo sapiens
ttgggaagagttataataatgtatcatagctctaaggtacaataatacaatatataaattcatgtcaatcttgctcagaaattctattcagatgcctaaaatctaatcaatatatcataattaattaaaacagtttactctggtagttctctgtgataaatttaatatattttcactgtattagacataaataatgtttattaataaatcccactgcaaaacagttcgggtggctttgggtctacccagttctcccctgactcttgcttgtatttttcaagaataaccatagaatgtgctaggaaggcaacattctgagaagaggagaaattgtcctgaacagcattctatgttctagtctccctgctagaaacaggatgtccttcatgccttatcccagagtttcctgggaccctggtatataagacccaagattgctgytttctagagtcctccagggtcagtgcaagggggacacatgcagataaaattccgtctaacccaggcagcttttctgagcctcagggaaccagctcacagtgaatcccaagtttctgttactccttgccgcccatctataaactgacttcatggatgttcggatgtg

SEQ ID NO: 283117 - DNA, 582 bp, Homo sapiens
ccgcccatctataaactgacttcatggatgttcggatgtgtgtgcggatgttctgactcattggactcggacaagttggtaactctgaactttcttcatakccatctaatcatggcactcaaaatgaattaacgtacttgagaatttgaaaagatcaaaaatattttctctgatatggacttactactactgctgtatatacacagacaaatcatagtggctatgttccaacaaaactctatttacagaaacaggcaaaaattggtcagtaggctgtcatttgctaatcatcgattcagataatattacatctgattttcattactcaattcttgaaagattgatactgtatacaacacaattaacgtggaatactgggaaaatggaatccaaaatactcattttaaaacattaatttgttaacacaattcattttaatgattccacaaagccaaaagacaaagtcggtataaggcagaggtggtatttttttgaaaatctacgagtgtgtcctgctgactatcgagttacatagagcacttatcaagaaaataaaaataaatcctagaaatgtcagtattg

SEQ ID NO: 283118 - DNA, 563 bp, Homo sapiens
gagtgagtttctaaggccagcccagattcaagagaaggagacactgatgtaactactcaatagaatgagtgtcaaaaacatgtgcagtcatggtttgaactaccacaaaatgttaaggttagtgtacctttaatataactggggagtatggttccaaatatatagaaatgcaagatttttgccactcatgaaacatttataattaaataattgttcatgtaatttcttactgaatttctattattccmctaggctgtgatttgcagaggatagcaggatttgcagatctgctttgctcatttttgtgtttcaagagccatgtagtgtttaacagacactatatgctcatgaggtatctgtttaacaaatgcatgtacaaaccttagttaatcaggaaactatgaacatatatatctggccctggaagtttttgttttgttttgtttttaaattattatccccaaatgaacttcctgaataatacttgaaaatatatacctcaacattttcatttgtataagattgtctattgtttactgaattatgatcatcttagtttatga

SEQ ID NO: 283119 - DNA, 563 bp, Homo sapiens
gagtgagtttctaaggccagcccagattcaagagaaggagacactgatgtaactactcaatagaatgagtgtcaaaaacatgtgcagtcatggtttgaactaccacaaaatgttaaggttagtgtacctttaatataactggggagtatggttccaaatatatagaaatgcaagatttttgccactcatgaaacatttataattaaataattgttcatgtaatttcttactgaatttctattattcccctaggctgtgatttgcagaggatagcaggatttgcagatctgctttgytcatttttgtgtttcaagagccatgtagtgtttaacagacactatatgctcatgaggtatctgtttaacaaatgcatgtacaaaccttagttaatcaggaaactatgaacatatatatctggccctggaagtttttgttttgttttgtttttaaattattatccccaaatgaacttcctgaataatacttgaaaatatatacctcaacattttcatttgtataagattgtctattgtttactgaattatgatcatcttagtttatga

SEQ ID NO: 283120 - DNA, 582 bp, Homo sapiens
ccgcccatctataaactgacttcatggatgttcggatgtgtgtgcggatgttctgactcattggactcggacaagttggtaactctgaactttcttcatatccatctaatcatggcactcaaaatgaattaacgtacttgagaatttgaaaagatcaaaaatattttctctgatatggacttactactactgctgtatatacacagacaaatcatagtggctatgttccaacaaaactctatttacagaaacaggcaaaaattggtcagtaggctgtcatttgctaatcatcgattcagataatattacatctgattttcattactcaattcttgaaagattgatactgtatacaacacaattaacgtggaatactgggaaaatggaatccaaaatactcattttaaaacattaatttgttaacacaattcattttaatgattccacaaagccaaaagacaaagtcggtataaggcagaggtggtatttttttgaaaatctacragtgtgtcctgctgactatcgagttacatagagcacttatcaagaaaataaaaataaatcctagaaatgtcagtattg

SEQ ID NO: 283121 - DNA, 510 bp, Homo sapiens
tgagctccctgggttttcttgtttgtttgttttactaaaatagagacagggtctcactaggttgcccaggctggattcagactgctgggcttatgtcatacccccatctcagcctcctaagtagctgggattaaattgtgtgccaacacacctggctcaagagctccctgttctcagtttgtaaaagctgcctgcattccttggccctcttcatcttcatagccagcatctcacgttttaagcctctctcaactccccttctgcctcatttctgctttcagacagagaaaattctctgttttaaagggttcatctgattaggctggatgagccccatataatacaagataatctccctgtgttaaggtgagctgtactcttaattacatctgtaaaktcacttgatgacaataactagattagcatttgattgaataaccaggtgacaggaattttgggaggacatctttaaaattctgctaaccacagggaatatctcaaattgtagga

SEQ ID NO: 283122 - DNA, 596 bp, Homo sapiens
taaagcttattttgctgtaaaaactccttttttttttttttttttttttttagttttacttgagtccaacattccaacacaaggaaggcaagtttttcctgcttccatgatgatggaaggtaggtaactcctttatggagtttgagttcatttccaacagggaagatgaggggtttcttttcctgcttctaggatggtagagagcactcttcagcctgagacccatccctaggtaagtaattgaattgggatttgtcttggctaaagttagattaacagccagctggtcttaatttctccttaccattagagcactcagtgatcttaccgttggagtttctttgttatttgttctggtctgaggttgttgtttaaggattctmattctactttaaagatgcattctaaatagtcttctccattgccttttctcccaaatttaatcttaatttggtttgtcagtgtgcattttcatgaggagctgaaatgttgttttcacatgttaatgagagactgagctttctcagctccaaagaggaagggcatttgttcctcccagccaaaaggtgtccctgggtgactgggggccccatcac

SEQ ID NO: 283123 - DNA, 592 bp, Homo sapiens
tgatatccattttcaattcaatcagccaagtcagctttaacttcagcataacaatctgacttcatctttcaatccaaataaatctgttaatatgtgtgcctattacgagactctaacttctgaattctacaagttgacaggtaaaaagattatatataatacatagaaaaggcatgaaactttgcagtaaatttgttatttgacaaaataaaccactgcagtatttcattccaatgcttgctttgttcattttcaytgatctcttgctgaagactattgcattcttcaacaaaaatcagcagatgtaataggcaaggttgtttaaaggaaatttccactattcccagtattctacactaaaataaattggaatgaagatacccaaacacatttcaaagtattccaattctaattctatatttttcattaacagacatacatataagacagaaacataatataatagttcatgcctctatatataatttcatggatattttatgattcttgataatccatatccataaagggaggtaatagtggaagaataccaaaatgccataaatatgtcactttcagaatatataattta

SEQ ID NO: 283124 - DNA, 568 bp, Homo sapiens
atctcttgctgaagactattgcattcttcaacaaaaatcagcagatgtaataggcaaggttgtttaaaggaaatttccactattcccagtattctacactaaaataaattggaatgaagatacccaaacacatttcaaagtattccaattctaattctatatttttcattaacagacatacatatragacagaaacataatataatagttcatgcctctatatataatttcatggatattttatgattcttgataatccatatccataaagggaggtaatagtggaagaataccaaaatgccataaatatgtcactttcagaatatataatttaatcattagaatgactataatactaatgatttacatattaagagttatcataatctgtaaagtactttcctgtcagtgtcagtcagggtccagtcaagaaataggaactactcttggtcttctacaaagaaaggatttaatatagggtattgagtatttacctaatgggaaatgaagccatatatgaaatgctaaaacaacttagagatgagcaaaagttgggaactactacccc

SEQ ID NO: 283125 - DNA, 619 bp, Homo sapiens
aattagaacaattcatgtagctagacaagtttaattgatcagttaaaaataaaagagtccccaactgagagcaaccacaagatatacattttggaaatggccatgacatagccattttgctaatttattttattaagttctgtgtgcttctaggccaatgtatttggcatctgagcagaggtgaataaacttccagcccaggccacctcaatacagatcctaaaatccaattaacagaatgggcaggttgtctggtttggctccaactagagcagattgtttcctcaatgtcaactcaacctgaaaaaaagaacgcctgtgagcttcctactttaggactaaaaagagctccaaggcccagaataagagctctatgccaattacttagagcaaaaccaagttccacactgtggtgcggcccctctactttccttctaygttgattctgtcatgaaatggcctctctccctcagctctgaaatctgcctcttctataggagcagattctattatcagggatttttgttgaaaacttgttggaagaatcaaaggctttggaagaatctgttacagagcactggaggggaattgaccacagggtagacatgcttttaaaaaa

SEQ ID NO: 283126 - DNA, 605 bp, Homo sapiens
tgcccacttgcaagtttgcttgggtaaggtactaaacttatttgaagcagtttcctcatctggaaaattaggttaataataccggcacattataagagttctgtgagggttgcctgacaccctgcatttagcatgtgcctgacctatcataaactctcagcaaatgaccattaccaaaattactattattttagataaacatttagataggtgttttctgtcactcctttccttaatatttatcaaacctaaaaatcttctttcaattattatttgaaaartaaagatggagaatagttgggcttcaaaaaaaacccctaatagctgcatgcaacataaaagaaaaatgatgtcaatcaaaaaaataagtatggataagtgtcattaagctggaaggtaggacttgtcttgtaattagtcctcatcatgaagtccataactaaacctcagcatatgtgtatttgctcaggttttgatgtttatggtctactgtccctcagaaagttcactagcctataaatctgttatggcatataaatagaaaaattaataaaattaagattttttaactttttctaacactttatatttaataaagttaggca

SEQ ID NO: 283127 - DNA, 632 bp, Homo sapiens
acaggatgtttagcactgtccatggcctctatctgctagatgtcaayaggactatcaccaccctgctccccaagttatagcaaacaaatatttctcctggggaggagctaagttgccctcggttgagaaccactgctttaaagggaagcagcaaggcagcgctctactctcctcccttttccataagcttgaaggcaggaatgctagctacagccagagcatccagtgtggaccacacttggaaaaccaaatgctgaggatgctagagccaagcctcaagggagcctagtccctgacacatggcctgcactgcaaacacctgaattggtacaagagatgaaagttaccttctaccttatttaagacaccatattccaggtgtctttgtttactgcaggtgtatttctatcctacctaatacaaacttcctaggaaagtcacttttgcagggcaggtaggggttaacgcatattgcctgttaccttaaaatcttgtagcttcatttcctttttgtgatcagcacattatcctgaccatatagcctgtccccaaagaggcaattcttacaatgagaagctgcacttgattcttcagtaaatacatactttgtttgactgtgtgctaacaaccca

SEQ ID NO: 283128 - DNA, 632 bp, Homo sapiens
acaggatgtttagcactgtccatggcctctatctgctagatgtcaacaggactatcaccaccctgctccccaagttatagcaaacaaatatttctcctggggaggagctaagttgccctcggttgagaaccactgctttaaagggaagcagcaaggcagcgctctactctcctcccttttccataagcttgaaggcaggaatgctagctacagccagagcatccagtgtggaccacacttggaaaaccaaatgctgaggatgctagagccaarcctcaagggagcctagtccctgacacatggcctgcactgcaaacacctgaattggtacaagagatgaaagttaccttctaccttatttaagacaccatattccaggtgtctttgtttactgcaggtgtatttctatcctacctaatacaaacttcctaggaaagtcacttttgcagggcaggtaggggttaacgcatattgcctgttaccttaaaatcttgtagcttcatttcctttttgtgatcagcacattatcctgaccatatagcctgtccccaaagaggcaattcttacaatgagaagctgcacttgattcttcagtaaatacatactttgtttgactgtgtgctaacaaccca

SEQ ID NO: 283129 - DNA, 641 bp, Homo sapiens
tgtcctacatattttacctttaatatactgtaggttcgatgaacaaactaaaatatttcaaatttaattaccctgagaaactacaataattagggacaaatggagaaactgagggctgattccgctctcacttaaggccacacttatgattgtgcgggtgatacacttcaaaactctagaagcctcagctacattatagtggatgtgaataatgccccctgccctcagaagggtttcaggcaacacttgctgagccatacctggcagccatgctgacctttactagccttgtagatttggacaagctctttaacctcctaatttatgaataggggacagtgtacttctttaaaggattgttgaggataaaattatgtattatttcttcctagcattgtttacaattatgaatttggttagtgtctaacactggaatatgtacctttcatgaatgtagggagcatgtctatttttgcttatcacaagagtgcacttttttgtaatgtgccagctgttgaaaaatattkgttaaggaatgaataaatgtcaattaagttatgcagagtacctggcacataactggagctaagtaaatgttggtgccttcttatcccccttctattgtaattaaagataaaaaa

SEQ ID NO: 283130 - DNA, 574 bp, Homo sapiens
gcctgggatcaaggatgtagtttttgaccttgagacagatccaaattgttgggttcacattctagtgctaacacccccgtgttayaattccattttttcaaactgattcatataacttgagtggagaatgcttgctaagattttgagaagtggtttataaaagggatgggtattcgatgtcttgtaaaattactgatttaaagaaaagtctaattgctacagagatattattgagacttaggaaatcagttttatagatttgatatgaccagccagaatcactttccaaaaaagcaaattgatagattcattggttactttttcctggtctaagccagtaaatatttttctgagatttaaaagttcactcccactcttttatatcataaggtattatatgaatatcaatggaactttggattgagttcaaaggcaggttcccaggaatgagccaaatttacactaaaagcaaggatttatgcactttttaaatgccttagcagtactcaagaacatttgagagtggtcattgttcctagaatgtcctgtcatgtagtgaagtttaaaggacagt

SEQ ID NO: 283131 - DNA, 441 bp, Homo sapiens
atgcatggaagaaaatagttttcctggtaaggaacaggcatgtgaaagctttcagaacttccttcccaaactttatgccttttttttttttttttgatgatgggatggcatgggtagtggaaacagatgctatcagctcttttggctcagaataaagtgagcaaaggctaagggagtcatgctgttttgcaaactgacatacacacttatctttccaaaatatttctaggtgamaaagcaaattgacaggcttgatagttctgtagatgctaccatttcttcagttaggggagcatagaaaatggagaatagaaaaccaactagattatcagtttacagtttgcagagccaggtatctctaccatgtgctgcagctgcttattaaattacatttctgtgaatttaaaatctgtatgcaaaacacttgcatttccaaagggc

SEQ ID NO: 283132 - DNA, 605 bp, Homo sapiens
actgcatctcataggatttggcctccattggaacccccatattctccttcactaggtgggagtagcctatggatagtgtgacattgctgcaaacccaatactggatccacaagggcaggagctgatgtgctcaaaccattaggcttcttgcagcaggaaatctgagcagtgctttttcattgccaccagagtcagtcccctgtgtctcacagatacacaggtggggaagaagctgctcctgtgggtctttcttgcggttccygtgggtctttcttcctgagtgggaatggaagatggaggttggcagaatgaacagtagcctccatcgtgcaggtagtctcagggccacacctgtattcacctttttccctttccactgtccatctgaaattgtcctcactctcatctgtcatatcaggacatcttgcaggcttacctcgtgggtcaatccaagcctgaaatcctgaaaggtatgaaccctagattggcaatcacactctttgggctggggtggctgtgtgtgtccattatagttacaatggtgcaagggagtacaaggaagcattctcccttcacttattgtgtaaatggagccctacctttgc

SEQ ID NO: 283133 - DNA, 605 bp, Homo sapiens
actgcatctcataggatttggcctccattggaacccccatattctccttcactaggtgggagtagcctatggatagtgtgacattgctgcaaacccaatactggatccacaagggcaggagctgatgtgctcaaaccattaggcttcttgcagcaggaaatctgagcagtgctttttcattgccaccagagtcagtcccctgtgtctcacagatacacaggtggggaagaagctgctcctgtgggtctttcttgcggttcctgtgggtctttcttcctgagtgggaatggaagatggaggttggcagaatgaacagtagcctccatygtgcaggtagtctcagggccacacctgtattcacctttttccctttccactgtccatctgaaattgtcctcactctcatctgtcatatcaggacatcttgcaggcttacctcgtgggtcaatccaagcctgaaatcctgaaaggtatgaaccctagattggcaatcacactctttgggctggggtggctgtgtgtgtccattatagttacaatggtgcaagggagtacaaggaagcattctcccttcacttattgtgtaaatggagccctacctttgc

SEQ ID NO: 283134 - DNA, 342 bp, Homo sapiens
gatagtcagaaatctgagaagatctaggttctaaccctagctttgttcctaatttgctgaatactaaggcaaagccttcacctccctagacatgttttctttaacattcaaagattaaaattagaatctctaaattctttttaaattctcatattctatgactctatttgctccttttttttttttttttttttttttgttccagrcaatctttcagaaagggtgtcatcaccttaaatcccagtgtaaggtattcaatatattagcagtacttttagcttcttatttattcaccaaataaaatgacattacagtgttgccaaatttatgtcaaattggtcc

SEQ ID NO: 283135 - DNA, 593 bp, Homo sapiens
gtcccttcccagtctgttgtaattacctcactgcagctcaccatagaagcaagtggtaagctgttcagcccaatcgaaccacaccaatacaacctgtgattttgaatcattccagatattgctgagaattgtaggtttgacagctgtgcatggtaactctagtgaagggggccataggtttttagaattaatataacatttttatttgcaactctctcccactcagccctccagcacacaccaaaatgatgttgcttacagtgccctaaattgacctcttaagcagagtgactctaaaccacaagattttctggcccaaatcaaatgtctcatctttttttctaaccatattcctgtctcaaccaatgtcttactctattcttctctttaatttgggttttctggttagaytgcttgactaagaatttaatgaatttagacctgtgagtgaaattacccacaactaagttcaattttcagcattcaactccatcaaagcccactcccatttggccttacctagctaagaaaggtctgctaggatcagccttagagataaacagctcacttcacatttaggtcccagagaaatt

SEQ ID NO: 283136 - DNA, 593 bp, Homo sapiens
gtcccttcccagtctgttgtaattacctcactgcagctcaccatagaagcaagtggtaagctgttcagcccaatcgaaccacaccaatacaacctgtgattttgaatcattccagatattgctgagaattgtaggtttgacagctgtgcatggtaactctagtgaagggggccataggtttttagaattaatataacatttttatttgcaactctctcccactcagccctccagcacacaccaaaatgatgttgcttacagtgccctaaattgacctcttaagcagagtgactctaaaccacaagattttctggcccaaatcaaatgtctcatctttttttctaaccatattcctgtctcaaccaatgtcttactctattcttctctttaatttgggttttctggttagattgcttgactaagaatttaatgaatttagacctgtgagtgaaattacccacaactaagttcaattttcagcattcaactmcatcaaagcccactcccatttggccttacctagctaagaaaggtctgctaggatcagccttagagataaacagctcacttcacatttaggtcccagagaaatt

SEQ ID NO: 283137 - DNA, 1101 bp, Homo sapiens
tcccaagagctaaaaataggaccagaagggaggaagagcttcctttcccaggaattccactccttgagagaaggaagtgaactggagagcctgattctgtgggaacctgccctgtggaggccttgggggcamcccacaggagactaaaagactagggtctcagttttacataaatataggggtagaggaagacacagaatagacccagagagaggtgtccttgttactggaccgcctcaaacagtagaatatgctatggggcacagcagtaggagctttatgccagaggaaaagttctaacattatagaggggacttacgtgagcccagaaggttataaagatggtagaaaatgtggtcctaagtgtacaggattttgataggaacttaggacacttttgatgaagtgtgcacctctgccactaagttgtgcatgccatgttgcctgctcgtttctgccactgcctctgttgaacagacagcaatagggagtccatcttcatgatgtcaattwtttttaaatgaccaatgttaattaccctagtaattagctaggaatgggtgggagctggaattaactagaattaacattcctagtaattaactaggaacgggtgggagctggaattaactacaattaacattcccagtaattaactaggaatgggtgggagctagaatttggggacagaatttgacatttggcaagccccatagttgtgaagatttaaatcaaaaaacctctcttggttcttgtgcttagaaccttaaatggaaatacttcaaattaaaatagtaagaattttgataacaaacagatgtcttcctgggggtcatcttgggtatttagaatgacatctacatgtggtaagaataggctgagggggaatggggctttgcatgagaaaaaaaggatgaggaggggatattgagcwgaggagaaacacggcagcaaattgaagtgagtctgtaacttgccagccattgagtgcttcatcttggaagcgagtcttccagcctcagtcaaaccttcagatgactgcagccccagctggtgtcttgactacacttgactacatgggagatcccgagtcagaaccca

SEQ ID NO: 283138 - DNA, 444 bp, Homo sapiens
atacaatagaaatagaaaagaggaaaactctctaaaagtaatatttatactacggaaaaatctaactttattttggttgaaaagagtatacagatttatattttttgtagctaatacatatttctcttttggaagtggttgaagtggaagagacaattttatgtttaatgtctcgcstcagttttaattttctgatttaattagtttcctaattagaaggggttaaattaattaacctcattatttactatatatttaatgatttctcatctatggggagttacttaattttcaataattggaaagcttatgacaagaggggatattgccaagtcttacacttattgttttatgatcagtggcaggaataagacagattaaggggaattttaggtgagatatcagatacttgcaaaggtatttcttacttgttttgaaccatga

SEQ ID NO: 283139 - DNA, 590 bp, Homo sapiens
agataatgaatgacaaattgacaaatttctggctatatagtaaatttttcaaaggcttgagagaaaatcaactttacttaatggaagaattcaagtagtaacaatctttaacaattctgtgtgccaacttataactgatattttcagatcattatcaaaagaatacttctttaatctatgacatacctgcaataagtaggatctgcttccaaataaaatgtgctgcagcccttgttcatgatgagattatasctgatctgacgtgagaatgcctacactgcatgtaattttaaaaattactatagaaatactgatggttctagaatctctatggacaagagactccacaactagaaaatttaattgaagtagaatgcataagagttaagaatgattcttcctaggttatcatgaacattccttttcatgcgaatatgaaaatatggggccatgctctgggtggattaaggtgacagcatagcacctgtcaaagaacattgcttattttaagttcaccgcttagttcagtaacctggaggctttgccttcttgtctcagagaaattacaggcatcaattcaactagtcaac

SEQ ID NO: 283140 - DNA, 614 bp, Homo sapiens
ccagacagaacttggatcctctagtaccaaattccaatgaaatattgtttgttgatggtatgctaaaaaacaaaaataacaataccatgtttgatatataataagtagtccagtctctcccataaaatttaatttcttacccaaagccaagttgttcaatgcttaaattatggacctttccagtaggtccatattaagttaaaaaaatgaaacagaatgtatgtagactaataattagtatacctccagaataattcactaatttaacatactatagaaacatctccttcaggtactctaaaaatggacaacaaatgtgaattatttgatgacttgatgctaccccaaaccattctaaactgaggtcctccagggaacctccagaaagagaagtgtggacattgccattaaaccaagaacctcgggacaaacagatgaccatgtgaattagtgaccatcttggcaatacttacagataacgtacctacagcttcactaagaytgatcacctctcttctatagttcctgggtcctttatcctatgctgacgttaagtgtctcaatgtcaactgagaagaaaagttaattgctccatagggccataggttaggcca

SEQ ID NO: 283141 - DNA, 624 bp, Homo sapiens
ttacaatatttataattattcttgtttatctggtagtccttcagcatctgttgttcggaactttacatgcttctgcagagctctgtcctgacagatgattcaacagatgatctaaaaaatagyataaactcatgttgatcaacgtgcaatgtgaacatcacatctccacagatgaaacttcatcattaagaggaccaaaaacagtggtgacaatctggataatcacggagatctctcctgcagctttggctgaatgaggaccaacacagacagactgagaagaaaatgttcccacgcacttaggaaaagactgagtgctctttagcccggaacaagttttagacttagtctactgatcaagggcaactcatctcaatcaatatattttaaaattttcttctcttaggatttgtaaccaagtatgttctcatataaggtcacaaggctgaggtgtttgtgtcaagtaactagatctttgattaagagacctaccattagggaattgtcttagatctgtgtaaaaggcttcaaacctcttgacatgaaggtgtactgtttggcaaatggtgtcatgctattcatctacgtatcctactgatgcttgctttgcttttgctgttgttt

SEQ ID NO: 283142 - DNA, 548 bp, Homo sapiens
ttttgtttggaaaggggagcagcctgaaagaagatgatacagactcatgaacagtggctaaaggtctggaaggtgaatgactggaaggaaggatgtctgtgaaagaggcttgtagatgaaccacagggaataaggacaaagtgtggatatgtttttatcacttttaacatcctccagaaagcatacactgcagcatagagcactggaaggggatcaccagccaccttgaagagcggctattcatcagcagggatggatttgcctctcctgcctgcagrgtctcagccaggtcactgtccaaggacctttgtaagtttccatcctctgatacaggattgcatttagcatccttgtgaaccaatggccccactttacagcaatgagcacatggcctcgggtcccatcacagaccacttgttgcaagtcgagctgcacttctccccgattgagaaaaaagaagtgttgaagtcctcacccctggtatccgtgaatgtgaccttctttggaaatagggtcttggctaatgtaatcaagttaaaattgcactg

SEQ ID NO: 283143 - DNA, 1245 bp, Homo sapiens
aatgcataatcatggcagaagggaaagcaaacacaaccttcatcacaaggcggcaggagagagaagtgccagcagggaaaatgccagatgcttataaaaccatcaaatcttgcgagactcactcactgtcacaggaacagcatgggagaaacctcccccatgatccaatcacttcccactggctcccttccacaacatgtggggattatgggagctacaattcaagatgagatttgggtagagacacagccaaaccgtgtcagatgtgtttggcagcaaagtgattagcatggacatgttattctccagaatgtaaatacatagatgtggcaatcatggcatgaaaagatcttggtaaccagtgggtcagatccctccgggatgagggccttacctcatggatgattctgacatcaaggtcaacagagatgctagcacaggtgcargaaaacacaggcagctagtggagaagggagatgatgagtatctgtcacagacttgagaccagctgcaacagtgagggtcgtgccttgtcccaacaaccagaaccctggatggaaagaactcactgtgagaagcaagtgggcttggaggtataaggagtggactgcagtggatgctawaatgcataatcatggcagaagggaaagcaaacacaaccttcatcacaaggcggcaggagagagaagtgccagcagggaaaatgccagatgcttataaaaccatcaaatcttgcgagactcactcactgtcacaggaacagcatgggagaaacctcccccatgatccaatcacttcccactggctcccttccacaacatgtggggattatgggagctacaattcaagatgagatttgggtagagacacagccaaaccgtgtcagatgtgtttggcagcaaagtgattagcatggacatgttattctccagaatgtaaatacatagatgtggcaatcatggcatgaaaagatcttggtaaccagtgggtcagatccctccgggatgagggccttacctcatggatgattctgacatcaaggtcaacagagatgctagcacaggtgcaagaaaacacaggcagctagtggagaagggagawgatgagtatctgtcacagacttgagaccagctgcaacagtgagggtcgtgccttgtcccaacaaccagaaccctggatggaaagaactcactgtgagaagcaagtgggcttggaggtataaggagtggactgcagtggatgcta

SEQ ID NO: 283144 - DNA, 557 bp, Homo sapiens
ttgttcacttacctgccttcactgtgtctactttcaaattaatctttctggaatagtttttattatatcccctccccccacaaaaaattaaaactattccttattttccctctgataattttagttcaacacattttgagcaaatgcctataaaatgccaagcaatctacaaaaatttgggatactgtcagttttctattgctgctgtaacaaattgccacaaatttagtggcttaaatgagaacaactaaaaactattgttttacagttctataggtcagaagtctggtggagtctcattggagtaaaatcactcttagttccttgcatctgtaggactaaggtcccattttccaaaccactttcctgtcttcctcttccactgtgaggggttcacgtgattcactcgggccttcctggataattctgccttcctcttccactgtgaggggttcacatggctcgctygggccttcctggataatgcaggctcatcgccccatctcaaggtcctcaaccttaatcacacctgcaaagtatcttttgccactaagcta

SEQ ID NO: 283145 - DNA, 547 bp, Homo sapiens
ctgagactgaagtcacaaaaagaccaatgccccagcttgaagrcagtcaggcagaggtgggaactctcctttattccacctttttgttctactgaggcccttaacagtctggatgaggcccagtcacattgaggaaggtgacctgcttcatgtatctacaaatttaaatgttaatttcatcagaaaacaccttcacagacacgtccagaataatgcctaacctgatatgtgggcatcctgtggcccagtcaggtcaacacatgaaattaaacatctcatataatcatcctcattgttcttcatggcatggcttttctaatattgttaaataatattttccagttaaacatcatcagcttgtctagctccaggtacaatactggtggcatttttattgggattgtattaaatgcctcaatgcctaaatcaaactgtaaacttttggatagtcttatccaagaatcagggctgtcttttattagattttaatactctcattctttatcactccctaagccagcttatcttgtctcagctgcctatgaaa

SEQ ID NO: 283146 - DNA, 593 bp, Homo sapiens
aggcgtgtttcagaaagctgcttttataataggcatttcctcctctttggcagtggggtgaaagcaagaacgagtttggcattttgtgaggtcaaatctgtcttcagttactagaaccatctggctttttggaggatggccccaatactcaaatggctgagtatactgttgagggaaagccatacagagaaatacatttttacatacagctctttcttgcaaagaaaagaaygccggtccttgaggacaccctgaagcccagagcttgcagaagtcgcccccaccccttccctagctctttctccagtctggaagctgtggcaggtgcctctaccccactccacccccaggcagcagccactccctcaggccctcctccctccccttctcctggcttcaggaaagaacccagggttaagttgtagcattacctggctaggcctcataaggtggaaaatgtctataactgaagggtttgcaaggaatgtctacaagattccagcaagaatgaggggagggccccagggactagattttgagggagattgacaaatgtcatctgctggagcagatataaaactgaataaggaaga

SEQ ID NO: 283147 - DNA, 618 bp, Homo sapiens
tcctgaggctgtgtcacgggcaggcatactcaaccttggcaaaaagaactttctaagttaactgagaccatctcagccattggggggttcacagagggtrttgtgaaaatgtcctgtaaactgcatgctttctgtgggcggcagcagttctcctccctgcctgcaaccatgggccaccctgtatgtaagttcccctcagtaaccgcaactctcatttgctggctctgggtctcatctttggcctcttgaacttggtgccattcctattgaaattaataggagcccggtgcaacagttatctggaaaatgggctagagaaatgtagccccgattccaggacgagcattgtaccactttcttcaaggtggtatcctttcactttagaggggatattctaatataccccatgctactagatgtccttccagaaacatctcttggggcttatgtcccgtcttctagcaggcatatattttattgggatttctgttgtatttgctaattcctcctcagcgggtgcagttagaatcacgttatcaatataacgaccatctggtattatttgggatgtcaagttccttcaagacgatataatatggagggcagaagaattgacaa

SEQ ID NO: 283148 - DNA, 618 bp, Homo sapiens
tcctgaggctgtgtcacgggcaggcatactcaaccttggcaaaaagaactttctaagttaactgagaccatctcagccattggggggttcacagagggtgttgtgaaaatgtcctgtaaactgcatgctttctgtgggcggcagcagttctcctccctgcctgcaaccatgggccaccctgtatgtaagttcccctcagtaaccgcaactctcatttgctggctctgggtctcatctttggcctcttgaacttggtgccattcctattgaaattaataggagccyggtgcaacagttatctggaaaatgggctagagaaatgtagccccgattccaggacgagcattgtaccactttcttcaaggtggtatcctttcactttagaggggatattctaatataccccatgctactagatgtccttccagaaacatctcttggggcttatgtcccgtcttctagcaggcatatattttattgggatttctgttgtatttgctaattcctcctcagcgggtgcagttagaatcacgttatcaatataacgaccatctggtattatttgggatgtcaagttccttcaagacgatataatatggagggcagaagaattgacaa

SEQ ID NO: 283149 - DNA, 618 bp, Homo sapiens
tcctgaggctgtgtcacgggcaggcatactcaaccttggcaaaaagaactttctaagttaactgagaccatctcagccattggggggttcacagagggtgttgtgaaaatgtcctgtaaactgcatgctttctgtgggcggcagcagttctcctccctgcctgcaaccatgggccaccctgtatgtaagttcccctcagtaaccgcaactctcatttgctggctctgggtctcatctttggcctcttgaacttggtgccattcctattgaaattaataggagcccggtgcaacagttatctggaaaatgggctagagaaatgtagccccrattccaggacgagcattgtaccactttcttcaaggtggtatcctttcactttagaggggatattctaatataccccatgctactagatgtccttccagaaacatctcttggggcttatgtcccgtcttctagcaggcatatattttattgggatttctgttgtatttgctaattcctcctcagcgggtgcagttagaatcacgttatcaatataacgaccatctggtattatttgggatgtcaagttccttcaagacgatataatatggagggcagaagaattgacaa

SEQ ID NO: 283150 - DNA, 635 bp, Homo sapiens
cagaactcaaatccttgttgagactgatgtgcttggctgtggacacaaagggcaattgagtttggggcccagtgaatgcacttgtggcccaaggatcccacggagagtcttcaaaatgacttcaatggagcctccagaactgtccaggggcgatgccactactgctcagagtctgagatagaaagacaaagctgaatctttgactcagaatagcgagaggaagctatgcttgtcagcagtctcccagagcagagcggaatgcccatcatccatgattcggggcagtgtggggttcagagactggaggacactcagartagcagcaggctgacatcagctgcagaacggagtttactcagaatgaggctttctgttggatggggttttctgatggaatggggttttctgttggatggcgttttctgttggaatgggattttctgctggaatggggttttctgttggatgattggtgctcagaagtgtgtttattggggtgagtctgaccttaattggctgactttcagaagtgagggctgacacagattagttggtttacaagtgtatattcccaaactgcatcatccttgattgactgaagaggtttaaacaagaaaaacgtctgcttgttatca

SEQ ID NO: 283151 - DNA, 587 bp, Homo sapiens
gctcgttttctactttttctgctccrtctcctaatcatctcacacagaagagccacactgacttctgggctattcttcaagcatgccagacacccttacaacagagcttttgtttggcctgagatttgtttaaaaaatttaaaacataaatacaaaatttttccttgaaattttagatttgggggctctcctgaattgcttgtgtattagtccattttcacactgctataaagacatacccaagactgggtagtttataaagaaaagaggtttaattgactcacagttctgcatagctggggaggcctcaggaaacttacaatcatggcataaggggaagaagtacgtcttacatagtggcacgagagagagagaaagagaaagagagagacagagggagagaaagcacaggaaaaagtaccatttataaaaccatcagatctcctgagaattcattcactatcatgaaaacagcatgttggaaaccaccccataatccaatcacttcccaccaggtctctccctaaacacttggggattacaactcaagatgagatttgggtagggacacaaagcctaaccatatc

SEQ ID NO: 283152 - DNA, 580 bp, Homo sapiens
ctgggatcatttaagatctcatagacagtggtatatgtttttgttttattgtttacataatgagaagccattggaggggtttaagtaagggagtaacataatttatgttttagaaagtgctgtgtaggggatgaattgcaggggacacaagtaggatgaggaagacccattaggaactrttcctatagttcaggcagatgataatattagctttgaatttagtttcagaagagttggtaagaagtggtagctacaacaggacatattgatggactaagcgtgggatggtaggaaaagaaataaatcaataatgacttctaagctgggcatggtggtctgtgcctgttgtcccagctgctctggaggctgagaggagaggatgtccagagtccagaagtccaagtacagcctgagcaacaaatgagactccttctcaaaaaaaaaaataaatagaaagaatgacctctatattttcaacctgagcaattaagtgtagagactgaagaattttgtttattaagctatagaagggcttgaaaaagcccaagaatgtattggctggaggccaggcctggtatgg

SEQ ID NO: 283153 - DNA, 630 bp, Homo sapiens
ctgttatgtgacccactaaacaaaggagccctgataaaatagccctttcggtctcaagtcacctggttaaggttaatgcaaaaaggacccagaattcaagagttaagatgagcatgcagatatcaggttattggagcttataactccaggaaactagcagaataactttttaggtagtaggcctttgaaccctcctggtgggtgcctaggcaggctgaagttgtgggctttctttggtaagacaaaatgtggttgcatgcttggatgtacagaaagagttaaactttcttgtgcattyctatcaaaagtgacagagagtaggtatgtagcaatgttagatttacctgaagagggtaaatctctgctggtatttaacttttaaacttccataggctttgaaataaagatggtataataatatacctagcttggagcagtagtaaatactggacaaaggagactgggagagacctaggttcaaattctcattttcccatttactagatgaggcagataatttagccagttttctaatctgtaaaatcggaaaacctattttgctattggaaagattaaagtatatattatctggcacctagaagtctcctaataactacctcaaagatagtt

SEQ ID NO: 283154 - DNA, 1100 bp, Homo sapiens
gatgcttaacatctgtagtcattagggaaatgcaaattaaaaccacaatgtgatatgactataaacacatcagaatggctataacaaaaatattgataaagccaagtattggtgaatatgtagtgaaattggaaaccctcatacatggtgggaatggaaaacagtttcttaaaaaattaaatataaacttaccataaaatccaacattttcctttttttgatatctacccaagagaaataaaaacatatgtccacacaaatagttctatatgattgcttattacagcattattcatataccttcaaactgaaaacaatatgaatgtccatcaactggtgaatggataagcaaaattagtatatctataaataaacaatggaatatytatacaattaaatattttccagcaacaaaaaggatcaaaccactgattcatgttacaacatgggagcatcaaaaacatgctaagtgaaagaagtcagacacaagagaccacatattgtgttatctcatttatgtattttcagaaaatttaaatatgtagagacagaaagcaaatcagtgcwaataaaattgtaaacttttcttcaaaaacaagaaggaaagaaagaaagaaagaaagaaagaaagaaagaaagaawgaaagaaagaaagaaaggaaagaaagaaaaagaaagaaagaaaggaaagaaagaagcaaagtaacagaaagatctgggggtggggtacaggaaaaaagaattaataaaacaaaacaagaattggtatatatgtggaggaacaaaaactcccatatactactggtggggatcaaaattgatacaatcactttaggaaaagttggcattatttagagaactagaagatattcattcctaggacccagtagttctgcttctagtatcttccctaaagttctgaatacttatgtgcaccaaggtacatggtaagaaggttcttagcagagactgtaaaagagcagaactcaaaataattcaaatgctcatcaatggaagcataagttgtggaatagtagtataataaaatagaatttagcactgaaaaacgaatcaactgtagctatctacagcatgaatga

SEQ ID NO: 283155 - DNA, 533 bp, Homo sapiens
aataaaattgtaaacttttcttcaaaaacaagaaggaaagaaagaaagaaagaaagaaagaaagaaagaaagaaagaaagaaagaaagaaaggaaagaaagaaaaagaaagaaagaaaggaaagaaagaagcaaagtaacagaaagatctgggggtggggtacaggaaaaaagaattaataaaacaaaacaagaattggtayatatgtggaggaacaaaaactcccatatactactggtggggatcaaaattgatacaatcactttaggaaaagttggcattatttagagaactagaagatattcattcctaggacccagtagttctgcttctagtatcttccctaaagttctgaatacttatgtgcaccaaggtacatggtaagaaggttcttagcagagactgtaaaagagcagaactcaaaataattcaaatgctcatcaatggaagcataagttgtggaatagtagtataataaaatagaatttagcactgaaaaacgaatcaactgtagctatctacagcatgaatga

SEQ ID NO: 283156 - DNA, 587 bp, Homo sapiens
atctgggggtggggtacaggaaaaaagaattaataaaacaaaacaagaattggtatatatgtggaggaacaaaaactcccatatactactggtggggatcaaaattgatacaatcactttaggaaaagttggcattatttagagaactagaagatattcattcctaggacccagtagttctgcttctagtatcttccctaaagttctgaatacttatgtgcaccaaggtacatggtaagaaggttcttagcagagactgtaaaagagcagaactcaaaataattcaaatgctcatcaatggaagcataagttgtggaatagtagtataataaaatagaatttagcactgaaaaacgaatcaactgtagctatctacagcatgaatgacactgaaaatcgggctragcaagagaagccagacataaaagaatatattctgattgattccaattatataaagttcaaaaattggcaaaattacattatactgctgtggatgcattattgggtacaaaaaatataaaggaagattagtgagtaaccattgaaactgcatagcctattttttgttttgaaaaatggttagg

SEQ ID NO: 283157 - DNA, 565 bp, Homo sapiens
gtgttgaagtctataattgtggatttgtctatttctcctttcaattgtattagtttttaatattgtggtaaactatatctagcaaaatttgcaattttaatcattttaagtgaacaagtaagtggcatttattgcacccacatgttatgcaaaattcrctctaccacttccaaaacccttttatgactccaaacaaaaactctagcctcaagcagtaactctctgttcctctctttctctaccctttggtgattcctaatctgttttctgtatctatggatttgcctgttctagatatttcatataaatagaatcagataatattggtctttctgtgtctagcttatttcatttagttgtctttgcaagcttcattcatattgcaacatgaatcagaacttccttccttttatggcttaataatattccattgcatattttatctatttgtcagttgatggcacttgcattatttctagttcttggctattgtgaataatgctttaatgaacattggcaaataagtatctgttcaagtttctgttttcaattcttttgggtatat

SEQ ID NO: 283158 - DNA, 565 bp, Homo sapiens
gtgttgaagtctataattgtggatttgtctatttctcctttcaattgtattagtttttaatattgtggtaaactatatctagcaaaatttgcaattttaatcattttaagtgaacaagtaagtggcatttattgcacccacatgttatgcaaaattcactctaccacttccaaaacccttttatgactccaaacaaaaactctagcctcaagcagtaactctctgttcctctctttctctaccctttggtgattcctaatctgttttctgtmtctatggatttgcctgttctagatatttcatataaatagaatcagataatattggtctttctgtgtctagcttatttcatttagttgtctttgcaagcttcattcatattgcaacatgaatcagaacttccttccttttatggcttaataatattccattgcatattttatctatttgtcagttgatggcacttgcattatttctagttcttggctattgtgaataatgctttaatgaacattggcaaataagtatctgttcaagtttctgttttcaattcttttgggtatat

SEQ ID NO: 283159 - DNA, 565 bp, Homo sapiens
gtgttgaagtctataattgtggatttgtctatttctcctttcaattgtattagtttttaatattgtggtaaactatatctagcaaaatttgcaattttaatcattttaagtgaacaagtaagtggcatttattgcacccacatgttatgcaaaattcactctaccacttccaaaacccttttatgactccaaacaaaaactctagcctcaagcagtaactctctgttcctctctttctctaccctttggtgattcctaatctgttttctgtatctatggatttgcctgttctagatatttcatataaatagaatcagataatattggtcyttctgtgtctagcttatttcatttagttgtctttgcaagcttcattcatattgcaacatgaatcagaacttccttccttttatggcttaataatattccattgcatattttatctatttgtcagttgatggcacttgcattatttctagttcttggctattgtgaataatgctttaatgaacattggcaaataagtatctgttcaagtttctgttttcaattcttttgggtatat

SEQ ID NO: 283160 - DNA, 1132 bp, Homo sapiens
gtgttgaagtctataattgtggatttgtctatttctcctttcaattgtattagtttttaatattgtggtaaactatatctagcaaaatttgcaattttaatcattttaagtgaacaagtaagtggcatttattgcacccacatgttatgcaaaattcactctaccacttccaaaacccttttatgactccaaacaaaaactctagcctcaagcagtaactctctgttcctctctttctctaccctttggtgattcctaatctgttttctgtatctatggatttgcctgttctagatatttcatataaatagaatcagataatattggtctttctgtgtctrgcttatttcatttagttgtctttgcaagcttcattcatattgcaacatgaatcagaacttccttccttttatggcttaataatattccattgcatattttatctatttgtcagttgatggcacttgcattatttctagttcttggctattgtgaataatgctttaatgaacattggcaaataagtatctgttcaagtttctgttttcaattcttttgggtatatwagtaactctctgttcctctctttctctaccctttggtgattcctaatctgttttctgtatctatggatttgcctgttctagatatttcatataaatagaatcagataatattggtctttctgtgtctagcttatttcatttagttgtctttgcaagcttcattcatattgcaacatgaatcagaacttccttccttttatggcttaataatattccattgcatattttatctatttgtcagttgatggcacttgcattatttctagttcttggctattgtgaataatgctttaatgaacattggcaaataagtatctgttcaagtttctgttttcaattcttttgggtatatatacaagagtactgggtcatatggtaactccaggtttagtttwttgaggaactaccaaactgttttctacagcagctagaccttttcacatccccttgagcaacatacataagcttcaatttttttttcacatcctcaccaacacttactcttttccattctattccagtagatgtgaagttgtatctcatttcaattttgatttttaattccc

SEQ ID NO: 283161 - DNA, 473 bp, Homo sapiens
aagtttctgttttcaattcttttgggtatatatacaagagtactgggtcatatggtaactccaggtttagtttattgaggaactaccaaactgttttctacagcagctagaccttttcacatccccttgagcaacatacataagcttcaatttttttttcacatcctcaccaacacttactcttttccattctattccagtagatgtgaagttgtatctcatttyaattttgatttttaattccccaactactaagagtattgagcatcttttcatttacgtattggccatttgtatgtcttctttgaagaaatgtccatttgagtcctctgcccattttttaattgggttgtctttctattgttgagttttagaagttcctataggctacataatttgtaagcattttctgtattttgtagattgtctttccactttttgataatgtcctttgctgcacaaaactttttaat

SEQ ID NO: 283162 - DNA, 580 bp, Homo sapiens
tgacttttaggtaaatatgaaattaagacaaaaatcaagaagttctttgaaactaatgagaacaaagatataacagaacctctggaacacagcttaggcagtgttaagagggaaatttatagcactaaatccccacatcaaaaagttagaaagatctcaaattaacaacctaatgtyacaactaaaagaactaaagaagcaagggaaaaccaactccaaacctagcacaagacaggaaataaccaaaataagaactaaactgaaggagatcaagacacgaaggtcactcaaaagatcaatatgctgggcgcagtatctcatacccataatcctagcacttgggaggctgaggtgggcagatcacctgaggccagaagtttgagaccagcctggccaacatgacaaaagcctatctctattaaaaatacacacacacacacgtacacacacacacacacacacacacacacacaaattagccaggtgtggtagcacatgcctgtaatcctggctacttgggtggctgagtcacaagaattgcttgaaaccaggaggcagaagttgcagtgagctatgagag

SEQ ID NO: 283163 - DNA, 580 bp, Homo sapiens
tgacttttaggtaaatatgaaattaagacaaaaatcaagaagttctttgaaactaatgagaacaaagatataacagaacctctggaacacagcttaggcagtgttaagagggaaatttatagcactaaatccccacatcaaaaagttagaaagatctcaaattaacaacctaatgttacaactaaaagaactaaagaagcaagggaaaaccaactccaaacctagcacaagacaggaaataaccaaaataagaactaaactgaaggagatcaagacacgaaggtcactcaaaagatcaatatgctgggcgcagtatctcatacccataatcctagcacttgggaggctgaggtgggcagatcacctgaggccagaagtttgagaccagcctggccaacatgacaaaagcctatctctattaaaaatacacacacacacacrtacacacacacacacacacacacacacacacaaattagccaggtgtggtagcacatgcctgtaatcctggctacttgggtggctgagtcacaagaattgcttgaaaccaggaggcagaagttgcagtgagctatgagag

SEQ ID NO: 283164 - DNA, 662 bp, Homo sapiens
gaagaaaaacacagaactgggagtcagaagcctaaagttctagtctggcttgttcactaactagctgtgtgatctgaggccaggtggtagacctgctggagtctctgtgtctgcagaatgacagtcaagggtgagctctgaaggccttttcaagctctgtttttctttctgtccatatctctaatctagtggactgatgagaagtgatattttcccctgcttttgtcattttatgataaagttctttggtgctttgatgccattagattatatatgcttaattaatgcagagaggaaccctccctgcagctacaatgaatctcaagggactgttacctgaaagaaggggacagctcacatgactkatttttcagaaccatcaaaataacagctttaaaaagcatttgccaattacattccactggggcatacttttctgacgtttgtatgtaccttgttttaattttggaaggaggccttctctaactaatctctttggtatattgaattcacccaaaacagagagagcctttgttccagcactttgggaaattggcttatgccattttctaacctttagtgcttttatgttgttaacttggagagctttctgtagtcttattgctaggttggtgttgtcagggaagcctgtatctatacca

SEQ ID NO: 283165 - DNA, 541 bp, Homo sapiens
acaggcacagaattttccccagaagccataatacctgtttcttttctccctatctaatttactgggctgctttcagtaactccactttgtttggcatatctgggcactgtgaaagtattcttatattattatcattctaatacttagggttcaaatagaggtttttcccccattctacccaaaggtgaggtttttttggttgcaatgctagggcctttcctgaatgggagctcaaccttgtttcctaccattattacattccgctttcatgatctaggcacacctctcttctttycctgaacatgccatatcctatcatacctgaaaagcctttgcatatagtgttccatctgtctctaatgtcattttacttcatcattctacaagattcagatttatttattcatctgatatgtaatttttttctttaagtgttttattgaaatatatttcacataccatacaatttacttatttaaagtgtacagttcaatagtttctagtatagccacaggtatatgcagccatcaccatagtcagc

SEQ ID NO: 283166 - DNA, 555 bp, Homo sapiens
accttcatccaacaactccttgtgccccacgtaattgtttcacagccagaaaggagtcagaacagccacatcatctatacccacaaargaatcttgctctgttcatctaaccttcgaagttcataaatttcttcttttcttactaaatggtcagatgttctatagtaattacaaaaaaaaattctaaaaaaagaaagaatgataaataagttcagaagatttacttaaaagcccaagttaatttgtgtctttggaaacaaattgaaaaacaagatgatgaaaatcacaatagtgcaaaccgagaagaaatattttctggaagagcctctggaagaaatttgaaaggcacactgttctattatcattgctactatttgtttaataattgagatgagctaatatattcctctcaactgccaacctaaactactagaacaatctgtcctaaggaataccaaatgcattctttaaatgaatcaccaagggcagtgccatggtgatcaaaccagatattcttctgaaggtgtgattcagatactcatgggcagatagagc

SEQ ID NO: 283167 - DNA, 634 bp, Homo sapiens
ctactccttaaaatttgtataaccgaagagttttattcttatctcattctacacactttctctctactctgtcttccattaccatagtttcartggattcccatatgcttaagactcccaaacctccttgtaaagcttggacttctcttcatctttccagcagccaacccattgcttgtacaagctaaaactcttccagtagttctccaaggagagacaaattgtagcaatttgggggcacatgttccaggttgcaactttagctctgggctggccttaagaaagttccttagattcagggaagctgcttcatcatatataaagggtaataaaaatccctccctgggctttttgaggattaaatgcagtatccaccacaatctctttgttagccaatggacagatatgtcacaatttttttttaaatttttccagtgatttcctttaaatgccccctttcctttccttcattcctccaaatataattggttagcccatccttttgactctacctctgaaatcttttgtggagttttttccttcctcttgcttaagtttagaccctgcttatttgtcccctcgaatttgtcctgtatatctttattattgatacattgcttaagaacaaatcaga

SEQ ID NO: 283168 - DNA, 598 bp, Homo sapiens
tcaaaataattgttccaaagtagcattttcctaaaatccctaatggtaacagygacactttttgtatgtgtatgtgacgaatgacaccagttttcatgattaaatgtacttgcaaaggtcatttttatgagaaaatataagtctttctaatatggctccatgtttcacaaaggaaatgccctttaatcactgccaacatatggcaacacactgagaaattttctttacagtttgctatgaagagagcttcactacgaaatgttcctatttcctgctctacggaataatcaaaataaatttagtgaaatttaacacacacacagttcctcttcttattactctggaagtaagcacttatatatcaagtttcatccctagtggcttatttatgattaattcctcagatgacaaagtcagacaagagacaagagtgggtgtcactaaaccacttaagtagaattcttaaaatgttcctttcaaaatacaacttgcacattctttcagaagtgaaatctatccatctcaccaaatcataaagcatctttattttcaaccctgaaattttacaaaatgcagaaacttctgcactaccttaact

SEQ ID NO: 283169 - DNA, 627 bp, Homo sapiens
tctgactttgtgatcttatggccctccatagtcttagcctctaactttgacacaggtaatgtatgttcactctggaacttttagaaccaactctatagcagtcttgattatgtgacagcaaatattttatcattttcaactaaatgttctgaactacatgsaataatcaaaataatactctgcagaaaaatttctgaggaataaacaagtttgagtaataaataattggcattatctattactgtctagttatgaaatctatccatctatctacccacccaaccatactttctccaatccagccatacattcatcatcataaaacctgtcatgctttcaattctgattgagttacacaggtaaaaagcctaggactggccaaagagtttaatctacatagctccctattggcaatgcatctgtgaagacactgttgtctatacataattccacatcaggccagccatatattttatatactacatcatctaactcgaaacaggaaaatatcttaatgtataaatgtgtttaggttttcttaaattggttactttgttaaataggtaatctattgagagatgcaagattctaatacggattatcctgaaaaggtaaacatttaaacag

SEQ ID NO: 283170 - DNA, 627 bp, Homo sapiens
tctgactttgtgatcttatggccctccatagtcttagcctctaactttgacacaggtaatgtatgttcactctggaacttttagaaccaactctatagcagtcttgattatgtgacagcaaatattttatcattttcaactaaatgttctgaactacatgcaataatcaaaataatactctgcagaaaaatttctgakgaataaacaagtttgagtaataaataattggcattatctattactgtctagttatgaaatctatccatctatctacccacccaaccatactttctccaatccagccatacattcatcatcataaaacctgtcatgctttcaattctgattgagttacacaggtaaaaagcctaggactggccaaagagtttaatctacatagctccctattggcaatgcatctgtgaagacactgttgtctatacataattccacatcaggccagccatatattttatatactacatcatctaactcgaaacaggaaaatatcttaatgtataaatgtgtttaggttttcttaaattggttactttgttaaataggtaatctattgagagatgcaagattctaatacggattatcctgaaaaggtaaacatttaaacag

SEQ ID NO: 283171 - DNA, 627 bp, Homo sapiens
tctgactttgtgatcttatggccctccatagtcttagcctctaactttgacacaggtaatgtatgttcactctggaacttttagaaccaactctatagcagtcttgattatgtgacagcaaatattttatcattttcaactaaatgttctgaactacatgcaataatcaaaataatactctgcagaaaaatttctgaggaataaacaagtttgagtaataaataattggcattatctattactgtctagttatgaaatctatccatctatctacccacccaaccatactttctccaatccagccatacattcatcatcataaaacctgtcatgctttcaattctgattgagttacacaggtaaaaagcctaggactggccaaagagtttaatctacatagctccctattggcaatgcatctgtgaagacactgttgtctatacataattccacatcaggccagccatatattktatatactacatcatctaactcgaaacaggaaaatatcttaatgtataaatgtgtttaggttttcttaaattggttactttgttaaataggtaatctattgagagatgcaagattctaatacggattatcctgaaaaggtaaacatttaaacag

SEQ ID NO: 283172 - DNA, 584 bp, Homo sapiens
ttaaaacgtcaaaaaggaaacatatcaacctcaacatgagaggtaaaggggaggaacaaagggagaaactcagtaattaaaaatgtgctaasactctccgtcatcttttttaggaaagatacagacaccaaacagatttagactttaatagagatatataatttgaaatatgtgagttagaaaggcaagaataactttcacaagaaataagatgtataattcctgcaccattagaaaaaaaaagacctttttttaagcagcaaaaaatataaaacaaaggaaatgtgatcaagccaaggaaaaaaagaaaattaaactatgtttatttggatattatattcctcaactaagttacagtggctgtcacattaggctagaaaaatgtaaagctaaatgctgtgtataacaaaccatcaaaaataaaacacagagactatgaaaaataaaaatatataaaaaatatgtaatataaaatctacaaaaataaagcatgtagagaacattactatacattgaaagccaatctaaggcaaaaatgtaaaaaaagaaaaaagttggatatttcatactgatgaaacctatag

SEQ ID NO: 283173 - DNA, 402 bp, Homo sapiens
tgacattccttctgttggagtccataagctttcttccagtggtaatgatttgaatgtcagatctttttcttgagtttaatgtagrcattttctgtccacattattaaagtttcagctacattttactgatggtttggaaacagtatgtgtaaaactcagtgtaggccaatttttccaatttgttaacaaggtaggagttgagcattgacaattactgtacttaaaagcccctcggatcaggtgttattttaccatctggacattttaattagtaataaaagtgtggatctggatacacagaaataggatctacagtacacaatggcccaatgcactctgttggtgctgaggtgtatgtggctacattttataaatatgtatgtatgtgtgtgtgtgggcaag

SEQ ID NO: 283174 - DNA, 603 bp, Homo sapiens
aaacttgcacataagtaaaactgtatctttttaatgctcctacttcctcaagtatggcatgacaaaatataatgctgacatttaggtaggcctgggcaaaagatgtgactcttctctttcatagctgtgtgctctaaggcaaataaattaaccaccaagtatcccttttttctcatattcagaatgaaagtataaatgataattgttatggtatctacctaacaggattatgaggaagctcatttgagcatgtatgttgaaaagcacttaatgaaatataaggagtcataacagttmttaacaattgattgttaatacaggatgcagatgaccaattcataccccacataccatcttttataattcagtaaatcatctcatatttaaaaataagggagatgcaaatataatgttacattagattattaacaaatgataagtttaagaccaccagaaaaaaatgtgttcataagtttcaacataaagcaaaatgactcattcttataaagtatatacaggctcattgacgcaatgttatccttaattaaggcaaaagcgatgcatttgagggaaatagtgaccctctggagaaatagagaatga

SEQ ID NO: 283175 - DNA, 607 bp, Homo sapiens
ctctatcaaaccaagacacgtagtcagcccttttaatcattagacctagtggtctgcaaagtttgtgttggaaatactttatcttctctcttttgaactggtacatcggctgtgatgcccggagctgcttatactgtggttcccttggccaataatttgtttatgcctaaatcagccttgcctctaagtgataaggagatacgtgctttttcttttgttttgtgtcagtggtattctctaataggccgggaackggtctgcccaagtgatgcacagccccttggtggggctggctatagatccccccgcaaaactgaaggttaggcctaagatattagctttgcctggcaagatgaagatgtgtggactaggtagacctgtgtggcagtctgtttcttttataaagtaaacagagttcagtttgtttaggactgcttaggtagatttcttacactgagcaggaatatttgtacagatgttttaaggtaaagtcaaagaatggctagattgtagcctttgacgcattataatgtatcttttctcagtgcccctgttgaattcacaaaagaaaaggtatttttgatcatcggctatgagaaacttaaaa

SEQ ID NO: 283176 - DNA, 529 bp, Homo sapiens
tattgctcatcttggctacgagctaaaagacattaaaatgcttttgtacaaagcaaacagtatgcatattttatgaaatacattcctctgcctgtttaattgtgagatcttcaaaagaggcagagagattcaccattcaccactggcatgaatggatggggtttcagtgtcagccttgggaggccccctgatgctgtcatgtcctggctctcyaggcctgtggaggaaggagctggagggctaggccctaagatgtggcctggccactttcgttcctccgggatcctcaatatgtccagttgtaaagttaaaatatctactttcccactgcctaaggtttctcaagcctggtttatcacaaatcaatctgctgagatttacaataataatggtggttttataggtcattagaagtgggttgtcctggagactcctagaagtcacccacactaggtttccagaagcatctctagtggtcttcccaggtgctttcactgccaggacactcccatcctgcccctaatcctta

SEQ ID NO: 283177 - DNA, 532 bp, Homo sapiens
gtggtggggatgatggcggtgatgacaggcaagtaagaatgacggcggtgaggatggtggtggggatgatggcggtgatgacaggcaagtaagaatgacggcggtgaggatggtggtggggatgatggcggtgatgacaggcaagtaagaatgacggcggtgaggatggtggtggggatgatggcggtgatgacaggcatccctccacaaaggcaccactgcctggtgactgattttcatgtgcagtgaaagattgttcctcctattgctcatcttggctacgagctaaaagacattaaaatgcttttgtacaaagcaaacagtatgcatattttatgaaatacattcctctgcctgtttaattgtgagatcttcaaaagaggcagagagattcaccattcaccactggcatgaatggatggggtttcagtgtcagccttgggaggccccctgatgctgtcatgtcctggctctctaggcctgtggaggaargagctggagggctaggccctaagatgtggcctggccactt

SEQ ID NO: 283178 - DNA, 541 bp, Homo sapiens
ggctggagaaaaccatgggaccataagcaggagctggcccttcatttctgtctttcccacacctatcaaaattcctggccatcggagctgctcagaattttgatgaatgaataaatggaatcagcacatccatgtggcaggactcctagcaccttttttctttcttccaaatcccaaaaggaaagggtaaggagtcctttctgcagatgctctactaatacccaaaggtctaggatgtctgcccatcacccaagccacggaggggagtttgggcaggaaattagacgactccatccatcatatttattgaacagccactctctggaagacgctagtgcaggaggtcactcacgcacatgaatcctcaaactccaagcagagagtgtcctttccgctccccatggctctctcctctctctccactctccagcctcacctgctgcacgtgttcctcaagcacaccaagcctcccgcaaacccctcaggtygcctatcgctgtcctccttgctgggccaatattcccccgggttttggctcaaa

SEQ ID NO: 283179 - DNA, 476 bp, Homo sapiens
ttcagacacagttttacagcgtgggcttgtctgtagatttgatatctgagccactcatcatcttctcaaacaagatgacctgagaagaaaagaaaggttgacagtgggaaaggtgaagcctatttagtacaggttgaaaaagacactgcaactcacattttgatctgaaagtttatgagatctcaaggcagagactggagtgacatacctcattgtcttctggatgaagccaaactccaggaaggtacagtgttttctgaggcccaatattccaatatcgcccaaggttacgtccattgatgaacacraatccataattccagttctgaaaggaatggtggcttgagatttggaaattggttcacattagcaaggtaaaacctaaggcacttggagagtgagagcaagattgagatactttatggcactcaaatggaggtgggtttagagtgggatatgttatagaacttctacct

SEQ ID NO: 283180 - DNA, 476 bp, Homo sapiens
ttcagacacagttttacagcgtgggcttgtctgtagatttgatatctgagccactcatcatcttctcaaacaagatgacctgagaagaaaagaaaggttgacagtgggaaaggtgaagcctatttagtacaggttgaaaaagacactgcaactcacattttgatctgaaagtttatgagatctcaaggcagagactggagtgacatacctcattgtcttctggatgaagccaaactccaggaaggtacagtgttttctgaggcccaatattccaatatcgcccaaggttacgtccattgatgaacacgaatccataattccagttctgaaaggaatggtggcttgagatttggaaattggttcacattagcaaggtaaaacctaaggcacttggagagtgagagcaagattgagatactttatggcactcaaatgraggtgggtttagagtgggatatgttatagaacttctacct

SEQ ID NO: 283181 - DNA, 476 bp, Homo sapiens
ttcagacacagttttacagcgtgggcttgtctgtagatttgatatctgagccactcatcatcttctcaaacaagatgacctgagaagaaaagaaaggttgacagtgggaaaggtgaagcctatttagtacaggttgaaaaagacactgcaactcacattttgatctgaaagtttatgagatctcaaggcagagactggagtgacatacctcattgtcttctggatgaagccaaactccaggaaggtacagtgttttctgaggcccaatattccaatatcgcccaaggttacgtccattgatgaacacgaatccataattccagttctgaaaggaatggtggcttgagatttggaaattggttcacattagcaaggtaaaacctaaggcacttggagagtgagagcaagattgagatactttatggcactcaaatggaggtgrgtttagagtgggatatgttatagaacttctacct

SEQ ID NO: 283182 - DNA, 531 bp, Homo sapiens
tgaggaatgaatcaacgaacttaaagataagtcagtagaaattaagcaaactgaaaagtaaagagaaaaaaagacagtgggaaagaaaacagcatccaagagttgtgagaccacactaagtggtctaatgtacgtgcgatttgaattgcagaaggtgagagagcrgagaaaatatctaataagtgacagctcagaattctacaaaattaatgacctaatcttgcattcctgggatgaatctcactaggatgtaattgtattagtccattttcacgctgcagataaagacatacctgagactgggaagaaaaagaggtttaattggacttacagttccacatagctggggaggcctcagaatcatggcagaaggggaaaggcacttatcacatgccagcagcaagagaaaatgaaaaagaagtaaaagtggaaacccctgataaacccatcagatctcgtgagacttattcactatcatgagaatagcacgggaaagactggcccttatgattcaattacttcccaccgggt

SEQ ID NO: 283183 - DNA, 531 bp, Homo sapiens
tgaggaatgaatcaacgaacttaaagataagtcagtagaaattaagcaaactgaaaagtaaagagaaaaaaagacagtgggaaagaaaacagcatccaagagttgtgagaccacactaagtggtctaatgtacgtgcgatttgaattgcagaaggtgagagagcagagaaaatatctaataagtgacagctcagaattctacaaaattaatgacctaatcttgcattcctgggatgaatctcactaggatgtaattgtattagtccattttcacgctgcagataaagacatacctgagactgggaagaaaaagaggtttaattggacttacagttccacatagctggggaggcctcagaatcatggcagaaggggaaaggcacttatcacatgccagcagcaagagaaaatgaaaaagaagtaaaagtggaaacccctgataaacccatcakatctcgtgagacttattcactatcatgagaatagcacgggaaagactggcccttatgattcaattacttcccaccgggt

SEQ ID NO: 283184 - DNA, 603 bp, Homo sapiens
tgactgtaaacatgagaagaatacacactgaggactctcaaaggaagaacggctgaaaaacgccctgttgggtactatgctcatacctgggcagcgggattcatcatactccagatctcagcatcacatgcaatatgacccataacaaacctgcacatgtgcccccaaatctaaaatgttgaaattatttttaatataataattcgtggtccatatatggttaaaaaaaagaaaaaagagagagagaaaataaaacctctcacccctttatccaggctttgataagtagctggcattttagggctgcacgggagttaccctgtttaattctgagaatgaccttatgaggtagggatccacagtgccccattttatagatgggaaaactgtggcatggagaacggaaatgacktggcaaaggtcttacagcctgtgggtggcacagttgggatttaaacctggtgtctctgcagtctgtgcttctgacccctgcaccctactgactttcataaatggagcagagccatggccctgtgcctgtgggaaggacagagcccattccactctaacaggcagacaaaagaggtcctcaggtgatggaca

SEQ ID NO: 283185 - DNA, 533 bp, Homo sapiens
aatggttcttgaagtcaggagcctcacctgtctatccccagtccttcagggaagcattagtgaagaactctccagtaaaactttctgtggtggtggaattgtactattacttgctgcctggtagccacttgccacatatggctactggacactgtggccaatgatactgaagaaccaatttaaaatttgtattttgttttaattatgttaaatgtagatttaaattgttatatgtggccagtttggctactgtattgggcaatgmagctctagaaacaaaaggggacaatacaccatgacttggggcttcaaaaacactttcacattcatctcattgtcctgtgaaataggtgtttatccccattttacagaggagaaaactgaagctcagagaaactaaacggcttccatgctgatggagccaggaagaagtagagacatgattgagtcccaggtttcttgattttgattccaaaagtccactcatacctctttgcaacactgcccacttatgtagtcatcacatatttatt

SEQ ID NO: 283186 - DNA, 557 bp, Homo sapiens
gacataaacgtttctgaaacagtagctcactcttaatgtgtatggtgccttatgacactttccattcagttctatttaatctttcaaaattattcatgaaataattcatgagttacagccgtctagtatttaccctctgtcctttacctttggactctaagtaattagagaaaagcaggtattcaccccttttttgcaaaaagkatgggagaaattggccttgcctaaattcacacagcaaattacatcaggtgaaagtagaccacattgaagcactgaaagataatcagcatctctcctggggcaaactggggattccatataggtagccagccatgcagtttaccattctgagaggaggatgataccgttcagcatgaaaaggcaaagtcagctatctatttttcatctcgttcttgtaaactgacattataggaagagtcaaaggggatattggtacatggtgggagaaaacacatagattttcaaatctttggtacatatgttggtttctgagttctctttaaccaggaagctagacacaaagtaatcatttt

SEQ ID NO: 283187 - DNA, 557 bp, Homo sapiens
gacataaacgtttctgaaacagtagctcactcttaatgtgtatggtgccttatgacactttccattcagttctatttaatctttcaaaattattcatgaaataattcatgagttacagccgtctagtatttaccctctgtcctttacctttggactctaagtaattagagaaaagcaggtattcaccccttttttgcaaaaaggatgggagaaattggccttgcctaaattcacacagcaaattacatcaggtgaaagtagaccacattgaagcactgaaagataatcagcatctctcctggggcaaactggggattccatataggtagccagccatgcagtttaccattctgagaggaggatgataccgttcagcatgaaaaggcaaagtcakctatctatttttcatctcgttcttgtaaactgacattataggaagagtcaaaggggatattggtacatggtgggagaaaacacatagattttcaaatctttggtacatatgttggtttctgagttctctttaaccaggaagctagacacaaagtaatcatttt

SEQ ID NO: 283188 - DNA, 491 bp, Homo sapiens
cctcatctccattttagttacatatataagctttgctatagctttccacagatgttggcattattttactgaagagagaaatgctagaagacggaatccagctttgtaatttatgggttaaatagccaagtcctagggaacagtgggtgatccaggttttataagtgagtaagaagacctaagtgatgtttggtacctggaaagttaatggtcagctctccagagcatgcttttgcagtgaggcagctgatacactaggcatagagtgtttgcagcacagagaaaagtgcagcagcacctcactcgatcctgctggcattggctttcagctgcttcttaactttgggtgaaacggcagctgccarccagtcacactggctttttgtgagaccactaccattcccgagatacttctgattagccatgcactctgccatagcctcaggaggttggaactttcagtacctggaagaagagtttttacccaaaga

SEQ ID NO: 283189 - DNA, 625 bp, Homo sapiens
cctggaaagttaatggtcagctctccagagcatgcttttgcagtgaggcagctgatacactaggcatagagtgtttgcagcacagagaaaagtgcagcagcacctcactcgatcctgctggcattggctttcagctgcttcttaactttgggtgaaacggcagctgccaaccagtcacactggctttttgtgagaccactaccattcccragatacttctgattagccatgcactctgccatagcctcaggaggttggaactttcagtacctggaagaagagtttttacccaaagaacagcttcttcctttaggatctggccagttgtcagtggaggaaggtgtttgtcccctcaggtggctgaaaggtaactacataattgataagagtattaggaataactatagtcttgcccttcaaactgatcttgaaccaactgtgtacatactttggggcactaaggaaaacatacctggggcaggaacccttcctagcattttatgattgggcatgttacagtggtctcagaaagccccgtgagggcatggaagaaagggtcagccaagaaaacccatcaaaccctttgcaaagttatgtggcgtctttttcctgtgtgtgtatttct

SEQ ID NO: 283190 - DNA, 625 bp, Homo sapiens
cctggaaagttaatggtcagctctccagagcatgcttttgcagtgaggcagctgatacactaggcatagagtgtttgcagcacagagaaaagtgcagcagcacctcactcgatcctgctggcattggctttcagctgcttcttaactttgggtgaaacggcagctgccaaccagtcacactggctttttgtgagaccactaccattcccgagatacttctgattagccatgcactctgccatagcctcaggaggttggaactttcagtacctggaagaagagtttttacccaaagaacagcttcttcctttaggatctggccagttgtcagtggaggaaggtgtttgtcccctcaggtggctgaaaggtaacyacataattgataagagtattaggaataactatagtcttgcccttcaaactgatcttgaaccaactgtgtacatactttggggcactaaggaaaacatacctggggcaggaacccttcctagcattttatgattgggcatgttacagtggtctcagaaagccccgtgagggcatggaagaaagggtcagccaagaaaacccatcaaaccctttgcaaagttatgtggcgtctttttcctgtgtgtgtatttct

SEQ ID NO: 283191 - DNA, 625 bp, Homo sapiens
cctggaaagttaatggtcagctctccagagcatgcttttgcagtgaggcagctgatacactaggcatagagtgtttgcagcacagagaaaagtgcagcagcacctcactcgatcctgctggcattggctttcagctgcttcttaactttgggtgaaacggcagctgccaaccagtcacactggctttttgtgagaccactaccattcccgagatacttctgattagccatgcactctgccatagcctcaggaggttggaactttcagtacctggaagaagagtttttacccaaagaacagcttcttcctttaggatctggccagttgtcagtggaggaaggtgtttgtcccctcaggtggctgaaaggtaactacataattgataagagtattaggaataactatagtcttgcccttcaaactgatcttgaaccaactgtgtacatactttggggcactaaggaaaacatacctggggcaggaacccttcctagcattttatgattgggcatgttacagtggtctcrgaaagccccgtgagggcatggaagaaagggtcagccaagaaaacccatcaaaccctttgcaaagttatgtggcgtctttttcctgtgtgtgtatttct

SEQ ID NO: 283192 - DNA, 593 bp, Homo sapiens
gtgttgggattacaggcatgagccactgtgcctgatgagaatttcattttcataccactcattctcaggtgtaccatgaaaacgaaacaaaaacaaaacaaaacctccacttgcacagctgctttcacctttcagtcatgaagcctcatgtatcggtttttacacaatgtctctccaatctattatttgtatccattttcacttatagaaataaaaaatttaagccctaagtataagcgtattgcattttatcaaatctaagacatcatatcttaagatgcaccattattttatgcatcagaaaatgatgccaattaaatagcacaatattttcctgtcatatcaattataagacaattttagtgatgttaaaatgagaaaaataagagtgagctttagatttgatgaaataaggtaattaaagcagttgaaactacatgtcaaaaatcagaagcatttaataagaactttaaatgggtrttttacttccctactatggatgctttggaaatctgtgcagataattttatggttatcataatagtttattggatattgatatctacattatgggaggggtgtcaaatgggtga

SEQ ID NO: 283193 - DNA, 593 bp, Homo sapiens
gtgttgggattacaggcatgagccactgtgcctgatgagaatttcattttcataccactcattctcaggtgtaccatgaaaacgaaacaaaaacaaaacaaaacctccacttgcacagctgctttcacctttcagtcatgaagcctcatgtatcggtttttacacaatgtctctccaatctattatttgtatccattttcacttatagaaataaaaaatttaagccctaagtataagcgtattgcattttatcaaatctaagacatcatatcttaagatgcaccattattttatgcatcagaaaatgatgccaattaaatagcacaatattttcctgtcatatcaattataagacaattttagtgatgttaaaatgagaaaaataagagtgagctttagatttgatgaaataaggtaattaaagcagttgaaactacatgtcaaaaatcagaagcatttaataagaactttaaatgggtaytttacttccctactatggatgctttggaaatctgtgcagataattttatggttatcataatagtttattggatattgatatctacattatgggaggggtgtcaaatgggtga

SEQ ID NO: 283194 - DNA, 615 bp, Homo sapiens
cccatcgtcctcaaaataaggtaaagccttttgacctggcctcaaggatctgtgtgactgccccgtctacctccagcctcatcctctccattctgtcctccctgtcaccactgcagaagcgctgaggtactaacacaggtatgtcctagaccccaaaagacaatttaatttcctaaacacactgctttttccagcctgtgtgcctttttgcacagakagcaccttctgccttttcttctgcacttcctgccacaggtttctacctccagatctttgagaatgtgcctcagcatcacctccctggaccttccctgactccccacgccgagaggggcccttctctaggcccaaagattggtaacacatgtgctgtgttattcatctctcctacagacctagttcctctgaggcaagctctttgtcttgattcttcatcctctggcctcagcataggaccagacccagagttgttgatcagacactgctggttgcttaggaaagagggaccatatctggttcacaaagactgggttgatttgagaagaaggaaggggatgaagaaagcaaatgccccagggtgttttgtagcaagaatccctctatgatgatttaaca

SEQ ID NO: 283195 - DNA, 575 bp, Homo sapiens
tatctgagacattatcaagcagaaaacacaaaggagaggaacatgttaggaaactggagtgtcaagtgcagggttagcatagaggggtaaggagactaaactttgtcttctaggctgcagggggccatggagagggccttaagcagagagacaagggtgatcagaggtgaggtccagaaagatcacctcctctgtatgtgtgcaatgacttgggctggtgggggtggggcctgcagaagggttggagaggagagaggaagctatcaatgcactgatctttgtggaagatgacaaacctggacagggaggtggcagaaggcatgastcaaggctggtggggtgcaagggggctggagctcagtgtggattggcaggcagggagaggaagtcagagggagaatgagcagggtggatgttgcttgtgcctcagaggtcctacataccttctcctgccagaaatatagcccagcactcgtgatctattttccatacaccctgctctccaccccttggctgaaatctggcagccacccacatttttagggcaaaaaacaagtcatcatgtgaccagagcc

SEQ ID NO: 283196 - DNA, 574 bp, Homo sapiens
tctgtggaatttttttttaaagatagaactaaaatagccaacagtaatcatatataggcctggggggagagttaaagtgttcaaaggtccttgaattttcagaagggaacaaagtatccataatttaaatttaatttatttaatttatctaattaaataaactttaactttagactttgttatctgaggtatgcatgttaaaactcctaagtagccacttgaaaatatgattttgaaactttcaaacttgtaggtattagatggattgagaaaatatttcaatcactctaaaagaaagcaaggaaagtaagaaaaagaaacacagaaaggtggggcaaatagtacaaaataaaatggaagaaagatgataggacccctggcgaagggagtggagggtragggggcaatgttggactcagctgagtaaggggagagtagcggaagggctacagatgcatacaatcatggtgtgtcagcccacccccattaatcttcaagagcctcccaccaatgcattcctcagatatacaatttaagaaaagcatagtacttgctataaaaatgcagaaaacaa

SEQ ID NO: 283197 - DNA, 615 bp, Homo sapiens
aaggtattcctggtgaacacaacaccaagagcaaaggcttgagagtagaaaacagaagagggtattcagaagcctgcaaactcagggcagctgtaaagaaagtgctattagatgcagagttcaggagtagaggggaagaagaaagggtrccaggctgaacaaagccacaaattatttccatatgaggaagagaatggcactggtcaggtggggaaaatgggatgagcaaatagcaggagagggcggagagaggaaagtgtttgaatcagggcactgccctgcctagaaactttctatgggttcagacctcttactctagggatggaagccaaactctttgccccccagtcccaacacaagctgattcttgcaggctaccctcatgctccctcatctgctgctcatcatgtccagggcaacctctgcctgaaatgctctccctagctcaaatgtcacttcctccaggaagccttctgtagctcaccctcacaaccagtctctccctagtctctgcccctaagtccctggtgccaactcccaccatagctcttattacactgttttataattatgtaacaggaagggggaatgtgtcatttttaaacagtcacttgc

SEQ ID NO: 283198 - DNA, 586 bp, Homo sapiens
caattgtcctaggaagaatgtggaattaatattaggaatagaatgttattttgcttacagaaaaacaataagaagtaaatcttgaaataaaatgtccttggccaaaggctaaatgtaagatgagcagattaaagagactttaaatcactgcataagatgtttgcttcctggtactccccaatatatctatgcaccactctcctcctcccttcccttcccaatccctgctccagcagctgrgtctgaggttctttgcagaattaaattcttgatttaaagattcaaaagccaagactttgagttgcaaaaacccaagctttttaacttcagatgcctaagccttgaaggatttggagtatgaattctacaacaaaaatagaagattcagaaaaatacatgatgggttggagccattttcccgcagctgaaaccaggaccgaactgagtgggggcagccagggaaagagaaaaagccagaatgaagacgagatgaagactgatgagtccttgaaaaagctcctgtgttacttctgcaaggagctcacagagttaaaaggacacatgccctttctgagttgacccagga

SEQ ID NO: 283199 - DNA, 612 bp, Homo sapiens
aaattgacaaataaattgtaatatatttgcacaaaagaatattttgtatataccagcaaaattgaatgaactgtagcctgtataacaacttgaacaaatcttggtaacattttgttgaaagagaaaaagcaagcctcagaagatggtgtacagcaygataccctttttcataaattttaataaaaactaaaactaaaaatatacgttgggtatatagttttaatcaaaaatattatgaatataaatttcaggatgatgtttaccaggggatgggaaagggtgatgaacgcctaaatgtaaattattgctgttgatgttacttcttggattgggttgggttgtgagttggactgtgggcgtgaatgtggagagagagactagagagaagaagagaggaaaaagaaaggcagaagggagggaggaaaaagaaaggaggaaaagggggaaggagggaaggagggaagaagggaaagaggtgtatgcaagagtcaaagatgacagcgtcaggagacaagattaaaaatcagctgattttttgcatagtgtcaagcaaaagaggaggaagaaaaggaagagacacttaagcagcctaagagaaattagggaaggctt

SEQ ID NO: 283200 - DNA, 559 bp, Homo sapiens
gtctatctgtgccattttttcaacagcatgtgytcatttcatgtctctgtgtcacatttctgtaattttgcaatatttctaactttattattattgtgtctgttatggtgatcagtgatctctgatgttaccattgtaattgttttggggagccaggaaccacacccatataagatggtaaacttaattgataaatgttgtgtgtgttctgaccactctaccgactagccaccctccatctctctccctctccttgagcctctctattccctgaacacaatattattgaaattagaccaattaataattctaggccaggcgcagtaactcacacctgtaaccccagcactttgggaggccgaggcaggcggatcacttgaggttaggagttcaagaccagcctggccaacatggtgaaaccccatctctactgataatataaaaattatctgggcatggtggtgcaagcctataatcccagctactggggaggttgaggcacaagaatcgcttcaactcaggatgcggaggttgcagtcagccgagatcacaccactgc

SEQ ID NO: 283201 - DNA, 559 bp, Homo sapiens
gtctatctgtgccattttttcaacagcatgtgttcatttcrtgtctctgtgtcacatttctgtaattttgcaatatttctaactttattattattgtgtctgttatggtgatcagtgatctctgatgttaccattgtaattgttttggggagccaggaaccacacccatataagatggtaaacttaattgataaatgttgtgtgtgttctgaccactctaccgactagccaccctccatctctctccctctccttgagcctctctattccctgaacacaatattattgaaattagaccaattaataattctaggccaggcgcagtaactcacacctgtaaccccagcactttgggaggccgaggcaggcggatcacttgaggttaggagttcaagaccagcctggccaacatggtgaaaccccatctctactgataatataaaaattatctgggcatggtggtgcaagcctataatcccagctactggggaggttgaggcacaagaatcgcttcaactcaggatgcggaggttgcagtcagccgagatcacaccactgc

SEQ ID NO: 283202 - DNA, 573 bp, Homo sapiens
cacttcccaggtgaggcgacaccccaccctgcttcagctggccctttgtgggctgcacccactttctaaccagtcccagtgagatgagctgggtacctcagttggaaatgcagaaatcacccaccttttgcgttgatctcactgggagatgcagacyggagctgtttctattcagccatcttgccagccaccaggtatttaattttacatgtggctattgtaaatggggttaatttttttatttttttcttttttaacttttattttaagttcaggggtatatgtgcaggtttgttatataggtaaacccatgtcatggggggttgctgtatagattattaataaagtataatattaagtctagtacccattagttatttttcctgatcctctccctcctcccactctccactctccagtagtccagtgtctgttgttcccctctatgtgtccatgtgttctcaactttaagttcccacttataagtgagcagcatgcagtatttggttttctgttcctgcattcatttgctaaggataatggcctccagctccatcatgtttctgcaaaaga

SEQ ID NO: 283203 - DNA, 573 bp, Homo sapiens
cacttcccaggtgaggcgacaccccaccctgcttcagctggccctttgtgggctgcacccactttctaaccagtcccagtgagatgagctgggtacctcagttggaaatgcagaaatcacccaccttttgcgttgatctcactgggagatgcagaccggagctgtttctattcagccatcttgccagccaccaggtatttaattttacaygtggctattgtaaatggggttaatttttttatttttttcttttttaacttttattttaagttcaggggtatatgtgcaggtttgttatataggtaaacccatgtcatggggggttgctgtatagattattaataaagtataatattaagtctagtacccattagttatttttcctgatcctctccctcctcccactctccactctccagtagtccagtgtctgttgttcccctctatgtgtccatgtgttctcaactttaagttcccacttataagtgagcagcatgcagtatttggttttctgttcctgcattcatttgctaaggataatggcctccagctccatcatgtttctgcaaaaga

SEQ ID NO: 283204 - DNA, 573 bp, Homo sapiens
cacttcccaggtgaggcgacaccccaccctgcttcagctggccctttgtgggctgcacccactttctaaccagtcccagtgagatgagctgggtacctcagttggaaatgcagaaatcacccaccttttgcgttgatctcactgggagatgcagaccggagctgtttctattcagccatcttgccagccaccaggtatttaattttacatgtggctattgtaaatggggttaatttttttatttttttcttttttaacttttattttaagttcaggggtatatgtgcaggtttgttatataggtaaacccatgtcatggggggttgytgtatagattattaataaagtataatattaagtctagtacccattagttatttttcctgatcctctccctcctcccactctccactctccagtagtccagtgtctgttgttcccctctatgtgtccatgtgttctcaactttaagttcccacttataagtgagcagcatgcagtatttggttttctgttcctgcattcatttgctaaggataatggcctccagctccatcatgtttctgcaaaaga

SEQ ID NO: 283205 - DNA, 597 bp, Homo sapiens
gatagaacaatttctattcctttgggtatatactctgaaaatgtctttattttaccttcattttgaagaatattgtcactggatgtagaattctagtttgactttttttttctttcakctccttaaagttattatcccattgtcttttggtcaatgataaatcaatgatcattcttatctttattcccttgtatatatgtcttcttttctgtctccttttaatgtcttatctttatcatttgtcttttggtacattgattacaatgtaccttggtatggttttctgtgtgtatatcctgtttaggatttgttgagcttcttgagacaactgtttttgatcttcaagtttggaaactttggactattatttctttaaatatttttctgcccttaacctttctgagttttctattgctatgtcttcgagttcattgatcttttcttctttagtatataactgctatatatacaccatatgctatatatactatataatctgctgttgaactatatggtgcatttttagttcagatattatacttttaaatctaaaagttccatttgataacttccacttctttcctcattaagtttatg

SEQ ID NO: 283206 - DNA, 528 bp, Homo sapiens
ctgtggtgaacacctgcagagaggcaggcacctctgcatctgttagcactctgctgcagaacaaaacctctgagaaatgtgggattatgtaaataaatcaatctatgactcattggggttcctaaaagagataaggagaatgaaagcaacttggaaaacatatttcaggatatcaaccatgaaaaattccccaacctagctagagaggccaacattcaaatgcaagaaatgcagagaaccccagtaagacactcctcaagatcctccccaagacacataatcatcagatgtctccaagttcaaaatgaaagaaaaaatgttaaaggcagcaagagacaaaggtcaggtaacctataaagggaagcctatcagactagaagaagctctatcaagctgaaactctacaagccagaagatactggggaccaatattcaatattcttgaagtcaagaaatttcaacccacaatttcatatctggygaaactaagcttcataagcaaagcagaaataagattcttctcagaca

SEQ ID NO: 283207 - DNA, 585 bp, Homo sapiens
tagtactatgcattgtgggtatccaaaagagggagaaagatacattcattccttgatgctgctcttctttgaggtggatttttactacctagcatttgtgaagtacagcatgttgtctcaacattaaaattgctttcatatgcagaaacatactatgtgcaattgtctgtgttaatatggacacatttctcatttagaagagagatcatgaactatctttatacaccaagtttaccttccccaacaatttagtaactttacagacacatggatattccagtcatattcccttgtcttttacctctgtacatggaaaatagctggttgcgaacatgggagcctctacctgcaagccttgtttttctggaaacagcagcccctcrtcactaacaaatggcaagtaggtaaataaatgcccctattttggaatgattttaaggcaggtgttctatactgtgtctcagaggtctctagtttcccacagtggtaacttacttgataatacgctctttattgactttcttcctttactgaattattccccctttcccatctaggtgtttcctagaatcacttcccaaataa

SEQ ID NO: 283208 - DNA, 585 bp, Homo sapiens
tagtactatgcattgtgggtatccaaaagagggagaaagatacattcattccttgatgctgctcttctttgaggtggatttttactacctagcatttgtgaagtacagcatgttgtctcaacattaaaattgctttcatatgcagaaacatactatgtgcaattgtctgtgttaatatggacacatttctcatttagaagagagatcatgaactatctttatacaccaagtttaccttccccaacaatttagtaactttacagacacatggatattccagtcatattcccttgtcttttacctctgtacatggaaaatagctggttgcgaacatgggagcctctacctgcaagccttgtttttctggaaacagcagcccctcatcactaacaaatggcaagtaggtaaataaatgcccctattttggaatgattttaaggcaggtgttctatactgtgtctcagaggtctctagtttcccacaktggtaacttacttgataatacgctctttattgactttcttcctttactgaattattccccctttcccatctaggtgtttcctagaatcacttcccaaataa

SEQ ID NO: 283209 - DNA, 656 bp, Homo sapiens
tctttattgactttcttcctttactgaattattccccctttcccatctaggtgtttcctagaatcacttcccaaataaaccacttgtagttaaatccttatctcagggtctgtttctgggggaaccataaccaggacaataacgttttctaatacttcctattcctttaggttagaaaaacaggttcttccaaagcaccaccctttccttctccatgtttagcattttactcctcactgacactggcctatcgagccccatctttctgaagtacactagtttgaggcttctttctcccaggcctggagttccacagaagtgctctaactagaagcattctgcagaagtactctaaatagaagcatttctacttctcacttgtataattttcaggcaatcttacaaatcactaccagacaagttttactaatcttctattgtatccatggttttagcatttataaaacttcagaggtttctgcattcactaccttagtaatgccaytcagttttatggctttatatattatatatatgccacagactcccaatacttatatttccatatcaaatctttctctcattccagtcttttagataccactacctacttgacatctgcacttagatgtctgttagacatttcacattcaaaa

SEQ ID NO: 283210 - DNA, 542 bp, Homo sapiens
tggtacctttgtgggactcacaaaggggcggctcrgttaggcagcccgcagcactcaaaccccttgtgggagggttagcacgcaggtgagctggtgcaggagccggggcaagtgcctttgggtgcctgcaggaacaaacactgtacaggcccatggcagcgcctaggggttgcctacgacccctggagccccagaggatgtgtgttatggtgtggtcctttagctttgtcatccatggatggcttaagtgtttaacagctcaatggggagttagtgtgacagcctcttccccctcacctcagttcttgtctggcatccaggaggagtgaggtcacacgaacaatttggagggtggtgaatgcagaggattttatcgtgtggtggaagtagttctcagcaggaaggggagctggaagggcaatatagtgggaagataatcttcccctggagttgggccatctgtggcagaactcttctatgaaattctgctgtcaagccatccctctgaagtcaagctgcttctttctaatatccagctggtt

SEQ ID NO: 283211 - DNA, 542 bp, Homo sapiens
tggtacctttgtgggactcacaaaggggcggctcggttaggcagcccgcagcactcaaaccccttgtgggagggttagcacgcaggtgagctggtgcaggagccggggcaagtgcctttgggtgcctgcaggaacaaacactgtacaggcccatggcagcgcctaggggttgcctacgacccctggagccccagaggatgtgtgttatggtgtggtcctttagctttgtcatccatggatggcttaagtgtttaacagctcaatggggagttagtgtgacagcctcttccccctcacctcagttcttgtctggcatccaggaggagtgaggtcacacgaacaatttggagggtggtgaatgcagaggattttatcgtgtggtggaagtagttctcagcaggaaggggagctggaagggcaatatagtgggaagataatcttcccctggagttgggccatctgtggcagaactcttctatgaaattctgctgtcaagccatccctckgaagtcaagctgcttctttctaatatccagctggtt

SEQ ID NO: 283212 - DNA, 535 bp, Homo sapiens
acattctactaatattggatcagcctctcatctgacgtaatttgcctgtgggaattgtatcggctgttaaactagctcctcttagtagctgtttgaaaaaaaaaaggaagaagaagcacaattctgtggtgtgtttcaaataactgaagccagtgtcctaggtactgagacaagaaagaatgtcaaacaggacctttaatgtgtatttatatttaaacatcagacctaacagaaaaccctgaagctttatacaatgattagagccttgtaagatcctaattaatgtattgtcaggtgaatggttggcctggcactcaagctgttctgagggacgcaaggggtttcaggtaccgcctargaagaatagatgcagttgtagtgattcagtggcccatctgaaagggacatataaaggcagctgtgtctggtgtgctgtcttttcagactcacttgataatgctagtgtcagtttcaactgaagcgtgtgccagattccagacagcttgagctggcatttcagagaggttaattgtga

SEQ ID NO: 283213 - DNA, 508 bp, Homo sapiens
acttgcttaaacaataggcaggaactgtgcgactcgacctggaacaaataggcataaataagcaggaaaatgtaatatttgtttgagagcttgaaatgcagtcttttaggacatatctargacatccctgcatcatcactttggtaagaacttcagtaccttgcctgccagtcatttatatgcacgttccgtcacagttagtcccacctctccccacaccttctgcaccactgctgccaccaccatcactgtgcctggcagctgggtgaatcaggaagacttctaacgttagttttcccatatttaccaacaagtcttccaaagtgggcccaaattaaagttgtgtaacaacatcgctttccctctctggatcttcattactggagatggaggcaagcactttactatggtaagcacttttgaccttagacaggtggcctaaaaggtgggtaccaactagcctttaggacatattcaggagggcttctataccaagactctctggcca

SEQ ID NO: 283214 - DNA, 586 bp, Homo sapiens
ttgacattgctctgaatttcaaattctaaaaatttcatagttaaggaaatttgcaaggacatgtaacactgaccacatttatgttgctgccccatttcgatttgagccattgttggaataatttgctaattaaatatgattcatgttggtattgggttctaattcctgacagataagtgagttggaagagaactttacagatatctttttggaacacgctttatttctctgggctcctcctatttattcataaaagatctttttttaaatgartacatcatggatgattgatgtcttttagcatatcccagaactacctctgttcattttagattataatgttatccccagattttggttccctggatcaatgaagctaaatatacatgccaaaaatcaaattattgagtactagtatacaggaagttaacaaagatcagtcacatgtattgctgctagcagatgagaaggagagaccaaaagcatgtgttaaatagtgtcaatcgtttgagtgttgtagccatcagcagaaagagatcattcagcgttttctcccttacctagagggaaaagaaaatacagcatt

SEQ ID NO: 283215 - DNA, 586 bp, Homo sapiens
ttgacattgctctgaatttcaaattctaaaaatttcatagttaaggaaatttgcaaggacatgtaacactgaccacatttatgttgctgccccatttcgatttgagccattgttggaataatttgctaattaaatatgattcatgttggtattgggttctaattcctgacagataagtgagttggaagagaactttacagatatctttttggaacacgctttatttctctgggctcctcctatttattcataaaagatctttttttaaatgaatacatcatggatgattgatgtcttttagcatatcccagaactacctctgttcattttagattataatgttatccccagattttggttccctggatcaatgaagctaaatatacatgccaaaaatsaaattattgagtactagtatacaggaagttaacaaagatcagtcacatgtattgctgctagcagatgagaaggagagaccaaaagcatgtgttaaatagtgtcaatcgtttgagtgttgtagccatcagcagaaagagatcattcagcgttttctcccttacctagagggaaaagaaaatacagcatt

SEQ ID NO: 283216 - DNA, 613 bp, Homo sapiens
gaaggtatggggaggatgcacagctctgggtaaacaagcatgcaaccaatttgggggaaaacattgaggaaaatcttaaaatatttttaaatgttttaattaaaaatatttccatatctaaatagagaaagaaagcaagagtgagagagagaaaaatgtttgtaagaataagaaacttatttgagaaaaatttcagttacattttggaaagcctaatttttctaagactgcttttcaaggtgtatactgargacctaattgtagtttctttaaagaactcattcttgaacagtgcaatgatgaattctgttttctggcatggcaaatggtcttgcctaattatactggaataatgtctctaaactttttgccactggagctagttaagcacaatgattatgcagcacttttgctccccctgccacgtcttcacatagaaagataaatgtcttgagaaaaaacaaaaaagagaatttccagtctctattatatcccttttggcataatattgttgctcatttctgcctagagaaagtaccacattaacatattatttctcttataatattatataacatactctgtaatttttaatcaataagatatggttaat

SEQ ID NO: 283217 - DNA, 613 bp, Homo sapiens
gaaggtatggggaggatgcacagctctgggtaaacaagcatgcaaccaatttgggggaaaacattgaggaaaatcttaaaatatttttaaatgttttaattaaaaatatttccatatctaaatagagaaagaaagcaagagtgagagagagaaaaatgtttgtaagaataagaaacttatttgagaaaaatttcagttacattttggaaagcctaatttttctaagactgcttttcaaggtgtatactgaggacctaattgtagtttctttaaagaactcattcttgaacagtgcaatgatgaattctgttttctggcatggcaaatggtcttgcctaattatactggaataatgtctctaaactttttgccactggagctagttaagcacaatgattatgcagcacttttgctccccctgccacgtcttcacataraaagataaatgtcttgagaaaaaacaaaaaagagaatttccagtctctattatatcccttttggcataatattgttgctcatttctgcctagagaaagtaccacattaacatattatttctcttataatattatataacatactctgtaatttttaatcaataagatatggttaat

SEQ ID NO: 283218 - DNA, 597 bp, Homo sapiens
gtcctgctagccttagtaaacatagcccttatctttcttctctaagataaaatggcaggtactggctagatgctgcactctacaagtatatcatcrgttttgttttgctttcagactagtactaggaaagaatgaggtcatgcattttgaaagtgggtttttgtgggttttctttatgtgtggtttctttttgagtcagataagtttttttccttccttttcaggtcacacttatacttttatgcaaaatattctaagttgtgtcaactgaggacatggctacagataatagaagtgattttaaaagccacttaacataaaaggattgttccaatttcccagaacagccaggtttctgtttaatccaacccctttagaatatagcttatatctctgatgttcaaagccatgtgttcgtcttgaaataatcaaaacaatagaatcctcaaagaatccagtgcataggcaacatgtattatgttatttagttagttttgacaaggttatctaggcagttaaacattattatctacaggatttctttttccttcaacatgaagacattaagttcagatttgtagagcagagaatatctgt

SEQ ID NO: 283219 - DNA, 597 bp, Homo sapiens
gtcctgctagccttagtaaacatagcccttatctttcttctctaagataaaatggcaggtactggctagatgctgcactctacaagtatatcatcagttttgttttgctttcagactagtactaggaaagaatgaggtcatgcattttgaaagtgggtttttgtgggttttctttatgtgtggyttctttttgagtcagataagtttttttccttccttttcaggtcacacttatacttttatgcaaaatattctaagttgtgtcaactgaggacatggctacagataatagaagtgattttaaaagccacttaacataaaaggattgttccaatttcccagaacagccaggtttctgtttaatccaacccctttagaatatagcttatatctctgatgttcaaagccatgtgttcgtcttgaaataatcaaaacaatagaatcctcaaagaatccagtgcataggcaacatgtattatgttatttagttagttttgacaaggttatctaggcagttaaacattattatctacaggatttctttttccttcaacatgaagacattaagttcagatttgtagagcagagaatatctgt

SEQ ID NO: 283220 - DNA, 597 bp, Homo sapiens
gtcctgctagccttagtaaacatagcccttatctttcttctctaagataaaatggcaggtactggctagatgctgcactctacaagtatatcatcagttttgttttgctttcagactagtactaggaaagaatgaggtcatgcattttgaaagtgggtttttgtgggttttctttatgtgtggtttctttttgagtcagataagtttttttccttccttttcaggtcacacttatacttttatgcaaaatattctaagttgtgtcaactgaggacatggctacagataatagaagtgattttaaaagccacttaacataaaaggattgttccaakttcccagaacagccaggtttctgtttaatccaacccctttagaatatagcttatatctctgatgttcaaagccatgtgttcgtcttgaaataatcaaaacaatagaatcctcaaagaatccagtgcataggcaacatgtattatgttatttagttagttttgacaaggttatctaggcagttaaacattattatctacaggatttctttttccttcaacatgaagacattaagttcagatttgtagagcagagaatatctgt

SEQ ID NO: 283221 - DNA, 597 bp, Homo sapiens
gtcctgctagccttagtaaacatagcccttatctttcttctctaagataaaatggcaggtactggctagatgctgcactctacaagtatatcatcagttttgttttgctttcagactagtactaggaaagaatgaggtcatgcattttgaaagtgggtttttgtgggttttctttatgtgtggtttctttttgagtcagataagtttttttccttccttttcaggtcacacttatacttttatgcaaaatattctaagttgtgtcaactgaggacatggctacagataatagaagtgattttaaaagccacttaacataaaaggattgttccaatttcccagaacagccagktttctgtttaatccaacccctttagaatatagcttatatctctgatgttcaaagccatgtgttcgtcttgaaataatcaaaacaatagaatcctcaaagaatccagtgcataggcaacatgtattatgttatttagttagttttgacaaggttatctaggcagttaaacattattatctacaggatttctttttccttcaacatgaagacattaagttcagatttgtagagcagagaatatctgt

SEQ ID NO: 283222 - DNA, 564 bp, Homo sapiens
atgacaaattccatctccagcatcttctgttaaatgaattaaccatatacctggtagattataaaatgggagggcaaatgactggaaacactttatgcttgacaatgtctgtggctgaccaaaatcaggtcccctttcttagggcagagctctaccacatttcccagyctcctgtgtgtggaaatgtgactgaattctagcctaggaaatgtgagtcaaaaatcacatgtgccactctcagacttcgctcataatcatcttccacctataattcactgcattcttatcgcgtttgctagctaatggggaggcccagaggatgatggagccataggatggaaaaggcttggtttcctgaatcattatatgaaatgtcacccactagctagaaacatctgagagagaaatgaactgctattgggttaatctaatgatatgttgaggtatgtttcagtagttagtctaccctaactaatgtacgagagagagggagagtccagtgattaaaaagacaatttgattagagcataaaaaacggttatgggtcagagccttaggtagaca

SEQ ID NO: 283223 - DNA, 608 bp, Homo sapiens
gcctattttttcttaataataaaacatgaacaatgttcaatggacttgagtttattcaaattgtcattatatttgattaagaaaatgctaccagacaaagcctggccagacaggcttaatctctgatggtaaatgaacatcgccaggcttgactagccacctctgggatcgactgagggaaaggcagacttgaattactcagagaataagccagtggttctgttttaatgctctgagtcagcagccttttatagctcaaatcaaggtcaacaagatatgtagagcaycttctctgagcactagctggaacacggcggctcttctttcttccactctgagacaagaacacatgcgcttttcctgtaagtgttgtctccccagttattctggagaccatccagaagagaatgagaataaagaaaccaacagaagaaaggtacaaagggtcccaggttcttaccaagttcccacagtcttgttctgctgtccctagtgactaaatgtttgcagtgactggggcagtgtttcctcaggtgttatagcctggcctctggcaagagatgggaaaggggatagaaagatgaaatgctttttggtggtacacatga

SEQ ID NO: 283224 - DNA, 630 bp, Homo sapiens
attagtcctatttgataaagagagaaatggtttcctccagtgcccatgttgttatgggcactaaatgctttatacatgtatcctggtaataaatactccataatgaggaaatgagggacttacaaagttaatacattactaaacttagtgttttaatataaagtccattaagctgcctgtacatgcaagagaggtgcttcttaaacttgcctgatgataacagaaacttaagatgcttattaaaagtatagaaacttgggtatcacctaggcctcaatctccaagataagaaacttaaaatccacattttaataagctcatatgtcttgtaatcagactattttagaagcatcaagttatagcaaagtttggggttctgaaaatgttgtatttaagaaagacgtaaagaggaaggatcctttcatttcyctttaaccaaccttaaccaaattaacttggctgctgcatctttcggaggtggtggtgggtagagcatatcaactaaggtttctatatggtttttagtttctgcctatggcaacctaaaatcaccaagaaatccagaaaacatagaacttctgcttgctgccttcatttgcacaggcaccaacaggaaacagcagtccccag

SEQ ID NO: 283225 - DNA, 630 bp, Homo sapiens
attagtcctatttgataaagagagaaatggtttcctccagtgcccatgttgttatgggcactaaatgctttatacatgtatcctggtaataaatactccataatgaggaaatgagggacttacaaagttaatacattactaaacttagtgttttaatataaagtccattaagctgcctgtacatgcaagagaggtgcttcttaaacttgcctgatgataacagaaacttaagatgcttattaaaagtatagaaacttgggtatcacctaggcctcaatctccaagataagaaacttaaaatccacattttaataagctcatatgtcttgtaatcagactattttagaagcatcaagttatagcaaagtttggggttctgaaaatgttgtatttaagaaagacgtaaagaggaaggatcctttcatttccctttaaccaaccttaaccaaattaacttggctgctgcatctttcrgaggtggtggtgggtagagcatatcaactaaggtttctatatggtttttagtttctgcctatggcaacctaaaatcaccaagaaatccagaaaacatagaacttctgcttgctgccttcatttgcacaggcaccaacaggaaacagcagtccccag

SEQ ID NO: 283226 - DNA, 630 bp, Homo sapiens
attagtcctatttgataaagagagaaatggtttcctccagtgcccatgttgttatgggcactaaatgctttatacatgtatcctggtaataaatactccataatgaggaaatgagggacttacaaagttaatacattactaaacttagtgttttaatataaagtccattaagctgcctgtacatgcaagagaggtgcttcttaaacttgcctgatgataacagaaacttaagatgcttattaaaagtatagaaacttgggtatcacctaggcctcaatctccaagataagaaacttaaaatccacattttaataagctcatatgtcttgtaatcagactattttagaagcatcaagttatagcaaagtttggggttctgaaaatgttgtatttaagaaagacgtaaagaggaaggatcctttcatttccctttaaccaaccttaaccaaattaacttggctgctgcatctttcggaggtggtggtgggtagagcatrtcaactaaggtttctatatggtttttagtttctgcctatggcaacctaaaatcaccaagaaatccagaaaacatagaacttctgcttgctgccttcatttgcacaggcaccaacaggaaacagcagtccccag

SEQ ID NO: 283227 - DNA, 603 bp, Homo sapiens
ttttacttttctgctttttgctacaatttgtttatttggactagtgttaatttatcacctagaaaagaatgttattttaggaatttttgtatcagtttaactcatggaactgaaaatctgtctcatgtctcagtgcaaaagaatgggaatatattttagatttcataattagcatgtgcttaaragggtttttatattctttgtgtgcaatgcttagcaaggtttatacatgtttggaggattaggtacacctagaaaatataatctaccagagggagttctattatcttatggttttcagcaagtttaactccatggaattgcagacagaaagagatattgtataaatatgccagtcatattttgacatcgcagtcttgtattgacactttcatcaaactgtgggagaacagagcatttcttgaggtataagttcttgtaagtattttgcagaacaaaagttttctcttctatttgtactaaatcttctaggccacaaagcgtcaagaagaaaattgactaaataattatgggttctgtaccttctcccagaatacttacccttgacctgaggaataactttccttcatggtaagattgacc

SEQ ID NO: 283228 - DNA, 560 bp, Homo sapiens
tcagtttaactcatggaactgaaaatctgtctcatgtctcagtgcaaaagaatgggaatatattttagatttcataattagcatgtgcttaagagggtttttatattctttgtgtgcaatgcttagcaargtttatacatgtttggaggattaggtacacctagaaaatataatctaccagagggagttctattatcttatggttttcagcaagtttaactccatggaattgcagacagaaagagatattgtataaatatgccagtcatattttgacatcgcagtcttgtattgacactttcatcaaactgtgggagaacagagcatttcttgaggtataagttcttgtaagtattttgcagaacaaaagttttctcttctatttgtactaaatcttctaggccacaaagcgtcaagaagaaaattgactaaataattatgggttctgtaccttctcccagaatacttacccttgacctgaggaataactttccttcatggtaagattgacccaaaatatggcttgaaatgaactttctctgctctagtattaagaaata

SEQ ID NO: 283229 - DNA, 1183 bp, Homo sapiens
tcagtttaactcatggaactgaaaatctgtctcatgtctcagtgcaaaagaatgggaatatattttagatttcataattagcatgtgcttaagagggtttttatattctttgtgtgcaatgcttagcaaggtttatacatgtttggaggattaggtacacctagaaaatataatctaccagagggagttctattatcttatggttttcagcaagtttaactccatggaattgcagacagaaagagatattgtataaatatgccagtcatattttgacatcgcagtcttgtattgacactttcatcaaactgtgggagaacagagcatttcttgaggtataagttcttgtaagtattttgcagaacaaaagttttctcttctatttgtactaaatcttctaggccacaaagcgtcaagaagaaaattgactaaataattatgggttctgtaccttctcccagaatacttacccttgacctgaggaataactttcyttcatggtaagattgacccaaaatatggcttgaaatgaactttctctgctctagtattaagaaatawgtagaactagttagcaagagttactctgttctgggttacttgggattcactgttagcaaagactaacaattagtttgtatatccgtatatggatgtaggtggtcacagtaatttcctgcttgattttttttgaattccaattaatataggaagtttctgaatttctaggtatttcaggatttgcatatacttagagttcaattatgttttaaacacattatctgtgcaagtgactgtcctaaatgttgtggctaaagaggaggaagcataaaaaaatwaaaaaaattaaaaactgttcttacccatctcccaccccagccccaaattttaaaatctagcaaagtaaaaagctgcatgcaaatttttttttaaaaaaaaaatacaaggcagattgttttatattcatgtaacaattgtcaggcacaggagcctaagcagacacattcctggtgtggttattcataacttagctaagcaatgtctgctatttattactgcacttataggctgggggagagtctctcattgcccactggtgagtcactcaccttttcattttgaaagccagtttggccattttttttaaacaactcttttgctcaaataacatgaaaaattccaa

SEQ ID NO: 283230 - DNA, 1051 bp, Homo sapiens
aagtcttctcatttgctttttttaaagtattgaaaattctggaaagactctgtgtggactatgctattcttaatgtttattaaggagaggacactttacataatttatagagcttatttttaattattgttttgacccattggatgtaattacacattttttgttgtacgaaaaatttatataattaatactaccatattaaagactattataaaatatttatcaccatttattagactaatggtagcatactattcacttttattcacccagctttcttcacataacaacatatcttggtgctcctttataataacaaatgtaaacattttygacaaatacataaagttccattttgtgaatacttcacagtttaataaaccatttcccaattgataggcaattggctttgttatgaaatactatcctagtgaagaggcttaaacatacacaaaaaatctttcaataagtaccttcttgaaagaaggtttcaaatgtagagctattttcatttttttgagatgawaagtcttctcatttgctttttttaaagtattgaaaattctggaaagactctgtgtggactatgctattcttaatgtttattaaggagaggacactttacataatttatagagcttatttttaattattgttttgacccattggatgtaattacacattttttgttgtacgaaaaatttatataattaatactaccatattaaagactattataaaatatttatcaccatttattagactaatggtagcatactattcacttttattcacccagctttcttcacataacaacatatcttggtgctcctttataataacaaatgtaaacattttcgacaaatacataaagttccattttgtgaatacttcacagtttaataaaccatttcccaattgataggcaattggctttgttatgaaatactatcctwgtgaagaggcttaaacatacacaaaaaatctttcaataagtaccttcttgaaagaaggtttcaaatgtagagctattttcatttttttgagatga

SEQ ID NO: 283231 - DNA, 525 bp, Homo sapiens
aagtcttctcatttgctttttttaaagtattgaaaattctggaaagactctgtgtggactatgctattcttaatgtttattaaggagaggacactttacataatttatagagcttatttttaattattgttttgacccattggatgtaattacacattttttgttgtacgaaaaatttatataattaatactaccatattaaagactattataaaatatttatcaccatttattagactaatggtagcatactattcacttttattcacccagctttcttcacataacaacatatcttggtgctcctttataataacaaatgtaaacattttcgacaaatacataaagttccattttgtgaatacttcacagtttaataaaccatttcccaattgataggcaattggctttgttatgaaatactatcctagtgaagaggcttaaacatacacaaaaaatctttcaataagtacmttcttgaaagaaggtttcaaatgtagagctattttcatttttttgagatga

SEQ ID NO: 283232 - DNA, 519 bp, Homo sapiens
ccctttctatcattttctctcccatcakttatcctcatgatccatagcgattgcaaagcacatcgcaaatgtgaatagctatattgttcctgcatgatagtaatgagtatactgctacctccaaaggggctgaaagttaagataggtcttttacaaagcaggaaacataaccttaagcataattataaattatatatataatcatgctctcttttctttaggataagtgattagtgttcaagtttagtgcttatatttgctttaaaaatgtacattgtgctcatttatgttttggtacggacagatcctttatatgaccactgtgctaaatatttttttaaatcactgactagacatcctgatttatgtgtctagatttatatttccagaaacatacactgtaacttattctgtttaatggctaagacacttctgcataatttacattgagactaaagtggttttttactgagatacttttctctatgacaaaccaacattatgatatctgatagaaat

SEQ ID NO: 283233 - DNA, 519 bp, Homo sapiens
ccctttctatcattttctctcccatcatttatcctcatsatccatagcgattgcaaagcacatcgcaaatgtgaatagctatattgttcctgcatgatagtaatgagtatactgctacctccaaaggggctgaaagttaagataggtcttttacaaagcaggaaacataaccttaagcataattataaattatatatataatcatgctctcttttctttaggataagtgattagtgttcaagtttagtgcttatatttgctttaaaaatgtacattgtgctcatttatgttttggtacggacagatcctttatatgaccactgtgctaaatatttttttaaatcactgactagacatcctgatttatgtgtctagatttatatttccagaaacatacactgtaacttattctgtttaatggctaagacacttctgcataatttacattgagactaaagtggttttttactgagatacttttctctatgacaaaccaacattatgatatctgatagaaat

SEQ ID NO: 283234 - DNA, 1165 bp, Homo sapiens
gcataattgcattacatttccgaagccatagaactagggagttgtaaaagtttgtagtttgtttygagggtccactcacttcactacggagctgtactgtcttctccatggaaactatgatgaagacagtaggtataaaccttttgcttgaagttgattgacatatgtacatgtgttaattcaatgtgtggggaagaacttggctgaaagtctagtgaaattgtaagaaaacattgtctataggaaacaatttgaagagatcggttgccagaaacaacttaatgaatgctatttaaggagaacatctgaatatcagatgggaactattacggttgggaactttctatcttagtacatgtaggttcacatgtgctaacatatctgcaatgcccagagtatttgtacaagtagtaggtctaaagttctaccctggtagtgccatgttataacaaagtattttttattatctttccatttctatcaagttaattgctattgaagtaggtgcaaactcacctgattagaatggatttagaagatttagagccaaaattgatgattcccattcttattgtgaaagacctgtaaaatctttaaatattcatttaatccagggatccccaaccctacaggttgtgttacaaawccctttctatcattttctctcccatcatttatcctcatgatccatagcgattgcaaagcacatcgcaaatgtgaatagctatattgttcctgcatgatagtaatgagtatactgctacctccaaaggggctgaaagttaagataggtcttttacaaagcaggaaacataaccttaagcataattataaattatatatataatcatgctctcttttctttaggataagtgattagtgttcaagtttagtgcttatatttgctwtaaaaatgtacattgtgctcatttatgttttggtacggacagatcctttatatgaccactgtgctaaatatttttttaaatcactgactagacatcctgatttatgtgtctagatttatatttccagaaacatacactgtaacttattctgtttaatggctaagacacttctgcataatttacattgagactaaagtggttttttactgagatacttttctctatgacaaaccaacattatgatatctgatagaaat

SEQ ID NO: 283235 - DNA, 589 bp, Homo sapiens
tttctgtcttttccataaggaaaaagtatgccttgctttttgtctatcctctcaaaaccacaaaaggccaagctagacacaattcatgtttacagaaatcaaagacacttttattttatggtcccctgccatttctctctgccatgggacaatttcttactgcgtttcttgccaaacgagggtaggaatggaaagactatcaagtgccagtaagtccatttgagaaaagacaggtcaaggcttttcattttagaaagcctacaaaatacggarcagcttatagttatatgttgtgatgctttcagtggacacttttattgtggagtgttttattgttaagtttcatcgaacatcaagtgattggctcagcctgtgggatggccctcaagtgtgacagagtcaaacattactggttactggtcgtaggcctgccgagggctgattgcaccttccgtttagagagtatcatgccttttgcaacaaaaagcaaattaaagcccctgctgattgacagcgatatatgctacttttgtttttaattatttaacacttgacactctcagatggtaccttatataagaagaagacc

SEQ ID NO: 283236 - DNA, 589 bp, Homo sapiens
tttctgtcttttccataaggaaaaagtatgccttgctttttgtctatcctctcaaaaccacaaaaggccaagctagacacaattcatgtttacagaaatcaaagacacttttattttatggtcccctgccatttctctctgccatgggacaatttcttactgcgtttcttgccaaacgagggtaggaatggaaagactatcaagtgccagtaagtccatttgagaaaagacaggtcaaggcttttcattttagaaagcctacaaaatacggagcagcttatagttatatgttgtgatgctttcagtggacacttttattgtggagtgttttattgttaagtttcatygaacatcaagtgattggctcagcctgtgggatggccctcaagtgtgacagagtcaaacattactggttactggtcgtaggcctgccgagggctgattgcaccttccgtttagagagtatcatgccttttgcaacaaaaagcaaattaaagcccctgctgattgacagcgatatatgctacttttgtttttaattatttaacacttgacactctcagatggtaccttatataagaagaagacc

SEQ ID NO: 283237 - DNA, 589 bp, Homo sapiens
tttctgtcttttccataaggaaaaagtatgccttgctttttgtctatcctctcaaaaccacaaaaggccaagctagacacaattcatgtttacagaaatcaaagacacttttattttatggtcccctgccatttctctctgccatgggacaatttcttactgcgtttcttgccaaacgagggtaggaatggaaagactatcaagtgccagtaagtccatttgagaaaagacaggtcaaggcttttcattttagaaagcctacaaaatacggagcagcttatagttatatgttgtgatgctttcagtggacacttttattgtggagtgttttattgttaagtttcatcgaacatcaagtgattggctcagcctgtgggatggccctcaagtgtgacagagtcaaacattactggttactggtcgtaggcctgccgagggctgattgcaccttcygtttagagagtatcatgccttttgcaacaaaaagcaaattaaagcccctgctgattgacagcgatatatgctacttttgtttttaattatttaacacttgacactctcagatggtaccttatataagaagaagacc

SEQ ID NO: 283238 - DNA, 589 bp, Homo sapiens
tttctgtcttttccataaggaaaaagtatgccttgctttttgtctatcctctcaaaaccacaaaaggccaagctagacacaattcatgtttacagaaatcaaagacacttttattttatggtcccctgccatttctctctgccatgggacaatttcttactgcgtttcttgccaaacgagggtaggaatggaaagactatcaagtgccagtaagtccatttgagaaaagacaggtcaaggcttttcattttagaaagcctacaaaatacggagcagcttatagttatatgttgtgatgctttcagtggacacttttattgtggagtgttttattgttaagtttcatcgaacatcaagtgattggctcagcctgtgggatggccctcaagtgtgacagagtcaaacattactggttactggtcgtaggcctgccgagggctgattgcaccttccgtttagagagtatcatgccttttgcaacaaaaagcaaattaaagcccctgctgattgacagcratatatgctacttttgtttttaattatttaacacttgacactctcagatggtaccttatataagaagaagacc

SEQ ID NO: 283239 - DNA, 565 bp, Homo sapiens
ctgttctgaacaaatttgggaagagagtttctatggtttgactctgtggacttggcctgagtatgaataactgggtcatgttcttgacctccaagaaacttggagcacagcctaagagattgcctgatggatacagtcatgaaatttagaacttgaagggacattagagaccacctaatccgaccattttaaacagatgcagaaacttcagagccaagcagggtcaractactaacccaggatctcagaatgagcttgtggcaaaagccaggccagaatccaattttctccttcaagggtcactttcttcccatggctccatacacatgctctaatctttggcacaccctggtcttaacctagtaaatactttggatagggttataatgaggattagctattgccttttgtggttgagcaaacatctgggtcaatgctagtaactgaagaaaaggaaaataataaagcaaaccaactacattatttaccaatatgaaagtgaatgctagcataaccattaaaggttaaaaattcaatggatgacaactgctcatgtatctttgga

SEQ ID NO: 283240 - DNA, 565 bp, Homo sapiens
ctgttctgaacaaatttgggaagagagtttctatggtttgactctgtggacttggcctgagtatgaataactgggtcatgttcttgacctccaagaaacttggagcacagcctaagagattgcctgatggatacagtcatgaaatttagaacttgaagggacattagagaccacctaatccgaccattttaaacagatgcagaaacttcagagccaagcagggtcagactactaacccaggatctcagaatgagcttgtggcaaaagccaggccagaatccaattttctccttcaagggtcactttcttcccatggctccatacacaygctctaatctttggcacaccctggtcttaacctagtaaatactttggatagggttataatgaggattagctattgccttttgtggttgagcaaacatctgggtcaatgctagtaactgaagaaaaggaaaataataaagcaaaccaactacattatttaccaatatgaaagtgaatgctagcataaccattaaaggttaaaaattcaatggatgacaactgctcatgtatctttgga

SEQ ID NO: 283241 - DNA, 536 bp, Homo sapiens
aaccttctgcagctttggaaaaagcagggcagagagatccagcacatgcttggtatgtaactagtaacagtctatgactctctaccacagttctgttgtaatcaggtaggccaaggagatgtgctgccgcataccaggagcctctgcaatcctgacctgcatgctgttcttcaactagctttttaaaaaatataacaacgtatccctggatacatttccaagtcagtacatgcacacattctttttgtttttaatgacagcattcctccgtgaatattagagtgggctagctaatcatttaagtgagtacaatgccagcttttgtcttcattttactgtgtgaacatataggtatgctaaayattcctccataaaacaaagagtgatttttgcttctcaagcttttatgtacacatgaatcacctatggatcttgttaaaacgcagatctgatttagtatatctggggtggggcctaagactctccatttctaatgattcctcaagtcttattgatccataaatcaggctttgagt

SEQ ID NO: 283242 - DNA, 617 bp, Homo sapiens
gataatgacaagttgtttttgtacattgaaattctagaaagttttaaattctatctttcatttaaaaactgagagctactaaatatttgggcatttgagtatcttggcacttgggaatcttattcctgtcttgatttgtgtgggtygcgtttttgatgataattacaaagaggattttgtggtggctttgaaaatcctcagtcttgtaaatagcattttgtgatccaaaagccaagggaaatgactaaatggatctttgtgacattttaagaacaccaaaaggtaacttctttgaacgagatttatgaatgtagaaaacttaataagcaaagaatggatctttgtgttttttcttcccaacattaaatctaagaggttttctgtggacagtgcaagaacaaggccctgcagatccttcctctgcttatttccccacacctgatacagtttctactggcactttttaattattctaagtaactggcacaatgaaatgttttcgtttttattctaataaggtttagtatgtgctaaaagcaattttataaagatctctaagcaaatattgtactgtacttgtatacattacacttgagaatgttccaggcaagtaagtt

SEQ ID NO: 283243 - DNA, 518 bp, Homo sapiens
gtaactttatcatatgtgttaaaatcattaatgacattttatatacagatgctcagacagtttaaatagagctaagaaggtgatcatttatgcactagttgcattttcctcctctcctctcttctataacatcttagctaatattgttgtcctattccattattaggataatccagcagaatctgttgctgtttcgaaggttgggtgccagttctgccttagtgattcattgaggtggagctgaaagagcagaagtcaccctctccttggaagccaggagcattttattgtttttaacagtgctgagaatgccagtgactctaaagatgagaaaaaaaactctcttaatgagtttcagcattttaatgtactgcaggttcccaattgtatgagtttaagaagcttagcaattcggtatcttctgaataatarcatttattttatactgtaaatactcccagggaagtctgaataacactacagcttcttcggtgtaatagctttggtgagctaattga

SEQ ID NO: 283244 - DNA, 617 bp, Homo sapiens
gataatgacaagttgtttttgtacattgaaattctagaaagttttaaattctatctttcatttaaaaactgagagctactaaatatttgggcatttgagtatcttggcacttgggaatcttattcctgtcttgatttgtgtgggtcgcgtttttgatgataattacaaagaggattttgtggtggctttgaaaatcctcagtcttgtaaatagcattttgtgatccaaaagccaagggaaatgactaaatggatctttgtgacattttaagaacaccaaaaggtaacttctttgaacgagatttatgaatgtagaaaacttaataagcaaagaatggatctttgtgttttttcttcccaacattaaatctaagaggttttctgtggacagtgcaagaacaaggccctgcagatccttcctctgcttatttccccacacctgatacagtttctactgrcactttttaattattctaagtaactggcacaatgaaatgttttcgtttttattctaataaggtttagtatgtgctaaaagcaattttataaagatctctaagcaaatattgtactgtacttgtatacattacacttgagaatgttccaggcaagtaagtt

SEQ ID NO: 283245 - DNA, 538 bp, Homo sapiens
gatccttcctctgcttatttccccacacctgatacagtttctactggcactttttaattattctaagtaactggcacaatgaaatgttttcgtttttattctaataaggtttagtatgtgctaaaagcaattttataaagatctctaagcaaatattgtactgtacttgtatacattacacttgagaatgttccaggcaagtaagttctaggtttttgctgtgcttatcctactgaagtatgatccctgcctctgctgcttttttcaaatacataaccatractgcctttatctccatatatcaatatgcagaaacaatagaatgcttgtatggctatctgtgcatatcccaagagaattatttgtactgggggaaatgcagttgaaaaaaagcaggaaaattaatagataggcatagagccttatatcttcatatatcctctaataatggtagaatttggttttgttttatgattcatccaataaaactatataatttactatgcattttaaaattaagaaacttatgcagaaagag

SEQ ID NO: 283246 - DNA, 386 bp, Homo sapiens
tgagtacagagaaaaacagttttggagaaagactacagaacaaaagaagcagtcagttaggctgggtgcagtggcttacgcctgtaatcccagcactttgggagcctgaggcagacgtatcaactgaggtcgagagtttgagaccagcctgattaacacgaagaaaccccatctcaggatcccttgaasccgggaagcggaaattgcagtgagccaggatcgtgccattgcaccacagcctgggcaacaagagtgaaactccatctaaaaaaaaaaagaagcaattggtgttaggataaatgctttggcttttgaatgacaaatacaatcgagctgactgaagtacaaagaaatctgttaggctttctaactgggatacgtaggga

SEQ ID NO: 283247 - DNA, 378 bp, Homo sapiens
gagaaacacagttttggagaaagactacagaacaaaagaagcagtcagttaggctgggtgcagtggcttacgcstgtaatcccagcactttgggagcctgaggcagacgtatcaactgaggtcgagagtttgagaccagcctgattaacacgaagaaaccccatctcaggatcccttgaagccgggaagcggaaattgcagtgagccaggatcgtgccattgcaccacagcctgggcaacaagagtgaaactccatctaaaaaaaaaaagaagcaattggtgttaggataaatgctttggcttttgaatgacaaatacaatcgagctgactgaagtacaaagaaatctgttaggctttctaactgggatacgtaggga

SEQ ID NO: 283248 - DNA, 604 bp, Homo sapiens
ttatggtggtgtaattcacaaattaaaattatatatattcaacgtgtacaatgtgaggttgtgagttttttttaattagccctagttgagaaaggcaaatgcttaatggtacatactaaaaagtattcaggacraggctgcttaacataaacttgctaattaccaatcaatagactactcaaatgcttttttgataaacaaaagctacacttgtaggtagcgtatttttactgggttcctttacactgaagcattttttcaactaatatatatcttacaaatagtaaaatacatatatcttaagcatatagcattataatttttataagtgtatatatccctatcaccaccacccaaatcaagcaagatatggacgatttccagctcccacacccctggctctcgcactttctcaaccagttactcaccaatggtcatcattatcatgaaatctatcacgatggatttccctactcctcaatttcatataaatggaaacttgctgtatgtaatcttttgagtctgacttgtttcactcagttgaaatttgtgagaatcatctatgttttgtgtagcagcagttcattgtttaattgctgtgtgg

SEQ ID NO: 283249 - DNA, 1209 bp, Homo sapiens
ttatggtggtgtaattcacaaattaaaattatatatattcaacgtgtacaatgtgaggttgtgagttttttttaattagccctagttgagaaaggcaaatgcttaatggtacatactaaaaagtattcaggacgaggctgcttaacataaacttgctaattaccaatcaatagactactcaaatgcttttttgataaacaaaagctacamttgtaggtagcgtatttttactgggttcctttacactgaagcattttttcaactaatatatatcttacaaatagtaaaatacatatatcttaagcatatagcattataatttttataagtgtatatatccctatcaccaccacccaaatcaagcaagatatggacgatttccagctcccacacccctggctctcgcactttctcaaccagttactcaccaatggtcatcattatcatgaaatctatcacgatggatttccctactcctcaatttcatataaatggaaacttgctgtatgtaatcttttgagtctgacttgtttcactcagttgaaatttgtgagaatcatctatgttttgtgtagcagcagttcattgtttaattgctgtgtggwttatggtggtgtaattcacaaattaaaattatatatattcaacgtgtacaatgtgaggttgtgagttttttttaattagccctagttgagaaaggcaaatgcttaatggtacatactaaaaagtattcaggacgaggctgcttaacataaacttgctaattaccaatcaatagactactcaaatgcttttttgataaacaaaagctacacttgtaggtagcgtatttttactgggttcctttacactgaagcattttttcaactaatatatatcttacaaatagtaaaatacatawatcttaagcatatagcattataatttttataagtgtatatatccctatcaccaccacccaaatcaagcaagatatggacgatttccagctcccacacccctggctctcgcactttctcaaccagttactcaccaatggtcatcattatcatgaaatctatcacgatggatttccctactcctcaatttcatataaatggaaacttgctgtatgtaatcttttgagtctgacttgtttcactcagttgaaatttgtgagaatcatctatgttttgtgtagcagcagttcattgtttaattgctgtgtgg

SEQ ID NO: 283250 - DNA, 579 bp, Homo sapiens
atcatgaaatctatcacgatggatttccctactcctcaatttcatataaatggaaacttgctgtatgtaatcttttgagtctgacttgtttcactcagttgaaatttgtgagaatcatctatgttttgtgtagcagcagttcattgtttaattgctgtgtggtattcatcgcgggaagcaaaagtaatttatttattcattctactgtgaatgggcatttgtgttgtttttagtttagaagttatgacacatcagtgattttatttgataagaaccctaggagttgctgagttatatagaatygattgccttacacatgttgtttacgttttgcctactattttatatatttcatccttgatctgtttgtctcgctactgtttggaacaaacctggagctccttataggaaattgatatctttttttttcttttctcaacttctattttaggttcaggaggtacatgggcaggtttgttacgtgggtaattgcatgttgctggggtttggtgtacaaatgatttcatcacccagctagtgagcatagtccccagcaggtagtgttttgaccctcactct

SEQ ID NO: 283251 - DNA, 593 bp, Homo sapiens
tgagtaattttccctaaggcctgtagctgccgctgtaatgcaatctcacctaactcttggggagtacctggaagccctcccagtatgggaggaggcctatgatacagaatttcaaagggggagtatgctgttctcttagaaggggtacacttaattttaaacaatactataggaaggacttgtgtctattttaaatttgtttcttgacatactttccagaaactttttctgatagttcgattcatttgctgcactttccggaactctaaggttggtaaacggcatgtaacttctatgaaattcttaatacctttgccgtcttctgtatcaagtcagcaacaaatgctggcctattatttgagccaattcgtagaggcagtccaaacctagggatgaaattttgaagaagtacacaggttacttcaggagctttttcagttcatgttggataagcctccacctacttagagtaagtamacactagaaccagtaaatacttgttacttctacatttaggcatttctgtgaagtccacttgaagatcttcaaaatgagctgctccagaggcttctattccccgaggtacagagggg

SEQ ID NO: 283252 - DNA, 552 bp, Homo sapiens
tgctccactgactacatgatttttcagatatgataaaagtcaatgaacagagaaaaaaaagaataaaccaagaacatactggtacaaaatattatttttaattgatatttacttaccagtcatcattgttgaaaacaatgaatcctctgtttcctctcccaaaagccacttggttgctcccattatcataccaatttgtaaaaggctggccatccactacattgcggaaaataaccatgttcctaaaaacacaataccatataaaacgttgatattcttaaacttcaactgttttaaataaaatgcagtggaaagtttactattagaggacatgtctaaatacatattctcaccttatttggcgccatcgatgttcacagacscagtcattgccacaagtagtgtctggattaatagtaacttctttaattactccattattatttggtggcccaacccaatcattaacatccttaagtaggggggaaaaagccaaattttactatgcatgtatttacctcttccttctcctttacaccaaacccaaccaat

SEQ ID NO: 283253 - DNA, 387 bp, Homo sapiens
gtaaaaggtggacttatttataaagaaaataaccaccagattttgtctatggcacaaacttcttaraaattttgaggtctttagccttaaagacctaatcaaatatttattactttgaacagtgagctactgggatatgctgggctttgagcctatgtacaaatctaattttaaaagtcaggacgtgttgtaagcaatagcaaaaaatatgctaaatgatcagcttggcaattgttgaacaaacttcattcagcagtgtgaggacgtaattaaagcagtggaccttcaatctattcactctctttattggcaaatggccgaggaataagactagaaggaagatgaactggtttagtctctttgtcagctgaacttgtggggaaagag

SEQ ID NO: 283254 - DNA, 387 bp, Homo sapiens
gtaaaaggtggacttatttataaagaaaataaccaccagattttgtctatggcacaaacttcttaaaaattttgaggtctttagccttaaagacctaatcaaatatttattactttgaacagtgagctactgggatatgctgggctttgagcctatgtacaaatctaattttaraagtcaggacgtgttgtaagcaatagcaaaaaatatgctaaatgatcagcttggcaattgttgaacaaacttcattcagcagtgtgaggacgtaattaaagcagtggaccttcaatctattcactctctttattggcaaatggccgaggaataagactagaaggaagatgaactggtttagtctctttgtcagctgaacttgtggggaaagag

SEQ ID NO: 283255 - DNA, 387 bp, Homo sapiens
gtaaaaggtggacttatttataaagaaaataaccaccagattttgtctatggcacaaacttcttaaaaattttgaggtctttagccttaaagacctaatcaaatatttattactttgaacagtgagctactgggatatgctgggctttgagcctatgtacaaatctaattttaaaagtcaggacgtgttgtaagcaatagcaaaraatatgctaaatgatcagcttggcaattgttgaacaaacttcattcagcagtgtgaggacgtaattaaagcagtggaccttcaatctattcactctctttattggcaaatggccgaggaataagactagaaggaagatgaactggtttagtctctttgtcagctgaacttgtggggaaagag

SEQ ID NO: 283256 - DNA, 491 bp, Homo sapiens
gtcctccaggtgtcgaagcagggcacccgtcctttttgcacacctgactgccatggagtgtcmtagcagaaggtcatctacatactggagcaggatgcaacataggtctttagcaggaaacatttggaggtctccaaccgaggcctcccgaaagatggtgggggactttttgaacctttgggaaagtcgagtctaagtgtactgaatggtgacatctgactccggatcttcctactgaaaggcaaacagcttttggctctcaggaactagcctgatgtgaagaaggcatctttcaagtcctgtacgggtcgatagtctttggtccttggtttagggacaggtaggaggtgggtgttccatggagactggcaaggaactagaattccagaggcttttaagcatataagatgagtctctattcctttaaaggcttccctgggaacaggatacggcttttgtccaattggctaggtcgtaggctaaacttctat

SEQ ID NO: 283257 - DNA, 491 bp, Homo sapiens
gtcctccaggtgtcgaagcagggcacccgtcctttttgcacacctgactgccatggagtgtcatagcagaaggtcatctacatactggagcaggatgcaacmtaggtctttagcaggaaacatttggaggtctccaaccgaggcctcccgaaagatggtgggggactttttgaacctttgggaaagtcgagtctaagtgtactgaatggtgacatctgactccggatcttcctactgaaaggcaaacagcttttggctctcaggaactagcctgatgtgaagaaggcatctttcaagtcctgtacgggtcgatagtctttggtccttggtttagggacaggtaggaggtgggtgttccatggagactggcaaggaactagaattccagaggcttttaagcatataagatgagtctctattcctttaaaggcttccctgggaacaggatacggcttttgtccaattggctaggtcgtaggctaaacttctat

SEQ ID NO: 283258 - DNA, 611 bp, Homo sapiens
atcagggtaaatgggttatccatcaccacgagcatttacctttatgttacaaacaatctaattatattcttttagttattttaaattgtacaattaagttgttattgacgatagtcaccctgttgtgctgtcaaatattaggtcttattcattcttctgttttttgtactcattgaacattcacacttgcttcccatccacccttctcagcctctagtaaccatctttctactctctatgaccgtgagttccattgtttggaattgctgctcccacaaataagtgagaacatgtgatgtttgtctttctgggccrgtttattttacgtcacataataatgtacagttcagttccatctatgttgttgcaaatgacaggatctcatttttccatggctgaatagtactctattgtatatatgtaccacatcttctttatccattcatatgttgatggacatttaggtagtttccaagtcttagctattgtgaacagggctggaataaacatgggagtgcagttatcatttcaatatactgattttcttacttttgggtatatacctagctgtgggattcctggatcacatcatagctctatttttagttttt

SEQ ID NO: 283259 - DNA, 602 bp, Homo sapiens
gattcacaataataaaattttagtgtagaggaggattattttttcattaatatatgtgcacctacacatagtgtatatgtaatattgtgttacgtgcgtggacttcacaatgatcaattcaragtatcgggggtgtccatcacctcaagtattatttccatatgttaagagagtttcgagtcctttagatattttggaaaatacaatacattgctgtttatatgtagtccccttactgtgatatgaaatattagaatttatgtcttccgagtaagtgtatgtttggacccattaacaaacttttttttattcctcccacccacagaaactctttccagcctctggtatctatgtattattctattctctacctccatgagatcaatatttttagctttcacgttctattcttagaataagaacatgtgatgcttgtctttctgtgcctggcttatttcacctaacacaatgacttccagttccaaccgtcttgctgtaaatgataaaatttcattcttttttatggacaaaaactcttccactgcttgtatatataccacgttgcttttattcattcatccattgatggacacaggttgatt

SEQ ID NO: 283260 - DNA, 602 bp, Homo sapiens
gattcacaataataaaattttagtgtagaggaggattattttttcattaatatatgtgcacctacacatagtgtatatgtaatattgtgttacgtgcgtggacttcacaatgatcaattcagagtatcsggggtgtccatcacctcaagtattatttccatatgttaagagagtttcgagtcctttagatattttggaaaatacaatacattgctgtttatatgtagtccccttactgtgatatgaaatattagaatttatgtcttccgagtaagtgtatgtttggacccattaacaaacttttttttattcctcccacccacagaaactctttccagcctctggtatctatgtattattctattctctacctccatgagatcaatatttttagctttcacgttctattcttagaataagaacatgtgatgcttgtctttctgtgcctggcttatttcacctaacacaatgacttccagttccaaccgtcttgctgtaaatgataaaatttcattcttttttatggacaaaaactcttccactgcttgtatatataccacgttgcttttattcattcatccattgatggacacaggttgatt

SEQ ID NO: 283261 - DNA, 602 bp, Homo sapiens
gattcacaataataaaattttagtgtagaggaggattattttttcattaatatatgtgcacctacacatagtgtatatgtaatattgtgttacgtgcgtggacttcacaatgatcaattcagagtatcgggggtgtccatcacctcaagtattatttccatatgttaagagagtttcgagtcctttagatattttggaaaatacaatacattgctgtttatatgtagtccccttactgtgmtatgaaatattagaatttatgtcttccgagtaagtgtatgtttggacccattaacaaacttttttttattcctcccacccacagaaactctttccagcctctggtatctatgtattattctattctctacctccatgagatcaatatttttagctttcacgttctattcttagaataagaacatgtgatgcttgtctttctgtgcctggcttatttcacctaacacaatgacttccagttccaaccgtcttgctgtaaatgataaaatttcattcttttttatggacaaaaactcttccactgcttgtatatataccacgttgcttttattcattcatccattgatggacacaggttgatt

SEQ ID NO: 283262 - DNA, 535 bp, Homo sapiens
ttaatgcattatcagatatattgttttcaagtacattctaccattccatgggtgactttttatttatttatttatttatttatttatttactgtgccacaatcttttagtttgatgtagttgtatgtgtttatttttgtttatcttgtctatacattgggattcatagccaaaatatcatgccaaggtcaatgttatggaggatttcccctgttttcttctagggattctttggtttcagatgttatgtttaaattccttttcaattttcaatttattcctgtgcatagmataacactccaatttcattcttttgcatgtgggcctccaataattccaacgctatttattgaagagactatcctgtctccattaggtgttttgggcatgttattgaagattctttgacgatattggtgtaggctttctattctgctccattcttctatgtgactgttttcataccagtatcatatatatatatatatattactgtagtttagtaatataacttgaaagtgagaagtgtggtacct

SEQ ID NO: 283263 - DNA, 492 bp, Homo sapiens
gatgtatatatttatgggatacatgagatgttttggtacaggcatgcaatgcataataatcacatcatggaaaattggatgtccatcccctcaagcatttatcctttgtattacaaacaatacaaatatacacttttagttattttaaaatgtacaattaaactattactgactgtagtcctcttgttgtgctaccaaatactacgtcttttcctcctttctaacgattttcttttgtacctgttaatcgtccccacctacccccattccctccaccacccttcccagcctctagtaaccatccttctattctctattcccatgagttcaattgttttgatctacaaataagtgagagcatgcaatgtttgtctttctgtgcctggcttatttcacttacgaaaatgacttccagttccatccatgttgtggcaaatgacagaatctcattctttttaatggctgkatagtactccattgtgaatagtacca

SEQ ID NO: 283264 - DNA, 588 bp, Homo sapiens
tcattggttatatgtactcctaggtatggtggggtttttcttgtgcatgaggcaagtattaaattagacctctcatgttatactttatcttattccttacaatagttcagacagtagatcatctctgtttccactcaaatgcaccagaagcctgagtgtgtattttatttatttatttaaaaactgaatatcactctgttacccaggctggagtgtggtggtgtgatcatagctcactgcagcctcaaacacttggcctcaaaggatcctcccacctcagcgtcctgagtggctgggattacaggagagaaccactgcacctagccctgagtgtgtatttgttttctgataaagagctaataattactcttgtagatcagatctggtatttaaaagaaaacaagacattgtgctcattttctcttagtttttaaaatttttagaaatattgatgtgaggatgatttaatcatagagcaagaaatgtttatttagmatctactttattcagcacatgtattcattaacttaacatttactaagagccaagtaccagctgggtgtagtggctcatgcctgtaatcccagc

SEQ ID NO: 283265 - DNA, 615 bp, Homo sapiens
ccctggccaatagggcatactagtagtctttagggccattgtggccattagctgtctcccccgccacccacacattaccaaatgcttgggtagacatcagctgtggtctgggctggtgactgatcaaataatttaagaagattaaattaagattaaggaaaaggctttgctggctttattcctaagatgcccttctgggtttgagtgctttgctagaaggcrgctacaagagaggcaggtactagtccatcttctccaaggctggaagagctccctctaagaaggggaagtgccctcaggcacatctccccaccactcccaggtgctaccttggacctgttctttctcagaacttttcacacaggtccctgaaactagaattttccacataaaaatctatgcagaggagatactggtttatcttccctcttgtacagttgggtctgaagattgcatctaaccattaagcggagatgagggtagatttctggtatctctcctctcttcctgtctcctcccctttcctgaagcctgtttttttccttgaattcttcctgaccaccaacctgcccactcccgcacacccgtgttaagcaattcacacttaaatcctgg

SEQ ID NO: 283266 - DNA, 560 bp, Homo sapiens
tgccacctctagcaatgttgcatggtgatgctttatggtcctatgtgcactcagaccttgcatccatgccctccagctttgttctgtccatgtcccaaggaagcactgagtcagcagggggcatgcaaagtgcattaagagtgttgggaatggcctgtaataccagcacttggggaggccgaggcaggcagatcacttgagatcaggagtttgagaccagcctagccaacatggcaaaaccatgtctctactaaaaataggaaaattagctgggcatggtggcgcacccctgtaaccccagctactttggaggctgaggcacaagaatcactcgaacctgagaggcggaggttgcactgagccaagattgcaccactgcactccagcctcagccacagtgagactctctctcaaaaaaaaagtaaaaatrttgggaatgattttcgtgaccataataagcatggagcagctgggcctatactgcccctatgtgttgaacaagagcgtttgctgaataagtatactgttctggtgtcataggtaagcaggagatgcccata

SEQ ID NO: 283267 - DNA, 468 bp, Homo sapiens
aacccatacaagaaacaggccatgtacaccaccaagaaagctgctgtttgcagccattgcacactgggatcagaacttctttcttatcaatctcgtctcctctcccattcattttttctccctcttcctttctttcctctttttttcacctttcatcgcagtctagtctctatcatggctgagaatgccaagccattgcaaaacccctcctgatgggctacgatagtcatgaatagttcaaaggatacacagattactaagagtacacccaaatggtttaacccaaatgtgggtttaagcccccacagcaaccagctctgagtttctgaatgtttacttatatatgkctattatttctcaagatgatgctgatatcctcaaagacaggaatagaatccatggcgactttgatgcaatgtgaaggcggccatcaaataccaacctaaatgaagaaaaaactagattttc

SEQ ID NO: 283268 - DNA, 425 bp, Homo sapiens
tgcagtcaatcacatgtagtgcctgatggatgtgtcaggcaataagcatagctatagctgtttcaaggccactgacttgaaatctgcaatttcacctgattcctttaagcctatggctttgaggtaaaccaagggtcagcaaaagtgttctcttctgcacagatcacttgaaacaccaaagaacgagttaagcagattgaatattgatatagaaagyaccttcaagttattaataatttcaacaattccaacaatagaaaaataaaatttcattaaaagcattttaactttattcattgttgaagagtttattacaaagtatttctgaggacaatgtatttgattcttgataagtagcttattacactgagttctttatttttatggacaatgacagaagaaaaactctgtttatattgttaaac

SEQ ID NO: 283269 - DNA, 580 bp, Homo sapiens
acagaaagttcagtttgggattatgtcctgcctggcacaaataagttgatcattggagctatgtggaaaagggcaaatggaaactgttaattgctcactgatgattatgacttacgatgctatttatttcatttcgtccctccttgagggaagaatatattccagctataaaaggacaaacagacgacatccattcttatgttctcttttgttcagatttattctaaacaaaaagacaattattggcctagaagtgagcttgtcaamcaacaaaacaatgcaagcctgatgtgttgatggaataaaatgaggtaaattgactcaaaagtgcagatttcatattgaattggtgagtagaatatgaggttcatcttaatctgagacccattaaagtcagtgtggactttgtcttgtattggtggtggggttggagggggtgattacgttgtaattagttatgagttttatgttttagaacatagttttagaatttagtgataatgaagagcattgtttcttaaatctgatgttccttagaatcaacctgaaatcgtgtttaaagaaagacttttggccgggc

SEQ ID NO: 283270 - DNA, 1321 bp, Homo sapiens
gcatgccaacgtgcatctagggctgctgagttttcccacttaaagctattcagtgtttcctgtttcctcatgtcttaaggaatgtggttcaytgacaagtaactgattgctagtgtctccatcagctattaaatgtgcaaccttagggaaagaacttgaatttttgtggtctagttcaagggctcttttttttttgtttataaaaaagctgttagcaaatgagtaccaatccacctttccctgcctaaaagaatggtagctctttacatgaaactgtggtgaagctcaattgtttatttactatttatttttcaacacattttaaactttcttatgtatgtttgcgtgtgtgtgtgcttggccctttgcctacaaatctttattttctatcactgaattctatttactcctcaagaagagggtattcttccctctcatatgaggctttttctcacaaccccagtgaaaggaatgtcctgccttctaacactgttagcatatatgcgggactcataatataatgttttattctagtagatggatactctttaaaataataaaaggaatgctttgtgtaaattttacctaatcgttaaaaaattggaataccgaaaaataattagtagagcccttaaatatctaaatcacattatttagaaawgcatgccaacgtgcatctagggctgctgagttttcccacttaaagctattcagtgtttcctgtttcctcatgtcttaaggaatgtggttcactgacaagtaactgattgctagtgtctccatcagctattaaatgtgcaaccttagggaaagaacttgaatttttgtggtctagttcaagggctcttttttttttgtttataaaaaagctgttagcaaatgagtaccaatccacctttccctgcctaaaagaatggtagctctttacatgaaactgtggtgaagctcaattgtttatttactatttatttttcaacacattttaaactttcttatgtatgtttgcgtgtgtgtgtgcttggccctttgcctacaaatctttattttctatcactgaattctatttactcctcaagaagagggtattcttccctctcatatgaggctttttctcacaaccccagtgaaaggaatgtcctgccttctaacactgttagcwtatatgcgggactcataatataatgttttattctagtagatggatactctttaaaataataaaaggaatgctttgtgtaaattttacctaatcgttaaaaaattggaataccgaaaaataattagtagagcccttaaatatctaaatcacattatttagaaa

SEQ ID NO: 283271 - DNA, 1116 bp, Homo sapiens
tgtctgcagacaaattattgtagtagcagtttgcagcagcagttaaaaacagtcacttagggaccgggtgatagctctgatatttccagcactcgaaaagaaaaaaaaaaaaagaaaaagaaaaagaaaaaaaagaggatttgtgaaggggagacagaggcttccaaaacagaaaaactttcctactatctctgtccctctagcttatgcagaataatattttattaagttgacacaaaataggtaagcatggggattcagaagctgcctcagtgcaaattttgcctaaaataccgtaaggctgagagacctgggttctgagataaacccaaaaagttcatctcaatgtatttttttcccattacatgtatattgcagagttcttgtcatctttagtaaactctattatttatcatttttctttgtagtgtttgtaaatgctgatcaaattcctttcttaygctgagctgtcattgccatgtgtatgtttttgattttgcttgaaaagactgtgtggccttgtaaatacatacagaaaatctagagccacagtcaacaaaatccatcaagattwcagtgtacaacattgtacttacagtgcattatatacactgtgctaaaactctgcgacaagggcagaacttatgttaagtattcttaccacaacagcaacaaaatataaatctataaataawatctaatagcagtgtatgagaatttcttctcacatgcttgtcagtgcatagtattctcatacatgttttaaaaatatcatcagtattgttctcattgtcttaatttgcattccctttatctgttgggaagcagaccctcttttaatacatttgttcattggccattagaacttcattttctgtggatttctagttcatattgttcactgtattttaatttgggttttgtctttttcttaccgattcataggaattctgtatgtgttctgaatactcatattttgctggttttggatagtgtatattctcccatctctggcttatctctttgtgtctttgttgctattgtggtggtggttgtagtataagcacttcgtttttatgtaatcaaaattatcattattatttatgttgtatgctt

SEQ ID NO: 283272 - DNA, 581 bp, Homo sapiens
cattttacccgcagtagaccttttatcaatgctagagtaaatcatctcaaaagctgctgctgctttatcaactaattttgtgtaatattctaaatcctttgttgtcatttcaacaatgctcacagcaacttcactaggagtagcttctatctcaagaaacgactttcattgcttatccataggtagcaactcttcacccatgaatgttttatcatgagattgcagtcattcagtcacatattcaagctccacttctaattgtagttatcttgttattcacactacatcttccaccgaattactgagcctctcaaagtcattcatgagggttggaatcaacttcttccaacctcttgttcatgttgatattttgatctcctatgcatcacaaayggtgttaaggacatctagaatggtgaatttttttgagaaggctatcaatttattttggccagattcattagaggaatcactatagctactgtagccttatagaatgtatttcttaaatcataagacttgaaagtcaaaattactccttgttccattggctgcagaatggatgttatattagcaggcat

SEQ ID NO: 283273 - DNA, 554 bp, Homo sapiens
ggattacaggcatgcacctccacgccyggctaatttttgtatttttagtagagatggggtttcaccatgttggccaggcagattaatcttgaactcctgacctcaggtggtccgccctcctcagcctcccaaagtgctaggattataggcgtgagacaccacacctggccaagactgttttgtttacactgaaaatctcttatttaatgtagccatcatcaccacttatcttggctagatcttctggataacttgctgtagcttctacttcagcacttgctgcttcaccttgcacatttatgttatggaggtggcttctttccctaacccttatgaactaacctctgctacactcaaacttttcttctgagcttcctcagttatctcagccttcatagaattgaagagagttaggtctatgctatggagtaggctttggcttaacagaatattatagctggtctgaactatctagaccactaaaactttctccattatcagtaataggactgttttgctttcttatgattcatgtgttcacaggaatagctatt

SEQ ID NO: 283274 - DNA, 554 bp, Homo sapiens
ggattacaggcatgcacctccacgcccggctaatttttgtatttttagtagagatggggtttcaccatgttggccaggcagattaatcttgaactcctgacctcaggtggtccgccctcctcagcctcccaaagtgctaggattataggcgtgagacaccacacctggccaagactgttttgtttacactgaaaatctcttatttaaygtagccatcatcaccacttatcttggctagatcttctggataacttgctgtagcttctacttcagcacttgctgcttcaccttgcacatttatgttatggaggtggcttctttccctaacccttatgaactaacctctgctacactcaaacttttcttctgagcttcctcagttatctcagccttcatagaattgaagagagttaggtctatgctatggagtaggctttggcttaacagaatattatagctggtctgaactatctagaccactaaaactttctccattatcagtaataggactgttttgctttcttatgattcatgtgttcacaggaatagctatt

SEQ ID NO: 283275 - DNA, 554 bp, Homo sapiens
ggattacaggcatgcacctccacgcccggctaatttttgtatttttagtagagatggggtttcaccatgttggccaggcagattaatcttgaactcctgacctcaggtggtccgccctcctcagcctcccaaagtgctaggattataggcgtgagacaccacacctggccaagactgttttgtttacactgaaaatctcttatttaatgtagccatcatcaccacttatmttggctagatcttctggataacttgctgtagcttctacttcagcacttgctgcttcaccttgcacatttatgttatggaggtggcttctttccctaacccttatgaactaacctctgctacactcaaacttttcttctgagcttcctcagttatctcagccttcatagaattgaagagagttaggtctatgctatggagtaggctttggcttaacagaatattatagctggtctgaactatctagaccactaaaactttctccattatcagtaataggactgttttgctttcttatgattcatgtgttcacaggaatagctatt

SEQ ID NO: 283276 - DNA, 503 bp, Homo sapiens
tgagaagagtgagggagaaattcatccccatgatccaatcacctcccatcaggtcccttccccaatacgtaggaattacaattcaacatgagatttgagtggggacacagagccatgccacatcaactccatttattattttcctacgtatgcccccaatatttggggagggagcatgatgatgatgatgacrctttgagtctctggctattgtggtcatctctaaccctgtgttcacgagtcttcaaaatgtttgagtatttctgttttcccagtgcacagctaactaagaaaatgtccagaaatccctttgaggaatgtctggagaagtcatcatcacatgcaattgatgtgatacttcagtttccttcattctggacctagttttgctttcagtcaattgcacctagttttgctttcagtcagtaggtcctagtttgaaaactggaacaggtctgaaaactgggaagggaactacaactttgtattggggtaattgctct

SEQ ID NO: 283277 - DNA, 503 bp, Homo sapiens
tgagaagagtgagggagaaattcatccccatgatccaatcacctcccatcaggtcccttccccaatacgtaggaattacaattcaacatgagatttgagtggggacacagagccatgccacatcaactccatttattattttcctacgtatgcccccaatatttggggagggagcatgatgatgatgatgacgctttgagtctctggctattgtkgtcatctctaaccctgtgttcacgagtcttcaaaatgtttgagtatttctgttttcccagtgcacagctaactaagaaaatgtccagaaatccctttgaggaatgtctggagaagtcatcatcacatgcaattgatgtgatacttcagtttccttcattctggacctagttttgctttcagtcaattgcacctagttttgctttcagtcagtaggtcctagtttgaaaactggaacaggtctgaaaactgggaagggaactacaactttgtattggggtaattgctct

SEQ ID NO: 283278 - DNA, 606 bp, Homo sapiens
attttctgtgctgcatttgactccacctacaggagcccatctatatgtctataaaaataagaagccaaattatttgggaaagtatggaaaaaatgtgcagacaccatcaatcatgtaatagagtgaactcattacctatcctgcacccccactgaagcaaggtgaaaattcaattttaaagaatgctaacgcgtttattctatctttaagcaatttcttacctggcagattggtaactctctctttactgtatttctcgaggtgcaaattaatttttggttcaggtagtaactcatatttgtgtaaggaaattgtaacagtaagggctgatctcttctcaggaaagcaattgaattgaacataaatatactggattccaaaaatgttkgcattgttcaaaactttatctctagttctaggttatttcccaacagggtgatcatgctttttttccccacaacatatttcaatccatgtatttatttatttttggatattaacagggcaaaaatatataaatattttatgcactactctaattgcaaagacaactggctaatgcaattctgaattaagcaaaatatatattttatttataatacaata

SEQ ID NO: 283279 - DNA, 607 bp, Homo sapiens
agtaaaaataacagaagttttatgtattttcttaattcatatttatcaactgcagcacatggagtgctgtacactctccccaaatgttgcactgaaatttcaaccaacatgtaaaacttagttttgcaacaacgggtataagtagtattaaggtaggatctttaaatgaaaacagcatggttgtaagctataatgatgtactggcttctgtgaataaaaagcaacattaagataccactaaggaataagaccatcactggaacatagatgaattgtgtgttttcaatctatgagggtgtaaccaaagtagtaaatgaatctactcaaatactggcaaaaagtaaatattgataataatcatgaatgcccttagagaaaaggtaagaatttagttgtgattatgttatgattgatcatgcttattcacaaagtactgtttttaattttttaatctttagaaatrtgttgtacaataatctagtatcttacatatgctttaaaaatagaatggaaaaaatcattgtctaatgtgatctgtgtgctttcactaaacaagtattctgagcttcgctggtctgataaatgttattggtatgtgatttatttt

SEQ ID NO: 283280 - DNA, 646 bp, Homo sapiens
cacaaatcattagcatatgattcttctgttatttgctgagtgattctcacaatagcctcaagacaactggatcagtcatgtcctttacacaaataaagaaagtgaaactcaaaatagttaactaaatgtattttaagcatgtgtagcaaaaataagattaaaaaatatatattttttcttttagtagagcccaagtcaaatctatgtcaaaacttgaaatagtccttaaagcaaaatttgaacaagtccctatgaattaatgagataaatgtacaacattactcccagctaccagatggggcacagaaaagttcctaaamcatgaataaacctaaaaaatatgtaaattattttttgaataaagtgggaaaacttacgaagaggaatttttgtgtccacagagaccttgaatgcctgccaaatgtaaagctaacagtaaagaccactgcattgataaagatatcttctatgttttctaggatgattcttgcagcaatactgtattactctcacagtctctcaatatgggacggagataccaaatgaatagaatggtggcaaattaagcattgggggagaatataatttagaggcaatctggtgtttctctcaatagaactatgcttttggaacaatgattttgtta

SEQ ID NO: 283281 - DNA, 532 bp, Homo sapiens
aagcattgtaaggtgttgtggcatatactcctacttagctattcatcttcattgatcaaattctgattttgttctgtgtggcactgttctcagaaaaaaaaatctgaattatcagcctctcttgctgctatggatacccttgggatagattacttgtggacagaaattttctagggaggaccagcagataatttgcttttccgatacagacattttctccttcacccaccaattttccttccttcagtctgcaaagtggacatggctagagttaggtcagccattgttctctgagaaagtagcatacatcagaaaaggccaaatgctgtaaatgttagagcagaaagataaaaaggttatcaggacactggtgctaacaagcagcccacaccagacctgtgccctatgcctagtactatgtgagtaaaaactaaccaattttaattaagccatttaaaactggattttccttacaagaacaaagtagaakccttactaacagaggttcttttgctcctataaactttcattg

SEQ ID NO: 283282 - DNA, 532 bp, Homo sapiens
aagcattgtaaggtgttgtggcatatactcctacttagctattcatcttcattgatcaaattctgattttgttctgtgtggcactgttctcagaaaaaaaaatctgaattatcagcctctcttgctgctatggatacccttgggatagattacttgtggacagaaattttctagggaggaccagcagataatttgcttttccgatacagacattttctccttcacccaccaattttccttccttcagtctgcaaagtggacatggctagagttaggtcagccattgttctctgagaaagtagcatacatcagaaaaggccaaatgctgtaaatgttagagcagaaagataaaaaggttatcaggacactggtgctaacaagcagcccacaccagacctgtgccctatgcctagtactatgtgagtaaaaactaaccaattttaattaagccatttaaaactggattttccttacaagaacaaagtagaagccttaytaacagaggttcttttgctcctataaactttcattg

SEQ ID NO: 283283 - DNA, 543 bp, Homo sapiens
tgttcctaacactcagaattatttaaaataatttaacataatttgttaacaaattttttaacatttttaaatttgttttaacatatttaacaaaataatgttaaaataatttaacattattatttaaaataataatgttgcaactgaagttattttgtctctcaaataagatttaaattatggtcactaaaatttcgtatttaaaaatcaatatttattatctgttttgtcatagaaaaaaaatctatcctgagcactgaaattagtcttccaaaataaagccttccagagatggatactgagaattaattaatagcrtcatatttaatagatggtaagtctcaagatacttctagtacattgaaatgattttctggtctgtttttttcctgtgaactcacctgttttcaactctgtgtccactttctgtttatgaagcagttctccaacctttacaacatttgatcttcccacattcctttataataataatatataaatcttattataatcacttttttatagtgccaaatcaaaagttac

SEQ ID NO: 283284 - DNA, 549 bp, Homo sapiens
agaggtttcttttcctcacatcaacaccttttgggggaagctggtaagggggaaggaggagcasaaataggcgcacaaattaataagactcctgaaagaagtgggatttagattatcttttctcttttgttggaattcaataatattaaaagctctacaggagatgagagatggcatgttcctgacttaagacagatacccctgcccccacccacccacccacccacacacacacacacacacacacacacacacacaaggtcttgcgtattcaaaggaatcatatccataagtggatccaaatccaaatttagcctaagaatatagacgctcatggaatccatctagactcagccaccccatcagagtgtttgcacttcaggaacaatagatgaacagtataggtgaattacaagaagctgagactggcagtaaaaggattagattaagatgagcattagtactgcagcaggatgaagagacactctacttcttcctagttgatgtttgaaagcaagcctatatccaaagactaccagggtgtatgat

SEQ ID NO: 283285 - DNA, 549 bp, Homo sapiens
agaggtttcttttcctcacatcaacaccttttgggggaagctggtaagggggaaggaggagcacaaataggcgcacaaattaataagactcctgaaagaagtgggatttagattatcttttctcttttgttggaattcaataatattaaaagctctacaggagatgagagatggcatgttcctgacttaagacagatacccctkcccccacccacccacccacccacacacacacacacacacacacacacacacacaaggtcttgcgtattcaaaggaatcatatccataagtggatccaaatccaaatttagcctaagaatatagacgctcatggaatccatctagactcagccaccccatcagagtgtttgcacttcaggaacaatagatgaacagtataggtgaattacaagaagctgagactggcagtaaaaggattagattaagatgagcattagtactgcagcaggatgaagagacactctacttcttcctagttgatgtttgaaagcaagcctatatccaaagactaccagggtgtatgat

SEQ ID NO: 283286 - DNA, 549 bp, Homo sapiens
agaggtttcttttcctcacatcaacaccttttgggggaagctggtaagggggaaggaggagcacaaataggcgcacaaattaataagactcctgaaagaagtgggatttagattatcttttctcttttgttggaattcaataatattaaaagctctacaggagatgagagatggcatgttcctgacttaagacagatacccctgyccccacccacccacccacccacacacacacacacacacacacacacacacacaaggtcttgcgtattcaaaggaatcatatccataagtggatccaaatccaaatttagcctaagaatatagacgctcatggaatccatctagactcagccaccccatcagagtgtttgcacttcaggaacaatagatgaacagtataggtgaattacaagaagctgagactggcagtaaaaggattagattaagatgagcattagtactgcagcaggatgaagagacactctacttcttcctagttgatgtttgaaagcaagcctatatccaaagactaccagggtgtatgat

SEQ ID NO: 283287 - DNA, 972 bp, Homo sapiens
agaggtttcttttcctcacatcaacaccttttgggggaagctggtaagggggaaggaggagcacaaataggcgcacaaattaataagactcctgaaagaagtgggatttagattatcttttctcttttgttggaattcaataatattaaaagctctacaggagatgagagatggcatgttcctgacttaagacagatacccctgcccccacccacccacccacccacmcacacacacacacacacacacacacacacaaggtcttgcgtattcaaaggaatcatatccataagtggatccaaatccaaatttagcctaagaatatagacgctcatggaatccatctagactcagccaccccatcagagtgtttgcacttcaggaacaatagatgaacagtataggtgaattacaagaagctgagactggcagtaaaaggattagattaagatgagcattagtactgcagcaggatgaagagacactctacttcttcctagttgatgtttgaaagcaagcctatatccaaagactaccagggtgtatgatwgagaacttcttcaacttgataacacacatctacaaatcatgtacacataacaccatacataatggtgagaaagttgaagctttctagctaagatcagaaacaagacaagaatgtcccctcttaccacaatatttcaacatcatctagatatcctcgctatcaccataagagaataaaaggcaataaatatatacagattggggaagaagaaataaaactttgttcacagatacwtgatcatctatgtataaaatctgaaagtattgaccataaaaattcctggaactaacaagaaattattataacaaggtttcaggatacaaggttagtgtaaaaagtcaatcaccttcctatatatcagtaataagacaaggatctttgaaattaaaaacacaataccatttgcattacacacccaaaaa

SEQ ID NO: 283288 - DNA, 578 bp, Homo sapiens
aaaatgccagttcctcacttacttaagacattacaggttcacttcattctcatgtcacaatacaataaagatcagtaggaaggttctgtaacatgatctgattcaggcttcttccatgatgtggattcaccaaagctgtggatttagaatcctccccagtatgctttgaatccagccaggatgtaaaatgagggacagagctgtggaggcttgtgcaggtttagtgttccaggcatagaggtgtctttcatagttacccccattctgttggccagtcacatggccctccctgctgggaagtatataggaaagatagcatgtgtgtacagaaaaaaaaaatgggattgattaattctgccagaatcttcccttctagttgttaagtatttatttcattctttatcacayacagtatatgctgactttttgcaaagaaacatatcccaaagttcagtgcaggaagtaatttcatccatctttatattaggatttccaaaaatttattcccattttgaccagacatagctaaggcacttgtatttcaactattatagaagtatatgcataaagaatgtata

SEQ ID NO: 283289 - DNA, 636 bp, Homo sapiens
aatcatttgtggtgtggtctagaaattggaattttacagctttccagatgattgtgatgtccagccaacgttgagcccactgctaaaatatacgtggaatttacttgaacgtgagagccacaaaaacaactcgtacagtttagggtttattgatgaccctaatgaaataagtttgctgtatcaatgatatatttatctaaaatgatgaacatctcaaatatattttttagaaatcttcccttgatttatttgacaatacacatctgcatgttaaaactcttcaataaagtctctatgtttacatgtaaaaatatgctttttttttcaacaatctcactttgtcgcccaggctggagtgcagtggtgtgatctcagctcactgcaaactccgcctccccggttcaagcgattttcctgcctcagcctcccgarctgtttggattacaggtgcccaccgctctgcccagctaatttttgtatttttagtagaaacgaagtttcaccatgttggtcagtctggtcttgaactcctgacctcgtgattctcccaccttggcctcccaaagtgctgggattacaggcgtgagccaccatgcacagctgtaaaaatatgttttattatcatgtgattataca

SEQ ID NO: 283290 - DNA, 636 bp, Homo sapiens
aatcatttgtggtgtggtctagaaattggaattttacagctttccagatgattgtgatgtccagccaacgttgagcccactgctaaaatatacgtggaatttacttgaacgtgagagccacaaaaacaactcgtacagtttagggtttattgatgaccctaatgaaataagtttgctgtatcaatgatatatttatctaaaatgatgaacatctcaaatatattttttagaaatcttcccttgatttatttgacaatacacatctgcatgttaaaactcttcaataaagtctctatgtttacatgtaaaaatatgctttttttttcaacaatctcactttgtcgcccaggctggagtgcagtggtgtgatctcagctcactgcaaactccgcctccccggttcaagcgattttcctgcctcagcctcccgagctgtttggattacaggtscccaccgctctgcccagctaatttttgtatttttagtagaaacgaagtttcaccatgttggtcagtctggtcttgaactcctgacctcgtgattctcccaccttggcctcccaaagtgctgggattacaggcgtgagccaccatgcacagctgtaaaaatatgttttattatcatgtgattataca

SEQ ID NO: 283291 - DNA, 636 bp, Homo sapiens
aatcatttgtggtgtggtctagaaattggaattttacagctttccagatgattgtgatgtccagccaacgttgagcccactgctaaaatatacgtggaatttacttgaacgtgagagccacaaaaacaactcgtacagtttagggtttattgatgaccctaatgaaataagtttgctgtatcaatgatatatttatctaaaatgatgaacatctcaaatatattttttagaaatcttcccttgatttatttgacaatacacatctgcatgttaaaactcttcaataaagtctctatgtttacatgtaaaaatatgctttttttttcaacaatctcactttgtcgcccaggctggagtgcagtggtgtgatctcagctcactgcaaactccgcctccccggttcaagcgattttcctgcctcagcctcccgagctgtttggattacaggtgcccaccgctctgcccagctaatttttgtatttttagtagaaacgaagtttcaccatgttggtcagtctggtcttgaactcctgacctcgtgattctcccaccttggcctcccaaagtgctgggattacaggcrtgagccaccatgcacagctgtaaaaatatgttttattatcatgtgattataca

SEQ ID NO: 283292 - DNA, 673 bp, Homo sapiens
ctacctattctgttacaatagtctatgtgtctgtttttgtaccagtaccatgttgtttcggttactgtaaccttgtagtatagcttgaagttgggtaatgtgaagctyccagctttgttctttttgcttagaattgcctttgctatttagaaccatttttggttccacatgaaatttatttattttattatttatttttgagacaaggtctcactctgttgcccaggctggagtgcagtggtgtgatcttgactcgctgcaaatcctacctcctgggttcaagcaattctcccacctcagcctcctaagtagctgggactatagttgtgtgccaccatgcccagctaatttttgtatttttagtagagacagggtttcaccatgttagccaggctaatctcaaactcctgacctcaggtgatctgcccaccttggcctcccaaattgctgggattacaggaatgagccaccttgcccagcctccatatgaaacttaaaatagtttattcaaattctgagaagaatgtcattggtagtttcataggaatagcattgaatctgtacatgaatttggacagttgagccattttaaaaatattgattattctatccttaagcatgggatgcttttccttctgtgtttgtcatctctgattcctttgagcaatgtttt

SEQ ID NO: 283293 - DNA, 503 bp, Homo sapiens
aagccttttctgaatctattaaaataatcacgtgctttatgtttttagctctgtttatgtgatgaatcacatttattgattgtatatgttaagccaattttgcatgccagggggaaagcttacttgatcatggtggattagctttttgatatgctgctgtatttagtytgctagtattttgtggaggatttttacatctctgttcatcaaggatattgacctaaagttttcattttatttgcgtctctgctaggtttttgtatcaaaataatgctggcagcctcatagaaaaagttatggaggagcctcccaacctcaattttttgaaagagtttcagtaagaatgttaccagctcttctttatacatctggtggaatttagctatgaatctatctggtactgagcttattctggttggtaggcttttttttttttttttcctgattcaactttggaactgttctatgtcattttagggattcaatttcttcctggttcaatt

SEQ ID NO: 283294 - DNA, 503 bp, Homo sapiens
aagccttttctgaatctattaaaataatcacgtgctttatgtttttagctctgtttatgtgatgaatcacatttattgattgtatatgttaagccaattttgcatgccagggggaaagcttacttgatcatggtggattagctttttgatatgctgctgtatttagtttgctagtattttgtggaggatttttacatctctgttcatcaaggatattgacctaaarttttcattttatttgcgtctctgctaggtttttgtatcaaaataatgctggcagcctcatagaaaaagttatggaggagcctcccaacctcaattttttgaaagagtttcagtaagaatgttaccagctcttctttatacatctggtggaatttagctatgaatctatctggtactgagcttattctggttggtaggcttttttttttttttttcctgattcaactttggaactgttctatgtcattttagggattcaatttcttcctggttcaatt

SEQ ID NO: 283295 - DNA, 607 bp, Homo sapiens
ttctcctattctgccatcttactgatgtcactcctgaatgtatttttatgattytcacttacacatggttttttgaagatgctttataatattaaaataatgtgttcaattaatgaataaatgacactatataattcattgactattaggtcatatattagagaagatatagtaagaagttagtcttaaaatatgtattacattttcagaaaagtattccatttgggttcctagagattctagaaaattccataagttgttcttaatacttgatgggaaggcatcaattattaacctattgcattatgtatgaaagaatatttatatacaaatttattattatagaaatcatcttattcatctcataaatttcttgtacatttttatcattttttaattcttaggtttctaataaatagtaaatgttttatctattgatcggttattatctatttatgcttaaatgtgtgaacttgaatctcttcatatatttatccctggcttgattatttttctaattattttggtgaataaacacattccttcaatttaaaaattacatgtgtatcgcattgtgcaatgcctgaaaatgatcctgaacactcac

SEQ ID NO: 283296 - DNA, 575 bp, Homo sapiens
ctgtcgtcacgtgctgtctctctgggggtctccgtcttcacgtggtcttcttaaacagacaacagtcacgctagacgaggacccacctcagtgacctcaccttaattttattacatctgtagaccctgtttccaaatagggtcacactcacaggaaccaaagatgataatatttttttttggagggagggagttcaacctataaaagtcttgagcttgaatataaamttaattcaatatttcaaggctttgtactaaagccctggatttatacttaaactgtttctgagatgactgacagctttagtgacagggatctccaatcttctggagcaatctcatgaccaaggatctttaatttttgtgtcttgaatcttgcagttctacacacattagtgtacatgcttcatcagagaagaatgggaaaatgagcaggaaatcctgtttttgtgatttctagattcaacctatggtttgatgcagtagaaacatataagtggagatcctactctgaaaatgcctaaaaaatgcaggtttcatcgaacatattttccacttatggtgtagatttaaaaa

SEQ ID NO: 283297 - DNA, 607 bp, Homo sapiens
tttgtactaaagccctggatttatacttaaactgtttctgagatgactgacagctttagtgacagggatctccaatcttctggagcaatctcatgaccaaggatctttaatttttgtgtcttgaatcttgcagttctacacacattagtgtacatgcttcatcagagaagaatgggaaaatgagcaggaaatcctgtttttgtgatttctagattcaacctatggtttgatgcagtagaaacatataagtggagatcctactctgaaaatgcctaaaaaatgcaggtttcatcgaacatattttccacttatggtgtagatttaaaaacctccatttttggcagtctctataattctttatgttaatacctcaagtgaaaatacattatggtctattagtcacacaatattcaccatcagagataatcatgatagccatgactctgtttcctttttmtgaataagtaacccccaaaatgtgacccatcaaattttcaagttatgtaacaccttacaattcctatgtcgagacaatgttacccaacaagaaaatacaccaatattcagactacgtcatatgcagcacttaatatcaggccagagttaa

SEQ ID NO: 283298 - DNA, 545 bp, Homo sapiens
gttaattcatgtcttagcatatgtcagagtcagaatttccttcctttttttttttttggaggaagtctggttctaccacccaagctggagttcagtggcacgatctcggctcactgtaacctctacctcctgggttcaagtgattctcccacctcagtctcctgggtagttgagactataggcatgcmccaccacaccaggctaatttttgtattttagtagagatggggtttccccatgttggccaggctggtcttgaactcctgacctcaagtgatccaccagcctcagcctcccaaagtgttgggattacaggcatgagccactgctcctggccagaatgtccttcttttgtatgtatatatcacattgtttttataaattcgtctgtgtatgatagacaagggttgcttacacattttagttattggaaataattctggtgtgaacattggtatacagatattcttttgaaattctttctagtctatattcagaaatggaattgctggattgtatggtaattctgtttttaattttttgag

SEQ ID NO: 283299 - DNA, 567 bp, Homo sapiens
tgaggatcgtgggataaacaaacaaaaagaggcacatttcttgacattgagattacatgtttctctgtgtaataaagaaatatagtatttttagatagaaattgcttaattatyagtctctttggtacaaaagctataaatatctccctccatgcttaattcagttaaactgaataattcctatgatgatttgatcactcatacaaatggaggtacagggactggttgagggagaatggggtgatattggtcaaaaggtacaaactgtcagttatgcaagatgaataagctctgaaaatgtagtgaacagcctagtaatgagggttaatgaaattctattgtatactcgaaatttactagagaatagatcataaattaaatattatctatatttaatattatcaaatacacattatcaatattatcaatacacatacataaatgtacaaaatgctaacttttagaggtaatggatatggtaatttgattgtggggatcttttcatagcatatacagatattacaagatcacttaatacaccttgaatatatgaaattttctatgtca

SEQ ID NO: 283300 - DNA, 567 bp, Homo sapiens
tgaggatcgtgggataaacaaacaaaaagaggcacatttcttgacattgagattacatgtttctctgtgtaataaagaaatatagtatttttagatagaaattgcttaattatcagtctctttggtacaaaagctataaatatctccctccatgcttaattcagttaaactgaataattcctatgatgatttgatcactcayacaaatggaggtacagggactggttgagggagaatggggtgatattggtcaaaaggtacaaactgtcagttatgcaagatgaataagctctgaaaatgtagtgaacagcctagtaatgagggttaatgaaattctattgtatactcgaaatttactagagaatagatcataaattaaatattatctatatttaatattatcaaatacacattatcaatattatcaatacacatacataaatgtacaaaatgctaacttttagaggtaatggatatggtaatttgattgtggggatcttttcatagcatatacagatattacaagatcacttaatacaccttgaatatatgaaattttctatgtca

SEQ ID NO: 283301 - DNA, 632 bp, Homo sapiens
ataaattaaatattatctatatttaatattatcaaatacacattatcaatattatcaatacacatacataaatgtacaaaatgctaactkttagaggtaatggatatggtaatttgattgtggggatcttttcatagcatatacagatattacaagatcacttaatacaccttgaatatatgaaattttctatgtcaaagataactcagtaaagctgttgaaaaaaaaaaaagaacatctggaaagacaaaagagaagccctggtttcaaaatctagtaatctgtaatacaagttatattacataaaatgctacattatgtgcaatgctgctttattgaagttttaaaagctgggatggtatatcacaaatctgtatttgaagtacaattaatttctattaaaacctgatcagtaatttgataacagtttgctattacttgctttcttgtgatagtggcatagtcagaaatctgaaatgtgctgataatttaactcaacattctgaccatgtttgacattttttctgatcaccttgacggattttctcacttgaatgaaagaaagtgaaaagatggaaattataagggctgtgagaattgcagaagcaactgtccgaaaggcaaaaattttt

SEQ ID NO: 283302 - DNA, 640 bp, Homo sapiens
cccaatgcctatactcctgtcatatctaggaagtaactaactttttttgattttacaagtccataggaagaagggacttgcctgggctcagttgagactttgagctatggatttttgagttaatactgaaatgaattaagactttaggggactgttgggaaggtatgattggttttgaaatgagaggacaagagatttgggaggggccagaggtggaatatgttttagctgtgtccccactcaratctcatcttggattcccatgtgttatgggacggacctggtgagaggtaattgagttatggggtaggcctttcctgtgctgtttttgtgatagtgagtaagtctcatgaggtctgtctgttccagaagggggactttcccaatacaagctctttctttacttgctgccatccacttaagaggtgacttgctcctccttgccttctgccataattgtgaggtttccccagccatgtggaaccataagtccattaaaccttttttcttgtataaattacccagtctcgggtatgtctttatcagcagcatgaaaacggactaatacaatgatcatattcagataataatcttttcaaacacatgtcctcctccaaagttcccatgtaaggacattgtt

SEQ ID NO: 283303 - DNA, 640 bp, Homo sapiens
cccaatgcctatactcctgtcatatctaggaagtaactaactttttttgattttacaagtccataggaagaagggacttgcctgggctcagttgagactttgagctatggatttttgagttaatactgaaatgaattaagactttaggggactgttgggaaggtatgattggttttgaaatgagaggacaagagatttgggaggggccagaggtggaatatgttttagctgtgtccccactcagatctcatcttggattcccatgtgttatgggasggacctggtgagaggtaattgagttatggggtaggcctttcctgtgctgtttttgtgatagtgagtaagtctcatgaggtctgtctgttccagaagggggactttcccaatacaagctctttctttacttgctgccatccacttaagaggtgacttgctcctccttgccttctgccataattgtgaggtttccccagccatgtggaaccataagtccattaaaccttttttcttgtataaattacccagtctcgggtatgtctttatcagcagcatgaaaacggactaatacaatgatcatattcagataataatcttttcaaacacatgtcctcctccaaagttcccatgtaaggacattgtt

SEQ ID NO: 283304 - DNA, 507 bp, Homo sapiens
tgtggcatgtaacatcacacaaccacaggagtaaaatccatcatatttacagtcccagggattatgcrcagtgcaccaggggacaactgaattctgcctgtcaaaagggccaagcaggactttattggtgaagaacagtggaatgtcattcttggttcttccagaaaaaaatcactcagtaaagttagaggttctcttgccttttgggaagtcatcaaagaatctcatggagggtttggaccttcaccctagaaacatcacaccatgttttctataattgcagggttcatggtcccttgaagcctattcatagtttccaggttgaaaagctctgctgcagggtgtggggagggatgcaggtggaggtgagggctgaatagtgtgagctgcatatctggagctgtggtggtttttttagtctttaagctgtcatgtgttgggggttgggcatgggaggggcatcccaagagctccttggtattgacaccatctccaaggtgatctctg

SEQ ID NO: 283305 - DNA, 618 bp, Homo sapiens
aaattataataaaagtaaataattaaaagatgaaagggcatgaaagtacaaatctaattattacagtctataaaactactgtaaacatttctaagtactttctctcaatttctgtacacattgagaatcagtaacaaagagttcacagaccagaacaaatatgtgaccacactttgattagtggtactgtatctgtatttgtaagacctatgtttgccagaggatgggacaaatatactctttataagttaagggatctgccayttcagtgaagtttttgggaatccagttgtatggggcatgtgaagatacccccattcaaagcaaaagacaatttgatatactttgtatttcctaaaacacacaaacacaagttcacacacatctgcaatacttgctacattttgtatattttgaatgcaatctaaatcatattttggtccttttctatgatccaataattccattatgttgcctgttttgagtgtgtcccagtgcaagaaatagttcttcagttgcttcaggctgcaaagtaatcagatttctgagactcttttccacttaaccttatgacctactaaacctactaaaccaatgacaggagaggattgtgtgttg

SEQ ID NO: 283306 - DNA, 596 bp, Homo sapiens
tttataagttaagggatctgccatttcagtgaagtttttgggaatccagttgtatggggcatgtgaagatacccccattcaaagcaaaagacaatttgatatactttgtatttcctaaaacacacaaacacaagttcacacacatctgcaatacttgctacattttgtatattttgaatgcaatctaaatcatattttggtccttttctatgatccaataattccattatgttgcctgttttgagtgtgtcccagtgcaagaaatagttcttcagttgcttcaggctgcaaagtaatcagatttctgagamtcttttccacttaaccttatgacctactaaacctactaaaccaatgacaggagaggattgtgtgttgagaatcatttgcagtcaccttggactttgaataaagttatggatgctgtatcaatcagggattcacagagaaacaaaactagtaggatggatgaatagatagacagaaaaatttaattcaaggaattgtctcacaggattatgggaagtctggcaagtctgtaatttgtagggcaggccagaaggctggaaagtcttagatgggagttgatgctattt

SEQ ID NO: 283307 - DNA, 501 bp, Homo sapiens
taacactgctgtagctgtgtcccatagattctgatatgttgtctctttgttcttgttggtttcaaagaacttcttgatttctgccttaatttcatsatttacccaggagtcattcagggctggttgttcaatttccatgtagctgtatggttttgagtgagtttcttaatcctgaattctaatttgattgcactgtggactgagagactgtaatgattttagttcttttgcatttgctgaggagtattttacttccacctgagagactgtaatgattttagttcttttgcatttgctgaggagtattttacctccaactatgtgataaattttagagtaagtgccatgtggcactgagaagaatgcatattctgttgttttggggtagagagtgctatagatatccatcaggtctactcgatccagagctgagttcaagtcctgaatatctttgctaattttctgtcttgttgatctgtctaatattgacagtagggtgtt

SEQ ID NO: 283308 - DNA, 548 bp, Homo sapiens
attgcattttattaaattcgtgttttctgcatttttcacaacaattttatgtgtgtgtgtgtatttatctttactttgagttatgtgatcttttaatagattcctgaatttaaatttaatattattttactagcttatgctttctaagcctcagtctctgtatgtataaaaatcataatgatacctcccttaaagagatgttaaaactaaatgagaaaatgcatacaatgtgtttagaacctttcttagtccattttgtgcttctataatagaaaattgccaaatgagtaatgtataaagaaaagaaatttatttctcacagttctggaggctgaaaagtctccaagatgctatcatctggtcagagcctcttgctgtgttactccatagtagaggtggaaggacaagaccgtatgagagagcaaaagatctaacttgcaacctcaacccttttataattgtcatccattcattcataagagtgaatcccttatgatctaaacacctcccattgggccccacctcaygatactgttgcattggagatt

SEQ ID NO: 283309 - DNA, 608 bp, Homo sapiens
attttgcatgtagcatcctttccagcttccagcttgcatcttcagtaaatgtgtataaacatcatagaatggtgtttggtttggtttggtttggttcgattttaggaggatggagatgacatctaaagaatgctattgaaaagacagtctcaacaaggaaactaattccagttgctttcagttttcaaatttctgtgaagaaggagcagtcattagcaaaactgtgaagtcattgaactgtgtttttggctaacaaatctcctragtttgagcccttgttcccttattccctttaagctacctttatcttcatattctctccagtctcttccctgctgaaacatggtttcaacaacaaacctgacctctttctctgtaatgtattcctcttttctccactttctaaaaactatctcagggcagtctcaacgacaaatatggctttgacagccactataagctaataaccccccaaatttacacatttctctcctgagcaacagaatggtaatgataacttctcatttgtcatctccacttgggtgtctgacagacaccttcagtacaaaacacacaatagtaacttcttaacttcccctcaaaatttg

SEQ ID NO: 283310 - DNA, 598 bp, Homo sapiens
agtaactcacacaaaataattttataaatcaaaaaagaaaaataratttttaaaatattgttggcctccttaacaattagagatagtacttaggcctaaatttacagccatatctttggatttactcatttctctgggcatctcttatatatacgtgaggtatatatattataaaacttctatttgtttttctcattttaatttgtcatttgttagaggggtccacctcaactaaaaactatgaagagtagagaaaaaaattatttttcctttctacatatatattttaaaggtaagtgctagtcccaacattctctctaaaacttaaagcaatgccattgtctctaaaacaagggaaataatggtacccactgaaataattgatgtgaggattaaatgtaatcatttatggtaggtgttggcaatgcctggcaaatagaaagctctcaattgatgctatacatattattgatagtcattattataataaggaatttagtttgaaggattgtataaccatttctagtattcttgttacttttttggctagaattaccacactgcttcaattctaaaatataaattttttcacattgta

SEQ ID NO: 283311 - DNA, 636 bp, Homo sapiens
acaccctgtactttctaagttataacatttaacattaaatgctgcccacttattttctctccattcctcatatgagttaaccacgaaataaatgcatttctaagttgtttaagaaatgcctttccaacaatgtagtgcttgctcctattgccttttgcrttttaacagaattgattcccaactatcgcctcattggtcctttgatgttgatgagccaagaacagtccttgctctctgcatttagaaacttctatttatgttgtgatattctctgagagtaacacttgcatttgaatgatggatcttatactcctggttctttctgcagcagctcaaacaaaagatcactttctattctacatttagaaacaattccaaggatagagtgtgcttgcattagcaaactctgagataaccattatcctaacctgattggtctgaggatattgtgtatgtatatgtggcaggaggaagagatatttgagctataaaccccaagtcattattcctctctctgacctccaaagtgtagagaaaactctgggatcaaatttctaagagttagtgccctccccaggcttccatcatcatcaagatgactgggaaagggtttggtcaggctgcttaacagccaca

SEQ ID NO: 283312 - DNA, 471 bp, Homo sapiens
ggttaggaagccattgaaataattctcatgaaatgatgatttcttgaaccaggaaaataatagtgcaagtggtgggaatttgtctgcttctagctatattttaaggtaaagctgacaagatttgataaaagagaaaaaaaatccaaggatgcctccaaactttttggcgtgaatacatggaggatggaattgctgtatctgaagatggcgaagagtgtggttagagcaggttttaggaaaagtttgtttcaattgtatacacattaattttgagatgcctcctataaatctcagtgaagatgtcarctaggtggttagaatatgaatcttggaattcagaaaaagtggtctagatggaaataaaagtttggaagttgtcaacgtagagatgatatttaaagccatgaaacaggatgagcaagagtaaatagagaaggaaagagcacaagggctgatccctaaatgactcaa

SEQ ID NO: 283313 - DNA, 480 bp, Homo sapiens
aacaggagaaattttcgaggcttactttmtatgcttcataattttaccaagccttgagagaaattgtgtctctgagatgggctgctctctgcaaagcaaggatttctccacaaggaacaatatcaattatctatcagaatattggattctgatggttcaactcactgtagagatttggatttaggttagaacaaatataaggcctgcatgcagcagcatcaatctggacagcgtaaatgaatgaagttactcagccagcttcatgagaaaacaatcaacctattctgttcctaaaccaagcaattagagatatagatggctaatgcaattctgtgtgtcaaaaaaaggaacacaactttccagtttctaaggtagataaagttattctctactcttcttcactgcccaagtagtggcagaaatggaatgccagatagcttaagcaaaaagggaaattgattcacataaatagtaaaacct

SEQ ID NO: 283314 - DNA, 563 bp, Homo sapiens
tcgaggagtagggggctcagggagggatagcattaggagaaatacctaatgtaaatgatgagttgatgggtgcagcaaaccaacatgagacatgtttacctacgtaagaaacctgcacattgtgcacatgtaccccagaacttaaagyataataaaaaagtttttttttaaaaatatataaataaaaataaaaattaaaaaaagtaaaataaaacaataagatgaaaggaagcaagggagatggaaacaaagaaagagggagggagagaaggaagacatggaggaaaagagtctaggacaaacataggttttagttgcactgggatatttccagttgtatttcattgctgtgttaccttgaacatataatttaacatctctaggccctaggaacctcatctataaaatggtaataattttcccccaggattactgtgggaaagttctgcataaggcataaatcaccatgagaaatatacagccttgatgggaattgaaaaagtagtatttggaaaatgtggagtaaattggaaaaatattaactattttttaaattgaaaata

SEQ ID NO: 283315 - DNA, 537 bp, Homo sapiens
tccaggactcaatgcaaaaactgaagctggtaatatttagcctagcaaagtagagccaagcatcacagtaaggtttatggagaatccaatcaagagattgaagatctgggtttggatcgtatccttgtcactaagtagctgattaggactcccagacatccaactataagaagtttaatgtagggaatgtattagctcctataactaaaacgtccagggactggtcttcagacacagctaaatcaaggagatccaaccatgtkgccaaggctctgtgtttctccctcctgtgcttggaccttctttacttttttttttttaatttaaaattatttgtgtatttatttttaaattttactttatgttctgggatacatgtacagaatgtgtaggttttttacataagtatacgtgtgccatggtggtttgctgcacctatcttaaaattcataaaatttacagaaaaccattaagaaattttattctctctactctccattctgcagtttggactactggggccttgtgatttaaatg

SEQ ID NO: 283316 - DNA, 618 bp, Homo sapiens
tgcagtttggactactggggccttgtgatttaaatgacttttctaaagtcatgattctgctaagtgccagaattgtaagacaaatctgttttctacctaattcataactagttctttccagaacataatgagctgaacattcagttcatgcttgaatctagaaaattatactatatttttacattaatctggatataccataggtgttttaaactcccggaagataactatatgttctactcatagctaacatttattttagtgctattatgttatagacactgttctaagtatttcacatctatcaaataatttaaccctcagattagtcctatgagatcagttctattattgctatcttcatttaacagatgaaaacatggaggttcagagaggctaagtaacctgcccagggtctcagcttcaaagtgaaggttggtgcttaaaaagcctatgctcctaacstatgcatactaccgtttacatataataatggcccatgatggctggagtaatacataagtccaattctatagtaatcagcaataatagagaatttttccaaactttagaaaatgttttcaaataattgcctattgaattacaaactggacaatt

SEQ ID NO: 283317 - DNA, 1145 bp, Homo sapiens
ttctgctggaagaaaaccttatacttacccaaaatacaaattgatcagtgaaattagtcaggtggttgtaggtgagcaaacatatcttttccctctacccatcttaggttcattggctgagrtttcatgacaaaagattaacaagataaaaacatacaatttatttaatatacattttacatgacatgggagccttcataaggaaatgaagacctgaagaagtggttaaacctgagcatttttatactaggtttgatgaagtgtggaaattagtggagaaatatgataggagaaaagggtatgagctataaaggggaaactaggaaaacctagcaaggcctgtgggttcagattcctctcacctgacaatctgtcttctgtgataaggatgctcctttcctccaggtatagagagggcatcgctcagatgtgtgtcttatgacctccttcagagaaaggtcagagaacctttcctgcacctgccatttctcaaattccttcatcttctccaataccaggtwaatatatctaatgcttttttgttatggaaatatttaaaagaaaacaaaagctggctcctggggaatgatttttctctcttgggtaattaaccaatacaaagtcaactggagaccaccaggtgtgaagtgactcttcacctgtagcaagatcaggtgawattcaaagtaagcctcctttgttgctgatgaacatacatggaatttggggtagtagatccatcactgccttcctagacctggcattaataatttaaggctagaactttactcatgccttttgataaaggtgagcagaacaaaatttcttctgcccaacaatgcccaaaactccttaaagactcttttttcccctatgtctcagccacacttgcttcgacctaaatctatccttctaaaagttcggccctatttcatccctgcagaatcattaaaaataaacctattctctctttcttcttcaaatgaagacagctggctctagagagacacgcctagtcctcttggccgtttctgatttagatgttgccaagttctttagtcatttttgacttactttctctggaacaagctgtaatttgtttgtttttccaaaagtataatcatgagatctgaatgtgatatttt

SEQ ID NO: 283318 - DNA, 624 bp, Homo sapiens
aatatatctaatgcttttttgttatggaaatatttaaaagaaaacaaaagctggctcctggggaatgatttttctctcttgggtaattaaccaatacaaagtcaactggagaccaccaggtgtgaagtgactcttcacctgtagcaagatcaggtgaaattcaaagtaagcctcctttgttgctgatgaacatacatggaatttggggtagtagatccatcactgccttcctagacctggcattaataatttaaggctagaactttactcatgcyttttgataaaggtgagcagaacaaaatttcttctgcccaacaatgcccaaaactccttaaagactcttttttcccctatgtctcagccacacttgcttcgacctaaatctatccttctaaaagttcggccctatttcatccctgcagaatcattaaaaataaacctattctctctttcttcttcaaatgaagacagctggctctagagagacacgcctagtcctcttggccgtttctgatttagatgttgccaagttctttagtcatttttgacttactttctctggaacaagctgtaatttgtttgtttttccaaaagtataatcatgagatctgaatgtgatatttt

SEQ ID NO: 283319 - DNA, 516 bp, Homo sapiens
cagtcatattggattggtgttcctatgacctcatttaaccataatcaccccctcaaaaatcctattttcaagtatagtgacattctgaggtagtaggggttaggacttcagcatattaatgggttagggagacacaattcagctcctaacaaaggtgattgtataataaaatgmaatagtgctagtaaagcattcccagaatatatggactttttgatatgtctccaacatgtagagtatttcctggcacgcaatatgttcttcgttaattaatatctgttgaataaagaaaatgaaataaagtaaactgttttgctaattaaatgctaattaaatattagctcctttctttctctcctaaatctcttaaatttcattttgctgacagatctcaaattattctctacatgaatgtgtggtgcactctgttcatggaaaactcagcacgatcagagagtgtgccttgttttattccatccttccaaaatgcttagtgaaacattgtacacatggaat

SEQ ID NO: 283320 - DNA, 516 bp, Homo sapiens
cagtcatattggattggtgttcctatgacctcatttaaccataatcaccccctcaaaaatcctattttcaagtatagtgacattctgaggtagtaggggttaggacttcagcatattaatgggttagggagacacaattcagctcctaacaaaggtgattgtataataaaatgcaatagtgctagtaaagcattcccagaatatatggactttttgatatgtctccaacatgtagagtatttcctggcacrcaatatgttcttcgttaattaatatctgttgaataaagaaaatgaaataaagtaaactgttttgctaattaaatgctaattaaatattagctcctttctttctctcctaaatctcttaaatttcattttgctgacagatctcaaattattctctacatgaatgtgtggtgcactctgttcatggaaaactcagcacgatcagagagtgtgccttgttttattccatccttccaaaatgcttagtgaaacattgtacacatggaat

SEQ ID NO: 283321 - DNA, 527 bp, Homo sapiens
gattcctctgttcagaaccctcaaatgacttcccatcttgctcaaagtaaaatctaaagtcatcacaaagaccttatagccctatgaaatctgttgcctctttcttacctggcttcacctcacctactatactcacccttccttacactggcccgcttgctaccattcctcagagacaccaggcacrctcctatctcaaggcctttgcccttgctggtggtcactctttctaaaatgttcttcccacagaaatttgcacagcttgcttccttgcttcagatctttactcaaatgccatctccttagtgaggacttcctgaccactctatcagaaacttgcagtcatacacacaatttctatctccctcccctacttcagttttctccttggtgctttgtcactatctaatacactgtatatttttatatttctcatatttaaggtctgtctcccccattagaatactgagtcaagggagctttatctactttgttcactgctctatctccagcactaagaataataa

SEQ ID NO: 283322 - DNA, 495 bp, Homo sapiens
tggtagaactggcattccagccaaagcctactgggtcttggcaccatgctatttagtttttgtcagtggtattgagagcacagcatacgtgagaagagatctgatcattacctggtatggcaggctttagtcttgggaataaaagcaaatgctgcgttcttcccctccactgagagatacacactccattagtttttcatttgccagaagcatcagttttttaatattttctctttcgttttatctcaggggaatatcaatctgtacagatttattattaattccctggtaacatgcttagctgctcaaaaattttttactgttgcttgtaaaagaagacctgcctgttcttgaaatttcagggactgcaatcactctggatgaaatattaccttaagagacattataagaagaagagaagagyacaggataaagaactcctctacctcccacccatctgccttttctctggaacaagcaatagctactttagtg

SEQ ID NO: 283323 - DNA, 593 bp, Homo sapiens
ctggtgctggagatgtaacctctgcctccatggaaattatggtctactggaagacataaacattaagcaaataaacacactaagaactttataaaactacagaattaycacaccagctaattaagctgcatgaatatggtgggatgcaagcatgaaatagttgtgtttttctctagtctgtgctttctgtatatttggtgattctttctcactccttaatgacctttaggggagcttcaataacttcccagttaccatctggcataaaaaattccaatccagttcaggtcaatcgagaagttaattctcttgtctgatccacattttttttccctctcccagttctggcctgattttcgatgaaaggggcctgattttcgatgaaaggggcatggcactgggaagggaggcatggtcttttttattccttttatcctgacttactttgtcgctttgggccccatcagtagagtgtgggtttgggggaatgtaaggaaggagaattacagaaaagagtcaaaagattttttaatcaactagtgctatgattggtagctccacttcagctccttcttctacctcccgtggtatgc

SEQ ID NO: 283324 - DNA, 586 bp, Homo sapiens
ctcccacttacggggcagaagctctagtccaggcagcaggcagagctcatttgtagcaaaggggctccayactaagagggacaagccaaggagaccagagtttgtttgcacctctccatgcccactcatagtgatggattgtgtcactctgggaaaagcagttctgcccctagctctggggcagtgtcacagggattcttcccagggtaaaggcaggccataaagacaaattactccatagctctgcctaaagggactttatgtggaacagaaagtggagagcccatgcccaaccttggtggagaacacttaagaggagagtggcagttccatgatacaggcaaaatggcagagtagattattcaaaaaacaaaataaggaaagaaacagccaagaagagcgtttttaagatctcagtcaactcgggatcaggaaggctatgtgcacagctaggctgcacccagttgggaacactcagagcagaatgtagggtagtcttacaaacattccccaagaagcacatagccatcaacacaaggcagaagcttcactgccgtggaagtgttaaatacaacctttgaccaaa

SEQ ID NO: 283325 - DNA, 586 bp, Homo sapiens
ctcccacttacggggcagaagctctagtccaggcagcaggcagagctcatttgtagcaaaggggctccacactaagagggacaagccaaggagaccagagtttgtttgcacctctccatgcccactcatagtgatggattgtgtcactctgggaaaagcagttctgcccctagctctggggcagtgtcacagggattcttcccagggtaaaggcaggccataaagacaaattactccatagctctgcctaaagggactttatgtggaacagaaagtggagagcccatgcccaaccttggtggagaacacttaagaggagagtggcagttccatgatacaggcaaaatggcagagtagattattcaaaaaacaaaataaggaaagaaacagccaagaagagcstttttaagatctcagtcaactcgggatcaggaaggctatgtgcacagctaggctgcacccagttgggaacactcagagcagaatgtagggtagtcttacaaacattccccaagaagcacatagccatcaacacaaggcagaagcttcactgccgtggaagtgttaaatacaacctttgaccaaa

SEQ ID NO: 283326 - DNA, 586 bp, Homo sapiens
ctcccacttacggggcagaagctctagtccaggcagcaggcagagctcatttgtagcaaaggggctccacactaagagggacaagccaaggagaccagagtttgtttgcacctctccatgcccactcatagtgatggattgtgtcactctgggaaaagcagttctgcccctagctctggggcagtgtcacagggattcttcccagggtaaaggcaggccataaagacaaattactccatagctctgcctaaagggactttatgtggaacagaaagtggagagcccatgcccaaccttggtggagaacacttaagaggagagtggcagttccatgatacaggcaaaatggcagagtagattattcaaaaaacaaaataaggaaagaaacagccaagaagagcgtttttaagatctcagtcaactcgggatcaggaaggctatgtgcacagctaggctgcacccagttgggaacactcagagcagaatgtrgggtagtcttacaaacattccccaagaagcacatagccatcaacacaaggcagaagcttcactgccgtggaagtgttaaatacaacctttgaccaaa

SEQ ID NO: 283327 - DNA, 443 bp, Homo sapiens
ggatcaggggtgattgttttcttctttggtgtgtccagattttaggcagataaggaaacttcagagtacaacttcttcctgtggtttgggagagacagaggattgagatagagcaggggaaggtcagaaagaccttgaggcattttyttcagttcagctcgtcaaagtaccatgtttctgggtaacaatatctgcgccccaaaacattctccaccaacaatcaatgagctgttttctaagatttgtttttctatctcagggtaggaattaaatcctaattattcttacatcccaccaaaaaaaaaaaaaaaaaaaaaccctccttggactcttttaaccggttgatcaaaattttcctcttaaatgaaattgaattaaatataattgaatgaacaaaatgttctccttgccaaaggaaattaaaacccactgcattgaccccc

SEQ ID NO: 283328 - DNA, 443 bp, Homo sapiens
ggatcaggggtgattgttttcttctttggtgtgtccagattttaggcagataaggaaacttcagagtacaacttcttcctgtggtttgggagagacagaggattgagatagagcaggggaaggtcagaaagaccttgaggcattttcttcagttcagctcgtcaaagtaccatgtttytgggtaacaatatctgcgccccaaaacattctccaccaacaatcaatgagctgttttctaagatttgtttttctatctcagggtaggaattaaatcctaattattcttacatcccaccaaaaaaaaaaaaaaaaaaaaaccctccttggactcttttaaccggttgatcaaaattttcctcttaaatgaaattgaattaaatataattgaatgaacaaaatgttctccttgccaaaggaaattaaaacccactgcattgaccccc

SEQ ID NO: 283329 - DNA, 632 bp, Homo sapiens
aaacaaccttaagatctttgaagaagaataaaagacttttaggggtcttatacataatttagtataacctcactagttcttgagtaaacagtaccttcaagtgtagagattgagagtgtgggtgtttgaataaaatgaactcaggttgtagtcctgttcctgaaacatgctggttttgtaaggtaacctcaaaaatgtcaactattctaataatgtagagtatctgctgagcacttattatctgccaagtattatttataaacttaaaaaattatttcatctaattttattattaatgaccatactctgaggcagttacaagaattatctcattcrctaatgagaaacttggagtacagagaagacaagtaacttgctcaagctgacactatcagtaagtggtagagtcctaattcaaactgtcttaaggcacttgagggttatgtcacaataccgcctcggttttcttactatcaaaaataaagaaaataatgatatttgtttcttagaactgtgagaattaattgaaagggaatacataccaaattcatggcatatagaaagcactagaaaattttaactaaagttacttaaaattaattttcatgttagctacttttaaatatgaagat

SEQ ID NO: 283330 - DNA, 580 bp, Homo sapiens
cagttacaagaattatctcattcgctaatgagaaacttggagtacagagaagacaagtaacttgctcaagctgacactatcagtaagtggtagagtcctaattcaaactgtcttaaggcacttgagggttatgtcacaataccgcctcggtttycttactatcaaaaataaagaaaataatgatatttgtttcttagaactgtgagaattaattgaaagggaatacataccaaattcatggcatatagaaagcactagaaaattttaactaaagttacttaaaattaattttcatgttagctacttttaaatatgaagatactcttagctcatcactgcagtttaataattgcttagatgctttggtttctcctgcaatgatttcatcatcatttagtgttctaagtgcaatttgctatttatagaagcatttatggcttcttataattattaacataccacctatgctagctgtaatgtttttcccttttgaaagttgtttgttgtaactttatataaatccagtattaactgtttgagagccttattgccaaatgaaacaaaatattcttctagatta

SEQ ID NO: 283331 - DNA, 368 bp, Homo sapiens
ctgtgagaattaattgaaagggaatacmtaccaaattcatggcatatagaaagcactagaaaattttaactaaagttacttaaaattaattttcatgttagctacttttaaatatgaagatactcttagctcatcactgcagtttaataattgcttagatgctttggtttctcctgcaatgatttcatcatcatttagtgttctaagtgcaatttgctatttatagaagcatttatggcttcttataattattaacataccacctatgctagctgtaatgtttttcccttttgaaagttgtttgttgtaactttatataaatccagtattaactgtttgagagccttattgccaaatgaaacaaaata

SEQ ID NO: 283332 - DNA, 633 bp, Homo sapiens
gttatgtcacaataccgcctcggttttcttactatcaaaaataaagaaaataatgatatttgtttcttagaactgtgagaattaattgaaagggaatacataccaaattcatggcatatagaaagcactagaaaattttaactaaagttacttaaaattaattttcatgttagctacttttaaatatgaagatactcttagctcatcactgcagtttaataattgcttagatgctttggtttctcctgcaatgatttcatcatcatttagtgttctaagtgcaatttgctatttatagaagcatttatggcttcttataattattaacataccacctatgctagctgtaatgtttttcccttttgaaagttgtttgttgtaactktatataaatccagtattaactgtttgagagccttattgccaaatgaaacaaaatattcttctagattatatccagaatgattaaaaattagcaggcttctgttctatgttcatacatgtggtagatgtctcatatgtgtgtatatatatacttatatgcagactctgtgtttgtgtgtttgtgtacgtgttacatctatatttggcagtataggaggtggtatagtgagttttctatttgtcttgctc

SEQ ID NO: 283333 - DNA, 544 bp, Homo sapiens
actattcctgaatagtatatgactactgtttccctaattctgacaactgtacacaataaatactctataaacaggagctgctcaccaacataataatcaaatatataagcaaaattattttattttaaatgttgagaatatggtatgtgtaattcaaaaacttgaggcaaatccaatattacataacccctagaacttgagactagcaaatgcttatgtatatcaacatgaacacatcatactgtggcacatgctaaggtaggtacctttcaaaagggccatttatctcatatgagaaacatgtcaacaaagagaaaaaaaataaagaagktcatttgaatttatgaccacaaataaccccctcatcataaacaaacctgatcatttcatctgttattccaaaataaaaattctccaaatggatgagaaaaccaattttgtatacaactagatcctgtactctaccaccttaccctttccttctaaaagtgctcagtgagtatgtaacgcagagacgatatagaaatgagtaagataggatcac

SEQ ID NO: 283334 - DNA, 486 bp, Homo sapiens
tccaggtgagagatgatggtacctgccctagagtaaccccaatggagatggagggcaggaccccgtcagggtatattttggagataaacaaaacaaaacaaaacagaaacagtggaacatgctgatggattaaatgtgtgggmccagggaaaaaagtcaaggatgagttccagcccggaatgtccagaataacccaggaggagggatgtaggtggtggtggaaaataaacaagtttgcccatagttgatccctgttaaagctgagtgatgagtacatggggttccctttgctattttgtcacttttttttatgctttaaactgtcccccataaaagggttttaaatgcccaaaaaaaaaaaaaaaaaaaaaacccaataaaaataaaaagagaaaggaatatggccatgaaaagatgtaaggcttggtgttctggtggccattttgtaattatgagagcaaaccaggccaatagcagagagattgc

SEQ ID NO: 283335 - DNA, 486 bp, Homo sapiens
tccaggtgagagatgatggtacctgccctagagtaaccccaatggagatggagggcaggaccccgtcagggtatattttggagataaacaaaacaaaacaaaacagaaacagtggaacatgctgatggattaaatgtgtgggcccagggaaaaaagtcaaggatgagttccagcmcggaatgtccagaataacccaggaggagggatgtaggtggtggtggaaaataaacaagtttgcccatagttgatccctgttaaagctgagtgatgagtacatggggttccctttgctattttgtcacttttttttatgctttaaactgtcccccataaaagggttttaaatgcccaaaaaaaaaaaaaaaaaaaaaacccaataaaaataaaaagagaaaggaatatggccatgaaaagatgtaaggcttggtgttctggtggccattttgtaattatgagagcaaaccaggccaatagcagagagattgc

SEQ ID NO: 283336 - DNA, 486 bp, Homo sapiens
tccaggtgagagatgatggtacctgccctagagtaaccccaatggagatggagggcaggaccccgtcagggtatattttggagataaacaaaacaaaacaaaacagaaacagtggaacatgctgatggattaaatgtgtgggcccagggaaaaaagtcaaggatgagttccagcccggaatgtccagaataacccaggaggagggatgtaggtggtggtggaaaataaacaagtttgcccatagttgatccctgttaaagctgagtgatgagtacatggggttcmctttgctattttgtcacttttttttatgctttaaactgtcccccataaaagggttttaaatgcccaaaaaaaaaaaaaaaaaaaaaacccaataaaaataaaaagagaaaggaatatggccatgaaaagatgtaaggcttggtgttctggtggccattttgtaattatgagagcaaaccaggccaatagcagagagattgc

SEQ ID NO: 283337 - DNA, 591 bp, Homo sapiens
tgtgaccgagtgtcagtgtaggtgttacaggcctgcagatgaccaggaagtctagggcacycaagaaggtagagagaaggggcagctgagcaagaacttcagaagataagatgtgcaaagggcattaccaccattaggggcaacatgggcaagggctcagagaacaaggtgggcgagagtaagcaagtggtccagtagaccaaacggaaggagaaacttgcttggaggcagtgtagtgacagagaagtttacagttatttcgaagccaatactgagccattaaaggcctgttggaaacaatctgaacaaaataatgtttcaggaaagttattctgatgccgcagtggattggaattagttatcaggcttctccagtagtctaggagtgatatgaaaagagcacgaattagggcggtagcagtggaaatgaaaaaagtttgcacaatcttctataactctcttcatatacgtaagataatttatgatttttatgcatcaatcaattaacataccataaagctcttaagaaattagatccttaggcagaaaatttaggatcttggatattgcattcaccataatgaaattata

SEQ ID NO: 283338 - DNA, 600 bp, Homo sapiens
accagcccttcccctttccagacattttagctgttcttgtgtgtttacagagaggggcccaagggtcagagtactgcccaggggtattctcaagagtgaacccaaaccccatttctggagatctgtgcactttccttctctctctccactcatcatgtggctgagacaagataaaatgaaactgtctaccagggtcagcctggcttccaggatgtgtgaattcccrcagaaccctctttgtgttgataccctctgtgcatagtgtgggcttatttgccattggcctggcaatttgagaatttggctctcacctgcagggcagatgtcagagtcaggagtaagagctatttttccatttcattggcttgctctcatagggtgtgactgagcactcagccttggtgggaggaagcacccctccatgcctagtgctggttgctgaggcgtgggggctagtggaactgattccttgggtgcctggtgccaggaagaagcagtgttggggtgtacccaggtcaggaatcacagatccatgcagcaagttatgaggccctcttgaatcttggcttcttcccgtgtaaaagacagacaagaatattc

SEQ ID NO: 283339 - DNA, 586 bp, Homo sapiens
agcaacatcagcatcacctgggaatttgttagaaaaggaaatgcttaggtcacgtattggacattcttaataaaaaaccttggggctggggtctaagctgatgtgttttaacaagtcttctaggtaattctcatgcaaactaaagttgtataactgtcttagaacycacctcaccagcagaggcccatttcttagtccaataaacactgctgtactcttcaacaaaacagatgttgaagaaaagaataaatgttaaaatgagtcatagtctgtgatagagtcttcagtatgtcttagattctcacccagcagtaactagaaacaccaaacctgggcatattagacccacgtcagacaaggcgttcttttactagtacttggtcacaatatactgccattactcttaatcactgactcacattttatgccccaacttcagaataagtgtatagagctgacatggagctccctgttctgtggaaatacaaacaagcatgggaaataccacctctgaagatcatttaattagctcaaactacaaaatgaaacctagtatgattgttgaaaatgcttcagaatggaaaac

SEQ ID NO: 283340 - DNA, 646 bp, Homo sapiens
aattcctctcgttgtactctttctctttatttctcagccggctgacacttacggaaaatagaaagaacctacgttgaaatattgggggtgggttcccccaatatgagttcatactgatgtctctaattctartccataaccacatggattgttcatgtgattaacaactcatttttaataacaatatcatatttggtattttgtgccaggtacagtgccaagtcatttacaaagatggcctaatttgaacctgaacaaaactttatgggtaaatactatcactcacatttaacagatgcagaaactgaggcactgaaagatgaagcatcctgcctaaattcacacagtaagtggtgggggcagcgtatgagcctatgtctttgagtctccacatcccttcaatgatagagaaccactatctcaatattaagactgaaaaaacttcagttctgagcgatttaagatgcagatgtagttcccagctctcttcaggtattgttctgctcaaatcttacctcctcagtgtttctccctaccccgacccccccagggtcctgtccccatctgacatgctaactggaagacaagttgccaagttacaacccaacctgacagctcaagaaaaggatgtcagtacaatggcaag

SEQ ID NO: 283341 - DNA, 348 bp, Homo sapiens
tgattaaaaaaatgtctacaatcaaatcaggttggggattcatatgtgatatttccttagagattctcagtgcacaccagcatattaaagtcccaattgttacatcacagaaacctgtgtactttgttcaactttacatttcctaaatttatttgcacaaatagcttctttcaaataataccttttaacatctttttaaactcctctgggaaacactgatttaaggcaacatgacaattatatgttaggtgttatggcaataatgagggggkcctaactaccacaactctgggtgtgaaacaggtaagcattcaggattgccttcctggagtaggtgacccctgaatt

SEQ ID NO: 283342 - DNA, 574 bp, Homo sapiens
gcacaaggtttgtttcctaagtgaagccctaccctaccttcagaaccartcaagctgaccagaccttgggctcacatattggccagcatatatcttcaaaatgatacttctcagagcagggaaggggtctcatgctcttattcttctctgtgcctgctgtggagcaccacataagtccacagcacacactgggttttctcttgctcctcgcgcagtcttggtgcctaatacagtgctacatacaatcaaccagagaccaagagggaggtctgttctatgcaagaagcagaagcttagagttagacagtcctgggttcaaatcctggctctcctgtgtgacctggcagatgcctcctaaccttgctgggagtcagtttcctcatctgtaaaatggggataatgatgtctaccttgcagagagatggtgaggattcaacaaggatcctggcacacagtgaatgctaaataattaaatgagtatgtatataacatatatgttatgtatattaatatatcagatactaataaggatgaataaagactgtatttccctggaaacttgttcttaggcact

SEQ ID NO: 283343 - DNA, 574 bp, Homo sapiens
gcacaaggtttgtttcctaagtgaagccctaccctaccttcagaaccaatcaagctgaccagaccttgggctcacatattggccarcatatatcttcaaaatgatacttctcagagcagggaaggggtctcatgctcttattcttctctgtgcctgctgtggagcaccacataagtccacagcacacactgggttttctcttgctcctcgcgcagtcttggtgcctaatacagtgctacatacaatcaaccagagaccaagagggaggtctgttctatgcaagaagcagaagcttagagttagacagtcctgggttcaaatcctggctctcctgtgtgacctggcagatgcctcctaaccttgctgggagtcagtttcctcatctgtaaaatggggataatgatgtctaccttgcagagagatggtgaggattcaacaaggatcctggcacacagtgaatgctaaataattaaatgagtatgtatataacatatatgttatgtatattaatatatcagatactaataaggatgaataaagactgtatttccctggaaacttgttcttaggcact

SEQ ID NO: 283344 - DNA, 574 bp, Homo sapiens
gcacaaggtttgtttcctaagtgaagccctaccctaccttcagaaccaatcaagctgaccagaccttgggctcacatattggccagcatatatcttcaaaatgatacttctcagagcagggaaggggtctcatgctcttattcttctctgtgcctgctgtggagcaccacataagtccacagcacacactgggttttctcttgctcctcgcgcagtcttggtgcctaatacagtgctacatacaatcaaccagagaccaagagggaggtctgttctatgcaagaagcagaagcttagagttagacagtcctgggttcaaatcctggctctcctgtgtgacctggcagatgcctcctaaccttgctgggagtcagtttcctcatctgtaaaatggggataatgatgtctaccttgcagagagatggtgaggattcaacaaggatcctggcacacagtgaatgctaaataattaaatgagtatgtatataacatataygttatgtatattaatatatcagatactaataaggatgaataaagactgtatttccctggaaacttgttcttaggcact

SEQ ID NO: 283345 - DNA, 650 bp, Homo sapiens
tggttgagggaaccttgatttatagccagtcagaagcacaaataacaacctggggctttctttgttttttttktttgtttgtttgttttgagacagcgtttcactcttgtcccccaggctggagtgcaatggcgtgatgttggctcaccgcaacctccacctcccgggttcaagcagttctcctgcctcagcctcctgagtagctgggatgacaggtgcttgccaccacgcccagctaattttttgtatttttagtagagacgggatttcaccatgttagccaggctggtctcgaattcctgacatcaagtgatccacctgccttggcctcccaaagtgctgggattacaggcgtacgtcatcacacctggccctacaacctggggcttttaattggtatctggagtgcgggcagtcttgtgggactgggcccttaacctgtagggtctgatgctatcttcaggtggatagtatcagaattaaattgaattataagacactcagttggcgtccactggagatttgcttagtatgtggagaaaaacctttacacatctggtcacagaagtgtgcaacggtgaaaaacagtttgtgctttcaaatttgaatttcatataattttcatgtgttacaaagtatttttttcattg

SEQ ID NO: 283346 - DNA, 563 bp, Homo sapiens
cagaaggggctctgccccctaccctggaggaaggaatgttgcacagagaggccaagagaaatgtgagcagacaggccttgctgggttcccccgttcagtctgttggtattagatcatactttttttgtctaatcacatttctacatggttgtcaatcatgcctatctaatgaaatctccatcaaaggcccaagagyacaggattcagagagcttccagatagctggacacgtggaggttcctggaggatgttgctctcagagaaggcatggaaactttgcactcctttctgcatcctgtaccctatgcatctcttctcttcatctatatccttcataataaactgggaaacgtgtttctcggagttctgtgagcagctctggcaaattaattgagcccaaagagggggtcatgggaatggcaactggaagccagttggtcagaagttcccgaggcctgaacttgcaactggtgtgtgtatgggctggggggggggggggggcttgtgggaccgagccctcaacctgtggggtctgatggcatcttcaggtagatagtgtcaga

SEQ ID NO: 283347 - DNA, 399 bp, Homo sapiens
ttgtcacccaggctggagtgcagtggcccaatcttggctcactgcaacttccacacacacaatcccacaaggctcaagtgatcctcctgcctcagccctttgagtactgggaactacaggcgcgcgccaccatgcccggctaatttttctattttttgtagggtttcgccatgttgcccaggctggtctcgaactcctggactcaagcgatccacccactttggcctcccaaagtgctggggttgtaggcatgagccaccacacccagccatccagcccttctaaatagccatcgtgaactatgtccaggaaatatrtattttgagataaagtattttgatttcctttaatctcaaatgcatcagtatgtattttctctctaaccccttccccttccca

SEQ ID NO: 283348 - DNA, 516 bp, Homo sapiens
tattggagctaaagagagagctagacctcaatacaataatatctggagtcttcaacactcccctttcagcattggrcagatctcctagacagaaactcaataaggaaatattgaacttaatctgcactatagatcaaatgaacctaatagatagttacagaacatttcatccaatgtctgtagaatatacattcttttcctcagcacattgatcattctcaaggatagaccatgtgttaggtcacaaaacaagtcttaaagcactcaaaaaactgaaatcatatcaagcatcttctctgaccacaaagaaatacaattagaaatcaacaacaagaggaattttggaaatcatacagatccatggaaattaaacaatatgctcctggatgactagtgaatcaatgaagaaattaagaagaaaattgaaaaatttcttaaaacaaatgataatggaaacacagcatagcaaaacctatggaatacagcaaaagcagtactaaaagagaaatttgtagc

SEQ ID NO: 283349 - DNA, 1027 bp, Homo sapiens
tattggagctaaagagagagctagacctcaatacaataatatctggagtcttcaacactcccctttcagcattgggcagatctcctagacagaaactcaataaggaaatattgaacttaatctgcactatagatcaaatgaacctaatagatagttacagaacatttcatccaatgtctgtagaatatacattcttttcctcagcacattgatcattctcaakgatagaccatgtgttaggtcacaaaacaagtcttaaagcactcaaaaaactgaaatcatatcaagcatcttctctgaccacaaagaaatacaattagaaatcaacaacaagaggaattttggaaatcatacagatccatggaaattaaacaatatgctcctggatgactagtgaatcaatgaagaaattaagaagaaaattgaaaaatttcttaaaacaaatgataatggaaacacagcatagcaaaacctatggaatacagcaaaagcagtactaaaagagaaatttgtagcwtcaggctggagtgcagtggtatgaacatggcaacacagctcactgcagccttgatctgctgggctgacacgatcctcctgcctcagcctcccatttagctgggaccacaggcgtgtgccactgcacgtggctaagttaaaaaaaaawttttttttgtaaagatggggtctcactttttttgcccagactagtattgcactcctgagctcaagcagtcctcctacctcagcctctcaaagtgctggaattataggcatgagccactgtgctcagcctacatgcatttttaacttatggaaatggtattgtattatatatctcctcctgggttttacatttttccactcaatgcttatgtatttaaaactcatctatgccacttagcctacatttaagctgatgctgctcaccgtggtattagactccaacatagacacccaccacattttacctgtccactctcccaaggataagcacccagatagcctccagctccttgtcacccagagc

SEQ ID NO: 283350 - DNA, 510 bp, Homo sapiens
tcaggctggagtgcagtggtatgaacatggcaacacagctcactgcagccttgatctgctgggctgacacgatcctcctgcctcagcctcccatttagctgggaccacaggcgtgtgccactgcacgtggctaagttaaaaaaaaaattttttttgtaaagatggggtctcactttttttgcccagactagtattgcactcctgagctcaagcagtcctcctacctcagcctctcaaagtgctggaattataggcatgagccactgtgctcagcctacatgcatttttaacttatggaaatggtattgtattatatatctcctcctgggttttacatttttccactcaatgcttatgtatttaaaactcatctatgccacttagcctacatttaagctgatgctgctcaccgtggtattagactccaacatagacacccaccacattttacctgtccactctcccaaggatragcacccagatagcctccagctccttgtcacccagagc

SEQ ID NO: 283351 - DNA, 604 bp, Homo sapiens
tgcctggctcatttttgtatttttttgtagagaccatggttttgacatgttgctcaggctagtcttgaactcccagctcaagtgattggcagccttggcctctcaaagtgctgggattacaggcatgaaccactgtgctggccatgaattatttttgtggtgtatttagctatgcttcagagattcaaaacccagaagcatataattcaaaagaagtaaactgctggctttaattttaatgagctgtggtagagtgtgaaatggtgtgattttcaaaggcaatttcaaggactgttttagtatcaaagatattcttcagaacagcctaagtggctttgcttatcatgtgactctggattccagtctgttttggtacaaggatttagcaaagtcatgatgttctcagatgctgggcatgcaagtggttataaaaaaggtcaaaactccaggacaattcaaaatattttacacttccaagcttaaaatttcccayatctttcttgttaccaaaatttttcacatttgtgaaagcaaagtcctcattatctgcaccaaattttgatccaaatgattgagatattgcaacacatgatactacattatt

SEQ ID NO: 283352 - DNA, 1073 bp, Homo sapiens
ttttcatgtttatgtgactacctctctttctaccctccctgatgatttgcattttctctctggaaagagatttttgtgttaaaggtaccatcctcagctatactgaagatattatactaaacacaggtggattaaggaaagtgagacatcaaacagtgagaagcctcatacaccctgtcagatgagtggaagatttctctctaaggaaaagaacaaacccaggagaaaagccacacaaattctgatcctctaggaaaccacacacamaaaaaaaagtctcatttggatcactcatcttacaggaaagtctaccaatgggcagccctacccacataattgtacaaatcagcttctcagcactataatcttaaaaataaagcgatagccaagctcatcagcaatttggagaaatttaaagttgaacaagttttaaaaaaacacataagggccaggtgtggtggcttatgcctgtaatcccagcactttwcaacccaagataagatctaagtgtcttggtaaacaacaggtctcattaggctctttgaagctgtggtctgttgatgagatgtttcaaagaggacagagactgtgttgtttttgttgttagtggcggtggtaatggtggtggtgatggtggtggtggtggttgtgatacacatacagaaacactgcaattgacaaaaatcaggtggaccctcacagaactgagtgaaatgcttgtccaggcattactaggatttatattttcacagttgctcttttataagacctaacattgccaacagtgccccatcatagctctctaacataaactgtgataactaaagcccgaaacatttcattttttataaaactatctaaacttaggcactcagattatttcatatgagttctatttgaaacgtctctagaaattttctaggatgaaaataaatctgataatttttatttawcaaggaaataggcttgtcagttctctattatccacatccggggaaattgagaatgatttcaaagaatcatcaagcccttggaatttggtttaagaaaaacctcaaccatacagcagtgct

SEQ ID NO: 283353 - DNA, 593 bp, Homo sapiens
gtttgacctaaaattttcctttatggttcaggaagccctccttatagaaccttcccataacatggaacctgctcagtttaagatttaacagagcaattctttcctgacatccaagcctcctcacatttttaagtcacaagccctaaaaactgatactaactatatcaggcttcatgcrtattttaggaaaatttgtgaatttttgttcttcgcatgattggaaattgagacaacaatgttcttcttttatctagttaggtaagtgagatgatcccatcttcatcctaaattcagtctcttatgatcccgaccctaggtaattttttctttgatttcacattgagagacagaagtgaagataaagaatccttataaactttagcccaaaaggaaaatgaatttaatccacttgtttttatttattctggaaacaggtattctaattagtgaattgggagctctctcatgtgcttctctgcagaaagctttcaaggaaagattcagctccacttgattatctatggaaccagagttgtgaatagatgactaatggagaatgtcttttgacttggctctcaagttgcattcatcac

SEQ ID NO: 283354 - DNA, 532 bp, Homo sapiens
cacaggaaagaatgaagtagagaaaatggaacaatccctgcagaagtcagaaagcagaaaattcctcaattcctcagagaacattcaccctttccttttctgctgccttcatattcccctgcaactacttagtagttataaaagtgttactgaaagcttactctgtaggtaaatcaaatgttctcctaaataggcccaaaaccaaaactttctttgcccagcagtgtctcagaaccatattrggattctaacattccacatatttgcatctatttttacccccagaaaaaataagacaaaccagatatgaagtcaactttccattgacattttttccagcattaaccaagtagtacttttctttcttaaaatcttcttgctatcaggacacatggacatgagactgccagaatttaaccaagcaatgtcaaaaatgtgagaaaatataattgtatcatttgtgcagaaaaagtacagaaatttttctacatcttcatctcattagaaatttgtttatcaggatagaatgaac

SEQ ID NO: 283355 - DNA, 634 bp, Homo sapiens
tggcaacttggtggctatttggtgactttgctaagagcagtattgatgaaatgatagagacaaaataaagactggaatgaatgaaatgaggtaaggaagtatagatttcattagagattattctccacagacatttatttgttaaaagaaacagagtattaggacattagctcaaaaagaratgtgactaaaaatttttgctttgctgtgttttgtttttaaaatacaaccacatatttgcatgttgatggaaatgtttgagaagactggaagagatagctggtgtaggagaaaaagataattccagagacaaaacccttatgaagacatgaggggatcatatttgataacatggatttgcctttaataaaaggacctaagaagaagagagtgggttcagatgcaggtagacttgtggttgtggttttaaatggcttttattttctcagtgaagtatgaagtgatagtaccagttagctggaacttaccaactagaattgcttgtcttctgtgtcttactatctgaagcttaatgccttaaattagtaataaagacaaagaaaacaaattcaactggcaaatcacttcacatttctggcttccaatttccaaatcttaaaagggttagaataga

SEQ ID NO: 283356 - DNA, 638 bp, Homo sapiens
gcaatgtctacaaacaatattgtttattatagtattgttcatgaaaataagaccattacagaaaatatttgagatagtaaattgaaaaggcaaggtgaaaaattagacaataagatttcaaccacatataaagcaagaccaatatatacatagaaaacaaaagaccaaaaaaaaaaaaaaaaaacacctcagaatatccaaagtgcttatatttgttaagggaagctagagattatctttctactcttctgcacttttaaattttccttaatgagatgatggctgtaaaagcaaatattaaatggtatttaaaacaaaagaaaatggaagctattttaaaamactgtgtgtctgttctgcagtcagaagcagaaggtcttctaggtaggaaaaggcctttattctttaccagggatttaaggtgattcaccctagttgacaggtggcaattacatattatttctctttgagagttcagataaatactcctccttccatttaaaagcaattcattgcaaactcaacacgtcctgtgtaattgagcaggtataattaataaaaagcagagtggacttgggaaattggaatgtgtgctccatttaaagaccttcaaacagatttcctttttttccccaaaa

SEQ ID NO: 283357 - DNA, 548 bp, Homo sapiens
atgaaaatcctacttaagagccatgtggagtaaaagaatataatatgctttttttgcctaatggaactttagaacttcgttttccaccagagggcaaaatgaagcttatataagtttacctgggaggttactggtgagtactggaaggaagtattagaggatcccaggyatctaggtgggtagaaaccacgtgttaatttattcagcacttggatttcactacttttgtaatggaatttgaatttatttctctttagcccaaagttgctctctggctcagcgcttaatcttcacttatgcctcttagcattaaggaacagtcaatatttgcctgaaattaaggactgagaaatcaatgtttttaaaagtgcttagtaaccagtgtccttgggtatttactcactttcagaatcacttctattccaatcaatgcaaaagctctagaatttattgttctgcctcaagatcaagccccctttccccaacactacatgttcctgtgtctgcataattcagtctagaataatgccacaggagttccagtaaga

SEQ ID NO: 283358 - DNA, 589 bp, Homo sapiens
aataattcatacaaacactgtataaccccttttattcttaggtttgctaaaaaactatccttctctgttcctcagaataactcctttcttcccatttactcattgtgaatattcattccccaaggctttagccatcatyctgctctatttccttctctgtctatctgctcagttaatgctgctaactttccattgtaaaagggtaaatagtcataacctaatgttctgagactctggtgccatacctaagggaaaaatggagaggtgatggattttctgtgaaagtcataacctttgtgcacttgcttatattctctgaaagatttttttttctaatatgcatatagttcaaacaagtgcataaatatatatttataaattctaaatggatctaagggtacatattaggatatagggaaggggcctgagagattgctaattctagatttaattgaatctcttatgctagtcttataaattttttgtaatagttcttcattcatatttattttataggataatttggctcaataaatattttctacatccagcaaaaatttaaatggacttagagaatcatattttctac

SEQ ID NO: 283359 - DNA, 589 bp, Homo sapiens
aataattcatacaaacactgtataaccccttttattcttaggtttgctaaaaaactatccttctctgttcctcagaataactcctttcttcccatttactcattgtgaatattcattccccaaggctttagccatcatcctgctctatttccttctctgtctatctgctcagttaatgctgctaactttccattrtaaaagggtaaatagtcataacctaatgttctgagactctggtgccatacctaagggaaaaatggagaggtgatggattttctgtgaaagtcataacctttgtgcacttgcttatattctctgaaagatttttttttctaatatgcatatagttcaaacaagtgcataaatatatatttataaattctaaatggatctaagggtacatattaggatatagggaaggggcctgagagattgctaattctagatttaattgaatctcttatgctagtcttataaattttttgtaatagttcttcattcatatttattttataggataatttggctcaataaatattttctacatccagcaaaaatttaaatggacttagagaatcatattttctac

SEQ ID NO: 283360 - DNA, 629 bp, Homo sapiens
ggcatcttcactaaccaatattattaaataatctgtttctaaatctaatgttyaatccaggacttacacctttgaaaacactgagacatttctgctactgcaactgcttgatactgctatgtaccatctagcttctcagtgtgactgcttcctcatccctcctccaattacctactctcttctctcttctctgatgttccagaccttcaagatgatctcactaatattcaccccatctagtcttattctctacagccactagttcttgtgattctttgtcatggactgactcctcatgtaatccattctttcatcagatagcctgatatagaaatcccatacattctgtaagaagaacttgtttagataaattacttttgttcaacaatgatagtattagaaagccagcaattatgaaatgatttaacctggagtccttgaaatcatatgattgtatttaactggatgctgagaatattctgggacatacctcttaatgactaattcttcttcttggatgagggatttaaaatcacccatttgctatagctctgacttttaaaaaagaaattttgttacttccaaagcttctaattacttccaattcttatgaaaatttagtctcacag

SEQ ID NO: 283361 - DNA, 632 bp, Homo sapiens
agttttaacttacatacatcttgggtttattgtctgccttatattatagttgtttctaggcttatctctcttttgatgcaagggactcaatcatgttttcataagccacataattacttgaacatactagttgctcaagagatgctaatagaaggagtgaataagtaattatatattgtcttgagagaacaatttttcccaaatgatttcatgaagttttcatttcagctattggctatgacataacttaatgatccaaagtctttggcctgttcagtgtgacttcatggagcaactratgttatgtctgtgggcatcagtttatcacctgtggaaagtgaagatgctgacatgaacaactcccaaatatcataagctgatctttgtgccttcttatcatgcaactcaatccaagctctctgattctatatgcttttactcccacctggaatctctcatgtgcattaacagacgcacacaatcatgtgaaattaatgtgtctaatttccctagaatttcctctctcttttgaagcagaaattaggtggaagcaagtgtgtgtgtgtgtgtgtatgtgtaagtagaaatggaaaaaacatttgtaaaaatagacattctttatctgtatgtgg

SEQ ID NO: 283362 - DNA, 630 bp, Homo sapiens
ttattttctacaaaaaacaaagtatagcagttttttgagacatggtgttcagatagtaattgtaccctgtgctgcgcaaaataaaggtgattttcaagatacaaactactgactcaaaagtgccttaaaatcccttagtggttcaccactatgcccaggaagaaattaaacatttcttatatttgcctgcagattgtgggcattgtaataatgataataaaaatagatgctaacattcattgaatactttgtttcatatattatgctaaaggttttgcaagaattaatttccttaattttgaaaactaccctccagtagatattatcctttttcagatgcagagtcttacaargtactcccacatcatttgtctgacagggtgagattaatggagttcaatatcagtttctatactctctgcgatttggccaactctggaccatggttacaaacaaagggcaggctattagaaaaatttttcttatgaaaaaggacccactgctaatgaatgcatttgctactttcaaaatattatgctcacaagtcataatgtgatgaaaatactgctaacagactattgatcttgccaatttgttaatagaaatacatgtttcatagttcacaaatca

SEQ ID NO: 283363 - DNA, 592 bp, Homo sapiens
cacacctagttcattgaataatcaagccctaataaagagaaggatagcatggaacgttgctggacccatgctgcatcttcccaaccctgttaaaagatgtatcagactgtctctgagaagtgagaaaggataaatttgtcataaagacccaaatcactgttactctctttctgacaccttagagtgagaatggacttttgccacattgcagagaatgagctgcaaaaaaacacagacttctaccgttacccagggatttcttctctgtccactagaggaaacaaaaaatatatataaatctagtcctattcctaaaagaatagccaaaagaggtatgggtgactatgcttgcacacatataaaaaaggagctagattttttttaagactagctttctcttggaataaaagtctcagagaaacctttcttttactkgctgaagcctctgaaaacagctgctgacagatgcctcaaactccctcagctacagtcgcataaggaaccaccttccttgatgcttcctccacctccactccctgccttctgtgggtcttgtctgtctgtctactctggtaacaatctcaatggctag

SEQ ID NO: 283364 - DNA, 556 bp, Homo sapiens
taagcatcacattaatggttgtcaaatcaatcatgatttcctctgagttatgttacacagaagcaacatgctttatcagaaatcaaagaaaggacagtgccaaaagtggatgagctaatgtaaaatcacttacatgggcactctagagacrgaaacccgtttaatacttaatgtagtcattaacctaagaatgagaaggagagggtaatggatggtctactccctttgcctacgggacagggtactgaagtgagctgtcccttctgggatcagattcacccacgtctaaaatccataaagtgggtcacaggtgaagggaattggaaaagtctcaaaattcccagacatattgttctaagaggacagttgtgctcagcagacatgcctgaagttcaccaacctgcaggaaccagaagccacgtcaactgaattgctcaattagtttgttatggcaacagacatgctgtccccaatacatatggtcaaactgtagcaaataatcaattattgaaggaaccatctccaagaagcattaatccatcaggatattgaaggg

SEQ ID NO: 283365 - DNA, 554 bp, Homo sapiens
tatttttcctcttatgtttcctgtggcagttgttgaaccaccacccccctagaatgaggtcaaaacttggaagtctccctggagtccctcctttctcttactctcccacatacagatcagtcccccaccccctcacccccgccacctgaagatttttccttctacctagttctggaacccagcccctccctctctcacagcaccacccctcagcccaggccctcaggctcacttgcctgctgtactrcaggaggtctctaactggtttcctggtcttgcccacgttcatccagccttcttatactgccaacgtgatccttctaaaacacaacctgtctaagtcactcacctgaaatcccttcatgctaatgctggctgcagtttactgagcgctgtctttgctccaagacggctgttagcttgttatgctgattagctcactcagtcctcacaacatctcaatgaggtaagtactatgatttcgccctcttaacagattaggaaattgaggcaccaagagatgacgtttttcgctcaagatcaccagctcgcaa

SEQ ID NO: 283366 - DNA, 555 bp, Homo sapiens
gaatgggaatactttccagctgcacagtgaacttcaaatttcataaggaagtgcgggctcagccttgtcacgggctgtaacgatgcctcaagacatctgctgatacaggaaccctgtggttcttctaatactcttacactttcccataaagtatcatgagtttcctaacccccaccaccaaatgtttctctacaggctccagccgagtttgcaatatagatccccctaactgttgcctggtattttgcctctgaggcataggtcctctcctttgcaagagccraagggatcagaacccacagaatcttcctctggccagccagttgatatctgctccctagaaaagatgctcagatggtaaacccagcggctgggcagggccaatggggacagattctctcttttgatgtttgatggctttatatcctcctcctattgtatataacaaagggacattaaccccagattatcatcacccttggcactctccaggaaaggatgtcattttacacataacagagaaatcctgcctgccctccagagaactgaaatgag

SEQ ID NO: 283367 - DNA, 555 bp, Homo sapiens
gaatgggaatactttccagctgcacagtgaacttcaaatttcataaggaagtgcgggctcagccttgtcacgggctgtaacgatgcctcaagacatctgctgatacaggaaccctgtggttcttctaatactcttacactttcccataaagtatcatgagtttcctaacccccaccaccaaatgtttctctacaggctccagccgagtttgcaatatagatccccctaactgttgcctggtattttgcctctgaggcataggtcctctcctttgcaagagccgaagggatcagaacccacagaatcttcctctggccagccagttgatatctgctccctagaaaagatgctcagatggtaaacccagcggctgggcagggccaatggggacagattctctcttttgatgtttgatggctttatatcctcctcctattgtatataacaaagggacattaaccccagattatcatcacccttggcactctccaggaaaggatgtcattttacasataacagagaaatcctgcctgccctccagagaactgaaatgag

SEQ ID NO: 283368 - DNA, 456 bp, Homo sapiens
ttgcacagtagtttaacctaacttatttattcctgacatttcttatttgtgtcacactctctgactaaagaatctacaaaattattttgttgttgttgttggattaacagcagtaatccctatggataatcaaaaccccatcacacagtatgtaataacgcatcttttgttctcttaggctggtgaagatayatgtaattgttccaatgaatgtgaatgcttaccatcaaaacctctatcaaggggcattatcatgtagggacttcacagtagttcacaatactcattgagataactgatattactctttcctgtgtaagcagcctctatgccaagtgctcagtttatttcctggaggactcattgcatggcagaagccctttctaaggacagaatatactttattgagcaacggttctcagttgggaagtgaatgttagtcatcttttttctttc

SEQ ID NO: 283369 - DNA, 456 bp, Homo sapiens
ttgcacagtagtttaacctaacttatttattcctgacatttcttatttgtgtcacactctctgactaaagaatctacaaaattattttgttgttgttgttggattaacagcagtaatccctatggataatcaaaaccccatcacacagtatgtaataacgcatcttttgttctcttaggctggtgaagatatatgtaattgttccartgaatgtgaatgcttaccatcaaaacctctatcaaggggcattatcatgtagggacttcacagtagttcacaatactcattgagataactgatattactctttcctgtgtaagcagcctctatgccaagtgctcagtttatttcctggaggactcattgcatggcagaagccctttctaaggacagaatatactttattgagcaacggttctcagttgggaagtgaatgttagtcatcttttttctttc

SEQ ID NO: 283370 - DNA, 456 bp, Homo sapiens
ttgcacagtagtttaacctaacttatttattcctgacatttcttatttgtgtcacactctctgactaaagaatctacaaaattattttgttgttgttgttggattaacagcagtaatccctatggataatcaaaaccccatcacacagtatgtaataacgcatcttttgttctcttaggctggtgaagatatatgtaattgttccaatgaatgtgaatgcttaccatcaaaacctctatcaaggggcattatcatgtagggacttcacagtagttcacaatactcattgagataactgatattactctttcctgtgtaagcagcctctatgccaagtgctcagtttatttcctggaggactcattgcatggcagaagccctttctaaggacagaatatactttattgagcaayggttctcagttgggaagtgaatgttagtcatcttttttctttc

SEQ ID NO: 283371 - DNA, 558 bp, Homo sapiens
ttcttattcatcctaacttctgtttcttctatttccctgcagcataccacaatacatctatattagcaggtttgatctttctcatttgcacaggaaatacgtgtggattatacaactggttgcatttcatatccagtggaatacaggatgagttcrtttttgttttagtattttgagatatattttgtatcactgtattttttttctttggaactaacttcccagacaggtggaaatgtgataacttgattttttttccaaaaccaaatacctaaattggtattttgatctctctatcttttctaacaaattctgctatttatttttgcacatctaattcttttacatggttctatagatagatcgctgctctcgcctatattgtcttaatttgcactttttgtttcccaaaaatgttgaaaatcagataaaccagataaaatatgttattttcaacacttgggtggataaaatcacttgagagatgtagggaaaggaaatagtaaagtaatggagacagtatgaattaaacgtacttgtctatacttagtagatcat

SEQ ID NO: 283372 - DNA, 515 bp, Homo sapiens
  misc_feature (1)...(515): n = A,T,C or G
nnnnnnnnnnnnnnnnnnnnnnnnnnngaattcctaatagcaaggattagagccatcaacgtcaaacatggtgatctgtgccacccgctttcctagcttctctgactctaacacctcctgcctcctgcttttcagaaagctgttaattcacaaggtgaaaaaattggcctccactctccrttcagttatcctattctagaaactaatatttaaataataatgtgcatatatttgaactaattacaaaatctctctttcaaaatgcatttaatccatatacatattcctctattttattatttattttttgagacagagttttgctttgtagcccaggctagagtgcagtggcacaatctcggctcactgcaacctctggccccagggttcaagcgattctcctgcctcagcctcctgagtaaatgggattataggcacatgccaccaggctcaactatttattttatatttttagtagagacagggtttcagcatgttggtcaggctggtcttga

SEQ ID NO: 283373 - DNA, 558 bp, Homo sapiens
gttaacctttgatattaaatctcccactccgctatattaaaaaagcttgagattttctgaagtaaataataagcaactaatccctgttatttctgctaaaactctgtattcttcaacataatgtagcctcattggcactatgtgattttgaaaggaaaatttttaagattctacatggtaatttgtaaaccatgtttaaggagctgctgcaccgctctatggagtctaatagataatttgacaaattgattgttaattaaataatctaaaaccagtatcatcgagctgaagtgtgaagatgtcattttctgctagaggttaaatctgagtggaaattttccacctcaggcagatgactgccaatccagaacatactctcagagacattcttaatattacaataaaagccacctcaatttagtgtctttatttattatccgtcatatttcaggatcacatcagaattcagtagaggctcaaatcatcacaagtatgaatagctagtatttagcmttcataaagcctgaataaatctagagaaaaaagggtattacttaa

SEQ ID NO: 283374 - DNA, 578 bp, Homo sapiens
gggctaattgtaaagttaagcaaacattcagtactattcttgaagttgtgtatgygacttgaattcacagacttgtatagtatattgcagaatacaaatcttataatacagagagcaaacagacatattttaaaaatatgctctgaaggacctacttagattgcctgagataactgttaaggggagaaaaagaactaaaataatcctttgatccagccatctatcttcagggccttcaggaacataaatgtctaaaacatttctaagaattgtgtcttgtcttcatgaagataaggaaccaagccttgagccagtagtaaatgatcatataatttaatgtatgcttagttctctacacacccatcatatttttgtaacttctgaatgtttgtaatgataaattttatgtttttaagaataaaatgatatttcttaaagttatgactataatgactaaagttgagttacataatgataatttcagaagcaattaatggtgagatttcacttacctggccagatagaaattaaaaggtctcaattaatacccgaatcattattttattctccagtctagc

SEQ ID NO: 283375 - DNA, 578 bp, Homo sapiens
gggctaattgtaaagttaagcaaacattcagtactattcttgaagttgtgtatgcgacttgaattcacagacttgtatagtatattgcagaatacaaatcttataatacagagagcaaacagacatattttaaaaatatgctctgaaggacctacttagattgcctgagataactgytaaggggagaaaaagaactaaaataatcctttgatccagccatctatcttcagggccttcaggaacataaatgtctaaaacatttctaagaattgtgtcttgtcttcatgaagataaggaaccaagccttgagccagtagtaaatgatcatataatttaatgtatgcttagttctctacacacccatcatatttttgtaacttctgaatgtttgtaatgataaattttatgtttttaagaataaaatgatatttcttaaagttatgactataatgactaaagttgagttacataatgataatttcagaagcaattaatggtgagatttcacttacctggccagatagaaattaaaaggtctcaattaatacccgaatcattattttattctccagtctagc

SEQ ID NO: 283376 - DNA, 525 bp, Homo sapiens
agtaattaaattctgttcatcaggccaggcacagtagctcacatctgtaatcttagcactttgggaggccaaggcgggcggatcacctgaggtmaggagttcaaaaccagcctggacaacatggtgaaaccccatctctactaataatagaaaaatcagctgggcatggtggcgggtgcctataatcccagttactgaggaggctgaggcaggagaacggcttgagctgcattccagcctgggtgacaaagtgagactctatctccaaaaaaaaaaaaaaaaaaagaaagaaaagaaaaaaattccgttcatgtagaattcaaagtgtagcaaatgtccctcaaaaattggaaacaagagctgaaaacatttctctccacctgacttgcactataagtattattaaaataacaataatttaaaaagctgtacagagccaggattcatcactctttttcagtttttttttttttttttcatttctttaggtacaggatcttgctctgttgctcatgctggcatgca

SEQ ID NO: 283377 - DNA, 525 bp, Homo sapiens
agtaattaaattctgttcatcaggccaggcacagtagctcacatctgtaatcttagcactttgggaggccaaggcgggcggatcacctgaggtaaggagttcaaaaccagcctggacaacatggtgaaaccccatctctactaataatagaaaaatcagctgggcatggtggcgggtgcctataatcccagttactgaggaggctgaggcaggagaacggcttgarctgcattccagcctgggtgacaaagtgagactctatctccaaaaaaaaaaaaaaaaaaagaaagaaaagaaaaaaattccgttcatgtagaattcaaagtgtagcaaatgtccctcaaaaattggaaacaagagctgaaaacatttctctccacctgacttgcactataagtattattaaaataacaataatttaaaaagctgtacagagccaggattcatcactctttttcagtttttttttttttttttcatttctttaggtacaggatcttgctctgttgctcatgctggcatgca

SEQ ID NO: 283378 - DNA, 568 bp, Homo sapiens
caatttatatgaataatgtgatggttattcaattctgtattcacaaaatgtgtaaataaagtctctggaaaaatgatactgctcagcaaacaataaagaacaggtcttatattgcaacagcttaacaattttagaaagaaatactaaatcacatgaaataatttacaaatgttaaaaaatatagtggggcaaacaccatcaagttagcaaataggtattctaatttttctcatttccttaaggtaataaaaattatttattaccttagatcaccagtaattcttytggataattcatgatgaagatggcaaaggattgtcatgtcttataaaatatgttgatgttttatactaataatacttgaacttcagagaaaagtattagaataaataaaatgactacttattgcttacagaaatatgatataatattaagaagccacttatatttgccaaaaatcaataaagcagattgcatattgtttctttttgacaggatgacattttgatagagaagataaatagactattttttaaagatttttgggacataggaaattattacagta

SEQ ID NO: 283379 - DNA, 517 bp, Homo sapiens
caggcaaatggtgcttgcttgtcctatcagacacgtaattagaggtatgtttcatatgagaaacaaattaaaatttaaatatccaaagaaaattttatattatatctattaattggagttttagaatgactaaaaagttaaaaattgttttaaataaaatttattgcatatatttaaggtatacaacatgatgttataaaatatatatacatgataaaatggttactatagtggaagaatgaacatagccatcgtttcacatagttaccaatttcccccactctcaccgcaagagcagctatgatttattcatttaccaaaaatcttgaatacaagaataytttttactggaaggacatgaaagtttcatttaagcttctaggagaacatttgagttgtgattttcaagtattctaagtatcatagctaaatatcactaatagggacccacacatcatttaataccactattaaaataacaatgcagaatcctatggggtctgggagatggcaatac

SEQ ID NO: 283380 - DNA, 531 bp, Homo sapiens
tagaggggtttggggaagaaaacattgttaatcattgactctrtttagatttatgccaaagctaagaatttagttttgctggtttatactggtttataagagctggctgcccacatgtcttcttaaattcagctgtgatgtcttgtttgtagctgcagatcagacactgtgggagtattttacaacacagaaaccagagaatgctacaaacacagtgccttttgttaagcactaatcactacatcactgattatgactcaaggccagaaaaactcaggaatttaaaggatctttccccaaaactgatgttaaggcaactattataaatatggctcttaaaaaatctgacattgtttctaatgcattaggtgtgaagaaaatgtggagtaaaaataaccagccacacatcaaaaattataaatttgagggaaaaatgagacatcatttagtccagcactctgtagaaatcctgaatttttcactttttccttactggatgtcagagagactgagggaagccatacctgggac

SEQ ID NO: 283381 - DNA, 563 bp, Homo sapiens
agaagttgaaagcattcctctgagaatttgaaccagacaakaatgcccactctccccagttctattcaacatagtactggaagtcctagctagaacaatcagacaagagaaagaaataaagggcatccaaatagtatacctagaaaaccctaaagactcatgcaaaaagctcctaggactgataaatgaattcactgaagttttatgatacaaaattaatatgcacaaatcagtagctctgctatacaccaatggtgaccaagctgagaatcaaatcaagaactcaaccccttttacaatagctgcaaaaaatcacaaactaattaggaatatacctaaccaaggaggtgaaaagcctctaaaaagaaaactacaaaatactgctgaaagaaatcatagatgacacaaacaaatagaaacatatcccatgctcatgtatggatagaatcaatattgtgaaaataaccaaacaatcctaaaatttatatgaaaccaaaaaagaacccacatagccaaagcaagactaagcaaaaagaacaaatctgaaggcatcacattacctg

SEQ ID NO: 283382 - DNA, 563 bp, Homo sapiens
agaagttgaaagcattcctctgagaatttgaaccagacaagaatgcccactctccccagttctattcaacatagtactggaagtcctagctagaacaatcagacaagagaaagaaataaagggcatccaaatagtatacctagaaaaccctaaagactcatgcaaaaagctcctaggactgataaatgaattyactgaagttttatgatacaaaattaatatgcacaaatcagtagctctgctatacaccaatggtgaccaagctgagaatcaaatcaagaactcaaccccttttacaatagctgcaaaaaatcacaaactaattaggaatatacctaaccaaggaggtgaaaagcctctaaaaagaaaactacaaaatactgctgaaagaaatcatagatgacacaaacaaatagaaacatatcccatgctcatgtatggatagaatcaatattgtgaaaataaccaaacaatcctaaaatttatatgaaaccaaaaaagaacccacatagccaaagcaagactaagcaaaaagaacaaatctgaaggcatcacattacctg

SEQ ID NO: 283383 - DNA, 552 bp, Homo sapiens
agacttcatgaccaagaacccaaaagctaatgcaacaaaacaaagataaatagatgggacttaattaaaataaaaaccttctgcccagcaaaagaaacaattagcagagtaaacagacaacccatagagtgggaaaaaatctttgtaatctatatatctgacaaaggactagtatccagaatctacaaggaattcaaacaaattagcaagaaaacacaaacaatcccatcagaaagtgggctaaggacatgaattctcacaataagatatacaaatggccaacaaacatattgatggcagtggtggcccatctggagcagctgatgtgaagacagcagctgcagcagtggagtcacagctgaagtttcatgctctgtgatgcctgtggtagccctgcccctaccaagtttgcagggcaggaaccccatgatcctcagcacagttgcagccacacagccrtggatccagacttggacatccctgcactcttgcaggcctgcaaagccccttccccttcaggctcagaagtccctgctcccaagatctggtgtc

SEQ ID NO: 283384 - DNA, 570 bp, Homo sapiens
acagtatggtgctggagaaaggaaagacaaaaaaagagtgatggaacagagtagagggcccagaaacagacccataccattagagttaactgatctctgacaaaaaaaaaaagcaaagctaattaaatgaagaaaggatattcttgtcaacaaatrgtgctgaagcactggatatccatatttaaaaaagagaaagaaaggaaagaaagagagagagcaacagagggagggagggaaggagggaggaaggaagtaaggaaggaaaacaaatctagtcacagaccttatgtaattcaaaaaaaattcagcttgaatcacaaatttaaatgcaatatgcacaactataaaactcctagatgatctctatggaggacatctaagaggctgagtttggtgaagacattttagttacaataacaaaggataataagtgaaaggaaaaattgatgagttggacttaattataattaaaaatttctctgcaaaaaccactgtcatgagattgagaagacatgctacagattgggagaaaatatttgcaaagacacatccgataacagactggtacac

SEQ ID NO: 283385 - DNA, 570 bp, Homo sapiens
acagtatggtgctggagaaaggaaagacaaaaaaagagtgatggaacagagtagagggcccagaaacagacccataccattagagttaactgatctctgacaaaaaaaaaaagcaaagctaattaaatgaagaaaggatattcttgtcaacaaatagtgctgaagcactggatatccatatttaaaaaagagaaagaaaggaaagaaagagagagagcaacagagggagggagggaaggagggaggaaggaagtaaggaaggaaracaaatctagtcacagaccttatgtaattcaaaaaaaattcagcttgaatcacaaatttaaatgcaatatgcacaactataaaactcctagatgatctctatggaggacatctaagaggctgagtttggtgaagacattttagttacaataacaaaggataataagtgaaaggaaaaattgatgagttggacttaattataattaaaaatttctctgcaaaaaccactgtcatgagattgagaagacatgctacagattgggagaaaatatttgcaaagacacatccgataacagactggtacac

SEQ ID NO: 283386 - DNA, 632 bp, Homo sapiens
ttatgttatttcctctcttctcttttctacttgggttgcgattatgagaataataatgaatatgcatatgtattatggtttgacgatttgagaagctcaaatccaagagctttgcaaatattgttgggaattatttttactttaatagtctatgtaatttcatcaattctttatttgctagttcatataataccgcagatcagatgattataggacctactgactttgataaacagataataasctaaactttataaaggaaacaaccttctttgtttatttacatttcatatcctaaaagatatatttttaaatataataagaaaatacaacgttagaattgtgaaatttaagagtaagaaaaaataagggtaataaggtctgattatgaattgtaaaataaaatagaatatccctagtagccaacaccaaaagtgaaacatcaggtttactatatattagtgttcctgaaaagatcacattttaatgaaattaaatgcccatttctatggttattatatttaaatacaattaatgataacgatagcaaattctagaaatgttctgtctatataaaatcacaattaatttttccatccattgtttaatatgaatgttatcattcccagctt

SEQ ID NO: 283387 - DNA, 632 bp, Homo sapiens
ttatgttatttcctctcttctcttttctacttgggttgcgattatgagaataataatgaatatgcatatgtattatggtttgacgatttgagaagctcaaatccaagagctttgcaaatattgttgggaattatttttactttaatagtctatgtaatttcatcaattctttatttgctagttcatataataccgcagatcagatgattataggacctactgactttgataaacagataataagctaaactttataaaggaaacaaccttctttgtttatttacatttcatatcctaaaagatatatttttaaatataataagaaaatacaacgttagaattgtgaaatttaagagtaagaaaaaataagggtaataaggtctgattatgaattgtaaaataraatagaatatccctagtagccaacaccaaaagtgaaacatcaggtttactatatattagtgttcctgaaaagatcacattttaatgaaattaaatgcccatttctatggttattatatttaaatacaattaatgataacgatagcaaattctagaaatgttctgtctatataaaatcacaattaatttttccatccattgtttaatatgaatgttatcattcccagctt

SEQ ID NO: 283388 - DNA, 631 bp, Homo sapiens
cagtagcattctctggtgatgcatgtaggaagataatggttaaatgattcattgcaatatatgaatagtttggatttattttaccccaaaaagacatttctccaacaccttcatatattatctcattgggatcaatagtgaattcttgattttcagtgatcattgctgaaaaatgtatatctcatctaattctgtgttgagtcagctaaagatatgtttaggatgtttggaaaccatatagtattctgggaagtgtgattttgttttccttcataaaccagaagataaaagtctgaaaataagagataaaaaataaactctaaaacagcataagtgtacacacctgtaatactgtaatctctaatccataaactcttcagctcctgctgagactgtcaggaagggtttgttttgatctgaacagagtgaagaacattcggctgaacaagctctattcactcaaaaacattctttaacaaaacattctctacgtgcctaacttatcaatgatgtatgttgttataataacgatgtataaattatgtcttttattcatcacatttctcartgtcacattaactctgtcattactgtcaatcttatattagtctcatgcagttctttactaagt

SEQ ID NO: 283389 - DNA, 631 bp, Homo sapiens
cagtagcattctctggtgatgcatgtaggaagataatggttaaatgattcattgcaatatatgaatagtttggatttattttaccccaaaaagacatttctccaacaccttcatatattatctcattgggatcaatagtgaattcttgattttcagtgatcattgctgaaaaatgtatatctcatctaattctgtgttgagtcagctaaagatatgtttaggatgtttggaaaccatatagtattctgggaagtgtgattttgttttccttcataaaccagaagataaaagtctgaaaataagagataaaaaataaactctaaaacagcataagtgtacacacctgtaatactgtaatctctaatccataaactcttcagctcctgctgagactgtcaggaagggtttgttttgatctgaacagagtgaagaacattcggctgaacaagctctattcactcaaaaacattctttaacaaaacattctctacgtgcctaacttatcaatgatgtatgttgttataataacgatgtataaattatgtcttttattcatcacatttctcaatgtcacattaactctgtcattactgtcaatcttayattagtctcatgcagttctttactaagt

SEQ ID NO: 283390 - DNA, 1682 bp, Homo sapiens
gactttctatagttatttacaaagtttcaggtagaaattgaaactaamatttgggtttatatttcctattgttttttaaattacctttatgcttgagagctgctgtgctaaacaaaacagactgttgatgtgaaactatagagctttaatttataactaataatttaatattatggcagttatatttgtcaaagatagtgataaagacagagaggtctttagctcagttacatgaatagcagactatccggctttttaaaaatctgaaactgatgttcgtcttgctttgagatctcatagaccaaattcaatttctgcaattgaaaattgagaaatatcaggaaaatttagatgaattattctggtggtagtcattgctcttcatctcaattttagatatttgaatagttcctattattgacagaaaaccatcagagcgaagggtttaaatcaccattagggagacatttcttggtggacagctaatccccaaaatgatcaaagtaaaaagatagatattatcaaaagttatttggtgttagaacttgaagggtgtagagwgactttctatagttatttacaaagtttcaggtagaaattgaaactaaaatttgggtttatatttcctattgttttttaaattacctttwtgcttgagagctgctgtgctaaacaaaacagactgttgatgtgaaactatagagctttaatttataactaataatttaatattatggcagttatatttgtcaaagatagtgataaagacagagaggtctttagctcagttacatgaatagcagactatccggctttttaaaaatctgaaactgatgttcgtcttgctttgagatctcatagaccaaattcaatttctgcaattgaaaattgagaaatatcaggaaaatttagatgaattattctggtggtagtcattgctcttcatctcaattttagatatttgaatagttcctattattgacagaaaaccatcagagcgaagggtttaaatcaccattagggagacatttcttggtggacagctaatccccaaaatgatcaaagtaaaaagatagatattatcaaaagttatttggtgttagaacttgaagggtgtagagwgactttctatagttatttacaaagtttcaggtagaaattgaaactaaaatttgggtttatatttcctattgttttttaaattacctttatgcttgagagctgctgtgctaaacaaaacagactgttgatgtgaawctatagagctttaatttataactaataatttaatattatggcagttatatttgtcaaagatagtgataaagacagagaggtctttagctcagttacatgaatagcagactatccggctttttaaaaatctgaaactgatgttcgtcttgctttgagatctcatagaccaaattcaatttctgcaattgaaaattgagaaatatcaggaaaatttagatgaattattctggtggtagtcattgctcttcatctcaattttagatatttgaatagttcctattattgacagaaaaccatcagagcgaagggtttaaatcaccattagggagacatttcttggtggacagctaatccccaaaatgatcaaagtaaaaagatagatattatcaaaagttatttggtgttagaacttgaagggtgtagag

SEQ ID NO: 283391 - DNA, 560 bp, Homo sapiens
gactttctatagttatttacaaagtttcaggtagaaattgaaactaaaatttgggtttatatttcctattgttttttaaattacctttatgcttgagagctgctgtgctaaacaaaacagactgttgatgtgaaactatagagctttaatttataactaataatttaatattatggcagttatatttgtcaaagatagtgataaagacagagaggtctttagctcagttacatgaatagmagactatccggctttttaaaaatctgaaactgatgttcgtcttgctttgagatctcatagaccaaattcaatttctgcaattgaaaattgagaaatatcaggaaaatttagatgaattattctggtggtagtcattgctcttcatctcaattttagatatttgaatagttcctattattgacagaaaaccatcagagcgaagggtttaaatcaccattagggagacatttcttggtggacagctaatccccaaaatgatcaaagtaaaaagatagatattatcaaaagttatttggtgttagaacttgaagggtgtagag

SEQ ID NO: 283392 - DNA, 439 bp, Homo sapiens
aagacctaaaattctcgaattatttcccaccaaaaaattaaaaaaataaaaatacaaaatgaaggaaagaaagaaagagaaaaagagaaagagagaaagaaagaaagaaaaaagaaaaacaaagaaagaaagaggaaggaaggagagaaaaggaaaagaaagaaagagaaaaggagaaagataaagaaagaaagaaaaaraaagaaagagaggaggagacaaggaaggagagagagaaaaaggaaaggaaagaagaaaggaagaaagaagaaaggaagaaggaagaaagaaaaaagaaagaaagaaagagaaagaaagaaaggaaagaagataatttatggaactgcataaattatcaagagacggaaggatttgaaaagtaaaattgagaaagaagtagcagctgcttaagaccaaagaacaaatgacaagttctgtg

SEQ ID NO: 283393 - DNA, 556 bp, Homo sapiens
aataacacgaattattataactttattggaaatgtaagtaaatttacttgaatgtaaataaactgcctcctctccagtttctgatgtgcatgactgtaatccagctaattgaaacatgatagaaacttgtgaattaaatggccaaagaatacaggccatctttatccacctatttacaaaaatttttctctaataaacattctatgttttatactgcttttctcctaaaaccgtatggttttatttacaggaatacaaaagttgagttatttccattttaactaatgttataatattttgtaatatggtatcataattttgaaaaacattagaagattagaaaaatcagtgccaataatgmagacattgggaggagattccatctgtctgatatggttctgaatcatgtaagatttacaaaattagtacatctttatttttattcctcttttctatctgtgtcagtgaatgtaaatgagtcagtctatatagcatctttaaaatcagtttcaataaactgcaatagggataaaagaaaggaagttcatatgccata

SEQ ID NO: 283394 - DNA, 574 bp, Homo sapiens
agtcatttttaccaaatacactatatttctattagttgtagtttcaataaaacagagaaaaagttagttaattttatattttataattcttctcagttcacactcactactataggaacaccatcaaagttctttgcaaaagacattttgatcccaactttctctaaatgtgtaaaccttgtagaagtctataggttcaaataaatgttgactgtatctctgtaaatattcttcacaggttttcaaacttgaagaatcaactcccaaactaactcaaagtattccataaaaattcagtaatttccacatcacagtttaatctgatttattaacttttmcaaatgtaaaatatcattaattttatatacaggaaattaaaatgcctctgaatatcattattttaattagtagtttaaaaatatagcaagtgaatgttcttcaggttctattttgaaagaaatgtcagaaattgaatattttacacgttagtcaatgctttccttaacttttaattacaactattattcaaatagttacatgcacatttcaaaaatatttgccataatgttgtatt

SEQ ID NO: 283395 - DNA, 529 bp, Homo sapiens
ataattagcttttaacactagaaagattgttttcaagttctatattccattctaatattttaaacttgtcatcttaccataattttttgattgtggttttgcttcatttttctaatgttctcatcaatataaactaaagccatcacattatccttaacagctaaaccactggcattatcagaatgcttcatactatttccaatcaaacagaacaatagaaaaaagtcactaaatgtcatttgcctaggaaaaatgagcagacatactcttttgttttctcatcaggtaattcaaaatggtttttgaacattggatatttattgcagtctctgttaacagggcaattcctaaatrgctatataaggtctattaaaacagaacaaatgagcatagcacattgctgactgatttgcagtatcagcagtaatcccttaaaaatcacccttaagaattttcagttctctaaattgacatcagcagtttttattaactgactttttcttttctttccctaaagattcaatatcct

SEQ ID NO: 283396 - DNA, 598 bp, Homo sapiens
agcatagcacattgctgactgatttgcagtatcagcagtaatcccttaaaaatcacccttaagaattttcagttctctaaattgacatcagcagtttttattaactgactttttcttttctttccctaaagattcaatatcctggtgcctaaatattttcattgcatttcagactggcagcyaaaaccaaatttttactcctgcaaactttattgtaaggatttccgaaggaatgcctgaagacctggaattttgcccattgtagaaacataggtatggtttttatccaatttatataggttgttttataaaatgatcaaagttgggggctggtatacagttctcattttagaattttaaatgtaatgagtattatcaatttatctaatttaacattatgtccatagatgaggaaatataagtcttagatgagtgtttggatgaggtcatacagtaagaggtggagcacaggttaatatcaggcctctttgactccagagtttcatttcctttctattacgtgataatggtattagtcctggcatgaaaaaaatcaaggacaaaatttgtaaattcaatactatgtaattttagttca

SEQ ID NO: 283397 - DNA, 598 bp, Homo sapiens
agcatagcacattgctgactgatttgcagtatcagcagtaatcccttaaaaatcacccttaagaattttcagttctctaaattgacatcagcagtttttattaactgactttttcttttctttccctaaagattcaatatcctggtgcctaaatattttcattgcatttcagactggcagccaaaaccaaatttttactcctgcaaactttattgtaaggatttccgaaggaatgcctgaagacctggaattttgcccattgtagaaacataggtatggtttttatccaatttatataggttgttttayaaaatgatcaaagttgggggctggtatacagttctcattttagaattttaaatgtaatgagtattatcaatttatctaatttaacattatgtccatagatgaggaaatataagtcttagatgagtgtttggatgaggtcatacagtaagaggtggagcacaggttaatatcaggcctctttgactccagagtttcatttcctttctattacgtgataatggtattagtcctggcatgaaaaaaatcaaggacaaaatttgtaaattcaatactatgtaattttagttca

SEQ ID NO: 283398 - DNA, 564 bp, Homo sapiens
ctacttattatgtctcaggtactgtgctttgggagttacattctttagaacattcaatcaacacaacagccttgtgaggtagctattattgttatccatttgctagataagaaaattcagaactgaatgtttggataacttgcccaaagtctcacagctaataagtagcaggaacacaataascagatttaaacttactctcgtgccccttgttttagccacttaactacactgcttttaattattatatttccaaataatatgagaaatgctctttctactgtataaagaaaaaataatgtatgtttacagttctttctaccttacagaaaacattaatttaaaaatgcaaatgtcctttttttaaatcaaaaccacttttgaaatcatatttaggattcacatttaactgatgtgctcaattacattgcaagacttgcctcgctgttagtaaataacaggaacagatattgaggccagtgttctgatttgaagcccagaactatttcaataggaggaaaatgaagctgactttatactcagattttttggagttaggttcag

SEQ ID NO: 283399 - DNA, 564 bp, Homo sapiens
ctacttattatgtctcaggtactgtgctttgggagttacattctttagaacattcaatcaacacaacagccttgtgaggtagctattattgttatccatttgctagataagaaaattcagaactgaatgtttggataacttgcccaaagtctcacagctaataagtagcaggaacacaataaccagatttaaacttactctcgtgccccttgttttagccacttaactacactgcttttaattattatatttccaaataatatgagaaatgctctttctactgtataaagaaaaaataatgtatgtttacagttctttctaccttacagaaaacattaatttaaaaatgcaaatgtcctttttttaaatcaaaaccacttttgaaatcatatttaggattcacatttaactgatgtgctcaattacaytgcaagacttgcctcgctgttagtaaataacaggaacagatattgaggccagtgttctgatttgaagcccagaactatttcaataggaggaaaatgaagctgactttatactcagattttttggagttaggttcag

SEQ ID NO: 283400 - DNA, 580 bp, Homo sapiens
atataggggggcatatctactgctttacttctatattattttcaattagaaatctgatgatattgggctttaccaaagtcacaggacaaaagagtaagtttcctcttccaccaatgtgatcatggaagcagatgtttgctatatggaatcagtatatgtctaggtagttaatctatcaaatatctgtttagccttcatacttttgatatattgtcattattcctgaattccataatgtttctaaactctcaaaacgactgccaataactacataaacctttattgtatcttcattgttttgctatctgaaatatttcattatttaattaatgttaaaaatgatagattgcatgttaaatgaaacacaygaaatagttgtgctacacatgaatatggctaaatgttagcaatttcttatgctttgaactaatagtcttatttccagaaattatcatgctatccttgcttatcaggtcatactttccttaatttacctacatcaatgtattaatactttagatgaaaattttaactttaatgctagaaaagatgccccccttccacatacacacacacccct

SEQ ID NO: 283401 - DNA, 591 bp, Homo sapiens
tcattaccacattgtagatgttctgttttcaaggaagagttccttgaatggccccattaaaaaatatcactataaagctgatgacgagccactttttattttggaaaacgattatgaccagattttgtgagtatgtgctyatttatttatttatttgcttagaaaaaaaattcaagaaacaaacaaaatactggtttttttctgttgatgtgaagactctggggactcacaagtaggtaagaatgaagagcataacctttgccactgatgttcaaagctaaggaaactgcgaattagaccagtagggacctcactgagactgcttgacagaagacactgaaccttccaagtgcaactaagcagaagagaggacaaatttgtgagaacgatttcttttgaccagtatggggcttctgattcagtatgtggctgagcctggaagcttctctgggccccaccttgaaacagcaatgttttaatctatgattttgacatacaaattctgaagttaatgtccaatatgtttcaatctgtggtagttctcagaatcaaaacttctaaactgccaagtgactataaaagacataaatt

SEQ ID NO: 283402 - DNA, 591 bp, Homo sapiens
tcattaccacattgtagatgttctgttttcaaggaagagttccttgaatggccccattaaaaaatatcactataaagctgatgacgagccactttttattttggaaaacgattatgaccagattttgtgagtatgtgctcatttatttatttatttgcttagaaaaaaaattcaagaaacaaacaaaatactggtttttttctgttgatgtgaagactctggggactcacaagtaggtaagaatgaagagcayaacctttgccactgatgttcaaagctaaggaaactgcgaattagaccagtagggacctcactgagactgcttgacagaagacactgaaccttccaagtgcaactaagcagaagagaggacaaatttgtgagaacgatttcttttgaccagtatggggcttctgattcagtatgtggctgagcctggaagcttctctgggccccaccttgaaacagcaatgttttaatctatgattttgacatacaaattctgaagttaatgtccaatatgtttcaatctgtggtagttctcagaatcaaaacttctaaactgccaagtgactataaaagacataaatt

SEQ ID NO: 283403 - DNA, 593 bp, Homo sapiens
ttcatttctcaaatcctcatcatacttgatttcagcagcgattaattcagcccaatcttctgtcctccttacgacttttttccttggcttggttctccttctgtaacactggtggctatgcatttgtctcctgtgcttgcttctgctcttcttcatgacctccgaaggttgaagtacaccagagttctctatcctcaactcttcattcttctcaatcagcactcattcttcacttcatcttaactatacagtcccttggcattttctctttattgtcatacttatagctcataaatatatgccttcctgatccaaactgtattgatttctacatgaatatccaactgcacaaatgacactttcttttgcttgtctaaaaagccaatcttaaatcactatatacctgtatatatactctccttgcatacattaacaaggagattccagtgttttgcatttcagtgaatagctccccartcttctgtttgcttagctagtttctttaattacatgaactccatactcaatctgtggcaaattaggtcagatagtctgacaacattttatcagtggcacttctgtcatcttaattg

SEQ ID NO: 283404 - DNA, 534 bp, Homo sapiens
gtgacaaccatatttctcaagttgttattgcttgtgatgcacatttaagtgcacagaacatttacctttatggcagttttattctcagcacagtaaatagcagaagggtttctgttcaattgactctcataaaaggtttaaatcccttttcattttggcataggttatatcttaagtttcttactccagtttacatctatactctgagtagtatagatgttttgtatgagggaatgacctgatgccagggtgaaaggaaattgtacttgctttaagggatgttgtgaattgctgcagttagaaagccctttgtgagagaaatgactttaaggcagaactgtctcatcacaaaaatgaacagctaggcattttataaaaatagaatgttttatgttacgttgagcatcatcacaaagtatctgacgccaataaacaaatrctacaatattctatatccgattatagcctgttatttcataatcaaataaatgtgaataggaataaattagacaaatattatattcataggtatat

SEQ ID NO: 283405 - DNA, 405 bp, Homo sapiens
catcatcacaaagtatctgacgccaataaacaaatgctacaatattctatatccgattatagcctgttatttcataatcaaataaatgtgaataggaataaattagacaaatattatattcataggtatattgtttattttatctatagttctacaaatcataaatcactaaaaaaattattggtaaatttaygtgtatatttaaaagtcaataataataaaaaatgctaagattaacacagaggtatttcaatatgtaacacaagtaatagaaagaggatatacagatataggtatataaaaaatattttatatagaaatgtagatgatttaacatggattttaactttaaaacaatgcatcaatacacctgattctacaaatacaaattattttaataagttt

SEQ ID NO: 283406 - DNA, 1227 bp, Homo sapiens
tacatattatatattatgtacataatttcatagtgtcaagtatcagtgcaatagtataatttccaccataccatcttgtgtcaaaatgacagaaaaaaattccctaatattttacaaatattatttgtaaaatagatttgatagaaaagggaactaaactgaacttgaaatctaagtatctgttatccttttggtaaaagaactgtcataaaattctctgcacatgtatgtaagaggcacacagtacactatggtaagtaaattatcccagttttacttcaaatgtgttaaaggatttctagcagcaacaataacagagcattgcatcttgcatcatctgaaaagctctacatgtcatttttaaatcacratggaaataatattgtgttagagaaagtttgaaaaaggataatttttaattattcaatttaccttaataggtggatgagtggagtgtaataaaattatttttcagccataaatttaagctaggagtaaaaatattaaacaggtttttaagtgtaaatacgtttcagaaatattctgagaaactgggacttggcactgaccaaaggttagaagtcagattaattattgatggaagttctacacawtacatattatatattatgtacataatttcatagtgtcaagtatcagtgcaatagtataatttccaccataccatcttgtgtcaaaatgacagaaaaaaattccctaatattttacaaatattatttgtaaaatagatttgatagaaaagggaactaaactgaacttgaaatctaagtatctgttatccttttggtaaaagaactgtcataaaattctctgcacatgtatgtaagaggcacacagtacactatggtaagtaaattatcccagttttacttcaaatgtgttaaaggatttctagcagcaacaataacagagcattgcatcttgcatcatctgaaaagctctacatgtcatttttaaatcacgwtggaaataatattgtgttagagaaagtttgaaaaaggataatttttaattattcaatttaccttaataggtggatgagtggagtgtaataaaattatttttcagccataaatttaagctaggagtaaaaatattaaacaggtttttaagtgtaaatacgtttcagaaatattctgagaaactgggacttggcactgaccaaaggttagaagtcagattaattattgatggaagttctacaca

SEQ ID NO: 283407 - DNA, 613 bp, Homo sapiens
tacatattatatattatgtacataatttcatagtgtcaagtatcagtgcaatagtataatttccaccataccatcttgtgtcaaaatgacagaaaaaaattccctaatattttacaaatattatttgtaaaatagatttgatagaaaagggaactaaactgaacttgaaatctaagtatctgttatccttttggtaaaagaactgtcataaaattctctgcacatgtatgtaagaggcacacagtacactatggtaagtaaattatcccagttttacttcaaatgtgttaaaggatttctagcagcaacaataacagagcattgcatcttgcatcatctgaaaagctctacatgtcatttttaaatcacgatggaaataatattgtgttagagaaagtttgaaaaaggataatttttaattattcaatttaccttaataggtrgatgagtggagtgtaataaaattatttttcagccataaatttaagctaggagtaaaaatattaaacaggtttttaagtgtaaatacgtttcagaaatattctgagaaactgggacttggcactgaccaaaggttagaagtcagattaattattgatggaagttctacaca

SEQ ID NO: 283408 - DNA, 560 bp, Homo sapiens
tagggcactgacttactgaaatcctaacttataattaaaatatatatactaagagaaagactaggtgaataattttaaaatgctcttaagtggaaaaagatgagaagttaatgctatcatcaaaaccttataaaatcatgcaattatttggaagatactaggaaaagaaatttaaaaatgaatatagttgatttagcaaggttgatatggtactgggcaagttttgctatttttacatgattgctttttaatgttcattatgctaaattaaataagcaggagtccattagtttgaargtgtctctgtattttgagttcctaagtgagaaactgtaccctaacttattagtaagtaaacaagccaaaactgattttaagaatatattgttataacaaataaccaggtttcagccaatcacaggaaatcaatttatcagatcagtttcaaaaaggcaaatgcttcttccaaccatgcccaaataacatagatgcctcgtggtagccaagcaggtcatttatttactttgcttctatgtttggcctataatagctcattgcta

SEQ ID NO: 283409 - DNA, 587 bp, Homo sapiens
ttaattgtttctcaaataaaaaacataatccttatagtttttgttcctcagtttctctcaaacttcaattcttttataaaactttacatgcaaacagtagcagacatctgtatattctttctgtttaatggctactaagctggtctcagccctttatcgctcacctaacttcagtctgaatttgccttcgtctgtcactcttgatactcaatacgttttgtctttcttattcgccactcttatcataagtgccaaaaatagtgcctggcgtgtagtaaatgttccatcgtatttgctgagttatgaatgaaccaggaagttgaatactatcaatatagccttggccagtacttcctggatcaaaaacttttggaaaggagtccagaaatgtgaaaatttttgaaggtctctagaagaccattaggcatttttaaagccactgcattagggtgtgaaagacacttctaaaactcaatayattttatttttcaactaagcaatatattctggtaaaaacaaaatacgtagttgtgaaatttacaaacaaaatcagtttagcagttgaaaagttaactttaggctgggca

SEQ ID NO: 283410 - DNA, 553 bp, Homo sapiens
attatttatcatttctacatcacttatatatgccatatactgtgttatgcaccacgtggtgaacaaattatacatgttttatcttatggggtttgtagtctagcaagggagatagttcaaaaagaagccaacacagtaatcaaattccaacactcattctatcactttctctgttgtctctattacaacagatttaccttgcagtcttaagatgactgttgatattaatcagagctacagacttttttcttcagtttcagtgggagagtagaaaatgggaaagtgagataggaggaggaaaggagaggtaaagagattgaaggtgggagaagagtgstgaagacaaggagaaattttaatcttgaatatgatttctgcatttaagtccaattatatcaatgtaagacacatacaccctggacaaatacctatctgtaggagaatgccatatgctaatgtattaacactggcacagtgcctgggatattcatggtttgttattaggccaaggtttctcaacattgacacaactgatatttcagccagagaattc

SEQ ID NO: 283411 - DNA, 506 bp, Homo sapiens
cagtgagctagcttgggcacatgtttttaaagaggtagtgaaaatgtgaaaaagggaggaaaaacatgtcataattcttaaggtgtagggttgaaactggcataccatcactattacctattcattattttagggkccaaagcaagtaaaaagcatgatcccagatttaataggcagatatcttcaccattttaggaaaaactacaatgtcctatggaaaaagccatagggaaaaggatattagaaagaaagattatataatctgtttcacattcaactctcttgtttccacatggggatgaaagtgaatatactttgttccaagttcttctcccttgtctcccctagaatgtgcagtggccctggaaaaggaccaggcttcagagcaagggataatgaggagtctagatggttttaaagtaaatctcaaagatgaaagtgaccaggaatttcattttaaattacatctgaagaatagatttcaagtgcttatgagtttatgtgca

SEQ ID NO: 283412 - DNA, 529 bp, Homo sapiens
gtttattccgttctattactgaatagcattctactgtgtaaatataacaagcttgttgataaacctgttctggactacgtcttggctattgatgggcatttaggtagttttttcttttgttttttttttttttttttttttttgctatgataaattaagatgttatgaacattggtacacagctcattgtatggataaataggtttcatttyttttggataaatgtctggggtaaaatggttaaaccatatagtacatttgtttaactttttcaaaaactgaaaagttggctttcaaagttgatgttctaatttacagtccctgcagcactgtaaaaagtttgagtcccccttcagtctcaccaggtctatctaactttacacgttttaatggataggtagtgatatttcattgtggtcttaatttgcatttccctaatgactaatgatattgaacatcatatcatgtgcttacttgctatatctgtatcttctttggttatgtgcctgttacttctttggctatgtgc

SEQ ID NO: 283413 - DNA, 893 bp, Homo sapiens
cacaaaaactagaaaaagaagagaaatttaaacctaaaaccatcaaaaggaaataaaaaagtttaaaattgatattattaaaattgagaatggttaaaaatcttgagaaaattaataaaataaaaacgtattttttgaaaaactaaaataaatataataaaatacctttagctagaccaagaggaaaaaaaaaaacaacagaagacttgaatcaaaatcaagaatgaaaataaagacattttattgcctttakaaaaatacaaaaattatagtaaaataatactatccataattctatattaacaagttataactttgatgcagtggccaaattcctagacagattcaaactaccaagtcttctgaagaatagatagataatctgaatagatttaaaacgagtaaaaggttgatataataattttaaaacttccaacaacaaaataaaatttcagggccagatggcttcaatgttgaaatctacaaaacatttcaagaataattagtactwaaaaacttcttttaatacttaaaagtgaagaaaattcaggcaactatgaccaatatttttaagcaaaaaaaacaaacgcattccatatttttggcacagtaaatatttttttcttatctaggaattatatggggctaaatttgataattwaaaaaaaactactcaccaatatttacaacgaggatcatccaatatttgtaatgtaacctagccaaaaatgcaaaactgaccagaaagtattatcatggtcttagggttttgttttataacacttaggctaaatttaaatatgccaaacaaatgcatttgttcctaaacttttatgcttatttttatgtataaattaaattttatgtggatgatacgaactacaaaacacatt

SEQ ID NO: 283414 - DNA, 471 bp, Homo sapiens
cttccaggtgaagacttagatgataaattgtcattatttttagtcagtttcagctgttagcacagtgactaagagccacccatcccccagtcttcaaccacagggtagacagctatacccctatttctctaacagcttgaacacagcttgtgggagccagagtaggcaaaaaagaactctgtccttcaaatattgagaactgtggtctgattgctgattgctgcttctgatcacaaagtcacagacacaaaatcaggcaaccattgatgcacctcctcccattgttgcaagcctcctctctggctaatgtgacttccaagagatttaaatgycagatgtcctcttccatttcattattttttcccttttgggtgccagacattaagcaataaaatgttcaaaaacaattacatatactggaaaattgaaagtgagcattcatgcccaatgtctcagaaaagataggagaaa

SEQ ID NO: 283415 - DNA, 518 bp, Homo sapiens
tctaggagttctgtcctcttttatgatcatccttggccatattggaaaagggcatcagaaaatctattcccctagtgtttaagcagcttcttacatctgtccctataaacttaggttattttgcaattcactcacagtctttgttagtccgtgccaaagtgcttttcataacacagggctagtttaaatgttggggagatttatttgtttatatttaatctatttgattccrgtcaacttcatatgttaatagctatatacacaataattttctactcatgaatctcaccctctctctatttttctcccttaatcatggtaccttaagcttgtcagccttcagtgggaccatgcccttctttttgctgtaagctattttgtccaactgatataatttactgggagctaccttatttattcagtcagatatctcagtaaaagttgtgtaagccatgctcttgatttggtcttgttcccaggctgtatcttagtggcaacacacctgcatttagcccttg

SEQ ID NO: 283416 - DNA, 518 bp, Homo sapiens
tctaggagttctgtcctcttttatgatcatccttggccatattggaaaagggcatcagaaaatctattcccctagtgtttaagcagcttcttacatctgtccctataaacttaggttattttgcaattcactcacagtctttgttagtccgtgccaaagtgcttttcataacacagggctagtttaaatgttggggagatttatttgtttatatttaatctatttgattccagtcaacttcatatgttaatagctatatacacaataattttctactcatgaatctcaccctctctctatttttctcccttaatcatggtaccttaagcttgtcagccttcagtgggaccatgcccttctttttgctgtaagctattttgtccaactgatataatttactgggagctaccttatttattcagtcagatatctcagtraaagttgtgtaagccatgctcttgatttggtcttgttcccaggctgtatcttagtggcaacacacctgcatttagcccttg

SEQ ID NO: 283417 - DNA, 498 bp, Homo sapiens
aaaataaagacacagagagcaagtaggtgaagtgcagagagaggcacagagaatactcactcataggaagaggacttgggtaccacagaagcctcgaraggagagagttttaaggcactgatcgacactgagacattttgtttcgtgttaaaggctcataaggaatattaggtctcattagtaggagcctgttgtcaaaatgtgaataatttatgtgagatagaacacattcatagtcatttccatcttagtattgaggtgttcatcaattcccacattaaggatggtggacacgatgggcaaatgttgccagttattggaagaggatgaggcaaaaccaaagacctgggaagagggccctgcctaggttttctctacagtgaaggtcatgatgggtgagggatgacaggagagtactatgaacatgatatagctaaaaagcctggaagacacgaaaagaggagatggagagataaggatgtgaacacatgcttagcc

SEQ ID NO: 283418 - DNA, 1708 bp, Homo sapiens
gtctcctttcaatttctccattccttcttcctggtcttttcatcttccgtatactctgcaatacaaatgttccttttacattgggaggccatagcagaggatcacttgagcccaggagttggagatcagcctgagcaacatagcgagaccccgtctctaaaacaaaaattaaataaaataaaaaaaattagccagcatggtggtgcgtgcccgtagtcccagctactcaggaggctgaggcaggaagttcacttaaacccaggagaytgaggttacagtgagccatgatggagccactgtactccagcatgagtgacaaagtgagagcctgtctctaaaagataaataaataaaataaaatgttccctttacagtagtccctctcttatctgcagtgacccacagtcaagtgcagctcaaaaatattaaataaaaaattccagaattaacaacttatgttttaaattgtgttctgttctgagtactatgacaaaatctcacacctttccactctgttccacccaagatgtgaatcctcccttcgtccatcatatccatgctacacgwgtaagacaggaagaataaggttttttaggtctattgccaatatacattattattaagtatattaattaattatgtattatacagttcaaaatctctaagagaataaatttcaaatgttctcacaaaaaaatgataaacatttgaagtgatggatatgttcattggcttgatttcattattccccattgtattcacagaccataacaccgctttgtaccccataaataatacaactataatttgtcawtttacaataacatttttaaaatagatagatatataaagcatagcacttaacctagggtaagcaagttaacattaattaactttttctttcgaagttttgtattctaaacctgataaagtcaaaattccataagagggcattcacaattcttccaaatgcaaccctgacctactggcctggataatgctttgcaatattagccaatgttttccctgcatcattttctttaatactttggacctttccttaacwgcaaccctgacctactggcctggataatgctttgcaatattagccaatgttttccctgcatcattttctttaatactttggacctttccttaacaattcagctagactagcagttcttgaacctgactatagttagaacctactggggaggagctttcagaacaataccaatatctgtgccccacctcagaccaatcaaatcagagcctcagccagtagacttctgcatctgtattcaatgttatggctcagwgtgatagtaacatgcatctgtggcggaggactctgagctagacctttctagatcgcccaggaaagaaattacaaggtaggaatcaggacaaaaggggtctgttgtcagcttttgagtgtcaaaagcctagctttcaaaagaaatgaacagaacacaggacctaaacaaaaattttgtaaaatgcacaatggataagagcaaagattctccatcatgaccaccaccatttctacatcctaaatccacaccctgaaaatgacaaaagctaaccctggttgggaagagagtcgaaaaggaggtaaggacagcgcttggaagcttgtcgcctctgagaaatggagggcttgtactctgtcttcctggggtggaggggagaagggagacaaaat

SEQ ID NO: 283419 - DNA, 547 bp, Homo sapiens
ccaccatgtccagcctatttgtgccatttttaattggcttaagaaggcactatcttcaactgccctgcctcaaggaaaataattagaataatcttgctacactaattttgaggatgaagattccacatgcttccttcatagttggtacaggtgtgttgtcacactggttgagtattgacaacccagtttcccttttgcttctggtcacatggttaggctacattttccagcctccctttcacctgggcacagacatgtgtcctagtttgggccaatagaatgtgggtgggagtaatgtgtagcagttctggcccataaaatcctcccacatggaatcctccccatctgcccatttaatggagagaattctaatgattaaaggaggtgcagccaaaagatggaaggtttccatgtccccaaatcagagctttaaggagacctgctytgaaaagcttcctgaaaacaaacatccacattaaatcgttgttgagcaaaaaacccaaagtttgttaaacttgttaaatttagcagttattattaccagagt

SEQ ID NO: 283420 - DNA, 561 bp, Homo sapiens
tgctggctgccgcattttgtgggagtctgatgttagagaagctgccttatctccaggagctgagtgctggggtagctgcatgccctgaaggagcaatgcttgagaagtcacttgtgcttcattagctggctgctggaaaagctgcctaaactgcagaagactggttctgaataagctgcctactctgcaggagatgggygctgtggaagccatgagtgctgtgggagcctggtgctggagaacccgcctgtgctgcaggagcctgctaagccagagcatcagaaccagaatggaaacttccttcctactgcaatgtctctccagtgctgtctacggacaagacttaacattgaaccagctggcaaaggaaaaatgtgtacagggcccagatccatttttgcaaagcaggcaatgaggggtgaatttggaggtgtgaggcaatgaattgatagttggcacatcatagaagaatggtctttaaactctagtatacttaagcaatacctgggggagtatttgtgaaaacttcagtcttgggttttcacattctggttcaatgga

SEQ ID NO: 283421 - DNA, 673 bp, Homo sapiens
tgggttttcacattctggttcaatggatctaaagttaactcctggcattcacagttttcaggtatttcaggtaattatgatggctggtctgctaccaccaattttcayttagattattataaaagcctcccagttggtgtccttgattcccttctcattcctctatgatctatttttttcacacagcagccaagtgattctgttaaaatatgagttagaatcaccgggctgctcaaaatctttggtgattcccatctcactaggagaaaaagctcaagtctttacaagggccttcataatttggatgcccactacctctctcttactattctctccctggtttactgtacctgggccatactggccttcttgttgtgccttgaacacttcaggcacatcctagcctcagaacatgtgctattgcagttctttcttctcaatgggctctcctcccagatttctgcaaagctcacacactcacaggcttctggtcttttctcaaaggataccttttcagtaggctcttccctgaccaccctattaataagtgcacctttttcctccctctttcactctctgcactcgggacactctctgggattccacaccggttgatttttctccaaatcactccatatctccgtatctaacttaatatatgttccacttatta

SEQ ID NO: 283422 - DNA, 673 bp, Homo sapiens
tgggttttcacattctggttcaatggatctaaagttaactcctggcattcacagttttcaggtatttcaggtaattatgatggctggtctgctaccaccaattttcatttagattattataaaagcctcccagttggtgtccttgattcccttctcattcctctatgatctatttttttcacacagcagccaagtgattctgttaaaatatgagttagaatcaccgggctgctcaaaatctttggtgattcccatctcactaggagaaaaagctcaagtctttacaagggccttcataatttggatgcccactacctctctcttactattctctccctggtttactgtacctgggccatactggccttcttgttgtgccttgaacacttcaggcacatcctagcctcagaacatgtgctattgcagttctttcttctcaatgggctctcctcccagatttctgcaaagctcacacactcacaggcttctggtcttttctcaaaggataccttttcagtaggctcttccctgaccaccctattaataagtgcacctttttcctccctctttcactctctgcactcgggacactctctgggattccacaccggttgatttytctccaaatcactccatatctccgtatctaacttaatatatgttccacttatta

SEQ ID NO: 283423 - DNA, 551 bp, Homo sapiens
gttggtaggctttttattgcttattcaatttcagaactcattatttgtctgttcagggtttcaatttcttcctggttcaatcttgggagattgtatgtttccaggaactcatccattacttctaggctttgtagtttgtgtacatagaggtgttaataatagtctctgaggattttttgtatttttgtgggatcagtggtaatgaccccttagtgatttctgactgtgtttmtttggatcttctctttttctttattagttgaaacagcagtctattaatcttatgtattctttcaaataccaacttttggtttcactgatcttttgtatggtttttcgcatctcaatttcattcacttcagctctgattttcattatttcttttcttctgctaggttttgggttggtttgctcttgtttttctaattcctctagttgcaatgttaggttgtaaatttgagatctttctgagtttttgaagtgggtgtttagcactataaactttccttttaacacggctttagctgcttcccagagattctggtatgttg

SEQ ID NO: 283424 - DNA, 387 bp, Homo sapiens
tggagctggaggctattatccttagcaaactaatgtaggaacagaaaaccaaataccgaatgttctcatttgtaagtgggagttaaatgataagaacttatgaacacaaagaaagaaaaaatagacactgggatctgcttgagggtggagggtgggaggagagagaggagcaaaaaagataactactggatactgggcttaatacctgggtgacgaaataatctgtacaataaacccccatgacacaaatttacctatataacaaaccttcatatgtacccctgaacctaaaataaaaatttaaaaaacctcagtaygtaaaaaaaatattgtgaatggccacaaaaatgtgcttttaagaagtattaatagtagttcatgttgaaa

SEQ ID NO: 283425 - DNA, 676 bp, Homo sapiens
atacagtatttgtcataaggaaaagtttttagatttcttctggatgaccacaaggattagaaccagaaccagaactagtagataaaggtgcttagagacagattttcacacactacaagggaagacatttcttttctttctttcttttattttctttttcttttttttttgagatggagtctagctctgtcacccaggctggagagtgcagtggcctgatctcggctcactgcaacctccgcctcccaggttcaagcgattctcctgcctcagcctcccaagtagctgggattgcagacatctgccactacgcctagctaatttttgtatttttagtaatttttcaggttccactgtgttggccaggctggtcttgaactcctggcctcataatccacccgcctcagcctcctaaagtgctgggattacaggcatgagccactgcacccggccaagggaagacatttctaagggagatgtggaacattaaaatgggctgctttaagaagaagtgaggtcttttttatcagtggtrtctaatcacaggtacaatgtcattaggcaagggcattacagactggatttcagtggctggtgtttgaccaaatggccccttctcacttggaggtggtcaggtctgattggttgtggccatgaagctagtagcctgtgaggg

SEQ ID NO: 283426 - DNA, 578 bp, Homo sapiens
cctgccgtgtttcccctgtgactcattcatttcaggtgctatagcaacaggtctgggatacagacatgatgaactcaagttcctctccagcccgagttcaaagcacctttttgcccttcaatagatcagaagagattttctctttaaatacctgccagctgaccccgagctggccaaaataggacagaattttccaccaggacttagtagaatcttgggagcttctttcaraagaacttagtgtgttgggatggacaaagcttccctgtgagtcagaagctagggtggcagctctagatctatcagaacaagctaagacactaactctctgaagttggaccagctcgtttgttcatggtaacgggccaggttgcaatgaggttcctgtggagaagtgagaaaaatgggaagaatgtcttgaattttttattaagctaagttattttgttgaacgtgctatcctttaaaatttctacttctctaacgttaataaaaaaaaaaaaagcaccattcaaggcctacttcaactattggctcctttcagaagcctgttctgataccatcaatctatcccaata

SEQ ID NO: 283427 - DNA, 573 bp, Homo sapiens
caatgggtgagatattatcataaacctgcatatgaggcatgtttaatgatttgctcaaggttacatatctagtaaaaggcaaaatagcatctcaaaaatggttcttcaagttagacagaaggagtaagttctgaagatccattgtacagcatggtgagcacagttaataagaatgtattgtatattaaaaattgctgagagtagattttaaatactctcatcacaaaaataagtgtgtgaggtgatggatatgttaatacagtcatattaacatatatatgttaatacataacatatatatcaagttatcagtataatgatataaccattccacagccatatacatrcatcaaaacatcacattgtacaccatatacacacttttcatttgccaattaaaaattaattaattaagattgaaaatcaaaaattgaaaacaaaaatggttcttctgaccaagggcaccccatcatctacaggctctaggacaagagtgtaagtggaggcccacataccataattctgaatgtttaaaatttataaatcaagctaccaaatttttaaatgcaatat

SEQ ID NO: 283428 - DNA, 571 bp, Homo sapiens
tggtactctttgtatagaacaacttaagccacttgcgggcaccaaccagatttaattaggaatatccctaaggaaaagacttggcccctctatgggcgttgttgcatgcacatcttgtcactacccagcagggcttaatgattgatgacttttgggatattttaaaagtaggaaattgagcatacaattgaaaatgccaaaatgcggctgcattcatgaagcaaactcactgtgagctctgaattccgtttttgtccctcagttaaaattgagtttgagttatgcacacatttmaggaataggaaaactattctttatctattttcagatatggattttggcatcttcttcaaactagctgtagaaatggagctgcatataggtaagcagaaacgctgcagtttcttaagaagtttttgacaataacttcaggtaaaaatgagaacttttcctacactgtaaactgtccactactgggtgggggatttgtgaaaatgtatcattctactaagtggagagattccttacattattcattcaaggtatttttcctatttttcctgtggaggag

SEQ ID NO: 283429 - DNA, 1181 bp, Homo sapiens
tggtactctttgtatagaacaacttaagccacttgcgggcaccaaccagatttaattaggaatatccctaaggaaaagacttggcccctctatgggcgttgttgcatgcacatcttgtcactacccagcagggcttaatgattgatgacttttgggatattttaaaagtaggaaattgagcatacaattgaaaatgccaaaatgcggctgcattcatgaagcaaactcactgtgagctctgaattccgtttttgtccctcagttaaaattgagtttgagttatgcacacatttcaggaataggaaaactattctttatctattttcagatatggattttggcatcttcttcaaactagctgtagaaatggagctgcatataggtaagcagaaacgctgcagtttcttaagaagtttttgacaataacttcaggtaaaaatgagaacttttcctacactgtaaactgtccactamtgggtgggggatttgtgaaaatgtatcattctactaagtggagagattccttacattattcattcaaggtatttttcctatttttcctgtggaggagwattttctgagttctgaaaaagttgaattttcctatttttgtaagtgttcttgttacgaaaaagcagatttttggagggccttactatgccattccagaagtatttctagtttgcttttttatttttgtattagatcaatttagattaatttttattgttcttggtgtatggcttttttaggcaccttatttaatattttcaccatcatttgatgtagaagttaatttaatttwaaaaatttttgtgtatactaatataaaatatcatatataagatctgatattgtatgatttataatgaatattgatttttttacaatgacagttttaaatatccagaaaaaaaagcttgacaatagaataatgagatacagcaaggtcaaaaaaatttgaaagtggcaaaataaagttcagaacattttgaatcatataaaataataatattcattttaatagaaatatttagatacctagggaaaaacacaaaaggtaaaataattactatgatgcatcattatttttcttgagaaaatacacatcaaacatcatttggtaaaatggaatcaactacatgtaagacagagtgaaaaaaataatgaagacaatgctg

SEQ ID NO: 283430 - DNA, 426 bp, Homo sapiens
ccttctttgtgttggctgttccctaaattctcttagattgaaataatcagcataccaaagcagtatgttttgaagtggtatgtcctggattccttcagtgatatcattcaaatgctctsgccttcaatttcttgattgagaaaatggcacattatgtggtaatcaattatagctatttctcaatatgtgcagagaagtttgtattaattcctcctatgaaatttagtctgttacttgaggttgtaaggtctttaagtcaacgaaacttattttattctcttttgtgtcaaacagaataatatcttttctgtgtttctcaagcacccagatactgtttaaacgttattagactttcaaaactttcttgaaagaatatctgcttaatgcaagagaagtattaattttaaagcttaagaagaaaaaaaa

SEQ ID NO: 283431 - DNA, 426 bp, Homo sapiens
taggcactaatgacactctaggatggatagttttggggagctatcctgtgcattgtagaatgtttagcagcatttctgstctctacccactatttaccattagcacaaccctttcccccacagtgtgacaaccaaaaacatctccttacattgccaaatatcctgagggaaaacatcactttttttttttttttaagacaagagtctcactctgttgcccaggctgagttgagtgcaatgatgtgatcgtgtcccactacagcctccacctccctggttcaaccaagcctcctatctcagcccccagagtagctgggactacaggcatgcgccaccatgcctggttaacttttaattttttgtagagacagaatcttgttacgtttgccaggctgaacttcaaccccctgttctcaagcaatcctc

SEQ ID NO: 283432 - DNA, 426 bp, Homo sapiens
taggcactaatgacactctaggatggatagttttggggagctatcctgtgcattgtagaatgtttagcagcatttctgctctctacccactatttaccattagcacaaccctttcccccacagtgtgacaaccaaaaacatctccttacattgccaaatatcctgagggaaaacatcactttttttttttttttaagacaagagtctcactctgttgcccaggctgagttgagtgcaatgatgtgatcgtgtcycactacagcctccacctccctggttcaaccaagcctcctatctcagcccccagagtagctgggactacaggcatgcgccaccatgcctggttaacttttaattttttgtagagacagaatcttgttacgtttgccaggctgaacttcaaccccctgttctcaagcaatcctc

SEQ ID NO: 283433 - DNA, 600 bp, Homo sapiens
tgaatagctctttttaagcttgtattgggatcatcagtcatctactcactggtagaaggtaaataagcagacaaatgtcctttgtgctagtactctcttatctccttgttaatctgtaattagtctaggaagcagcatatatgatttgggatcagaatcagttttatctccaacattagaatggtaaatcttttcattaacagaaacagtacatggaacagttattggactttttcttattgggtcacattggatatttatttcagattgcagttatgcatggacgggtatcatatggtgctttgatgacctttagaaattctcttgattaaacgctgttgtacttcattatgacatttctttccttgtactaccagatttgatgtgtatggcttaataacgcaagtagacrtgaatgttaataacttcacaattcattgctttgctattttttaatgctcatgaaatttagaacaagtttcactggctggaggcttacatgaatcatataaattagagggtaacaaaagaacatattagcatttgttagcctagatgcacgaattttgtactaaccattttaatatgtactacaacttt

SEQ ID NO: 283434 - DNA, 541 bp, Homo sapiens
tgccctgttttatatacttttcacttgtttgctttttagaacattggataccaaatctgactcattagctgaaaatctgtagacgttttgcctcaacctgacaaactttgatttaaaatagctagggaggggtccaattttgatacttagaaaggtttaaaaaattctaatatagacagaataccttatcacacattcctcactcttctgttaaaatkttcttaaagataattctctgaataaggcatttccatgtatactccagtgtctaccatgcagcagtacccagatcatagcctttgatgtcctcgtataggaagttgtaggacaagctggcatttctaaacctctgcgacagcaaggtcacccatctatcacaagcaactgtgcacagggcttctctgggcctagagaacattggacactcaagaaactaccaaggaaagtggagatgttagtcagagggcacaaagttcaagtagacagaaggactaagttctagtgatctactgtacagcatggtgactgtaagaatgttaac

SEQ ID NO: 283435 - DNA, 1175 bp, Homo sapiens
caagtgagtccttcccttcctgactcactcccagactaccaagcaattcagcacccagatgttaatgcctggcacagtttggagcctccagaaccttactgattgatcactgccattttttttctttaacacagagtctcactctgttgcccaggctggaggcacgatctcggtggctcactgcaacctctgcctcccagtttcaagcgattgtcctgcctcagcctcccaagcagctgggacyataggtgtgcaccaccatgcctggttaattttcttttttgtgcctttagtagaaacagggtttcgccatgttggccaggctggtctcaaactcctgagctcaggccatcttctcgccttggcctcccaaagtgctaggattactggcatgagccaccatgcctggcccccactgccattggttttaaacagcaaggcataataggaacaagaacctctctggcccaagacttgtcagactcctccatcaggaggcatgtggagagacagaattaggattacatgtgattaaagaagggaatgggcatgcttgtgtgtgcactttccaataatggcagctttctgccatggagtgatttccaggtgctgtgaaattttgaagttttcaaaacacttggcttagttagtttawaacctcaattcttgacttctatgcacccgcaggctcaacaccatgtggaagctgctaaggcttggggctttcaccctctgaagccatagcctggactgtaccttgtccccctttagccatggctggagcagctaggatgtaggacaccaagacactaggctgcacacagcagtgggagctctgggtctggcccatgaaactggtccttcctcctaaacctccaggcctgtgatgtcagggcctgctgggaagctctctgacatgccctggagacatattccccattgtcttggcaattaacattgggctcctcattatttatgtaaatttctgcagcaggcttgagtttctccccagaaawtgtgtttttcttttctatcacgttgtcaggctacaaattttccaaacttttatgctctgtttcctcttgaacactatgctgcttagaaatttcttcctctacatacattaaatcatctctctcaagttcaaagttccacagatttctagagcaggggca

SEQ ID NO: 283436 - DNA, 591 bp, Homo sapiens
tctctctcaagttcaaagttccacagatttctagagcaggggcaaaatggcaccagtctctttgcatagaaagagtgacctttaatccagttcccaacaagttcctcatctacatctgagacatctaagcctggaatttattgttcatactrctatcagcattttggtcaaagctattcaacaagtctctaggaagtaccaaagtttccacatctcagacttctgaaacccccaagtctttaggaagttccaaaatctcccacatttttcctatcttcttctaagtcctgcaaactgttccaacctctgcctgtttccaattccaaagtcagttcgacattttcaggtatctttacagcagcatcccactacctggtttactgtattaagtccattctcatactgctaataaaaacatacctgagactgggtaatttataaaggaaattgtaaaaggtttaattggctcacagttcagcatggctagggaggcctcaggaaacttacaataattatagaaggagaaggaaacacatccttcttcacacagtggcaggaaggtgaagtgctgagcaaaagaggaaaaagccc

SEQ ID NO: 283437 - DNA, 598 bp, Homo sapiens
tctaggaagtaccaaagtttccacatctcagacttctgaaacccccaagtctttaggaagttccaaaatctcccacatttttcctatcttcttctaagtcctgcaaactgttccaacctctgcctgtttccaattccaaagtcagttcgacattttcaggtatctttacagcagcatcccactacctggtttactgtattaagtccattctcatactgctaataaaaacatacctgagactgggtaatttataaaggaaattgtaaaaggtttaattggctcacagttcagcatggctagggaggcctcaggaaacttacaataattatagaaggagaaggaaacacatccytcttcacacagtggcaggaaggtgaagtgctgagcaaaagaggaaaaagccccttataaaaccttcaggtctcatgagaaatcactcactaccaccagaacagcagcatggaagtaactgcccccatgattcaattacctcccattgggtccctcccatgacacatggggattacgggaactacaattcaagatgagatttggttggggacacagctaaaccatatcaccatacatagtcagccct

SEQ ID NO: 283438 - DNA, 598 bp, Homo sapiens
tctaggaagtaccaaagtttccacatctcagacttctgaaacccccaagtctttaggaagttccaaaatctcccacatttttcctatcttcttctaagtcctgcaaactgttccaacctctgcctgtttccaattccaaagtcagttcgacattttcaggtatctttacagcagcatcccactacctggtttactgtattaagtccattctcatactgctaataaaaacatacctgagactgggtaatttataaaggaaattgtaaaaggtttaattggctcacagttcagcatggctagggaggcctcaggaaacttacaataattatagaaggagaaggaaacacatccttcttcacacagtggcaggaaggtgaagtgctgagcaaaagaggaaaaagccccttataaaaccttcaggtctcatgagaaatcactcactaccaccagaacagcagcatggaagtaaytgcccccatgattcaattacctcccattgggtccctcccatgacacatggggattacgggaactacaattcaagatgagatttggttggggacacagctaaaccatatcaccatacatagtcagccct

SEQ ID NO: 283439 - DNA, 548 bp, Homo sapiens
tgtgtatattgttttaatgcacatctctttcttaatgagttctgagtaataaaaagagaattatattagaaatttcacatggaattatgtaatgcaatgaacagggcttggataagatttctcttctattgaggagacgaagtgtgtaatttactgtaaacctggatattaacagctcctatatctggaatgaacagccttagctataaatgaaaatttcatagaaagatagtctagtttaaaacattgttctcagaagaagttgggagaaggggcaataatatttttactccgatttgtgctttaccatatgtggacatgctaaggatggttgaaaattttttaaaatataaaacagcagasatacacctaaagggcatcattcgttctccctagcacacagaaatttcagcttcttcttgggagtccttctccccctttgtcttaatcgagatccttatgtttcaaagcaggcatgctgaaatcactcaaaaaccttctttacaatacccaagagaatattgtccagctaagttttaaagagcctc

SEQ ID NO: 283440 - DNA, 565 bp, Homo sapiens
gcctgggtagtttttgtatttttagtagagacagggtttcaccatgttggcctggctggtctccaactcctgacctcaggtaatccacccatctcagcctcccaaagtgctgggattacaggcatgagccaacatgcccggctgaaaggtcattattacatataatgaaagtaatcatttaggatcattaatcttatagcagaataaatgatagaaggaagagaggttgaagctgggtgactatattacaatgagccgagaatattattagaacctcttccttggtgttattggtggttgaaacagacagaaagaataactggaaacatttgaaggaagaacctatacaaaaatcaatgtatatttcaaggcaaatgttttcaatcttagaacagtgacttccttacttcgatattttgtatatttattaaactatctcttccaaaatgytcccccccaaattaaaaaccaccttcaatgtaattatgaggagccaaagatccttaagtcacttttcaattataatgattactatgaaatgctactattatctccccatttggac

SEQ ID NO: 283441 - DNA, 600 bp, Homo sapiens
ttcagccagatgtaatgggaaaaaaatacctaggcttcacctgggctattttcttgagctttattaaaaaaaaataccaaatagttaatgttgccttggtatttagtatcttagtctggggaaccttggaaataatccatcccatatacagtcaagcacggcataaacaagtttcamttaaggacagactgcatatatgaaactgtttccataagattatggtaccatattttttattgtaccatttctatgtttagatataagatacagacataccattgcgtcacaattgcctacagtatccgggacagtaacctgcagtgcaggcttgttgtctaggagcaataggttgtaccatatagcctaggtgtgtagtagcccacactatactgctctgagtcactctgatgttcacacaacaatggaataacctatcaatgcatttctcagaatatagctgttaagcaacacatgactgtatcttcagttgatttatattttatgattacagaaggatgtctgttaagaaatgccaaatgataattataaataagctcaattaattcataaatgtggcctctgagtcttccaaatttcagc

SEQ ID NO: 283442 - DNA, 600 bp, Homo sapiens
ttcagccagatgtaatgggaaaaaaatacctaggcttcacctgggctattttcttgagctttattaaaaaaaaataccaaatagttaatgttgccttggtatttagtatcttagtctggggaaccttggaaataatccatcccatatacagtcaagcacggcataaacaagtttcaattaaggacagactgcatatatgaaactgtttccataagattatggtaccatattttttattgtaccatttctatgtttagatataagatacagacataccattgcgtcacaattgcctacagtatccgggacagtaacctgcagtgcaggcttgttgyctaggagcaataggttgtaccatatagcctaggtgtgtagtagcccacactatactgctctgagtcactctgatgttcacacaacaatggaataacctatcaatgcatttctcagaatatagctgttaagcaacacatgactgtatcttcagttgatttatattttatgattacagaaggatgtctgttaagaaatgccaaatgataattataaataagctcaattaattcataaatgtggcctctgagtcttccaaatttcagc

SEQ ID NO: 283443 - DNA, 376 bp, Homo sapiens
tggtcaaacaaaaaataaattatccaagcctggcttgggagctgccagtttaaaatctcttaaactcatcataaacatagagctgccagtttaaaatctcttacattcaacataaacaaagagttcttcctgcttgtgtttgttttgttctttcagcctggaacatttttctttgcctaactcatcatcctctaccatcaaaactgtcctctttcttcaaatctactctctttctttgattttcaatattttaatacctttaattcatttccaacytcaaagtatttttgtaattttgatgtataaattaagatttctaatatttcttccaaatcagatgagtcaacagctcaaggccagtgttctcacatggaat

SEQ ID NO: 283444 - DNA, 531 bp, Homo sapiens
caaaactgtcctctttcttcaaatctactctctttctttgattttcaatattttaatacctttaattcatttccaacttcaaagtatttttgtaattttgatgtataaattaagatttctaatatttcttccaaatcagatgagtcaacagctcaaggccagtgttctcacatggaatgaatggggtggagccaggtgatggtcagaatgtttaacaaccattagaacaccagcaccaagcaggmagaggagccttcagctgcagtgctggggcacggctctggtttttaccttctagttgtcagatcactgggtcatcctagtagttcctgggagataatccagggtatgtggaggctcttggggaatagagcactcatgaactctgggtaaaacaatttacccacagttgtgtgtcttctgttaagaatgttttcaaataaaaagaacaagtataatcagagacttgctcaagaccccagaggtgactgagtccagtgatttttccattcttttgttcaatccagaaga

SEQ ID NO: 283445 - DNA, 1144 bp, Homo sapiens
aggccaaaccaatattttttcaaaaatagatgaataaatacataaactgttgtcccactgaacttattttcttaacataggatcttgctagctgtagaattaatttttttatttcatcccttttaaaccttttataggcttttctattcatttctttggcatttgtaaggcctcattgagaacatgctacttacatccctagtactactgattccaaacggaatgagaatgagttggctgatgtaggtgccaacaaaacctaattctatctaagactgcatagataaaactacaatttccagaacaaacggagatagtcttgctcaagttttgcaccacacaggctgtgtctgacaggcaggactcaacaaccactgacacacaggacaaaccacatgccaggcactgtgctaagtgtgctaaacacatcatctgytttacccccaagcagcccccatggaataccttttattaatattatccattttatatatgaagacacacatatttaaagaagtttatcccaggttcacagctaataagtcacwcacaggacaaaccacatgccaggcactgtgctaagtgtgctaaacacatcatctgctttacccccaagcagcccccatggaataccttttattaatattatccattttatatatgaagacacacatatttaaagaagtttatcccaggttcacagctaataagtcaccaagctcagactcaaaccttaggttattctgactccctagctgtgtccttaatcactgtgctctattgccttatgagatggagcttcacaaagaaattattgccataggaggcaaatcaaaactgtcatttttttttgagaaatcaaaattactgtgctaagtttgtatggatgattaaaaacaccaaaagacagaataaatattttcatctctctgaagggttatcacacagtaawaattagtttagatttttttcatacatcagcattaagaatggaagttttagggtgagcaattcaatctcaatatgagacaagaactagttatatctattccaaatagattactggatgctttagaaggaaataaaggcttctggtcatcatgtgggaatgataattgctcgcaaagatgataacagattttta

SEQ ID NO: 283446 - DNA, 1044 bp, Homo sapiens
tgtcatttgcaacaacatggatggaactggaggtcactatgttaggtgaaataagccaggcacagaaagacaaacattacatgttctcacttatttgtgggatctaaaaatcaactcattgatgtagaaaatagagtgatggttaccagagcctaggaagggtagtgagggggcacagggggtgtttgagtacaaaaaacaatagttagaaagaataaataagacctagtatttgataccacaactgggtgatagtagtcaataaaaattgtaaattttaaaataaataaaaaattgtaattggattatttataacacaaaggataaatgcttgaatggatgatacctcattttccatgaygtgattatcacgcattgcatgcttctatcaaaacatttcatgtactccataagtatatacacttacgatatatccataaaaatwgatgatacctcattttccatgatgtgattatcacgcattgcatgcttctatcaaaacatttcatgtactccataagtatatacacttacgatatatccataaaaattaaaaataaaacatttttttaaatgcactgaaatttcctccagatatctaatctccacctgccctaaacaaattattctctccatcagtaataccgtctctcttccctcttcctgwcacagctgccaaaagtcttttctgctgttctcagctcctgtgctcaacttatatacctcatttggccaagtaaatgcattttattcaactctaagagcaaacttttatttttttccttaagtgtgcccttaaaagatctcactctccaccctatccaaacttaacaaaaacattcacccccaaaaaccacttccttggggatgactttgctgctaagaaaataaaattttctccatgttgttatgtttacgttgtctactatttaagtagaccaaacagaatgtgattaggttttttgagacatgggttggggtctttgtcgaagttagcaccttagctcatgggctataataataaggtgtgggtgctaatatatc

SEQ ID NO: 283447 - DNA, 473 bp, Homo sapiens
agatattttacccataaggtagagtaatgagggtcttcagtgataatgaaggagcagaattttgaatattttaatatattctggaacacttatatgtttcaagctaaggaaccagtataattccagtacagaaaaaatgtattatttaatgatattttttattttttaatttttgtcctaayaaagttctaaaaatatagttagaattatgttcagaaccagaaatatatttcaaaattgaaattgtgatgtttaaaacagaaacaatgagttgcttcctagagggattaaaagtcattatttgggacatattatgtcctgatttttatcactgcaccctattaaagaaaatgatatctagggttttctttttttagagtttgctgtagctatacatcaggttaaagagcttgggagatgaattttttactttcagaaactcaacgttctaaagatgacttcaatgtatctac

SEQ ID NO: 283448 - DNA, 578 bp, Homo sapiens
attgccatgtaactatgcagtccttcccatcaagagtacattgttctaccctagaacctggatttcatcatatgatgtgttttggacaacaggatgccatcaatcatgatgcaagtagaagcttgaaaaattatttaccagattgggttacgttcttrtccttctgccattgtcaagagaaggatgttcctgtgctggcccactgctctaaggagaaagatgagtgacatgtggagcaatgctgagtgttcccatccaagcccagtctaatgcagctgaccccctgccaactccacatgcctgagtgagccaagccaaaattagaagatccacccaggtgagcctggcctagattagctgaaccatattgattcatgagaaataaatgcttatttttgtatgccacttgactgttaataaaagtcatgtaaaagtcatggaggcaaattataggagacattgtagccaaggcacaaagatgagagtttggaccaatactgagcattcatagctgcccgaaagcaaataccaggtatctcctgaaaatgatatttacatttttaaagcatttttgttgg

SEQ ID NO: 283449 - DNA, 1149 bp, Homo sapiens
ggtctgtcagcgtaatgggataaagcacctagtgtttataaaaataagagtatagcactttgtgaactttgagaaatgtgaacgaacattgattggtaaaatgtctattttataactgcatttaaatcatcttgaaagtttgaagaacatgcaccactttatttaaggatgccttaaatacagaatttgccaagtagtgaaagctggagatgaaatgtggagagtcttatgggtattttgaccaacaatgaatccaatactgaaatggaagaggccatatttgtcaccgagtcttagacccaaaggtaagacagctatgagcaaaaaatacaggtatgtataaatctgaactcaacaatgtgaactctacaataatagackggagtagaaaatggattttgtgtagcaaattctcttggtagccaaagataaaagacattcttgtttacaaacagaggcaccaaagcaaagaaccacttcactgatgcaaaagctaattaaaactttgagaaatttttccaaggaagagaagatggagagtgaatatcaaagggactagcttgggaggagtgccwggtctgtcagcgtaatgggataaagcacctagtgtttataaaaataagagtatagcactttgtgaactttgagaaatgtgaacgaacattgattggtaaaatgtctattttataactgcatttaaatcatcttgaaagtttgaagaacatgcaccactttatttaaggatgccttaaatacagaatttgccaagtagtgaaagctggagatgaaatgtggagagtcttatgggtattttgaccaacaatgaatccaatactgaaatggaagaggccatatttgtcaccgagtcttagacccaaaggtaagacagctatgagcaaaaaatacaggtatgtataaatctgaactcaacaatgtgaactctacaataatagacgggagtagaaaatggattttgtgtagcaaattctcttggtagccaaagataaaagacattcttgtttacaaacagaggcaccaaagcaaagaaccacttcactgatgcaaaagctaattaaawctttgagaaatttttccaaggaagagaagatggagagtgaatatcaaagggactagcttgggaggagtgcc

SEQ ID NO: 283450 - DNA, 489 bp, Homo sapiens
gttcgttcttggtgctttacaggaacatgtattaagatggggaaagaacaagttcattgagaagtacagaatcattcccattggtttatctaaaccattgcaaattctcacattttgaatcaacaaaccatttaagaattctttgaagacggataaaatcaagataacaccagcaaaactttcagaatagctgttagcagcttggaagaaaaggcaagagttaatggtggagcactctttaaagaaataatccttcaccaatgctcctggtgcctcctgaagagtgggaaaatatagatactgatgtctctaactggaaaaaaaaaagattcacaagagcaaaattctacatgtgaaataacacatgtattgtgctcatatttgcatttatatgcatgtaaaattgtgatatttacttttgaaaacttgtctaastaggtctaaaagagccttttaagtatagaattaaaatcttaaagataaaaaatt

SEQ ID NO: 283451 - DNA, 1073 bp, Homo sapiens
tagctttaaacataaatattatgggggaaaaaacaaagtctcaaaattaatgaattgatttcccatcatcagagtttagaggccaggcctggtgtcacacacctgtaattccagcaccttaggacgctaaagcaggaggaccacttgagtccaggaayttgagaccagcctaggaaatatagtgagactcctgtctctacagtttaaaaatgagccaggcatggtggcatgtgcctatagtcccagctcctccgggggctgaggtaggagaatcgcttgatcaaggctgcagtgagcagtgatcataccactgcaccccagtctgggcaacagaacaagatcctgtctcaaaaaaaaaaaaaaaaaaaaaaaaggattttagaaaaagaacaataggataaaactaaagaaaatacaagaaggaatgaggtaaaataaaacaacgataaaatagagaagactaacgaagccaaaaaattagctatttgaaaacttaacaaaatgaacaaactttgacaaaattacacaacaaaaacwtagctttaaacataaatattatgggggaaaaaacaaagtctcaaaattaatgaattgatttcccatcatcagagtttagaggccaggcctggtgtcacacacctgtaattccagcaccttaggacgctaaagcaggaggaccacttgagtccaggaatttgagaccagcctaggaaatatagtgagactcctgtctctacagtttaaaaatgagccaggcatggtggcatgtgcctatagtcccagctcctccgggggctgaggtaggagaatcgcttgatcaaggctgcagtgagcagtgatcataccactgcaccccagtctgggcaacagaacaagatcctgtctcaaaaaaaaaaaaaaaaaaaaaaaaggawtttagaaaaagaacaataggataaaactaaagaaaatacaagaaggaatgaggtaaaataaaacaacgataaaatagagaagactaacgaagccaaaaaattagctatttgaaaacttaacaaaatgaacaaactttgacaaaattacacaacaaaaac

SEQ ID NO: 283452 - DNA, 438 bp, Homo sapiens
tggtcctcttgtgcagaggaagtcagggaaatgaaggaagagaagaccatgtagttagacgtaggttattgtcctcttattttgggtgctaagtttacaggtgcttattatrttattgataactaagtaaataattcaaagcaaaagttaaaatacaagacactggttttacattttgtctcagtgtcttatattctaaataaaatattgtggctagacaatgctatgtatgcattcagcaaactgttttattttcgtctcaggcacaaggaaaatctacatttcctatattcctgtgcatccagatgggactgtgtaactcagttctggctgatggtattggccaaaagtgaagtacatgacttcagtactgcccataaaacatcctttacaatctgccaccatattcctccttcattcccatggctaaaaagtggt

SEQ ID NO: 283453 - DNA, 539 bp, Homo sapiens
cttctgaactttttaatattgttttacctttattgttttcaattccttttcttagtccttaattctctctacttttgtgttttcaacttttatatcatggattttagtcttttatgttaatcttttatctctcttactattatatttttaacttatgattctttgtatctttatttcaaattacttattttatctataattttagtgcccaatcatttgtctttattgagatttaatcatcatgtttagatattttcccttttaatttattcygcatctcaaatttttgttgtaatcgcctcataatactttacagtaacaagtaggaacacttccatgaagacagccctcactcaaaacggctgaacaaaataaagggttagaggggtagaatatattaactcacattactgaaaatgtcatcttgtaggcttggttttagacatggctgaattaaaagttttgaaaactcatcaggatcccgttctctccatgcttcctctgtaatgccgcattctagagaggctcaccagcactac

SEQ ID NO: 283454 - DNA, 568 bp, Homo sapiens
agaagatgataatagctgtagagatgaatgagaagagtaagagggaatggaagcaggaagttgtgattttaaattgagtgatcaggaaaggctgcactgagaaagcaacatttcagcaaagacctggaggaggtgaggaatgtggccctacagataactaggaaagcctgttttaggcagagggaacattgagtccaaaggctctaagatggaaggatcgctgacaaattcaaagaaaagcaagggggccactgtggctgsagcagaaggaaccagaacagaataagagataagatcaaattggtgctggggccaagttaggtagggccttgcagcccaatataggaattttggctcttgctctcagtgagatgggaagccaatggaagaatttgagcaaaacatgaaacatgatctagcttttaacacactttctgtgactgtgtgttgagagtagatgttggggacaaaggtgataggagggagacaggagaggagaccagggtagcaatccaggtgagagaggtcttggctcagacctggaaggcagtggaagaggtgcaaaaat

SEQ ID NO: 283455 - DNA, 573 bp, Homo sapiens
ctgcactgagaaagcaacatttcagcaaagacctggaggaggtgaggaatgtggccctacagataactaggaaagcctgttttaggcagagggaacattgagtccaaaggctctaagatggaaggatcgctgacaaattcaaagaaaagcaagggggccactgtggctggagcagaaggaaccagaacagaataagagataagatcaaattggtgctggggccaagttasgtagggccttgcagcccaatataggaattttggctcttgctctcagtgagatgggaagccaatggaagaatttgagcaaaacatgaaacatgatctagcttttaacacactttctgtgactgtgtgttgagagtagatgttggggacaaaggtgataggagggagacaggagaggagaccagggtagcaatccaggtgagagaggtcttggctcagacctggaaggcagtggaagaggtgcaaaaatatggtcagagtctagctgtaccgtattttgaatgtatgtgatagaggttgccaaagtgcccccaaaggggttacaccaatttatcttcccaccaga

SEQ ID NO: 283456 - DNA, 571 bp, Homo sapiens
gcaactgctctataccaggcctctcttagggagacatgtcttatccctcaggtgtgcggaaaaacacggcttctgctggagatggaaaaaggactctggggaggacaagatgcctcatgtcaaagcaacaaggttccagtgaagagctgcaggcctcagaggcaggtaggcagagccatttcttggtctgaacgtctttsttcttcggtccccagcaaatcatcacagtgagctgtcagcattttccccacattctccagaagcagcctctggatcctaaacacaattcttcctttgattcttttgatgacggtgcaacagcaaaatgctgtggcaatcaaaactgcctgaaaacagcagattagccattccaagttttaactgagttaatcaaagaactgtcagcacagatgctgtccatggttctcctagagatgaaatctcgatgctgtgtccttgagacttctcatttagagggcctcttccagacagaagtttgggatattcacaagactaacttctacatgtggtgaggttgaggacgaggatagcagtgaagatgtgccagaca

SEQ ID NO: 283457 - DNA, 462 bp, Homo sapiens
ggattatctcttttatctcctccatctaaaggctcaatggaattagaggtatttatatgaattttagggttagaatatatttcagtcctttctcatttgagtaagtaagtgtgaatgagtatataatkccaatatggcatgtataatgaaacaaatttacattcccacgttctgaagctagtttggaatgctaaatatttagacatagataccatatttttaatcagacaatataatctcatagccacatttttctcttttagtttcttgactctgtcaccttccccttctccccttgtaaagcaattttgttagtttacatttgcttttcctggacaattttgcatgggaaacttttatctacctcatgactatcagaacacaccatcatcttgtagctttgatgccatcctttcttttatgtgtccctaaaggattcatgaggcatgtcccagattgttt

SEQ ID NO: 283458 - DNA, 462 bp, Homo sapiens
ggattatctcttttatctcctccatctaaaggctcaatggaattagaggtatttatatgaattttagggttagaatatatttcagtcctttctcatttgagtaagtaagtgtgaatgagtatataattccaatatggcatgtataatgaaacaaatttacattcccacgttctgaagctagtttggaatgctaaatatttagacatagataccatatttttaatcagacaatataatctcatagccacatttttctcttttastttcttgactctgtcaccttccccttctccccttgtaaagcaattttgttagtttacatttgcttttcctggacaattttgcatgggaaacttttatctacctcatgactatcagaacacaccatcatcttgtagctttgatgccatcctttcttttatgtgtccctaaaggattcatgaggcatgtcccagattgttt

SEQ ID NO: 283459 - DNA, 462 bp, Homo sapiens
ggattatctcttttatctcctccatctaaaggctcaatggaattagaggtatttatatgaattttagggttagaatatatttcagtcctttctcatttgagtaagtaagtgtgaatgagtatataattccaatatggcatgtataatgaaacaaatttacattcccacgttctgaagctagtttggaatgctaaatatttagacatagataccatatttttaatcagacaatataatctcatagccacatttttctcttttagtttcttgactctgtcaccttccccttctccccttgtaaagcaattttgttagtttacatttgcttttcctggacaattttgcatgggaaacttttatctacctcatgaytatcagaacacaccatcatcttgtagctttgatgccatcctttcttttatgtgtccctaaaggattcatgaggcatgtcccagattgttt

SEQ ID NO: 283460 - DNA, 589 bp, Homo sapiens
gtttactggaagtcaaggaactctctacttgtccctcaaattatagtcagtcctgtggtgggcatctgtgtctggattctgggaatgtaracactgccactgttgccacttgatcacacattgaggtattggtgttggggagaagctatccaataatactatcttaaataataggagtataaatggtacaaatgcagcaagttaccctgattgcctttggtcaacatgactttccgtcctcaacttacagtatgtttccaggtttcctttctatccattaggagggcaggggtcacagctgaccagactgtcttgtctgtgtctgtaccggcaaacagatgttttagcaggtggtttcttctgattatggcaggttaaattaaactattttgaatttaatgtacattatgctgatgagaactggatcggttatttaaaggactgagattcatctctatatgaaccactttatttcctgctaggacatccttttgcttttttgaagatataaacaatgtctacttctatcagaaaaagatagacaaattatgtttttgaaaattgaagatattatttcttattaacagac

SEQ ID NO: 283461 - DNA, 624 bp, Homo sapiens
ggaactctctacttgtccctcaaattatagtcagtcctgtggtgggcatctgtgtctggattctgggaatgtagacactgccactgttgccacttgatcacacattgaggtattggtgttggggagaagctatccaataatactatcttaaataataggagtataaatggtacaaatgcagcaagttaccctgattgcctttggtcaacatgactttccgtcctcaacttacagtatgtttccaggtttcctttctatccattaggagggcaggggtcacagctgaccagactgtcttgtctgtgtctgtaccggcaaacagatgttttagcaggtggtttcttctgattatggcaggttaaattaaactattttgaatttaatgtacattatgctgatgagaactggatcggttatttaaaggactgagattcatctctatatgaaccactttatttcctgctaggacatccttttgcttttttgaagatataaacaatgtctacttctatcagaaaaagatagrcaaattatgtttttgaaaattgaagatattatttcttattaacagactgaatgaatggcattaatattgattattaatgctatagagaaatacagaga

SEQ ID NO: 283462 - DNA, 603 bp, Homo sapiens
ttgtattttgttttattttagaaaatttgttaatgaaattttctgttttcttctatgtcctggatcttttgcataagaaaagctttaatacaaagtaggagaaggagatgggaggcagagaggaaagagagaattcatttgtgagctacagcagtcttcctgtgtccatctcttggctataaattcagataaaacatgtcagtgatattttaggggatgcttctcatcaggtatatatggtgttgcttattttactttatttaaaatatttattttatttttaactgcctatgcaaatttatctgcataaatctggtcgcttttttcatttctttttccagtattggttttaactctcaatcatgtactaaagaaaggacttctaacttttaaattrgaactgataagctttctttctcataggacatctatttctaggttccagctttggttcactataccttgtccaaaaatatcttctaaactcaagaattcctaagggggctttggagcgagaggtatccacaaaattcttagattacaccctgagaaacactgatgtaggcactgtttttctgatttgaaattaaaaatctcaaatgg

SEQ ID NO: 283463 - DNA, 305 bp, Homo sapiens
ctctctggttcccatggcagccacgctctgttgcaracagaaaaggattgcctgttccctcttaaaaggaacctctcctttgcattctgggaccactctcttaagcctcctttcaaaaccacctaggacttcttggggtgcaatgccttttggattaatcttctgtcatctctatcccactgggctcatcagagaggtgcagaagactgaagaaaaggaagtccctcaggactcactggaggaatgtgctgtcacttgttcaaatagtcacaacccttctaactccaaccagcctcacaggagca

SEQ ID NO: 283464 - DNA, 535 bp, Homo sapiens
ctctgctgcctggatgctctttccagactcagtatagagcattcctgcaccaccttcaaacagcacctcctcaataaggccttctctatcaatctctgtacaactgcagccctggccacagccccagctctcccttctgcacttagcaccatctgacacactacatgttttacttaatagtttatcatctgtctctccccastagacaagaagtactgagtcttttgttcaatgttgtgacctcagcccacattggctgctgtattagtccattttcacactgctgataaagacatacctgagactgggaagaaaaagaggtttcaatggacttacagttccacatggcaggggaggcctcaaaatcatggagggaggcaaaaggcacttcttacatggcagcggcaagataaaatgaggaagaatcaaaagtggaaacccctgataaacccatcagatcttgtgagacttattcactatcacaagaaaagcatgggaaagacctgcctccatgattcaattatctccccctggg

SEQ ID NO: 283465 - DNA, 624 bp, Homo sapiens
tttttccaaaagatacagaatcattttttggaaaagatacaagatgtacagacaaatcacattcataccttacaatttaaattcataatgaacaatgaatattttcatattttccagaagtttgaaatttcaaagttgttagcaaaattattcatttccrtaatttttacgagtaaaaatagaaagagctgatcatgtaccttaatattgtcactttatatattactcaaaagtacaaataaccctaaaagtagaatcccaggcttatcatattataaaaatactgagacatttatcaaacataactaatataaatgaaactacatttttaaaaatgtttcacaaacaccagtccatctttctctttggttcagaaaataaaagaggtaggttcaaataaagaaaatgcctattacatcattagattttcattaaaatgctggaaatttataacagaaattattagaagtgaaatgagtttaagaactaaattaaaaactgataataacttcaactagtaaatatttttctaagttctaatcacacaaataagaaaagatagttgactataaaaatggctttagtaaaataaaaaaatgctctcattattataaattaagtctc

SEQ ID NO: 283466 - DNA, 561 bp, Homo sapiens
atgaaggagagatactttcccagacaaacaatagctgagggagataatcatgaccgcacctattttataagaaacgtaaaaggagctcctcaagctgaaagaaaaagatgctaatgagtaacacaaaaacatctgaaagtataaaactggctgataaaaraaagtacacaggtaaattcaaaataatactgtaatgatggtatgcaaatcacttacatctgtagtaggaaagagaaaactattaaaagtaataatagctacaataatttaagggatacacaatatgaaaagaggtaaactgtgacatcaaaaattcaaaatttcaggggattaagtaaaagtgtagatttttttgttttggggggtttttgcaataaaaattaagttatcaagttaaaataaactattataactcttaagatgttttttgtaacctcttggtaaccacaaaccaaaaaccaataggagatacacaaaaaataaaaagcaagaaatcaaaacataccactagagaaaatcacttaaccacaaaaaaaagacagcaagagaggaagaaaagaa

SEQ ID NO: 283467 - DNA, 576 bp, Homo sapiens
ctgattaatacataaccatgtcttatgtctgtttctgtttgaasgcacctcatttaatgtgtgctgttgattcactaacattgaatttggggcaaagcttatccaacgcatatattttctccataaggcatgctatggctttcttgcacttaggaacactagacagcacttcagcactacctttggggaacattttaaaaaggaaattaccaacaaaaatacaaaaatgcaaaaactggcacaaaatagaccttgaaagggatacttgctagttaatagtatgagagctgaaacaagaaggcagagtattgccttattctactagctaggaatgtacatgctgagcaactcaagtttttcactgctctgtgcatgtccatgaatgcctgggaaagtactgtgagtatatattttggggttactttggggataaattttattgagtaggcaaatttgcaaatacagaatccccaaataatgaggatcaactgtatatgttttgcattaaggaagtctaaaaaataaaaatatgaaccaataatgccacattgttttaaaatacacaaacatgggaaa

SEQ ID NO: 283468 - DNA, 576 bp, Homo sapiens
ctgattaatacataaccatgtcttatgtctgtttctgtttgaaggcacctcatttaatgtgtgctgttgattcactaacattgaatttggggcaaagcttatcmaacgcatatattttctccataaggcatgctatggctttcttgcacttaggaacactagacagcacttcagcactacctttggggaacattttaaaaaggaaattaccaacaaaaatacaaaaatgcaaaaactggcacaaaatagaccttgaaagggatacttgctagttaatagtatgagagctgaaacaagaaggcagagtattgccttattctactagctaggaatgtacatgctgagcaactcaagtttttcactgctctgtgcatgtccatgaatgcctgggaaagtactgtgagtatatattttggggttactttggggataaattttattgagtaggcaaatttgcaaatacagaatccccaaataatgaggatcaactgtatatgttttgcattaaggaagtctaaaaaataaaaatatgaaccaataatgccacattgttttaaaatacacaaacatgggaaa

SEQ ID NO: 283469 - DNA, 576 bp, Homo sapiens
ctgattaatacataaccatgtcttatgtctgtttctgtttgaaggcacctcatttaatgtgtgctgttgattcactaacattgaatttggggcaaagcttatccaacgcatatattttctccataaggcatgctatggctttcttgcacttaggaacactagacagcacttcagcactacctttggggaacattttaaaaaggaaattaccaacaaaaatacaaaaatgcaaaaactggcacaaaayagaccttgaaagggatacttgctagttaatagtatgagagctgaaacaagaaggcagagtattgccttattctactagctaggaatgtacatgctgagcaactcaagtttttcactgctctgtgcatgtccatgaatgcctgggaaagtactgtgagtatatattttggggttactttggggataaattttattgagtaggcaaatttgcaaatacagaatccccaaataatgaggatcaactgtatatgttttgcattaaggaagtctaaaaaataaaaatatgaaccaataatgccacattgttttaaaatacacaaacatgggaaa

SEQ ID NO: 283470 - DNA, 421 bp, Homo sapiens
gcgtgtctgtcttttctcagagtgtgaagagtacaaagacatcatagactctgtgctgagggatgaactgcagtccatggagaagctggcagagaagctcaggcaagctgaggagctcaggtgagcgggccccactgggggcaggcagatgggcaggggtgtgaatctctgaagtgcagcaactcagctgggagaactaagagctgagctgggccaggacaacggcaggcatttacatggcaggcacgtgtcacacaaatatttataaaacagagaacagtcatcttagtaasttatgggttgtagttgtttcttaagccttgttttctcttcttaaaaccactgattgttgaggtaaaatttgcataacacaaaataaaccaaaaaaagtgaaccactcagaagcatttaggatactcag

SEQ ID NO: 283471 - DNA, 533 bp, Homo sapiens
aggaattgaggaggtcctattactattccatggtatttagmggaaggacacgactgcttaaagttgtacccctattagttggcagagttggaattggaacccaggatgttctgattgcagagttgatgctttagttttatggagcacgtctggaaaaatagggctggtggtatggtgcagggggaggaagacccagaatctggtgagagtgggatggaataataaagacacattaatgttataaattattattagtatacagatagctatagtatattgggtacctactctttgcaacctataggagaagaaaaataattttccctctacctttctaaattctcagctgggcccctgtaacaaaggacagattgataagagaaaaacagcagtttattaacatgtatatcacatatgtaacccataggagtacccagagatgagtaactcaaaggtttggttagaacttgagtttttacaaaatcttagcaaaaggacaactcatttttagtgatagacaaaggaaaaggatc

SEQ ID NO: 283472 - DNA, 597 bp, Homo sapiens
atggtaaactaatagcagatgaaggctggttactaaaatttgttgtatagattcctctggtgccatccctaggctgataaaagtttaaatttgccctcyctgggagagaggggaggagggatacctttgtaaatttatgtcctgctttgtggcaaataggaggagggcagagagcttttcttgtgtctgtttcttctcagctgcctttagctcaaaataattcttatgccaaagtgacatattttggagaggcatattttgatctcctacaagcccatcttatatatatcatattattaaccctctcaacaactctaggagggctgtatgatccccattttacagatggaaaaagtaaggctgagagaagttgcatgaaattctcttagccacacatctccaaagtccagaaagcagcctgattgccaggcaaagtaagatcacctgatttccttcttaccagggccacaaattgctggtgctgtttagagagggacatgttcttagaactagaagttgcttcaacattgtaattctgtcaaaaaaaaaaaaaaaaaactgccttgggaagcagttgagactccaaaactataattt

SEQ ID NO: 283473 - DNA, 608 bp, Homo sapiens
acaaattgctggtgctgtttagagagggacatgttcttagaactagaagttgcttcaacattgtaattctgtcaaaaaaaaaaaaaaaaaactgccttgggaagcagttgagactccaaaactataattttattagcttattttcctactttgaatttgttacattaatatgtcgaattaacccagagccacatgtagagtttaatttgtatgtcttccttggggaattctgggcctattgcagaaattcacttccacatgtagccctggaccctggagggtaagatagggaggagttgcaggaggcgcctcagatggagtcctgtggtccctgggcttcctgggagtggcctagcctggctgtgcgtcagttctgtgtcatcttctccagactctttaytcctctcagaacagcatggaaatccccaagtcacttagtgctactctcaaagtcaccagaagacacctcatcccaaaatcattcaggagcataagcccctggaaggctggatgacactgtaaggctgtttttagaaatgtaataacctgtttgccacttgtatgtcttcttttgagaaatgtctattcaaatcttttgcccatttttt

SEQ ID NO: 283474 - DNA, 554 bp, Homo sapiens
tgtttctctggacaatattttggaaatcttaaagtacgtaagtgaatctaaagatcattttattaacttcattataatattaactctttccgtccaagaatatgacagatctctcytttgtttaggtctttcacaaggtcttgaaataaaggtttatatttttttctgtaaaaggtttttacatcttttgttagcttttcctcctagataaatgtatcttttcttaaaaaaatatatcaaatatatcttttaaattttgctttctgactgctgagagtatagagcaatataattgacatttttataggaacttggtaaatagcaatgctaaaatttgttatttactctaattttttgtactggttttggatttgtatgcaaacagtcatataatgtgcaaatattgacatgtgtctccctttcaaatcttcattttactttattttatttcatatttttcttatcttattgtacaggctaggatctctagtacaatgttaaatagaagtagtggtaaatgggcattcatgatttgtgtctaaaggtggctgata

SEQ ID NO: 283475 - DNA, 554 bp, Homo sapiens
tgtttctctggacaatattttggaaatcttaaagtacgtaagtgaatctaaagatcattttattaacttcattataatattaactctttccgtccaagaatatgacagatctctcttttgtttaggtctttcacaaggtcttgaaataaaggtttatatttttttctgtaaaaggtttttacatcttttgttagcttttcctcctagataaatgtatcttttcttaaaaaaatatatcaaatatatcttttaaattttgstttctgactgctgagagtatagagcaatataattgacatttttataggaacttggtaaatagcaatgctaaaatttgttatttactctaattttttgtactggttttggatttgtatgcaaacagtcatataatgtgcaaatattgacatgtgtctccctttcaaatcttcattttactttattttatttcatatttttcttatcttattgtacaggctaggatctctagtacaatgttaaatagaagtagtggtaaatgggcattcatgatttgtgtctaaaggtggctgata

SEQ ID NO: 283476 - DNA, 554 bp, Homo sapiens
tgtttctctggacaatattttggaaatcttaaagtacgtaagtgaatctaaagatcattttattaacttcattataatattaactctttccgtccaagaatatgacagatctctcttttgtttaggtctttcacaaggtcttgaaataaaggtttatatttttttctgtaaaaggtttttacatcttttgttagcttttcctcctagataaatgtatcttttcttaaaaaaatatatcaaatatatcttttaaattttgctttctgactgctgagagtatagagcaatataattgacatttttatakgaacttggtaaatagcaatgctaaaatttgttatttactctaattttttgtactggttttggatttgtatgcaaacagtcatataatgtgcaaatattgacatgtgtctccctttcaaatcttcattttactttattttatttcatatttttcttatcttattgtacaggctaggatctctagtacaatgttaaatagaagtagtggtaaatgggcattcatgatttgtgtctaaaggtggctgata

SEQ ID NO: 283477 - DNA, 532 bp, Homo sapiens
caacactgtccccttctccttccaataattaactacttaaaaaaagttttggtttatccttctttttgcaaacatgagcaaatatgtataacttgcatttaaaaaacagcctcaaatcctagacagatacagtatcttttcccctgagccattattccagtgmagcatttcttggttaccacactgctaattcaacctttactgccagcctttaatcaatttgaaggtatttatccctgaattctgctgtccatacctttgtctggatttttgcccccaaactgagttttaattggcccttattgtgcccaaacttcttcaatgttatcttttactgtttaagattgagaagattgccttctgtactgtataagtcccagttctcttttcctcctttctgcaaaccagccaaatctgctgtgaactcacaccatccctatggctccttgctgaatgtagacaatcgtaaccaaaacatataaataacattttgttttctgaactcttcccctagggttataaattcactaga

SEQ ID NO: 283478 - DNA, 606 bp, Homo sapiens
tataataggttacattttacaaatttgctgttttgctctttccattttacaytctaaaatacaaaatgggcttctaaaatcttttttaaaaagtagaattgaattacatggcaattacacccccccacacacatatatactgtcaatggaattctactgaataatttattcaactgaccctctattgatatatagtttatttcaaatgtttgcttttaaggacaatgctgcaaaatactgcattgtcccacaagcatttgcatacatataagattatatctataggaagtgtatggatggctaaatcaaataatatatttttttacattttaattttgatagatattactaaaatgcccttcaattacacctatttattctaccatctacgcaagctgagaatgcctgcccctcaacaacctcagcaatatgtagtattaccaaatattttcatctttttaatatgacaggtgaaaaatattgttttgacattaattgttggattatggaagaggttgaacaactttttcaggaccatcataatcatcactacttcataatgcccaggctgagaagataacatagagctaaaatgcagcctacatt

SEQ ID NO: 283479 - DNA, 606 bp, Homo sapiens
tataataggttacattttacaaatttgctgttttgctctttccattttacattctaaaatacaaaatgggcttctaaaakcttttttaaaaagtagaattgaattacatggcaattacacccccccacacacatatatactgtcaatggaattctactgaataatttattcaactgaccctctattgatatatagtttatttcaaatgtttgcttttaaggacaatgctgcaaaatactgcattgtcccacaagcatttgcatacatataagattatatctataggaagtgtatggatggctaaatcaaataatatatttttttacattttaattttgatagatattactaaaatgcccttcaattacacctatttattctaccatctacgcaagctgagaatgcctgcccctcaacaacctcagcaatatgtagtattaccaaatattttcatctttttaatatgacaggtgaaaaatattgttttgacattaattgttggattatggaagaggttgaacaactttttcaggaccatcataatcatcactacttcataatgcccaggctgagaagataacatagagctaaaatgcagcctacatt

SEQ ID NO: 283480 - DNA, 606 bp, Homo sapiens
tataataggttacattttacaaatttgctgttttgctctttccattttacattctaaaatacaaaatgggcttctaaaatcttttttaaaaagtagaattkaattacatggcaattacacccccccacacacatatatactgtcaatggaattctactgaataatttattcaactgaccctctattgatatatagtttatttcaaatgtttgcttttaaggacaatgctgcaaaatactgcattgtcccacaagcatttgcatacatataagattatatctataggaagtgtatggatggctaaatcaaataatatatttttttacattttaattttgatagatattactaaaatgcccttcaattacacctatttattctaccatctacgcaagctgagaatgcctgcccctcaacaacctcagcaatatgtagtattaccaaatattttcatctttttaatatgacaggtgaaaaatattgttttgacattaattgttggattatggaagaggttgaacaactttttcaggaccatcataatcatcactacttcataatgcccaggctgagaagataacatagagctaaaatgcagcctacatt

SEQ ID NO: 283481 - DNA, 977 bp, Homo sapiens
taaatacatcataaaaaactggagccaagaattccaaaatatagattcagcttacagaagagtttgagmaaagtgagataatgctttagttctatgacttaacagcaatgcattgcaggagctttactcttttatgaatcctggtcttgtttaatagccagtttcagttcgcctaaatgcacttatccttaaaggtcctgcacgatctccctgatgctgtttaacaagtgtagtgtgctggtgacacatttgactgggctattgaagtcagacttccttttatcccaatgggttgatctatctgtagcagatttattttacaaagccatatcctacagacatgtcagtaagtatatatgtcattgtcatactctgatattttgacgcctagattwaggaggaggaagtaagtccagattagtctcttctttctgttgcctgaaaaagagtaggggtataagagagagagagtgagaagagaaggtgtgaaagtgtggaattgagggwgtgaaagagagaagatgtaagagtggaagcaagagagtttaagaaaggatttaggaacaaagaagtgtgaaggtgaaagtgtcagaatagctgaaagaaagaaaaatactaaatgagtaaaacagagagaaataggttaagagcatgctagagttgagtaggagaaaatgagtgaaagaagacaaagaaggaggtctgagcaagaacagaaagtgtacaagagcaaagagaatacttaaagatgtgaagtgagtcagcttgccagtgaaaggcagtgtgtatgagaaaggaattgaaaaggctgagtgtaagagcaagtgagaaagagggagaaagagagttggagaaaaacaaaatgggatatgtatgttagagataaaaagtgagtgtgagagaaaatgagaatgtgttggagaatgtgagagaccaggagaaatttatatttgcttatggagaacaaatactttgag

SEQ ID NO: 283482 - DNA, 426 bp, Homo sapiens
cttaagaatgggaaaatgatttatgaggaagcagcttgaaagagaaacatcatgagacattatttatattaattggaggtttatattataaaagtatccttaagaacattgcttcakttgggtactgagatcagttgcttatgacaggaactctaaggaagtagagttgcagctcacagggcaattgaggggaaattatttatctgtgtatgaattaaaggaaaaaatgaggctatctaaatatgtggtactatataaggaaaaaataggagtaaaagcaaaaggaaaatggaaaaacaatcaaagatctaccccaagaatgacattaatgacaatgttagacaattctagaagcttgtcattttcccattatattttgtaacttactttggcccgtgtttctacaatgtgattacagaaaaaaag

SEQ ID NO: 283483 - DNA, 426 bp, Homo sapiens
cttaagaatgggaaaatgatttatgaggaagcagcttgaaagagaaacatcatgagacattatttatattaattggaggtttatattataaaagtatccttaagaacattgcttcatttgggtactgagatcagttgcttatgacaggaactctaaggaagtagagttgcagctcacagggcaattgaggggaaattatttatytgtgtatgaattaaaggaaaaaatgaggctatctaaatatgtggtactatataaggaaaaaataggagtaaaagcaaaaggaaaatggaaaaacaatcaaagatctaccccaagaatgacattaatgacaatgttagacaattctagaagcttgtcattttcccattatattttgtaacttactttggcccgtgtttctacaatgtgattacagaaaaaaag

SEQ ID NO: 283484 - DNA, 520 bp, Homo sapiens
ttacctatttaacaaacctacacatcctgcacatttaccccttttatttcagttaaaagttggaaaaaaaaatggtgggaatttccaatgagtctttaactgtttttgttttatagtctattcctttctaccttggccctcttcaagacaccccctctgttttgtttgtcaattatcacctcatccacttcttgggatgtaattttctgaaaaaaaaatatgatggtaggttttctttttcctgacagggaaaaataatttcaggatttgagcaaccaaactgttcactcaattttggagtcacctgactccccagatttccacatttgatatgccatttccttttcagaaaacagaaatgatgccacacttacactactgaatcaaatacttgcctatgagcaaaattatcaataaatagtggcaatatttatagtgcatctcctactgaaatccygattgctccatcaaaactcctgcctaacattaaacaacattcacttaaccagatggcatttca

SEQ ID NO: 283485 - DNA, 652 bp, Homo sapiens
agagagatttctttgcattacataatctctcaccattccagataattactggacaacctatacatttagcctaaacttattttgacacaaaattaataaaaggtgaaattatttaatattgtgaaagtataatcaaggcaatggatgaaaaatatactctggcagaaaaatccttccacagtgcaacccctggagacctgaaatgccataacatacaatcaggaaattttgtctgatggaaacatttacaaaaggacttactccaacctcaatggaaaggctcctacaaggacctgttgactagcccctgtgctactaaacttaaagtaattgattcctggatacatgtatctcatctacagaaaacatcagcttctttgtggacctgcattcctgtcaacaaattgaaattaaaaatgcctgggatttgaagaagatascatctgaatagacgacttttcccaagatggaccaggcctgtatatctttttctaatttctgattctcatttattttatatccctctcccctaaaaggaaaatgcccttattgacattttccagtctgtcaccaccaggaattcttaataatttttggatgtgccatcagaaacttcaacacgtttatgactctaataactccctacttcaac

SEQ ID NO: 283486 - DNA, 484 bp, Homo sapiens
aaacatgagtaacctggtgagttgtgggcctctggatttgccagatcttttgtatcatggtatggtgtagccactaatgaataaataagaaatttatctcctaccctaggaattcttgcagactctgctgtgatggctattgctttgtaacagcatttgttagcttctmctgtaagggtagtcttagataacaggattgctcttgatcatttgttagctgagtaaaatagtacctgtgctaatgcaacatgctgtacctggataaattcctctgggaaagttgaggctcagttatatcatataaaagaataagccatctgaatataaaaagtcttacccagttcctcttcgtcatttgatctgttcagttggttgcctgtaaatctaggttcatggctcaaaaccataatgcaaactggaattgtaatattgctattatatttgctttatatttttctttttaaaatttttgcctgtttcctgt

SEQ ID NO: 283487 - DNA, 484 bp, Homo sapiens
aaacatgagtaacctggtgagttgtgggcctctggatttgccagatcttttgtatcatggtatggtgtagccactaatgaataaataagaaatttatctcctaccctaggaattcttgcagactctgctgtgatggctattgctttgtaacagcatttgttagcttctactgtaagggtagtcttagataacaggattgctcttgatcatttgttagctgagtaaaatagtacctgtgctaatscaacatgctgtacctggataaattcctctgggaaagttgaggctcagttatatcatataaaagaataagccatctgaatataaaaagtcttacccagttcctcttcgtcatttgatctgttcagttggttgcctgtaaatctaggttcatggctcaaaaccataatgcaaactggaattgtaatattgctattatatttgctttatatttttctttttaaaatttttgcctgtttcctgt

SEQ ID NO: 283488 - DNA, 540 bp, Homo sapiens
tttatgtggggaaggtgggggatagaattccaggtatagcaataaggacaaagatgcatgaaatagtcaatgtgtctggaatgctgtgagcagaagagtagttcaggttgatgtcataggcttattcaacgccagagaaataaatttagatttcattctaagtgttgaacaaaggtatgggttggtttaatgctagttggcctgctttccttaacctagtaatctctatgcacacaacatttgccttcttttattggatgttctcttatctcctttatttttatttttttttaagcaaaagcaagtttcttagagaagtaaagaaacaacaaaaacaaaaaatgactactcyatagaacgagcagtaatgagggctgcaggttgggatgatgatctcttatctatcgcattcaccctactccctggcttctgattaggcattggacatttccattctggagtagagtctggtatgatgtctcttttatagctcctcagatctgaaatggatagaagaagaaagaaaattattgacaagtc

SEQ ID NO: 283489 - DNA, 600 bp, Homo sapiens
tgggagcaggaaaaggatcagaagaaataactacagggcacgaggcttaacaactgtgttatgaattaatttgtacaactaactattgtgacatgagtttagcatataacaaacctgtacatgtacccctgaacttaaaataaaagtttaaaaataaaaaaaaaaamacaacagaagatgtctgggtttaaaaatgatgaccaagtatatttatctcctctttttaatgtctaatgtaagagattttaaaaatagcacatgtctaaacctagaactgagataaatttgaattgactaagatggcatttctttcattttggaaaataggagcaggaaatataaattaaattaaattatggtaaaacaaaaataaatacatttttgcatgactgaaaaaagataaaaataaaagtcgcttctagagactagcagcaacaggtgtatactctgtgcagaaaagctatggtaagcactgatagtgatattttggtaacaataggttctatttttaaaatacacaccacgtattttcataaaaatgtctcatcaaggattatttatggacaaattaaagatatcaaattatatatcatttaaaaa

SEQ ID NO: 283490 - DNA, 644 bp, Homo sapiens
ggcatcttcactagtatttgctrtatttttctttttggtaatagccattatactgtgtatcattttggatgacaagataaactaaggtaatccatgaattacaaacaaatatttatgtattatcaagttcatttgattcattcatttaataattatttattaagctcttagtatgtgccatttactgtttggtgtcttatttctttaccactggagtacttagagtattttaaacaagaataaactatcctagtaatatttgagattaagactacacaggaatattggtcagcttaggtttttgttcctatttttctatgtttctttactttctgacttttcattatatcttttgtgtggttgagatgatgaaaattcctggagtccttttctcatctgaagtattttttcaggccctattcagtggaaatgatctgccaaaaacatagataaagagatacatctttaatcttacagccctgtctccttgcactggatcagggaaaatgatttttcttttaacagctgtcagcatgcttgacatctgctacagaggcttaggctctatttttatttttcctattgaaatgatactccaacacctgcccctttgatacttttagactgatgtggtaaagaaccag

SEQ ID NO: 283491 - DNA, 483 bp, Homo sapiens
tgatagttttgattacaaggagactaatggagacaagtaagastatacttagaattcaagacaatttctgggctgccttttgctatttttgttctgttaaagaacaccaagtaaaactttccaacacaccaagggctggctaaaagtaaggggcacatggaatgctgctagaaggactctgcgattatcatcttaggttttaagacaaaggacagatgtggggtttgcagcactaattattttttattatctcctgattttccctgcttctttacttgaaaactactgggaatgattgaattaaaatcctccttaaatgacacaaaggcttatgagaggtttacattttctcttggttgttgagttgatttgctttctacgtaaacaaaggataagcatagattttttgcccctcaactctacctgctgttaatctctgatcttctctgttttctgggagtttcccctctatgaaccttatta

SEQ ID NO: 283492 - DNA, 648 bp, Homo sapiens
tagggggtatttggacacaagaagattctgtatcagggcccttgagccgctgcttgggcccgctaccactgtggattgtactctcggtttcaataaatacctgctttggttcttttgttgcttcattctttctttgttttgtccaactctttgttcaaaataccaagaacctggacaaactacagtcacgaccctctaacggtgacaatcgttatacttatttaattttacaaactgaaaaaaaatacacgtgtcttgtcaatctacagtccttttaatttcatacttaaatattttgaatatatgcatttctctcttactattgaagtcagaaaagaatgtaccatcataccattcttggaacaatgtcctgccayatctattattactgtaaatagaatggagtttggaggagtgatctgtatgctggaattttcgagagaaaaggtttgttagtagtttcagataaaaatatctggtaagtgatacttaacatgagaatgtccaaacaatcaatatataaatgtttattaaaaacatactactaaaaagaagacagcattttttttaggacacaaaattaagaaagcaaagcaattaaaaatagtgatagtaactgaatgttaattggagccaaatatgccaagg

SEQ ID NO: 283493 - DNA, 569 bp, Homo sapiens
cttcacactcacagaggcttactttcatcctaattagcaactggactttaataatgtggactccacatgaaactagagctcactaactgtgtgattgattaatgtacctaatctatccagcatattttctctgagatttgttattgttattctcccccttttgagcagtgtggaaaaaatatcctttakggcagtaaaggatgtaattcatgaaattatactttgatcatctcattttaactacacaaaacacatgcacatatgtacacaaacatgcacattaacacatatagatgtatatatttggagaattgaagattcataaggttttcttcttgttctccctttctgaataactatgcaaatgagcaaatggaagaagcaaccaagaaaaaggtaaatatgagatctagaaaacagaaaactaatacaggattataatttgggaaaatgaaataccaagaataattaaaattttaaagcaagacttttattttaaacgtctgatccagtttgaagcagaaagtaaggtgtccaaagaaagaaatgtcttgatgaaaatatggatt

SEQ ID NO: 283494 - DNA, 569 bp, Homo sapiens
cttcacactcacagaggcttactttcatcctaattagcaactggactttaataatgtggactccacatgaaactagagctcactaactgtgtgattgattaatgtacctaatctatccagcatattttctctgagatttgttattgttattctcccccttttgagcagtgtggaaaaaatatcctttatggcagtaaaggatgtaattcatgaaattatactttgatcatctcattttaactacacaaaacacatgcacatakgtacacaaacatgcacattaacacatatagatgtatatatttggagaattgaagattcataaggttttcttcttgttctccctttctgaataactatgcaaatgagcaaatggaagaagcaaccaagaaaaaggtaaatatgagatctagaaaacagaaaactaatacaggattataatttgggaaaatgaaataccaagaataattaaaattttaaagcaagacttttattttaaacgtctgatccagtttgaagcagaaagtaaggtgtccaaagaaagaaatgtcttgatgaaaatatggatt

SEQ ID NO: 283495 - DNA, 1169 bp, Homo sapiens
cttcacactcacagaggcttactttcatcctaattagcaactggactttaataatgtggactccacatgaaactagagctcactaactgtgtgattgattaatgtacctaatctatccagcatattttctctgagatttgttattgttattctcccccttttgagcagtgtggaaaaaatatcctttatggcagtaaaggatgtaattcatgaaattatactttgatcatctcattttaactacacaaaacacatgcacatatgtacacaaacatgcacattaacacatatagatgtatatatttggagaattgaagattcataargttttcttcttgttctccctttctgaataactatgcaaatgagcaaatggaagaagcaaccaagaaaaaggtaaatatgagatctagaaaacagaaaactaatacaggattataatttgggaaaatgaaataccaagaataattaaaattttaaagcaagacttttattttaaacgtctgatccagtttgaagcagaaagtaaggtgtccaaagaaagaaatgtcttgatgaaaatatggattwcacaaatcttcttcttttttattattattattwttttttggagtttcgcactggagtacaatgcccaggctggagtacagtggtgcaatcttggctcactgcaaacttcacctcctgggttcaagcgattctcctgcctcagcctcccaagtagctggcattagaggcatgcacccccacacccagctaattttgtgtttttagtagagacgggatttcaccatgttggtcaggctggtctctaactcctgacctcaggtgatccacccgcctcagcctcccaaagtgctgggattacaggtgtgagccactgtgcctggccaagatcttctattttactacataaatgaatgtgtccttttgagtgtctgtgagttgctcatctggtttcaggatcttcagctaaagttctattcgtaaaattgtactagctcattgattatgcaaaagatacaaggggttagcttttctttcttggacttggaattatttcatctttctcttatgttgctttatttatagcacctaaataaattaacttctgtatctgatcctttttgttttgggtaaatgatttggtttagaaaaggtgaatagta

SEQ ID NO: 283496 - DNA, 611 bp, Homo sapiens
gattagcgctggttttggtccaaagtggtcagttgacgtgaaatcttcccattgtaaactgggtgctttaagttaagctatacttttcattattccgaggacactttccagtacactttccttgttaggatttacctcctcttagataagattttgttgtttatttgagagaaagtttcattgttttacctaggctggagtacagtggtgtgatttcagctcaatgtaacctccasctatgaggctacagtgatccttccacctaggcctcccaagtagctgggattataggtgcataccaccatgttcagtaatttattttattattttattttattttatttttgtagagacagggttgctccatgttgcccaggctggtctcaaactcctgctctcctcttgactcagcctctcaaaatgctggggttacaggtgtgagccactgcacccaggcagtttttgttaattataaatttgaaattaatagggatatgaggagggtgatgggcagtgtgtgtatgcttcatggtcctattaatcaagctgtctgttcttgacttactactaaattgtcttttgtcattatatttcataaaggctggcgtggg

SEQ ID NO: 283497 - DNA, 1215 bp, Homo sapiens
gtgtctgtgagttgctcatctggtttcaggatcttcagctaaagttctattcgtaaaattgtactagctcattgattatgcaaaagatacaaggggttagcttttctttcttggacttggaattatttcatctttctcttatgttgctttatttatagcacctaaataaattaacttctgtatctgatcctttttgttttgggtaaatgatttggtttagaaaaggtgaatagtatgatttgttaggattagcgctggttttggtccaaagtggtcagttgacgtgaaatcttcccattgtaaactgggtgctttaagttaagctatacttttcattattccgaggacactttccagtacactttccttgttaggatttacctcctcttagataagattttgttgtttatttgagagaaagtttcattgttttacctaggctggagtacagtggtgtgatttcagctcaatgtaacctccacctatgaggctacagtgatccttccacctaggcctcccaagtagctgggattataggtgcatrccaccatgttcagtaatttattttattattttattttattttatttttgtagagacaggwgattagcgctggttttggtccaaagtggtcagttgacgtgaaatcttcccattgtaaactgggtgctttaagttaagctatacttttcattattccgaggacactttccagtacactttccttgttaggatttacctcctcttagataagattttgttgtttatttgagagaaagtttcattgttttacctaggctggagtacagtggtgtgatttcagctcaatgtaacctccacctatgaggctacagtgatccttccacctaggcctcccaagtagctgggattataggtgcataccaccatgttcagtaatttattttattattttattttattttatttttgtagagacagggttgctccatgttgcccaggctggtctcaaactcctgctctcctcttgactcagcctctcaaaatgctggggttacaggtgtgagccactgcacccaggcagtttttgttaattataaatttgaaattaatagggatwtgaggagggtgatgggcagtgtgtgtatgcttcatggtcctattaatcaagctgtctgttcttgacttactactaaattgtcttttgtcattatatttcataaaggctggcgtggg

SEQ ID NO: 283498 - DNA, 588 bp, Homo sapiens
cgtgtacatacaaagatggttcagtcatttgtttgctgatttacatcacatttatttgtatttaattttttttacctttgtatgagagattaactgtgccactgaccagttcagtgcatatataggcacattttaaataaagacaatggatattcaagactgaaaagggagtataaaaaggaaaagtgagtatttataagaaaagtattgtaaaaagaacagaagtaaaaattgactaccttctcatacatccaatgtaaatgaatataaagaccmtatttggagcagaaacactcctataagaatttgccagatttaaagtgtgaatgaaatggaataggcagctaataacaaaaaataaagaaataggaaaataagcagataatagcagcatcttaaatatagaccatacagtgtttctagtttagggtgatggacataatgtgttcattcacacttacaaaagtgccataaaaaggtaaaatttgataacataaaaaatagaaaggatccctcaatgaatcagatagtttaagaacgttttgtaagatgaaaggcacatagaatgtgatgggtaaactcttgaga

SEQ ID NO: 283499 - DNA, 573 bp, Homo sapiens
ctccctaatttacctacttatggaccccaagcttaacatttatttcctcagtttacagaaaatcgtatcagatgctgcagtgcaaatagttttaccaatttaattgttaattataagatattgaagaatcacaagacaccagagaaaagcctgcaacatgaaggggaaacgcaaaatgaacatattagaaaaattattccttagaaaacaaattattcagcaaacatggaggaacaattaagcaaatgcaaagagttctgattattatcttagattttttgtttgttctcatatttcatccattaaagaagtttctgtgaataggacaaaaaatggtcctagaaaaatttttttaagtgactgctgagaatatctacmaaaaacttagaggaataaagcaaagaaatacaaaatatattgaataggagtgatgagagtagatgtttttgtcttattctggttcttggggcaataattccaccttttgtctgttcagaaggatgttcactatgggcttctcattgatggctcttattattatgaggtatgcgcctttgatgcctagtctcctga

SEQ ID NO: 283500 - DNA, 525 bp, Homo sapiens
atcataacaagggaaaaatagcatacataatacccaagttaggagtaaaaaaaatgtgagttttgctgaaataaattgaagagactaaagtgtttatttttcaaagtagagacaggagaaagtatctatggttgaaaaaacagtaagtagtaaaactgttaaagttcaaaagattaaaaacagaggtataaaatagtatttcagctttgtagcaagagaagcacrggaagcacataaatagtatacatcaacatagtatgagaaagtcaataaaactataagttacaaaaaaataagggaggatggtattataaacatattttaggtatatataaaatgtatagttaaaagagtttaagaaagatgaaaacttctctttttttctagctcttacccatgtattactttgctcaattttaaatgaattaaaaatacgttaaaaatgcttcaggaaagatttagtgtagctgagaagtttaaattcaattgttacatgaataaataaattctcctgtacctagaatt

SEQ ID NO: 283501 - DNA, 1662 bp, Homo sapiens
atcataacaagggaaaaatagcatacataatacccaagttaggagtaaaaaaaatgtgagttttgctgaaataaattgaagagactaaagtgtttatttttcaaagtagagacaggagaaagtatctatggttgaaaaaacagtaagtagtaaaactgttaaagttcaaaagattaaaaacagaggtataaaatagtatttcagctttgtagcaagagaagcacgggaagcacataaatagtatacatcaacatastatgagaaagtcaataaaactataagttacaaaaaaataagggaggatggtattataaacatattttaggtatatataaaatgtatagttaaaagagtttaagaaagatgaaaacttctctttttttctagctcttacccatgtattactttgctcaattttaaatgaattaaaaatacgttaaaaatgcttcaggaaagatttagtgtagctgagaagtttaaattcaattgttacatgaataaataaattctcctgtacctagaattwatcataacaagggaaaaatagcatacataatacccaagttaggagtaaaaaaaatgtgagttttgctgaaataaattgaagagactaaagtgtttatttttcaaagtagagacaggagaaagtatctatggttgaaaaaacagtaagtagtaaaactgttaaagttcaaaagattaaaaacagaggtataaaatagtatttcagctttgtagcaagagaagcacgggaagcacataaatagtatacatcaacatagtatgagaaagtcaataaaactataagttacaaaaaaataagggaggatggtattataaacatattttaggtatatataaaatgtatagttaaaagagtttaagaaagatgaaaacttctctttttttctagctcttacccatgtattactttgctcaattttaaatgaattaaaaatacgttaaaawtgcttcaggaaagatttagtgtagctgagaagtttaaattcaattgttacatgaataaataaattctcctgtacctagaattwattttctttcctttcttgctccacatcctttgatatttctggctctacaattcactgctccccaaattatctgaactgatacttgaaatgcagctcttactgtagcaatgagaaagttagaaccagggagaattttaggatgacttcttgaacacaataaagtatttaawaaagtaactaataaaaatgggcccaagtataaactttcatccacccctttgctcacttttaagaatccaaacatattaacatattataaacttccgtataattattctgcatgttttctaaattcaggtgtgatgtgctctattcgaatgacatgtaaagttataaaatttgaaaattaaatagaaaaatatatgcacaattcatctttcctttgataggtatagtgatctatttgtgatatttttcaaaattgtattcattttctcaaaggcatgttgtagaattctgggctggttaataataaatagaaaataaattttaatgaaaaactagtaaaattatttcccccataagttattgaaataaaatagggtttctaagccatatttgagttatggtagttgtaagcattatttttagaggctttgacaacaaaagg

SEQ ID NO: 283502 - DNA, 610 bp, Homo sapiens
attttctttcctttcttgctccacatcctttgatatttctggctctacaattcactgctccccaaattatctgaactgatacttgaaatgcagctcttactgtagcaatgagaaagttagaaccagggagaattttaggatgacttcttgaacacaataaagtatttaataaagtaactaataaaaatgggcccaagtataaactttcatccacccctttgctcacttttaagaatccaaacatattaacatattataaacttccgtataattattctgcatgttttctaaattcaggtgtgatgtgctctattcgaatgacatgtaaagttataaaatttgaaaattaaatagaaaaatatatgcacaattcatctttcctttgataggtatagtgatctatttgtgatatttttcaaaattgtattcattttctcaaaggcatgttgtagaattctgggctggttaataataaatagaaaataaatkttaatgaaaaactagtaaaattatttcccccataagttattgaaataaaatagggtttctaagccatatttgagttatggtagttgtaagcattatttttagaggctttgacaacaaaagg

SEQ ID NO: 283503 - DNA, 571 bp, Homo sapiens
gaggaggaagtctaatagctttcctctttctaataagcctaaatatactcacttctgtcattcttttttcctggataactcattgtgaaagttgcacataccaagatgaagtcactagtcagatccagacaaattgggactgagaaagtatgaagaaaataaactcatgtttacatgtttatgtgcctgagatttagcaaaataaaaggtcaaagacatttacaaattacccatctccaccaataaatttattataactctggctttgagcctctagaaccaatgaactctgtctaagcagcttactttaatttcttycttttgataactaaagcttctgtttacccttctctcagcagaagcacctgtggcttgccatggccattcatgccagattgtaatcctacatttttattcgctaataaatttaacgtatttggaaatatttttttctctgatgtgttttttagggcagatgtaatccagtgttagaagcagttctgcagtaagaatacctctgcttatgttgtaggaaaaattgagttcttgtcacaggaccagaaaaggttag

SEQ ID NO: 283504 - DNA, 538 bp, Homo sapiens
atggtggtaaactttatttattccttttttctattaatgctaactataccaagaatacattacccagacaccttgaaaaggcaatgcactagaaaactgaagaattcactgaaatataacaagccattatcaccttcttcccctaacatcttcattttatataggagccactgtaaattaagtcaaaagaaacaatttaaaatttaaaattttcaaaaatgggtctgcttctataagatcaacttttttggtttctatctttgagtgagaatgtgcagtgtttattcctctgtgcctggcttattgtatttaagattatgtcctccaggctcatccatgttgctgatgataggatttcattatttttcatggtaaaatagtattccaggctgggaggggtatttgagagaggataggaaaaggttggtaaatkaatataaaatgatagaaggaatagatcctagtgttctacagcactgtagggtgacaataagtaacaatttattgtatattttcaaatatctagaagagaggattt

SEQ ID NO: 283505 - DNA, 562 bp, Homo sapiens
caacaagcatgtaaaaaatgttcaacctcactaatcattagagaaatgcaaattgaaaccacaatggatacgttttaaatcagctaagttgacacatgaaattaaccatcacaaattcttagttacaattatcattttggtgaatggaatattactaagctaagcaaatgagcaccatctctttgaagtttgccttagcaatggagaaakaaacattcttttctggttcacgttagaatgaaatcttggaacagctcttggtcaatttctttttctactatatgaataaaatctgactaataatgaagccaacacagagaaatttggaacattgataaagaaaaacaacatcttgatatagttaattacctggatctgtctgtatgtgaaggcttccctttgaatttttcatgttataattcaataaattctccctttatatttaaacaagtgtggtttggatttctggcatgaaactgaggaaagctctgcttggttttctggatgagcagtcaggggtaaaatctcaggtaaattgataattccaaagtgttcataacat

SEQ ID NO: 283506 - DNA, 562 bp, Homo sapiens
caacaagcatgtaaaaaatgttcaacctcactaatcattagagaaatgcaaattgaaaccacaatggatacgttttaaatcagctaagttgacacatgaaattaaccatcacaaattcttagttacaattatcattttggtgaatggaatattactaagctaagcaaatgagcaccatctctttgaagtttgccttagcaatggagaaagaaacattcttttctggttcacgttagaatgaaatcttggaacagctcttggtcaatttctttttctactatatgaataaaatctgactaataatgaagccaacacagagaaatttggaacattgataaagaaaaacaacatcttgatatagttaattacctggatctgtctgtatgtgaaggcytccctttgaatttttcatgttataattcaataaattctccctttatatttaaacaagtgtggtttggatttctggcatgaaactgaggaaagctctgcttggttttctggatgagcagtcaggggtaaaatctcaggtaaattgataattccaaagtgttcataacat

SEQ ID NO: 283507 - DNA, 562 bp, Homo sapiens
caacaagcatgtaaaaaatgttcaacctcactaatcattagagaaatgcaaattgaaaccacaatggatacgttttaaatcagctaagttgacacatgaaattaaccatcacaaattcttagttacaattatcattttggtgaatggaatattactaagctaagcaaatgagcaccatctctttgaagtttgccttagcaatggagaaagaaacattcttttctggttcacgttagaatgaaatcttggaacagctcttggtcaatttctttttctactatatgaataaaatctgactaataatgaagccaacacagagaaatttggaacattgataaagaaaaacaacatcttgatatagttaattacctggatctgtctgtatgtgaaggcttccctttgmatttttcatgttataattcaataaattctccctttatatttaaacaagtgtggtttggatttctggcatgaaactgaggaaagctctgcttggttttctggatgagcagtcaggggtaaaatctcaggtaaattgataattccaaagtgttcataacat

SEQ ID NO: 283508 - DNA, 373 bp, Homo sapiens
aaaaaacattgctatagtcagcaaattaaatatttaggataaaatgtaaaatgtcatacaaattctaagaataggtaagaagtagataaacaaaaggtaagaagaaagaattggtcacagacatccagtatatacagattttgagagttggagatttactatccttgaatattgtcctgcrtacacatagaagcacagactgtatttatatagccattccccagtttgtctacttggttccataatttctatcatgggaaacataattactggttttaatagattctaatgtattataatctccctccataatcggttcctaaaaatatcttttttctgaagtttagtgtcaactttttgttttattaaaatt

SEQ ID NO: 283509 - DNA, 1007 bp, Homo sapiens
aaaaaacattgctatagtcagcaaattaaatatttaggataaaatgtaaaatgtcatacaaattctaagaataggtaagaagtagataaacaaaaggtaagaagaaagaattggtcacagacatccagtatatacagattttgagagttggagatttactatccttgaatattgtcctgcgtacacatagaagcacagactgtatttatatagccattccccagtttgtctacttggttccataatttctatcatgggaarcataattactggttttaatagattctaatgtattataatctccctccataatcggttcctaaaaatatcttttttctgaagtttagtgtcaactttttgttttattaaaattwaaattgatgcacagatccaataaaatttcaataataatttcaggagattttaaaaatagatactgacaaatggatcctaaaatttataaggagtagaaaaaaaaatcctattttagccaaaactatttttgaaaagaaaaagattagagaatttatattacatgacttgaaaacttatttwaaaaaaaactactataatgaagactgtggtattgtcataaagatagaaaaatagaacaatagaatagaattttaaaaatagaattagggacatgtacatgtgtcatttataaagacagtgttaaaacagttccatagaaaattgaaagactttctacaaatgggactgaaaaccactgtacattattacaggtaaaaagagccttattagtttcagaaattgattcaaatggatggaatatggatctaaccctaatggttaaattataaacctttcaaaatacaaatgtcttcgtgaccaagcaggtgccttagtaagctcaggctgctataacaaggcatagactaggtggcttataaacaacagaaatttatttcttataaatctagaggcaggaagccctaggtaagggtgccagcatggtagggtttgggtgagcgccctcttccaag

SEQ ID NO: 283510 - DNA, 580 bp, Homo sapiens
ccctataacaagaacatatattcaaaggaatatgttatgtcactattcttggatgtttagcttaaaacatatggctatacactatgaaaaaaaacatagctgcaagctgtaaaagtataacaaatattttagatgtttcagtgcaaaaatgaccaaaataaaattactgtgtgattgttaagataaatgtagttaaccccacactatatcttaataaacrgaaaacaataacgccacaaatttcatttcaaactttacaaattgctgtctctatattgtagaaaaagtaccttttcattgtcatgacataccatgctttatgtacaaaactgaagaagccatcagcaagggaacatgtctattaaaaaaacttccttaaaataccctaacacgcttaacttacattataagagtaatcagaagtaatgttcttgcatgaattaacacactttattacaatttataataaaaataataaaatggaaggaaaaggcataaagagatatgattcacataaaactacaaggcacagaaaataacaacattttctaggtttgacgcagagttttgaatttcatta

SEQ ID NO: 283511 - DNA, 1161 bp, Homo sapiens
ccctataacaagaacatatattcaaaggaatatgttatgtcactattcttggatgtttagcttaaaacatatggctatacactatgaaaaaaaacatagctgcaagctgtaaaagtataacaaatattttagatgtttcagtgcaaaaatgaccaaaataaaattactgtgtgattgttaagataaatgtagttaaccccacactatatcttaataaacggaaaacaataacgccacaaatttcatttcaaactttacaaatkgctgtctctatattgtagaaaaagtaccttttcattgtcatgacataccatgctttatgtacaaaactgaagaagccatcagcaagggaacatgtctattaaaaaaacttccttaaaataccctaacacgcttaacttacattataagagtaatcagaagtaatgttcttgcatgaattaacacactttattacaatttataataaaaataataaaatggaaggaaaaggcataaagagatatgattcacataaaactacaaggcacagaaaataacaacattttctaggtttgacgcagagttttgaatttcattawccctataacaagaacatatattcaaaggaatatgttatgtcactattcttggatgtttagcttaaaacatatggctatacactatgaaaaaaaacatagctgcaagctgtaaaagtataacaaatattttagatgtttcagtgcaaaaatgaccaaaataaaattactgtgtgattgttaagataaatgtagttaaccccacactatatcttaataaacggaaaacaataacgccacaaatttcatttcaaactttacaaattgctgtctctatattgtagaaaaagtaccttttcattgtcatgacataccatgctttatgtacaaaactgaagaagccatcagcaagggaacawgtctattaaaaaaacttccttaaaataccctaacacgcttaacttacattataagagtaatcagaagtaatgttcttgcatgaattaacacactttattacaatttataataaaaataataaaatggaaggaaaaggcataaagagatatgattcacataaaactacaaggcacagaaaataacaacattttctaggtttgacgcagagttttgaatttcatta

SEQ ID NO: 283512 - DNA, 563 bp, Homo sapiens
ctattaaaaaaacttccttaaaataccctaacacgcttaacttacattataagagtaatcagaagtaatgttcttgcatgaattaacacactttattacaatttataataaaaataataaaatggaaggaaaaggcataaagagatatgattcacataaaactacaaggcacagaaaataacaacattttctaggtttgacgcagagttttgaatttcattagtaccattcaaaaaattttatatctagcagattttaaataagaaaaagaaatactgttgtcatttacaattaggcattacagcctctttaaaacagaattctgtgacaggtggactattatcaataaattttcagcagactgtgaacatctacacaattgtaaaggtttaaaaattaactaaataaaggacaaatactttcaaagtcatagataaaaataattttgtaaagtttctttaatttctttaacaaaaamtgaaaacaaaaattaatgttaacttttaagagttatcaagacaaatattaaataattgagacaacttatctgcataagaatacca

SEQ ID NO: 283513 - DNA, 593 bp, Homo sapiens
ccagaagcctctgcttataagtgcttttgcattttaataaggaagaaaagtaattcagataagggtagattctgtcctaggcattcgtcattacatatttccagttcttatatcattatactgcatcattcaccagagaacattattctacatgctaaattgagtgatgcactaaaatgacaaaattttaatctccactaaaattttaagacatacagctatatttggctgaggaagctgtcaatgattcatttacagattttttccccagctgcagtaaagttgtagccattccttcaagcctatcatacattaaaaagaacagtgcttcaattaattcaatttccaggagaaggagctggaaataaaattatttgaacagtatgtggtttggtaagttaagggaaaaactacctttttatattcaaaaataaaacattatttttatttaaaataaaaggaatctaatgatgccatgtgtagtgaartgttatatcgatttagaagtcaaaatatcaaatgtcacatgcatgggaattagaaagtactagtcccaatggtaatggggcatttagaattgtacaaaacgtaag

SEQ ID NO: 283514 - DNA, 567 bp, Homo sapiens
caacaacatgtatttctgagctgaatgtatcactgttttcaacttttacggaatacattttttttacaacgtatttaaaaatctagtcttattcagaatattttctgacaaaagaaacaaaaacttgggagtgaaatattcgcaaatgtctttatttatctacagactgtggtattttcaagacttatttctccctgatagtataaaatacaagttagtaatcaattctatagagattattaaatkttaactttgtaaggtattttctgtttaataattttggattttttacccaccattttgtcttcccaaggatagcctatacatcagagctatgtaaataacgtatatcagcgaggagggagtatctgattgaaagccatcttttgttctctcaccatttgtggtcatagactgctgagctcttttttgtccttatctttttatatttatggacactcttctcagtaattcttcatccttctcaaaacagttggatgttctctcatccttttctctgcaaagaggaaacccaggtggtatcttggcacagcaaacttccttgag

SEQ ID NO: 283515 - DNA, 567 bp, Homo sapiens
caacaacatgtatttctgagctgaatgtatcactgttttcaacttttacggaatacattttttttacaacgtatttaaaaatctagtcttattcagaatattttctgacaaaagaaacaaaaacttgggagtgaaatattcgcaaatgtctttatttatctacagactgtggtattttcaagacttatttctccctgatagtataaaatacaagttagtaatcaattctatagagattattaaatgttaactttgtaaggtattttctgtttaataattttggattttttacccaccattttgtcttcccaaggatagcctatacatcagagctatgtaaataacgtatatcagcgaggagggagtatctgattgaaagccatcttttgttctctcaccatttgtggtcatagactgctgagctcttttttgtccttatctttttatatttatggacactcttctcagtaattcttcatccttctcaaaacagttggatgttctctcatccttttctctgcaaagaggaaacccaggtgrtatcttggcacagcaaacttccttgag

SEQ ID NO: 283516 - DNA, 623 bp, Homo sapiens
ttttgttctctcaccatttgtggtcatagactgctgagctcttttttgtccttatctttttatatttatggacactcttctcagtaattcttcatccttctcaaaacagttggatgttctctcatccttttctctgcaaagaggaaacccaggtggtatcttggcacarcaaacttccttgagatgtttgatgatgattgatgaaaaacaacagggaaaaaaaaaataaatcaaccactctaaatagtctgcttgaccaggaatccttctaaacacccagggtttctattgcatacagttttcctcccactggggattaggacctttgcagggaccagtaacaaagtaatgttctatagcctttctttctaaatctgcatcatttgcccatgtaacatatatataataatgagcatgaagtatttcattttcccatatattgtctcctaatgtattgttaagagttagcaggctctgcatgttccacatcttagttcttaaacccaagtttccttttagtgatacacatgatgaagtatttagaataaagcagagtaatacatgtatttcacttataaaagtatacaaagaaaaggttaaacaaagtgatgtataaattaata

SEQ ID NO: 283517 - DNA, 623 bp, Homo sapiens
ttttgttctctcaccatttgtggtcatagactgctgagctcttttttgtccttatctttttatatttatggacactcttctcagtaattcttcatccttctcaaaacagttggatgttctctcatccttttctctgcaaagaggaaacccaggtggtatcttggcacagcaaacttccttgagatgtttgatgatgattgatgaaaaacaacagggaaaaaaaaaataaatcaaccactctaaatagtctgcttgaccaggaatccttctaaacacccagggtttctattgcatacagttttcctcccactggggattaggacytttgcagggaccagtaacaaagtaatgttctatagcctttctttctaaatctgcatcatttgcccatgtaacatatatataataatgagcatgaagtatttcattttcccatatattgtctcctaatgtattgttaagagttagcaggctctgcatgttccacatcttagttcttaaacccaagtttccttttagtgatacacatgatgaagtatttagaataaagcagagtaatacatgtatttcacttataaaagtatacaaagaaaaggttaaacaaagtgatgtataaattaata

SEQ ID NO: 283518 - DNA, 526 bp, Homo sapiens
ttaagtagttgattgccttttacttctgtttgtgtttctttgaggactgtagaatcttttgagtaatacatatataaatttatacaatttacatttatatttagaaactgtaccaacaacatattatctatatatatctatgagtaaaaatttttagaaatagttaatctgtcatttggtaaaattcttccttacagctttatgtcacaaattcattttgaaataattcttttttacctattttgtgaaactaaatcactggctataygttcagattcacctcaaatatatcttggaagtcattagttttatgccaagattggaacagacatataataagtactcttctgatataatttcaaggtatttttacattatccttactggaatagtgattgcatagtatactaattttctgataacctgatttttccaagatttattttacatatataaactaaaattcaaaaactgaagctttgtatttttaatgacatcttggaagccaagaactaggatttggaaa

SEQ ID NO: 283519 - DNA, 1253 bp, Homo sapiens
gtaccaagtacagatgagtttgcaggtgtgcgctttatgtaacttgagaagcatctgtgtttttttaaaaagactttgaagtatggattctatttctccaaacatttcaaacacattatatgaaacataacttgttaatacaatctaacaaatayagcacaaaaggtaagattatacaaaatttctcatcaatattttacgcattcaatctagcatgctaaaagaataatacagtttgaccaagacaggtttatcaatggcttcaagcatgtttttaatgataaaagaggaatatcccttctcggaattttccgaaatacattattgacagtaggtactacatatcagctagcctaaacacagagtttaagttgttcagtcatttttctggggttcactaagaggcaactaacttagtccttaaaccatttctcctattacatctccaaaagttaacttatttgccaaatgctacataataaatgttaaggaggtgagtttagtccaagacttcaatatccatactcaagtcatgtcatactaccagatggtatttcatataagatagtgtttcaaatacatgtcttgatataaaattttgcaccaaagtccataacattcataatwgtaccaagtacagatgagtttgcaggtgtgcgctttatgtaacttgagaagcatctgtgtttttttaaaaagactttgaagtatggattctatttctccaaacatttcaaacacattatatgaaacataacttgttaatacaatctaacaaatatagcacaaaaggtaagattatacaaaatttctcatcaatattttacgcattcaatctagcatgctaaaagaataatacagtttgaccaagacaggtttatcaatggcttcaagcatgtttttaatgataaaagaggaatatcccttctcggaattttccgaaatacattattgacagtaggtactacatatcagctagcctaaacacagagtttaagttgttcagtcatttttctggggttcactaagaggcaactaacttagtccttaaaccatttctcctattacatctccaaaagttaacttatttgccaaatgctacataataaatgttaaggwggtgagtttagtccaagacttcaatatccatactcaagtcatgtcatactaccagatggtatttcatataagatagtgtttcaaatacatgtcttgatataaaattttgcaccaaagtccataacattcataat

SEQ ID NO: 283520 - DNA, 400 bp, Homo sapiens
aatattaacagcaaaaaaagaaagaaaagagaaataacatttttagttgaagttaggaatatgtgyatctgttgcaagcaagcttgaaggtcatctagaatggcattctaatatctggtgacagttttaaataaacatctcacagatgcagtgttcaacagtattggctgataatactactggcaccgaaccagcattgaactccatttttccagtatctcttgctgacccaagtctttgattgggtatgcacttcactgatcttcatgaataatccttacacaattgccacattttgattagtttttaagcaaaattgttacattcggccaactttatctatttgctaaaaacgaaacaagaactactgagttagaatcagttaaaaatgatcttggtg

SEQ ID NO: 283521 - DNA, 661 bp, Homo sapiens
cagcctgagttcttgcccagtgtactggaagaatcggatcacacttggatttgaaggatgagtacaaggttttgttgagtggtggaagtcgctctcagctagatggagatggatggggagctggaagcaggagatggagtgggaaggtggtcttcccctggaatccagatgcccactggttagactcttctccgcccctggctgaattcccttctgtgtgtccagacatytttctcttctctctttctctgtcatgccaccctgcccctctgttcctctggatgttcagctgcttgtgtctatgtccgctaaggtcttgggttaatatggacacagtataggggatgtagcaggaaaaaggtaattctttgggcctgcgaaccgaaattcctgacctcacttggagccaggggtcttcaggcttgagggtggggcttttgccagggaaccaccgtcttctacccagaatttccctgtcttctgtccataccaataggtaggcctcagaaatcagttcacccacacaaaataccttgttctgattggtagtgaccagtgactttatataaacagatttttatattcacagcctataagtcgatcctgttgatttattcaaaatgctgatggtcagaatagctagaactcctaaaaaagttag

SEQ ID NO: 283522 - DNA, 661 bp, Homo sapiens
cagcctgagttcttgcccagtgtactggaagaatcggatcacacttggatttgaaggatgagtacaaggttttgttgagtggtggaagtcgctctcagctagatggagatggatggggagctggaagcaggagatggagtgggaaggtggtcttcccctggaatccagatgcccactggttagactcttctccgcccctggctgaattcccttctgtgtgtccagacatctttctcttctctctttctctgtcatgccaccctgcccctctgttcctctggatgttcagctgcttgtgtctatgyccgctaaggtcttgggttaatatggacacagtataggggatgtagcaggaaaaaggtaattctttgggcctgcgaaccgaaattcctgacctcacttggagccaggggtcttcaggcttgagggtggggcttttgccagggaaccaccgtcttctacccagaatttccctgtcttctgtccataccaataggtaggcctcagaaatcagttcacccacacaaaataccttgttctgattggtagtgaccagtgactttatataaacagatttttatattcacagcctataagtcgatcctgttgatttattcaaaatgctgatggtcagaatagctagaactcctaaaaaagttag

SEQ ID NO: 283523 - DNA, 661 bp, Homo sapiens
cagcctgagttcttgcccagtgtactggaagaatcggatcacacttggatttgaaggatgagtacaaggttttgttgagtggtggaagtcgctctcagctagatggagatggatggggagctggaagcaggagatggagtgggaaggtggtcttcccctggaatccagatgcccactggttagactcttctccgcccctggctgaattcccttctgtgtgtccagacatctttctcttctctctttctctgtcatgccaccctgcccctctgttcctctggatgttcagctgcttgtgtctatgtccgctaaggtcttgggttaatatggacacagtataggggatgtagcaggaaaaaggtaattctttgggcctgcgaaccgaaattcctgacctcacttggagccaggggtcttcaggcttgagggtggggcttttgccagggaaccaccgtcttctacccagaatttccctgtcttctgtccataccaataggtaggcctcagaaatcagttcacccacacaaaataccttgttctgattggtagtgaccagtgactttatataaacagatttttatattcacagcctataagtygatcctgttgatttattcaaaatgctgatggtcagaatagctagaactcctaaaaaagttag

SEQ ID NO: 283524 - DNA, 535 bp, Homo sapiens
caactcagttgaaaagggacctggagggacttctgcagtgagtgtcyaacctcacatggtctgaaggggcacaggcaagaatcattcatatcccctatcctgggccaggctgggaaagccagtgtgccaggactggggcagcacctgtgaactgcaccaaccacaagggcaggtggtgggctactgatcaccacacagtgggtcttgtgatggcccaggggctgcctgccaggcacaagagggcggctgggtccagaccacatgtgagcagcccatggagtgatctcagccgctctccctggctggaagggtctgggaagtggggaccaagcaggaacagccacctggttgacctcctccctgtctactgtgctcctacggggttaaggcaaaggggaaattggatccttgccaggtttccaataaacaggcttcctcaggatgcaaactcatttcatgaaaagagcctggccccatcaggcacctcagcaacttgtcaaacaggtctcctgcaaggactatcctgtgtgcaaca

SEQ ID NO: 283525 - DNA, 556 bp, Homo sapiens
tttgatagacaccagcacaaatgacaagaaaaasttggtaaagttgaagagactgcctttgttatatctaatattctatcaatcaccccagatctatcttctcaaatctccacattacttagcctaaccctatttttctattttctagaggaacccaccacattgatcaggttgatttattcacattttcccaaaaatgctaggtagattccttcctaaatccattagtaagttatagtctgtattccccatggatgaactgtgttcaccagttatgactcttaggaggaacttcatagaagatcttcagtggcatctattggtacatgttggacattaactaaaaatgtatagttttagcaaccaacagattctattatacctgttggtcatgtccagccagttatgtgtaaaataattacacaatgtttcaaaatttcaagatgtttgcccacctatatagtgtccttcactctcctctccagctttccaaataatatccataattcaaagaccagttaaatcctacaggcatattcacagaataacttccctg

SEQ ID NO: 283526 - DNA, 1151 bp, Homo sapiens
ctgttcctgtctcaccaccgtcactaccaccctgattcaaaccaccatctctccactctccagttaggtttactgctayagccgcctaactggtcttcctacttccctgtagccccttgccttcagtctattctagtttctgcaattagggtgattctttaagaataagtcagaccgagccattcttctcttaaaaccctccaatgacttcactctccatcccactcaaggtattagtttcctcaggctactgtaacaaattaccaccaactgagcaggttaaaagtacagaaatttattctctcacagttctggaggctaggagttgaaagtaaggtgtcatcagggtcatggtctctgaaggctccaggggaggatccttccttgtcttttcctagcttctcacagttgccatcaatccttggcattctttggcttgtagttacgtgactccaatctcttccttcttcttcacatactttatccaccgtgtgtttttctaaatatccacgttcttacaagcacactagtcatttgataagggcccatctgaatccacttaacttgattgactawctgttcctgtctcaccaccgtcactaccaccctgattcaaaccaccatctctccactctccagttaggtttactgctacagccgcctaactggtcttcctacttccctgtagccccttgccttcagtctattctagtttctgcaattagggtgattctttaagaatawgtcagaccgagccattcttctcttaaaaccctccaatgacttcactctccatcccactcaaggtattagtttcctcaggctactgtaacaaattaccaccaactgagcaggttaaaagtacagaaatttattctctcacagttctggaggctaggagttgaaagtaaggtgtcatcagggtcatggtctctgaaggctccaggggaggatccttccttgtcttttcctagcttctcacagttgccatcaatccttggcattctttggcttgtagttacgtgactccaatctcttccttcttcttcacatactttatccaccgtgtgtttttctaaatatccacgttcttacaagcacactagtcatttgataagggcccatctgaatccacttaacttgattgacta

SEQ ID NO: 283527 - DNA, 575 bp, Homo sapiens
ctgttcctgtctcaccaccgtcactaccaccctgattcaaaccaccatctctccactctccagttaggtttactgctacagccgcctaactggtcttcctacttccctgtagccccttgccttcagtctattctagtttctgcaattagggtgattctttaagaataagtcagaccgagccattcttctcttaaaaccctccaatgacttcactctccatcccactcaaggtattagtttcctcaggctactgtaacaaattaccaccaactgagcaggttaaaagtacagaaatttattctctcacagttctggaggctaggagttgaaagtaaggtgtcatcagggtcatggtctctgaagrctccaggggaggatccttccttgtcttttcctagcttctcacagttgccatcaatccttggcattctttggcttgtagttacgtgactccaatctcttccttcttcttcacatactttatccaccgtgtgtttttctaaatatccacgttcttacaagcacactagtcatttgataagggcccatctgaatccacttaacttgattgacta

SEQ ID NO: 283528 - DNA, 564 bp, Homo sapiens
ttgtagttgtgcctggatcgtttgtataaaggccactgttacctgttcttcaaattcattcaggggaggctaaaggtttaaaagttggacaatctgctgggtgctgagagaggcacacagggagcagatggcctctgcatcctcctgggttttcttctttaattgcaggagctgggccgcttggaccagaggtaccatggtctgaactactccactctggtgaagatttcttccccaaagccactcctcaagctaacttatattgtacctgagttgcatgcctgtgctccaagagcagacgtccttccgcaggagcaggtcattaagagtcactgcgttgatcatgtagaagagccgtttgaatacctgcaggatgatctcagggtccaagccctggtcacacatgactgtatgaaaggcattcatctggcagatgatagcttacaggtggtatgagttatccccatctgccatgctggaggagtgcttctgggagccagtgggcttcacaccagatagaycctgaatgctctcattttccaacatggcagaaactatcatcgg

SEQ ID NO: 283529 - DNA, 593 bp, Homo sapiens
gaatttggacatatgatttgatttcttttatagaccttgatttcttcacctgtaaaaatggaataatagtatgattcctatctcattattgtcatgcttaaatcataccacttatgtaggtgcctgtatatatatatatatatayacacacacacacacacacatatctatatatatgactgactttgactgacttaggtctatgatttaagatgcggaaattggaatttaccagaacatttgtgaattgatttgttcttatgcttcaccaactgtcatggtaaaggataccttagccccagctcatagtatgaaaacacgtaaatgcttctatgtgccctaaatttctcttggttaagctttatactttttttttgtttatgacacagaaatatgatcacaaagcacatgtgtaccacaataaaaatttcatgtattttgtctctatgttatgttttctttccatttatgtcttttcaagctaacaattcctaatctcctaatacagtgggcctttcaagcacttacttctttagatagtcatgttcttttaactaggatctcacagataaagttatcaaagcatggaaaag

SEQ ID NO: 283530 - DNA, 593 bp, Homo sapiens
gaatttggacatatgatttgatttcttttatagaccttgatttcttcacctgtaaaaatggaataatagtatgattcctatctcattattgtcatgcttaaatcataccacttatgtaggtgcctgtatatatatatatatatatacacacacacacacacacatatctatatatatgactgactttgactgacttaggtctatgatttaagatgcggaaattggaatttaccagaacatttgtgaattgatttgttcttatgcttcaccaactgtcatggtaaaggayaccttagccccagctcatagtatgaaaacacgtaaatgcttctatgtgccctaaatttctcttggttaagctttatactttttttttgtttatgacacagaaatatgatcacaaagcacatgtgtaccacaataaaaatttcatgtattttgtctctatgttatgttttctttccatttatgtcttttcaagctaacaattcctaatctcctaatacagtgggcctttcaagcacttacttctttagatagtcatgttcttttaactaggatctcacagataaagttatcaaagcatggaaaag

SEQ ID NO: 283531 - DNA, 606 bp, Homo sapiens
caacactgtctgtaggtcatgggtgggactcacggggacctcgctgctaactcttgttgcgttggcggggtggggtggggaggggggtccttagtgctgccacctgcagtgagaaccgccccttggttcctggagggcacccatcaagggacacaggacaggaagcccaggatggttagtgcaactagggatgaaggccagggagaagcaggtgctctgaagtccagacacagaggcctaggagcttcctgttaagygtgggcgttccgctctgtctccaccaggcactctgactagggatggatgatacctctcttcaggcgctccgcggcgctcttgctgccagcataggtgggccggatccctttgcccatctcccctgtgaccaacagcagttctgtgtaggtgctctgggagccctgggcaccagggtggtttcatggcctgcacacaaccgacggtaggcggtccaaagtctttaaacagcggtctgcaaggggcagtggctcccggccctgagcccgacggcgacgggacgcttcctgtagggaccggagtgcctggcccaggggtgctgaagccgggggtgctgctgggggcaggggt

SEQ ID NO: 283532 - DNA, 606 bp, Homo sapiens
caacactgtctgtaggtcatgggtgggactcacggggacctcgctgctaactcttgttgcgttggcggggtggggtggggaggggggtccttagtgctgccacctgcagtgagaaccgccccttggttcctggagggcacccatcaagggacacaggacaggaagcccaggatggttagtgcaactagggatgaaggccagggagaagcaggtgctctgaagtccagacacagaggcctaggagcttcctgttaagcgtgggcgttccgctctgtctcyaccaggcactctgactagggatggatgatacctctcttcaggcgctccgcggcgctcttgctgccagcataggtgggccggatccctttgcccatctcccctgtgaccaacagcagttctgtgtaggtgctctgggagccctgggcaccagggtggtttcatggcctgcacacaaccgacggtaggcggtccaaagtctttaaacagcggtctgcaaggggcagtggctcccggccctgagcccgacggcgacgggacgcttcctgtagggaccggagtgcctggcccaggggtgctgaagccgggggtgctgctgggggcaggggt

SEQ ID NO: 283533 - DNA, 606 bp, Homo sapiens
caacactgtctgtaggtcatgggtgggactcacggggacctcgctgctaactcttgttgcgttggcggggtggggtggggaggggggtccttagtgctgccacctgcagtgagaaccgccccttggttcctggagggcacccatcaagggacacaggacaggaagcccaggatggttagtgcaactagggatgaaggccagggagaagcaggtgctctgaagtccagacacagaggcctaggagcttcctgttaagcgtgggcgttccgctctgtctccaccaggcactctgactagggatggatgatacctctcttcaggcgctccgcggcgctcttgctgccagcataggtgggccggatccctttgcccatctcccctgtgaccaacagcagttcygtgtaggtgctctgggagccctgggcaccagggtggtttcatggcctgcacacaaccgacggtaggcggtccaaagtctttaaacagcggtctgcaaggggcagtggctcccggccctgagcccgacggcgacgggacgcttcctgtagggaccggagtgcctggcccaggggtgctgaagccgggggtgctgctgggggcaggggt

SEQ ID NO: 283534 - DNA, 606 bp, Homo sapiens
caacactgtctgtaggtcatgggtgggactcacggggacctcgctgctaactcttgttgcgttggcggggtggggtggggaggggggtccttagtgctgccacctgcagtgagaaccgccccttggttcctggagggcacccatcaagggacacaggacaggaagcccaggatggttagtgcaactagggatgaaggccagggagaagcaggtgctctgaagtccagacacagaggcctaggagcttcctgttaagcgtgggcgttccgctctgtctccaccaggcactctgactagggatggatgatacctctcttcaggcgctccgcggcgctcttgctgccagcataggtgggccggatccctttgcccatctcccctgtgaccaacagcagttctgtgtaggtgctctgggagccctgggcaccagggtggtttcatggcctgcayacaaccgacggtaggcggtccaaagtctttaaacagcggtctgcaaggggcagtggctcccggccctgagcccgacggcgacgggacgcttcctgtagggaccggagtgcctggcccaggggtgctgaagccgggggtgctgctgggggcaggggt

SEQ ID NO: 283535 - DNA, 943 bp, Homo sapiens
ttgtcttgggagatgtattattatacaaaagatctatttggcaatttatagtttgctttttatctattcaattgttccctggtattcttagaacagaaatgcgaaccttttaagaataataacatgccaattacctttaattactctctagctctttcagttaaacaaaaaaamcctctcattttcggtttagtttgtaactgaatagaacattttatatctaaacccttaatggaaaggctttcctatttcccacaattttcttttctatttaatgtattctctaaatttaacacattatttaaaatgccatccgtatacctgatcaacttgaaaagatggagaaacacacaagtaaagtttattatctgttcacattttattctgtttwtaaaaataagaatgattataaaatattgttaaagaaaagacactgcacagaatagtcatggagatttctgtactaatcaccttgatcataatgaataatcactgaatttcactggcctattttcctccacaagattctatgttaggtaagcaactttgggtaattcaataataggaaagatgtttcttttataacatatctgatttgtacaactawttgaaatacattttatgctataaaataaaaatggtaactcttatttacacagctatttattgtgaatttgtataaagacagctcatccttagaacataatagactaggattcttggtaaagtatatattgtatatctgaaaaatgtaatagtgacaatattaaagtgttgccacttagtgctgtgttacctaaagtgtgtgacactttctgtcagtcttatcactgacatttaaatttcagatataggtgaattcaatattgaagtgaatagagctaccgacatttgctttcctaatattcatggaagttgttgttgacctctcatagataaataa

SEQ ID NO: 283536 - DNA, 552 bp, Homo sapiens
taaaaataagaatgattataaaatattgttaaagaaaagacactgcacagaatagtcatggagatttctgtactaatcaccttgatcataatgaataatcactgaatttcactggcctattttcctccacaagattctatgttaggtaagcaactttgggtaattcaataataggaaagatgtttcttttataacatatctgatttgtacaactatttgaaatacattttatgctataaaataaaaatggtaactcttatttacacagctatttattgtgaatttgtataaagacagctcatccttagaacataatagactaggattcttggtaaagtatatattgtatatctgaaaaatgtaatagtgacaatattaaagtgttgccacttagtgctgtgttacctaaagtgtgtgacrctttctgtcagtcttatcactgacatttaaatttcagatataggtgaattcaatattgaagtgaatagagctaccgacatttgctttcctaatattcatggaagttgttgttgacctctcatagataaataa

SEQ ID NO: 283537 - DNA, 410 bp, Homo sapiens
ctgaaaaatgtaatagtgacaatattaaagtgttgccacttagtgctgtgttacctaaagtgtgtgacactttctgtcagtcttatcactgacatttaaatttcagatataggtgaattcaatattgaagtgaatagagctaccgacatttgctttcctaatattcatggaagttgttgttgacctctcatagataaataagcaaataatatcttcaaaaatatatctaacttgactcaaatacttctaagtattttgtcatttgaagggatatgagcaagttgagaagaagaaatgtggagagagaaatattcatgaaaactaaatktataacattcaactattgctcaattcttagaaatttaatcactacttatattttaaagcaaaatatttttgaacttatttag

SEQ ID NO: 283538 - DNA, 240 bp, Homo sapiens
attattattcactctagtcacagagataagaaagggcaaaatatcataakagaagcccaaataggtcttattttaatggaatatttttccactggacttcaactggtttatcttatttatccgtccatctaagatcagttgaaaaaagagacttgcagatgcaatattttagctaatatatccaatctcctatttgaaatctcctgcgtgtctaacagaaaactcaaatttagtatgtct

SEQ ID NO: 283539 - DNA, 240 bp, Homo sapiens
attattattcactctagtcacagagataagaaagggcaaaatatcataagagaagcccaaataggtcttattttaatggaatatttttccactggacttcaactggtttatcttatttatccrtccatctaagatcagttgaaaaaagagacttgcagatgcaatattttagctaatatatccaatctcctatttgaaatctcctgcgtgtctaacagaaaactcaaatttagtatgtct

SEQ ID NO: 283540 - DNA, 240 bp, Homo sapiens
attattattcactctagtcacagagataagaaagggcaaaatatcataagagaagcccaaataggtcttattttaatggaatatttttccactggacttcaactggtttatcttatttatccgtccatctaagatcagttgaaaaaagagacttgcagatgcaatattttagctaatatatccaatctcctatttgaaatctcctgcgtrtctaacagaaaactcaaatttagtatgtct

SEQ ID NO: 283541 - DNA, 413 bp, Homo sapiens
acaatattagggagtgaaagaagtcatggaagtttcaaaaagtcaaactttatttcagtgttrtggtagaaatttgaaattcttagttaagctataaataaatccttgggcaggtgcaggcatggagattctggagtgctgctgctgagtttaagagcttcctttggagatgccccctggccccctcaacccctgtccacctgtcaagaagaggccatcctgggcagcacattagaggcaaatggcccagatgcccagctgagggcaaacctccattcctggaggaggaggtcacctctgggagcaggaggacctgctggaacccctgctcacaggctccttttcttgctctccagcacctcctgcaggcaggcaaacacccccagcagcagtagcagcagggccttcagcag

SEQ ID NO: 283542 - DNA, 413 bp, Homo sapiens
acaatattagggagtgaaagaagtcatggaagtttcaaaaagtcaaactttatttcagtgttgtggtagaaatttgaaattcttagttaagctatraataaatccttgggcaggtgcaggcatggagattctggagtgctgctgctgagtttaagagcttcctttggagatgccccctggccccctcaacccctgtccacctgtcaagaagaggccatcctgggcagcacattagaggcaaatggcccagatgcccagctgagggcaaacctccattcctggaggaggaggtcacctctgggagcaggaggacctgctggaacccctgctcacaggctccttttcttgctctccagcacctcctgcaggcaggcaaacacccccagcagcagtagcagcagggccttcagcag

SEQ ID NO: 283543 - DNA, 413 bp, Homo sapiens
acaatattagggagtgaaagaagtcatggaagtttcaaaaagtcaaactttatttcagtgttgtggtagaaatttgaaattcttagttaagctataaataaatccttgggcaggtgcaggcatggagattctggagtgctgctgctgagtttaagagcttcctttggagatgccccctggccccctcaacccctgtccacctgtcaagaagaggccatcctgggcagcacattagaggcaaatggcccagatgcccagctgagggcaaacctccattcctggaggaggaggtcrcctctgggagcaggaggacctgctggaacccctgctcacaggctccttttcttgctctccagcacctcctgcaggcaggcaaacacccccagcagcagtagcagcagggccttcagcag

SEQ ID NO: 283544 - DNA, 487 bp, Homo sapiens
cccaggccccaggtggatataaggcctcaggcaaacaccaggccccaggtagacattagacacgagatggacactcaagccacaagtgaacatctgtccccaggtggacatccacccaaggtggacatcaggccagagatgtacacccaggccccaggagaaccccaggccccaggaggacacycaagtgccagaaggacacccagtccctaggtaactacaagaccccaagtggacatgatgttccatatggatatgaggccccaagtggatactaggcccaggtggaccccagatctcaggggcacaccaggccccaggggaacaccaggccctaggtaagcatgcagtcccaggtggacatcagtttccaggaggacaccaggacccagttgctcatcaagccacagctgaacaccagttccccatgaacaccagtcctcaggtgggcacctagtcctctcgtgtgcttcaggtgccaggctga

SEQ ID NO: 283545 - DNA, 487 bp, Homo sapiens
cccaggccccaggtggatataaggcctcaggcaaacaccaggccccaggtagacattagacacgagatggacactcaagccacaagtgaacatctgtccccaggtggacatccacccaaggtggacatcaggccagagatgtacacccaggccccaggagaaccccaggccccaggaggacactcaagtgccagaaggacacccagtccctaggtaactacaagrccccaagtggacatgatgttccatatggatatgaggccccaagtggatactaggcccaggtggaccccagatctcaggggcacaccaggccccaggggaacaccaggccctaggtaagcatgcagtcccaggtggacatcagtttccaggaggacaccaggacccagttgctcatcaagccacagctgaacaccagttccccatgaacaccagtcctcaggtgggcacctagtcctctcgtgtgcttcaggtgccaggctga

SEQ ID NO: 283546 - DNA, 487 bp, Homo sapiens
cccaggccccaggtggatataaggcctcaggcaaacaccaggccccaggtagacattagacacgagatggacactcaagccacaagtgaacatctgtccccaggtggacatccacccaaggtggacatcaggccagagatgtacacccaggccccaggagaaccccaggccccaggaggacactcaagtgccagaaggacacccagtccctaggtaactacaagaccccaagtggacatgatgttccakatggatatgaggccccaagtggatactaggcccaggtggaccccagatctcaggggcacaccaggccccaggggaacaccaggccctaggtaagcatgcagtcccaggtggacatcagtttccaggaggacaccaggacccagttgctcatcaagccacagctgaacaccagttccccatgaacaccagtcctcaggtgggcacctagtcctctcgtgtgcttcaggtgccaggctga

SEQ ID NO: 283547 - DNA, 487 bp, Homo sapiens
cccaggccccaggtggatataaggcctcaggcaaacaccaggccccaggtagacattagacacgagatggacactcaagccacaagtgaacatctgtccccaggtggacatccacccaaggtggacatcaggccagagatgtacacccaggccccaggagaaccccaggccccaggaggacactcaagtgccagaaggacacccagtccctaggtaactacaagaccccaagtggacatgatgttccatatggatatgaggccccaagtggatactaggcccaggtggaccccagatctcaggggcacaccaggccccaggggaacaccaggccctaggtaagcatgmagtcccaggtggacatcagtttccaggaggacaccaggacccagttgctcatcaagccacagctgaacaccagttccccatgaacaccagtcctcaggtgggcacctagtcctctcgtgtgcttcaggtgccaggctga

SEQ ID NO: 283548 - DNA, 1016 bp, Homo sapiens
tgaaaagcagtatggagtttccacaaaaaataaaaaagagaactattatattacccagcaatcccactactgggtacgtaatcaaaaaaaatgaaattagtatgtcaaagagacatctgcacccagggatattgaagcatcattcaaaatagccgtgatatggaatctgcctaaatgctcatctaacaacaaatggataaagaaaatgtggtgtataaatgtatatctatctatctatctatctatctatctatctatctatcatctatctatcatctatctatccacccctccagaacaatattcagccataaaatgctgttattttyagcaatgtggatgaagttggaggacactttgttaagtgaaataagccaggcacagaaagacaagcactgcatgatcaaattcatatctggagttttaaggatatggagaaagatgttaggatttttccttgtgtgaacaatatttaaaattattatatttggagagataactagaatacttctgccaacttaactatgawctcctacactgcagagggtagagggaggtatttatataatacacagaattttaattgaagaagcaaagaggaatggattaatgggattaatagtgtttatccaatacaagatgaaaaacaacatattattgtttgtatcgtgatggttctagaataaaacacatcatttctctaattttagwtagatctttgctgaaagaaaaagataaataaaataccctacagtttatccatatccatgttcctctacactaaatattcatctttgattagttatttttaactatatttgatttctttataaattaccttttgaaactttaaacacataaagacattgtttccccttaaaagatttttcttttcctttcttttgtttttttaatctaaaacttactttcaaaaacaatgactttcataaactttcaacttgttaaatatagtatttttattaacattctagtttgtaacagaaggcaaaacctaa

SEQ ID NO: 283549 - DNA, 527 bp, Homo sapiens
ggaaaccaaaagcccctttgaatcctaccccccgaggttttccccagccaaggcgaggcggccccagtgcgagatcccccccgcagcctcggaaaacaagcgggcagaaatcccattaggggcagtttaggttttaggaaggaaaggttaggcccctgtggcaaaaaaaaaaaaaccgccccccggagaagcagagcctgggtccccaacggacaaaagtgttttcccatcagcccttgcgctggscgcaggtgaccctggcattcctggtttgagaccagggtgcgcttcaggccgctaggggtacccaaaagcgggcaaaaggcccataaggggaaggtgatgcccctggggcagagaaaaaaaaaaaaaaaaaaaaaacaaccgcgccgcgtataagcggggcctggctcccccacagaagaaactgtcctcacatcagcgcttgcgctgcgccccagggaccctggtatccctggctcgagcccagcgtgcgcctcggcctgctaggggtaccccaaggcaga

SEQ ID NO: 283550 - DNA, 527 bp, Homo sapiens
ggaaaccaaaagcccctttgaatcctaccccccgaggttttccccagccaaggcgaggcggccccagtgcgagatcccccccgcagcctcggaaaacaagcgggcagaaatcccattaggggcagtttaggttttaggaaggaaaggttaggcccctgtggcaaaaaaaaaaaaaccgccccccggagaagcagagcctgggtccccaacggacaaaagtgttttcccatcagcccttgcgctggccscaggtgaccctggcattcctggtttgagaccagggtgcgcttcaggccgctaggggtacccaaaagcgggcaaaaggcccataaggggaaggtgatgcccctggggcagagaaaaaaaaaaaaaaaaaaaaaacaaccgcgccgcgtataagcggggcctggctcccccacagaagaaactgtcctcacatcagcgcttgcgctgcgccccagggaccctggtatccctggctcgagcccagcgtgcgcctcggcctgctaggggtaccccaaggcaga

SEQ ID NO: 283551 - DNA, 395 bp, Homo sapiens
atgcagcggatccacaaggtatctaataatttttatttttaccaagctcatgagtaagttasttagccctgaaacagtttcggagaaaaaaaaagtgttttagtttcttcatctgtaaaatatttatgttgcaaatgattgagcaaatatataaatttaagcagtttgatcctagaacttgttgtgtttaagaatatggattattgagaagtacttcaccatagtatttatcacatagtatgtcctaattgaagattaagtatggttgtaatcataataaagtattttgaaaattcttttgaaaactgttttaatgaattatagattgaacactgagataagatggagttatccatgatctttaagacagcaaaattaggtcttgaaattaaaat

SEQ ID NO: 283552 - DNA, 395 bp, Homo sapiens
atgcagcggatccacaaggtatctaataatttttatttttaccaagctcatgagtaagttagttagccctgaaacagtttcggagaaaaaaaaagtgttttagtttcttcatctgtaaaatatttatgtkgcaaatgattgagcaaatatataaatttaagcagtttgatcctagaacttgttgtgtttaagaatatggattattgagaagtacttcaccatagtatttatcacatagtatgtcctaattgaagattaagtatggttgtaatcataataaagtattttgaaaattcttttgaaaactgttttaatgaattatagattgaacactgagataagatggagttatccatgatctttaagacagcaaaattaggtcttgaaattaaaat

SEQ ID NO: 283553 - DNA, 395 bp, Homo sapiens
atgcagcggatccacaaggtatctaataatttttatttttaccaagctcatgagtaagttagttagccctgaaacagtttcggagaaaaaaaaagtgttttagtttcttcatctgtaaaatatttatgttgcaaatgattgagcaaatatataaatttaagcagtttgatcctagaacttgttgtgtttaagaatatggattattgagaagtacttcaccatagtatttatcacatagtatgtcctaattkaagattaagtatggttgtaatcataataaagtattttgaaaattcttttgaaaactgttttaatgaattatagattgaacactgagataagatggagttatccatgatctttaagacagcaaaattaggtcttgaaattaaaat

SEQ ID NO: 283554 - DNA, 486 bp, Homo sapiens
aaaatatggtactacatatgattgttgccaaatcattctgtatacttaatggttgttcagcactttctgttttataaagtactttcaaatatatcarttcagttagctagtacccaaatccttgatgtaatcactgtcatataacatacaagcaaactgtgtgtaatgaatcacactgcagttggagtacaagagtaggcatcaggaaagtggcagctgtgtcattttgaataaaggctgttgtgggaaaggttccttcagacagatccctctccctaggtatttatgtggtgagaatagcaggtggggtttgtggagtagagtccggggcttgtgcatccttaattcaagtaacagcacttgaattaaaggtttatcctaactataaagctatacatttttctcatgatgtatttgaatatattctttttaaggaaagaaaaaaatgtagtcatataaatgttcaggtcctgaagtatatgtatg

SEQ ID NO: 283555 - DNA, 486 bp, Homo sapiens
aaaatatggtactacatatgattgttgccaaatcattctgtatacttaatggttgttcagcactttctgttttataaagtactttcaaatatatcaattcagttagctagtacccaaatccttgatgtaatcactgtcatataacatacaagcaaactgtgtgtaatgaatcacactgcagttggagtacaagagtaggcatcargaaagtggcagctgtgtcattttgaataaaggctgttgtgggaaaggttccttcagacagatccctctccctaggtatttatgtggtgagaatagcaggtggggtttgtggagtagagtccggggcttgtgcatccttaattcaagtaacagcacttgaattaaaggtttatcctaactataaagctatacatttttctcatgatgtatttgaatatattctttttaaggaaagaaaaaaatgtagtcatataaatgttcaggtcctgaagtatatgtatg

SEQ ID NO: 283556 - DNA, 486 bp, Homo sapiens
aaaatatggtactacatatgattgttgccaaatcattctgtatacttaatggttgttcagcactttctgttttataaagtactttcaaatatatcaattcagttagctagtacccaaatccttgatgtaatcactgtcatataacatacaagcaaactgtgtgtaatgaatcacactgcagttggagtacaagagtaggcatcaggaaagtggcagstgtgtcattttgaataaaggctgttgtgggaaaggttccttcagacagatccctctccctaggtatttatgtggtgagaatagcaggtggggtttgtggagtagagtccggggcttgtgcatccttaattcaagtaacagcacttgaattaaaggtttatcctaactataaagctatacatttttctcatgatgtatttgaatatattctttttaaggaaagaaaaaaatgtagtcatataaatgttcaggtcctgaagtatatgtatg

SEQ ID NO: 283557 - DNA, 486 bp, Homo sapiens
aaaatatggtactacatatgattgttgccaaatcattctgtatacttaatggttgttcagcactttctgttttataaagtactttcaaatatatcaattcagttagctagtacccaaatccttgatgtaatcactgtcatataacatacaagcaaactgtgtgtaatgaatcacactgcagttggagtacaagagtaggcatcaggaaagtggcagctgtgtcattttgaataaaggctgttgtgggaaaggttccttcagacagatccctctccctaggtatttatgtggtgagaatagcaggtggggtttgtggagtagagtccggggcttgtgcatccttaattcaagtaacagcacttgaattaaaggtttatcctaactataaagctatacatttttctcatgatgtatttgaatatattctttttaaggaaagaaaaaaatrtagtcatataaatgttcaggtcctgaagtatatgtatg

SEQ ID NO: 283558 - DNA, 542 bp, Homo sapiens
ccagctggacttcctaggtggagtggggacttggagaacttttttgtctagcaagaggattgtaaaatgcaccaatcagtgctctgtagctagcaagaggattgtaaaatgcaccaatcagcactctgtaaaacgcaccaatcagcaggatcctaaaagtagccaattgcagggaggattgaaaaaaagggcactctgataggacaaaaatggaacatgggaggggccaatacgtgaataaaagctggccaccccagccagcagcagcaacctgctggtgtcacyttccatgctgtgggagctttctccttttgctcttcacaataaaccttgctaccgctcactcgttgggtccacacgatctttaagatctgtaacatgggaaaggtccgtgactccattcttgaagtcagcgagaccacgaacccaccaaacccactggcagaaaccaactccggacataataccacatggcaagctctgttctaagcattgatgtgtacaggttatttactcctcataagaacactgaaagataattg

SEQ ID NO: 283559 - DNA, 542 bp, Homo sapiens
ccagctggacttcctaggtggagtggggacttggagaacttttttgtctagcaagaggattgtaaaatgcaccaatcagtgctctgtagctagcaagaggattgtaaaatgcaccaatcagcactctgtaaaacgcaccaatcagcaggatcctaaaagtagccaattgcagggaggattgaaaaaaagggcactctgataggacaaaaatggaacatgggaggggccaatacgtgaataaaagctggccaccccagccagcagcagcaacctgctggtgtcaccttccatgctgtgggagctttctccttttgctcttcacaataaaccttgctaccgctcactcgttgggtccacacgatctttaagatctgtaacatgggaaaggtccgtgactccattcttgaagtcagcgagaccacgaacccaccaaacccacyggcagaaaccaactccggacataataccacatggcaagctctgttctaagcattgatgtgtacaggttatttactcctcataagaacactgaaagataattg

SEQ ID NO: 283560 - DNA, 460 bp, Homo sapiens
catcccaatcattttcagtcaaaatgtgtatatatatatatatgtgtgtgtatatatatgtgtatatatatgtgtatatatatgtgtgtatatatatgtgtatatatgtgtgtatatatatgtgtatatatgtgtgtgtgtatatatgtgtgtatatatatatgtggatatatatgtgtgtatatatatatagatgggaaagaaatacagagcaatctaggaarcattgtgaaaaaatggtgtgaacgtatgcatcaaaaagtaatattacaattttattcagtatcccatccaaacttttctcctgcagggctttcatgcttgctattgtcaaatcttctcccttctgcataactttcatttatcttctctattattgctattgtcacataaatgtgcttttatttatcacattagaaaaatagtcattctcagtctacatgtctcacaaatatagaac

SEQ ID NO: 283561 - DNA, 212 bp, Homo sapiens
cttggcattccctgcctaaatttcagaggatgtatgagaaaggctggatgcccagggagaagactatgcacsactggagctctcaaagaggacctcttctaggacagtgccaagtggaaatgtggggttggaggccccactcggggtcctgactaggggggctgcctagtggagctgtgggaggggggctgctgccctccagatcccagaat

SEQ ID NO: 283562 - DNA, 212 bp, Homo sapiens
cttggcattccctgcctaaatttcagaggatgtatgagaaaggctggatgcccagggagaagactatgcacgactggagctctcaaagaggacctcttctagsacagtgccaagtggaaatgtggggttggaggccccactcggggtcctgactaggggggctgcctagtggagctgtgggaggggggctgctgccctccagatcccagaat

SEQ ID NO: 283563 - DNA, 580 bp, Homo sapiens
gtttgcactaattaatatatattttatatgaacattcctttatttaaaccatccttttttcctagagtgatggattaggggctttcagtgtgcctcagccacttggaagtagaaaaataagcataaagataaactttgtgagcttcaattcaagaagaaaaataggaattcacaggaatagagaagaacactccagaccctgtggagggggaggtgggaaagcagactctgtgatagcatttggttcataaaagggagtgaaactccagtacgagacaagagcagccagtctccctctgcaactcaccttttcacyggggatctgtgcaatccagattaagggagagcactctgtgtctcccaagccttggagctagcacaaaagtggctgagagatggggaaagaggaaagacactcagaaaagctgcaggcatttccccagacctgggactgagagaaggatgccctttttaatctgggctcatacaaagtcaatcattttttggtgcctggcaatggtggccactgcagacactttaatcttgggctaggaattggagtgctttctctggagcaggg

SEQ ID NO: 283564 - DNA, 636 bp, Homo sapiens
cacctgctaccccaaggccacttgattctgaagattcccttgaataaaatgcatgagcatgaggggcagagaccttgaaatggttacattttgaactataaataaccaaggaattaatatgttgggctaaaagtcttggaacattgctagactacacattcttctagaatcaaaaataagaatttgcaaactgaattcaatgtttgagaaatttttagtttcatttctcctcatctgagtcttattgtactatgaaactcacagtcattgtacttgcttcacagttcttattgtgattaaatgaggctccttctgtaaggtccttaaccctgggcttggagcatagtaaggactcacaaatgttaataacccccacctgcctttgtctatgcctttcagagttaatacctgtgggctagagcaaggacagtgaaagaatgcaggaagtaaacactcactctcaaccttggagcygcgcttaatcccctggtagccctaaggctggtgaagcctcccagacactgacaccccactcttgtatctcttctctgtacagtcaggcaagcttggcctctcactctgacacccacagggagtccctttgttaatcacaccctttgtctcacttggcccaaa

SEQ ID NO: 283565 - DNA, 604 bp, Homo sapiens
aaaatgtagaagaggctttggaattgagcaatgggcataagatgaaagaattttgaggcccgtgatagaaaacagctaggtttccttgaagaaactgtaggtagaaatttgggtactaaggactctgccaccaagggttcagaaggaaatgaggaacatggtagagaaaacctgtatcatcttagagaatacctaaatcatcacaaatggaatgttggtagaaatatgaatgttaaaggtgctgctggagggctcagaaggaaatgaagaacatcttgttggaaattggaaagaaggagattctcatttcacagtgacaaagcttagctgaattgtaccctatcrttatgtgagaagcagaacttgttaagtaatgaattttgatatttagttgaggggatttccaaaaatgtattgaaagtatgacctagtttcttcttgtttcctatagtgaagtgtgagagaaaagagaaaaattgagggaagaactgtttagaaaaagaaactaggacttgactattggggaaattcttagcctgtacagtttgcaagacaattatgagattcactatcaggaaagtatgctctggaggaaaagccaatg

SEQ ID NO: 283566 - DNA, 565 bp, Homo sapiens
tattgaggtataattttcatgtaataaaatatacagatattaagtttacagttccatgagtacggacaaatatgttgatgtaacagaattaaaggcctcaaaatagggcctacgtatatggtcaattggttttttacaaaggtgycaagaaaattcaacagggaaagaaaacattttcagcaaatgatgctaaaacaattgaacatataggtgaaaatgaaccccaactcttaaaaattagacattatacataaaaattagagatgaattacagttctaaaagtaaaaaattaactataaagatttttttaaatatataaaataaaatcttcatgaccttggacaagacacaaaaagcattaatcacaaaagaaaaaaaaatcaataaattgtgcctcatcaaaaatttttaatttattcatcaaaggacactattaagaaaatcataaaggataatgacttttaagacttgaaaagcatgcagtttttctacaggtactttcagtaaatttcaactgtcactctcagacctaataacccttcattctaactccctctgtgagtt

SEQ ID NO: 283567 - DNA, 578 bp, Homo sapiens
tatccagcatcaggtggggtccattgttaaaagtcactgatatttattagcatctttctccttcccctggttttatggtaagacttgctyttcaatagagtagagccaatatacttaaaaatgaagagtgtacatcatatccaccagaactgccaggcaaagagcatcttcctgtggtatctagttacagacgtgtttctagttacttttattaattcagatggtaaaccagccttgacagatcatgaagcagtcctttcagagtttttccagaaactagaaacaagaaattgaatcagtggtcaaattctgaccagagccaccaggaccattttcttttgtagatgatttttaccaaaacttcaaggaagggatggtccatatctcacagaaaatgtttcaaagaggggaaaagagaaagccgtcaactaagtttactaaactaataacaaacttgataacaagagaagtacaaggaaataaaggacaattatagaccaatcttaattattaacatagatggaagagtcctacaacattaacaaatcaaatccgatagtatattttttaaattatgt

SEQ ID NO: 283568 - DNA, 588 bp, Homo sapiens
ctaatttacatttccaccaacagtggataaacattcccttttctctgcatctttgccaacatctgttatttttagactttttaatagtagccattctgactggtgtaagatgatatctcattgtcatgtttcttttttttttttttttttgagacagagtcttgctctgttgtccaggctggattgtggagtgcagtggtgtcatctcagctcactgcaacctctgcctcctgggttgaagagatcctcatgcctcagcttcctgagtagctgggattacaggcacgtgccactatgcccagatatatattttgtacctttagtagagacarggttttccatgtatgataaacccacagccaacgtcatactgaatggggaaaaactgaaagcattcaccctaacaactagaacaagacatgatgcctaccttcacccttcttaaataacacagtactgtaagtcctagccagagaaatcaggcaaaagaaagaaataaaaggaatctaagttggaaaagaggaagtcaaattatggtgctgagcttttatctgttgggagattttttttattactgaatcagtgttg

SEQ ID NO: 283569 - DNA, 524 bp, Homo sapiens
gttcatcaatgttcgtgatggtatattgggtagaaaacyatgatcattaatgcctcagttgaaaagcaattcagaagagctggacttagaatatgaagatgttttagaaataccataccaacttatttcacttatattcctatttttacgaatgtacaagaatgacatataactagaatctgtgtcggagcgtccttgctgggcttctggtggtcacagctctgctgtttgctcctagattctgtatttcaaggtggggaagaagtgactgcaggtactagtgatggaaaaagaaggccgtggacaagttctggaacattaaacaacaagacttctttaaaagggaaaggaaaggctgtggtgaagtaaaaatgatgaagaggtgtttttagcaaaaactggtgaccctgctgattatttcaaagtcagttattttgaactatttaaggtattaaccttcttgcagacgtggtgccctcacctacagaggctgaaagtgtccaaagtgaattacgcagaaggcc

SEQ ID NO: 283570 - DNA, 568 bp, Homo sapiens
ctcctcattaaaggattttaagaacaaagtccatttgggaaaaggaggaggtgtgtcctacagaagccacttttccatgggccacgtgcgtgtcagccatgggatgggtttaagtatttacacagagaagtggttcctcaggaggctgagtcctagggcagtggaagtttgttacaggccttgggagcttgggggatgcctgtagttctgtccccagaatcttgtacatttcttctgttaaatgatccttggaattttctttgggaaatcatttctcctcggatttcagctctgttgtttggatggggataaaactgaccccagcctaaactactcaacacaatgcattcctgaggccatggtgattggtttaggggtgggcacatgactcacacagggccaatgagatgaaagacacttttgatgagaattctgggacaaaggtctgcgctttttctctttggctayaaagctggatgcttccaggtcagagctattgctcaggttgtcaactgagatgtctgaaaaaaagggctgaaagacagaaaaatgagttctgatgaaatgg

SEQ ID NO: 283571 - DNA, 521 bp, Homo sapiens
catccaagtggccagtcactctgcgtgggtctattacctgtgggtaggtagctagttatctatccatccaactacccacccatccatccacccacccatccatccayccaccctcccatccagctatctatccacccacccatccatccatccatttattttcctccctccctccattccttcctttcttccattctccaggttcttgtggcccctctttcctttaccattcaaatatgatgccagagccttcaccatgcctgaccagagggcatctcagccccacctgaattttctgaagctttctggggagtgttgacctgcagccattgctgctcgacacctctgtctgtgagctataggcctgggcttcttctgcatgctctatcgctgtccctgcttctgtggacccttcccttttctccccgtgtttgccccaagtatggacacaggagcttcctttactctccacgtctccagtgacacaaagttgtcatgagtcatggactgtattgaggata

SEQ ID NO: 283572 - DNA, 585 bp, Homo sapiens
aatgtaaatcaacactccacttccttcatcaagaaagtcctgctatgaaaaatatgtcagctgaaccaaacaatgtgcttagtgacacagttgatttacattctggcacaaactccttatctcattgcagcccagtaaaaaccagctcacagactgacagtggttcataaaccacatttttagtagcactgctgtagctcatgtaagaaatgccaagtgagaaagtcagcaggygccgccctaaagagagggaaccattggtcctttaccaactgcactgagaagccacaggaagcagaagaggagggctttgtaggtatcaggactgcgggtagtgatcctgctggctagtaacgtggcctcatccagcagatcaagagtcctgctcttggcgacagggagtgaaaaaaggctggtcagaagagagggatggaaggtttctttttcccctacagaaatttcttcgaattgtgctgtaaagccttagcaacaacaacgaaataaattcctggccattgtcctgtaatgtttacatgttcttaattttacagtttttgataaatgtaacagcagaaggcccacagg

SEQ ID NO: 283573 - DNA, 585 bp, Homo sapiens
aatgtaaatcaacactccacttccttcatcaagaaagtcctgctatgaaaaatatgtcagctgaaccaaacaatgtgcttagtgacacagttgatttacattctggcacaaactccttatctcattgcagcccagtaaaaaccagctcacagactgacagtggttcataaaccacatttttagtagcactgctgtagctcatgtaagaaatgccaagtgagaaagtcagcaggcgccgccctaaagagagggaaccattggtcctttaccaactgcactgagaagccacaggaagcagaagaggagggctttgtaggtatcaggactgcgggtagtgatcctgctggctagtaacgtggcctcatccagcagatcaagagtcctgctcttggcgacagggagtgaaaaaaggctggtcagaagagagggatggaaggtttctttttcccctacagaaatttcttcgaattgtgctgtaaagccttagcaacaacaacgaaataaattcctggccattgtcctrtaatgtttacatgttcttaattttacagtttttgataaatgtaacagcagaaggcccacagg

SEQ ID NO: 283574 - DNA, 576 bp, Homo sapiens
actacatagattccctcagcacttaatgaatcttggctcaaatgccacctcctcctagaggccacctcaatttccctctttaaacagcattctcagcccctctctattcycttgctctgatgcatttttcttcataccactaagcagtggctgacattgtcttgtgtatttatcttctgttggttttctggctagaacatgagcttcaggagactgggaactttgtttgggttttgtttggctcattaggtccagaaatcaaataactatttggcaaaggaatacatgaatgagttagtgcctgtaaagcatcattcttgccacacatgcgtgctcacacttattagtgatggaatgaaatgtcctagaacctgtagccctaggatccagttactgccctgctgtcaacttactgtgcatcttaaacaattcccttaacctctctggacctctgggagagcactgagcaaaaggagatatcagttcctgcctttgctgggagagatcagggtcagggaagggtcaaattgataagtagacagtttgccaagcaaaagaagccccaggaatataaag

SEQ ID NO: 283575 - DNA, 581 bp, Homo sapiens
ggtcctatttcacagaggtttttagcaacaaaggtggaaatgtaaagggtgtaagcccccgattatctaaggatccaatgcacagcatcttgcacttytctgggcatgactgctggttggatggagctttgggtgtgtttggctgtatgccaccattcagggcacagtcatgagtgatgagtgtgacagagagacaggtgtagctgtgggggaggatgtcaggattgcccagacagccttatcagtcatgaatctagtttttggaccaccatccatatctcttacttgttgctataatagttctatacaccctgtaacttagtggtttaaaacaacaatcatttcctcttgttcatgtgtctatgggttatgtggcctttggctgatttaggctgggctcagctgggaccagctcaaagcttgtgaactgagtttcacgtctgcctcatttatcttttcttcctccaggaccagtgggccacctagaacaaacgccaagctaaactgctcgagcacagtgatggcctcttcttgtgtcacatttgcagacattccactggccaaagaaagtcatggggcca

SEQ ID NO: 283576 - DNA, 630 bp, Homo sapiens
tgtctgactctgtctcagtggtactcactgatgtaattcatctcagggtagattagagttacttctcaaaacaatcctgtgaagagattgaccatgtaatattatggttcaaattatggagtggagagagactgaggaaagatcactgaactgtgccccaagaatcctcgattctagacctgtttttctcactaatcccaatgtgatcttgagcaactaggttcttctctggttttctgagttccaatctatgactttccaacttcccttccatctctaaccagcagtgatgcccagttcaagaaagggcttggaggatcttctttatggtttccatatgcactctgtacgtgatcatgcactccctgaagagcctcaacatgtgcattcagtactgaatagactgagtcaactcartacctttctctgccccaatggccagtttcagagccttgttgcttctgcatgtcttcacaatggccttactgtatgactaggccagtacttgcctgacctcttctcctactactttccccacttcaaccacaatggcctttttgttattccttgaatacactagccaagctacagactcagggctattccctctacctgagacaatcttatacc

SEQ ID NO: 283577 - DNA, 579 bp, Homo sapiens
tgctattctcttgtttcacattggcaattgcaaccgtagccttctctctgggagccttacccctttctgcccccaagctccatctctgagctctgcttcatttgttctcttgtgcaaagcagtgttctcatgccatctccaaggtcttaccctcctcaaaccaaaagggagccttttggcctagctggtgtctctgccttccttaaatgggagccacactgcagaggctccagaaatatacgtgcatgcacaagagaaggctcaccttcattcaatccaatttaactgtaagaataaaagcattgaaaaacgatctttagcaatcaattctacgaygaattatgcagcaaatcataagcattgcccccaaatattatgtctacaggaaatggccttatgcagctaattgttaactgggaaactctttcattaattcaaatgggtcaacattttaaaatgatactgtcatataaatacagtgtgaaggtttacatgcagatcactctaaggtatccccccccttttttttttagtgaagccgactattgctgcattatgttttattgtgcaataaaatta

SEQ ID NO: 283578 - DNA, 587 bp, Homo sapiens
gatgtgcctctaatatttgactgggttaaatgctggagccttcctcaacccctttactttccattttaactctcctaacactgtggttggctggtggtacagttatgatggctaagagcatagactcaggagccaaactacatgggtttaaatcctggctctgtcaattgcttaccctggataagtcacccaacttccaaggctcataatagtatccgtctcaaaggattattgtaagcatgaattgagttaatatgtgttaggcacccagtctagtgtctgacacatagcaaatgctctcggtaaatatatcagctattattatctcttcaattatttaatctctctctttagtactacagtcactgagagttctctgaggcaaggacctgtttctactgccatagcccaccactgagcacagcgcctggcacctggaagaatctcattactgtttgttgaattgtattgaagtgatgctaaaaaaaatgcggggcggggtgggggggatgtaaaattgtgttgtaaaccaccatgcaagaaattyttattattagctctggaaagagtttattggataaaatatc

SEQ ID NO: 283579 - DNA, 568 bp, Homo sapiens
tcttagagggccttggatatcagcctaaggatattagtcttttccccatgggcaaaggaatcacccagtgttttcctcaagrgagtgactaaactggaatagcaactgagaaagatcactcaaggaaagtgtaaacaggaggttgggggaggtcaagataggaggcagggaggttagaagggagcctgttagaatagactcttctcatcactccttcttatgtggccatgctcttcctggtgacctgccttgcatccagccctccacttaggactcccaggtggtcccactggtcccagttgaccctcagatagctctctgctgcccccacctggcctaggcagcccctgccacaattcacttgcagggccaggccctcttacacatgtactaatatcatggtgaataatatgactcctaggactactggccaagactcagagcacattctacataccaggcactgtccatgtcttttacatgcatcaggtgcttaacagtaacctcataagaactttatgaagtagctcatgttcctatttcacaggtaaggagactgaggcatcaa

SEQ ID NO: 283580 - DNA, 568 bp, Homo sapiens
tcttagagggccttggatatcagcctaaggatattagtcttttccccatgggcaaaggaatcacccagtgttttcctcaagagagtgactaaaytggaatagcaactgagaaagatcactcaaggaaagtgtaaacaggaggttgggggaggtcaagataggaggcagggaggttagaagggagcctgttagaatagactcttctcatcactccttcttatgtggccatgctcttcctggtgacctgccttgcatccagccctccacttaggactcccaggtggtcccactggtcccagttgaccctcagatagctctctgctgcccccacctggcctaggcagcccctgccacaattcacttgcagggccaggccctcttacacatgtactaatatcatggtgaataatatgactcctaggactactggccaagactcagagcacattctacataccaggcactgtccatgtcttttacatgcatcaggtgcttaacagtaacctcataagaactttatgaagtagctcatgttcctatttcacaggtaaggagactgaggcatcaa

SEQ ID NO: 283581 - DNA, 578 bp, Homo sapiens
aggtgggagacagagcagggtggtgttttaatggagacacagtggggtgggaagatccaggtcgggacgcagctggcagtctgcaggagagagcaggcctggagaggtgtcggggagagccaaatgcaaacttctcccacttcccagtgttgcctggggccagccctgggcacaatgataatgtttctataaaacaattctcaggaagcctggtaggagagccgtacctttccacaattaagtgcatccttccaacttaaagacctctctgggatcagctgagattgtgaatgtgttttgagtatacacgaagtgtcatatcagggatggcagggaaagctggggggatgtttctgcatgtgcacgcccctgtgcrcattctcagtgttacaaacttccttatgtccagtaagtcatctcacaaccccaaatgcttattgtattctggctgatgcagcagcagctgagcccctccccagacagacaaatgaagggatataaataagagtgggaaggaaacctttcagggagtgttgcttaaattattattggcaagaaacagaaatcattttaagaca

SEQ ID NO: 283582 - DNA, 529 bp, Homo sapiens
cctgttgtgccatcacagaggaatgtttaagtaaaccatgtttcctctgtgaaacatggaatgcattcatatatgcaggaacatgcagcttttagaatatttccaacaatgtgtggaaattgtggcatcatcgtgttaaatcaaacctgtgtgtgaaacctgcatgtgaaccctatacaaaacaggcacagcagaaaagacccatttagcatgtgagccaaaaagttttcatttcttctgcttaatggatcattctatatttytgttttgttttttgcttttctcttgaacctaaataaacatgtattattcttatacacaaaataaacttaaaaaagaagtgtgggaattcatttgaacttgagtgcagcaaatatgaagaattgaaagagtaagggaagaacacaaggagcagtgtgccgggccttgtggctgggtccctgacctccatctactctttccccatggtacgtcagccttgcaattcaggagagactgattctacccccagctctgggggttgatttac

SEQ ID NO: 283583 - DNA, 529 bp, Homo sapiens
cctgttgtgccatcacagaggaatgtttaagtaaaccatgtttcctctgtgaaacatggaatgcattcatatatgcaggaacatgcagcttttagaatatttccaacaatgtgtggaaattgtggcatcatcgtgttaaatcaaacctgtgtgtgaaacctgcatgtgaaccctatacaaaacaggcacagcagaaaagacccatttagcatgtgagccaaaaagttttcatttcttctgcttaatggatcattctatatttttgttttgttttttgcttttctcttgaacctaaataaacatgtattattcttatacacaaaataaacttaaaaaagaagtgtgggaattcatttgaacttgagtgcagcaaatatgaagaattgaaagagtaagggaagaacacaaggagcagtgtgccgggccttgtggctgggtccctgacctccatctactctttccccatggtaygtcagccttgcaattcaggagagactgattctacccccagctctgggggttgatttac

SEQ ID NO: 283584 - DNA, 561 bp, Homo sapiens
ggagtgctcgagggtatgatgctggttgagttacctgtttagttgctagaagctctagactatttgaaatgaagtttggagaaataaaagacatatcaagagaccctgcactaagagttgtggaaaagtttatactgttatgtccagatgggaaagttgaggcccacgtagaagactttcctaagttaagacagtgaagagtggcagagatagcttcatacccaaatttccttactcctagttcagtgctctttctgtggaaacataagatgctcactgcaaaatctcaaaggtctggaaagtctcaaaatagaattsttttcctcttttcttccccagtacctcaatcatcttgcttctctttctaccttcctcccctttgttttgttgcatctgattcaagtaggctaccctggatctggacaggaatagagatgggaaggagaaaggtaaagaatataccagggcaatctagggaagtctgtagggcaaaagtaaagcaatgatgtcaaaggtgccaaactgatgtagaggaactcatttggtatatccaaggccact

SEQ ID NO: 283585 - DNA, 661 bp, Homo sapiens
acctgcttgtgaaacaaaattgggttgtatgaaattcctgggatagatacttgtctattttcttaaactgcatttagagaaggttgaattggccatgattaactcctgatgaatcagtgccaatggacagtggaatggtttctgttggatcaagtttcacttcagctctcaaagaatacatatttttagatgtgaatttcagattcaaagtctccttttgctatgattttgggagtcttgccaggtggatgtgttaactttccagaccagtggctgaaatctgaaccattgttttcctttgagattgtttgtcagactcttaaagtcttggggcaggggattccagatrtgtctcctatgctgttcacagtttgtgtgctctcacatccagggtgatttagttacagattagaacccaacaccttcctgcccctccactccctccctaggcatctcctaaaccaaggacagtggcaattctcagaaacccagggttagtattttccatttaatgaacttcaagcactgggagagtactgagagaccgcctgatgcaaactggttgcttagcagctgggcaaaataatgcccacagaggtgaagcaatatgaagaaagttatacagcgaatctgagtcataaacagaaagtgaaaaatagta

SEQ ID NO: 283586 - DNA, 1083 bp, Homo sapiens
aatgtaaaaatagctttcttacatttcaacaataaactacgcattaatacaataaaatcccaattgttgtagcaaaaagccataaaacatataaagtaaattcaataagaaatttccaaggtgtgcttaaagaaaactgatacatactaaaataaaggtatttcctttgttctgacaataacagtcttaatattataaagagtctcttaaagaattaaatttaataaaatcccaaacaatatatccatatcttggtaatgaaaacttgtcaaaattattctaaaattcatctctggaagataaatatgcaagattaactagaaagaacaataccatatatttgttttttaaaaaaaatctaaaaagctatattaattaaaatggtatggtattactttagggctagaaaratagtttaattgattataatagattagttcagaagtagattcaaataaatatgggaacatatttatatgataaaatggtwaaaacttgtcaaaattattctaaaattcatctctggaagataaatatgcaagattaactagaaagaacaataccatatatttgttttttaaaaaaaatctaaaaagctatattaattaaaatggtatggtattactttagggctagaaagatagtttaattgattataatagattagttcagaagtagattcaaataaatatgggaacatatttatatgataaaatggtatttcagatcagtgatgagaaacaaggactaacaagtagtattagaataatttgttgaccatttgggaaaagagtgaagatgaattaatactttatgttttatataaaaattaatttcaawcagctcaaatatttaaatgcaaaaattaaagtcatgattattaaaaaatagtgaagcacattattattttcttatgcttaggaggccatagcacaaaactcataaactataaaggaagagattgactatggtaaacatttcttgatgcaaaaaagtatttaaagttataattctaaaagtaaactgtaaaacattctcaagcaagaaaaataccaaataatccaatggtgacttgggtaaaaa

SEQ ID NO: 283587 - DNA, 536 bp, Homo sapiens
aacacccagtctgtgataccttgttttagcagcctgaatgaactaagatagtaggtatgtcctctcatctaacctgtgtcttagtcctttcaggtgactattttaaaaaataccatagacggggtgacttaaacaacaaatatttgtttttcacagtcctggagtctgggaagtccaagatcaaggcttcagcagattcagtgtctggtgagggcacacttctggctcatagrtggtcatcctcttgctgtgttctcatgtggcagaaagaatgaggggtctaaggtctctttcataagggcactaacaccactcaagagagcttcacactattaacctaatcacctctcaaaggcaccccttcctaacaccgtcacattgggagttataatttcaacacctcaattttctgggggacacagacattcagtccataataacctcctatatttctatccccatttgatatataagaaaactgagactcaggaaagtaaagtgaaattcctgaaacctacagagtagaaatggcctag

SEQ ID NO: 283588 - DNA, 511 bp, Homo sapiens
aagtaaagtgaaattcctgaaacctacagagtagaaatggcctagcttagatcctggttcatttgatttttgatctacaatcaaaggttactcagactcaagtttctcatacggaaatcattgtgaggctccacagcacagagtacagtgaagggaacgcatcaaagcctcatactgtcttataaaatgtcagaagcatcaaaggagaatttagtccaggagtccaaatctcaaatatctacacagtycaggcaagtaacattgactagagaagtgcactcaaggtagcacgataggaagtggtgggcgtcgggatgaactggagaggatgcactccatgatagagagctgctgttgctcagcccaaaccaacaacaaaacagaacatgtgcaggctacctgtgtcccctgggccaccagttctcagcctgttattttggttcattcacactgcttttaggcccttcccatgtttcctccagtttgattctcataattccacgaggtagta

SEQ ID NO: 283589 - DNA, 511 bp, Homo sapiens
aagtaaagtgaaattcctgaaacctacagagtagaaatggcctagcttagatcctggttcatttgatttttgatctacaatcaaaggttactcagactcaagtttctcatacggaaatcattgtgaggctccacagcacagagtacagtgaagggaacgcatcaaagcctcatactgtcttataaaatgtcagaagcatcaaaggagaatttagtccaggagtccaaatctcaaatatctacacagttcaggcaagtaacattgactagagaagtgcactcaaggtagcacgataggaagtggtgggcgtcgggatgaactggagaggatgcactccatgatagagagctgctgttgctcagcccaaaccaacaacaaaacagaayatgtgcaggctacctgtgtcccctgggccaccagttctcagcctgttattttggttcattcacactgcttttaggcccttcccatgtttcctccagtttgattctcataattccacgaggtagta

SEQ ID NO: 283590 - DNA, 589 bp, Homo sapiens
tggccacattgtggatatattttccttggcacagtccatgagcagttactttgcaaatgcatgcgggtgagcaatacagacccttggaggagtgtgccaaagctcaaggagagtgctggagagctgaaaggcgctatttaaaattttgggcagaagcatgtacatcaaaaagttatacatatagctggctttgggaagcaggtgtgaagttgacaaagatcgtctccagtggttcttggcccttacttagcactttgccraccttcaccttctgggtttcttgctgctataccccagcctagaccgacttcttttgcctttgacttgtcctccttgctctctcttcatgaaaactcacccattccttagaattttgctctttgtttgggctaatctgataagtgaatctgtgcaattcataaagaaatgggtgttattggtattaagccaagtcctcttatagggttctactcagaggtaacccttgggacttttagtcattctgacaaccaaaataaacttgggtggagtaaagagtgccaaactaaccatgacaagagcagggttttgtaccagctcaattactgct

SEQ ID NO: 283591 - DNA, 608 bp, Homo sapiens
ttctggggaaggacttggtgaagcagargagaagaaggaaaaaaccatttaatatcttcaaatcacatttcctacttgcctctgtctttctgctatggaagagaagtgacaggtgataagagagcactcacccactaactctgacaatggaggaagaaaatggactctatgggatattgcttgtcttcagctcctggcagggctggtgcagagtggccccttctaaggcagtaactagcttcacccttccaagccatccaagactctccttcctgctatgtttctgaagatctctggttcctcttctcctaggcaaaccagggtaagggagactgacagtgggctgggagcctgtgctggctgaggaagccctgaagaacaggagtacagggggagtggtatggccaagaaagcactggatgaggagttcaggttccaatccaaactgggtaacagctcagggtgaggccctggccaagtctttctgcttcattttttattttctctgagtaaaatgagaacaaagattcctgtttccctcaaagtgattctgataactaaataacatgaaaaatcttttcatggcgaaaaccacacaagtgaaaaac

SEQ ID NO: 283592 - DNA, 608 bp, Homo sapiens
ttctggggaaggacttggtgaagcagaagagaagaaggaaaaaaccatttaatatcttcaaatcacatttcctacttgcctctgtctttctgctatggaagagaagtgacaggtgataagagagcactcacccactaactctgacaatggaggaagaaaatggactctatgggatattgcttgtcttcagctcctggcagggctggtgcagagtggccccttctaaggcagtaactagcttcacccttccaagccatccaagactctccttcctgctatgtttctgaagatctctggttcctcttctcctaggcaaaccagggtaagggagactgacagtgggctgggagcctgtgctggctgaggaagccctgaagaacaggagtacagggggagtggtatggccaagaaagcactggatgaggagttcaggttccaatccaaactgggtaacagctcagggtgagrccctggccaagtctttctgcttcattttttattttctctgagtaaaatgagaacaaagattcctgtttccctcaaagtgattctgataactaaataacatgaaaaatcttttcatggcgaaaaccacacaagtgaaaaac

SEQ ID NO: 283593 - DNA, 608 bp, Homo sapiens
ttctggggaaggacttggtgaagcagaagagaagaaggaaaaaaccatttaatatcttcaaatcacatttcctacttgcctctgtctttctgctatggaagagaagtgacaggtgataagagagcactcacccactaactctgacaatggaggaagaaaatggactctatgggatattgcttgtcttcagctcctggcagggctggtgcagagtggccccttctaaggcagtaactagcttcacccttccaagccatccaagactctccttcctgctatgtttctgaagatctctggttcctcttctcctaggcaaaccagggtaagggagactgacagtgggctgggagcctgtgctggctgaggaagccctgaagaacaggagtacagggggagtggtatggccaagaaagcactggatgaggagttcaggttccaatccaaactgggtaacagctcagggtgaggccctggccaagtctttctgcttcattttttattttctctgagtaaaatgagaacaaagattcctgtttccctcaaagtgattctgataactaaataacatgaaaaatcttttcatggygaaaaccacacaagtgaaaaac

SEQ ID NO: 283594 - DNA, 605 bp, Homo sapiens
aaacatgttgaccaacatctccctttcccagttcaccacgagccccagaccctgggaaccaccattctactttctacttccatgagtttgaattttgtaggttccacgtatcagtaagatcatacaatatttgtctctctgtgcctggcttgtttgaataacataatgtcttctcggttcacatatgttgttgcaaattacagaatttcctgtttgtttttttaaaggctgaataatttttcattgtgtatatatatatcacattgttttaatccattaaaccaggggtccccaagccctggaccacttctggtctgtggcctgttaggaactgggctgcatagcaggaggtgagtggcagcccagcgatcctgactgcctgagctttgcctcctgtcagatcagtggcagcattagattctcataggagtgcaaaccctattgtgaactgtacatgaaaggattctaggttgcacaygctttatgagaatctaatgcctgatgatctgaggtagaacagtttcatcctgaaaccgttcccccacccagccccattcatggaaatattaacttccatgaaaccagtctctggtgccaaaaagttg

SEQ ID NO: 283595 - DNA, 1065 bp, Homo sapiens
ttaatatcatctaatgcattatggagagcattttaataattattactttcyttctttccccattgctgtattcctagcgcttacaatggagactggcatataatagatactcaactaatatttgttgaatgaacgtgttcatttttagaaagttggtaaaactaatatttagtaaatttcaaaaaaaaaaaattacaatcagagtacaaaatatcaaataaagatgtaatattagaaaatacagtggttggccaggtgtggcttatgcctgtaatcccagcactttgggaggctgaggtgggcagatcacgaggtcaggagtttgagaccagcctggccaacatggtgaaacctcgtctctactaaaaatacaaaaaaattagctgggcatggtggtgggtgcctgtaatcccagttactcaggaggctgaggcaggagaatcacttgaaaccggaaggcggaggttgtagtgagccgtgatcatgccacagcactccwgactaaaatcattacaatattaagcaaaaatacaaaataaataaattataaaggtattattttatcttaaataccaacacttaagagcagccatacataattaaagaaagtgagaagaaagatgaaaacttttatgctaattctgcaggaaacttcaagcctcttttaaagwtttaagaaatgaggtatttgttatgtctattttcacttcaaagcatggctttctttgtccctgttacaagtggatcaccagcactgctctgatatggttatattcttttcaactcatttaaatgaaataaagagagagctggaaaggtgtttctgatattactaggcaatggctagaagagagatgaagcaaaaaaggtgttaaaaagaagaaaagttacttgagctgaaaatagctgcactgtaaagtaggaacaagcatctagtctctgctcagatatgagtaaagagagggaaaaaaatgaatgtctccaagtttgatggggaatgtgatagggtataaattgtctttaagataagcgggatgggcaagatatagaactactatatgaccc

SEQ ID NO: 283596 - DNA, 658 bp, Homo sapiens
attttcaagtgttcttaaatcatttcatagtacatgctgaacattactgctagaatctgtagaaatctgtaatttctaaggcttaatatttttagtcacattcagtggagattaaataaaagtgatttagtggtgataagaagaactccaaaccacctcatatacactggtgcattgagaaacatcaataaatgttaattatctgactgtcacattattaaaactttaataaatctgttttttcataaaggaaatatagaaaacaaaacattttgcctgtaataaaactctaatttttatcacttctattttcctttaggtgatgtgccctattgaagacaataggagacacgtatatcrtctttctcatatttcagcatttaaaaaaaaaaaaaaaagactgttgatttgttttaacctccgcagatgctttgtgaaggtacaaaggtgcatatggtcaagatgagacatttcctatttttataagcaccttcaaacttccattgcttacatttgtattgaatttcctcaaagcacaatagtaaaaaagtctctacaggagtaaaactgtatccaaactattccatctcagactttgtcttattcctaaaagtactctatggaagaaaatatttgaaaatgtaatgggaaataatcc

SEQ ID NO: 283597 - DNA, 658 bp, Homo sapiens
attttcaagtgttcttaaatcatttcatagtacatgctgaacattactgctagaatctgtagaaatctgtaatttctaaggcttaatatttttagtcacattcagtggagattaaataaaagtgatttagtggtgataagaagaactccaaaccacctcatatacactggtgcattgagaaacatcaataaatgttaattatctgactgtcacattattaaaactttaataaatctgttttttcataaaggaaatatagaaaacaaaacattttgcctgtaataaaactctaatttttatcacttctattttcctttaggtgatgtgccctattgaagacaataggagacacgtatatcatctttctcatatttcagcatttaaaaaaaaaaaaaaaagactgttgatttgttttaacctccgcagatgctttgtgaaggtacaaaggtgcatatggtcaagatgagacatttcctatttttataagcaccttcaaacttccattgcttacatttgtattgaatttyctcaaagcacaatagtaaaaaagtctctacaggagtaaaactgtatccaaactattccatctcagactttgtcttattcctaaaagtactctatggaagaaaatatttgaaaatgtaatgggaaataatcc

SEQ ID NO: 283598 - DNA, 631 bp, Homo sapiens
gtattttgttataaatagtctgaactatttgtaaatgcaatttaattcagcaagtatatgtattcttgctatatacaagatgctgtggcagctactgcaatacgcacaccaatatatgacacaattttggtcattaaggagttagtaatccagggaattaataacagaatatattctatcttaaaattaactcaactaaccaagacctaagagttggccacgtggtgaaatatttttattctggagtgtattttgttatattctycaccactgttttgaactgcaagatgactttttccctgaaaaatataactttctacaagttaaataccaggttatctcactaaagtatggttcctcttgtttttcacatcaatatagcatatatttttataaacagctgtaccaagtgaacacttgctgattttcaatcatcagtatgcaattcactcaataaaagaaaacaagcagccaatattcaggcattctgtttataatgacaacctaaactgccattcaagctcaatactgtctgttataattatcagaatgagtggaaacaaatgatcaataatgggaaagcttcttattcatctcccatggcaatgtgctttcaattcctagtgagatt

SEQ ID NO: 283599 - DNA, 631 bp, Homo sapiens
gtattttgttataaatagtctgaactatttgtaaatgcaatttaattcagcaagtatatgtattcttgctatatacaagatgctgtggcagctactgcaatacgcacaccaatatatgacacaattttggtcattaaggagttagtaatccagggaattaataacagaatatattctatcttaaaattaactcaactaaccaagacctaagagttggccacgtggtgaaatatttttattctggagtgtattttgttatattctccaccactgttttgaactgcaagatgactttttccctgaaaaatataactttctacaagttaaataccaggttatctcactaaagtatggttcctcttgtttttcacatcaatatagcatatatttttataaacagctgtaccaagtgaacacttgctgattttcaatcatcagtatgcaattcactcaataaaagaaaacaarcagccaatattcaggcattctgtttataatgacaacctaaactgccattcaagctcaatactgtctgttataattatcagaatgagtggaaacaaatgatcaataatgggaaagcttcttattcatctcccatggcaatgtgctttcaattcctagtgagatt

SEQ ID NO: 283600 - DNA, 628 bp, Homo sapiens
gaaagccgaccaaatgcccagacattgttgctcgtttctcttttctcagtggaatcactttgcttaccactgccaccatcgtgtcagcatccaaaagtggaaacacactcctcttcacttccccctggtaaagctaaaaaactgtttgcctcttcaaaaagattttgtgaacaaccgtgataaaacacaggtgaatcaaagaaaattcacagaacattaaaataggcctcattacaagccaggggtttcaattctgatcttagttagcttgtgtaagagcttgtaagtttcatcttttctcagaaaagcagcagccctctaggtctgggtcatagagttaaaaatgtatagaatccacactgggtatataaatgagagaagaaggtctggtgaaaaccataaggagtagtaatgagtatggtaaatagatgatttacctatttatctatctaaagacatcacacttgaaatttttttaaacactctacaataattgccaatggggtaaccaagaaaaatcttccctctcagttttgaggctataggttttcaattcactaaaatgagagttaagttaagaaacaacagaaaataaatacatagggaaaraaggtgttaagaaaaaaga

SEQ ID NO: 283601 - DNA, 612 bp, Homo sapiens
tctgagaactgtgagaggggaagtttaagtcccagactccgaaagcctgatagtctgcagctctgatgtctgaggagatggatgtcccagctcaagaagagagagcacatctgcccttccttcacctktttgttctatccgggtcctcaatggattggatgatgcccatccacattggtgagcatgagtctgctttactcagtctaccaatcccaattctaatctcttccagaaacagcctcacagacatacccagaaacaatgttttaccaactagctcagtgtgacacataaaatcaaccatcacaccatgtaaatcaagtcagagtttccatccataaaaggtattttcaaatactagaggacatgggttactttgtccctgattgatctaagccaagcctaggatcttcagcctttcgtcataagaaatgtcatgaagccctttgtcactgaggtcattattttcttcaataggttccagttgtctgtgtacctcttgaaatttgagatccaagactaaacaaaattaagaagagaatatatgtaataagagctaagaaataattcttggggtctgatagatctgtgttactacctaagctctaaaac

SEQ ID NO: 283602 - DNA, 612 bp, Homo sapiens
tctgagaactgtgagaggggaagtttaagtcccagactccgaaagcctgatagtctgcagctctgatgtctgaggagatggatgtcccagctcaagaagagagagcacatctgcccttccttcacctgtttgttctatccrggtcctcaatggattggatgatgcccatccacattggtgagcatgagtctgctttactcagtctaccaatcccaattctaatctcttccagaaacagcctcacagacatacccagaaacaatgttttaccaactagctcagtgtgacacataaaatcaaccatcacaccatgtaaatcaagtcagagtttccatccataaaaggtattttcaaatactagaggacatgggttactttgtccctgattgatctaagccaagcctaggatcttcagcctttcgtcataagaaatgtcatgaagccctttgtcactgaggtcattattttcttcaataggttccagttgtctgtgtacctcttgaaatttgagatccaagactaaacaaaattaagaagagaatatatgtaataagagctaagaaataattcttggggtctgatagatctgtgttactacctaagctctaaaac

SEQ ID NO: 283603 - DNA, 374 bp, Homo sapiens
ctactgaaaatgatccaataaaaagtaaataactgaagatgaaaggaaaaggcagagtcactgaggttatctcctcggggtgaaaggaaataggatccaatgctrggcaagatggctgaataggaacagctccggtctgcagctcccagcgagaccaacacagaaggtgggtgatttctgcatttccaactgaggtacccagttcatctcattaggactggttaaaaagtgggtgcagcctatggagggcgagcaggagcagggtagggtcacctcacccaagaagtgcaaggggtcggggaaccccctcccctagccaagggaaacagtgaaggactgtgctgtgagggacggtgctatccggaccagaaact

SEQ ID NO: 283604 - DNA, 1297 bp, Homo sapiens
gtcctcctcgacctcccaaagtgctgggattacaggtgtgagccaccgcgcccagccccataactcttgtaatggcccaggacaggcccgcaaagtacttctttgctattcmacaagtttccggctttctgcacctaaccagctcccttaacctttccagagctgccttcttcctggcagagagttgattccttaatatgttaggaagatccattggaaattattctgcatggtagactctctgcagttagatcctagcaggcttatccagctgctgtctcctggaagtacggaactaagaaagccaagctaggttaaaggcaacatgaaagccagcagaaaattgaattgacccagctgaggttattatccagttttcccccaaactacatctacatagtgaaaaaagaccaaaggagttcagggtaaaggaggttcttgtactgaatcaggaaggaaactttgtatgaaaacctgaatgtgtctcatttctagatttatttctgaacctccatagtatcaaggaaggaacacagaatttgccatcaatcagactgagctcaaatcctagttcaatctgttaaagattctttaaaaacatctttaacagctatgagatatagtttccacctttatgtaatggataggwgtcctcctcgacctcccaaagtgctgggattacaggtgtgagccaccgcgcccagccccataactcttgtaatggcccaggacaggcccgcaaagtacttctttgctattcaacaagtttccggctttctgcacctaaccagctcccttaacctttccagagctgccttcttcctggcagagagttgattccttaatatgttaggaagatccattggaaattattctgcatggtagactctctgcwgttagatcctagcaggcttatccagctgctgtctcctggaagtacggaactaagaaagccaagctaggttaaaggcaacatgaaagccagcagaaaattgaattgacccagctgaggttattatccagttttcccccaaactacatctacatagtgaaaaaagaccaaaggagttcagggtaaaggaggttcttgtactgaatcaggaaggaaactttgtatgaaaacctgaatgtgtctcatttctagatttatttctgaacctccatagtatcaaggaaggaacacagaatttgccatcaatcagactgagctcaaatcctagttcaatctgttaaagattctttaaaaacatctttaacagctatgagatatagtttccacctttatgtaatggatagg

SEQ ID NO: 283605 - DNA, 1206 bp, Homo sapiens
tacttatctattgttgatataaatggacgctttcaaaaagtctctagaaaaatttagaaatgcaatgttgtaaatttataccgtagaataaaaaaagcatatacgtataagaaaacatttattatggcatttttgttctgtcaaaaatcagaaaagaaggcactagggtatatccatactttggaatactaggcagctgttaaaaagcaaatgttagagctatactggatatcttggagggattgttatgaggtattattgtgtgagagaaatggaagattaataatttggctcaattttaataaaacaatgaaaagtaaattctgtatacatatctgtacacaatatttctgttcacatttaggtctttgtatgagtatatgagaaaatatgagaggaaacacaccaggttgctaatgtaggttaactgaggagctggggtgagatgctattgtagatggaggttggaggagacaagcaaagagtaaaggttgtgtcartggctccacattttcatcaatgtcctaagctctttctatttgtccatcatctttagcatggttttagtcccaatgatcactatagggatgcattgtgtccaggaaagaaataagggaaagawatcaactttgatatctaaccaagttcctcatcccccacctttaatttatgtccttggcctgacttcagaagaatccctttaccattgatgactcctcttagtaactttccatccactgacccctcactctgaaactgggctacaatccccwgctgtctttgctgtattcagagttgagcccaatctctgtcctatattgcaatagtcatgaataaagtcttccctactgttttaacaagtgtcagaactttttctttgtctatggctattctggacagaattagggttctattagctgagaaggaaaaaagggatgggtaatggagaagtaactgtgtctgtgacaccaaagatctccttattctaaaagctagtcattgccatttgagaagcaaatgctggcacagggcataaatccttgtgagctcagaacttacatttaactgccatctctgtcagcgatacacctgggaactcagtgaaacaaagcttgtaaaactttctacctacatattttgtaggagtattgtgaagttttaattagccaatagttataaagtcatttgaagatagtcactgcaagc

SEQ ID NO: 283606 - DNA, 589 bp, Homo sapiens
tgtaagtgaacaacaaataatagctctcattgtttttctacaagttgctttccttttcttaatcttaaatattaggattatccaatctattttgtgtgtgtgtatgcatgtgtgtgtgtgtgtgtgtgtgtgtgtgtccagccacccttacatagcaaaaaccattggytttctttatattttgattcatttttagaaatatctatatcatgaacaatgattaagctttgctcttaaaggtttttgattataggaaatttgtatgttgtatgtctctattaaccataacagttgatacatcaaaccacctggtgttcatttggataacacagaattttctatgtgaatagcattcattgtgcaaatggaaagacagcaaaatataatttggttaatcattaagatgaacacttcggtgtctctgtatctgcctttctatcaaaggtgccttttctaaggctgcatactaaatggattccattgcaatagaaagttcccaggagtgttgaataaaggttaacccaaactatatatagaatacatatttctgtttcttcaggtaaactttaacagataaatgaataagaat

SEQ ID NO: 283607 - DNA, 589 bp, Homo sapiens
tgtaagtgaacaacaaataatagctctcattgtttttctacaagttgctttccttttcttaatcttaaatattaggattatccaatctattttgtgtgtgtgtatgcatgtgtgtgtgtgtgtgtgtgtgtgtgtgtccagccacccttacatagcaaaaaccattggttttctttatattttgattcatttttagaaatatctatatcatgaacaatgattaagctttgctcttaaaggtttttgattataggaaatttgtatgttgtatgtctctattaaccataacagttgatacatcaaaccacctggtgttcatttggataacacagaattttctatgtgaatagcattcatygtgcaaatggaaagacagcaaaatataatttggttaatcattaagatgaacacttcggtgtctctgtatctgcctttctatcaaaggtgccttttctaaggctgcatactaaatggattccattgcaatagaaagttcccaggagtgttgaataaaggttaacccaaactatatatagaatacatatttctgtttcttcaggtaaactttaacagataaatgaataagaat

SEQ ID NO: 283608 - DNA, 556 bp, Homo sapiens
aactctttcaactttgtttcactattagattacttttatgaaaaaatgaatacaaagtttgtatttattttaagctgaaccatatgaaaatgcaatttttgtagttcaaaaatggctgaatcttggcaatttcatgtggttcaatctaatccctttattcaaaaagcattaactgaataatatgcacaagagagaaagaggttgggggaaaaagagtggaagacataattcatgtatttagagatcatcacatccagttaacacgtaaatggatataatgggtacatgacatgataagcggtgatttgatgccttttaactccaggaaaactaaacacagaccacgtgtgttttatattaccaagcaatgtcagcagatatgttcaccttgagcccagccccctttgccaaacccacactgtaagggacaggmtgaaggtcaggtaccgcctggcagataaaccataagaataggagtcaaatgtttattagattttacctacctcggaaagggccaatgattcagccattctctataaaagtactcaaacagaat

SEQ ID NO: 283609 - DNA, 578 bp, Homo sapiens
cagttttacataaggaacttgagcatccacatactttggtaagcaaggggagtcctggagtcagtgccccacagataccaagagacgactgtatgcaataaaattttttaaagaaaaacccctagacatacaaaaagaaagggaaaaaacaaaataccaagactttcacttcatttgatcacttaaaaatactatgcaaaaaggtacaacaatacaacgttcccaggaaagaaatgcatgttcctctcacccactttttccgccaagagtacactgtacatcttgatttttaaaagaaatgaaaataagccatgttatacatgatagtcataaaattctcaggaaaaaatattagatgactcccaaacccytcacatagccttctccctcatactcccatttgctgacctgatagctcattactgcattgctcctttgcaacatctgccccagatgatgtctgcatattttcaagaacagggtaaaagtttctgtccttgcaacaagggacccactaaaaaattctagaccctctcactggatttgagacgtcagtgcagggaaaatgcaaaataaga

SEQ ID NO: 283610 - DNA, 528 bp, Homo sapiens
tttttccttactaactgtattagtctgttttcacgctgctgataaagacatacccaacactgggtaatttataataaaggaaaagaggtttaatggactcacagctctgcgtggctagggaggcctcacaatcatggcagaaggcaaaaggcaagtcttacactgtggcaagcaggagagagaatgatagccaagcgaaaggggtttccctttataaaaccatcagytctcgtgagacttattcactaccaggagaacagtatgggggaaacagcccccatgattcaattatctctcaccgggtcccccccacaatatgtgggaatcatgggagcttcaatacaagatgagatttgtgtggggacacagccaaactctctcactaacttagtaattatcacttgaatattttattaggcatgataattcatttgcttatagccacttgttagccacagccctctaaactcaaagccaggtatcccttcccttccctcagtacagtgcatgctacaacgtcaatagctt

SEQ ID NO: 283611 - DNA, 601 bp, Homo sapiens
tgagttggtctctgctgtcactgtatcccacttgctttagccttgccccattcacaagccatgctgaactatttacagagcttccactggctgctcaagagatattgttcatgctgatcccttggcctcaaatgcccttgtggctaccttctaccctctagtagaccccagatctttacctagttaacttctatttatatttcaagctccaggttgggcatcatctctggaaactttctcctgactttctcaatcctaactgtagggtgatgtcctactaaagctccttatgcacactatagacgtatttctatgacaatacttataaaattgtggcaagttgtttgckacacatctgtgtcctcagaaacagtcttgataacgaacctcttgaaggcagggccataaactatctgttcttgtattcctagtagctagcatggtgcttggcgcagagtggctgtgcagcaaatgtctgtggaaagaatctgtgtgtttatgtggaaatatccaaacagatgtgttcttggcataagggagatatattctgcttgtgtgacaactggcagttgagtttgcttggcatcaaaagcacccaatt

SEQ ID NO: 283612 - DNA, 601 bp, Homo sapiens
tgagttggtctctgctgtcactgtatcccacttgctttagccttgccccattcacaagccatgctgaactatttacagagcttccactggctgctcaagagatattgttcatgctgatcccttggcctcaaatgcccttgtggctaccttctaccctctagtagaccccagatctttacctagttaacttctatttatatttcaagctccaggttgggcatcatctctggaaactttctcctgactttctcaatcctaactgtagggtgatgtcctactaaagctccttatgcacactatagacgtatttctatgacaatacttataaaattgtggcaagttgtttgcgacacatctgtgtcctcagaaacagtcttgataacgaacctcttgaaggcagggccataaactatctgttcttgtattcctagtagctagcatggtgcttggcgcagagtggctgtgcagcaaatgtctgtggaaagaatctgtgtgtttatgtggaaatatccaaacagatgtgttcttggcataagggagatatattctrcttgtgtgacaactggcagttgagtttgcttggcatcaaaagcacccaatt

SEQ ID NO: 283613 - DNA, 393 bp, Homo sapiens
ttgtgaagctgttatgtgaggtcctagatagttctcttaaactctatgaacctcagattcttgtgtgtaagaaagagggtgagggggaccctcaaggggcctagaagtgctttttgtgccagtcatcaaaccagtgtctcagctccaaacccacgtatctttactggctctgtgatcctggcacaggggccctataaaccatgctttcctttgccagtgctgttggatccygccagtatgaagtgccagaaggtgactagaacccagtggaggagagaagggcttgcttcttcctatttgcctgctcttcctgctagcttcatctcagcaatgatacacctcagaaagggcagccaggcagtgtccttagaattctggatcctagcccagtgg

SEQ ID NO: 283614 - DNA, 577 bp, Homo sapiens
taatgacttttagaaaacaggcctctgcacaagaaaaattctacctgatccaaaattaggtagtcgtgtataccaggtacctcacagagagaattccttagggtcatgtatttacccaaaagccacattctgtatgtgtacaatgtccttctattacaaagcaataaattcctttgactttagcagtaaggaaaatagagatgccaattaataggatgacttattccaatcctttagcaagtcagctgaagatccagaagccagagacacatgcctcggtggctgattttgtaagtatggcagacacatccacatatgttctcttctttctatgctctctggatttgtgagaagtccctaatgtccatttctctgtacatactctcatcctctataaagacttctcacttgcattttatattctgcccaatcttcccaaataaatgttttctcaatgyacttgtatatttcaagcagcacagattcagatttctgggtaatagaaacaccagccttcatttgcatgtctaaaagccacttgtttccataaaaccaagttcttgtatgtgactattga

SEQ ID NO: 283615 - DNA, 610 bp, Homo sapiens
ctctattctcatctctccctggccatattcactgaccatcttgccctcagcttgacagagacaactgaggccatcagttggataagaagtctattaatcttgatctcccatctcagttcagcctctatccctctcctcttctatctcagcagggtcttggatctcagtgagttgggtcatcctttccatcccccacccccatatttgtttcttcaggctgttagatctctcttagttttttttttttctatcttcagtgtagcatttttcattgtagataataggagcattcttcaaaacccctctcttcacttggtttctctgaaacacccagccctttcttgatcttccttctacattctggtcttcctttctcagtctkctatctgacctgctaaggcattaaagtctacattcagaaaggaccacagaatcctgttctttcagcatgtcagaaaataacagtaccattagatatcattgtttgacttaggtggaagagacatttatattcaaatctttcttcgttttatatagcttatatggcggaattaaaaataaatatatttaccatcagtattttattacatttttattgcttacttacctt

SEQ ID NO: 283616 - DNA, 1145 bp, Homo sapiens
ttgccaaatttaaggatgccatttccttaataatcttgaaagatgcagcaaatgtatttaataaaacgttaagtctttgtgcaattccttcagaaaagaaattgaattgcttctggaggcacagctcaaaaatccaaagaatcctatcagtggagatatgatatataactcctaataaagtacccragagggaaatctaacaagtgagaacaagagtttggttttaggagagtcacttaatacaattgctctgggttacattgaaaaaggacttgattggaatcagctgtgaccaatctcttcttaagggagaataaactgttatgatagacctgcctcaacagtgaatacctaggtaacaaactattactgttgtatttttccactggttctaactgttaaaaaaaaaatctctgctttaaaacaggtttcttttccttgtttgtgctgtgccttgctttgttcaaattaaattttcaagaacaaacaggaagggaaaagatccctgttgaaaaataaaggaatgcttctgttaggaaagaatgtctaawatcctttttggtagaatccagcacttatttttaaaaactttagttaaaatctcatatattggttacacaattaatcttcagggtagatgcaaaatgggtgtttcattgcaactctttggattttacacagtcattttttaaaacagtttcattaatgtttaaaacacatactagtaagtaaaagactgtaatatattaaaacataaggctttatgttttaaaagagaagttaaggatcccagggaattaaataatgtaatcaaaacactgaaatctgtttcaaagcagtactagttcaccgataaccaaaaaaaaaggagaaaaggggaagttccccctgcttaatgcwtacaaaaaggacttttctatattgctttcacactacattataggtttccacattaccaggactagagaatgaaagaagggtatgaacatatatggaggatatgaccattttaagttttacttttgggataagacatatcagagtaacgcaaaggcaaatttgagtatttcctctcaacatgatatgattggcaaatatatacatacaattagtaatatatatgattaataatatagaaatgtaag

SEQ ID NO: 283617 - DNA, 1703 bp, Homo sapiens
tgaaaatactatccctatgccattgaattgtttgttaacctttacaaaaatcaatacgccatagttgtgtaggtctatttatgggctttttcttctgtttagttaatttatatgtctatccctttgtcaatatcacattttttggttacagaaatgttaaagtgagtcttaaaatcaagcaatctgagttttccaacttcattctttttgaaaatcrttttagctattctagttactctgcatttctttctaaatttaaaaatcagtttgcctgtatctacaaaatgtcctcctgcgattttgattagaattgtatgaaatctctggatcaatttacagaaaattgatgtcttaactatatttagtcttctaattcataaacacagcaagcctctccattaatttagttctttcttggtttctgttattggtattttgttttcaatatacagatcctgcatgtggtttgttaggtttagtcccaagtatttacatttttttgaactattagaagtggtattgactttattagtttctgtttccaattgctcatttctagtagttagatatgcwtgaaaatactatccctatgccattgaattgtttgttaacctttacaaaaatcaatacgccatagttgtgtaggtctatttatgggctttttcttctgtttagttaatttatatgtctatccctttgtcaatatcacattttttggttacagaaatgttaaagtgagtcttaaaatcaagcaatctgagttttccaacttcattctttttgaaaatcgttttagctattctagttactctgcatttctttctaaatttaaaaatcagtttgcctgtatctacaaaatgtcctcctgcgattttgattagaattgtatgaaatctctggatcaatttacagaaaattgatgtcttaactatatttagtcttctaattcataaacacagcaagcctctccattaatttagttctttcttggtttctgttattggtattttgttttcaatatacagatcctgcatgtggtttgttaggtttagtcccaagtatttacatttttttgaactattagaagtggtwttgactttattagtttctgtttccaattgctcatttctagtagttagatatgcwaaaaaattatagaaatttggatactatgttagataactctggatctggaatgttaagtgacataggattttcctggggagaatgttgagattttgttttaccaggtaatcaaaccagattttgtccagaatgcaagttcttatctgccttctgttgctggttgttccaatgtcagttaagtttgaaagtctttgcagttgtctttagatttttcctgcatatgtgatacccagtgtccagttggggagctgggtaatgttctgacttatagttcatttcttattgtcttwggtgtatgctgtttaggctcagacacatgcatatacagcctaattttgagctcgaaaatttatagacaactttatagggtcgatttctcaaactcccttctctctacaatcttctctacattttctaccttcccaaagcctcttttcctggtcctctggctaaaaactcagagttttaattttcccacagtgctgcatattttctatgattttcccataacattgcacctgtttccaaggctaatcggtgagaggattaagagaaaa

SEQ ID NO: 283618 - DNA, 557 bp, Homo sapiens
aaaaaattatagaaatttggatactatgttagataactctggatctggaatgttaagtgacataggattttcctggggagaatgttgagattttgttttaccaggtaatcaaaccagattttgtccagaatgcaagttcttatctgccttctgttgctggttgttccaatgtcagttaagtttgaaagtctttgcagttgtctttagatttttcctgcatatgtgatacccagtgtccagttggggagctgggtaatgttctgacttatagttcatttcttattgtcttaggtgtatgctgtttaggctcagacacatgcatatacagcctaattttgagctcgaaaatttatagacaactttatagggtcgmtttctcaaactcccttctctctacaatcttctctacattttctaccttcccaaagcctcttttcctggtcctctggctaaaaactcagagttttaattttcccacagtgctgcatattttctatgattttcccataacattgcacctgtttccaaggctaatcggtgagaggattaagagaaaa

SEQ ID NO: 283619 - DNA, 474 bp, Homo sapiens
gtctaaaccttccagagactatttctatttcccatgtataccatgctttcataaatataattaattaataatagtttatatgtgtatgtgygtcagggggacaataaaatagtatttgggtaagaaaaggctcataggtatcctctggtactgttatagcaatatttgttgagcacttactgtgtgccctaaattctgtacacacagaatgctcaatccttataatgttcgaaaggggtagatatcattattccaattttacagattaagaaatttgaggaataaagacattaaatttattgctcaaaatcctacagctttaagagagggaggcacaattaggacctgctcagtctaactccacagtatatgtgtgtattgatagactacattaatataacaatgaagcaaactgttaaacccacatgaaactttgaatgctagaaagaaaaccaaacagaacacaatcaatat

SEQ ID NO: 283620 - DNA, 576 bp, Homo sapiens
acatgcgatctgtgattgacaaagatgttgttatatgtttcatgactgtagttctataatagggtcagtatattttgatgaagcaataagttaaggctttgaacatttcataataatcctatagcaaagaggattgcctatttacttgggctttaggaaacagagaaggatctattatgccttcagtacaatcactccacttttctctgatcttttctaatgtaattgtatctagaacccttgctacacaaaacatagtctttggaccaatagcattgacatcacctgggagcttgttggaaacgcagactcaggtccaacccagattaactaatttaaaatttgcattttaataggcaattcacatatccactaaaaattgagaagtgctggactaaacaacttatttcacccaatatgtgctgaaatgtcatctttctttctttaggctctttattaatagatttttatttatttaacctgtgcatttaatgatatattcctttcttatttattctactcyatcattcattctacaagctacaagttacaggcttagtttcccagattcccaga

SEQ ID NO: 283621 - DNA, 364 bp, Homo sapiens
catttaagtctttaatacatcttgggttgatttgtgtatatagtgagagataagggtccagtttcattcttctgcaaatggatatccaattttcctagtactatttattgaaaagagtgtgctttccccattgtttgttcttaacacttttgttgaaattcagttggctgtaggtgaatttctttctgggctctctattctatttcattggtctatgtgtctgtttttataccaataccattctgttytggctactatagccttggagtatagtttgatgtcaggtggtgtgatgtcttcaaatttgctctttctgctcaggtgtgattcgactatttgggctctttgtttcatacaaatttta

SEQ ID NO: 283622 - DNA, 743 bp, Homo sapiens
catttaagtctttaatacatcttgggttgatttgtgtatatagtgagagataagggtccagtttcattcttctgcaaatggatatccaattttcctagtactatttattgaaaagagtgtgctttccccattgtttgttcttaacacttttgttgaaattcagttggctgtaggtgaatttctttctgggctctctattctatttcattggtctatgtgtctgtttttataccaataccattctgttttggctactatagccttggagtatagtttgatgtcaggtggtgtgatgtcttcaaatttgytctttctgctcaggtgtgattcgactatttgggctctttgtttcatacaaattttawgataatggtgccattggctagaagaggaaaccgaaatgaaagcaggttgttcagggagacaaaagttcactgtggacatctcagcagagtgattcagtggggaaaggaatggatgcccagaccacctcagaggaagatctaagctggagccagcaataaagatacaagatgaacaatccctaacgaactgctcctcagccatgctccccagacacgctgcttcagatttatagtccgggtgaggctaggaggtgcgcctccctcagtggaggacagcaaagcaccagtggctccagggagttaaaatcttttgatawtttttgttctagcatctgtctgcagagctgtctctcagccattgcctgcctttacacagga

SEQ ID NO: 283623 - DNA, 561 bp, Homo sapiens
tgaaatttattatgcctagagatctggatccccagttgtttgggagtatattttctgaaccacttgttggtttaagtaatgcagatttattgatgccacttctcttgaatctgtgactctggacccaccatctaagtgaatgtgcagagggaacggaatggctgcaatagatctccattaaaaccagtgcatcctcccagacacatacagtagtagggargtgagtcaatgtcaggacagcaccagctcccgcttcggtacatttccaaagttctcagtctgtgtacaaaggtttgctctggggcagcagaaatagccctgggcaggtagtcaaaggcctggtttgatttcctccacttccaggcaagtcactcgaaggctcacaggctttttcctcacctgccacatgggtccagtgagatctactgagctgtaaataatgaaatgagtgtgtgtgcagtcatctataagttgtaaagtactagaaaatggtgaaactttgggatttgggctatttaaggctgaatgctaaaaatgtcaggcattgtggagaaaggaatt

SEQ ID NO: 283624 - DNA, 661 bp, Homo sapiens
ggtaccaaaatagcaacaaacctaatctgttcatttgcattattttttctccaaaactgattatctatatgtagcaagacagattgttctcaaattgcaaatcccactatattatcctcttgcttcaaacacttccatggtttcccattgtttatgataaaaccaaatgcttcaagttcgaagaccggcatgattgggaatttcctgtcaccctagcctacttgctctccatggtacagttgcactggctttctttcattccttaagtacaacctgtttcctcccacctcaggactgtgcatgtgccattcattctgctgaggagcctttttccttccacttcaatcagctaagtctgattcttcctgamaatctcagctcaataagcatttcctctaagaaatgtctctaatatcattaattggctcaggtccctctactgtattgctgcacttttcacagttataattttacttaattatgaatgattatttgattaggtctatttccatccattagacataagcttcatgatggccagattactgttttctatccatcgttgtattccaatacctgacagaaggagggcgggaggtggtggcacacaagagatgctcaaaaacaattgttgaataagtaaatgaatgaggccatttag

SEQ ID NO: 283625 - DNA, 578 bp, Homo sapiens
agatcaatccagtcttatttctcaaagcatgtaccttgagcttcagataaacagcattgttctcttcccctggactcttcctacatttccctacctatgagtatctgatcaatctgcttatccttgaaatgttaatatatttaccacatctctatttgaattttatgaaatttttgataatttctaagtagttttttcagatttataggcactacttcatggtacagtgactgttacaaacgtatttgttaaatttagaaggaataaagatttaaaagactagggtagttactgaactaaagttttaggaaatcccaaattatttcaaatttttcttatggtaattttatgacttaatatttttatatgcagtgaacaaatttgaaactttaaaagatactcccagaattatcagttttctgatgtagattggcaaatttattactatatcccaaataacccaagagacaaaattcacaaaaacatttcaattttcattgccacttgaaaggccaaaaagcagaaatgrcacgcattgatttcaatcgtactcttgagtgtgggaaccaggaattaaa

SEQ ID NO: 283626 - DNA, 302 bp, Homo sapiens
tgttgtcatgacttttgttcttgactagtctggttttgctttgactggaccacttctacctctttatagccattgctttgatggtgctttgtcttcaagattgtattagtaaagccatatttcatcttctgttacaattcttcaaagaaatacttcagaatcttgatctgacatgtttaaaatttctattggaagctctgaccttgggtgcagctgatctgggcgaaacagttttggcatccatcaagtagaaagtttgctcaactttagtttttcmgtcagaattgtataagctgaaccag

SEQ ID NO: 283627 - DNA, 562 bp, Homo sapiens
actcctgaatctcatgaaaagtagcaatgctactactttctgagaaattaataaaatcagtatttctggagtgtattatttagtgagagatcaaagttttctctatcaattctaaactttctaaatcagaagactttaaaattgcctatttagcataaaacctagaaaaaccattgatagcatagttttcctctgcctatgaaagaattatttcctgaaaaatctctcctagggtaaattccttgacctaattctattgatttcaatgggaaaagattttaagcatccccaagccctmaaatttatattcatttatgcttgaacaatatcacattcctgtaacaaagagatgattacatagttaaaattagttaaaacaatttttcttttattaagtaatttatgacttcttatacgatctcattaggctattctatagtttaacaatcaaaacagaatatacatatgatatttaatgtttgtataattcaaacttcaatgcaaaaaaaaagaaagaaaagaacaagtagagaaatgcaagtgatatctcacttaccaaaca

SEQ ID NO: 283628 - DNA, 532 bp, Homo sapiens
tttaagcccatgggattgagcacctggaatcaaacactactgtgttgattgatgaccagttctgaggttggaatacacctgtgtgatggttaatttcatgcatcaacttgcctgcccattggaatgaatgcctagatatcttgttaaacattatttctgggtatatttgtgaggccgcttgcaaaacagattaacatttgaaygggtagactcggcaaagctgattgtcctccccaacatggtcatgtgtcatccaatctattgaggatctgagtagaaccaaagggccaaagaaggtgaaattatctctctgcctgtttgggttgggacattggttttcttctgcccccagtctgggacttacatcatcacctctcctgttctcaagtctttggactcaggctggaactacaccaggtctccagcttgcaggtggcagatcagcaaatcacaggacttcgcagcctccataatcctgtgagcaaattcctcataaaatatacattttacactttgggagaccaggacaggt

SEQ ID NO: 283629 - DNA, 532 bp, Homo sapiens
tttaagcccatgggattgagcacctggaatcaaacactactgtgttgattgatgaccagttctgaggttggaatacacctgtgtgatggttaatttcatgcatcaacttgcctgcccattggaatgaatgcctagatatcttgttaaacattatttctgggtatatttgtgaggccgcttgcaaaacagattaacatttgaatgggtagactcggcaaagctgattgtcctccccaacatggtcatgtgtcatccaatctattgaggatctgagtagaaccaaagggccaaagaaggtgaaattatctctctgcctrtttgggttgggacattggttttcttctgcccccagtctgggacttacatcatcacctctcctgttctcaagtctttggactcaggctggaactacaccaggtctccagcttgcaggtggcagatcagcaaatcacaggacttcgcagcctccataatcctgtgagcaaattcctcataaaatatacattttacactttgggagaccaggacaggt

SEQ ID NO: 283630 - DNA, 276 bp, Homo sapiens
ttctcattccaggaaaatgggataaatgtgtttttccttattcctcccactaaatacaactaagaaccctagccattaattacaaaacaaacagaagcagccagtctggctagtgacttcagagtttaataacatggtagttgagttccatgagttttctttttgcttcatatattccaaaattggagctaaagaagccagcacccccaaaactcccaagggtacaggaagaaaaaagargccccagaaaaagtcccctccttctggccaaaagac

SEQ ID NO: 283631 - DNA, 346 bp, Homo sapiens
tgtgacatttcaaggtgtattagtctctaacgtaagcatgtctgaagttagtcatccagtggttttcccgacagtaattgattggcactcatcccaaaatataggcaagcatttacaactaacagagagttaatcccacccaggcactgcctccatgactaagcaagtgaaaatactaggggtttagcaataattgtttttctgggtgggaccttcytaaaacacaaattcatgtgttgccatacttttattgatagtttctatatatggtgatatacaatttttgttagctttttttcctatgggcatttgggaaaatggcaagccaactttgaagttgttagag

SEQ ID NO: 283632 - DNA, 457 bp, Homo sapiens
taaatctttatagagactcttaatattccaaagaatatacatattaagaatctaggcttggcatggtggctcatgcctgtaatcccagcattttgggaggccgaggcaagaggaccacttgagctcaggagttcaagaccagcttgggcaagatagtgaaaccccattgggcatggtggtgcmtacctatcatcccagctacttgggaggctaacgcaggaggatcccttaagcccaggagtttgaggctcctgcaagctatgattgcaccactgcactccagcctgagtgacaatgcaagaccccatcttaaaaaaatagtaatatatttttaaaaataatctacataaattcttaatgtttgaaagatgtgagagctcagtaagctgatatattagaaagccagaaatcccttatgctggtgtctggtttttcaaagtaatgggaaacttacttt

SEQ ID NO: 283633 - DNA, 611 bp, Homo sapiens
ttttcggatgacatacgccagatttgtttgccagaagcctctgcatccttccaaccaaatttgactgtccacatcacaggatttggagcactttactatggtggtgggtatctcaggatagctaacagagcgctaagccctgtctaaggcaatgtgatttcatctccatcaatattatcctgacagccatttccacacagtctggttggattagttagggttcttactttgtgtgacagaaattcaattcacattaaccagtgcagaataaaaaacaaagaaacaaaaacttccacaaatttggctcatgtaatttggaagtcaaaaaagtgtagtaagtttcacttcagacacaggggtttatatgatgtcatctggctctgtgtctctgaatttgaattttttgccccttcttttctctatrttgtcttcattcagagggatgctagcttcacctagtgtcagaggtggctaacaacacctcaacacatcatcctcaacaaagaaaaaatacatagaaaggaatatttatttcttttctttgccagaattcacattaatttctattgttccagctgtgtctaggaggactcagattgagtggctaactc

SEQ ID NO: 283634 - DNA, 611 bp, Homo sapiens
ttttcggatgacatacgccagatttgtttgccagaagcctctgcatccttccaaccaaatttgactgtccacatcacaggatttggagcactttactatggtggtgggtatctcaggatagctaacagagcgctaagccctgtctaaggcaatgtgatttcatctccatcaatattatcctgacagccatttccacacagtctggttggattagttagggttcttactttgtgtgacagaaattcaattcacattaaccagtgcagaataaaaaacaaagaaacaaaaacttccacaaatttggctcatgtaatttggaagtcaaaaaagtgtagtaagtttcacttcagacacaggggtttatatgatgtcatctggctctgtgtctctgaatttgaattttttgccccttcttttctctatattgkcttcattcagagggatgctagcttcacctagtgtcagaggtggctaacaacacctcaacacatcatcctcaacaaagaaaaaatacatagaaaggaatatttatttcttttctttgccagaattcacattaatttctattgttccagctgtgtctaggaggactcagattgagtggctaactc

SEQ ID NO: 283635 - DNA, 582 bp, Homo sapiens
taattggttgggtctcagcatgaggaggatgagaagagaaacaagtagataaccatgagaaggtggattaggccatgttgtgattccatgggccctccccagtgccctcatctgccttctaacatggatgttttccagcgaaggtacgtttcttcctggagacacttgctttttaacatgagatactttrgaactctaaggaggccactctatgtggaaatgatggaatggtattgatatcaggtggcagaaagtcctgtccagagtcccacaaactgtaccacatgtgcgacctctatcagaaaaggagcagggacctatgtgacatagaggctgggcaaaagcaggatctggtccacagccagcctcggttgctaataatgtggagggaggcaggcagaatttagggattccaacaaaaggtccataccacggggaacaggtggaaggtgcaggagtcttggagcagacaggaccggggaattcaggtgaaccatgacattactgaaaagccttaggagggattggtggtcatagagatgcttcactggattggggagcagaggtaaacttgctgcctaa

SEQ ID NO: 283636 - DNA, 578 bp, Homo sapiens
cgtaatacaattaaattaaggctttatggaagcaattattctgcttggcaatgcctgtgaaatattatggtctgcaggctggggagtcatttactcatttagcccaaatataagacaaatcattggaaygatgaacttgctttataataatttccctcacatgctattgagaaggcatgaaaataatcctaaaatatctaaaagagatatgcagttcactcataaaacacttgattcataatttagactcatagaattttaaagctgagaagagattgcatgtcacataggccaatatacttatgttatgtttaagaatatgagtatattcttaactatttttattgaattcttaactatttttattgaatcatcagatctgtaaaattttaagtgagagctattgaacctgtattaagatagaaaactcttaagataagaattttaaatgacgagattcatttaggcagctggctgccaattctctgaattcacttcaagacaaagtttcttcttcatatataaatatacataggcatataaattattctatattatggtggtaaaacttaatgctg

SEQ ID NO: 283637 - DNA, 578 bp, Homo sapiens
cgtaatacaattaaattaaggctttatggaagcaattattctgcttggcaatgcctgtgaaatattatggtctgcaggctggggagtcatttactcatttagcccaaatataagacaaatcattggaacgatgaacttgctttataataatttccctcacatgctattgagaaggcatgaaaataatcctaaaatatctaaaagagatatgcagttcactcataaaacacttgattcataatttagactcatagaattttaaagctgagaagagattgcatgtcacataggccaatatacttatgttatgtttaagaatatgagtatattcttaactatttttattgaattcttaactatttttattgaatcatcagatctrtaaaattttaagtgagagctattgaacctgtattaagatagaaaactcttaagataagaattttaaatgacgagattcatttaggcagctggctgccaattctctgaattcacttcaagacaaagtttcttcttcatatataaatatacataggcatataaattattctatattatggtggtaaaacttaatgctg

SEQ ID NO: 283638 - DNA, 533 bp, Homo sapiens
catttgctaatcaaattcccaaaggtcaaagataaagaaaggatcctaaaagcaacaagagaaaagaaacaaatgacatacattggagctccaatacatctggcagcagacttttcaytggaaaccttaccagtcaggaaagagtagcatgacatatttaaagtgctgaaggaaaaaatatttaccccagaagagtatatccagcgaatatgtatttcaaacatgaaggagaaatgaagactttctcagacaatcaaaagctgagagatttcatcaacacaagacctgtcctacaagaattgctacagggagtacttcaatcagaaagaaaaggatgttaataaaattagagacaagaaggtacaaaactcactgataataggaaatacatagaaaaacacagaatattataacacagtaaatgtggtgtgtaaactactcttatcttaagtagaaagactaaatgatgaaccaatcaaaaacaataactgcaataactattcaagacaaagacagtacaatacgatataaat

SEQ ID NO: 283639 - DNA, 603 bp, Homo sapiens
ccttctaaacgaagtgtgttaatacacatttgcagggaaatatgtccagagtttaagatttcatgggtctcttaaccacactctctcyccatcagcaggcaaaagaaccaatcttaatagttcttacattgcatagttcatcttccagaaatataaatgatctctgctatgtccctgaaaactgttcctgtcattcgttctcagtctagctgccttggttttgtgactgttcaaccagaagaataaaatcagcctgtaaccagaaggcagaggactcttatattttttgtataacgtgattctacatttctcattcatgcaatctcttaaaaagagaataggtcaaggcctatcctgccactccctgaggatctaaagatgaagagtcaacatctttaaactggtccctgttatgaacaattcctttgcctcacaaaccataatttcctgccccacctccctttctgcgttgagctcatcatgcgggaagtcactttcagactgaattcaattttccccatgcctttcccccgactcatccccacgttctgttgtgaatagtaatagggcactgggatctgcactaatacgttaattatgaga

SEQ ID NO: 283640 - DNA, 603 bp, Homo sapiens
ccttctaaacgaagtgtgttaatacacatttgcagggaaatatgtccagagtttaagatttcatgggtctcttaaccacactctctctccatcagcaggcaaaagaaccaatcttaatagttcttacattgcatagttcatcttccagaaatataaatgatctctgctatgtccctgaaaactgttcctgtcattcgttctcagtctagctgccttggttttgtgactgttcaaccagaagaataaaatcagcctgtaaccagaaggcagaggactcttatattttttgtataacgtgattctacatttctcattcatgcaatctcttaaaaagagaataggtcaaggcctatcctgccactccctgaggatctaaagatgaagagtcaacatctttaaactggtccctgttatgaacaattcctttgcctcacaaaccataatttcctgccccacctccctttctgcgttgagctcatcatgcgggaagtcactttcagactgaattcaattttccccatgcctttcccccgactcatccccamgttctgttgtgaatagtaatagggcactgggatctgcactaatacgttaattatgaga

SEQ ID NO: 283641 - DNA, 448 bp, Homo sapiens
atctgagggatctcaacatttctgtagaccagtagcaactctgtgtctttcattattccattttctaaatgggcattttgattgtgattatcagatccatattcctcccattttatatgggagctacaggctgacctgatgaataargatcacacagagaacctggactttgagctcagtgcaatgaccagatgggactttgagttccctccatggtgaggggtgaatgtgttttatgtgtgaaaacaacggagcaaacaggtatttggagaccaggaaggcgaactatgtggagaatgccggtaccccctgatctgtgtttcttctctccttccagggcatatggctgcctctattttaaagccctcttgctgttaggttgagcccagtttagtgggctctggccaatggaatgtcagtaagagtgttgtatcccacttccagccca

SEQ ID NO: 283642 - DNA, 448 bp, Homo sapiens
atctgagggatctcaacatttctgtagaccagtagcaactctgtgtctttcattattccattttctaaatgggcattttgattgtgattatcagatccatattcctcccattttatatgggagctacaggctgacctgatgaataaggatcacacagagaacctggactttgagctcagtgcaatgaccagatgggactttgagttccctccatggtgaggggtgaatgtgttttatgtgtgaaaacaacggagcaaacaggtatttggagaccaggaaggcgaactatgtggagaatgccggtaccccctgatstgtgtttcttctctccttccagggcatatggctgcctctattttaaagccctcttgctgttaggttgagcccagtttagtgggctctggccaatggaatgtcagtaagagtgttgtatcccacttccagccca

SEQ ID NO: 283643 - DNA, 489 bp, Homo sapiens
actctttatgtagaaatctgatttaatcctcattattcycctatgaagtaaggattcttactttcatttttcagaaagaaaacagaggcttaatgaggcaaaggcaacatgtccaagaccacacagctggtaagcaacagagcaaggattcaaattgtgaacccaaaatatctgagacaggtctcagttaatttagaaagtttattttgtcaaggttaagaatgcacctgtgacatagcctcaggaggtcctgatgacttgtgcccaaagtggttggatacagctggcttttacacattttatggagacataattcatcaaacgatacctgtaagacgtacattggttctatctggaagggtagaacaacttgaaggaggggcttccaggtcataggtagatttaaacactttctgattggcaattggttgaaagagttattatcagtagaaaggaatgtctggattacaagaaggggttgtggagacc

SEQ ID NO: 283644 - DNA, 588 bp, Homo sapiens
agcctactcccaccacctcctctatggggatttcacactctgggccagccttcccttccctaatcaccccagggcagggaccagacagctaaggacagcccctaagtcctcagagccttgaaatgattcaaaccagccaatcctaagcatgcgtatcctgccttgcctgtgttccccatggaaaccacagtaaaggctcttgctggtgctttgctcctccacccacctccagactgaccctgacgcttccctstatgcactgccccccatgtagtgcaccccatcctcttgggatctgtgagtaatgaactgtcttttcagtggcacttgtctgctgatctgttggccttgccaaacctaaatgataaaaaagcttatattttaaaacagtttagaattactgaactcgaaagagagtcatgaatagaagaataataatatcgccatctctcattggaaactcactttgtgccagtcgtttctgtaagtttattcactgcattagttaattcaatcttcacatgttctcctgtccactgatgcatttttcaaatcaggaaaatgactgggatcagaggagataaataa

SEQ ID NO: 283645 - DNA, 1181 bp, Homo sapiens
agcctactcccaccacctcctctatggggatttcacactctgggccagccttcccttccctaatcaccccagggcagggaccagacagctaaggacagcccctaagtcctcagagccttgaaatgattcaaaccagccaatcctaagcatgcgtatcctgccttgcctgtgttccccatggaaaccacagtaaaggctcttgctggtgctttgctcctccacccacctccagactgaccctgacgcttccctgtatgcactgccccccatgtagtgcaccccatcctcttgggatctgtgagtaatgaactgtcttttcagtggcacttgtctgctgatctgttggccttgccaracctaaatgataaaaaagcttatattttaaaacagtttagaattactgaactcgaaagagagtcatgaatagaagaataataatatcgccatctctcattggaaactcactttgtgccagtcgtttctgtaagtttattcactgcattagttaattcaatcttcacatgttctcctgtccactgatgcatttttcaaatcaggaaaatgactgggatcagaggagataaataawtgtggcaatcatccatccacgtctgcaatgtgcctacagtttccaatcacacatttctttcttgctgccactgtggagttaaggcatatgatagcatttggaagaaaataaacatcccttgtaataggccaatatggcaaaccctggtgagtgggatctatcaaaagcaaacttgggtaatgatcaagggagaaaataaaacctttattcttggctgctgagagtggtgacttccagctaggctgttctttcattttattgttagggtgagttcaagtacacctaacaccccaaggggatcacwtcgttgaaagactctatacttaaaagaagaagaaattctaaagttataaacatatctaacttggaaccatcagggtattccatattttagggcattttcttttcaagttctccttcagttcacataaaagccctacttctttgtttttcttggccaaaggatggggccctggacaagagttctggaaaatcctatggaggccttgggagcttcccctcctggtgctggcagccggcagatgcctgtgatgctatctatgcctgtcagtttaatctcacagcactgcct

SEQ ID NO: 283646 - DNA, 514 bp, Homo sapiens
gcattttcttttcaagttctccttcagttcacataaaagccctacttctttgtttttcttggccaaaggatggggccctggacaagagttctggaaaatcctatggaggccttgggagcttcccctcctggtgctggcagccggcagatgcctgtgatgctatctatgcctgtcagtttaatctcacagcactgcctaacaggcacgacatcgtcctagagtgtttttactggaactgttttaatgactgtgaataatattttgaaagacccaacacctgatcttytattagcaaacctggctattttgcttttaaatgtccaaaagagccaattatcctgcaaatctgattcaagtgtaccagattgaattagagaagtgcatatttcaggaaacttcccttgcattccaaatctgtccagttgagatagggttttttgatagaaaacatttccttttttttttttcaaactgtgtctcatttcagaatacttacaatatctctcacccttgg

SEQ ID NO: 283647 - DNA, 606 bp, Homo sapiens
caatgttggttgactaaataaaagccaaacttcatctccactgactttattactacttaaactgaacatttaaaaaaagaattagtcttggacatgatgcaacattattgctgagccaaacttttttactatcttgggttttacagccttcttrtccttctggttaagtgagagcaggcaactccatctggcatgtaaagaactggaaaaaatttctatggatttttgtacctgtttatttctccttgtacatgttgtagctactggtagaatatttggatttttgccagtttgttagaagagtaaattttactttacatttactttttatgagcaagattgagcatcttgttatatgtttaagtgtcatttgtgtttctttttaaaataattttttattgttacctctcgcccatttttttctatcaggttgttggtcttttctccacttttagaagcctttgtaaattaaggatattagttagctctttgtgtttgttacatgtggcaaatatacttctctagattgtcatttgttttatactttgctactgtaaatgtgttttaatttcacagagctaaatttatcactatttctccttgttg

SEQ ID NO: 283648 - DNA, 628 bp, Homo sapiens
tgagaccacacagttgcaccacccagaattcagggtcattacagatttgtcagaggtgtttcattttctgaataaaagaaaacaaataaattattgttcttttcaatattatatttgtatcaagaaaatgtacaagaaatgtagagtttcattctctgggcaggccgtatcagctgaggcatcagaaagagacaacacagccctcatttgcttccattgctttgtggcaagtctaaggatatttcagagtgaaacaaatatggacacaaaggatctgagctccttttccagaagcrttttttctgaggacagacccaaacagagatggctcagtgatatagttttgatctgtgtcccctctaaatctcatgttgaaatgtaatctccaatgctggaggtggggcgtggtgggagccgttgggatcatgggggcagatctctcatggcttggtgctgtcttcctgagagtgagtttttgtgagatctggttgtttaaaagtgtgtggcacctgccccctcactctctctcttgctcctgctctggccatgtgatgtgcctgctccctcttggccttctgctgtgattatacttcccaaggcctccccaggagctgagcagatgccagca

SEQ ID NO: 283649 - DNA, 576 bp, Homo sapiens
gaaagctattcacaaagaataaagttgattgctttgggaacttttcctcttttttctcacttttccctcttccttcctagaaagaaagaatatgagaatgagatgcagagtagagttcccaacattaagcatgagagagacaaagggagtctaggaatctggataattacaattagaattcrgaccttgggatatctatggttcacaagaaatgtgttgtttagctgccaacatttcgatgcttcattaatgtagatgcttccaagataattgctcaattaattatcaagactctacatgttcacagagatatttgacctgagttatttcctttgccaggataacttgaaggatgagtaaaagacttaacttggataagaaaaccttctcatacattctgcttaagtcagaaagccatttccttgaagtttcttagcattctagggcttatatggtgctgggttgaatgctaagtgtttacctcattggttccacacaacacaccaaattgagtactggaggtgttatgtaactggctcaaagttataaaactcgtaagaagcagaggaaattgaa

SEQ ID NO: 283650 - DNA, 576 bp, Homo sapiens
gaaagctattcacaaagaataaagttgattgctttgggaacttttcctcttttttctcacttttccctcttccttcctagaaagaaagaatatgagaatgagatgcagagtagagttcccaacattaagcatgagagagacaaagggagtctaggaatctggataattacaattagaattcggaccttgggatatctatggttcacaagaaatgtgttgtttagctgccaacatttcgatgcttcattaatgtagatgcttccaagataattgctcaattaattatcaagactctacatgttcacagagatatttgacctgagttatttcctttgccaggataacttgaaggatgagtaaaagacttaacttggataagaaaaccttctcatacattctgcttaagtcagaaagccatttccttgaagtttcttagcattctagggcttatatggtgctgggttgaatgctaagtgtttacctcattggttccacacaacacaccaaattgagkactggaggtgttatgtaactggctcaaagttataaaactcgtaagaagcagaggaaattgaa

SEQ ID NO: 283651 - DNA, 578 bp, Homo sapiens
cccacacacaaagaaaatacttgctttcagaatgtttatatttctatgttttaatttcttttcaacttaaagagtagattaccaccccaaattactttattctccatttagtgaggcttctgccttattccagaaagcagccaacattttggctgcacctggttaaatttgttttctttcatattttgtgggagcacaagactcaatgctaagggacacctaaataatttcaaacatttttttcccacttaaatttatgacatcttgataattaccataaagcataattgataccagttaaaatgatctattattcaatgcrgctgaattttgtatattactccaaatgacaacagtgacatagtgcatggctataaactcaggtatgactgtgatactacaagggatattttgtttatatctgctctgtacttacagaacaggcaggctgtaaattgagcttactgctgatttactgggctcatagatttattacttatacattcaatacattccataaagagttctcaaacacctgttatgtgtcaagcatcttgttctgcattgcagacagcttg

SEQ ID NO: 283652 - DNA, 578 bp, Homo sapiens
cccacacacaaagaaaatacttgctttcagaatgtttatatttctatgttttaatttcttttcaacttaaagagtagattaccaccccaaattactttattctccatttagtgaggcttctgccttattccagaaagcagccaacattttggctgcacctggttaaatttgttttctttcatattttgtgggagcacaagactcaatgctaagggacacctaaataatttcaaacatttttttcccacttaaatttatgacatcttgataattaccataaagcataattgataccagttaaaatgatctattattcaatgcggctgaattttgtatattactccaaatgacaacagtgacatagtgcatggctataaactcaggtatgactgtgatactacaagggatattttgtttatatctgctctgtacttacagaacaggcaggctgtaaattgagcttactgctgatttactgggctcatagatttattactyatacattcaatacattccataaagagttctcaaacacctgttatgtgtcaagcatcttgttctgcattgcagacagcttg

SEQ ID NO: 283653 - DNA, 554 bp, Homo sapiens
aaagacaataaaaaattaaaagtaaatacttcttttttcattagcaggtgttcagtaatgtgtcaaatcttgatatacctaatttgtcttctttcaactttacttttggatttcctgattccaatttttcaaaagttgacagacatcatgttattgtcactaattcctcccactcagctctcagaggttcattgttctgagggagaaattgtcatctccccttttccctccactggctcagtttaagaaagtgagkcagattacgggtcttttttttttttttttttgcttcagcacaggctggcatttgattctggagtatcccaagaccttttctagaaaattccaactcttcttcctcttctcctgctcttcagtcttcagagcctctttgtggttcaaggggtgtgggtaaaagggagagtttgctcggcaccactgggaggaagctcctgagctgacccttaggtactggggaatacctgtcctaagacagttaagtgagacttttcaaaactgatggatagtatctggcttcatccacagagaagacc

SEQ ID NO: 283654 - DNA, 554 bp, Homo sapiens
aaagacaataaaaaattaaaagtaaatacttcttttttcattagcaggtgttcagtaatgtgtcaaatcttgatatacctaatttgtcttctttcaactttacttttggatttcctgattccaatttttcaaaagttgacagacatcatgttattgtcactaattcctcccactcagctctcagaggttcattgttctgagggagaaattgtcatctccccttttccctccactggctcagtttaagaaagtgagtcagattaygggtcttttttttttttttttttgcttcagcacaggctggcatttgattctggagtatcccaagaccttttctagaaaattccaactcttcttcctcttctcctgctcttcagtcttcagagcctctttgtggttcaaggggtgtgggtaaaagggagagtttgctcggcaccactgggaggaagctcctgagctgacccttaggtactggggaatacctgtcctaagacagttaagtgagacttttcaaaactgatggatagtatctggcttcatccacagagaagacc

SEQ ID NO: 283655 - DNA, 523 bp, Homo sapiens
cttctgaattcctcccatttattccctcgtttattccagcatagtattactttatatggcttattcattgcttcatgggtcagttttatttctccagctaatggcagtgcgatgaaggggaaaatgcacaggctgattagcaagtgcgcaaacaaacataagtttcatagctgctctgagactcagtttccccatttgtgaattagatayattacctagtttgtagggctgttgagaggtttatatgaaaaccgcacagtgcctgccatagaatgattcacagtattgattatcaacttcatttatactgccctccccctctccctgagattctctcacaaggctgagctctagtcagtgaatagtaaccatgtcagaggaggaggctgaacatactgtctatagttattggtgaaataaaaaaggcagctttgggcacagtagctagaagaacaaatatgttttcagagatttttgtagtaattaattactggtgttttttttttttaatttgccaacaact

SEQ ID NO: 283656 - DNA, 523 bp, Homo sapiens
cttctgaattcctcccatttattccctcgtttattccagcatagtattactttatatggcttattcattgcttcatgggtcagttttatttctccagctaatggcagtgcgatgaaggggaaaatgcacaggctgattagcaagtgcgcaaacaaacataagtttcatagctgctctgagactcagtttccccatttgtgaattagatatattacctagtttgtagggctgttgagaggtttatatgaaaaccgcacagtgcctgccatagaatgattcacagtattgattatcaacttcatttatactgccctccccctcyccctgagattctctcacaaggctgagctctagtcagtgaatagtaaccatgtcagaggaggaggctgaacatactgtctatagttattggtgaaataaaaaaggcagctttgggcacagtagctagaagaacaaatatgttttcagagatttttgtagtaattaattactggtgttttttttttttaatttgccaacaact

SEQ ID NO: 283657 - DNA, 516 bp, Homo sapiens
ggcaaaagaggtcactggaaaaatgaagttaaagaggcatcttatctggcctgatttttaaaagcactattgaaaactttgaacacctgtgaaaacaaccttttcctatttctgggaaattttgcctcttttctttctcatctctcattaaaaacaaaaacaaaaacaaaaacaaaaaacaaaaaatgtattttggttgctgtgcacaacagttactttagaatatttaaaaatgaattttcaaatcatctggtaaagtttctgaaaggctttgctattgctcagaggctgtgtcgctcattgtgacttggattttccccattttatacttacctgtgactccatggggctgaaatacaatttcaacctagtctcacggttacacatggaagaagaaaatatgtgttatcttttctgggctttagtttgaatgggagyttctgatccaaatgtgcagcttcctctgcatgcccccatgttcatgtcctgccatcatttttggtttgtgattagaag

SEQ ID NO: 283658 - DNA, 493 bp, Homo sapiens
ctaaagcttttattttagataatgaggatgtaacctagattattaatttggttccttctgctcagtccagtgggacagtatctaggatttatgaatgtgttgttgctaggtgcatggaactagatcctgctttaataagagcacaggcaagcagctatgggctgaatggagtaggaagaccaccactcatgatattttatttaaatattaaaaatatgttcttagtagagtagaaaattgtgataataataaatgggcacaagctctccatctcgatatgctttttgatgtgtctkgacatgtcccacagtaggtagattgggacagaagagtgcagagccctaagggaaccaatcaaaggcgagcttgcaggtctgctgtggggggcaggtagtcaggcaaagccacagagaagtgcagacaagtgcaggcttaagctgggactggctggctcagcttgtgaggcacagggcacttcagaggctgagcaacc

SEQ ID NO: 283659 - DNA, 577 bp, Homo sapiens
tttaatagacatgaggttggccatgccacatgggagacagagttattattcaaatcaatctcatcgaaggcttggagattaggggtttttcaaaggttatttggctaggcaatgggtgcttacagctgattgatgggggtggagatgaaatcataggtagttgaagctgttctcttgtgctgagtcacttctgggtggggccacaggagcaggacccacaaggtggtccaagtgaagmcactggtgtcagacatgcaataaacatgaaaatatatctcaaaaggccaatcttttggccttttgagccaaatgttatctgatgttatctgcgggaataattgggtaagctgtgacttccagagtaatggctggcaatcatttgtgtctacaccttagcagaattgaggctcctgtcttcctcctagcctggtggtctttcattagctttacaaaggtggttaaatttgggggaagagctattatcattaaactataaactaagtgtctcccaaaactggcccagcctaagctcaggaataattaagacagcttgaaggctaaaggcgagagtggggtt

SEQ ID NO: 283660 - DNA, 606 bp, Homo sapiens
tgccagcaattagcttccccagctcttcccacaggaacctcctgctgacttaatgagctaaatgcaggaaggttgtctcctctggtaggtgtctccctgggcaggaagatgctctgggagggccatgtgtgagctccaaactgactcctacaccgtgtcaaagagctcagcccactgacacatgcctcactttgaaaccgaaacccaattctaaacttccagtcagaagcgagctaagagaaagatggagacaacagaaataagccaatttttcaacagtaaaaaatgccttactggcctgtgtacctgtttccctatggacaaaggagtatttctcaccttctgccatagcagagccagcactctacatagacacagagcttttcaaagcctccagaamgcatcttcctaccaggataccacagtacttacaatgcccaaataaaattccaatctctctaattgaatataaatgtatggaataaagttttggaatttaacactactcaaacatttgttgttttgtttccttcttgcagcttttctgttctactaaggctagggctagtgattaaggcttattgctccagggaaggggagggttga

SEQ ID NO: 283661 - DNA, 590 bp, Homo sapiens
agcaacagtggccttgttatatagaggaaattttccaggtggtagctgtcagagagaatggatggtaaatatctctttttcagacatttaaaggtgtcagactctcaaktaatctctcctagattcaggaaagacctagaaagagatggtctgattgcattgagggaggttgtctgcagatacaaatctcccccacgaaagacagttttgccagggcacgtcaatctgctggccttggggcagctatttcaaaataagtgaaagaaatatattttggagtaaaatattttattcctttcaatattaaggaataattgtcacttttttgctgtgttattggtattgtggttatgttaaaaaatgagtttttttttttaacgtaactgaaaatttgatggatgaaatacatactgaaaaaatgacaggcaaacttgtatgggatttgcttcaaaataatacgggaattttaaaccaaaaataaaattctaagccccccagccatctaaatggaccccttttctcagaaagggcattccaaagttaacctaaaacacgagttcaggccatgatgagaagaaggagctggacat

SEQ ID NO: 283662 - DNA, 590 bp, Homo sapiens
agcaacagtggccttgttatatagaggaaattttccaggtggtagctgtcagagagaatggatggtaaatatctctttttcagacatttaaaggtgtcagactctcaattaatctctcctagattcaggaaagacctagaaagagatggtctgattgcattgagggaggttgtctgcagatacaaatctcccccacgaaagacagttttgccagggcacgtcaatctgctggccttggggcagctatttcaaaataagtgaaagaaatatattttggagtaaaatattttattcctttcaatattaaggaataattgtcacttttttgctgtgttattggtattgtggttatgttaaaaaatgagtttttttttttaacgtaactgaaaatttgatggatgaaatacatactgaaaaartgacaggcaaacttgtatgggatttgcttcaaaataatacgggaattttaaaccaaaaataaaattctaagccccccagccatctaaatggaccccttttctcagaaagggcattccaaagttaacctaaaacacgagttcaggccatgatgagaagaaggagctggacat

SEQ ID NO: 283663 - DNA, 598 bp, Homo sapiens
acttttgcaacatgattggtaatggctacatagtgttctttagatgacgtcttataatttaactttagatgatgtcttataatttaattaacttcccctatttttgggaagtcagactgttgtttcttttgcacatctaaaaaaggaacacctctcaggtctgactccctcctgaggacagagatctggctgtgcccttgtctcttgcaaggaaatctacatgttgctaggctgttttgcacccccagcctgtcctctgggaataggaacgagcctgctcactggcctggatattctgtcgtaagagtcattttttttggctttgtaacacataagtatttcaaaagccactcttgtggccttctattacactatgaaaaactgagggtccacatttgccttgaatgcagacctccctgccctgytggggatgtctctctcatttatctttgctgcagatccctgacttacaccctgacttgtaatctggaaccacgcagagattttcaatgacaatgtggggaaacagaatttgtctgaactttggtgattttgaatgaagtttatataataattaaagccaggtatgattgttcta

SEQ ID NO: 283664 - DNA, 598 bp, Homo sapiens
acttttgcaacatgattggtaatggctacatagtgttctttagatgacgtcttataatttaactttagatgatgtcttataatttaattaacttcccctatttttgggaagtcagactgttgtttcttttgcacatctaaaaaaggaacacctctcaggtctgactccctcctgaggacagagatctggctgtgcccttgtctcttgcaaggaaatctacatgttgctaggctgttttgcacccccagcctgtcctctgggaataggaacgagcctgctcactggcctggatattctgtcgtaagagtcattttttttggctttgtaacacataagtatttcaaaagccactcttgtggccttctattacactatgaaaaactgagggtccacatttgccttgaatgcagacctccctgccctgctgggratgtctctctcatttatctttgctgcagatccctgacttacaccctgacttgtaatctggaaccacgcagagattttcaatgacaatgtggggaaacagaatttgtctgaactttggtgattttgaatgaagtttatataataattaaagccaggtatgattgttcta

SEQ ID NO: 283665 - DNA, 593 bp, Homo sapiens
aaaacgttactggtaatgagcttccactcctttagtcgttgtgcatagatacaccacagagtaaggttataaaaataaaagttgtttcaggaaatttcccattgctttattacatgatcaatgagagtaaagagaaatggaagttgacgggayaggaatgagggacctgctggaagagtgatcacaatatccaaaggaaatttaaaatgcctgttgaaagtgacacactgactcagcattgtcactaacacagaatcaccacaataaaactgccctgccctgtggctcctggcacctcatgtctctttaggttaagcagagagaggtctgtgttgctttggaacaaggtgcagcctccccctaagctacagagaggctctgagcaaggaccagcccccagggtgcagccttgcccaccctccacaggctccagagcagatggggtggctctagagagcaaatggtcaaaacttctagcgctaaatagagctttaacatgtctcagatactagcaaaatagagaagcctcagatggctttaggtctggaagtgtgttgctaaaaatgctaaaaatttaacaaacttttataaat

SEQ ID NO: 283666 - DNA, 593 bp, Homo sapiens
aaaacgttactggtaatgagcttccactcctttagtcgttgtgcatagatacaccacagagtaaggttataaaaataaaagttgtttcaggaaatttcccattgctttattacatgatcaatgagagtaaagagaaatggaagttgacgggataggaatgagggacctgctggaagagtgatcacaatatccaaaggaaatttaaaatgcctgttgaaagtgacacactgactcagcattgtcactaacacagaatcaccacaataaaactgccctgccctgtggctcctggcacctcatgtctctttaggttaagcagagagaggtctgtgttgctttggaacaaggtgcagcctccccctaagctacagagaggctctgagcaaggaccagcccccagggtgcagccttgcccacyctccacaggctccagagcagatggggtggctctagagagcaaatggtcaaaacttctagcgctaaatagagctttaacatgtctcagatactagcaaaatagagaagcctcagatggctttaggtctggaagtgtgttgctaaaaatgctaaaaatttaacaaacttttataaat

SEQ ID NO: 283667 - DNA, 648 bp, Homo sapiens
acactctgcctgatgggaccagaagattctcccactgatatctgaggtggtggggcatgggtaagactaaggctggactcagacatggattgaatattaagttcatagtttgcaggatgtgcctttaggcaagttatgaatcttcttaataaaaaggtttcttagtgtaaaatggagatagtatccatttacaataatgtctactttaagagattaaataagatgatcctgcaaaagcacttaccacaatgcttaacacagagtaaacactyaatagatgttagtggttattattatcattaatattttaaaattacctgttcctcctttaacttttttctgctataactgtggctcccaatgctgccctgacacctttgagtttatctcacaaacacaatgtctcacacaacctgaataatccatatatctccattgattgactcaacatctggtcctctgcaccaatgtgaagtcagtgtgaaggtggagctgccaccagtgcaaacccttttgcattgctcttctcctctaaatacaactaaacgccctgggcattaactcccttggcattgctcttctcctctaaatacaactaaataccctgggcattaactccctttgcattgctcttctcctctaaataca

SEQ ID NO: 283668 - DNA, 599 bp, Homo sapiens
gtatatggtaatacctaaagcaccaacaaagaaaactataccaagagacatagtaaaaaatcttataaataaatcaaaattaagctctaaacaatattcaagtaacccacagtaaggcaagaagaaagaaacaaattagaaacatagagcacatacagaaaacaaacgcaggcggaaaatggtatgacccctaacagttattaacataattattgtctaaatatcccaattaaaaggcagagactggcagagtgaattaaaaaccataagccaactatatgctatcttcaaagaactcacttcaaatacaacatgggtaagctgaaagtaaaaggayggaaaaatgtgtatgttatactgacattaatttttgaaaagcaggagtggctatattaatatcaacaaaagtagacttcagagtaaaaccttttactaaggacaaaaggacaaaagtgaacattacataatgataaaaggatcagtccaccaagaagccatagcaattctaaatgtgtttacacaaagcaatagacattcaataacaatgaagcaaaaccaatgtagctgaaatgagaaatagacaaatccataattagtaa

SEQ ID NO: 283669 - DNA, 587 bp, Homo sapiens
tgtctgagacaggtctcaatcaatttagaagtttattttgccaaggttaaggacatgcccgggaggaaaaacatggaatcacagaaccagtctgtggtctgtgcctttctccaaagatgattttgagggcttcaatatgtaaaagtgaaaagygggctggaggggcaagagggaggatatggtcacaatcctgaatccacatttttcaagagaaaaggagccagtaggagaatagtcaactatgtgttcgtccagtaaattagcatttttacataaggtaaggtgaacatagagtagctacttgtggagatatttaatcttttatctgtagctctctgcttaagaacagaaggaaagatagctccgcgcaagactcaggtttcagcttaattttttcctttggcagagtgaactggggtcctgagtttttatttttatttcacatatgtgtagcctcacatgagcagagagagaacaggaaccacaccataaactcagtctacctgagactgagtacagaggaagggctttaggaagtaccattcaaattagactgatatatttaatagcctcaaaatgtcaacgcc

SEQ ID NO: 283670 - DNA, 587 bp, Homo sapiens
tgtctgagacaggtctcaatcaatttagaagtttattttgccaaggttaaggacatgcccgggaggaaaaacatggaatcacagaaccagtctgtggtctgtgcctttctccaaagatgattttgagggcttcaatatgtaaaagtgaaaagtgggctggaggggcaagagggaggrtatggtcacaatcctgaatccacatttttcaagagaaaaggagccagtaggagaatagtcaactatgtgttcgtccagtaaattagcatttttacataaggtaaggtgaacatagagtagctacttgtggagatatttaatcttttatctgtagctctctgcttaagaacagaaggaaagatagctccgcgcaagactcaggtttcagcttaattttttcctttggcagagtgaactggggtcctgagtttttatttttatttcacatatgtgtagcctcacatgagcagagagagaacaggaaccacaccataaactcagtctacctgagactgagtacagaggaagggctttaggaagtaccattcaaattagactgatatatttaatagcctcaaaatgtcaacgcc

SEQ ID NO: 283671 - DNA, 603 bp, Homo sapiens
gctacttgtggagatatttaatcttttatctgtagctctctgcttaagaacagaaggaaagatagctccgcgcaagactcaggtttcagcttaattttttcctttggcagagtgaactggggtcctgagtttttatttttatttcacatatgtgtagcctcacatgagcagagagagaacaggaaccacaccataaactcagtctacctgagactgagtacagaggaagggctttaggaagtaccattcaaattagactgatatatttaatagcctcaaaatgtcaacgccatcattgtcctgaaagatggaaataccgttatagacccaaacttgsatgaactttttgaaagaattagaatctaatactgccgtgaaagccacttacaggatatccagtttctggccttagcagaacagcaagggcgagccaccaacttatcacaaataataacaagcgcatagctgtcaaatgcccttgtgaccttagagaccaaaatagatgtctctctgtctactaagatgggtgctaaggataaggaagcaaaagttacttacaggttgggggtctagggtttggttggatggcaacttcctagtcct

SEQ ID NO: 283672 - DNA, 612 bp, Homo sapiens
ctacaaagttttttttaataatatatatttttcagtcaacgacagaaccaattactagaaataaataaactgggacttttagaaatgcragaatatgaggaatatgtaccactcagtcaattgtcttcctgtgtggcggcttgccagacaatcactggagacatctggaggcagagaacaaacacttctgcccacttctctgctcaaacttgagtcatctgctatttgtacttagagaggtaaagagcaaaactatctcaaggcagacactagcttcaggcatttatctgtccaaagctgagaacccactgtttcgtctccaccagtgcctcacaccccactttgggaggctaaatattgtatatgttttcttttccattcatcctcttcaccttgtttcacctgcttggcctcaatctttcccatgggaaatgaatgaatgaatgaatgaaaaatataattgaagatcaacatcttatttctagcctctcttatttcaacctatagaatagagggtagagatagacagcaggggatggaacagatgtgcctcacttttttctcttgccttgcagttgagaattgggttgtcaagttgaagaaaaagaaatt

SEQ ID NO: 283673 - DNA, 612 bp, Homo sapiens
ctacaaagttttttttaataatatatatttttcagtcaacgacagaaccaattactagaaataaataaactgggacttttagaaatgcgagaatatgaggaatatgtaccactcagtcaattgtcttcctgtgtggcggcttgccagacaatcactggagacatctggaggcagagaacaaacacttctgcccacttctctgctcaaacttgagtcatctgctatttgtacttagagaggtaaagagcaaaactatctcaaggcagacactagcttcaggcatttatctgtccaaagctgagaacccactgtttcktctccaccagtgcctcacaccccactttgggaggctaaatattgtatatgttttcttttccattcatcctcttcaccttgtttcacctgcttggcctcaatctttcccatgggaaatgaatgaatgaatgaatgaaaaatataattgaagatcaacatcttatttctagcctctcttatttcaacctatagaatagagggtagagatagacagcaggggatggaacagatgtgcctcacttttttctcttgccttgcagttgagaattgggttgtcaagttgaagaaaaagaaatt

SEQ ID NO: 283674 - DNA, 521 bp, Homo sapiens
taagtattttaatataaaatattctgctctaattctactgagataactcaatatgaacatagcacctccccagatatttaagagtaaatataccactaatatattttgcttttggaattatccatgatttcagcatgctatggaaacaaaggagttttctaacttattcatgtgcctctccactgaaaattctaaaataaattaagagctacctattggagataatctaacatccaaagaaaaccaaactcagttatttagattaaaaactttttttttttttttttttttgaggcaggrtctccctctgtcacccaggctggagtgcagtggcgtgatctctgctcactgcaacctttacctcccaggctgaagtgattctcctgcctcagcctcccaggtagctggaattacaggcgtgcaccaccatgcccaactaatttttgtattttctgtagagatggggtttcaccatattgcccaggctggtctcaaactcctgagctcaagcaatctgccct

SEQ ID NO: 283675 - DNA, 606 bp, Homo sapiens
atttctctgtttctgcttttaagacctttgtctttagtttttataagtttaactatgatgtgttttggtgatttatttaggtttatctggtttggattcagtcagcttcttgaatctaggattacatctgacgccaaatttagaaaatgttcagcccccaccctcttttacgtctccttctgggactccaatgccatgacagttgggtaktttgttatagtcccaaaacagagccccctgaggctctgttcatttctttttagtctatttttctgtgttatttaagttgagtgatttatattattttatcttccagttcagtgattattttctctgttcccccaactggctgttgagtctatccacttagcttttattttaatgattatatttttcagttctaatatttatatttggttattctttatatattctatttctttgaagaagctttctgttttcttgctgttatgggttaaaattgtgtctctcagaaattcataggctaaagtcctaaccaccagtctctcagaacatgccttagttagaaatagagttcttgcaaatgtaattaattaagataaggtcataccagagtaggttggg

SEQ ID NO: 283676 - DNA, 609 bp, Homo sapiens
ccactccaacagggcaaggggaggaactgccttgctactgctagatggagtaagaaaagtccagactctccatttggtctcagctgacacctaaggggaggagctcctcataagtgctgggcaggcatgggagttcatggtccccacagggtcttcactgacacatattgaggtgrccccaatactgttaggcaatgttgaaagtactgactttctactcagcttcctctgatactaccacagcggtgagaaagtggaacgcctctttactgctggatggaggtgaaagtctaggctttctacagaatatctctactgacactttggtgtggggaactcttgatacctgccaacaagaagaaagtctttgctccccacttaactttctcagaaaccacctggcagaggtttaaggataccttattgcaacttcaggaaggtggaagtctaagctctccactcagcctttgcttgtgttcgggtggggtggggactaggttttctgtggttttttgactagagtagaatagcaattgtcaaaaagtcttcttcctaagctacccctttcttggtcttttggctacaaagaacaagcttttttttcttgga

SEQ ID NO: 283677 - DNA, 609 bp, Homo sapiens
ccactccaacagggcaaggggaggaactgccttgctactgctagatggagtaagaaaagtccagactctccatttggtctcagctgacacctaaggggaggagctcctcataagtgctgggcaggcatgggagttcatggtccccacagggtcttcactgacacatattgaggtgaccccaatactgttaggcaatgttgaaagtactgactttctactcagcttcctctgatactaccacagcggtgagaaagtggaacgcctctttactgctggatggaggtgaaagtctaggctttctacagaatatctctactgacactttggtgtggggaactcttgatacctgccaacaagaagaaagtctttgstccccacttaactttctcagaaaccacctggcagaggtttaaggataccttattgcaacttcaggaaggtggaagtctaagctctccactcagcctttgcttgtgttcgggtggggtggggactaggttttctgtggttttttgactagagtagaatagcaattgtcaaaaagtcttcttcctaagctacccctttcttggtcttttggctacaaagaacaagcttttttttcttgga

SEQ ID NO: 283678 - DNA, 599 bp, Homo sapiens
gagcttcaaacttagtaaagtcaaattgctcaagtgggatggaatcaggcctctgtggaaaggagagtctaatcaaagactgaggtgtacctttacacaagcagttctcagaagagatggcatccaacgcagcagagatctgtgactactagaaggcacctggaagctggcttactttgttttgtcagagaagtggctagtggagtgcagcctaagctctcagagtatctgtgaaactctggastttctatgtatttgaagttcagcagctgacatgtgcggtctcataatgtgtgatgtcacattctcaagacagcaggaaaaccctccaagttctcctcacagcaaaacatgtcactcacatagaaaaccacaaaagtggaatcatttcaaggctccataatactggcacagtatctggcacagagagggcatttgagaggcactgggtttgcaacaaatattttaagggatctaggtttccgcctttggttttttctcttctctagctgttatccaaacctaattagtgtccccttatgacacggattggtaagcaattcttcctcatattctggcataaactatacacgtgaaca

SEQ ID NO: 283679 - DNA, 2233 bp, Homo sapiens
gagcttcaaacttagtaaagtcaaattgctcaagtgggatggaatcaggcctctgtggaaaggagagtctaatcaaagactgaggtgtacctttacacaagcagttctcagaagagatggcatccaacgcagcagagatctgtgactactagaaggcacctggaagctggcttactttgttttgtcagagaagtggctagtggagtgcagcctaagctctcagagtatctgtgaaactctggagtttctatgtatttgaagttcagcagctgacatgtgcggtctcataatgtgtgatgtcacattctcaagacagcaggaaaaccctccaagttctcctcacagcaaaacatgtcactcacrtagaaaaccacaaaagtggaatcatttcaaggctccataatactggcacagtatctggcacagagagggcatttgagaggcactgggtttgcaacaaatattttaagggatctaggtttccgcctttggttttttctcttctctagctgttatccaaacctaattagtgtccccttatgacacggattggtaagcaattcttcctcatattctggcataaactatacacgtgaacawtgatttttattctgtgggttttccttcttctcatgtctaatatccagtaaacttctaactgatgattctgcatcacagagactaaacattcttaaagtgaaatttgctcctttgggaaattcttttgactgaaaaaggagaaactaagaaaattttwtttgagtaaaacagtgcagatcctgtctaactaaagcgaaggtgccaacagaaggatattatgcagactttattcagagatagcctgtcaagtatattcaacaactaaactcccaaagttttggccttgttttgtggtgttagctacaagttattcagtgtgtttatcccaaaaataaaaaacaagactcactgttcccaaactgcctagttttttctcttctttcttcctcttcttttctttcgctcctttccttcctttttcttctttttttctcttatacatcctggttttttcctttgtcactgataaaaggctaaaagctcttcctttcacaaacaaaagtgaattgctgactctgtgttaccctttaaattattaaataaawtgatttttattctgtgggttttccttcttctcatgtctaatatccagtaaacttctaactgatgattctgcatcacagagactaaacattcttaaagtgaaatttgctcctttgggaaattcttttgactgaaaaaggagaaactaagaaaattttttttgagtaaaacagtgcagatcctgtctaactaaagcgaaggtgccaacagaaggatattatgcagactttattcagagatagcctgtcaagtatattcaacaactaaactcccaaagttttggccttgttttgtggtgttagctacaagttattcagtgtgtttawcccaaaaataaaaaacaagactcactgttcccaaactgcctagttttttctcttctttcttcctcttcttttctttcgctcctttccttcctttttcttctttttttctcttatacatcctggttttttcctttgtcactgataaaaggctaaaagctcttcctttcacaaacaaaagtgaattgctgactctgtgttaccctttaaattattaaataaawctatttagcccaagctggtctcaaactcctggcctcaagtgatcctcccatttcagcctcccaaagcattgggattataggcatgagcctcagcacccagcccatcttaaccatttttaagtgtagagtccaattgtatatagtatattgagattgttgtgcaacagctctccagaactttttatcttcaaaactgaaatcttatacccattaaataacaactccccatttctgtctcccctcagttgctgacaaccaccattctatttctgtctaaatctgactactttacatgcttcatgtaagtggaatcatacagaatttgtcttttcgtcattgtcttatttcacttagtgtaatgttctcaaagttcatccatcttgtaacatgtgaaaggctttccctcctttttaaggttgaaaattatttcwttttatatttctgccacattttgtttatctagtcattcactgaaggatatctgggttgtttctacctcttgactatcgtgatatgtctgttatgaacatgaatgtgcaaatt

SEQ ID NO: 283680 - DNA, 622 bp, Homo sapiens
atgagggcagctagggattgcttttgttgtcatctgttggtttctgctgttttctttacttcattccattgtgaccaggagataagtcttctagtctcctacctcaatctgatctacattcttatcttcctggatgatagactctgattccacttccctgtagtttgaaaactttttatatgcacttctttggcctattgatctttgcttgactatagcattactaagatttcaggagggacatactcctygtatgattgaagcctgaggaactcttaaccttgattcagccaaaaagattataaacttctatgcttatatttgtacattatgagtttagcataatggacattgccactaattatgtatctgatattttatcttggatctaatagagtttataattcccttcccctccaacagtatccctgatgtgtttattgactatcactatcttcctctatgtccaagttctaactaccctaggattgagattcttccctgccttcttccataaattcattatattctagccctaatcctccagtaattctcctgatttaggttaagtttttcagaagctacatttgcaatgacatggatggaattggagaacattatg

SEQ ID NO: 283681 - DNA, 541 bp, Homo sapiens
tttgcaatgacatggatggaattggagaacattatgtcaagtaaaataatataggcacagaaagaaaagttttgcatgttctcactcatttctggcagtgaaaaattagaaaaattattttcatatggttagtgagtagaataattgttaacaaaggttaggaagaatgtaagggtggtgtctagtccttgcaagccagacttaccacctgcaattagaaaatccagatgtttyctagtttaggcctttcttagttcagcctactactaagacacctaagcaacttacctggatattcttggttgcgataaaaaaaaaattcaagtataaaatatgttatttatatgtacaaattataatcattcaggatgatgaattttcacaaattgaacataatcataaaactaaaatccagattaagaaacagaatactgccagcatttcagaatccaactttatccacttttggtcacttgcaaaaatcaaacaatgcttctgtcttctaacaacatagaggaatatacttgtattagaagtttat

SEQ ID NO: 283682 - DNA, 1135 bp, Homo sapiens
tttgcaatgacatggatggaattggagaacattatgtcaagtaaaataatataggcacagaaagaaaagttttgcatgttctcactcatttctggcagtgaaaaattagaaaaattattttcatatggttagtgagtagaataattgttaacaaaggttaggaagaatgtaagggtggtgtctagtccttgcaagccagacttaccacctgcaattagaaaatccagatgttttctagtttaggcctttcttagttcagcctactactaagacacctaagcaacttacctggatattcttggttgcgataaaaaaaaaattcaagtataaaatatgttatttatatgtacaaattataatcattcaggatgaygaattttcacaaattgaacataatcataaaactaaaatccagattaagaaacagaatactgccagcatttcagaatccaactttatccacttttggtcacttgcaaaaatcaaacaatgcttctgtcttctaacaacatagaggaatatacttgtattagaagtttatwtggacttacagtttcacatggctggggaggcctccgaatcatggtgggaggtaaaaggcactttttacatggcagccacaagagaaaatgaggaagaagcgaaagcagaaacccttgataaacccatcagatctcatgagacttattcactatcacaaaaatagcacaggaaagaacagcccccatgattcaattacgtccccctgggtccctcccacaacatgtggaaattctgggagatacacttcaagttgagatttggttggggacacagccataccatttaagggatcaaataatgtgaactattttctgtatagcttgtttcattcaacatttattatttgtgatttttacawattattgcattattcattcccattgttgcacagtattccattgtgataaaatatttcactttaccatcttactattgttcttgcttatgaataatattgctatgaatattttagtgtatttctttatatatatatgtatacatttttatttgttacatgcttaggagtagaattgctagattctaggatatgtttatgttcagctacagtagatagcattaccaacattttaaa

SEQ ID NO: 283683 - DNA, 1832 bp, Homo sapiens
catctccctgatgaccaatgatgctgagcatattttcagatgtttgttagacacctgaatactctttttttcctygaccaagtttttggtccatttattgtttgatcatcatgtagctattaatttatagtgctttgcatattctggtcataagcccattttcagataactgtcttgcaaatatcttgtctcactctgttaattacctattcagtctcttcaggtggttttggtgaataaaaatctctaagttttcatatttcctaagttattactgtttttctttaccattagctccctgtagtattaggaatctttagaaatctttgcatactcaaaggtcagcaaaataattttctgtgttttcttttcaaaattttacttcttatgtcactgttttaaatgaatttcaagattttttaaaaaatttgtattgttctggtattttactctaaactgttattgtttagattgcaatccatgtggaattgatttttgtatatggcatgaggtaaaggtcaagatattttttttcatatagaaatctaatctagcattattaatttaaagacattgattctcactgccwatcatcatgtagctattaatttatagtgctttgcatattctggtcataagcccattttcagataactgtcttgcaaatatcttgtctcactctgttaattacctattcagtctcttcaggtggttttggtgaataaaaatctctwagttttcatatttcctaagttattactgtttttctttaccattagctccctgtagtattaggaatctttagaaatctttgcatactcaaaggtcagcaaaataattttctgtgttttcttttcaaaattttacttcttatgtcactgttttaaatgaatttcaagattttttaaaaaatttgtattgttctggtattttactctaaactgttattgtttagattgcaatccatgtggaattgatttttgtatatggcatgaggtaaaggtcaagatattttttttcatatagaaatctaatctagcattattaatttaaagacattgattctcactgcccatagtatctcctttgtcacaaattagttaattctaattccaaactcttttttattccattgccttagttatctattcttgtgtcattactatctgcattattattattatcactttttaataggttttaataattgwatcatcatgtagctattaatttatagtgctttgcatattctggtcataagcccattttcagataactgtcttgcaaatatcttgtctcactctgttaattacctattcagtctcttcaggtggttttggtgaataaaaatctctaagttttcatatttcctaagttattactgtttttctttaccattagctccctgtagtattaggaatctttagaaatctttgcatactcaaaggtcagcaaaataattttctgtgttttcttttcaaaattttacttcttatgtcactgttttaaatgaatttcaagattttttaaaaaatttgtattgttctggtattttactctaaactgttattgtttagattgcaatccatgtggaattgatttttgtatatggcatgaggtaaaggtcaagatattttttttcatatagaaatctaatctagcattattwatttaaagacattgattctcactgcccatagtatctcctttgtcacaaattagttaattctaattccaaactcttttttattccattgccttagttatctattcttgtgtcattactatctgcattattattattatcactttttaataggttttaataattg

SEQ ID NO: 283684 - DNA, 608 bp, Homo sapiens
taatcaaaatataatttaagaacttaagctcaaagtgacagggccagaaagggtgtcatttgatcttagaggtaattcatcgcaaaatttgtgttttttactgtctctaagatctaactttctcaaagcgtatgctatttttattatttcctctaatacaaraaaatgccaaaagttattctgaagtttttcaatcacattgtagaaaacaaaagtattattttatctatatttattctaaaacaaaaatataccattcagttatttactgatggcaatatgagctggggagatttattgcaaattaaaatgtctgctcagtgtacatataatgatattatttcaaatcatggccaaatcaccaaggttacattcaaacaagtacaatagacttagacacaaattcttatttttcaaatactaaagccaaaaatatgccacgtcatttaaaaaaaatcacgttttaacaacttacaaggttactcaattaacatcagctacagataatattaatataacagtgtcttattactaaacaattagtttatcacacaaattaggaagaaccaaatacatactcattaaaaataatctgcaataactttgag

SEQ ID NO: 283685 - DNA, 586 bp, Homo sapiens
attcatcgcaaaatttgtgttttttactgtctctaagatctaactttctcaaagcgtatgctatttttattatttcctctaatacaagaaaatgccaaaagttattctgaagtttttcaatcacattgtagaaaacaaaagtattattttatctatatttattctaaaacaaaaatataccattcagttatttactgatggcaatatgagctggggagatttattgcaaattaaaatgtctgctcagtgtacatataatgatattatttcaaatcatggccaaatcaccaaggttacattcaaacaagtacaatagacttagacacaaattcttatttttcaartactaaagccaaaaatatgccacgtcatttaaaaaaaatcacgttttaacaacttacaaggttactcaattaacatcagctacagataatattaatataacagtgtcttattactaaacaattagtttatcacacaaattaggaagaaccaaatacatactcattaaaaataatctgcaataactttgagacatacatttgatagaatataataattaaatggtcaggtcaggatttactac

SEQ ID NO: 283686 - DNA, 539 bp, Homo sapiens
tttcttgcataaaacaaacttctcatatctacttatttgtctgacagattatgaccactgagtttttggcttactaaaccttttcaccaataattctttcttgactcgtaaagtttgggcaaggcctatctcttctactttatttcatttctcataatatgcaactcacytaattgtaattctctgtattcctcaggagcagtggttaatgattgattagttatacgtaaagtaattatttgtaaaggttttatttgcttccaaaataaaggggcctaaagcaaaggaaaaaaaaaaggcaaatactgcatgatctcacttatatgtggaatctaaaaaaaggtaagctcatagaaacagaataaaatggtgtggagggactggggaagatgttgtcaaagaacacaacattagaggctgtggggtggagggattggggagatgttggtcaaagaacataacatttcagttagataggaggaattagtttaaaatatttattgtataacatggtaagtatagtaaataatagtgtactg

SEQ ID NO: 283687 - DNA, 539 bp, Homo sapiens
tttcttgcataaaacaaacttctcatatctacttatttgtctgacagattatgaccactgagtttttggcttactaaaccttttcaccaataattctttcttgactcgtaaagtttgggcaaggcctatctcttctactttatttcatttctcataatatgcaactcacctaattgtaattctctgtattccycaggagcagtggttaatgattgattagttatacgtaaagtaattatttgtaaaggttttatttgcttccaaaataaaggggcctaaagcaaaggaaaaaaaaaaggcaaatactgcatgatctcacttatatgtggaatctaaaaaaaggtaagctcatagaaacagaataaaatggtgtggagggactggggaagatgttgtcaaagaacacaacattagaggctgtggggtggagggattggggagatgttggtcaaagaacataacatttcagttagataggaggaattagtttaaaatatttattgtataacatggtaagtatagtaaataatagtgtactg

SEQ ID NO: 283688 - DNA, 539 bp, Homo sapiens
tttcttgcataaaacaaacttctcatatctacttatttgtctgacagattatgaccactgagtttttggcttactaaaccttttcaccaataattctttcttgactcgtaaagtttgggcaaggcctatctcttctactttatttcatttctcataatatgcaactcacctaattgtaattctctgtattcctcaggagcagtggttaatgattgattagttatacgtaaagtaattatttgtaaaggttttatttgcttccaaaataaaggggcctaaagcaaaggaaaaaaaaaaggcaaatactgcatgatctcacttatatgtggaatctaaaaaaaggtaagctcatagaaacagaataaaatggtgtggagggactggggargatgttgtcaaagaacacaacattagaggctgtggggtggagggattggggagatgttggtcaaagaacataacatttcagttagataggaggaattagtttaaaatatttattgtataacatggtaagtatagtaaataatagtgtactg

SEQ ID NO: 283689 - DNA, 455 bp, Homo sapiens
tggttaatgattgattagttatacgtaaagtaattatttgtaaaggttttatttgcttccaaaataaaggggcctaaagcaaaggaaaaaaaaaaggcaaatactgcatgatctcacttatatgtggaatctaaaaaaaggtaagctcatagaaacagaataaaatggtgtggagggactggggaagmtgttgtcaaagaacacaacattagaggctgtggggtggagggattggggagatgttggtcaaagaacataacatttcagttagataggaggaattagtttaaaatatttattgtataacatggtaagtatagtaaataatagtgtactgtatacttaaaatttgctgagagattttaagtgttttcaccataaaaattacaattatgtaaggttatacatatattaattagctgtgcttagccattcaacaatgtatacctatatca

SEQ ID NO: 283690 - DNA, 584 bp, Homo sapiens
ccactttgctgttgctgcacatgctacattagcaacctgtcttgcattctttcttaaaattaaataaatttaatgttatgtgaagtgtgctgtgtcttatgartttgcctgttaattcaaaactaaaattgccactgctgtttgaacagagagctaacatgaaaagattttcatattctgaaatgaactctatttagacatggcatattattctcatagtaaactgccaactctacccatatttaatttagaaattttataagtatagttccaaacttatattgatctatatttctccctttctatcacattccagttcaaatattatacaagctttaaaaaatcatattttccaatctcagattcattcatcgtgtttcatttttatttatttgtattttttctccttatatccacattaatttctcatattgtaatttagattatgcttttttcctaaagtatctgtaatgaaatgctgagccatttcttctattcagatatgactaccaaattaattatatagatagccacacatatatacacatacacaagaacatacatgatgctaaaatacagtttga

SEQ ID NO: 283691 - DNA, 584 bp, Homo sapiens
ccactttgctgttgctgcacatgctacattagcaacctgtcttgcattctttcttaaaattaaataaatttaatgttatgtgaagtgtgctgtgtcttatgagtttgcctgttaattcaaaactaaaattgccactgctgtttgaacagagagctaacatgaaaagattttcatattctgaaatgaactctatttagacatggcatattattctcatagtaaactgccaactctacccatatttaatttagaaattttataagtatagttccaaacttatattgatctatatttctccctttctatcacattccagttcaaayattatacaagctttaaaaaatcatattttccaatctcagattcattcatcgtgtttcatttttatttatttgtattttttctccttatatccacattaatttctcatattgtaatttagattatgcttttttcctaaagtatctgtaatgaaatgctgagccatttcttctattcagatatgactaccaaattaattatatagatagccacacatatatacacatacacaagaacatacatgatgctaaaatacagtttga

SEQ ID NO: 283692 - DNA, 2235 bp, Homo sapiens
actccctagaaaaatcatttactacatttctctctcaaggctcttaaaattacattttaagttgtggaaaaaaaggttattatgaaatgtttcagaaaagtatacgtctatgaatttttcatagtgaatagaaatcctaaccagaaacttcacacttttcctataatcatggctaattttcaaaaatgtatacaaacatagctcataactgcttttctcttcccaatatcatggacctttgctggtgaaactgtattggttaaatatcagacaataagtgtaagctcactgatttattcagggatctattgtacaaattagattatgatattatattactatgctaaacatcctagctatgtcctgaaatttaactgtgaaatcactttatcagagggaccacaactgatttatagtacataaaataaattaaaatagctgtgcctccttctttcccttttgatattctcactttcatagttcttataaaatttatagataatctctatgaaaatcagcctcttgatctgacattaggtggtatttaacttagttttgtcmtatcctaacctaagctttgtttactgctgaatwatgatattccaagcttccatccatagtgtctaggctatctgttatgcttataaaccatgatagcaatagcctgcacatggagagacagcataaagaaagaggaaaatttttattcaggaaatgccattctttgttttttgtaattaccacttttcctcactaattgttctaattaagtctgtaaattctcaggcatccatatattccacaagtgctccaaggtttctagaagtaagtaactcactattaccttgctgtttctgttcttgttaatctctattgaaccttttaccaaaagcaaagtggagaagataggcaaaagataaaaactgatgataaaatgagaaatagagaagcaaagaagagtttgggggcagacatgagggtagacaataagcagaaggaaagagaacaatgtggaattwctaaggggtataaaagaaatggccacatgtgtgatcttatgctattttccttgcctccactctaagagcaccatacatcaccagtgtgtgatctatgtgtcatatatataagcatacatatgtgtgtgtgtgtacaaacacacatatgwgcagctttgcttatctattcccctgactgcctgcccttgttcactttgttattaatgttgttattatttaccttaacaataccttagacaaaaagggtggagttggagtagaatttccttcccctacctgagataaagttttagaattgctctttcccctaaagtccaggcgtttgctcggaaaatgagtctgggtgagattcacaaagctagtcttcctttctccaagttagatttacgaatcttcaacagatttgcactgtaagattacagtgggattcctagagtgaatgcctttgtaaatgtaggagggccctttctaatgcagcccccatgaattcctcactctcaagcaattctacactcagtctgaagcaatttataaaacaaccatctgaatattcctaccagcttawggattccggtggcttctgctctaggtaagcaaatattagcagttttatttctctagatacatctgtctctctagatttcagaataatagtttactgtgttaccttggttctttgatacataaaagttgttgatttttattttctttagctttcacttactgtaagatggtagtgatgwctctttcagattattggtctactggatttaaattcatgaaaattattgaaatatctattatctgacaatttatgggccatggaatatatgactctttaaagatacgggaagtaagaatttttatataatattctttgagataacawttcttgcattctggaggtatttgttaaattatagatgattgtttttcttatttgctcatactatttccacaagccatgaaaagtaatcagaaatatcttgtgtaagttaacattgtaggtatttttgttatagcaaatctgtatataggatttgggagctacttctctagcatgtgacttgactttctctgatttgataagtcatctagcaagtaaggctatcaattagagaggtttttcagaagttcaagcaagagaacttgtaacacaatgatagaaaagccttctttccaataatagagccaacatttattatcggcaaatgct

SEQ ID NO: 283693 - DNA, 473 bp, Homo sapiens
ctctttcagattattggtctactggatttaaattcatgaaaattattgaaatatctattatctgacaatttatgggccatggaatatatgactctttaaagatacgggaagtaagaatttttatataatattctttgagataacatttcttgcattctggaggtatttgttaaattatagatgrttgtttttcttatttgctcatactatttccacaagccatgaaaagtaatcagaaatatcttgtgtaagttaacattgtaggtatttttgttatagcaaatctgtatataggatttgggagctacttctctagcatgtgacttgactttctctgatttgataagtcatctagcaagtaaggctatcaattagagaggtttttcagaagttcaagcaagagaacttgtaacacaatgatagaaaagccttctttccaataatagagccaacatttattatcggcaaatgct

SEQ ID NO: 283694 - DNA, 484 bp, Homo sapiens
caccaggcccaggctatgacgataaagtcagaaagcattctgggcacatagttgaaagactaccactagacatccacatacctcacaccactgacagagtatgcaatagaaataagaaaaagaaaaaatacagtataccgggatcaagacgggaagtctccttcctacaagatcyctccaatatcctctattgacaaagctttacactgtcctcactgtgaaggagaaatgcccgaacagtctagactatttgcacaggtactgaagagtagatttgggactgaggtacacagttataaatttataactatgtcaaaaagttatggggagttggaataactttagtaaaaaacagatattggctacaatcatggtggtaggaatgccagtgacacgggacagtttatgaatatattctgaaaggacagccaacagatttgctgatgtaggatgtaacagaaaaaaacaaagaaggattttgtat

SEQ ID NO: 283695 - DNA, 484 bp, Homo sapiens
caccaggcccaggctatgacgataaagtcagaaagcattctgggcacatagttgaaagactaccactagacatccacatacctcacaccactgacagagtatgcaatagaaataagaaaaagaaaaaatacagtataccgggatcaagacgggaagtctccttcctacaagatccctccaatatcctctattgacaaagctttacactgtcctcactgtgaaggagaaatgcccgaacagtctagactatttgcacaggtactgaagagtagatttgggactgaggtacacagttataaatttataactatgtcaaaaagttatggggagttggaataactttagtaaaaaacagatattggctacaatcatggtggtaggaatgccagtgacacgggacagtttatgaatatattctgaaaggacagccaacagatttgctgatgtaggatgtaayagaaaaaaacaaagaaggattttgtat

SEQ ID NO: 283696 - DNA, 596 bp, Homo sapiens
ggttggatatttattctatggataatggatacctcaaaaaagaaattatagacagtaattaaacctatgtctagaaatatgttgctggttattctagaaaggcagaatgaaattttcaaatctcaactgcaaatttacgtggttattttagctacctgytctatgaaaaggagaaatatgtcatttctccagaaaaggcccattggatatcaaaattctgctactcacctgggttctcaactaagctttgacagtattaattgctttaggaaaattacataacctccctgttggtttctctgttctctaactgttctctagactcagcagtgatattatgcatatattatatacatatgtcagcagtagaagactttaaaaaaataaaacctcttaataaatttttgatatgttaaacagataccaatgactttttattagtaaacatttctattttaatgtagatttcattactacaaaatcaatcaagtagaacattggaaaggatctaatgtaaacaaaaatttgaaattagaagctatagatgacaataaggcttatggcatattttgcagtcagataatttctgttttatt

SEQ ID NO: 283697 - DNA, 596 bp, Homo sapiens
ggttggatatttattctatggataatggatacctcaaaaaagaaattatagacagtaattaaacctatgtctagaaatatgttgctggttattctagaaaggcagaatgaaattttcaaatctcaactgcaaatttacgtggttattttagctacctgctctatgaaaaggagaaatatgtcatttctccagaaaaggcccattggatatcaaaattctgctactcacctgggttctcaactaarctttgacagtattaattgctttaggaaaattacataacctccctgttggtttctctgttctctaactgttctctagactcagcagtgatattatgcatatattatatacatatgtcagcagtagaagactttaaaaaaataaaacctcttaataaatttttgatatgttaaacagataccaatgactttttattagtaaacatttctattttaatgtagatttcattactacaaaatcaatcaagtagaacattggaaaggatctaatgtaaacaaaaatttgaaattagaagctatagatgacaataaggcttatggcatattttgcagtcagataatttctgttttatt

SEQ ID NO: 283698 - DNA, 316 bp, Homo sapiens
acacatatcactcaaggtcttatagaactgtccatccacctgtcccattgctactactgccattacctgagcaagctacataaaagcccaaggatcagcctgcmctgacttgctaccactggtgcctacatacaccatctggtggcccaaggagcagcaaagttggtccactgctgtaactactgaagcatgagcaccaacctgcatggtgatgccacttctagcaaagcttcaccataggcttcactaacaacagcagtctaagccactgaggaacttgaaggcaccactgacactgattacagctgaagaaatc

SEQ ID NO: 283699 - DNA, 630 bp, Homo sapiens
gaaagctcattaggcattcagggcccaaggtttttattgagaggtcgatcacataggggtattctgtctagaatgtccacaaattctaggatctcaaaagcaaagtaagtatttagcataatccacattgcttttatttaaaaagtaggcacagtgagccaccattatcaattgggatatagtacggacttccaaaatccaagttctcaaacacgagccaaggctaaccttataagcagcctttttaaagaatagtcctctaaggcctgctatattaactttttctgcaacgtaacaaatgagttaaacaggaacctagaaaagaaagctaaaaataaatttaactgaatgaaaatgaaaacatgctatgcctaaatttgtaccatgcagttaaagcaatactttatagacaaaaaatgtacatattggcttacaatagaagagaaaataaaaaagytagcaatctgcacttcatcttaagcaactagagaaacaagtatgaaataaacttcaagaaagtagaaggaagtaaatattaaaattcagagtaaaaataaaaaaattgaaagaatagccattaaaatcaatgaaatcaaaagcatgtatttgaaaatataatgtaattgctag

SEQ ID NO: 283700 - DNA, 603 bp, Homo sapiens
aacgtagcacagaactaacatttgacccagcaatttcatcactgggtatatactcacaggaaaataaatcattctaccaaaaagatacatgcactcaggtgtttatcccaacactgttcacgataacaaaggcaagaatccaatccagatacccattaatggtggactggataaagaaaatatggaacatatacatcacagaggactatgcagctgtaaaaaagagtgaaatcctgtcttttgcagcaacatggatgcaatgggaggccataatcctcagtgaattaaggcgggaacagaaaaccaaatatcaaatgttctcatttataagtgtgagctaatcactgggtactcatgaatataaagatggtaacagtagacactggggactactagagaggggatcaagggctgaaaaactatctgttaggagctatgctcacttgctagctcttgggttcaagtgtaccccaaacctcagcatcacacaatatacccatgtaagtaamctgcacgtgcactccctacatctaaaataaaagttaaaattattttaaaagtatttccctcttcactacttaaaaataaaaagcacagtttcac

SEQ ID NO: 283701 - DNA, 537 bp, Homo sapiens
tcacttgctagctcttgggttcaagtgtaccccaaacctcagcatcacacaatatacccatgtaagtaacctgcacgtgcactccctacatctaaaataaaagttaaaattattttaaaagtatttccctcttcactacttaaaaataaaaagcacagtttcacttatctagaatgtgttaaatgtggtcatgtagaggcaatagattaggcttgatcacttttcaaggagaatgccaggtccagtaatatgtgtaacatgtaaagaaactgctcattaaactgtgtgttactgaggttgctctgtggcttttcaagagcattggtaatctgattttgattttgagaaatggtctcactctgccacccaggctagagtgcagtggcctaatcttggctcactacagcctcaacctcctgggctcaagcgatcctcctgccttagcctcctgagtagttaggcactgcaggcacatgccaccacrcacagctaatttataaaaaaaaaatttgtagaaatgaggtttcactatgttgc

SEQ ID NO: 283702 - DNA, 444 bp, Homo sapiens
gtccccggtaatgttatgactgcaaaattctctgttttctaatttgagaatggaaggattttaaccctctgtatataaggcaggcrgagggatgtacagggaaaaattctaacaacttgtttccgtcattgtaatatattgccttgcagctaactgacatccaaatccttaaaaattgagggaaaaatggcctattttatgtttaattaaataattatcaaaaaataaaatccttggttatggtttcaatgctttctaaaaataatcttttgcattacctaacttaatagttcttccattagatgctggtggaaagtccacaattgtgtttgttttgagatcagtgtaaatattaatagttgcctatctgacaaagcaaaggttttgttcttccaaaaaaaatgtagaattgatggatattttcttaaataacatatgaagatc

SEQ ID NO: 283703 - DNA, 560 bp, Homo sapiens
ccaactcattttctaaggtccagtatgattctaataccaaaacaaaacaaagacactgaaaaaaataaaattacaaactagtccttcataaatagcaacacaaaaattctaaggaaaaaaatagcatattgaaccggcaatagagtaaaaaggatagcacatccttatcaagtgttacttatttcaggaatgagaaactcattaaatatttgaatataagtgtaatttattacactaacagactagagaggaaaatacacacatgatcctctctacaggtaaaggaaaagtatttgacaaaatttagcaatcattcaaataagaacagtcagcaaaagagagcttctttaacttcaagatgggcatctaaaaaaaatcagacagataaaacaactrccatactaacacacttaatggtgttaggcaaaactgttttcttctaagattgaaaataagaagaagaaagaaggatgtcatctcccatcactcttatgcaatgtcatgtagaaatactgtctagggcaataaagcatggaaaaaagtatacagattagacagga

SEQ ID NO: 283704 - DNA, 508 bp, Homo sapiens
gtgttaggcaaaactgttttcttctaagattgaaaataagaagaagaaagaaggatgtcatctcccatcactcttatgcaatgtcatgtagaaatactgtctagggcaataaagcatggaaaaaagtatacagattagacaggaaaaaataaaattatacaggtatagctattgtatatayagaaaactctaaagaagctactaactagttagtattcttatttttttccacgcaggatactgattagcagttctgtagctcctgtgtgtgttcactgggttaaacaaataagtaagtgtagagaatgagattcaggtttctcactacagaagaaagaaataacacatcaagaatgtaaaaggcgagaataactctgtggtgttgaattataattaaagttagtatgaattcaagatttttaaactatataaacagataaatagatatagactaaactttgtgtgtatgtgtattacatatatatatgtttaagtgtatacaaatact

SEQ ID NO: 283705 - DNA, 496 bp, Homo sapiens
ccactggcattttgggtcagaagagagtcattggcaaaaaaaaaaaaaaaaagagagagagatctagagaagacaaaaaagagggaggaggtgatggaaggagagggattgaaaagataaggggaaggcagaataattggatgtagggaaggaaactcgaagaaaatgagagaaaggattcagtaaaaaaaaaaaaagtctactgtttatgaaattttcattatcttcgagtaaagaatcatttagtgaagcaacttttgattcaraattttgtttgttggaatgtgtttcccagaagcttatgggttagaaatttaatttccaatgcaacagggttgggatgtgggacctaataggagatgattggctcatgagggtagagtccttctgtatgaatgattaaggttgttatcataggaataggttcattatcacaagagtgagttcttacaaattgagtccagcacctggtgcctctctgtgtttcacatgctca

SEQ ID NO: 283706 - DNA, 586 bp, Homo sapiens
tggactggttgctgcggaagtcatgaatcagmgtaccattgttatatatgatctggccattgtccatttgtatattgtctctcactcagttataacatctgcaaaacatctcttatgacttaaaaatctttaacatgtgtttttttttttttaaatacatacatatttctgtggaagtcatacttttgccttttttggtaattctcttctagaagatcactttcctaaaggtgtcttccatgactccccagtataaatcatactctgcatatatactctgtgtttctgctccaaggcttaaaaatctgtcatagtttcttttgcctggagtgtaaagttgaaatacattttcatgttatacaaaatcttctgagattaaacaatgttctctctctgtaatgtctctctctatataattttatatatataatttaaccctgtttgcacgctctaggcttaagccaaagtaaattatttgccaacaatcttagagtgtttgctatctccaaaattgggttcaaatattctttttatgtagaatgtactcctccctctacacaggcatcagattcctctttacagtttt

SEQ ID NO: 283707 - DNA, 508 bp, Homo sapiens
ctctgatggtgcatgccctgggctcagaaacatgagatacctgattatttctcaggccctcttctaacagaagaaattttaatttgagaaggatgagcgaggtcctgccaattgtaactatggattttggtcatcctgaaaaaataaggctgctgtgacctgcacctgttaaattgaaggtgtggttagagagtctagttaagaaggatactagagacataacagacactccaaatgtatacattatgttagcccttccttgtgtaatttctgcacctgttctttctgtatcataatacaaaaacctgcctaaagatcatcatgtattattttactttaagtgatttaataytcctgtgatgtttgatatcaactgacatgtttcattctttcattccaatatttctattcaattaaattaaaatgctctgctaagtattatagggaatccaaattttgataagatcccattgcttctgctaagtagctgtgatgtgccaggaagatt

SEQ ID NO: 283708 - DNA, 590 bp, Homo sapiens
tgtttgatatcaactgacatgtttcattctttcattccaatatttctattcaattaaattaaaatgctctgctaagtattatagggaatccaaattttgataagatcccattgcttctgctaagtagctgtgatgtgccaggaagattaagaaatatacacagataaaattcatttaagaggaatcaaagtgtgttaaatgttacagaaatggaaaaggtacatttcaacttggaggacaaaagatgtctttcaattttcaccattctttattcctcagccacatttttagtgctccttactctttttctcttttttaatcttccccttcttcaaattatacattcatgtatggaataatggaattatttctcggggtgttaggttaaaatttcacatatatgtatgttcattatttttcagatcrtcacactggatggtttatccatcacagatgcctctctgaggaattctcttgtacatctaatctgggcattaacatcttggaggacccgaagtgccacatctgttaactcaaagagccttccagagtggccataagattcccttattttgcatttttttaatagc

SEQ ID NO: 283709 - DNA, 622 bp, Homo sapiens
aactcttacacattgctgatgagactgtagagtggcacaactctggaaaactcattggcagtttcttaccttatctcccggcaattccattcctaggtatttacctgagaaaagtaggagtgaggagaatgtgtcctcaaaaaacctgtgaaagaatratcacagcagccttacatataatagccaaaacctggaaacaacccaaatgcccacaaaaggagattagataaacaaattgtggtatattcatacaatagatactacccagaaataaaaaggtatgaactgcagctataaaaaacaacatgaatgaatttctaaaacactctgttgagaaaaataaatcagacacaaaaagtacaaaatgtaacctcttaatgaagcagtcacatatcttcaatatagaaagaaagatatctcaattaaagaaaggctttaaaattatttttactttattctctaggacaaataaaaatatataatttcagacaaaaatacaatgaggtttttttggaaaataataggattatcatatagtggctaaaaacataggtcttggacataaatagatcaaaaagtttgacctaacatttagtagctgtgtgttatctagaaagtaaca

SEQ ID NO: 283710 - DNA, 580 bp, Homo sapiens
acctgtgaaagaatgatcacagcagccttacatataatagccaaaacctggaaacaacccaaatgcccacaaaaggagattagataaacaaattgtggtatattcatacaatagatactacccagaaataaaaaggtatgaactgcagctataaaaaacaacatgaatgaatttctaaaacactctgttgagaaaaataaatcagacacaaaaagtacaaaatgtaacctcttaatgaagcagtcacatatcttcaatatagaaagaaagatatctcaattaaagaaaggctttaaaattatttttactttattctctaggacaaataaaaatatataatttcagacaaaaatacaatgaggtttttttggaaaataataggattatcatatagtggctaaaaacataggtcttggacataaatagatcaaaaagtttgacctamcatttagtagctgtgtgttatctagaaagtaacaactctaaacgtctcattttctcaggatagggttgtgatgacagtcaagatatttattccctcttgaggtaggagttattaagaaattattttaggcagaga

SEQ ID NO: 283711 - DNA, 551 bp, Homo sapiens
tactatccaattcatcacagaataaaatgtgcccatattaaggagatccaggtctccaaatgcatagtttttctctagtaggacccacacattycaggattagagaattattcttcatctcaaggtgatgagtaatctgcacatttaatttaaatccatttaattaactatagcatttattataagaaagaatttatatggaactctagattcctaagtcatatagataaaaacaaaatatgtgtgaagagtaaatttttttaatggcccatataatttcactcactttctaaaagatgagcctgagccattttttcttaatatcaaggatatttttgataatttgaatttaatacttatagtcaagattgtcacagcttgtgattttttagaaaagattattatagtcttatttacaaagtatatgctgccagaaaaattagggttattcgaccaggaaaataatatctaatatagaagctgaatttgataatttagagaaattttactaatacattatgaagcagtgaactattaaaccacataggata

SEQ ID NO: 283712 - DNA, 463 bp, Homo sapiens
gtgcataaattctcagctgcgtgtcttggcaatttatctatactagtaatttctgatttctaayagcccaagagaatacaatatggttgttgtcttctttgtgttctaagtgatcataaaataagactcatggttcagccaatggattagaggttggaactaataaggattgcttccaattttgagtttcttgagataagagactcttagttagatgtgtatttttccatagtgcctatatagtgcattatactcagacaactaatacactttgaatacttgaattgaaacatagttaatggaaaaatatagagtattatttagtgtaatatgtatctaaaaccttatattcccaaatggtaagcagtcatgtggttaagggagcaaagaaacacccacaggtaactaacatctttgagctttgataccttatttttctcccctataaacaagaataatagaa

SEQ ID NO: 283713 - DNA, 551 bp, Homo sapiens
tactatccaattcatcacagaataaaatgtgcccatattaaggagatccaggtctccaaatgcatagtttttctctagtaggacccacacattccaggattagagaattattcttcatctcaaggtgatgagtaatctgcacatttaatttaaatccatttaattaactatagcatttattataagaaagaatttatatggaactctagattcctaagtcatatagataaaaacaaaatatgtgtgaagagtaaatttttttaatggcccatataatttcactcactttctaaaagatgagcctgagccattttttcttaatatcaaggatatttttgataatttgaatttaatacttatagtcaagaytgtcacagcttgtgattttttagaaaagattattatagtcttatttacaaagtatatgctgccagaaaaattagggttattcgaccaggaaaataatatctaatatagaagctgaatttgataatttagagaaattttactaatacattatgaagcagtgaactattaaaccacataggata

SEQ ID NO: 283714 - DNA, 594 bp, Homo sapiens
agaaattagttcaactattttggaaagcagtgtggtgattcctcaaggagcgaaaaacagaacatctattcaacccagcaatcgcattactgggtatatatccaaagcattataaattgttctatcataaaaacacatatacacataggttycttgcagcactactgacaatagcaaagacatagaatcaacctcaatgaccatcagtggaagactggataaagaaaatgtagtacatatgcagctgtaaaaaaagaatgagataaagtttatagcaaaaatgtcaatgaagctagacaccattatccttagcaaattaatgcaggaacagaaaaccaaatacatattcttacaaataagaaagagctaagtcatgagaacacacagacacaaagaggggaacaagagaaacaggggcctacaagagggtggagggtgggaggaggaaaaagagcagaaaaaataactgttggtactaggcttaataatcaggtgataatctgtacatcagactcccatgacatgagtttacctatgtaacaagactggacatgaacctctgaacctagaataaaagttaaaaaaaagaaaaaa

SEQ ID NO: 283715 - DNA, 579 bp, Homo sapiens
accccaggttccttgaggtggggaagctctctggacagacaccccaaggtgtcttactcatgacactgtcagcttaaccctcaagctaggagaagacccccagaaggagggtgggaggggcagtccccagctccccgacagtcacaaccagactgtggccccagcactcagggcagcgcagagccagaggccactgcagagagacaccagccctctgtctcagagtgggcaggagaagggagggacggcctccgggtggagcaggccctgcccagaccccatcctgaattctggggccacaggggagcatggcgcagctgcgtgtgtgtgtctgtgcccaccttggaagtgggcagccccgtgcagggcagaggcraagttcctggacctgagcagctgtggttggttctgggaccatttcttagccaggggaggacaggcccagtggacacagctaggggaagatctcagccaccccaggctgaggggcaggaccagggcaaagtcctcccaagtgtggggtccccacactcccgtgacgccacgctgaacttgcgctctcactcggcccccaccaag

SEQ ID NO: 283716 - DNA, 579 bp, Homo sapiens
accccaggttccttgaggtggggaagctctctggacagacaccccaaggtgtcttactcatgacactgtcagcttaaccctcaagctaggagaagacccccagaaggagggtgggaggggcagtccccagctccccgacagtcacaaccagactgtggccccagcactcagggcagcgcagagccagaggccactgcagagagacaccagccctctgtctcagagtgggcaggagaagggagggacggcctccgggtggagcaggccctgcccagaccccatcctgaattctggggccacaggggagcatggcgcagctgcgtgtgtgtgtctgtgcccaccttggaagtgggcagccccgtgcagggcagaggcgaagttcctggacctgrgcagctgtggttggttctgggaccatttcttagccaggggaggacaggcccagtggacacagctaggggaagatctcagccaccccaggctgaggggcaggaccagggcaaagtcctcccaagtgtggggtccccacactcccgtgacgccacgctgaacttgcgctctcactcggcccccaccaag

SEQ ID NO: 283717 - DNA, 603 bp, Homo sapiens
gtgttcaaagggcagggaaaggggccagataaacttgacttgtggctccagtgaacaggcaaggaaacttgtctatcccctgactgtgggtgagaaggaaaattccacagtgagaaattgaaacctcagggaaagttgaccaactaattaacagagctgaagaaacaacttgcaaatgggaaggttgatcatcagaaattaggcagatgcaggaatgggatgaagacatgtaaaatgtcaaaggagattatgaggcatggaagatagaatgaaaatctatttaatgagttttacaggatgaggataaagaaataagaggagtcgatattcaaagagataatggctgagatccttacagaaataaccaaaagcataaatccttaagtttaagctgcacgagtcccaaggagaatgcataagaataaatctaacctgracacagcatgttgaaactgcagaactccaaagacaaagagaaaaccttaaaagcaaacagagataagagaaactgttttcaaaggaacaacaattaggttggtgcatatttctccacagccacattatgtttcagaagtcagtatcttcaaattgtaagaatataac

SEQ ID NO: 283718 - DNA, 603 bp, Homo sapiens
gtgttcaaagggcagggaaaggggccagataaacttgacttgtggctccagtgaacaggcaaggaaacttgtctatcccctgactgtgggtgagaaggaaaattccacagtgagaaattgaaacctcagggaaagttgaccaactaattaacagagctgaagaaacaacttgcaaatgggaaggttgatcatcagaaattaggcagatgcaggaatgggatgaagacatgtaaaatgtcaaaggagattatgaggcatggaagatagaatgaaaatctatttaatgagttttacaggatgaggataaagaaataagaggagtcgatattcaaagagataatggctgagatccttacagaaataaccaaaagcataaatccttaagtttaagctgcacgagtcccaaggagaatgcataagaataaatctaacctggacacagcatgttgaaactgcagaactccaaagacaaagagaaaaccttaaaagcaaacagagataagagaaactgttttcaaaggaacaacaattagsttggtgcatatttctccacagccacattatgtttcagaagtcagtatcttcaaattgtaagaatataac

SEQ ID NO: 283719 - DNA, 524 bp, Homo sapiens
taacaaccaatacccaacttaagtattattcaagagtgaaggagggagcagggcacagtgacacatgcctataatcccagcactttgggaggccaagaygggaggatcacttgagcccaggagttccaaaccagcctgggcaacgcagtgagaccttgtctctacaaagaataaaaaaattagctggacattgtggtgtgtgtctgtagtcccagccactcaggaggctgaggtggaaggatggcttgagcctggaggtcaaggctgtgctgagccgggatcacaccactgtactacagcttgggcaacagagtaagaccttgtttcctaaaaaaagaaaaaagtgaaggaggaatagctattttcagacaataaaacctggcaatttaccactgttagagccatgatgaaagaatcacttaaggataataaactttaggaagaaaaaaccctttaattcagaattcagaaggaagttggggcatgcaagaagaaatagtgagtaaagaaattggtaaatatgt

SEQ ID NO: 283720 - DNA, 524 bp, Homo sapiens
taacaaccaatacccaacttaagtattattcaagagtgaaggagggagcagggcacagtgacacatgcctataatcccagcactttgggaggccaagacgggaggatcacttgagcccaggagttccaaaccagcctgggcaacgyagtgagaccttgtctctacaaagaataaaaaaattagctggacattgtggtgtgtgtctgtagtcccagccactcaggaggctgaggtggaaggatggcttgagcctggaggtcaaggctgtgctgagccgggatcacaccactgtactacagcttgggcaacagagtaagaccttgtttcctaaaaaaagaaaaaagtgaaggaggaatagctattttcagacaataaaacctggcaatttaccactgttagagccatgatgaaagaatcacttaaggataataaactttaggaagaaaaaaccctttaattcagaattcagaaggaagttggggcatgcaagaagaaatagtgagtaaagaaattggtaaatatgt

SEQ ID NO: 283721 - DNA, 519 bp, Homo sapiens
tttcaaaaacatttgcatgagaactttgcattcgttaacatgaacaaaattgtcctttcagccacatggttaggaatgagaattccatcatgagcaagaaaataagtattaaaccagagagtaaaaatgaaccttcatcatatttattatatttggctcaagaccattctagacaatgactactttgatagagacattttgaaatggttcagaccttaaggaagtaaaaaattaacataatgacacccaaataaagttaaacaagttaaacataaaacaacatatctgatcttctagtacagcagtccccaacctatctggcaccagggactggttgtgtggaggacaattttttcacagatggggtggcaagggggatagttttgggatgattyaggtgctttacatgtattgtgcactttatttctattattattacattgtaatatataatgaaataattctataactcaccataatgtagaatcagtgggagctctgagcttgtttttctgccac

SEQ ID NO: 283722 - DNA, 548 bp, Homo sapiens
catcccgctagtgcctcacctctgtgggtctaccctacacacacctgccacaggaaccaacgaagacccaacctgatatcctccactcaggaccctccaggggttgcaagtaccccaggatgcagtcccaaatctttgctgtgccctggagagctctgtctgtctgtcttgccccaaccccctctcccctcctcccctcctggcagctcctagagcaggtcaggagggttctgcctcagggcctttgcaatcaccccctctctacctggaaggcccttccccagatgtcccagtggctcactgctgctcctcatcaraaatctgctccactgtcgcctcagcctagtggccttcctccagcacctggaaggaaagagcaccctccaggattgggctttgtttctcttcatagcaacagctctcccctgcacattaggtgttcacatgtttactgtctgcttctttaatggaatgtaagctccgagagaccagcaatttcaacttctctgtttactgctgtatttccagtgctgagatgtgcttggcac

SEQ ID NO: 283723 - DNA, 495 bp, Homo sapiens
aaactattgataggaatatgtagagtaatatatgtacgcatatggtcaagctgctcaaaatagaacactatagctagcattctttgccagcaggcactgtgattggagcctggtgttctgatactttgcactgtattaatgagtgacagttttgaaatgggggtgaccgtggtgcgtggcagaaatgagaggggtagacatcagggtgtaatttagttctctgctctcttcttgctgatgatttgctgctgtgcagcacatctctggaaataaaattcaattttaaaaaaccaagttagacagcaacagacagttaaatttgacgtcaagaatgtctggaagcaattggagattgcatccacttcatacactgtgatgaggcacacttgcygtgaccaccggcagccaccagatagacagctctgctctgtatagacacagacaccacctagagccccaaacacaccaagctcctggttgtggatatgctgtaga

SEQ ID NO: 283724 - DNA, 573 bp, Homo sapiens
cccaaacacaccaagctcctggttgtggatatgctgtagatatttgccccattccacccacaactgggacacttgatgaagtcacacttgattgaaattgtgcttctcccaggccccgtcagacaccacctatgtgtttaaatttcaccgtctatcttagcaaagaaacagaggggagagcttcaatatacattgcaacayaatcttgtgcacagggtctgcaaggaagcccccaaacaaccctttctacagagccagatttgatatgcaaaacagcctaataaaaggtacaagatgaagttgctacataaagttaacaacatggaaagtaaagaagcaatttctaaactaaaataaatgtcaactacagcatatccagagagggcttttgctgacaggatcagcaggtcaaaggaaagtaaccttccctagagtcagtgttcaaggcagagcccccatctttaacagcagcctgcccttggatgcctctctgtgtgggctatctggtcaccccaagcctcctgccctcagactagtagaggccagggcctgcctacgtgctagagcaaatcc

SEQ ID NO: 283725 - DNA, 573 bp, Homo sapiens
cccaaacacaccaagctcctggttgtggatatgctgtagatatttgccccattccacccacaactgggacacttgatgaagtcacacttgattgaaattgtgcttctcccaggccccgtcagacaccacctatgtgtttaaatttcaccgtctatcttagcaaagaaacagaggggagagcttcaatatacattgcaacacaatcttgtgcacagggtctgcaaggaagcccccaaacaaccctttctacagagccagatttgatatgcaaaacagcctaataaaaggtacaagatgaagttgctacataaagttaacaacatggaaagtaaagaagcaatttctaaactaaaataaatgtcaactacagcatatccagagagggcttttgctgacaggatcagcaggtcaaaggaaagtaaccttccctagagtcagtgttcaaggcagagcccccatctttaacagcagcctgcycttggatgcctctctgtgtgggctatctggtcaccccaagcctcctgccctcagactagtagaggccagggcctgcctacgtgctagagcaaatcc

SEQ ID NO: 283726 - DNA, 942 bp, Homo sapiens
acacttcacaaattaggaaatggaggctcacagaaattaacgaattggccaaaccttatattgcttgtaagtagaaaaagaggttcaagcatgggatgtctggcccagagttggttgtttttcccaggaaactgtaccccaccacccagtaacaattctaagtagtgacttttatatattaatacaggatctttcttggaggtcacactaatatctgagtagtgattgttttctatattaacacaggatctttcttggaggttacgctgaagtagatacaatggaatgtcacctgagacttgccacagttgggaattctctgtgggtctgctctgcatccattcctgtctccatttttcttggatttgttctaaccatgctccgtgagtccgtgtgactccaggaagccaaatctacccccatatctgaggtggacctcggtgggtcatttatcctrttggtcattggttcagcattaggttatgctgcagttagggctaattagaccagtagagggccttccaagaaggatcatattagttcttctgtgaaagcttcaggggaccactcttctttggacaccacaggaaagcctggagccttagcaaawccttataccaggctgagctgctgggtgaatcagttctggaggtgctcctgcctctggaatcctgatttcatgagccaatggatacctttcatgtttaagccactttgagttgaattctctgttacttcaacaaaagcaccataactaagatattctacagaatttttaaattctatgatctgacccctacagtgaatattcactgaaaaataaaaatttggggactattgtactgtgctgaaaaagaaataccaagtcaatacacaaaatagttctaccttgagagcattwaaattttctcaagaacagactactttgtgcatacacaaatg

SEQ ID NO: 283727 - DNA, 575 bp, Homo sapiens
gctaggtggtgcttcccaaaaggcaagggtcttgcatctttkgctctttctacattatttggatattttacattcagaatacattatttcataacttgatttttaaagggataaaaatgtatttttccaggtttattgaggtacaattgccagaaaaattgtataattcaaggtgtacaatgcaacatttgatatacatatacattgcgaaatgattttcacaatcaagttaacgaacatattcatcaccacacagttactattttgtgcatgtgagggtgaggacacaagatctaccgtcttagcaaatttcaagtgtatgatatagtattcttaacaaatgtcgccatcctgtgcgttagatctccagagcttactcataactgaaagtttgaaaatggataaatacactaataatcattgagcactgtcgaatactaagtagctctgaggcgtccttgttcattttgctatgtgtgttattgtgttttatgtgttctatatgtatgacttcatttaattcacggggtagctataccataaaactacacacaggaaatagaaaggagaaagag

SEQ ID NO: 283728 - DNA, 575 bp, Homo sapiens
gctaggtggtgcttcccaaaaggcaagggtcttgcatctttggctctttctacattatttggatattttacattcagaatacattatttcataacttgatttttaaagggataaaaatgtatttttccaggtttattgaggtacamttgccagaaaaattgtataattcaaggtgtacaatgcaacatttgatatacatatacattgcgaaatgattttcacaatcaagttaacgaacatattcatcaccacacagttactattttgtgcatgtgagggtgaggacacaagatctaccgtcttagcaaatttcaagtgtatgatatagtattcttaacaaatgtcgccatcctgtgcgttagatctccagagcttactcataactgaaagtttgaaaatggataaatacactaataatcattgagcactgtcgaatactaagtagctctgaggcgtccttgttcattttgctatgtgtgttattgtgttttatgtgttctatatgtatgacttcatttaattcacggggtagctataccataaaactacacacaggaaatagaaaggagaaagag

SEQ ID NO: 283729 - DNA, 575 bp, Homo sapiens
gctaggtggtgcttcccaaaaggcaagggtcttgcatctttggctctttctacattatttggatattttacattcagaatacattatttcataacttgatttttaaagggataaaaatgtatttttccaggtttattgaggtacaattgccagaaaaattgtataattcaaggtgtacaatgcaacatttgatatacatatacattgcgaaatgattttcacaatcaagttaacgaacatattcatcaccacacagttactattttgtgcrtgtgagggtgaggacacaagatctaccgtcttagcaaatttcaagtgtatgatatagtattcttaacaaatgtcgccatcctgtgcgttagatctccagagcttactcataactgaaagtttgaaaatggataaatacactaataatcattgagcactgtcgaatactaagtagctctgaggcgtccttgttcattttgctatgtgtgttattgtgttttatgtgttctatatgtatgacttcatttaattcacggggtagctataccataaaactacacacaggaaatagaaaggagaaagag

SEQ ID NO: 283730 - DNA, 644 bp, Homo sapiens
gtgtatatattctaccactaagattacctccaaaaacttacaagagttagtaattccttgtgggattttttttcagctcatttaaacttgttaacacttcaggagaatgctacatgctaaaattgggagcccatcacacaataacagctaactgttagcactggcagaggcagctatgctaaaagctaacaaagtctgagcttcaggaccctttatttgcatggccccttccaasgtcctgagaagcaatgtccagcaatggcttcacatggtcatattttcatacaatgtgcaaaataagatagtttaactgtgtttgctatgacaacatttttgagatccagctaaggggaagttgaggtagagatacatttatgtagggattagtgggaagtatttataaggttcgtggtcacctctgcgtatagttaagtaatgggcagctgccctgggataggaatggcttccaccaaccactgtagcaattcactcagcatcatgacaccaagacgttgcaggagatgtgcatacacaacttagtttcttaatcttgtaggagaaaatttgcctccacagcacctggagatgttgaccacttcggtatggtattttgcggctgatgtatattgtcttctgggattagt

SEQ ID NO: 283731 - DNA, 610 bp, Homo sapiens
ccaatttcttgttcagtcaccttttttgttcattgaagatctgctgacccatctgctggaacttgatggtgaggaggcctcctggatggcgctcacagtcagatatttaacaagtggagtttctatgaaaacacaagaaaaacaagactaatagctagaaactcagtttctgagtcgagaggacagccagccgagcttgaagcaccttcaggtggtagagccatcatggcrgatatggccatcgacacagtccctggtttacagccaaatgcctgtggtgatggtattgagtgttctgatgaaccttctgagtggccacacatcaacaggcacgaaggttgtctactggatttgtcgtgggtatttctctgaagtttatataagttcctattattttcaacttgcagggcttcaggaaaacggaagttttagtttttagggatgccatgtcaggaagataggagaaaattggaaacgttaatttagagagttgtaaccagatatggaacgaagctagaactgagcaggaccagtcaggttcacaggcagataataaaaccccaaagataaagaacagggacagaacctcataactcacaggatgtgctat

SEQ ID NO: 283732 - DNA, 1112 bp, Homo sapiens
tgtttgcaaagtaagtctcatcccattaaccttagcctgatcattttcgtaagtacagaaagaatggtagttgaccaaaaggcctttgcttagtttgcactgctggaactttccattaagaacctcatattagacttttaaaagctgcttgaggctacaaagtcaagycaagaactcaactccagacttcatcttcaatacctagagatttgagtgaattattctctttttagagtccctaagatattttaagtttcctggaccaggaagtgacatttcttactcctgtaaggcaaggaatgctgtaagccaggtaccaggacatttttttcccccaaaagggctttgtaagccttggctccataaagtcagctttagttcctaaaaactgtctggtcatgcctaattttgtgcacattattctcaaatatgacattccagtcaaaacccatgaaatataaccaatgtttccwatggagggggagaccaagaaaacttgtctctccttagatgagtgtcagagaggcagaaagcagagcaggaatggccaaggacaaagagagggggaatggggacttcgtatttaatggggacagagtttcagttctacaatacaaatgattctggagatggagggtttccttcwctgagcaagagctgtttccaccttttggccatcatgaatgagtctcttctgttttgcaccatattctggtggcatgtgttcttgcatagtagtgatggggctgccatcacactctgaagagccttctatatttggagatcttcttgcattttaagtcttgtcttccctgcatggcagccagaactctcaggcaggtgaacttggctctgccaatcagcttcgcgcaggccaggctgactggaaagggggtgttaacacggaagtgcaggaattctcggttctggtctaacttatgagaaagaattcggccaagagacaattagtaatgtaagccaaaggtttgttaaggaaacaagagcacactccgacagaggagttgaaaaccactcgggctggtccagctgggaaaataaccgtagcagtgtttatttaaagagacaggatgctctggaaaacgaggcagagt

SEQ ID NO: 283733 - DNA, 537 bp, Homo sapiens
cctgttggcatcctgataaatagagtcactgacactggaagtagcaccccacttctggtaccaaagtctgtatctattttctattgccactgtaacaacctctaatttagtggcttaaaataacacaaatttattctcttacagttctaaargtcagaagtctaaaatcaaagtgtcaacagggcttcattcattttggaggattcaaggggagaattcattttcttgcccttttggcttttagaggcacctgcattctttgtctctcccttgcatcattccagcttcttgcttctgctctcccatctcctgctacttactctgctcctccagctgctctctcttaaggacttctgtgattacctcagacccacctagataatccaggatgatcccccacctcaatatccttaatcacatctacaaaacaatttcacagcaatatctagataagtgtttgattgaataactaggtaccatagcctggccaagtttacacataaacctgaccatatcacagctccaggaagcagactc

SEQ ID NO: 283734 - DNA, 531 bp, Homo sapiens
agtcaaaaaacctatgattaaatcttaactctgctacttgttatctgtttaaatttgaggaagttattaaaaatctcttggcttccatccctttatctttaaaatgagactgaacactgatgatttctacctcctagtcatatgaaattaacaaacgtaagaaactgcgcagcytaatgttttgcacatgctacatattcaaaaataaatggttattgtctaggttttactctaataagcatcgttaagtcatttccattagaacacaggtcagaaattcatgtattgatattttcatattttaagtcattgcacaaatattttaaagctgcagaacgaaaattctaattttggaagctgctgttttaataatagtaacataactccaaatgatgattaagtgagattctaattctttacagcaaaccaagtacattccactgaaggccctttggcacactggtgataaatcagcaatgcagtggaattagtaaaataaacagaaggcaccttcttctttcttgtccctat

SEQ ID NO: 283735 - DNA, 500 bp, Homo sapiens
tgcagatgcccaaacttgaacttttccaggtatcagaatcatcagccaaaaccttttctctctataaattatcaagcctcaggtattcctttatagtaacactaaaaaggctaagacaagcaatactttatattatttagtatgtgttattamtaatataatgtgaaatacaacattatttcaagatagttggagagggagaaagatttgcaaagcaggcaacacagttatttgttccatgaggttcttaagtttaggtgaacatctaaagcccagatctgtgagatacatgagaacatgtgttatatttgatatgtagtcatataaattataatacttgtctaaaacaaaaattatatgcaaatattgaactctaattaatgggtgttaataattaatcaaatgtctgcactttactctgatggatagaaggaataacagatggatacatgcgataaaacaagtatactaaagtgttaatggtagaatttcaggtgtga

SEQ ID NO: 283736 - DNA, 500 bp, Homo sapiens
tgcagatgcccaaacttgaacttttccaggtatcagaatcatcagccaaaaccttttctctctataaattatcaagcctcaggtattcctttatagtaacactaaaaaggctaagacaagcaatactttatattatttagtatgtgttattactaatrtaatgtgaaatacaacattatttcaagatagttggagagggagaaagatttgcaaagcaggcaacacagttatttgttccatgaggttcttaagtttaggtgaacatctaaagcccagatctgtgagatacatgagaacatgtgttatatttgatatgtagtcatataaattataatacttgtctaaaacaaaaattatatgcaaatattgaactctaattaatgggtgttaataattaatcaaatgtctgcactttactctgatggatagaaggaataacagatggatacatgcgataaaacaagtatactaaagtgttaatggtagaatttcaggtgtga

SEQ ID NO: 283737 - DNA, 500 bp, Homo sapiens
tgcagatgcccaaacttgaacttttccaggtatcagaatcatcagccaaaaccttttctctctataaattatcaagcctcaggtattcctttatagtaacactaaaaaggctaagacaagcaatactttatattatttagtatgtgttattactaatataatgtgaaatacaacattatttcaagatagttggagagggagaaagatttgcaaagcaggcaacrcagttatttgttccatgaggttcttaagtttaggtgaacatctaaagcccagatctgtgagatacatgagaacatgtgttatatttgatatgtagtcatataaattataatacttgtctaaaacaaaaattatatgcaaatattgaactctaattaatgggtgttaataattaatcaaatgtctgcactttactctgatggatagaaggaataacagatggatacatgcgataaaacaagtatactaaagtgttaatggtagaatttcaggtgtga

SEQ ID NO: 283738 - DNA, 543 bp, Homo sapiens
ttttctaaaacaactttggccctgcccaaaacatcttcctttagccatctgcacagagagsatgttgattctgacgtgtacctgctccgggcacctcattctgcaaagagaagtctcacctcttcatcagttgaaattcaaagtatgcaaatattttactaacaataaattggctttttttcccctgctgctgctagggaaaaaaaaatgacccattcattgaaagatacatttatacttggatccagccagactgtcatggaactaaagacatttgtatcaaaatagtagatacaatattgttggattcttcctagaactgacatgatgctctacagggcactgaaggacattataagaaatgtgtatgaaattcaatattgtaaatattaaaagatgttgctaataccatagtccaatatcattccatgtcctcattatataagaatgagaagtatccatttcattgttttcagtatcaggaaaagctttacttaccctgagtgaccagcgtatttatacatggatggcatgacttttacc

SEQ ID NO: 283739 - DNA, 1087 bp, Homo sapiens
ttttctaaaacaactttggccctgcccaaaacatcttcctttagccatctgcacagagagcatgttgattctgacgtgtacctgctccrggcacctcattctgcaaagagaagtctcacctcttcatcagttgaaattcaaagtatgcaaatattttactaacaataaattggctttttttcccctgctgctgctagggaaaaaaaaatgacccattcattgaaagatacatttatacttggatccagccagactgtcatggaactaaagacatttgtatcaaaatagtagatacaatattgttggattcttcctagaactgacatgatgctctacagggcactgaaggacattataagaaatgtgtatgaaattcaatattgtaaatattaaaagatgttgctaataccatagtccaatatcattccatgtcctcattatataagaatgagaagtatccatttcattgttttcagtatcaggaaaagctttacttaccctgagtgaccagcgtatttatacatggatggcatgacttttaccwttttctaaaacaactttggccctgcccaaaacatcttcctttagccatctgcacagagagcatgttgattctgacgtgtacctgctccgggcacctcattctgcaaagagaagtctcacctcttcatcagttgaaattcaaagtatgcaaatattttactaacaataaattggctttttttcccctgctgctgctagggaaaaaaaaatgacccattcattgaaagatacatttatacttggatccagccagactgtcatggawctaaagacatttgtatcaaaatagtagatacaatattgttggattcttcctagaactgacatgatgctctacagggcactgaaggacattataagaaatgtgtatgaaattcaatattgtaaatattaaaagatgttgctaataccatagtccaatatcattccatgtcctcattatataagaatgagaagtatccatttcattgttttcagtatcaggaaaagctttacttaccctgagtgaccagcgtatttatacatggatggcatgacttttacc

SEQ ID NO: 283740 - DNA, 459 bp, Homo sapiens
aaaatgacccattcattgaaagatacatttatacttggatccagccagactgtcatggaactaaagacatttgtatcaaaatagtagatacaatattgttggattcttcctagaactgacatgatgctctacagggcactraaggacattataagaaatgtgtatgaaattcaatattgtaaatattaaaagatgttgctaataccatagtccaatatcattccatgtcctcattatataagaatgagaagtatccatttcattgttttcagtatcaggaaaagctttacttaccctgagtgaccagcgtatttatacatggatggcatgacttttaccgtcacgccatctcagtttcttgcaagggagctcagagccaaatttctagtgcaccactagaagcgacccttagataaacatcctagaatcataaaactcccctgccctcatttcctcttc

SEQ ID NO: 283741 - DNA, 236 bp, Homo sapiens
gtgtttcacactcaagttctacagggaagtggcgaaagggccgcatgactatgagggtgcaatgggcccctaggagacttgcctcrggccatgtcctagggttttttaaagccttgtggcagatgtgctggtgagcaacatgcagcagttccatcaggacagagtgactcaccagaatgtggaaaaaatatgtttcacaacttaagagcgaataaagctgtggctatgctcctcca

SEQ ID NO: 283742 - DNA, 454 bp, Homo sapiens
tgcctctagatttggccatttctaattaattacaggatttctcagataagctcctcagataaaatgccagactgatgagattyttcatggtgcattcagtgagtcaggagaatgaaaatcccggcttgagattcttttttagttacttcgggattaaggttcctggatcaaatacaagacacccagttaaatttgaatttcagataaacaagtaatttttaaagtttatgttctaggtgatatttggggtatacttgtactcaaaattattgtttttccaaaattcaaatttaactgatgtcttgtgttatttgttaaatatacaacattatttgcgataaagttgcctgaggagataaaaagaaaggaatcctcttctagaaaagctgtcaattagcaataatcacacctcagataaaccttactggctatgacatgaccagtgtgcaaaaca

SEQ ID NO: 283743 - DNA, 454 bp, Homo sapiens
tgcctctagatttggccatttctaattaattacaggatttctcagataagctcctcagataaaatgccagactgatgagattcttcatggtgcattcagtgagtcaggagaatgaaaatcccggcttgagattcttttttagttacttcgggattaaggttcctggatcaaatacaagacacccagttaaatttgaatttcagataaacaagtaatttttaaagtttatgttctaggtgatatttggggtatacttgtactcaaaattattgtttttccaaaattcaaatttaactgatgtcttgtgttatttgttaaatatacaacattatttgcgataaagttgcctgaggagayaaaaagaaaggaatcctcttctagaaaagctgtcaattagcaataatcacacctcagataaaccttactggctatgacatgaccagtgtgcaaaaca

SEQ ID NO: 283744 - DNA, 592 bp, Homo sapiens
tggaaatccagttctcctctttgggaggcactagttgaggtttcagttttgaagtgaggttccttattatacaaatagttactctgttttacactttgtacttggaggaagttaatttccgaatcagtgtctagaatcactacacagacctattatctgaggaacagtgggtggagggagtagtaggagataatggagagatgtacattatttttaaaaatggagatgcgttataatttacttaacacgtttactcataaacatcaggattatggagactctcagagtcttacaaacttgagtcatagtaagttaacaaaaccctgaaagatttttaaagagaaagtttagggcagaggctgccagataacggccaggctgcttacctgctctgaatgctcctgaaacaagttttggtgtaaatgagagtgtcctttattttaygctaaaattttatcttctccatggaattatttttcccccaaatatttcttttctctttcgagaagagaaatgggcagggctatgattaagctatttgttttggaataaataaaatacattttcactggactgttaaattataatttta

SEQ ID NO: 283745 - DNA, 601 bp, Homo sapiens
tctagccagcatttctgagagagcatcttggagcagctgtagatcaagcagcactccaacatgataggatagaatgcctccctgacctgcactcctctgcagactgcttggctctgtgagcccgcttcatttatttcctgttgaggttaagtctcattccagtcagcttgttcatctaattttgtgttaagagaattatgttttcatgccgaggaaataatgcatctttaaatttacctttacaagtagctttctgagttttctttcagcagcttggctggagcagtctcatagagcatggatcctatggaagaatatgagaaagaacaaaatacagtgtttgcatttaagtttactatctatctagaggtggaaaagtaagattttttttttctktttgagatggagtctcgctctgtcccccaggctggagtgcagtggtgcgatctcggctcactgcaacctctgccccccggattcaagtgattctcctgcctcagcctcctgagtagctgggattacaggcacacgctgccacacccggctaattttttgtatttttagtagagacggggtttcaccatactggccaagctggtct

SEQ ID NO: 283746 - DNA, 514 bp, Homo sapiens
aaaatacacaccaaactctaaagatttagtatgaaaaagaatgtaaaatatctcagtaatattttatgttgattacatgttaaaatcatattttttatgtggagctaaataagacatattattataattaatttatctgtttctctttacttttaaaaatgactactagaaaatgtatacttacgtggctcacatttgtggattgcattatacttctattagagagtgtagctttacattattcccatattgcatcccataacaatcttataacatagactgctgttaggtctattttactgaaggagaaacgctgagatgtagactgcagtgagttgcccagcattagtaatgyaccccagagggttctcttgccctattttctgccatgtaagaacacagcaagaagtagtcagtctgcatctgggaagagggtcctcaccagaacccgaccatgctggcatcctgatctcagacttccattctccagaactgtttctgttgcttataaacc

SEQ ID NO: 283747 - DNA, 605 bp, Homo sapiens
tactctcaatctacctgtctcaaagcttttttttctttctttcttttctttcctttttttttttttttttttttttgagacagggtcttactctgttgcccaggctggagtgcagtggcttgatcatagctcggtgtagcctcaacctcccagggtccagtgatcctcccacctcagcctctcaagtagctgagactatgggctcatgctgccatgctcatctaattttttttttttttttggkggcaacagagtcccactgtgctgcccaggctggtcttgagctcttgggctcaagtgatcctcccatcttggctgcacaaagtgttggaattatacacatgagccattgtgcctggcctcaactcttttgaacaatgcaaaacatgaatcaagataattcacttggttattgaaatgacctaaaccaagttatgtttatctctttctttgtttttaatatattccatgtaaatgagtaaatttacctaaagtcctcaaacaacacaatactggaaaagttttcccaaacaagtactgtgttataatttaagataatgtacacaaatttacattctcctgggctagatcatagaagacagagc

SEQ ID NO: 283748 - DNA, 389 bp, Homo sapiens
gttttgaattatttatttaataaggtttacaatcaatactacagattaataaatgttagggatatttaatgagttgtttacaagatgtcaagttcttttctgttttggtatgtctagatatcataaatctttaagggaaaaatcaataattaaagtctctaaaagtgctgatcaaccttcctgcccctctgcacacacattagtctgcattctcaggattagactgtaaattaggagtccacagaktctttaagcaaaataaaactgttgaaactgtacatatttataagtattctaaaaaccaggtcataaatgatatggctcttcttttacccccacagacatttcctaagaatgtacatctaatttgaagaaaaagtgcctcaaat

SEQ ID NO: 283749 - DNA, 615 bp, Homo sapiens
catctccatgtgtttcacagaacgctgagctacttcttgatccttgacaaaggtgagtctttgcctcttcagtgtgtgccaatcataggtggggaggttgatgaagggagagaagtatagagagggagtgagtgagatagagggggagagagagagagagagagagaagagaagagatggtttgagataaatacactgctctatttacctatctgcatcaagccagatgtattagtgttctcttagagggacagaactaataggatgtgtgtgtgtgtgtgtgtgtgtgtgtgtgtgtgtgtgtgtgtgtgtrtatcctattccctatatatatatacacatcctattccatatatatatatatatatatatatgaatttattaagtattaacttacatgatcacaaggtctcacaataggctgtctgtgagctgaggagcaaggaaagccagtccaagtcccagaactgaaaaacttggagtctgatgttcgagggcaggaagcatccagcatggaagaaagatgtaggctgagaggctaggcccatctctctctttttcacatttttccgcctgctttatatttgctggaagctgattagattgtgcccacca

SEQ ID NO: 283750 - DNA, 635 bp, Homo sapiens
agtttcccattgaccttaatcacagggcatgttaatactgagagatgccctagtgaatctcctgtgttctatgcatactcttccttacctccattacagagtagtagacagttttcatcttgatagtccggatcaatcacctcatgcaacactgtaactcccttctcagcctgttgacttaaaggtaggaggagtcaaagtgtgcaggtggcaatcttaacttccagtttaatggaattgttgtgtctcctggtggcagcattcctccctctggagctaagacctctaggccagcagaacataatgttgtgggaacaggaagcaaatttttgctagtggatcactaggggtgatggtgagtggcgccacttccacttccrccccttgattcctgaacctgtgcatcttggctatgggagaaacggtaccgtatattggacattgatttagagcatgcacagctttctggagaactttgccccagccctgcaaagtattgttgcttagttggcattgtaattgtgacttcaaaaggccattccaccgttctatcaatccagctgcgttaggatgatggggaacatggtaagaccagtgaattccatgagcatgagcacactgccacacttctttag

SEQ ID NO: 283751 - DNA, 612 bp, Homo sapiens
atctctaacactggaaacagggttcctactgattcattcactcctaatatagctccagggggttcctacaggatcccaaagccccccactccctccgccacactgcagagtttaaggatatgccctcatagctacatagctctgacccaaagcccttccatgtggaaaacactaatccagctagttgccatgtttctctcactgggatgtgttcccatttctcctcttgtytagtgttttagaagatatgagaagggtacctgtctttgccctgggaggaagacatttttgtaaatgtcaaatggacatttgatagaagaacttatttaaggaatcttgaattacaagcaaaggggcatgtggagggggaaagatgaaatcatctacaagattttaaaagtgaaccaactacctgaattataaaatattatatatataaaaatatttaattataaaatgtaataaaaacttattacagccagacctggtctttggagagggatataatccgctgaaatggagaatgatcacccactttctacccacagattaactgcatatttcttatgaatatgcaaagtggctactccatactgcctgtatgtgtagcag

SEQ ID NO: 283752 - DNA, 624 bp, Homo sapiens
gggtgagcttcccacactcaggatgctcaccacaaagggagccacccgactcacacagacacaggraattctaggagaagtgatccattaaagtcatttctctcttgactttctgcaatcatctcctcatgttccttcttgcgtgagattccccgctgtacccccttttcctccactcttccagttcatcttccacacccttgttagggttatctctaaaataccagcttggaagaccgcctgcaagggtagttccaaaatgttgttcagcagccattgaggtctaattttgctgagcctccagatccaccaaatcagaatctctggggataaggccttggaatatgcacattaaacacattttagaataacttttacacatattccaatttgaaaagcagcctatgagtagaaaagtttgcaaagaaggatgaataccccataacaaagtgggaatcttccatctcactttgtctcaccaatctcattctattatttgagtttatacacatatacatacttcttgaggttctcaagggtatgggccatatcctattcatccctaaattccaaatgcccaaaacttggtaagcatcctataaatatgatagttgaactggggat

SEQ ID NO: 283753 - DNA, 624 bp, Homo sapiens
gggtgagcttcccacactcaggatgctcaccacaaagggagccacccgactcacacagacacagggaattctaggagaagtgatccattaaagtcatttctctcttgactttctgcaatcatctcctcatgttccttcttgcgtgagattccccgctgtacccccttttcctccactcttccagttcatcttccacacccttgttagggttatctctaaaataccagcttggaagaccgcctgcaagggtagttccaaaatgttgttcagcagccattgaggtctaattttgctgagcctccagatccaccaaatcagaatctctggggataaggccttggaatatgcacattaaacacattttagaataacttttacacatattccaatttgaaaagcagcctatgagtagaaaagtttgcaaagaaggatgaataccccataacaaagtgggaatcttccatctcactttgtctcaccaatctcattctattatttgagtttatacacatatacatacttcttgaggttctcaagggtatgggccatatcctattcatccctaaattccaaatgcccaaaacttggtaagcatccyataaatatgatagttgaactggggat

SEQ ID NO: 283754 - DNA, 612 bp, Homo sapiens
ttttcaattgccattatcctttctccccattaaggaggaaattcttgttagaaagaattctagtgtcagtatgtttcataacaccaaaggataaagtaatttggagaaaaccaaaacttactttttaaacacataaatgtgctgttttcatactgctattcatatttactgcatgacgtggtacacaaagaatatcaacatgtcatgaacaaatggtaaaatctgcatctattccgaaaaaaacaaaaagatagcaccacaaatgatactggattagtcttctgctagtcaacaaaacttagtaattaatgaatccctcttatgtggcaaatggtggagtttttctggcctttcaatatgatgatatctaatcattaygttaaattaaaagacggatttttcttaatgcactacatagtcccaaaagttaattatatgtaagagcaaaagaatagagaataattaaccataaaataatctagggagtcagacaataatgtttaataagtccccttttttttctaaggactattttgggaacattagaaaaatgcacaaagaaaaaacatttcaagtgacatacatattataattcagattttcattacaagt

SEQ ID NO: 283755 - DNA, 605 bp, Homo sapiens
ctgtgaactaattaaacctcttttctgtataaattacccagtctcaggtttttctttatagcaacacaagaacggcctaatacattcttactctatgaaatggaagcagtgatatcattcaaaataccaacaagaaatgagaaaatgaaatgtcaaatcacctaacagagatccagacacataactgatactgaattactgttaactgaattgaaaagyatcaacttactcccccgaccttgccagctttctggcaggacaactctgagatgccttaacattcatacaaccctcttaaaaatatgaatgcagactcctcagatatatggaaccaatttgtcagccttctgaaatcttgtcttctaaaaagtaccccatagcaagcaaaatgattttaggggacttgaatgtcagggttagtgacgactctgccaaagctttaaacacaggaaatttgaaaaaagattgcttcttacctgtttctgtgagagccatttatccaaaatcagctattggatcaaaaagaaaaataattgtccaattgtattcatcatcagtatccatcgatatgaaaccatagcccatggaataagtatttgggggaa

SEQ ID NO: 283756 - DNA, 605 bp, Homo sapiens
ctgtgaactaattaaacctcttttctgtataaattacccagtctcaggtttttctttatagcaacacaagaacggcctaatacattcttactctatgaaatggaagcagtgatatcattcaaaataccaacaagaaatgagaaaatgaaatgtcaaatcacctaacagagatccagacacataactgatactgaattactgttaactgaattgaaaagcatcaacttactcccccsaccttgccagctttctggcaggacaactctgagatgccttaacattcatacaaccctcttaaaaatatgaatgcagactcctcagatatatggaaccaatttgtcagccttctgaaatcttgtcttctaaaaagtaccccatagcaagcaaaatgattttaggggacttgaatgtcagggttagtgacgactctgccaaagctttaaacacaggaaatttgaaaaaagattgcttcttacctgtttctgtgagagccatttatccaaaatcagctattggatcaaaaagaaaaataattgtccaattgtattcatcatcagtatccatcgatatgaaaccatagcccatggaataagtatttgggggaa

SEQ ID NO: 283757 - DNA, 485 bp, Homo sapiens
ataagtatttgggggaatttcgtttgtaatgccacacaataggccaacattggtttttaatcacccaatcattctttcatctattatttccatctttaacatgtgtgatctaggccaaattgaagatgattatgtctccattaagcctcttctaatcctcaaaaatatctgtttctgagtctatttctgagtttcaaatggactttgagattatggaactagggagggtaacatggaatgaggctcattctaatccccaaataaaccgtctcgaagtggaaccatgtggagctctcttctcacattctrttctgagccgtgttccctccaactataccaataacccagagatgagctaaacccagtctgaccactctgcttagccaggaactggccactctgtcacggttggaagaagtttaacagaaagtcaaatgaattctcacaaaactgacaagaaactgtcttaaatggatctcagaaga

SEQ ID NO: 283758 - DNA, 560 bp, Homo sapiens
gtaagacaagcaaggtactcagagtgtacaatgtaagaagtcactcactcttgggcatgcgctagttcagggttggcagcgacagtgagtgccttcttacattttgcaccctggataccttccttgcctcaccctagactggcccagatgtctagtctacagttcaccttatcacttgcaatttctatttcaatgactacacttttcacttccaaggtttctatattttaatccctatctattcttaagaattctttgttccccttccctcttttacttatttgatgattcaagaatccttattttaacatttaataytgcaccattatgtctggttcttcatgcatggactccacagattcttgggtctgttgactatcctcatgccagaaaatattcttgtgtgctttgtaatttttcttgaaagcttaccttgtttgggagggaatttgtttgttttgtttctttttggtagactcctctccctgtcaagtagcttttgggttggttgccttactctggtagtactccaggtttgtgtccccaagccaagatgtagt

SEQ ID NO: 283759 - DNA, 557 bp, Homo sapiens
ggaatggtgctaaaccattagaaaccaccttcatgatccagtcacctcccaccatgccccatctccaacactggggattacaattaaacatgagatttgagtgggaagacagatccaaatcgtatcattttaccccttcccttttccaagtctcatgtccttctcacatggcaaaatacaatcatgccttcccaacagtcccccaaagtcttattccagtattagctcaaaagaccaaagyccaaagtctcatctgagacaaggctagtcccttctgcctatgagcctgtaaaataaaaaaaaaaaaagttatttacttccaagatacagtgggggttatagacattgggtaaatactcccattccaagagggagatatcagccaaaagaaaggggttacacgtcccacacaagtcagaaacccagcagggcagtcattaaatcttaaagttccaaaatgatctcctttgatttcatgtctcacatccagggcatactggtacaaggggtgggttcctgaagccttgggcagctctgcccctgaagctttgcagggc

SEQ ID NO: 283760 - DNA, 438 bp, Homo sapiens
aagaaaagttacctggccttcttatctcctagaactgttgtgtgggtcaaatgaactaataagtggcaaaacactttcttaaaatgttattgaaatataatgtacatacagaaaaccacataagtgtataggtggatacatttcacaagctaaacacaccagtgtaatcagtgcacagttcaagacatggaatgaacattaccccatgagtccccatctaggaacagcccctcaaagggtaaccaccattctgacttctaacaggctagctgttttgcctgtttttctactgtacataaatggagtcatatgctataagctttttggtacatggcattttttgttcggaattatgcttgtgaatttcatccatgttgctgtgtacttttrtaagttctttgttctcattgctatgtagattccattgtacgaagagac

SEQ ID NO: 283761 - DNA, 591 bp, Homo sapiens
cttgattctaatttattaatctgaacaagtggacattttttaataggtgaataacttctactgataaaaccacattcatctatgattaaagaacaaaaagccccttttcctagtttatgttttcttatgtrgagggatataaactcctgttaataatgtgctgctacagagagccttctttctaggatatctaagacctgggatttctctaatcatgggtgttcctacctaggcttgacctgcatttagggaaacaaactggcagttttatgttaacaaatataatgtcaatctgtctgtcttcaaatatatttttagctaatcagcaggacttccgcaggacatatcactttcaaaagaatggcctgcatctgattccaatttgaaatcttgtattttcctgtgaaatcactccagcagtatccttcaaagcccatttcctaccatgttgccattccctgtttgcctgtgacccctctactagactgcaacctcttcgatgacagcccttgccttgtccactgccatatccctggcacctcgcataggcagtctccccttgaaggttttcagcctaggtcatgagtgttc

SEQ ID NO: 283762 - DNA, 572 bp, Homo sapiens
gtcattactttacagtttcacctccttttctaccaaaaacagcttttcatgctgattttrttcaaaaaacaaagccaaataatattgggctctttccaaaataaaatccattttcaagtataaatatttgctctctttaaaagtaacaaaaagattggactgtaggatctaaaaaatctgaagaagaattcaaaaagtgcttgaacaatggcagcataattgtaatataacaagtgactcctataaaaagagaaactttcatttatgtgtataactaagtttttgcatttttgttttttaaatggggtgtaccactgaagacttaactgattaacagaatgacctgctgaagacttaagtggtgctttgttactgcctctgcagcaagaggatgccatgaagttttctattctgttcttcagagatggaatcttctgagatggagaataccccctagcatggcgtatctttggtgggtctttggatgatatatgaaataaaaggatgggcaccaacatctgaatcatgaggaaatcacccttatttaagggatcatcctggcctagagctct

SEQ ID NO: 283763 - DNA, 568 bp, Homo sapiens
gtccctctgggaggaagcttccagaggaaggaacaggcggcaatctttgctattctgcagcctccgctggtgatacccaggaaaacagggtctggagtggacctccagcaaacttcatcagatctgtagcagaggggcatgactgttagaaggaaaactaacaaacagaaaggaatagcaacaacatcaacaaaaaggatgtccacacaaaaaccccatccaaaggtcaccagcatcaaagaccaaaggtagataaatccaggaagatgaggaaaaatcagcaaaaaaaaaaggctgaaaattccaaaaaccagaatgcctcttctccttcaaaggatcacagctcttcaccagcaagggaacaaaactagatggagaatgagtttgayaaattgacagaagtaggcttcagaaggtgggtaataacaaacttctccaagctaaaggagcatgttctaacccaatgcaaggaagctaagaaccttgaaaaaaggttagaggaattgctaactagaataaccaatttagagaagaatataaatgacctgatggagctgaaaaacacagc

SEQ ID NO: 283764 - DNA, 596 bp, Homo sapiens
acatcatagtaaatgttcaccagatattaattatttgagtgagaatggttgtgagcattgggtactcccccagccagtacccttctctcttgcagtagtatattttgtagattaaataaaactcaagataaaaaaaacaaattaataaatgatcaatggaaacagaaatttggaacataaaagtattatttcaaaatgaacacattatatgtaaaagctcacaaccaggaatttcttcagttgggtttgcagcaatgttatgtcactaatactatatttctctctgtatggccaaacctgtaaagcctcaatatctgattatggagcacatctagactgttaaaaagctttctataatattaataaaatcaaataataaataaaaattaaattgactaatcatagcaatttcattttgagaatgttttgtaggctgaaggcaaatccttgagatatttttgcaggagcgtcattgcraaacagaatctgcagtagaactatgtcatcttctggttctaagtgtgccctctcattgctggcagatggcaagtatttatttgcttgctagctctttagtggaactggtcttctgtttc

SEQ ID NO: 283765 - DNA, 564 bp, Homo sapiens
agggaggaagggaataaagaaggaacaaaagagaagattttggcagaacactttctaaaatgtaactcaaccgcccctgctttcttaaagagtggaggaactttatttaacttcttatttttttcttttcttggttgtaacattatcacaaaaagaactgatttcactgctatcggataaaaaataataggtttaggccatggttggggggagagagagagagaagtgagagagaaagacacacacacacacacacacacacacasagagagagagagagagagagagagagagggagagaaatatttgcctgcacacctgagaggtcccaaattactgtgccttttggaattcttgtgcctgtctgttttttacattttttttctgttgctctcttctttgggccatcagcagttacctcttgttagtgtgcaagactatgcaaagccttctccctaatgctgattttctatttctaaattgctgtgggcatagagaaactcacactggttaaagatatgtgtgcaataaacataaatgcttttcaagtcaggaactgagggc

SEQ ID NO: 283766 - DNA, 564 bp, Homo sapiens
agggaggaagggaataaagaaggaacaaaagagaagattttggcagaacactttctaaaatgtaactcaaccgcccctgctttcttaaagagtggaggaactttatttaacttcttatttttttcttttcttggttgtaacattatcacaaaaagaactgatttcactgctatcggataaaaaataataggtttaggccatggttggggggagagagagagagaagtgagagagaaagacacacacacacacacacacacacacagagagagagagagagagagagagagagagggagagaaatatttgcctgcacacctgagaggtcccaaattactgtgccttttggaattcttgtgcctgtctgttttttacattttttttctgttgctctcttctttgggccatcagcagttacctcttgttagtgtgcaagactatgcaaagccttctccctaatgctgattttctatttctaaattgctgtgggcatagagaaactcacactggttaargatatgtgtgcaataaacataaatgcttttcaagtcaggaactgagggc

SEQ ID NO: 283767 - DNA, 569 bp, Homo sapiens
taaaaaaaaaaaaaaaggcttcctgaggcctccccgcaagcacatgctgctatatttcctgtagagcctgcagaaccgtgaggcaattatacctcttttcttataaattattcagtctcaggtatttcatcatagcaatgcaagaagagcccagtacatttacactataccatatgatatggtttggccttgtccccacccaaatctcaccttgaattgtaacaacccccatgtgtcaagggggtggccaggtggagataattgaattatgggggcrgattttcctatactgttctagtggtagtgaataagtctcatgagatctggtggttttataagtgggcattcccctgtacaagctctctcgcctggtgccaccatgtaagacatgactttgctcctcattcaccttttaccatgattgtgaggcctcctcagccatgtggacctgagtcaattaaaccttttcctttataaaatacccagtctccattatgtctttatcaccagcataagaacagactaacatagtatgctattagcattattctcaagttctatttttctcc

SEQ ID NO: 283768 - DNA, 461 bp, Homo sapiens
aaatgaaaattttaaactagtcaaatgttcagtatttttaacattataaatgtcaattgatttcaattaaacaatgattattaatgacatattgtttaatgtgttaataattttatgagaatagaacatagattagacatagatttgactggtttatgcataacttgaggaaataaaggtaatacagcagtatttagaatatattacggatataagtatattttccatctattttctttagcaagttacaacaacaccaacgagaatcagagagaggagaaaactaagttatcttttaatgccttcctcccattccacttggtagaaaatttgaagcatttttctctgaaagattaaaacaatcagttagtctgaagatgacaaaatcaactgtcagtataatacattattgctttatatttgtatayaaatattttttataaagtgaatctataatcctt

SEQ ID NO: 283769 - DNA, 537 bp, Homo sapiens
gctatgttataacctcacaagccacatttcaaaacatattagcggtcttctgcttgtggccatcactgagtaacttatacgagaccagccctctcaccataaacaacaataaaactggacaaaatatatgaaattttttttagatgttagaaaacagggagcacagatctgtgatccctaagaaaagtaaatgtaagatgattgccacagttaccccagcttccttcctggaggcactgataaatacagtggggtggagggcaagaaarggcagaggtctctgccctgaggatgcagatatcacacctttggtgtcctgaggtagatagatagatattgtggaacagaaatggagacctgtgcggaaaaggaactccaggattccaaatgtggttttccttattgttggatccaatacaaaactctccatgcatggagcaagaatccataaaatggggccaaaaaaaaaaaaaacaactgccgatgaaagaaaaactgctgagaaacattgaattgaacagctactagaagacacct

SEQ ID NO: 283770 - DNA, 537 bp, Homo sapiens
gctatgttataacctcacaagccacatttcaaaacatattagcggtcttctgcttgtggccatcactgagtaacttatacgagaccagccctctcaccataaacaacaataaaactggacaaaatatatgaaattttttttagatgttagaaaacagggagcacagatctgtgatccctaagaaaagtaaatgtaagatgattgccacagttaccccagcttccttcctggaggcactgataaatacagtggggtggagggcaagaaagggcagaggtctctgccctgaggatgcagatatcacacctttggtgtcctgaggtagrtagatagatattgtggaacagaaatggagacctgtgcggaaaaggaactccaggattccaaatgtggttttccttattgttggatccaatacaaaactctccatgcatggagcaagaatccataaaatggggccaaaaaaaaaaaaaacaactgccgatgaaagaaaaactgctgagaaacattgaattgaacagctactagaagacacct

SEQ ID NO: 283771 - DNA, 619 bp, Homo sapiens
ataacaatactcattcttcctttcatgcatttaacaaaaatgtgttgacttgcctatgtggcactcatcagagattttgaggttaaggacaggagctgatggcctagtgagagaagcagacatgagaataggtataacagagattgattattgctgaaatactggtgcacacagattgctaaggaagctcagcaacaaggcaccaaactcagcccggatgtggggaraagcagggaatcttctatccaggggcaatgcctatgctgagccctagagacatgctcatgttgtatgcagaagaagtaggcaaagaaaccaggaaaggcagccatggccaaaggcatagaaatgagaaagctggtgtgttaaaaaccgcagaaagctctttcatattgaaccaaagagcaacaggaggagtacatcagaggccacatcataaatgtggcatgctcttgagaattttatatttaaaaatggtgaactattgaagaattgaaaacatgatcaaatttacactactgaaagaatactctaatagtgcattggaaggacggtagacctgttcataggatgttgcaaaggttcagggcaagatgttgtgggcctgatccaaattaga

SEQ ID NO: 283772 - DNA, 559 bp, Homo sapiens
gtgtaggggacagagaaatgagtgaaaggcttagattctggtctcagctcaatagccgtgtaatattggccaaggtactcaaattctcgaaaactcagtttcttctgtaaaattaggatacaaatatggatcctgtgtaatgcacagttggtcaatgaccaaatgtgatatttctaccatgttttatttgacagaaagatattttactcatgagtgtctttgacccccaagatctttaactgaatacatgaaaacttgggaagctgtatcataaagtgtattccaaataaacaatttagccaactaagtctttcacccgagtgtggtaaaccataagagacttgatgcattcttcatgaattgcaaatgactgcagacattcaatattttctttcatttcgaaaatatccccctggaagacactttgctatratttgagaatatgatgtttctgaagcatttagaatctgattgacattgaacaatttcaagggccattattgattacaaaatacgtgtatatgtaaaatgatttcttgtatagcattatttctcaacg

SEQ ID NO: 283773 - DNA, 545 bp, Homo sapiens
cacctcaagcctgggtgactaagactctgtctctaaaaaagtattttaaaaaattttttgaatggcgttactagaagtcctcctgttcttatctacttatttgtgtggaaaastttctcagacaacatttttaaaaatttttttcaacttttattttaagtctgggggtacgtgtacaggatgtacaggtttgttacataggtaaatgtgtgccatagtggtttgctacacagatcatcccatcacctaggtattaagcccagaatccattagctattcttcctgatgatctccctctcccatcccaccctccaacaggccccagtgtgtgtttttctctgccgtatgtccatgtgctctcattattcagttcccacttataagtgagaacatcagacagcatattaacaaaaagtaggaaaacattgatacaaaactgtctcatccttgcaaaaaataatattgatccttgaatacttaaactactttaaaaactctatctcattaacagatgtatttccaataactttaatatgtttaataat

SEQ ID NO: 283774 - DNA, 509 bp, Homo sapiens
ttttatggattttaaaaacaacaatttacttcaaaatattacagtgatcgtgctgtgtaaacaagggtgtcccaagctgtttagcttctaatggctgtgtttctctcacatttttatttgatgactttccaaggacatcgttcttccaaggacatccattcttttattttgccaacagaagatggctgagctttttgcagtttatcagtttccagatggctttcacattcttgtggacactgtgcgcttcttgggaaagggccacagttttgtttttattttcctcagtgcctgaaactttgggagtgttgactgctgaagaggatttgtgctgctaaatgcctcttggctttagatttaagaccagaaaataagayagatgaggacagcttctctttactggtgtatgtccagtgcctagagtagtgtatggccccacagagacactcagtaaatattcgcaccctgagtaagtgtgcctgcaccttatgcgtcagatgtcagtcatt

SEQ ID NO: 283775 - DNA, 608 bp, Homo sapiens
tcttggctttagatttaagaccagaaaataagacagatgaggacagcttctctttactggtgtatgtccagtgcctagagtagtgtatggccccacagagacactcagtaaatattcgcaccctgagtaagtgtgcctrcaccttatgcgtcagatgtcagtcattagataaaccttctccaatgcctcctgttgagagggtgggaagaagcagggagatgctgttagaggtttgctcctctgttggtctgatgactagacaattctccaactcacaaaataaatccggagtcccacggctttggcccagcccccacatcctgtacagttccactgccattgcttgacctcagcattactttaggaaaaaagaaagaacaatttttgaataggcacacatttgcttagggtgccaggaacataataagcactatataaatgttagtattatgatcttagtgatgtctccaagtttttctattttattaagaattctgaaaaatcaagaatgtataaactttacattttaataaattttgtcaaattccgtcccagcattaatggagaaaatatttctctccttgtacttactaatatgaataattata

SEQ ID NO: 283776 - DNA, 649 bp, Homo sapiens
gagactgtaaatgaaatatttgcatagatatatttgcttggggccaggtattctttataaatatccagtaaagagttaagggaaatctccaagtcagttaatgacagtatactgaacaagcactgaaagtttctttccaacaccatggaatattggcttccataccaatgcaatgagccttcctgggtaacacttttgacctctgtggacttcccatttccactttaaaaatgaaggattttggatgacttcttcattaaaggcccatttgttactgatatatcttactaattgttatgtcattcattgttctttcatcttccatctttctcatcataggtgaaaaatgctacaataagaaaaggtagctggctccttccttcttcaccccaatgycctcatatcttctattttttcatgaccacttttctcaaccctaatgttcctctgccctcaacagccacgattgactttgttgttgccaggactccggagcccacacagttcctacatttgtagacctactctcatgattaatttttatgtgtcaacttgactgagccaagagaagcccagataactggtatgatatcatttctggatctgtctctgagggtgtttctggaagagattggcagttgaacaagta

SEQ ID NO: 283777 - DNA, 428 bp, Homo sapiens
atgccacataacaatctttcaatgaaaatttgcatacataatcccataagattataatactatatttttactgtgccttttctaggtttaaatatcttttgacacacaaatacttaccattctggtacagttgcctagagtattcagcgcagtcacatgctgtataggtttcagcctagaagcgaaaggctgtccccacatagcctagggtgtgtactagtctatgccatctaggttcatgtaagtacactctgtgatgtttacacaatgatgaaattgcctaatgatgcatttctcagaacatgttcctgttgttaagtgacacatgattgtgtatgcatatatattttttatgtatattgrttctgttttcctagagaatcctgattaatacgcctacatacacaagagaaagatgattatgaatt

SEQ ID NO: 283778 - DNA, 591 bp, Homo sapiens
agatggctaatgtatgagtaatgaatgcgatttgttttccctaaatcatactctcactcagaaataatataacctccatggttcttgccaccttacaaaaacactcaggtatgcatctattmattcataccataaatattcaccgaatgcccacaaagtgaccaagaaaatgaatgtcagcaatattgagctgtgttatataatgtgctctaaaacctgtcccgctcattgctatgcttgtccctcagaatacaagcccagaaactctaagcaaattaaaataatctcatttcaagacattcagaagggaatattccaaggatatttactgcactgcagacagcctggggtggggtaagaccattctttgaaatgtattccaggactcacagagaggacagtggcctcttccaaggacacttattctgagatgcccctgctttccactcctgacttaaccaaagcgactcctcagaattaaggatttgaatctgatacgaccaagaaactgtttcaaagaagcaatggttttaatatttaatacggaaaagttaatagcatttcttttatttatttatttatttattatta

SEQ ID NO: 283779 - DNA, 627 bp, Homo sapiens
tccaatgaaattgggaggttagactccaattctcaaagaattcaaatctcaatgagaaaaacaagtgaaactaaggtgttaggctcactgcagcgtgttttcctcacacacacctgcttcctgataactgctctttgcccttctctgtcctcatcttcctctgagcacaaggaaatacaacayggtaatacttgcttgtgaaagtgcttgaggatatacatcaagcatcactggtgagttcttgcatacatggttttaagctcctttagttcagagtgctggaagggaagttatggtgatatgtgctgatctacccggactttatgaggaccaaatgcagagaccaggtcaggaaggcatggccattttggaagctaactcctatgggggataaagatggccactctctttaaaagaagggccagactccagaagtggagtctatttccccttctcttgaatctgagttgggcctctgtctagctttacacaaaagaatgcagtagatggtgaaccacgtcacttccaaggctatgccttaagagatttgtaattttcactttcatggtcttggaacccagctatcacagtgaaaagcagcagccacatggagggagaactgacaca

SEQ ID NO: 283780 - DNA, 627 bp, Homo sapiens
tccaatgaaattgggaggttagactccaattctcaaagaattcaaatctcaatgagaaaaacaagtgaaactaaggtgttaggctcactgcagcgtgttttcctcacacacacctgcttcctgataactgctctttgcccttctctgtcctcatcttcctctgagcacaaggaaatacaacacggtaatacttgcttgtgaaagtgcttgaggatatacatcaagcatcactggtgagttcttgcatacatggttttaagctcctttagttcagagtgctggaagggaagttatggtgatatgtgctgatctacccggacttyatgaggaccaaatgcagagaccaggtcaggaaggcatggccattttggaagctaactcctatgggggataaagatggccactctctttaaaagaagggccagactccagaagtggagtctatttccccttctcttgaatctgagttgggcctctgtctagctttacacaaaagaatgcagtagatggtgaaccacgtcacttccaaggctatgccttaagagatttgtaattttcactttcatggtcttggaacccagctatcacagtgaaaagcagcagccacatggagggagaactgacaca

SEQ ID NO: 283781 - DNA, 473 bp, Homo sapiens
atctgtttcacgataaattttaggcctattttccagggcatttgtagatttatgtgtattatgttattatgtgattatacacaaaaagtttaagaatatgtaagaatactagytcagtagtattattgagagtaactgttgggaatacttctgcatccactatgtagttgaacacagcaaagaagaaaatcagccaaaatttaactgcaaaagaacatcacatgataaagaaagcctggttaagtggaaataacattcagattagaactaataggttcaaccaaagttttcataccagtgaagttttgttttacttgtatctgttctccataaatggagcccattagagcttaaatgcttaagttaacaaaatattaataaaatcaattgtgtaacatttctaatgaataaaattgatttaagtgtggtacaagtcattttaccaacttgcctttttagaaaaaagactggta

SEQ ID NO: 283782 - DNA, 583 bp, Homo sapiens
tgagaagagaggagaacatgtcaacagctgtctcagagaatgggagaagccattgaatgggtaaatgcagtatatttcaaggcaattctgaattcccacttgagattcttgtggtcatatgttttctctagccacagtcagctgctctggtgcaggcgtacagcaaataggtcaagagttgggtctaactagagatagcgttttactggtcaagtgcaaaggagaggggcaagggacaggstatttgtaaaagagttattagaatagacagaatatagataaaaaaggaatagctaaaatggtatatatagctgtatatatctatagaatgctctatagattgagtagatagagtggaaagaatagaaaaagtatggacattagaaagataaaggaggtcttcattgagtataaaaattcttgggctgggagttcgagggttaacaagtgaggaaattaggaggtaagtccaggtacagccccttcaagtcaggatgatgatggtgttcacttaacagttataacaagacgtagtgtatgaccattctccagagctgagctacgcaatattgtgactaccagc

SEQ ID NO: 283783 - DNA, 583 bp, Homo sapiens
tgagaagagaggagaacatgtcaacagctgtctcagagaatgggagaagccattgaatgggtaaatgcagtatatttcaaggcaattctgaattcccacttgagattcttgtggtcatatgttttctctagccacagtcagctgctctggtgcaggcgtacagcaaataggtcaagagttgggtctaactagagatagcgttttactggtcaagtgcaaaggagaggggcaagggacagggtatttgtaaaagagttattagaatagacagaatatagataaaaaaggaatagctaaaatggtatatatagctgtatatatctatagaatgctctatagattgagtagatagagtggaaagaatagaaaaagtatggacattagaaagataarggaggtcttcattgagtataaaaattcttgggctgggagttcgagggttaacaagtgaggaaattaggaggtaagtccaggtacagccccttcaagtcaggatgatgatggtgttcacttaacagttataacaagacgtagtgtatgaccattctccagagctgagctacgcaatattgtgactaccagc

SEQ ID NO: 283784 - DNA, 583 bp, Homo sapiens
tgagaagagaggagaacatgtcaacagctgtctcagagaatgggagaagccattgaatgggtaaatgcagtatatttcaaggcaattctgaattcccacttgagattcttgtggtcatatgttttctctagccacagtcagctgctctggtgcaggcgtacagcaaataggtcaagagttgggtctaactagagatagcgttttactggtcaagtgcaaaggagaggggcaagggacagggtatttgtaaaagagttattagaatagacagaatatagataaaaaaggaatagctaaaatggtatatatagctgtatatatctatagaatgctctatagattgagtagatagagtggaaagaatagaaaaagtatggacattagaaagataaaggaggtcttcaytgagtataaaaattcttgggctgggagttcgagggttaacaagtgaggaaattaggaggtaagtccaggtacagccccttcaagtcaggatgatgatggtgttcacttaacagttataacaagacgtagtgtatgaccattctccagagctgagctacgcaatattgtgactaccagc

SEQ ID NO: 283785 - DNA, 549 bp, Homo sapiens
tttttctcataataagactgggattcttgttttgggagaggaagaccacagaggtaaagtgccatttttatcacatcacataccatcagcatgattttctactattgatattgaccttgattaccagatctgtccatagtaaatttgctcttttaccccattcctctccatactgaactttccatactggaaggaagtcactatttgtagcctacacctgaggaatgggaagctatgctatccctccttgaaggygaagtatccgtgtaaattatttggaattcttctgcacagatttgtctcttctcccccatttgttaatttacttcatcactttatttttacccgtatggactcacagatacttattttatactttgaattacaatcaaatattgttttatttattttattgctcaaaatgtcccagttttggccactaggaactctttcagttggttcctgtgcatctttgacatatcctattattgtggggttttggtggggaagggaggaaagttccttgatttctaacgctgccagatgctc

SEQ ID NO: 283786 - DNA, 667 bp, Homo sapiens
ctgtttgagtagttactttcacgaggacaaaggaaaagcattctcttaaattcagtagactgaccagccactgggccaagtgctgcactctcaaatgtaagtggtggtgactttgaaaaatactctgccttgtatctttaaatgacaaggaaaattccatgtcattattcttaagaaatactacattcaacaaaaccaaggcatgccayagagacaggtccttatatgacctgctgattatataaggggcctattttctctttctcctttccttccttccttagtttccttcttcctttcttcctgttgaaaaatggcacggggacaaatgttttcacctcccccaaaccaaacccaattgcagccagtttccctcagtctctctataatcccttaactttgagaggttttaaaatctgagattcccatgtggccaattgctattcttgctccatttatgtaaataatcaggcccaacttcaatgaaactaaacttattgtacaaacaaatggtcttattttgattatctttggtaaaatttggataactgtagagataatttatgtctcaaataaactatagtatacctgttattagactgtaatccttcattgttttggggtttttattattaacttagaatctggactgaattctgaattcctc

SEQ ID NO: 283787 - DNA, 345 bp, Homo sapiens
aattggggcatttggcacatttatattcaaggttagtattgatatgygtgggttttattctgttgtcatgatggtagctggttattattcagacttgtttgtgcggttgctttatagtgtcactggtctgtgtacttaagcacgtttttgcagtggctggtaccagtcttccctttccattctttgaggccagcatcatcttcataacaaaatctggcagagacacaacatagaaagaaaacttcaggccaatatgactgatgaacactgatgcaaaaaaatcctcggaaaaacacttgtaaaccaaatccagcatcacatgaaagagctaatccaccgtgatca

SEQ ID NO: 283788 - DNA, 691 bp, Homo sapiens
aattggggcatttggcacatttatattcaaggttagtattgatatgtgtgggttttattctgttgtcatgatggtagctggttattattcagacttgtttgtgcggttgctttatagtgtcactggtctgtgtacttaagcacgtttttgcagtggctggtaccagtcttccctttccattctttgaggccagcatcatcttcatamcaaaatctggcagagacacaacatagaaagaaaacttcaggccaatatgactgatgaacactgatgcaaaaaaatcctcggaaaaacacttgtaaaccaaatccagcatcacatgaaagagctaatccaccgtgatcawaattggggcatttggcacatttatattcaaggttagtattgatatgtgtgggttttattctgttgtcatgatggtagctggttattattcagacttgtttgtgcggttgctttatagtgtcactggtctgtgtacttaagcacgtttttgcagtggctggtaccagtcttccctttccattctttgaggccagcatcatcttcataacaaaatctggcagagacacaacatagaaagaaaacttcaggccaatawgactgatgaacactgatgcaaaaaaatcctcggaaaaacacttgtaaaccaaatccagcatcacatgaaagagctaatccaccgtgatca

SEQ ID NO: 283789 - DNA, 345 bp, Homo sapiens
aattggggcatttggcacatttatattcaaggttagtattgatatgtgtgggttttattctgttgtcatgatggtagctggttattattcagacttgtttgtgcggttgctttatagtgtcactggtctgtgtacttaagcacgtttttgcagtggctggtaccagtcttccctttccattctttgaggccagcatcatcttcataacaaaatctggcagagacacaacatagaaagaaaacttcaggccaatatgactgatgaacactgatgcaaaaaaatcctcrgaaaaacacttgtaaaccaaatccagcatcacatgaaagagctaatccaccgtgatca

SEQ ID NO: 283790 - DNA, 982 bp, Homo sapiens
tccatgctcatggatatgaagaatcaatatcattaaatggcgatactacccaaagcaatttatagattcaatgctattcctatcaagctaccagtgatattcttcacagaactacaaaaaaaactatcttaagattcatatggaaccaaaaacagagacagaataaccaaggaaattttaagcaaaaagaaaaaagctggaggcatcatgctatycaacttcaaactatatgctactgagctacagtaaccaaaacagcatggtgctgggacaaaaacagacacaaagaccaatgaaacagaatagacagcccagaaataagaccacacacctacaaccatctgatcttccacaaagctgacaaaaacaagcaatggggaaggactccctattcaatagtggtgwgaactgtgagtcaattaaacctcttttcttcataaattacccagtctcaggtaattctttatagcagtgtgagaacagaataatacgtactctgactcaaatatttggtgttcttagctgtctgttcaccctctgagatgaagatttggatggatagctttggcaacactgctttgcagcccagggaagaagagctacctgcacacagatcacacagggccaggctttggtagctgtactggatgggtgtgggagagggaagagggcagagcctggcatcgggagcttgtgagccttgcatcatgggaacttcaggagccttgcagctccagcccaggacccactcccagggcctcctgggwcagaactggcactttttaccaacagactggaaattaactctagagccagctttctctaagggtgaggttggagagaaaacagttcttcttcagccatttcctcttcagtacctggcaggccccatagtccatgctttctcccagtgccactggttccagaatttctccagaagaaatcattgtttttggagctgaggttacaatgtggtgaggta

SEQ ID NO: 283791 - DNA, 577 bp, Homo sapiens
gaactgtgagtcaattaaacctcttttcttcataaattacccagtctcaggtaattctttatagcagtgtgagaacagaataatacgtactctgactcaaatatttggtgttcttagctgtctgttcaccctctgagatgaagatttggatggatagctttggcaacactgctttgcagcccagggaagaagagctacctgcacacagatcacacagggccaggctttggtagctgtactggatgggtgtgggagagggaagagggcagagcctggcatcgggagcttgtgagccttgcatcatgggaacttcaggagccttgcagctccagcccaggacccactcccagggcctcctgggtcagaactggcactttttaccaacagmctggaaattaactctagagccagctttctctaagggtgaggttggagagaaaacagttcttcttcagccatttcctcttcagtacctggcaggccccatagtccatgctttctcccagtgccactggttccagaatttctccagaagaaatcattgtttttggagctgaggttacaatgtggtgaggta

SEQ ID NO: 283792 - DNA, 577 bp, Homo sapiens
gaactgtgagtcaattaaacctcttttcttcataaattacccagtctcaggtaattctttatagcagtgtgagaacagaataatacgtactctgactcaaatatttggtgttcttagctgtctgttcaccctctgagatgaagatttggatggatagctttggcaacactgctttgcagcccagggaagaagagctacctgcacacagatcacacagggccaggctttggtagctgtactggatgggtgtgggagagggaagagggcagagcctggcatcgggagcttgtgagccttgcatcatgggaacttcaggagccttgcagctccagcccaggacccactcccagggcctcctgggtcagaactggcactttttaccaacagactggaaattaactctagagccagctttctctaagggtgaggttggagagaaaacagttcttcytcagccatttcctcttcagtacctggcaggccccatagtccatgctttctcccagtgccactggttccagaatttctccagaagaaatcattgtttttggagctgaggttacaatgtggtgaggta

SEQ ID NO: 283793 - DNA, 1021 bp, Homo sapiens
cctaggtccaaaatgaggctccatcactttctaaatgtatgatctggacaaattaatgtgcctcagtttcttaatttgtaaaatgtagatagtagtacatagtccctagaattgtcatacagagggctacattaggatactccataaatgccagctgttattgtatgtcgtgtattgttaaaccttaatattttaaaagttgtcctttacttgtgataccatatgcgtatgtgtgtggagatacagaagtatgtgtgtgtgcatgtgtgtgcatatttatttttgtgcttttcaataataaaagctagcacttacatcgtgctcaccatctgccttttaagcacctcacctatattaatgcatccttcagaagaagtcacaatggaaattagaaaatattttgaactgataatgaaaacacaacatgataaaacttatggggcacttttttcattatgtttcctaattagctattgctggtgtcttaaaaatgttttagtttctgttcatttattttgaatttarttttaatactgagaaaagcctcaggcagagggcttatgwatccagctcagtaaggtcatttctaggaacttagcccctcaagtccaagctgcctcagaagtttctgaattttccagtgtatgcagcttttctggttgttcacgctgaggcattggtcagttataaagtactccattgagatcaaaagtgaaagctcacctctaggttttaatacgtgatttttttcattgcttttttttttttttttttttgctaaataatcaatacttttagtttagcttaaatcttgacctaagaatcattgaagtatgttggctttttttwaaaaaaaatagttttctattgctgcatagaaaattctctaaaacttactggaataaaacaatattatcacactgtttttgtgagttaggaatctagacacagctcagcagggaacctctggctcagggtctcccaggctgcaattaaaggagatagtcgggactgtagtcac

SEQ ID NO: 283794 - DNA, 583 bp, Homo sapiens
tggtgccccatcccttttgctgtattcagtctgttagaagtgagtccttgggtctagcccatactcaaggctttttctgtgacagaagacttcccctttgaaccgggaagagctcttgttcctctacagaaagtggaaatgacaggtgccaccctttcattgcccgcctagcagctgggatacagtcacttaatctacacttgcccacttgamgataccactgcagaccgaaacgaaagccactgatgaaggaagcatggtgcagccgcatccaagccccagagtgcagtggagatgttccagattctgcattcattgttcctgtggtcctaactgaacgcctctgtccaattatctgcctggttcctgccaacctagactccacacatgattctgctgggaccttcttggagacattgtgagctaaccaatggtttcaagtaaattccttttctggttaaattagccagagttgttttctgcagcttgcagctaagaaatttgaatgctgtaatgttctcattaacgtgttaactccattttttccctagtgtctttttaaaggtcagcagctctccatctc

SEQ ID NO: 283795 - DNA, 527 bp, Homo sapiens
tctgtgcccattcccacatcccttgccctatgcttctcttccatatgactgttcatctgtatcctttagcgtgttctttattaagaagccagcaaacataagcaaagtgtttccctgagatatgtgggccactctagcaaattaatccaactcaaggaaggggttgtgggaaaccttgttgttgttgttgttgttgttkttgttgtttttaagatggactgtctctgtcgcccatgctggagtgcagtggcacaatctcacttcaacctctgcctcccaggctcaagcgatcatcccacctcagcctcccaagtagctgggactacaggtgcgtgccaccacacccaactaatttttgtattttttgtagagctggggtttcaccatgttgtccagactggtctcaaagtcctggcctgaagctatttgcccacccaggcctcccaaaatgctgggattacaggcatgagccactgtgcctggcaagagccaaataatagccaattgggcagaagtataggtgacga

SEQ ID NO: 283796 - DNA, 556 bp, Homo sapiens
acaaaccatatcaaatcctgttaattaattcatcttaaagaaactaagccaaattttgtcaggatccagtctgatgcaaagaaagcctgactaagacaagaaggataggtgtaagagcacaggataagattatctacaaacggttttcacagcaaaatcagacatccatttcttaccctgatttagagacacaaatggagcccaagacgtttcatcactccctccccaaagtttatgaaataaagtgccctctgatgaatccaattgcaggaaytggcattgtttctaaattctgcttcctctatttggctaagaataaatctcttaaaatattaagatatgccagtaagtggcatcatgtgttatctcaccacctgcagctagttatgctgtctttggactaaatgtctctctctacttattactatgattaagcaccaataatgtcatctggactacatagagtataaattatgttaatgtaatatgataacttaaatggtataaagtaaatattatggcaccaaacacacacattttaagagcaataaatcat

SEQ ID NO: 283797 - DNA, 633 bp, Homo sapiens
tccctgcctcctttttatccgccttctttctattcataactcagactagccattggccaccatcagtttttacaaggttattactgttaaaagtatttattaaccattcaatatatgattagccattttctatttgtccaattgttttatgtgttagataatttaatattcatgatcaaactgtgtggtaggttttataattagccccatttctcaggtgaagaagtggaaataaagtggggttcagcaaattgcccaaggtcactcagggagtaagttgtagagctgaggtttgaacctgtctttaggaatcaaaagcctgcattctttatcactctgcactgatacctcaacttaaggccatttatgaaaatcartggaggatttgcacttagagaccaacccataggtttactcttatattacaagatttccatactctgaagaaaggagctgctagattatttgttgtctcaggcagggttgagatgtgctgtcgggagatggtggctgtacttgggcaatgtcttccatcttcagagggaagagcatctgaactctcgggactgccagcccagccctttcataattagtgaattcacttagttgtccacccaactccaacccctcacc

SEQ ID NO: 283798 - DNA, 559 bp, Homo sapiens
actgttaaattcattctaaagaatataatgcattggttaaaaaaagtagagagccatacrcactaactactagactattaagtgaaagacactatagaacaatgcaggtagaagtttctcatttggtggaaaagaaatgctataaacacagaaacatatgtatatacatgtaaatgtatttttcaaacctcttagaaggtcacagactgttttgtttttcatggcgattaccaccaggaggcaaaatggattggggtggggcctgaggggtaagtaaaagaagggattttccatttttaccctattggtatctgtattacctggattatttaaattttaaaatatatattaacaatattgtattttcctaagttatttatgtagttaaaacagttgagtaaattattatatttacccccaactcccacagtgttacacagtggtgcgtgaaataggattcaggctccctaactgattggacagagttctttccattttcctaaactgatttaaacttttctgaatttcagaggtctgactgatcttgtaaatcttggta

SEQ ID NO: 283799 - DNA, 582 bp, Homo sapiens
aacccacagttaaattgattttccctgatagagcatagcattccttctaccttttgccacactttcaaatagttcttggtgtatgagttagataataaggcagagacagtacaacaaaccaagttctttatagctacttgcacaccattcattttcagtaactaataggtcatattctctgtgcatcaaaccaagagcaattttggcctcactgatctgaaacgatatgcatgtgcttccagacaaataatgtttgactaatacccattattaatgttcttgaattgctttatacctctgaaatgaaattrtatttcccatttagaaaaagaaaattatttctatctcttcttttatttcttttttattttcagttatttccagggtacagagccattttcagggattcacagcctgccagagaggctcattctccatacatcctcccatcaatgattgatcctcaggagatggtcggtgcctcaatagttactgcttaattaatgttcctctggttgttaactaagaacttaagctgcttggaaaaaaatttctccctccagcaagatggcttgccattag

SEQ ID NO: 283800 - DNA, 527 bp, Homo sapiens
caaggaaatagaagtcttgaacaacattatcaaccaccacacctaacactataaatcaactacaccatacagacatgtatagagcactccactctctaggacaggctgtgtgttaggccaaagtctcttacccaaaacactttggcccatatgtgtttcaggatcctaagttgtctggattttaaaaatataatatggtgcattttcagtagattataaaacatccacaccaccatcaggatttaggtcagcaccctgcagccaatcacaatatttctacagcaaaatatacaataattattgataataaatgagataaaggctataaataacttgaagttaaagtccacatgtttttgccaaaaataaattgtaaaacgaaattaaaaacctattgcttctactttaaaggyatctttcaaatgtatccatttttcttcatccctgccatcatcctagcacagccaccattttgtcccttttgtccttaaaggaacattttaacagcatccatgcttctacccctg

SEQ ID NO: 283801 - DNA, 562 bp, Homo sapiens
gacagtttctaagacttaccctgtttattcttcagctttgagaagtactcctcaagttattttgtaaattgtccccaatttggttttgtctgatgtttttctcacggttagactatagttacgggttttagagaggaagaccacaggtgaaataatctcatcacatcatatcaggggcagatgctatcaacatgacttatcagtgataatgctatcagttatcactgataatgttaaacttgattgcctggctacatagaatttgctagccttctcgattgtaaaggtatttcctcaycctttccactctattaccaatctactctttggaagcaagtcactaactacaaagatgggggaattgagctctacctcctggaggggagattatatacataaattatttgggaggcgagaattctaccattgaaccaccagtgcaattatttggaattctgtaagggagacttgtcttttctctcccatttacttatttgtttgatgatttatttatattggtgttcacctacagatttttatattatagttcaagatacaatcc

SEQ ID NO: 283802 - DNA, 428 bp, Homo sapiens
tggcccacaagctaagaagtgtttttatatttttgaagggatgtaaaaaagaaaaaaatgcaacagtaaggaacaatatgcaacagagactatatgcacctcataaagtctaaatatttaatatctggcctgttacagaagaaatttgccaatctctgctctatatgatcaattatctcctattctattcacatatrcatggtagcctgtatattacaaaatagctagaagagagtgttggaaataaatttttggtgccgcaaaagaaatagcactcgaacatgaattttctcagcaaggcaattttacttctatagaagcgtgtgtctcatggatggagcaacggtgagagcacacccgaacaagggaggggaaggggttcttatccctcaccacccctactgctgcgtcattcccctattggctag

SEQ ID NO: 283803 - DNA, 857 bp, Homo sapiens
tggcccacaagctaagaagtgtttttatatttttgaagggatgtaaaaaagaaaaaaatgcaacagtaaggaacaatatgcaacagagactatatgcacctcataaagtctaaatatttaatatctggcctgttacagaagaaatttgccaatctctgctctatatgatcaattatctcctattctattcacatatgcrtggtagcctgtatattacaaaatagctagaagagagtgttggaaataaatttttggtgccgcaaaagaaatagcactcgaacatgaattttctcagcaaggcaattttacttctatagaagcgtgtgtctcatggatggagcaacggtgagagcacacccgaacaagggaggggaaggggttcttatccctcaccacccctactgctgcgtcattcccctattggctagwtggcccacaagctaagaagtgtttttatatttttgaagggatgtaaaaaagaaaaaaatgcaacagtaaggaacaatatgcaacagagactatatgcacctcataaagtctaaatatttaatatctggcctgttacagaagaaatttgccaatctctgctctatatgatcaattatctcctattctattcacatatgcatggtagccwgtatattacaaaatagctagaagagagtgttggaaataaatttttggtgccgcaaaagaaatagcactcgaacatgaattttctcagcaaggcaattttacttctatagaagcgtgtgtctcatggatggagcaacggtgagagcacacccgaacaagggaggggaaggggttcttatccctcaccacccctactgctgcgtcattcccctattggctag

SEQ ID NO: 283804 - DNA, 428 bp, Homo sapiens
tggcccacaagctaagaagtgtttttatatttttgaagggatgtaaaaaagaaaaaaatgcaacagtaaggaacaatatgcaacagagactatatgcacctcataaagtctaaatatttaatatctggcctgttacagaagaaatttgccaatctctgctctatatgatcaattatctcctattctattcacatatgcatggtagcctgtatattacaaaatagctagaagagagtgttggaaataaatttttggtgccgcaaaagaaatagcactcgaacatgaattttctcagcaaggcarttttacttctatagaagcgtgtgtctcatggatggagcaacggtgagagcacacccgaacaagggaggggaaggggttcttatccctcaccacccctactgctgcgtcattcccctattggctag

SEQ ID NO: 283805 - DNA, 478 bp, Homo sapiens
ccgcccttcttcctcaggctgtgcccatcaaaacacacggcacttgggtgacagcagcacaagaagcttgttcagagcctgtgatgtcctctctgtacctggcctattgtcctctggatgctcgcagcaatgggtggggcaagtagcctttatataggcagccaccctgaagccagagacatggagtgcctgtctcaagtcacctgaaatccaagacacagcactgatttgaacttctggcttctggcaccacaggccccaagcgcagctcttcctcctccacaggcctggaggctctgcacacctgcttcctgccttccaggggagactgtacctaagatgctttcagcrtctattctgtcccgagcatgggccagagagagtagcagacactcacctgtcgggagaacccacgccaagcaggccagcagccagatggacttttccatgctgtgagcatctgaacaccccaggccag

SEQ ID NO: 283806 - DNA, 561 bp, Homo sapiens
cagtgagtgccactgcactctagcatgggtgacaagagcaaaactctgcctcaaaataataataataataataataatattaaaaacaaataaagatggaaaccttattcccaaagagttcagtctggcaggacaaaacagcaagtgactgcaacagcatttaggcacaagctgcaatgagggaaagaacatctcaattcgactgcaagagtccgcaaagacttcaaaagaggtttggcctgaactaaatactgaaggctgagcaagaaagaggtcagaaatgggtgggaggagaacaaaagcagcatatgcgaagaacaaaggtattaatgtgtatgttgtgtttagaaaaatgcagaaagtctaaatggctgaaaagtaaaatgtctgtgaagtgggagagaggataaatgatgctgctagaaaaagaycaataacagattatgaagggcgctaagggtcatattccttttgatactgccaagtaaatatgggtttttagcctgaaaatgtgatcagatctatgtttcaaaagatgagtaatgagagaatggaaaacag

SEQ ID NO: 283807 - DNA, 480 bp, Homo sapiens
ctctggaaatctagtagtctcgtactaatgattctttcattcttactcttattatcaagtacattaatagaaaaaaattggacaataattatctggtaaacactgaatggattaaacaaaaagtcaaatattaaattagccaagaattatttaaatttagtatcttatacaaaacacaactatttcaaagaatgttacttcttaaaccaaacttaaggatctattttatyatgtttcttttttttgaggcttctgaatacaaggaataataaaccataatttgaacatttctcttcactgtagatggtatgatccaaatatcattcttattatctacagtgttggctctcattttctaaaaagtcctaaatttaaaaacaaaaagcctttgttataaaagcatagggaagtgtgaatcttttgacatagattcttcacatattcattaattcaattaggcagatttggcaatgatgatgt

SEQ ID NO: 283808 - DNA, 651 bp, Homo sapiens
atacaaatatacaaatatatatacatatatacaaatatatatacatgtctatacatatttgttattatatacaaatatacacagttatacatacattcatatgtgtgtgtttgtatacccttaagtgctagccacttgtctaagcactttatayatagagcctagagtaaatcatttcattttaacaaaattgtattggattgtattgggtagtttttttatcctcatttcacagatctgagattaagtcatgtagactagcattaagtataaaagattatcacaggccgaaaatacatcactttgtgttaaaattaagaaaccatgtagacaagtctgaggaggtgaggagttcctagaatggtgaaattagaatccaaacctggaaaggtatgagaatgaagaagtgtttttctaaataatatgaataataataatttgatagatgacatttgttcttaactttcctattgcaaccaccatttcccaagtcctaggcaattcaacataaaaggtaaaagtccaggtaaatgtctacattttgtcacttcaaagcatttttctaaatcctagtgtatttcctggtgagctgggccaaaattcatagaggagttacattgcttcagctacatgctaagtagtcctcttcaa

SEQ ID NO: 283809 - DNA, 651 bp, Homo sapiens
atacaaatatacaaatatatatacatatatacaaatatatatacatgtctatacatatttgttattatatacaaatatacacagttatacatacattcatatgtgtgtgtttgtatacccttaagtgctagccacttgtctaagcactttatatatagagcctagagtaaatcatttcattttaacaaaattgtattggattgtattgggtastttttttatcctcatttcacagatctgagattaagtcatgtagactagcattaagtataaaagattatcacaggccgaaaatacatcactttgtgttaaaattaagaaaccatgtagacaagtctgaggaggtgaggagttcctagaatggtgaaattagaatccaaacctggaaaggtatgagaatgaagaagtgtttttctaaataatatgaataataataatttgatagatgacatttgttcttaactttcctattgcaaccaccatttcccaagtcctaggcaattcaacataaaaggtaaaagtccaggtaaatgtctacattttgtcacttcaaagcatttttctaaatcctagtgtatttcctggtgagctgggccaaaattcatagaggagttacattgcttcagctacatgctaagtagtcctcttcaa

SEQ ID NO: 283810 - DNA, 651 bp, Homo sapiens
atacaaatatacaaatatatatacatatatacaaatatatatacatgtctatacatatttgttattatatacaaatatacacagttatacatacattcatatgtgtgtgtttgtatacccttaagtgctagccacttgtctaagcactttatatatagagcctagagtaaatcatttcattttaacaaaattgtattggattgtattgggtagtttttttatcctcatttcacagatctgagattaagtcatgtagactagcattaagtataaaagattatcacaggccgaaaatacatcactttgtgttaaaattaagaaaccatgtagacaagtctgaggaggtgaggagttcctagaatggtgaaattagaatccaaacctggaaagrtatgagaatgaagaagtgtttttctaaataatatgaataataataatttgatagatgacatttgttcttaactttcctattgcaaccaccatttcccaagtcctaggcaattcaacataaaaggtaaaagtccaggtaaatgtctacattttgtcacttcaaagcatttttctaaatcctagtgtatttcctggtgagctgggccaaaattcatagaggagttacattgcttcagctacatgctaagtagtcctcttcaa

SEQ ID NO: 283811 - DNA, 1285 bp, Homo sapiens
atacaaatatacaaatatatatacatatatacaaatatatatacatgtctatacatatttgttattatatacaaatatacacagttatacatacattcatatgtgtgtgtttgtatacccttaagtgctagccacttgtctaagcactttatatatagagcctagagtaaatcatttcattttaacaaaattgtattggattgtattgggtagtttttttatcctcatttcacagatctgagattaagtcatgtagactagcattaagtataaaagattatcacaggccgaaaatacatcactttgtgttaaaattaagaaaccatgtagacaagtctgaggaggtgaggagttcctagaatggtgaaattagaatccaaacctggaaaggtatgagaatgaagaagtgtttttctaaataatatgaataataataatttgatagatgacatttgttcttaactttcctattgcaaccaccatttcccaagtcctaggcaattcaacataaaaggtaaaagtccaggtaaatgtctacattttgtcacttcaaagcatttttctaaatcctagtgtatttcctggtgagctgggccaaaattcatagaggagttacaytgcttcagctacatgctaagtagtcctcttcaawcaaaatcaaaataggaagggaaaaagaaaacagcacatattccacacccttgacataactgagatatgacaaaacatcaaattaactgtgaggtttttttttttttaaatcagtgcacgatttcttaccctattctcccawcctctctcggaaatcagatctgcaaagctagcaatagactgaaggctaaatctataacaattgcaaaatgacgaagtccatcataattctggaaatcctgaataagtgctctaaatgattagactatggactacaggagaaggacttaaaagtacatgaactttgacaagattaatttatttgggggaagttaataaaggtagaaagaaaaggacaaatactttttggcaattgggaggtgaataggaaaagaagtacaaagggtggggggcactgagtgtcctacaaaacaatgttggccaataacagagatggtgggtaacattgtcttgttactgatattaatggcaatgctactaaggtttccctcattaggctataaactaagatatatactcctccttcatccacaccccactgttggaaggaaagaagcgctaacaatagacttgagttgatctaaaatcatggctgaaatgacaaagtctatta

SEQ ID NO: 283812 - DNA, 633 bp, Homo sapiens
caaaatcaaaataggaagggaaaaagaaaacagcacatattccacacccttgacataactgagatatgacaaaacatcaaattaactgtgaggtttttttttttttaaatcagtgcacgatttcttaccctattctcccatcctctctcggaaatcagatctgcaaagctagcaatagactgaaggctaaatctataamaattgcaaaatgacgaagtccatcataattctggaaatcctgaataagtgctctaaatgattagactatggactacaggagaaggacttaaaagtacatgaactttgacaagattaatttatttgggggaagttaataaaggtagaaagaaaaggacaaatactttttggcaattgggaggtgaataggaaaagaagtacaaagggtggggggcactgagtgtcctacaaaacaatgttggccaataacagagatggtgggtaacattgtcttgttactgatattaatggcaatgctactaaggtttccctcattaggctataaactaagatatatactcctccttcatccacaccccactgttggaaggaaagaagcgctaacaatagacttgagttgatctaaaatcatggctgaaatgacaaagtctatta

SEQ ID NO: 283813 - DNA, 633 bp, Homo sapiens
caaaatcaaaataggaagggaaaaagaaaacagcacatattccacacccttgacataactgagatatgacaaaacatcaaattaactgtgaggtttttttttttttaaatcagtgcacgatttcttaccctattctcccatcctctctcggaaatcagatctgcaaagctagcaatagactgaaggctaaatctataacaattgcaaaatgacgaagtccatcataattctggaaatcctgaataagtgctctaaatgattagactatggactacaggagaaggacttaaaagtacatgaactttgacaagattaatttatttgggggaagttaataaaggtagaaagaaaaggacaaatactttttggcaattgggaggtgaataggaaaagaagtacaaagggtggggggcactgagtgtcctacaaaacaatgttggccaataacagagatggtsggtaacattgtcttgttactgatattaatggcaatgctactaaggtttccctcattaggctataaactaagatatatactcctccttcatccacaccccactgttggaaggaaagaagcgctaacaatagacttgagttgatctaaaatcatggctgaaatgacaaagtctatta

SEQ ID NO: 283814 - DNA, 337 bp, Homo sapiens
aggaaataataggaagagaaagagaaaggaagagaggaagaaaagaaagatcagaaaactatagatatacatctctcatgaatttagatgcaaacatagttttaaaaatgttagcaagaatctggaaatacattaaatggaaaatacttcatgaccaaatgtggtttctccaatatatgcaaggtarcttcaacatttgacaatcatccctgacttcacaccaagttaaaaaaaaaaaaaagctctacctggtttataaacctaaatgtaaaacttaaaacaataaatgttcaaaaataaatgttagagaaaatatttttccccttaggttaggcaa

SEQ ID NO: 283815 - DNA, 583 bp, Homo sapiens
aaaatattctagagatattgaaaatgaatacacagactgatgtgctagaaatgaaaattataatggatatgataaaaaagtgtgctggacactgaataagatcagtagcagactggacatttcacagggaaaaacaagacactgaagtaagaagcaaagcaaaagaaactccctaatctcaaagagatcagcagattaatcttaccagtaggttctagaaagtcctttaagctacagggagatgataccaggtcaaaatatagatttacacaaaggaatgtggaacaatgggaatgttaacyatgtacacaaatatctaattttaaaaaattaagtacttcttactaaagcataattgtttaaatagcagtgcagtgtggggtttactacatacataaaataaaatgtatgataccaggagcacaaaggacaggaatagggaaatgaaaatacgcagttacaactttcttataacgtaggtgaaatggtgataatatcactcaaaggtacgctgtgataagttatagaggtacactaaagctaccactgaaatgacaaaataaagttatacaaaccaagactg

SEQ ID NO: 283816 - DNA, 605 bp, Homo sapiens
attaggaggtgagacacttgggtgttatataggttaagaggatggcgctctcatgagtgggatgagtgcccttataaaacagggttgagagagccgttttgccccttatgccacagggagaagatggccatctatgacctaggaagtttgccctcaccagacactgaatctgcagctgctttgatattggacctccagaactgtgagaaataatctctraggaataaataagccactcagtttaaggtattttgttaaagcaatccaaatggacaaagacatggtctgtcaatcattgatagaacaaataaaaatgtagtaaatacataaagagattaatagtgccattctccagcatgacttacatcaatagagtatgcttcatccaataacaacagaatatacattattttcaagtgcacatggaacatttatataaatagataatattatgagcaataaaataagcctcacatttaaaagtttcaaataatgcaaagtaatatatcatatataaagagttattgttaatggatataaagtttcagttttacaagatgaatgaattaccatctggagatagatggtaatgatggttgcatatc

SEQ ID NO: 283817 - DNA, 605 bp, Homo sapiens
attaggaggtgagacacttgggtgttatataggttaagaggatggcgctctcatgagtgggatgagtgcccttataaaacagggttgagagagccgttttgccccttatgccacagggagaagatggccatctatgacctaggaagtttgccctcaccagacactgaatctgcagctgctttgatattggacctccagaactgtgagaaataatctctgaggaataaataagccactcagtttaaggtattttgttaaagcaatccaaatggacaaagacatggtctgtcaatcattgatagaacaaataaaaatgtagtaaatacataaagagattaatagtgccattctccagcatgacttacatcaatagagtatgcttcatccaataacaayagaatatacattattttcaagtgcacatggaacatttatataaatagataatattatgagcaataaaataagcctcacatttaaaagtttcaaataatgcaaagtaatatatcatatataaagagttattgttaatggatataaagtttcagttttacaagatgaatgaattaccatctggagatagatggtaatgatggttgcatatc

SEQ ID NO: 283818 - DNA, 648 bp, Homo sapiens
aaatcaataccaagaaggttgctcaaaaccatacaattaatggaaaatttaaaacttgctcctgaatgacttctgggtaaacaatgaaattaaggcagaaaccaagaaattctttgaaactaatgagagcaatgatactacatatcagaatctcaagacacagctaaagcattgttaacaggaaagttaatagcgctaaatgcccctatcaaaaatttagaaaaatatcaaattaaccatctaatatcataccttgaagaatgagataaacaagggaaaaccaacctcaaagctaccatcagaaaagaaataamcaaaatcagagctaaactgaatgaaaccaagatgtgaaaaatcataaaaaaaatcaacagaactagaagttgattctttgagagaataaataatatagatagattgccagctacactaaaggaaaaaagagagaatatccaaataaacacaatcagaaaggacaaaggggcattaccatcgaccccatggaagtagagaaaaccctcagagactattatgaacacctctatgcacagaaattagaaaacttagaagaaatggataaattcctgggaacatacaacctcttgagactgaaccaagaaaaaattcaaacactaaaaagaccaataa

SEQ ID NO: 283819 - DNA, 563 bp, Homo sapiens
tcaagattggcaatcctctgttagcacttgaaaaatgttatctcattgttttttgttgttgttgtttgagacagtgtcttgctcccattttatttttatctcaatggcttctgataaaaaatttgctatcattcaaatctttgttatcctatatgaatttttttttcctctggttgctaatgagttcttttctttatctttggttttcagatatttgattatgatgttgcttggtttggatttctttaactgatgttgtttggagtttactgtgttcttagatccgtgaatttatatttttaaccaaattatggctgttttcagtcatttttcttcaattgttttttctgctacatcactctctttttctgaaaaccctataaaatgaatattagatcttttgatcttgttccacagagcactgaagttcatttttttctgttttctttttcaagtctttgcattataattacaacatttgagctatattaaggttagtatcgattgactgccttttaagttgagrattgtttacagttttctttttctgtgtatgcttaata

SEQ ID NO: 283820 - DNA, 639 bp, Homo sapiens
gactgccttttaagttgagaattgtttacagttttctttttctgtgtatgcttaataaaattttggtttatatttttgtcatttggaatactgtgtcatgtgactctgggtcctattaaaattgtctggataatagtgatttctgttattgttgttttgatagacagcaatcagtcaagtttaagactaaatatctctaacaattttcttctggttgtagttgtgatgtctatttagtatataargacttcgcggtggtattgtgacacacctattattttattgtactcagatctgaaaccagaccattgagttttaaactgtttttcagtgttcaaaaccttttctatgctgactaaagttaattttatgcacgtccaacaataaagtgaacacaagtcttgacacacctggctttaaatttaaagtatcctttctccaacttccagcttttgtgatacttccctagcccagtctatatttcccactgatttcctttctgaggttctgcctgcaaatgtggggttttagctttccttcattcttgtcagagttctattccccagtgtattactaacccttggttgggactaggcaagtctctttctctttactggtactcacctggtggagaggtgg

SEQ ID NO: 283821 - DNA, 585 bp, Homo sapiens
ggagcctcaagctgtgcagcctggagttagaggaggggtcatgccagcatttccttggctctcccagatgttgtctcagtatgtcacatgccccctcatttcaccttctcagggtctaattcagcactaggacttgcctttgagttgcaatctttatggcctagaaggcctctcaagtttacttggagacatagagtgctgtagccctcagtggcaaggtctgtaggcactcaagttcagactgctgggatcagtgattcccttctggctagggctggcttacatgttcctttcatgggtgagcatcaattcattgtgatcctagtttccttttgctctaataggacagcactaagttcagtgcctcacaattgctgtgttctcccaaccccagtgcccagagacactctctgcaccatgccattgctgctagggttggggagggatggtgatggtgattcaggactgtgttttytattcttcagtgcttctttcagagatatgaagttaaaaccagatactatgagtgttcacttgatttttggttcttaaaaaggcatttttttttctgagtagatagttatt

SEQ ID NO: 283822 - DNA, 578 bp, Homo sapiens
ctagttattattggtttgttttgctgttttttagtttttgttttgtttgtttttataaattgaacagaaacaatttttaaacaaagtatatttcttgtcatatyaaaaataagagaaaatcctgttttcttttgttgtatctctttctcatatttccctactttacttggagtcatttactttctcaagtgatcagagccctagaagttcaacccaaatactttccttttatgaacatatgcttcatttaatatcttttgttttgttgttgttttatgaatttttttaatccatgctatgtacttaatttttttgaattgctctttacttactaggaccagataaattaatttactttaatgaaaaacagttcattggcatattatgctgccctgtaagtagctttcaggaattcaaggaactgatgatgaacaaagacttcagagaggagatggtttcatattgtagatgggcatttgtatatgcctggaatgagaggaagtgaatagtaagagaagaatagggtcagaaatccaagcttaaagaaaaagcacacgcacaggaaggtataagaaaca

SEQ ID NO: 283823 - DNA, 578 bp, Homo sapiens
ctagttattattggtttgttttgctgttttttagtttttgttttgtttgtttttataaattgaacagaaacaatttttaaacaaagtatatttcttgtcatatcaaaaataagagaaaatcctgttttcttttgttgtatctctttctcatatttccctactttacttggagtcatttactttctcaagtgatcagagccctagaagttcaacccaaatactttccttttatgaacatatgcttcatttaatatcttttgttttgttgttgttttatgaatttttttaatccatgctatgtacttaatttttttgaattgctctttacttactaggaccagataaattaatttactttaatgaaaaacagttcattggcatattatgctgccctgtaagtagctttcaggaattcaaggaactgatgatgaacaaagacttcagagaggagatggtttcatattgtagatgggcatttgtatatgcctggaatgagaggaagtgaatagtaagagaagartagggtcagaaatccaagcttaaagaaaaagcacacgcacaggaaggtataagaaaca

SEQ ID NO: 283824 - DNA, 541 bp, Homo sapiens
gactctgctattgtaaaatatacaactacttctttactttctgcttctaaaccttatgcaatttgtctcgtgtggctaatgctaacttctaactacacagggaagagaattaccacaatagaaatccatcccatacaatgcctattgatgtgtatgtggttgataaygtcaaaaacattgtatggaagtaatcaatataaaagtcaggacagtggttatttgtagaagagaggagaccactaagattgaaagagtgtaaatagatatttttggggtacgtagcaaagttctatcttgacttaggtggtcattgtacagtgtttttgcctaataatattgttcagtaatctatatatttgccttttatggttttatatatctatattttattttacaataaaatgatctttttaaaagacatgaagataaatatatttttgagatacctgtgggatattcaaggacagatgcataaagttagttttgtatatatttcaagttcaggaaggagattagagttagaaatagagatttgtttgcc

SEQ ID NO: 283825 - DNA, 541 bp, Homo sapiens
gactctgctattgtaaaatatacaactacttctttactttctgcttctaaaccttatgcaatttgtctcgtgtggctaatgctaacttctaactacacagggaagagaattaccacaatagaaatccatcccatacaatgcctattgatgtgtatgtggttgataacgtcaaaaacattgtatggaagtaatcaatataaaagtcaggacagtggttatttgtagaagagaggagaccactaagattgaaagagtgtaaatagatatttttggggtacgtagcaaagttctatcttgacttaggtggtcattgtacagtgtttttgcctaataatattgttcagtaatctatatatttgccttttatggttttatatatctatattttattttacaataaaatgatytttttaaaagacatgaagataaatatatttttgagatacctgtgggatattcaaggacagatgcataaagttagttttgtatatatttcaagttcaggaaggagattagagttagaaatagagatttgtttgcc

SEQ ID NO: 283826 - DNA, 549 bp, Homo sapiens
cagcccccaagggccatccagcctccatctcacaatgccaattttacctcgtgtctctcacgacagggggaaaccttagcattccttggagacctaacaggatgcagtcagcttaagcccttccaagagcttaccaaccagtctgtctttattccatccctaataacacagcccccaatggaacaattagaaaggccttacgaggccttacctctcgcaattgctgtaggtgttcttattactgtaggatactgcattatactctgtatttgtggattagtgcagaaacttatagaaacagctctcgtcaaaacctttaattcttccaccttactcagataagctcctactttgagaaaaccaagtgtaacggcagagtcaagacatgctaaaaagtttgaagaggaagaattttgaaaatcaagaaggggaaattgttggatacagtgagttcctcttcaaaggttctgcttgttcaactccctygttctttgtcttctattttcaaagcctaacttccttacctccttgcacctagttacggtaaac

SEQ ID NO: 283827 - DNA, 546 bp, Homo sapiens
ctcaaaactttgaaggccttttaccagtttgcacagtgagagggagaccaaaagtcaaactggttaaaaactttacccttttgttggcatattgggtttgtgggtgcccttccccctagcccaatcctaggccagccagtttaagacttgggaaattaactctttccagtttggatgatgtgtctgaggggagtgtctcataagatggagacacaattacctattastgaagagagaaccgagagaagaaagaaaaaaagaaggcatttttcaaaggattcccaggggttcaggatgcattctaaagggttgcagactgaagatgaatgactacccatctagaaagaggggagcaggtatccctggtccccttctcttcctagcagatacctggggtatgtgagggagagagggaagagcatcctccttcccttcttccgtccttgcatccccgagtcccagcaaccttggcaggcaccaccatgagtgccaaagcagcttgcacccatgaagcagggagggcctaacgaataggaattatccgct

SEQ ID NO: 283828 - DNA, 658 bp, Homo sapiens
tattttccattgtatttggatgtggggctgtattagtttcctactgctgttatgatggtcatgatgaatcatgacaaatttagtttcttaaaccaacccaaagttattatcttgtagttttgcagctcagaagtctaaaaagcggttggcaagtctggataccttcttgaggctcaaggagagagtccatttcctttttttgcagcttctagaggctgcccacatacaagactcaatatgacatgccattctycaagcatgcttttttctccccaaacccacaaaatctcttaattttcctttttaaactcaaatgttaaggttaagttgatgctttggaaactcagatgctaaggctgtgctcctcagattctggcatctatgcattgcttattttatcatttcctcttaattttttaatgctctctactggcagatatgaagagaaagtccccgagtttttcatagttgagtaataagaagaaaacctgagagttttggatgtcccatttaacagcaccctcccctcttgcctctaagactccatagacaaatgtgattattttttagaaggccaatttgccctccttaactcaccaccacttcttcactctggcttcatcactctgacctttgcttctgttatcatatctctttc

SEQ ID NO: 283829 - DNA, 505 bp, Homo sapiens
ttctcatttacttatgcattcaatttttgtaacaaaagaacaaaaattaaaactttatacaggttggagaaaacattggatgaaaatgcatgacagacctggaatctaggtagacttaattttcactatctttgttattgtgtgttcctgtagatacagctttggtttttatacatttttaatatagagaagagaaatataagacaataaaatagagagtctttagacagcactactgtaccactgcatttcacataggatgaaatttaaaccaagacaagcataaaggttgtcacagaaatgtactagaatccacgtgtatctcaatttaatttcaattgttatcctaaactatcacattattatgggttgaattgtgacacacacacacacacacacacatatacatgcacacacacacaaacatgtacacacacacacaaaagatctgttgaaatcctacccccaatayctgtgaatgtgattttattttgaaatagaatct

SEQ ID NO: 283830 - DNA, 1249 bp, Homo sapiens
aaacttacagacccaactttgccaaatagttgaatcctagtacatgtatccgtgctaacttccccactattctagtttctgatattaataaccacatgagctatcttttcaggaaacaaggaggtataatagtgaaaaacagaagagtgacatacattttcaaattaatatttattcatgaagaatatgagaatgaatttctattccaatccagtgagtagctgatcttttgtgcattcraggtttcttcctttgagagtgatgagttcaattacttgattttttttaattccaattgcttttttctaaaaatatgactcagcaaaggtggtgggctaactgagatgtgatacatttaattcagtgactctgaagggagatgctacctaatacagtttctagaaggcccaagatggaattaaaaattctgaaacttcctgaaatctctttgatctgcaattacagaatccatgaactacataacagcagtttcccccttatcttcagggtcacattctcagacccccagtgaatgccttaaaccatgggtattactgaaccttatatacactgtacatttttttcctatacatacctatagtataatttaaaaagaaattaggcacagtaagagatwtgagttgtgttcagttgtacactattatgaataaagttattatgagcatgtgtatagaatwctttattggacatatgttttatttctcttaatatgtctataaatggagtacagaaattaaaacataggtatatgcaggtttttttaagaacttgaaactttttcaaaatcattgcaccatcttgttttcccatctgcagtgtatgagaactctagtccaacatgtccttagagtttgatatgatcagaagttttaatcttagtcactgtagtggttatgtagtggtatctcattgagattttaatttgcatttcaatagtgactaacaatattgaaaatgtttatgtgttcattggctatttgttggtcttctgttcaaatattttgttcatttttaattgggtaggttatcttcttttattcatttttttttctttttatcttcagccaactcacaccaggttatctttttattagtgaattgagaagcttattgttctaatactatatatgatctcaaaatggtacacatacgatctttccccattctgtagtttgagtttcaccttccaaatgatctatttcaaagagcaatatttttttaaagtttc

SEQ ID NO: 283831 - DNA, 612 bp, Homo sapiens
tgagttgtgttcagttgtacactattatgaataaagttattatgagcatgtgtatagaattctttattggacatatgttttatttctcttaatatgtctataaatggagtacagaaattaaaacataggtatatgcaggtttttttaagaacttgaaactttttcaaaatcattgcaccatcttgttttcccatctgcagtgtatgagaactctagtccaacatgtccttagagtttgatatgatcagaagttttaatcttagtcactgtagtggttatgtagtggtatctcattgagattttaatttgcatttcaatagtgactaacratattgaaaatgtttatgtgttcattggctatttgttggtcttctgttcaaatattttgttcatttttaattgggtaggttatcttcttttattcatttttttttctttttatcttcagccaactcacaccaggttatctttttattagtgaattgagaagcttattgttctaatactatatatgatctcaaaatggtacacatacgatctttccccattctgtagtttgagtttcaccttccaaatgatctatttcaaagagcaatatttttttaaagtttc

SEQ ID NO: 283832 - DNA, 606 bp, Homo sapiens
tacaacctcagttctcccaagtgtccaaagaagtgtctatagttcagcttgttcagccatttcctgttacaagggctggagagactctctttccaactctctacaaatccaacacgacatagaaaataatatgatgattttaaaaattgaaattaaagaaaagcaagtagaaataatgaggcaacaaaaggcaatgacttcagaaaatagcttgtacatctagggttcggggaaaaaaaagaagagattggggttattagaatctagaactttgggaaagtggtctaacagttacaggtctcagagctaggagtagatggyactaccctgcaggtgctgttttctgagcagctaagaggagtgcccatgtggagacagaacttagacctctcaggacaaggcccttgctcactagtgctaatgcccgaaaagggttgtactgaggctagctagaagtacaggaaaaaaataaacaggaagctaaaaaactgctgccatttttattacctattcatggcactagggtgaagctaagagtagtgagcaaatattatggtcactcaaaccctccagattttctgtctctgtcactagcaaaaaaaaaaa

SEQ ID NO: 283833 - DNA, 606 bp, Homo sapiens
tacaacctcagttctcccaagtgtccaaagaagtgtctatagttcagcttgttcagccatttcctgttacaagggctggagagactctctttccaactctctacaaatccaacacgacatagaaaataatatgatgattttaaaaattgaaattaaagaaaagcaagtagaaataatgaggcaacaaaaggcaatgacttcagaaaatagcttgtacatctagggttcggggaaaaaaaagaagagattggggttattagaatctagaactttgggaaagtggtctaacagttacaggtctcagagctaggagtagatggcactaccctgcaggtgctgttttytgagcagctaagaggagtgcccatgtggagacagaacttagacctctcaggacaaggcccttgctcactagtgctaatgcccgaaaagggttgtactgaggctagctagaagtacaggaaaaaaataaacaggaagctaaaaaactgctgccatttttattacctattcatggcactagggtgaagctaagagtagtgagcaaatattatggtcactcaaaccctccagattttctgtctctgtcactagcaaaaaaaaaaa

SEQ ID NO: 283834 - DNA, 613 bp, Homo sapiens
ttgctttgctgtagaacttatgagtgatcatcgctaatgatttttaatcaatattacatggaaaggaaagatagaaattctgtgtatctattacttttagatttttctacacacaatggatttggaatgatygtttctagaattattttattagaattttctttttcccttatgagtagtttgttcctataacagatcatttaaatgttgttatataaaaagtcataaacttttccaaaattaatactgtgtaagtctgtctatgatggtacttaatgttaaaaaaaaaataaaagacaaatacacacttacccaggaaacacatagttcttgagttgcatagccaggtggtgctttagtagctgcttttgctcaggactttaagttacttgtagattatttacaatttgtttcatatataaagccagtccacaccgtctttaagccacatccatgacgaggtgagtattaaattgctaaaaaatggacataaaagggatacaattaagggattttaaccaaaagttgtaatatcacagctggaaatccaactgtgctcatattcatgtatctgtttattataccttaaaaattaccatctatgtgaattctt

SEQ ID NO: 283835 - DNA, 613 bp, Homo sapiens
ttgctttgctgtagaacttatgagtgatcatcgctaatgatttttaatcaatattacatggaaaggaaagatagaaattctgtgtatctattacttttagatttttctacacacaatggatttggaatgattgtttctagaattattttattagaattttctttttcccttatgartagtttgttcctataacagatcatttaaatgttgttatataaaaagtcataaacttttccaaaattaatactgtgtaagtctgtctatgatggtacttaatgttaaaaaaaaaataaaagacaaatacacacttacccaggaaacacatagttcttgagttgcatagccaggtggtgctttagtagctgcttttgctcaggactttaagttacttgtagattatttacaatttgtttcatatataaagccagtccacaccgtctttaagccacatccatgacgaggtgagtattaaattgctaaaaaatggacataaaagggatacaattaagggattttaaccaaaagttgtaatatcacagctggaaatccaactgtgctcatattcatgtatctgtttattataccttaaaaattaccatctatgtgaattctt

SEQ ID NO: 283836 - DNA, 583 bp, Homo sapiens
tctgtccttgtgccccaagtacataaaatattagagaccctgtatcacagaccatttcttccaaaatcaactaataccacctggctcctactcagtaactgaaatctagtaccttgcttttctgccatgtgaaactaattagatataaccatccttgytattttaaaattatatcttcaatatctacatgcatgatatctttgtgccttttgttcctgtcctctgggttatatctctaaagctatgtatcttcctgcaaccactgcccatataaagggacatgtgttgccttgtgtttcagttagtccccgttcaaaactaatgtttctcatctgtttcctgcaaaatacttttatgccatttttctcttccctgccattatgaaaagcaggaaatgttctgtttaagtaaaagtaaggtatttttgaagaaaaatcgcataactcaagtgtctattgcctgtggaagttgttcagctgcaagatagcaaaagtgtggtccctggaaaaccaatgatttcaaaatgtagactaggcagagtgaagggcatggatttcaaaagagaaagtttaggaatttgagt

SEQ ID NO: 283837 - DNA, 583 bp, Homo sapiens
tctgtccttgtgccccaagtacataaaatattagagaccctgtatcacagaccatttcttccaaaatcaactaataccacctggctcctactcagtaactgaaatctagtaccttgcttttctgccatgtgaaactaattagatataaccatccttgctattttaaaattatatcttcaatatctacatgcatgatatctttgtgccttttgttcctgtcctctgggttatatctctaaagctatgtatcttcctgcaaccactgcccatataaagggacatgtgttgccttgtgtttcagttagtccccrttcaaaactaatgtttctcatctgtttcctgcaaaatacttttatgccatttttctcttccctgccattatgaaaagcaggaaatgttctgtttaagtaaaagtaaggtatttttgaagaaaaatcgcataactcaagtgtctattgcctgtggaagttgttcagctgcaagatagcaaaagtgtggtccctggaaaaccaatgatttcaaaatgtagactaggcagagtgaagggcatggatttcaaaagagaaagtttaggaatttgagt

SEQ ID NO: 283838 - DNA, 544 bp, Homo sapiens
acccattttgaactcaaataagaaaatcactcgtttgttttttgtctaacatcatttccatagtctaaaataaatacaaattaamcagcaagtaatgtcattagcaaaaaaaaaaatacagtgagaaatgccccattaaaaggatgtataacataaccccatttatttaagaatgtattccaatatcaaatggcaaattacaacaatgcaaaaactactcttacttctgtatcaacctaatattttcaaacatgttcttttgtttttcttcttgagagtactaatcttcaaatattgaggaagtattttatacttaaaatattatactgttgaaatgagaaaagttcccttataccccttgcagggcatgagacaggggcagtggctggcttcttcagtgacccactgatcaaacctctacgggagcatgcagatgggcaagttttggggctccatgccccaaacaccatggcagcctctaggggtgaatgcttacagctcctgaagccccagggggcatgcgttacagagtaatcttttattt

SEQ ID NO: 283839 - DNA, 587 bp, Homo sapiens
gcagtccaggctgacacaaaagactctgaaatctctttcattgtgtaatcctaacatcttgtctttcgtcctcatgcttttcagatcgtggtcaccagatggctgttgcccttccaggcttccagctcctgtgttccagactgaagaagaggaacagaaaaagggtcagacatctttctcctagtgcagctttgtttgattaggaagagagaattccccctcaccgtcccccttgagatttctgccagcatctcattgacctgaactgtgacacctagctatttctgtttcactctctaacaaatgtagaaagtgttagtaaggaagactggagtagcatacttagaaatggcaacaagcagtgcctcccasagctgcacagtatcccagtttgtcagaatcttccatgtactccttcaggtctactctatgcccttctcactctgttctctactccggaggctgatttccagggctacattccacaggccaccaggctttcccaggccaagttctctagaaatagatcctgacgtgggtatttgagtacacatgatgtattgagagagtgctcccaggagcaacct

SEQ ID NO: 283840 - DNA, 587 bp, Homo sapiens
gcagtccaggctgacacaaaagactctgaaatctctttcattgtgtaatcctaacatcttgtctttcgtcctcatgcttttcagatcgtggtcaccagatggctgttgcccttccaggcttccagctcctgtgttccagactgaagaagaggaacagaaaaagggtcagacatctttctcctagtgcagctttgtttgattaggaagagagaattccccctcaccgtcccccttgagatttctgccagcatctcattgacctgaactgtgacacctagctatttctgtttcactctctaacaaatgtagaaagtgttagtaaggaagactggagtagcatacttagaaatggcaacaagcagtgcctcccacagctgcacagtatcccagtttgtcagaatcttccatgtactccttcaggtctactctmtgcccttctcactctgttctctactccggaggctgatttccagggctacattccacaggccaccaggctttcccaggccaagttctctagaaatagatcctgacgtgggtatttgagtacacatgatgtattgagagagtgctcccaggagcaacct

SEQ ID NO: 283841 - DNA, 1126 bp, Homo sapiens
gcagtccaggctgacacaaaagactctgaaatctctttcattgtgtaatcctaacatcttgtctttcgtcctcatgcttttcagatcgtggtcaccagatggctgttgcccttccaggcttccagctcctgtgttccagactgaagaagaggaacagaaaaagggtcagacatctttctcctagtgcagctttgtttgattaggaagagagaattccccctcaccgtcccccttgagatttctgccagcatctcattgacctgaactgtgacacctagctatttctgtttcactctctaacaaatgtagaaagtgttagtaaggaagactggagtagcatacttagaaatggcaacaagcagtgcctcccacagctgcacagtatcccagtttgtcagaatcttccatgtactccttcaggtctactctatgcccttctcactctgttctctactccggaggctgatttccagggctacattccacaggccaccaggctttcccaggccaagttctytagaaatagatcctgacgtgggtatttgagtacacatgatgtattgagagagtgctcccaggagcaacctwattttggatacaagcaattcacaaggaacattttcacacttgaggaccatccaccatcagcaatatttctcagttgtgacaaacccaaaawtctcacaatgattacatgatttacacttttgctattcaactctttctgtacatacctactttagataaaatccactgaagaatgttagaagaccaaaacgtaacatgtaacaaatccatgatctcagtaaaatgtggcctactcttttcagaaaaaataaaatataataaaaaattagatgtgtcttatgtgattttccatttgttgttttgttccagtcccccaaatgagagcacctgcctctttatattttcaagaaaaattgtaaatacttatcccctgaggacattttgtgtggttttagccatttcagaaaattttatgttcagtccacagtgatttaaagatttttggtttaggacttaaagttgttaactttcctctatttgaaaagtataaatcatggaaataatactatatagattcagaacaaagactttaaagaca

SEQ ID NO: 283842 - DNA, 531 bp, Homo sapiens
acaagggtcacattccattcccagagctatgaacatctacttttytgggataggaatcttggtgatgtgaaacctccctaactgcacgtccattcataggctctctgcagggggaagcacatcacgtgctgttggctcgttctggcagcccaacctggcattgtctttacacaatcttgcatgcaattttgtatttaacaataatcaggaggatttcatcttttattccgtagcgatagtttcagggggtctccctacagagcaagaagtcatttcaaacagtaggtgcatgagagagaagagacaagtaaaaatgggatagggaacagttactttctagtgttatctgtaggttagcatggagccacaggcccaaagagaggcttctgaaaaacaacaacaacaacaacaacaatgtgttgcaaacacttaaaggaaatttatattattctgacaaaagtcacccatattgaattcctaaagaaatctcaaacatggtactcccaaaaaaaaaaaaaaaaaaaaagagaa

SEQ ID NO: 283843 - DNA, 531 bp, Homo sapiens
acaagggtcacattccattcccagagctatgaacatctacttttctgggataggaatcttggtgatgtgaaacctccctaactgcacgtccattcataggctctctgcagggggaagcacatcacgtgctgttggctcgttctggcagcccaacctggcattgtctttacacaatcttgcatgcaattttgtatttaacaataatcaggagsatttcatcttttattccgtagcgatagtttcagggggtctccctacagagcaagaagtcatttcaaacagtaggtgcatgagagagaagagacaagtaaaaatgggatagggaacagttactttctagtgttatctgtaggttagcatggagccacaggcccaaagagaggcttctgaaaaacaacaacaacaacaacaacaatgtgttgcaaacacttaaaggaaatttatattattctgacaaaagtcacccatattgaattcctaaagaaatctcaaacatggtactcccaaaaaaaaaaaaaaaaaaaaagagaa

SEQ ID NO: 283844 - DNA, 531 bp, Homo sapiens
acaagggtcacattccattcccagagctatgaacatctacttttctgggataggaatcttggtgatgtgaaacctccctaactgcacgtccattcataggctctctgcagggggaagcacatcacgtgctgttggctcgttctggcagcccaacctggcattgtctttacacaatcttgcatgcaattttgtatttaacaataatcaggaggatttcatcttttattccgtagcgatagtttcagggggtctccctacagagcaagaagtcatttcaaacagtaggtgcatgagagagaagagacaagtaaaaatgggatagggaacagttactttctagtgttatctgtaggttagcatggagccacaggcccaaagagaggcttytgaaaaacaacaacaacaacaacaacaatgtgttgcaaacacttaaaggaaatttatattattctgacaaaagtcacccatattgaattcctaaagaaatctcaaacatggtactcccaaaaaaaaaaaaaaaaaaaaagagaa

SEQ ID NO: 283845 - DNA, 603 bp, Homo sapiens
agaaagaaaaaatccaacaggaagaaaaaggttgtgaagttgtctaagtttgcatctaggagcaggggaaggagtacacatacgaaacaggtttaacgggatggtgaaagattaaaaagtaagttacttttataattgtatttcattaattcttttcaacatataggttactcaagacaaaaagaggagtttggatgaaatggcatagggctgactactggactaagaattctggattttattctgcaagctggtggagacacatcaaagggtattgaacaggaggctgacaggattacatctctgtgttacagacattaggtctttgcataaaagtatatgctcccttatattatacacttacagagggctggctttgtttaacttgtcctacataactttcagtactgaaagtgagcattataccattgatgaggttgctattaaacatatgtaaaacatctgtgctatcaataatttcaggtattgttataaaaatcagatgaaagaactggatatcataagaatatttacaacaactaaacatatagaagagatttttaaaaaggcytaaaaaaggatgctgcaatggttaactaggag

SEQ ID NO: 283846 - DNA, 513 bp, Homo sapiens
tggtcatttttaaaaaatttatatatgaatactttgtcttgttgatatgtcagaaactgaaaattctagtaaccggactcctctttgtctactatgcggggatggaggggtggtgtggtgggcaggtcctggcaaatattagctttatctttgcccttctgaataggattgacctagtttctatgataaaaatctttgtagggtataatttatgtattgggaatcaccttatcttttctcaaacttttcaccttcagtactttataaaacttaaatttactttagtaaatcactgtactttattaaagtttttattctttgtttttgaaaaatgcagagagcccatattgyacattaatccattctgatttctccccagtgttctgttttcaaaattcaaacaaattactaagttacatatgtttcagtcactaaaagttttgaccatggttctgctcctaactagctggataaagtatggggtatgtttattttacaaataaaataatggga

SEQ ID NO: 283847 - DNA, 384 bp, Homo sapiens
aagttttgaccatggttctgctcctaactagctggataaagtatggggtatgtttattttacaaataaaataatgggattggatgacagctttctcaccttttgcttttatgagcttatgagcttatgtactttgggaggctatacgacttggtatattacctatgaagtggcataatatcatccctacaaattatctgtatagtatttaatctattcatttctatgaaagtttaatctttatcaattcagtaaaataaagtaactaacacaatcttagaaagcagycaggttatgagcatcattgaaggtttattacaacgtactttccctcagctgtcaggacgtggcccattctaatgaacgaatgaaccaagcaaggcat

SEQ ID NO: 283848 - DNA, 384 bp, Homo sapiens
aagttttgaccatggttctgctcctaactagctggataaagtatggggtatgtttattttacaaataaaataatgggattggatgacagctttctcaccttttgcttttatgagcttatgagcttatgtactttgggaggctatacgacttggtatattacctatgaagtggcataatatcatccctacaaattatctgtatagtatttaatctattcatttctatgaaagtttaatctttatcaattcagtaaaataaagtaactaacacaatcttagaaagcagccaggttatgagcatcattgaaggtttattacaacgtactttccctcagctgtcagsacgtggcccattctaatgaacgaatgaaccaagcaaggcat

SEQ ID NO: 283849 - DNA, 605 bp, Homo sapiens
tttgttctaagctttttagattatttaatacccattttaagaatgatgaagatttgaattttaatatttagaactaatattataggcatttaaacatatatgatggtcaaagagtatgtttcaagctattgtctacatgttaaagtttttaggtagtcaaatttccattktatggtgtataaaatgtgttatgaacaacttcacagagaagttcaacacaaataaaacatttaataatcattgttttcataacaaccttcaattctgcttatatttaatattgaaaaattgaagtagactaggttattcagtttatccataaaagtttctatgggctcaactttttaccaaaaaattaaaactccatatttggatcccctttggtcagagtttggcagcttttcagaggaattatatcactaattcacccatgccttcatttgggtttgccccatagcacttttggaaaccagatcttatattcaggtactttatttgggattgattcaggcaggaaaagtgagtgaatggggaaagtgagcaacgaagggtgaaaaaaaatcaataaatagacacggatttacattttgccattgttagcaact

SEQ ID NO: 283850 - DNA, 586 bp, Homo sapiens
catgattaatcaacagaaaaatgcaaattaaaacaataatgagatacggctacacaccaatgagggtggctaaaataaagactgatcatattatgtcttggggaaggtgcagaagaactaaaactttcgtacattgctactaggaaagtaaaatggtaaaactactttggaaaacagtttgtcagtttcctaaaaaaaggaaaaatataacccccatattatccaaataatccaagtctagatattttcccaactcaacagaaagcatatatttatggaaagactagtacgtgaatgttcatagtattaagagttttatttgtaagagccaaaaattggaaaccattcaaatatctattgacaagtgaacaagtgaacaaactttagtattttcatacaatgaaatgytattaatacttaataataaaaaggaatgaacaattaatccacacaacatgtataaatcttaaaattattatgctaactgagaaacttcagtatctactatatgattccatttagcatctactatatagttctatttacataaaactatagaaaaggcaaataatctatagtagcataa

SEQ ID NO: 283851 - DNA, 510 bp, Homo sapiens
aatctctacccttttgcaagagtcattgtcaaattatgccctccaataggtaatatacagcttgagtcagtaatttcaactgtttgtatgcatttcaggtttggcaattacccttccaagctgtaaattgcctattttgagagcataatttgatttttaatgtttgtcttaacagccygatttgttttgtcttttgatttgtttcacattttagtaattaattttagactgaaaatgtctctcctaaaaggaaggtggagtttggaagcctttgagaactacagccatttgatactgacataaatttctgtctagggtcatagaccttaagcaaaaaatgccaggctccattttcttttctttggaaagaagtcatcacttcttttccaggagatatgctattttgagtttcaaatgcacactccataaccccccaaatataaatacacatgaattagcaaaattggccctaagaaatatactcaaaacagaagtgatatttttcaaggc

SEQ ID NO: 283852 - DNA, 422 bp, Homo sapiens
ccaattaaatggttaattatcagtctagagcacacatgttctcctggaactatgtgttggatatttaacccttcaatttaccgaattcaaacattccaaataaaaagtacttgtgcttggggagttgggagtgaatttgagatcttttggggggtggcttttttccacacctacytgttttatgacgattgtagattcatacagagttgcaagaaataatttcgaggaatctcatccatatttctccaggttttcccaaaggcaatatcttgcaaaattataatacaatatcacaactgggatactgacattgatgtggtagaaatacagaaacttccgtcgccacaaggattcttcatgttgcacttttatattcatacccacttttcttccactcactccaccccctctttaatccctag

SEQ ID NO: 283853 - DNA, 629 bp, Homo sapiens
tttctctgcatcctcaccagcatctggtgttgttacaattttttgttttagacgttttaataggtgtgtagggatatcttcttgtggttttaatttgcacttccctaacagctaatggtgttaaacatattttcaagtaattatttttcaactttatagtatttggaaaaatgcctgttcatgtcttttgccccctttctaaatggattgtttattttcttaattttgagttttgagatttctttatatgttctagacataggatagatactagattcttgggagatttgtgatttgcaaatctttctcttagtttgcagattgtaactctttgcatagccccagatcccaaagactttgttttaagttttrtagttttacattttatatttaaatccataatctattttgagttatttcagtttacagatgaggtttaaattgaagttttttttttcttttttgctggagattttaaatagctccagtactatttgttgagactctatctttgttgatggatttgttgagactctatctttcttctattgtatttcttttacaattttgttaaaaatcagttgcatttatttatatagatctatattttgggttctgtattctgttcc

SEQ ID NO: 283854 - DNA, 629 bp, Homo sapiens
tttctctgcatcctcaccagcatctggtgttgttacaattttttgttttagacgttttaataggtgtgtagggatatcttcttgtggttttaatttgcacttccctaacagctaatggtgttaaacatattttcaagtaattatttttcaactttatagtatttggaaaaatgcctgttcatgtcttttgccccctttctaaatggattgtttattttcttaattttgagttttgagatttctttatatgttctagacataggatagatactagattcttgggagatttgtgatttgcaaatctttctcttagtttgcagattgtaactctttgcatagccccagatcccaaagactttgttttaagttttgtagttttacattttatatttaaatccataatctattttgagttatttcagtttasagatgaggtttaaattgaagttttttttttcttttttgctggagattttaaatagctccagtactatttgttgagactctatctttgttgatggatttgttgagactctatctttcttctattgtatttcttttacaattttgttaaaaatcagttgcatttatttatatagatctatattttgggttctgtattctgttcc

SEQ ID NO: 283855 - DNA, 425 bp, Homo sapiens
gataaaaatgctcactagtgtaactgattaactctacatttataagcataacaatttcacttgtctttctatatcatcccatttatcttgggaagataagtaggaataacaattataatagcaaatatacaccatttttaaagttccattttatagtaatttagattttttatggcaaatttagtaacaaggccaaaattgagatgtttttattcttacagatttcattttacattgaaaagtggcactgtttttcttatgttgaagagtttactgaagaaacttcatatcagagatttagtgttttaatctataacagattgtgcatataataaaggacattttttcctattggaaatctaaaaaatatgtcaatttctcaaacataaattygtaaaataaaaattctggcagtggtcaagctc

SEQ ID NO: 283856 - DNA, 607 bp, Homo sapiens
aatcccaatcttgattaatctactcaatcttgcatctcaacagctaaatgtgataattacctcatacatactttaatctcctcaaacctgtaatagtttctctgactccctcaaactcaattgaggattatgtgtcttacgtttctgagaaacttcatttctgtatatttccaacattacatttaccaaccaacccaaatacagctaatatactctgccttgttgcttctcagcaagaataaactgtccatgacttatttattatttacctatttatttttttgagatggagtttcgctcttgttctggttggagtgcactrgcatgattttggctcactgcaacctccgcctcccaggttcaagtgattcttctgcctcagcctcccaagtaggtgggattccaggtgcatgccaccacacccagctaattttttgtatttttagtagagatggggtttcatcatgttggccaggctagtctcaaactcttgacctcaggtgatctgcctgcctcagccttccaaagtgcagggattacaggcgtgagccaccacgtacagcccatgactttctttaggatgaactcctcctttaatagacataaa

SEQ ID NO: 283857 - DNA, 607 bp, Homo sapiens
aatcccaatcttgattaatctactcaatcttgcatctcaacagctaaatgtgataattacctcatacatactttaatctcctcaaacctgtaatagtttctctgactccctcaaactcaattgaggattatgtgtcttacgtttctgagaaacttcatttctgtatatttccaacattacatttaccaaccaacccaaatacagctaatatactctgccttgttgcttctcagcaagaataaactgtccatgacttatttattatttacctatttatttttttgagatggagtttcgctcttgttctggttggagtgcactggcatgattttggctcactgcaacctccgcctcccaggttcaagygattcttctgcctcagcctcccaagtaggtgggattccaggtgcatgccaccacacccagctaattttttgtatttttagtagagatggggtttcatcatgttggccaggctagtctcaaactcttgacctcaggtgatctgcctgcctcagccttccaaagtgcagggattacaggcgtgagccaccacgtacagcccatgactttctttaggatgaactcctcctttaatagacataaa

SEQ ID NO: 283858 - DNA, 601 bp, Homo sapiens
tcccatgaaaccagcaaggccagtctcattcctgccatactcccccagcagccaacagtgcccaatttatacccaggcctctggtgcacagggctgagatcctgccccaggctacaagactccctgctgagagagcaagcatggctttcagtcctcacccttcccttcctgttgcggcttctgtgctcctatctgtacttcccgttccccacaccccaaccccctggactctgcccaggaaaatttgtcgtctttggaaattattacaaagttcagctggaagtctccttctccctgtggaccttccccaattccactggctgccctcctcaaggacccctgtgagataaattcagaaatggctatccttggcttccctggggaacaagagtrcctgcagttcttttcccacttcttttacttttctatttcactgggctctctaaattcatttcagctctaggtaaggttaaactcttctcccgtcttctggattttcaggttctccagggccgatgtatgtttggagatggatttccccctctcacacttcaggcactcagttttttggcagtctcatggagttttcagtggcaagccg

SEQ ID NO: 283859 - DNA, 608 bp, Homo sapiens
tggcattcacctgtggtgccagatacttgggaggctgtgatgggagggaggttgaggctatagtattcatgttcatggcactgccttccagcctgggttcagagctaggccccatctccaaaaaagaaaaagaaaaactttactcaaaattattgcaataaggatcgagtccattgcaaaaggagagataggttgaaacaaaaagtaggagagattttaagctcagaggtgagatagtgcaaaagtactggagaaagtagccaggagggtggtcaatgccaatagaccatctgtgtttgctaattgtcatttattgccccccttccctttcacagagactgggagataagggccctgtgtttctagcttattacatttaaaagaaaaggtttccaggtcttttggagagacattccttggttgtagaaaatttacatttcaaagaaacagagaaggtatttaagattgcaaaatttctaaaggaaatgctcaaagaaaagggaggtcaagggcccatactcakaaaaaaacctgtctaaagttaagtcaagatgaagggaagtcaagatcatcttggtcaatatacaatcaatcacatatctatccac

SEQ ID NO: 283860 - DNA, 520 bp, Homo sapiens
aaatttttttatttctgccttgatgtcattgtttacccaaaagtcattcaagagaaagttgtttagttttcatatacttatgtaactttaagatttcctcttagtattgatttctaattttattccactgtggtctaagaaggtatttgacatgattttgatttttttgaacttactgaaatttactttatggctaagcagatggtcaattttggagaatgttccatatgcagatgaaaaacatgkatgttctgttgttcttgcgtagaatgttctgtaagtatctattagttccatttggcctagagtccagtttatgtccagagtttttttgttgactctctgacctatctagtgttgtcagaggggtgttgaagtccttaactattattgcattgctatcagtttattttcttaggcctaatagtatttgttttatgaatctggatgcttaaaacgttaagtgttaagtgttgggtgtgtatatatttaagataattaaatcttcttattgtattga

SEQ ID NO: 283861 - DNA, 559 bp, Homo sapiens
acactttatcaacatataatgttcttctcttttttctttatactgttgttggcttaaattttgttttgtcttctataagagtatctacccctgctcactggttttccatttgcttgatagaccttttccacctttttactttgggtcttaggtgtccttatgtatgtctcttttaggcagaagattatagggtcttgttttttcattaatcagtttgtggcatttaaaactatctgacatattcagatacataatacatttactaatttctttcatatttatctccccctacttgcctgtaaacttcataaagacaggtactgttttgtctactgctggttctccagtatctaaaacagtgtctgatacatagtatccactcaataattatttctgaatgaattaatgaatgaaatgccagattatttctggcaattaaatacaacttatttgagccccaaagtgccaaatttcacattayaaatatctttgaaaaatctgatgaaaactgtatattctttctgcagaataattaatacacatgaagacacactcactt

SEQ ID NO: 283862 - DNA, 429 bp, Homo sapiens
tgaggtgggaggatagcttgagcctgggaatttgagattacagtgagccaaacggtgctactgcactccagcctgggtgacagagcaagaccctgtctcgggggaaaaagtaaaaaagaatagaggagaaaaagaaaaaatctatcaactcaaaattccatattcagtaaaatcactctctagctgaaattaagatacactcagatgaaggacaaataagagaatgtattgccataacacctgctcacaatgaagtactaaaggaatttgtttaaacaaaagagaaatagttccagaagaaacttagaacatcaggaataaagaaggggtagatrttcaatatattgacaaatataatagcttatccttctctttttgaatttgaaaaatatatttgatgatcaacttctagcaagacttaaaaagaaa

SEQ ID NO: 283863 - DNA, 999 bp, Homo sapiens
agattaaatgtcaggactaaggccatatctacatacagcaatcaagttagccaaagtggagtgaactcaatatgctttgttgtttccatgatgaagctgtgcagtcatcaaccatgtcaactgttcattgatccaacttagtctcttagaaacaatccagtcagctctgtagtaatccagtgactttggttataatcctaaatttgytgtcttttgtcttcctttaaaacttcataaggaaacacaattcagttaaaatgaccaaatctcttgaagactgaaaactaacttcaaatacaggatttctgcaaactacagatgctttccagaaatgactgcttacttaaacatactcattaaggttcacatttttgttttaattactgaacttttcttatgttatgtatttttctttgagtatatagtttcatcatgtttgtcaaattgcctcataagcaaaatgggttttggcaacatttgcctacctttttatatagcatgatgaacatacagttctcacacatagcataacagtagaaacaaatgtccaacaactaataacatwgtaggcatacagtgcaagactgaatgaggcttggcagcctccatgtacatttcagaagatgtatgaaaaaggctaggtgcccaagcagaagcctgctgcaggggcacagccctcatagagaacctccactagggcactgtggaggggaaatggagaccccacacagaatgttwtcttgttttatattattcttgtacatgtcctgtcttagaccttagatgatacctttcttttttttccttttctttttattttcttttttttttttttttggaaacagtgtcttcctctgtcacccaggctggagtgcagtggggttatctcagctcactgcagcctccacctcctgggttcaagcaattctcatgcctcagcctcccaagtagctggggttataggcacgtgccaccacagttggctaatttttgtatttt

SEQ ID NO: 283864 - DNA, 540 bp, Homo sapiens
ttaaagttaaaaaaagtcttataggaactctggtgagcacaacctaaaatccaattagcaaatgtcagagtggagttcaaaggacatctgtgatagttttgataaagttactgctctggaaagaactgagatatactactcctcgccacggtgattgttcacgtgtgggtaccttcactcagtggcaccagttatgaatcctgtaagtgacctattaataactgtaatacgaatgaaatgtgctgcctagaaaatraggttgcctggctctcataaaataccattttcttttcataatttacgggatatgttgtccaaagagatgaagtatttcacgttggtcagttgtgcctctgcataggtctaataccatgtggaatatttttaatggttgactgataaaacattgtttcctgcaactcagcccttttgtgattgtaaacatcaaggctacagacacaatttcttacctggtttacctctccagtagttacaaatactattagagactcaaataaagcaagcaaacaactttcagta

SEQ ID NO: 283865 - DNA, 486 bp, Homo sapiens
tttggaaggccgaggtgggcagattgcttgagcccaggagttcgagaccagcctgggcaacatagcaagacccccatctctaccaaaaaaaaaaattagccaagtgtcatggcgtgcacctaaagtcctagctactagagaggctgargtgggaggatcacttgaggccaggattttgaggctacagtgagctgagatcacaccatcacactccagcctgaaaaaaaaaaacatcctggcaaaagtcagattaggaaaaaatgacttgagtgaggctttatcttaaaaaagaaaattaagaattataaaaatatacacaattgttcttacatttagccaaatttaaattttattttcaactaaatatcgaaagatgaatcaaattttttccctgttttggacagaattcagcttgtgctttgctagctcagctctgccccctggaggaggagttgctatcttggtttatttgcatagtgcaatcat

SEQ ID NO: 283866 - DNA, 536 bp, Homo sapiens
tttaaaaagccacgttttctcttgttacagggcctttttgcacatgctatgtagcatttctatcccattttacttagttaactcctatttatttttttcattgacaacttattgattacatcctcaagccttcccagatcacattagccaggccagacctcattatatgctttcatgattccatgcacattttgcattctttccaatcagaccactaatgcagcagtcatgcatgtttttatccccagtgcttattaaaaagaacccgtcacgtaatagccgctcattaaatatttgtgtaacaaaaacagaacgaatacgtaggttaagttcaaccagagggatggtatttactgagagtaacggggagccaggatttggaactctgargaagaattgagagggatcaggtaaaggaagtacagcccctgaaggagactgaaaagaaccagccaaagaggagaaagggacacttagaaagcacagtgtcatgaagcattttaagcaggaaagaatggttagcattgccaaaatag

SEQ ID NO: 283867 - DNA, 567 bp, Homo sapiens
ctagttcacaaaattttcactttgtattcattgcctttccttcccctgattcaattcagaccattaggtatttacctgattctcacttaaatccacagaagcaccacaaacagatccaaacttagggttcagacctcarttccttgcctgagctttgactttttcttttccaccctgatatacatacacaccgtgacttgttcataaaagctctgcagcaaagttgaataatatgtaaattttatgttgtaatgaattaggtcctaagatctttaaaggtcagacacctggtataatacatcacattctttaatatcaactacaaaataactgtaataaatttttccaacaccacatcctcacacactgttacccacaaggaagcaccaaaggaaatgtgtcatttgtcaaaacatgcagaaaaactggcatgtgtacaagtcactttaaaagtaatgctcaggttagaaatagctttccaaatgactgttttgtggttaaacaaagaaaaacacattaatacttaactaaaattatctcctgatatgcgaaaagaaaaataaataa

SEQ ID NO: 283868 - DNA, 457 bp, Homo sapiens
tagcttcttattcaaggccctgtataatgggtttcaaagatcttccctttttgctttccaatctttcccttcacatactccatttgccagcccatctgttctctggctgtgccccaagtgtctagcttccaccttattgcccttggccagatttatattccttatgatcacttgttgaaatttttcttctacttgaagtgctaactcaaattctatttgtaccataataccttttagtgtcttgcattccagttatttatttttcatgctagatcataagatcttcraagacaggatcagaggcagtatttgtatacaatgcacgatcagcaagtcaccataattttaagtgatccacaaaataataaaattaatcgtaaggttttagtcctcctgaacctctatatacgagctctatcaactcagccaaatagtcaaaagcttcagtaatgtgaat

SEQ ID NO: 283869 - DNA, 588 bp, Homo sapiens
ttattgccaaatctaaaatggactttctgagctggggcaaatgtgttggcatgaactcccccaacaaacagctgaacacctgttttcttgctccaaacaaacccagcgtaaagctcattagacaaactgaaggaagtaaagagatcaagagtgaacctttcagtgttttaattaatttgttcaaaatgggcaaagaacaaaggagcaatttaaggaaaagaaacgtacagtaatcacaggaaggcaatttaaagtacgttgacccccccaaaaatgttttagaccataacacataatgctyatgaagctgtagtaagagggacgtgctcatactctgctggtagaagtgtacatttctttgcgtttctggaaaatgatttagtagtaggtatctgctaggcaatttgtcagtaagacccattcattctttcattcaacaaaggattattgagtgcttgatttgtgcctgacagtgaagaaaacaggcaaaaactcctgccctcgtggagctgatattctgatgaggagacgcacacaattaacaagcaaataattgaatagccagcatgccagatgttggtaagaggt

SEQ ID NO: 283870 - DNA, 588 bp, Homo sapiens
ttattgccaaatctaaaatggactttctgagctggggcaaatgtgttggcatgaactcccccaacaaacagctgaacacctgttttcttgctccaaacaaacccagcgtaaagctcattagacaaactgaaggaagtaaagagatcaagagtgaacctttcagtgttttaattaatttgttcaaaatgggcaaagaacaaaggagcaatttaaggaaaagaaacgtacagtaatcacaggaaggcaatttaaagtacgttgacccccccaaaaatgttttagaccataacacataatgctcatgaagctgtagtaagagggaygtgctcatactctgctggtagaagtgtacatttctttgcgtttctggaaaatgatttagtagtaggtatctgctaggcaatttgtcagtaagacccattcattctttcattcaacaaaggattattgagtgcttgatttgtgcctgacagtgaagaaaacaggcaaaaactcctgccctcgtggagctgatattctgatgaggagacgcacacaattaacaagcaaataattgaatagccagcatgccagatgttggtaagaggt

SEQ ID NO: 283871 - DNA, 588 bp, Homo sapiens
ttattgccaaatctaaaatggactttctgagctggggcaaatgtgttggcatgaactcccccaacaaacagctgaacacctgttttcttgctccaaacaaacccagcgtaaagctcattagacaaactgaaggaagtaaagagatcaagagtgaacctttcagtgttttaattaatttgttcaaaatgggcaaagaacaaaggagcaatttaaggaaaagaaacgtacagtaatcacaggaaggcaatttaaagtacgttgacccccccaaaaatgttttagaccataacacataatgctcatgaagctgtagtaagagggacgtgctcatactctgctggtagaagtgtacatttctttgcgtttctggaaaatgatttagtagtaggtatctgctaggcaatttgtcagtaagacccattcattctttcattcaacaaaggattattgagtgcttgatttgtgcctgacagtgaagaaaacaggcaaaaactcctgccctcgtggagctgatattctgatgaggagaygcacacaattaacaagcaaataattgaatagccagcatgccagatgttggtaagaggt

SEQ ID NO: 283872 - DNA, 442 bp, Homo sapiens
tattttcaccattttgttcaacataatactgaaagttttaacaagagcaactagtcaaaataaaaaaaattaagggcatgtaaattggaaaggaggaagtaaaattgcccccatttgcaaatgacatgatcatatgtatagaaaactctaaagactccagttaaaaaaaactattagagaaataataaatgaattcagtaaagctgcagaatacaaaatcagcataccaaagttagtggcatttctatgcactaatagtgaaccatttaaaaaaaaatcaagaaagtaacaatacgtacaaaaaaagaataygcaaataggtgaaagatctttagaatgaaaactataaaccattgatgaaagaaactgaaaacaacacaaataaatggaaagatatcctgtgcttatggattagaagaattactattcctgaaatttctat

SEQ ID NO: 283873 - DNA, 383 bp, Homo sapiens
gaagaagacttaactatccaaaatatatacatgcctaacagtgtagcacccagattcctaaaacaagtttttcttgacctatgaaaatatttagacagcacacaataatagtgagggactttaataattgagacagaaaactaacaaagaaattgtraacttaaacttgtcagttgacaaatgggacctaatagacatctacagaataccacacctaacaaccacagagtatacagacttctcatctgcacatggaacttattctaagattgaccacacgctcagtcataaagcaagtctcaataaattcaaaaaaattgaaatcctaccaagaacagtctcagaccacagtgcaataaaaatggaaattaataccaagaagg

SEQ ID NO: 283874 - DNA, 574 bp, Homo sapiens
acagcagaacataataaatgtttgtttagaaaacagtccaacatgtctgaaactctgtcatatgtgcatctacttttccaactatgaattttatgaaatataaatgaaaattaactcaktccaatgaaaattcagtatccaaattgagatgtccttcaggtgtaaaatacactggatgtgatagactttgtatgaataaaacacattaagaaatgtattatgaacaattttatatcaattccatgccaaaatattttggatatatttggttacataaaatgtattgttaaaattaattttgcttatttttcttttttagtgtagctagaaaaattaaaattgcatatatggcttgcattgtatttccgttggtgagtactggtttacatcatttagaaagagaggtctttttgcatagagcagagttcagaatgatcttaggacttttaacatagaggaagatacatccattgccatacactaaacatatcttaggagataaatgactttggttgacccagttccttaatcagttatgccaataattttcccttggccacttgcttgtgaatat

SEQ ID NO: 283875 - DNA, 574 bp, Homo sapiens
acagcagaacataataaatgtttgtttagaaaacagtccaacatgtctgaaactctgtcatatgtgcatctacttttccaactatgaattttatgaaatataaatgaaaattaactcagtccaatgaaaattcagtatccaaattgagatgtccttcaggtgtaaaatacactggatgtgatagactttgtatgaataaaacacattaagaaatgtattatgaacaattttatatcaattccatgccaaaatattttggatatatttggttacataaaatgtattgttaaaattaattttgcttatttttcttttttagtgtagctagaaaaattaaaattgcatatatggcttgcattgtatttccgttggtgagtactggtttacatcatttagaaagagaggtctttttgcatagagcagagttcagaatgatcttaggacttttaacatagaggaagatacatccattgccatacactaaacatatcttaggagataaatgrctttggttgacccagttccttaatcagttatgccaataattttcccttggccacttgcttgtgaatat

SEQ ID NO: 283876 - DNA, 941 bp, Homo sapiens
gataccactttgtcttccagctaccattccatgtccctactttattttctacccaaattcctaagaggatctgctgcatacttccttatttctgctccactctattatgacttctctttccattacactgacattactctgaataaagattagtgaacatgcagctgaaaaattcaatagccacacttctttcttcatcttgtttgatatattgaaagtattccatacaatcaactactttttttttttgaaatgctctttccttttagtttctagaagaacctctactcaagcttcatctacctcacttgctgcttctgtgaagtctcttatgctattgcttctcttctattatgcctytaaatgttgtcatgtttttagagctcactcttttccctcttttctctttatattctctccttgagtgaacccatttatctcaatggatgtacattccacactggtgctgtwgataccactttgtcttccagctaccattccatgtccctactttattttctacccaaattcctaagaggatctgctgcatacttccttatttctgctccactctattatgacttctctttccattacactgacattactctgaataaagattagtgaacatgcagctgaaaaattcaatagccacacttctttcttcatcttgtttgatatattgaaagtattccatacaatcaactactttttttttttgaaatgctctttccttttagtttctagaagaacctctactcaagcttcatctacctcacttgctgcttctgtgaagtctcttatgctattgcttctcttctattatgcctctaaatgttgtcatgtttttagagctcactcttttccctcttttctctttatattctctccttgagtgawcccatttatctcaatggatgtacattccacactggtgctgt

SEQ ID NO: 283877 - DNA, 582 bp, Homo sapiens
agtcagctttggaggagatatccgctgcattcacaaaagtttgttacaacgaagtccaacattgaattaaacacaaaaacacacaccaggaaatccaagataaaaggagagaaaaagataacagaaacagaccaacaagatatccagatataagaattgttaggctcagaacttttgattatcacctccaaagtatagtatctatttttgattacttttgttcaaaaatatagaagagaaaaatggagaatttcttcyatagaaatggaatcaaggaaacatttatataaaaattttacagaaataaaaccctcaagttaaaacttaataattatatttaaccacaagtaagagaaagcagagagaattaggaaactgggatccaggtaagaagaaattgtgtaagctgaagaatggatacaaaaaatgataggtaatatatttaaaaataagagatatgggaggtatagacaactctaacatatgtgtaattagagttccagaagggaagaagagagaaaagaggagaaaaatattactttcaaaactttgaagtttatatgcaaatgtacactttcgcca

SEQ ID NO: 283878 - DNA, 582 bp, Homo sapiens
agtcagctttggaggagatatccgctgcattcacaaaagtttgttacaacgaagtccaacattgaattaaacacaaaaacacacaccaggaaatccaagataaaaggagagaaaaagataacagaaacagaccaacaagatatccagatataagaattgttaggctcagaacttttgattatcacctccaaagtatagtatctatttttgattacttttgttcaaaaatatagaagagaaaaatggagaatttcttccatagaaatggaatcaaggaaacatttatataaaaattttacagaaataaaaccctcaagttaaaacttaataattatatttaaccacaagtaagagaaagcagagagaattaggaaactgggatccaggtaagaagaaattgtgtaagctgaagaatggatacaaaaaatgataggtaatatatttaaaaataagagatatgggaggtatagacaactctaacatatgtgtaattagagttccagaaggraagaagagagaaaagaggagaaaaatattactttcaaaactttgaagtttatatgcaaatgtacactttcgcca

SEQ ID NO: 283879 - DNA, 513 bp, Homo sapiens
ttttaattttctcattttattcatcagttttttgcctttttcccttttgctttcctttttyctcctctttttctattttgtcttccataatgcaacttctagggaagaaaagaagaatgctttgcaaagtgggtggggaaagacagggcctaaagtagataattcatatttcttttttcattactctataggcctcactccaaaattacgataaattttcatcttcaaaagtatcatctggaaatgtaagaaatattgaagacaagaataatatatggtttgacttcaaatttgtctgtttttgtcttaaagacaagaacaacatatggtttgacttcaaatttgtctgtttttgtcttaaagacaagaacaatatatggtttgacttcaaatttgtctgtttttatcttaaagacaagaacaatatatagtttgacttcaaatttgtctgttgtagaaaaagaaaattgactatttcatgcttattaggagaaatagaggtataccagttca

SEQ ID NO: 283880 - DNA, 429 bp, Homo sapiens
tgtcttcctttcattatgtgtatctgccagatacaaccagtgactataagcattacataaaaggacaactatctgtcatggaaagactccaaggtggcccccatgatctctatatcttgatattcayactcttatttgatccttttaccttatgtgatcctttctacttgaataaaggcaagccctgtgaattgcctttaatcgataaaatatggcaaagacgataagatgtcatttctataattacattacacaggtttgtgacttctcctctctgagaagattctgtcctttactgtctttgaagaagcaagcggctgcgttggcatatacctaagaactaggggtagcaagaaactgaaacccccaacaactgtaaggaagtgaattctgctgaaaccacataagcctggaaatggatcttcccag

SEQ ID NO: 283881 - DNA, 959 bp, Homo sapiens
tgtcttcctttcattatgtgtatctgccagatacaaccagtgactataagcattacataaaaggacaactatctgtcatggaaagactccaaggtggcccccatgatctctatatcttgatattcatactcttatttgatccttttaccttatgtgatcctttctacttgaataaaggcaagccctgtgaattgcctttaatcgataaaatatggcaaagacgataagatgtcatttctataattacattacacaggtttgtgacttctcctctctgagaagattctgtcctttactgtctttgaagaagcaagcggctgcgttggyatatacctaagaactaggggtagcaagaaactgaaacccccaacaactgtaaggaagtgaattctgctgaaaccacataagcctggaaatggatcttcccagwataatctggttggctttatwtagttaggattctctttggggctggaattgcggtgaatctcattgaagccatatggctgagaatatggaacaggagtttcccaaaagacaatttggatgcccttattagagaaattagctatgagtggtgaggagagaactgacagatgggcacgctatctgagagttcacaaacatttactagaactgagacagaaaaaagaactactaggcactgagtgaaggtattattgtttcttttatgattaaatttagtgttagtattttacatgacccactgtactttttagataacttttaaaaagctttttgatgtcattattctagacacttgagttttatgagtaaatgataattgacagtagagttccccaaacaatttgaaggcatagagtagcagcttgcccttgagtaaaaggtgacataatggcgaacaagactgatgggaattgtgtataagctttagcgactttcttaatgctgtagaattttaggccattgagttaatt

SEQ ID NO: 283882 - DNA, 529 bp, Homo sapiens
ataatctggttggctttatatagttaggattctctttggggctggaattgyggtgaatctcattgaagccatatggctgagaatatggaacaggagtttcccaaaagacaatttggatgcccttattagagaaattagctatgagtggtgaggagagaactgacagatgggcacgctatctgagagttcacaaacatttactagaactgagacagaaaaaagaactactaggcactgagtgaaggtattattgtttcttttatgattaaatttagtgttagtattttacatgacccactgtactttttagataacttttaaaaagctttttgatgtcattattctagacacttgagttttatgagtaaatgataattgacagtagagttccccaaacaatttgaaggcatagagtagcagcttgcccttgagtaaaaggtgacataatggcgaacaagactgatgggaattgtgtataagctttagcgactttcttaatgctgtagaattttaggccattgagttaatt

SEQ ID NO: 283883 - DNA, 529 bp, Homo sapiens
ataatctggttggctttatatagttaggattctctttggggctggaattgcggtgaatctcattgaagccatatggctgagaatatggaacaggagtttcccaaaagacaatttggatgcccttattagagaaattagctatgagtggtgaggagagaactgacagatgggcacgctatctgagagttcacaaacatttactagaactgagacagaaaaaagaactactaggcactgagtraaggtattattgtttcttttatgattaaatttagtgttagtattttacatgacccactgtactttttagataacttttaaaaagctttttgatgtcattattctagacacttgagttttatgagtaaatgataattgacagtagagttccccaaacaatttgaaggcatagagtagcagcttgcccttgagtaaaaggtgacataatggcgaacaagactgatgggaattgtgtataagctttagcgactttcttaatgctgtagaattttaggccattgagttaatt

SEQ ID NO: 283884 - DNA, 484 bp, Homo sapiens
tgcctcagcttcccaaaagctgcaactacagacttgcaccgccatgcctggctaccttttgaaatttttttttagagatgggagtttcatcatgttgcccaggctggtcttgaactatagggcccaagtcatccccctgccttggcttcccaaagtactgggattacaagcatgaaccactgtgccatgccataattcagttttctgatgccagttatataaagtgaaagtcaaatatcccggctggactgatataacctaaaagttgccacttcttaccattccctgtttgctttggtctgcattctcattttgttagaagagaggcagcagtgttatggtcaaaagaacacttgagattagacctgcattccgatttcagctgcatccagtccattcatttgtgtgtgccctagccttcccatttatgaaatgagaatagcagtacttgtctcacaggactgycattgtgtggagatgaata

SEQ ID NO: 283885 - DNA, 585 bp, Homo sapiens
gataatcccagcatagttaccatggtatactatttataaagacctgccatttggttgtaatttttcaactgattagagcttaatttctcttgtaaattgcctacaagtaacaaatataccatagcrggatgtccaggtttatggcaaagtgaaatttatctggatgggtttctttccttctaaagtaaaacacagaactgaggttttcatttcctttatatccagattcacaggaaaaaggaagacacagatgaactgactgtaatagaaatgaaaatacaaaactgtaatgaaagagaaacagtggtttttcctttaaatatattatgttctcttgttgccttatttgcatctttctggaatgacaagacatttgtacaaaaataaagaggagaccttctacctgagcatatttgaatcatttattttttcactcaaagcctttaaataaaccagttcatattatgttcttctctctccctctgcctctaccaccctctgtctcaaatgcatccacctcattacaacaagcgtcactcatttttagattccaatttgccaccatcccacacagacctgctgttc

SEQ ID NO: 283886 - DNA, 518 bp, Homo sapiens
aatgcagtcctggagatacacttcagaaaacttcttatgttgagaaactagaaactagaaggctactcaaggcgttggaatttgctagagatttgtttaatccttatctgaggttgcagcaacacattaatagcagaaggttagcactgtccatcgtaaaattgcagtaatatataaagcatagcaaatgtagcttttaaaaattttcaaaaacaacttccaagtaacccatatgttcataggctgcttatatcgatgcaggataatttatgtaccaaacacatatgtgattcctaggacatatttaggagtgtacagtgttttaaaggtttttaagttgagatcatctatttgtrtatatgacttgatgatgagtgtctatactatgcacttaagtcatcctattatctaaaaggaatacactgcagcttaacttttccaaagtgttctgtaaacttgatacctaacttctaaagttcatgaaatgtgaatttaaaagcaatctaagcaatcagtta

SEQ ID NO: 283887 - DNA, 528 bp, Homo sapiens
aggcatggctgcggtagcctattcctagcttgtgacccagtctcagcagtgacaacccgaggttcccttatccttcagtcctgactggggcccaagactgtatagtgtctgttaaaggctaggtttaaaaatagaaccttgctgtagccacttaggtctcagagagggtgtgggaccctgcatgagctccccgctggagtagttctgtctcacagtcttccagcagctcctgtgttcatttcaggacttgggatggtcgaggggccctctcgtggccaggattggatggcaatgtgggctgctggaagtctcatgcttaccctttccctgygttgggaagtcattctcggctcccagccaatcctggctaagtaggctacttctcttccttctcctttcttgcatttggtgttttctgtcacttttctgttgcataccagtgttctcttggatgatgtatttgaagtgtgattgtctgtataccattttggttcttctcaatggaggaggcaagcatgaaatgctagt

SEQ ID NO: 283888 - DNA, 635 bp, Homo sapiens
ggtttttattataatacattttggaagctgaaggtaataatccttgtaattattcccccttctcttttgttttgttttcttttatttatttattatttgtgtgtgtgtgtgtgtgtgtgtgtgtgtgtgtgcatgtgtgtgctgtactagtaagtaaaatgctggatattgacttaatgtagatatcctttatcatctcaataagtatgtttctattgacagtgtacagaagcttttattttcttttttacaggatgttaacgtttattgactttttgggaactatgtagttatgtatttgtttccccttaaccatttatttataaatctgatatatttatagatttccaattgttaaactgaagagtatttttggctattctcttttggttatgttctcataatctactgtagattttcaaacctttattaactgagtcaggtcgtgtgtgtgtrtgtgtgtgtgtgtgtgtgtgtgtgtgtgtggtattcatcttgacttcctatcatatttagggttactctaaaacatgagttggggcctttcagtattgttttatgcagtttaatactggaactatctgtttttcaaggtcggagggaaatttttccttcacaactgctttctaaactgt

SEQ ID NO: 283889 - DNA, 618 bp, Homo sapiens
aataaatcaagcattaccattttgtgtcttcatctccataatcaatgctaatccaaaacttcgtgggattttttcctattaaattctgatagtcccttttggacaagagaatgttttttttttcttacagatttccctgcaggatactttcacttgtctgaaattcccataggtgcagttccccaaagtgctagggcctcagtatctgagataatagagtagaatgtagagtcctggaatacaacaatgttatgraaagataattttcagtaaagggtaaaatcatgactctcagatagatataaaaatgaatacaaattaaagattttattgaactcatacttaatgaggaaataagtagatgttaaaactgggtcaaaagagaatccaaagaacagaaaaatacatagattggaaatattaatatgactgtgaaaattgaagcaaaactgggtttcctgttagggacgattacaaagatgaagaaatagaagaaaacagacagtagaaaacatttagcatcaaaaaagaatgaccatctaagtcagtgtcaattgagtcaattgaacctctactgggcaggatggaatttacatgtgtttagacaagaattatttt

SEQ ID NO: 283890 - DNA, 607 bp, Homo sapiens
aggatgcgcacctgggagacaggcctatgccttcctccgaagatgattttgagggctccaaatttaaaggggaaagggttggatattgagaagtacacaattttcatgtaagaggagggtaggaaaaaatagtcattcatgcctttggctcagtgaatctgcattttttttaaatatatataagatgacatagaaaatggaaccggggaacaatcagataygcatttgtgtcaggtgggcaggggggtgactgcacctgtacagataagatatcaatttacattgccatggtgaaatttcaacagaagcactttagggtaaagatcttggagctcactaggaatttccttgtggacaaaatatggaggaggcatgtagcttttcatcttgtagccatcttatttaggaacaaaaagggggaggcaggtttctgtgacccagttatcagcttaacttttccctttggcttaatgagtttggggtcccaagatttatttccctttcacactgattacctaaagctagctgtgctttgtattaattattattattatttttgcttaagaagagttgttcctcagtatccactaagaattggttccaggat

SEQ ID NO: 283891 - DNA, 573 bp, Homo sapiens
tcagaaactttcctattcacatcacagtatattaatcctcccaaggagcatgtatattttaacaaggatcaaagtcataagtttaagtgcttagaataaaattttgaacatcagtggacttacagctgggaaaagtgcctacctattcaaaagagtaacccatttttttctaataaaatattccagagagccttatgcatcaattcatttttcaatgaccttgtagtgctcttctgagataaaatttaagcttaattttgggagagattaacattgtatagggtgtcttgcaatattcggaattggagttgyaccaagtcaaggtaaaatacttagaagcattgtcctatgttttttctcatagaacttgtttcgttgcccacttatatccaaagcatgtctaaatgtattcatttatttatcttcttttcacataaattggcttcacacaagttaggatttaagagataattttaggaaaattaggatattaaataaaaataaatatatatatttatttaagccattccttaggaattcttaatgaaggtaatagtaaaaggtaattagaaa

SEQ ID NO: 283892 - DNA, 571 bp, Homo sapiens
acccttgaagtcccaagcctatagaatattgagttatgatgacagagaagtgccataggaaaaaaaatcctgaaacacatttgttctctgggaggaattctttacctgggaaaaaaatatgtcatccaaagaagaggaatccaaataatccactgggcagaggccttttgatctccagaaataagtattttgaggtatcttcttcctctttagatgctgagcatgggctcatcgtggcccaactctatagaaatagcactttgggaggccaaattgggtrgattacttgaggtcaggtacaatttctatagaaatacagaggacttagctgagtcccacatggtcctgtcttggcttaggttgacataacaaagtaacatagactgggtggtttaagcaacagaaatttacttttcacaggtctggaggctggaaaattcaagatcaaggtgccagcaggataggtttcattctgaggacacttctctcggaaggtctgaggacctcctcactgaatgctcacatgacctcttctttgtgcagagagagagagagagagagagagcgagag

SEQ ID NO: 283893 - DNA, 558 bp, Homo sapiens
tgattaaaactgacattgttaatttaagaaaagtatatatcctgtgataaaagaggcttctaagtaaaatggttacttgaggaggatgtctaaagcccccatttggtctttacaagtgacagaataaaaacacggcagaatgaagmaataactagggtcattttattttttaaaatttagaggaagtcaagcatagtacaagtgggaacaaaatgaagaaaaacacataggacaaattatcaactccataatgaaaaaaaaaaactgtcaaaagaaatacagagaagagttattggcaaaagtcattttgagcttctactataggaaaggctaaagaatgaggctggcccacggggaaatgagaccacaactgtataacgcgtagatttcctttccttgccatgtaactacactattctgaagtaactgtgctggaagatcaaatcatttttgcaatcttttcaagtcaaatggcaagataactctttaaggaacaatttatctctcaagcggcaggagtagtatcaaagagtctggacacagccacaaaaggcacct

SEQ ID NO: 283894 - DNA, 597 bp, Homo sapiens
actgctgtaaaaacagcagtttatacacatttgtttccttcccatggttgtttccttctcagcgtaggcacagagcctttgagaagggcagcctctgaacaagggagccaggaacgcaggtaggacatgtcttttgcaggcatgttcagccctagcaggatgcaatccttcaagctggaattccactgggtatttgagagggaccaaggtaatgggtagagaggaagccttcaacaggactcacatcttggtccaggcctcctctctcactatccaagtccattccaagttttaggaccctggggggcaacaatcaggcccacccacttcaacagggacagattcttcaatctgtgcccagttcacacacacctgcttccgctggtcgcrcagttaaagagaattagccttatggtaagagacagaccactttctctctgcccctcactggcacctctcttcagcatcttcacaggaaccgctgggaagatggaggcctgccttctcagaataggtacttttaaaagaagacataaaaaggaccaacaaaatatcaaaaacagttaaacatcacttatcatcagaaaaatgcgcatt

SEQ ID NO: 283895 - DNA, 749 bp, Homo sapiens
aaatgtacatatataatgcatgcaatatatacatgtatatataatatatagtttagtatattatatgacaaattatatatagtataaggtatattaaatgtattatagtcagatgatatatatactattctacttcactatttttctgctgcttgatttttaaaataacattaacattatgcttttaaaatttattcttgttgatatctgtgctatgattcatttatttttactgctgcttccagttccactctatgaatataccacagtggggcttcaactatatcattaatgttttactcctaaaactgagttgggcatayacaggtgttaactatattattccttaagattctttgtaagtagtaaatattttctaataaagctaagagtaaaaaagtaggttatccaatgtgtggttttattcggtcttccatgcagacaaaatcatgtactgctcaatcttgtagagtccaccttggacttatcagatttatcttgggagagattacttgagctaactgccttgtagtaatcattctacaatataaacatacatcaaatcatcacatcatataccttaaatatatgcaattttttttgtaaattatacctcaataagcctggaaaaataaataaaagttaaataaaatagtatcgtgtgcttctgacatcattggagctaagatgatgtggagcttgatttcagatggcagaggcagggaagggagtaaagtaggcaaggtaag

SEQ ID NO: 283896 - DNA, 589 bp, Homo sapiens
gtgcaacacacatgaatgcatggcttaagcagatattatgcaaatgattatagaataataaaatcagatgtccaaagcaaagtatttccattaccatcaacccatggcaaggttccctattctattyttaagcagcttcaaatctacttgtgatcttttatcacaatttcattttcataacaactttcctagtttatagaatgtttaccatctatatgtttcctatacagaagaaaacaaagtctcccactgtatctatttctatagcaagattttgtaggaaatgttgcctatcaaggaatatcctttcaattttcacccacatggaaaatcaaacttctcttcagacctactaaaactcgctttacaatttccagtctatttcaagcttcatttgaaaaagtgactttttttagagaccagaaaaaacctaattctgcttttctttttcttcttttttttggggggagggtacagagtctcactctgttgccccagctggagtgcaatggcccaatctaagctcactgcagcctctgcctcccaggttcaagagattctcctgcctcaaccacccaaatagctggga

SEQ ID NO: 283897 - DNA, 589 bp, Homo sapiens
gtgcaacacacatgaatgcatggcttaagcagatattatgcaaatgattatagaataataaaatcagatgtccaaagcaaagtatttccattaccatcaacccatggcaaggttccctattctatttttaagcagcttcaaatctacttgtgatcttttatcacaatttcattttcataacaactttcctagtttatagaatgtttaccatctatatgtttcctatacagaagaaaacaaagtctcccactgtatctatttctatagcaagattttgtaggaaatgttgcctatcaaggaatatcctttcaattttcacccacatggaaaatcaaactkctcttcagacctactaaaactcgctttacaatttccagtctatttcaagcttcatttgaaaaagtgactttttttagagaccagaaaaaacctaattctgcttttctttttcttcttttttttggggggagggtacagagtctcactctgttgccccagctggagtgcaatggcccaatctaagctcactgcagcctctgcctcccaggttcaagagattctcctgcctcaaccacccaaatagctggga

SEQ ID NO: 283898 - DNA, 641 bp, Homo sapiens
taccatgcaaactatttttaagtgtgcattttgctggaatgaaatacattcacgatgtttcactgtcatcaccrctattcagccacatcactcttcaccaagtaaattgtacctgatgaagtacaatttgatgatgtacttgatgaaattgtaaagtttcaattgaaactttataccaattaaagaataatttcccatttccatctcccccaccccttggaaaccagcattctactttctgttttatgtgtgctctaaggacctcatataaatggagttgcatagttttggtcttcttgtaactggcttatttcacctcgcataatgtcctcaaggttcatctatgttgcagcatgtctgaatttcattcttttgtagggctgaataatattccattttatgtatatacaacattttgctgcctattcaacagtcgaaggacacaagtttcttttatagtttagctattgtgtaaagcagctataaacataggtgtaaaaatgtctctttgagaccctgctttcaacttggagggttatattcccagaagacttcaatgggaaaagcaaaatctctttaaaaattggtgctgtcatggacataaggatgaaataacagactgaggacaccaaaagaaagga

SEQ ID NO: 283899 - DNA, 641 bp, Homo sapiens
taccatgcaaactatttttaagtgtgcattttgctggaatgaaatacattcacgatgtttcactgtcatcaccactattcagccacatcactcttcaccaagtaaattgtacctgatgaagtacaatttgatgatgtacttgatgaaattgtaaagtttcaattgaaactttayaccaattaaagaataatttcccatttccatctcccccaccccttggaaaccagcattctactttctgttttatgtgtgctctaaggacctcatataaatggagttgcatagttttggtcttcttgtaactggcttatttcacctcgcataatgtcctcaaggttcatctatgttgcagcatgtctgaatttcattcttttgtagggctgaataatattccattttatgtatatacaacattttgctgcctattcaacagtcgaaggacacaagtttcttttatagtttagctattgtgtaaagcagctataaacataggtgtaaaaatgtctctttgagaccctgctttcaacttggagggttatattcccagaagacttcaatgggaaaagcaaaatctctttaaaaattggtgctgtcatggacataaggatgaaataacagactgaggacaccaaaagaaagga

SEQ ID NO: 283900 - DNA, 641 bp, Homo sapiens
taccatgcaaactatttttaagtgtgcattttgctggaatgaaatacattcacgatgtttcactgtcatcaccactattcagccacatcactcttcaccaagtaaattgtacctgatgaagtacaatttgatgatgtacttgatgaaattgtaaagtttcaattgaaactttataccaattaaagaataatttcccatttccatctcccccaccccttggaaaccagcattctactttctgttttatgtgtgctctaaggacctcrtataaatggagttgcatagttttggtcttcttgtaactggcttatttcacctcgcataatgtcctcaaggttcatctatgttgcagcatgtctgaatttcattcttttgtagggctgaataatattccattttatgtatatacaacattttgctgcctattcaacagtcgaaggacacaagtttcttttatagtttagctattgtgtaaagcagctataaacataggtgtaaaaatgtctctttgagaccctgctttcaacttggagggttatattcccagaagacttcaatgggaaaagcaaaatctctttaaaaattggtgctgtcatggacataaggatgaaataacagactgaggacaccaaaagaaagga

SEQ ID NO: 283901 - DNA, 427 bp, Homo sapiens
tcctttgggaagaagtttaatagatagaagagctatgtgtatattcaggaatttcttcaggacaggatttcatggaagrgtgtattagttatagaaatatttattcctttttctcttcctaaaattaaactttacaaagttaaatctacacaattgtcccttctaaacatgaccataaatctaccactaagaagatctaggctacatatttattctagagaaatttcattattataacgaaaaaaatcctaaagtcaattctaggaagtggtagtatctcagagggaggactgctactattgagtacattacaacttctaccaaaaaaaaaaaaaaaggaaacccattttgtaaattttgactgcatttccctgatcagtctctctctctctctctcactctctgtctgtctctctgtgttccaaac

SEQ ID NO: 283902 - DNA, 427 bp, Homo sapiens
tcctttgggaagaagtttaatagatagaagagctatgtgtatattcaggaatttcttcaggacaggatttcatggaagagtgtattagttatagaaatatttattcctttttctcttcctaaaattaaactttacaaagttaaatctacacaattgtcccttctaaacatgaccataaatctaccactaagaagatctaggctacatatttattctagagaaatttcattattataacgaaaaaaatcctaaagtcaattctaggaagyggtagtatctcagagggaggactgctactattgagtacattacaacttctaccaaaaaaaaaaaaaaaggaaacccattttgtaaattttgactgcatttccctgatcagtctctctctctctctctcactctctgtctgtctctctgtgttccaaac

SEQ ID NO: 283903 - DNA, 1151 bp, Homo sapiens
gggcatttgggctgcttcctcatgtaacttacttgttcctcagggcttccttcagtccagtctcacatatacaacttccacttaatgttggagtgcagccatgcatacctaattttatagtttgtccccayaatactcagttcaggatgagcacctcaggtcacatggtaacttggtgtctggggttaacattcagttgcttcccagtaaataggataaccaataacttcccacaaatttgcagtattctggatcaaatataaagctctggttaaagaaaaattgtgaagaatatgtggcgtgaggctgaattgtaagtggttaaacatagttttactcatggtgaattgggtctatttatcaactgatatgacactgtaaaataacagcttaatttgggatagaaaagcaaatcaaccttattgttgatgcctgggggattaatgattctacattttctttttgattcacttattttgatcttaaattgtgaaactcaattactagagataaatccaatctagtctcatggcataattagtttttgtagagtccattatcctaataattatactwgggcatttgggctgcttcctcatgtaacttacttgttcctcagggcttccttcagtccagtctcacatatacaacttccacttaatgttggagtgcagccatgcatacctaattttatagtttgtccccacaatactcagttcaggatgagcacctcaggtcacatggtaacttggtgtctggggttaacattcagttgcttcccagtaaataggataaccaataacttcccacaaatttgcagtattctggatcaaatataaagctctggttaaagaaaaattgtgaagaatatgtggcgtgaggctgaattgtaagtggttaaacatagttttactcatggtgaattgggtctatttatcaactgatatgacactgtaaaatawcagcttaatttgggatagaaaagcaaatcaaccttattgttgatgcctgggggattaatgattctacattttctttttgattcacttattttgatcttaaattgtgaaactcaattactagagataaatccaatctagtctcatggcataattagtttttgtagagtccattatcctaataattatact

SEQ ID NO: 283904 - DNA, 635 bp, Homo sapiens
agtcatgaaataaaagcattctttccaagtttctttctttcagtgatgctgtttttcttcttttaaatcttgtctatttcttagcaatatttgttgccagttgtattgattattggaacttttattctctgcatttcttctatgtctgctcctgatttcagcacacccygtctctactaaaaatacaagagtagcagggcgtggtggcgcatgcctgtaattccagctacttgggaggctgaggcagaagaatcgcttgaatccaggaggtggatgttgtggtgaaccgagatggtgccattgcactccagttcagcctgggctcgaaactccgtctcaaaaaaaaaaagaaaaagaaaaagactataagtaacacaataatgataaatacctttttgtttgcattgaggagaacagcttgaaatacaataataaaaataaaatataaaacaaaggacatgcaaaaaaggcagggggcagccttaataaacacacattgtggcacactgggcaacactattagattcctaactaacttttttcacatgtccatttctaatataaaccaaatatgtagaaccatatgcttaaataccactcctgacttaaattgtggacagcatatggtttgtgtt

SEQ ID NO: 283905 - DNA, 635 bp, Homo sapiens
agtcatgaaataaaagcattctttccaagtttctttctttcagtgatgctgtttttcttcttttaaatcttgtctatttcttagcaatatttgttgccagttgtattgattattggaacttttattctctgcatttcttctatgtctgctcctgatttcagcacaccctgtctctactaaaaatacaagagtagcagggcgtggtggcgcatgcctgtaattccagctacttgggaggctgaggcagaagaatcrcttgaatccaggaggtggatgttgtggtgaaccgagatggtgccattgcactccagttcagcctgggctcgaaactccgtctcaaaaaaaaaaagaaaaagaaaaagactataagtaacacaataatgataaatacctttttgtttgcattgaggagaacagcttgaaatacaataataaaaataaaatataaaacaaaggacatgcaaaaaaggcagggggcagccttaataaacacacattgtggcacactgggcaacactattagattcctaactaacttttttcacatgtccatttctaatataaaccaaatatgtagaaccatatgcttaaataccactcctgacttaaattgtggacagcatatggtttgtgtt

SEQ ID NO: 283906 - DNA, 570 bp, Homo sapiens
agctggaagtgtaattttcaaaatatcagcaaatggtttccctaaactatcttcttaggttaccatgagagagactttatatttctccctggcctcagctggaaaaaaagtaactagactgagtgttacctggaaatttctctcattacttggarttatttttctttattttgttttctgtctcccagtattaaattgttcttagtattaaaacctgaggtgaaaagtaatttcattccaacactggcacaagtttgaaatttgctacctaatctaatagtctgtacactgctccagatactatttgcacaactgcagaaagtgagaaagggagttgagaaagggcatgttgaatggttttgagtgggataatatgaagagttttcagacataggatagtatacattttttgttacttgtttttgtgagtttttccagatatcttgatctactcagagatatttgtttaaaaataatttctatcagtatcttagtaatataatgtctttttccaacaatttaatacaatccaaaaactttactaatgaaaggtagtattttctttctaaa

SEQ ID NO: 283907 - DNA, 509 bp, Homo sapiens
gatctagtattcaaaacccactaagaattcatccagatggcatgcaggaatggcctctactattctcaattgtttgatagttttagccataaattaaaataaaatttgatttaaagaagtattaattaagcaacttgaaatgctctgtttacattctgatatgggttgcacatcacttttcgaaaggtttctttgcaaattttatccacctgaaaagacagtcttataagttaaggagatgaaaatttttatttttaagtgtttttaagtgaggacgggggtgaggctgggtaagtcttcctccctcaccaataacaaaagcactgttacacatgtcaagcctggaccttagacttgatcttgatcttgtttcacacccagtaacrtctcatcatagtgtccttcaacaattgatctgaagcaaatataagctcatctttttttttactagcacactagtagaatatttcattctactaactttcagattgatatagaagtagataaat

SEQ ID NO: 283908 - DNA, 498 bp, Homo sapiens
tgcaacatgagactgcctaaagttaaggatgcaaggaataggtcagtagatactgctatgaaagaaagcaagagtacaagtcagactctcatttctatgsaaatgaagtgttagagaagtttccttcctgccgcttcaggatggatgttggatctatggcagtaatgcagcaaaggactgttaagagtctccgggattttggctggtgccttctttatgtttagtcgtacagctggtgcaggtgcattttgagccataataagtaataacattcccaatggaaacattcaactgtggtaaaacagacagaaatctattataaatgtgagtgcaatgtcaacgtttacagaaagaggtcaaataacagaattctatttggtaaatgtcagtactgtatgagtagaaagaattcacaatatttgcattcttattagaaagatacatgcaaaacccataaatatttcatggatttttttaacttctattttttctccctca

SEQ ID NO: 283909 - DNA, 618 bp, Homo sapiens
taacaatttgtactaatgcaacatgagactgcctaaagttaaggatgcaaggaataggtcagtagatactgctatgaaagaaagcaagagtacaagtcagactctcatttctatggaaatgaagtgttagagaagtttccttcctgccgcttcaggatggatgttggatctatggcagtaatgcagcaaaggactgttaagagtctccgggattttggctggtgccttctttatgtttagtcgyacagctggtgcaggtgcattttgagccataataagtaataacattcccaatggaaacattcaactgtggtaaaacagacagaaatctattataaatgtgagtgcaatgtcaacgtttacagaaagaggtcaaataacagaattctatttggtaaatgtcagtactgtatgagtagaaagaattcacaatatttgcattcttattagaaagatacatgcaaaacccataaatatttcatggatttttttaacttctattttttctccctcaccagaaatagcttttctttccatttctctgactctcaaagtttagtctgttgcttacgtgctttccagcatttgaggttatgtggtgaatcactggactcgtat

SEQ ID NO: 283910 - DNA, 572 bp, Homo sapiens
tgtttgctgattttaatgctatgcagatggtggttaagttaggtttaaaactagagcttaatgtttattttttaaagaaaatgaartaacatcttcccatgtctcactatggttatgaaacaaagaacagttatgataaagatatgcctttaactcactgtaggtcccgacctccagattttgccaggtttgaagttatctgggatatttgcctgggctgtgaggctgaagagatgggctgcaaactgaacgtgcagatattatgatcacagctggatattccacagtctttaatttttgtgaatacagagatctgacaggttttcaatcagaagcctgggctggccatacaccaagaacagaagtgcacctcaaaaaggcttagttttactaaaatacaacccagtttcaatctagagtaatttctaaaaggattaaagtagtcattccctcaactaaatgtgaaaaagacaaaccttctccaataggaagttttatcatatgaagcccctgcaatctgtaggtttgttttctctgctttgcttctttttgcatactgctagaatattaac

SEQ ID NO: 283911 - DNA, 572 bp, Homo sapiens
tgtttgctgattttaatgctatgcagatggtggttaagttaggtttaaaactagagcttaatgtttattttttaaagaaaatgaaataacatcttcccatgtctcactatggttatgaaacaaagaacagttatgataaagatatgcctttaactcactgtaggtcccgacctccagattttgccaggtttgaagttatctgggatatttgcctgggctgtgaggctgaagagatgggctgcaaactgaacgtgcagatattatgatcacagctggatattccacagtctttaatttttgtgaatacagagatctgacaggttttcaatcagaagcctgggctggccatacaccaagaacagaagtgcacctcaaaaagscttagttttactaaaatacaacccagtttcaatctagagtaatttctaaaaggattaaagtagtcattccctcaactaaatgtgaaaaagacaaaccttctccaataggaagttttatcatatgaagcccctgcaatctgtaggtttgttttctctgctttgcttctttttgcatactgctagaatattaac

SEQ ID NO: 283912 - DNA, 583 bp, Homo sapiens
tttaaaatacacttgaaagctttttcaatagactagatcaagcaggggaaataatttcaaagctcaaattctggttttttgagctaactcagtcagtcagaaataagaaaaaaaattccaaaaaaataaagaagtcttcaagaaatattgaattatgtaatgtgatcaagcctatgaattactgacattcctaagagagaaggagaaaacgtaaacaacctgaaaaacacatttgattaaacaattcaataaaattttcctaatcttgctagagaagtagacattcagatataagaaatccagaaaacacctgtaagataatatagaaaatggacatcaacaaggcatatagtcaccagactattcaaagtcaatactraagaaaatttcttacagacagctagagagaaaggtcagatcacacaaaaagggaacccagtaagattaacggtggtcttcttaataaaaattttacaagccagagcagaataatggccaattctcagcattcttatagaaaagaaattctaaccaaggatttgatatccaatcaaactaagcttcataagcaaaggagaaataa

SEQ ID NO: 283913 - DNA, 606 bp, Homo sapiens
acataaacagaattaaaaacaaaaaccatagaatcatctgaattaatggaaaagggctttcaataaaatccaacatcctccaaaaatgctcagacatatcaggcattgaaagaacatacttcaaaatggtgcaaaccatctataacaaacccacagccaacatcatactgaatgcacaaatgttgatatcatgtcctctaagaactagaacaagaaaaggatgcccactctcaccactcctattcaatacagtactagaaatcccagccagagctatcaggcaagagaaaaaataaaaggcatctaaataggaaaagaagtcaatttatctctcttgcagattatatgattctatacataggaaaccctaaagacttcaccaaaaggcttgcagaactgattagtgactttactaaagtttcaggatacaaaatcaatgtaaacacatcaktagtattattatacaccaatagcattcaacctgaaagccaaataaagaatgcaatctcatttacaatagccacacacatgaatgtaaaatacctaggaatacatgttaccaaggtgaaagatctccacaaagagagctacaagacactagtgaaa

SEQ ID NO: 283914 - DNA, 473 bp, Homo sapiens
atatagtaaccaaaacagcatgatcttggtaygaaaacagacacacagaccaatagaacagaacagagaacccacaaataaagccaactaatcttcaacacagtcaacaaaaataagcaatgaggaaaggcctctttctcaataaataatgctgggataactggctagccacatacagaagaatgaaactgttctcccaacattcgccatatataaaaattaaatgaagatgaaataaacttttaaatgtaagatctcaaactagaaatgtcctataagaaaacctaggaaatgcctctctagacatcagtcttggcaaaaagaaaatgactaagccctcaaaaacaattgcaacagtaacaaaaattgacaagtgggacctaattaaactaaagaaatttctgcacagcgaaagaaacaaagtaaacagacgatccacagaatgagagactatcttctcaaactatgtatct

SEQ ID NO: 283915 - DNA, 598 bp, Homo sapiens
aaggactactctatgtagtagtattgaacaagaagactgagacacagaatgctagagcttccataatatgaatatgcctcagagactccctaatttaaattaggcctatagaagtatgtgcctgcgggatttgatgattaacctaaatcaatttaactgatgagaataatcagaactctaatttatactatagaacaaattagttctataaaacttacagattagaaatccagaaccaggaaaaacrtttttcttttctcattagaatattgtcatattaggtagaaatttgaaattaaggtttacacgcattttcagtagctttaatctacctagattttctggtagaatcattctcctttaatgcattcctccctttattttacattgaatgtttttaaagttttatttattttgtgtttaaatataagccctcatacctcaattagcacttacatacagttatatatattcatcttctgagtagacatagctaaaccaaaatagtttttattttgtactttgaatttgctgtatggttaaaatccttgctactccaagtgtggcccatggaccagcagcatcaccatcagcatca

SEQ ID NO: 283916 - DNA, 1163 bp, Homo sapiens
aaggactactctatgtagtagtattgaacaagaagactgagacacagaatgctagagcttccataatatgaatatgcctcagagactccctaatttaaattaggcctatagaagtatgtgcctgcgggatttgatgattaacctaaatcaatttaactgatgagaataatcagaactctaatttatactatagaacaaattagttctataaaacttacagattagaaatccagaaccaggaaaaacatttttcttttctcattagaatattgtcatattaggtagaaatttgaaattaaggtttacacgcattttcagtagctttaatctacctagattttctggtagaatcattctcctttaatgcattcctccctttattttacattgaatgtttttaaagttttatttattttgtgtttaaatataagccctcatacctcaattagcacttacatacagttatatatattcatcttctgagtagacatagctaaaycaaaatagtttttattttgtactttgaatttgctgtatggttaaaatccttgctactccaagtgtggcccatggaccagcagcatcaccatcagcatcawaattgcttcagtttcctgagttcaatccatttagtaaactcattttgcttgatatttgtgaacattttagctcttcatgattcctgtacattttcctttattccaatgttacaatctctaaagttawcagaagcctgtatttgagagtacctgttacagctctatagctcattacaaactatctttgaaaaggattaaaataagacaaaaattttctgtgaatagcaaaatgtgcagggcatttatagttagaaaaacgattaacaaagaagtttggttatctccatagtttacagtagtgtaacataaaagccttaattaagattgatagcaaatacccaaacattagaattttttaaatcccatacaatgttggagcatattttagcattattcaccacgctataacctaaagaagattgagcatcattttggcaatcccatgtgcctaaacacgtcaaataattctgtttacctctcttttctggacgcttcagggtcctgctgaaaaaaatttcacaaagattaaagtagcgtgaaatcaaaggtatcacagctttttac

SEQ ID NO: 283917 - DNA, 564 bp, Homo sapiens
aattgcttcagtttcctgagttcaatccatttagtaaactcattttgcttgatatttgtgaacattttagctcttcatgattcctgtacattttcctttattccaatgttacaatctctaaagttatcagaagcctgtatttgagartacctgttacagctctatagctcattacaaactatctttgaaaaggattaaaataagacaaaaattttctgtgaatagcaaaatgtgcagggcatttatagttagaaaaacgattaacaaagaagtttggttatctccatagtttacagtagtgtaacataaaagccttaattaagattgatagcaaatacccaaacattagaattttttaaatcccatacaatgttggagcatattttagcattattcaccacgctataacctaaagaagattgagcatcattttggcaatcccatgtgcctaaacacgtcaaataattctgtttacctctcttttctggacgcttcagggtcctgctgaaaaaaatttcacaaagattaaagtagcgtgaaatcaaaggtatcacagctttttac

SEQ ID NO: 283918 - DNA, 615 bp, Homo sapiens
accctaaaacttaaagtataataataataaaaaaaaaaagaagttctcactttgggctgcaggtttgcaggtttcaggcttttcagcttgaaggtggggtttcaccagggacccaaccctgtgtgcctagaatttctctgcctcctgcctctatcaatagtattcaatgaataaaacctgtttctgtcttagacatgcataaagctatacctcaagtggtactatttatactctgcatttttgttattttacatgcatatgtctctcctacccaattagattgtagattgcttgaggtcaggaactactgtgtcctcacatcttgtactcaacaaagcttttcacactcaatgttacatttgataaaagtacctagttactgggaatagaatatctgggcttcgaagcagtcatttttattctytataagaaagaatatgcatttctattaaggtagaattgatgaatgatttactaacaaggcatatcaaccactttggaaagtaagcacagaagacagtgctattttcacttttgaatgtaaaaaatgaggctcacaaaatttaagaaatcagcctgtggtcactaagatataaaactatttaatctaaggta

SEQ ID NO: 283919 - DNA, 524 bp, Homo sapiens
gttggcagttacagacctatacttaatactcacctgactgccagacattactctaagttatttatatgtactaactcacccgcttcaatgactttatgaggtaagtattttatattcttctattttctgatgargaaactgaggtaaagcgagtaaaagttgtgagtctaagctttcaacaactgttaaacagcagatcaagaagccaaacccagagagtcttatcagcagccgtgttctttactactacgcaagtgcagctcttctttctcacgctaaacatgaaaagtaaaaaatgagagatgataaatagtacagcttacaaagccactcatttgtagtgtgttagagaaaacacactgtaaaattgtaaaattaaaaaaaaattaagtaagttagtctaaacttaatgcatttttttcttagatatatgcactcaaaaagaacaaacaaggtagaaagagccttgtggattttgcagaaatcgttgagaattctaggaagaagaactagcaaatgctggg

SEQ ID NO: 283920 - DNA, 524 bp, Homo sapiens
gttggcagttacagacctatacttaatactcacctgactgccagacattactctaagttatttatatgtactaactcacccgcttcaatgactttatgaggtaagtattttatattcttctattttctgatgaagaaactgaggtaaagcgagtaaaagttgtgagtctaagctttcaacaactgttaaacagcagatcaagaagccaaacccagagagtcttatcagcagccgtgttctttactactacgcaagtgcagctcttctttctcacgctaaacatgaaaagtaaaaaatgagagatgataaatagtacagcttacaaagccactcatttgtagtgtgttagagaaaacacactgtaaaattgtaaaattaaaaaaaaattaagtaagttagtctaaacttaatgcatttttttcttagatatatgcactcaaaaagaacaaacaaggtagaaagagccttgtggattttgcagaartcgttgagaattctaggaagaagaactagcaaatgctggg

SEQ ID NO: 283921 - DNA, 600 bp, Homo sapiens
gcaataaaagagaaacatgaaataaaatttgtcttagctttcaattcagactcaagtgtaaaaacaaatcaatttttttcctaaaatgtattatctttataaatttataatacattcagtgctgtctcaattcccagaataaccaaaaagtattctttttactgtcaattttaacaccccaggtaattttattaaagcctcgtgactttatatattatctgtatgctgaataatctcaaatttatatctctagtcccggttggtttctaggccttcagactcatagatccaactgctaattccacatattcactttcatccataacttgcttcccaactgtaagacacaaaacagaaatcttggttttcctccctgaaactctgaacatcctttctctttaacacttcaagaatcagcactatcmtcaccaatctacttgggaaaaaaattctgggagtcatctttgacttttttcttttcctcactcacttcattttgttcttaagagagcttactttccagtgatgaaggaagtgagggagtgagtcacacaaagatttgggaaagacattccagggaaagagaacagaaaattcata

SEQ ID NO: 283922 - DNA, 600 bp, Homo sapiens
gcaataaaagagaaacatgaaataaaatttgtcttagctttcaattcagactcaagtgtaaaaacaaatcaatttttttcctaaaatgtattatctttataaatttataatacattcagtgctgtctcaattcccagaataaccaaaaagtattctttttactgtcaattttaacaccccaggtaattttattaaagcctcgtgactttatatattatctgtatgctgaataatctcaaatttatatctctagtcccggttggtttctaggccttcagactcatagatccaactgctaattccacatattcactttcatccataacttgcttcccaactgtaagacacaaaacagaaatcttggttttcctccctgaaactctgaacatcctttctctttaacacttcaagaatcagcactatcatcaccaatctacttgggaaaaaaattctgggagtcatctttgacttttttcttttcctcactcacttcattttgttcttaagagagcttactttccartgatgaaggaagtgagggagtgagtcacacaaagatttgggaaagacattccagggaaagagaacagaaaattcata

SEQ ID NO: 283923 - DNA, 600 bp, Homo sapiens
gcaataaaagagaaacatgaaataaaatttgtcttagctttcaattcagactcaagtgtaaaaacaaatcaatttttttcctaaaatgtattatctttataaatttataatacattcagtgctgtctcaattcccagaataaccaaaaagtattctttttactgtcaattttaacaccccaggtaattttattaaagcctcgtgactttatatattatctgtatgctgaataatctcaaatttatatctctagtcccggttggtttctaggccttcagactcatagatccaactgctaattccacatattcactttcatccataacttgcttcccaactgtaagacacaaaacagaaatcttggttttcctccctgaaactctgaacatcctttctctttaacacttcaagaatcagcactatcatcaccaatctacttgggaaaaaaattctgggagtcatctttgacttttttcttttcctcactcacttcattttgttcttaagagagcttactttccagtgatgaaggaartgagggagtgagtcacacaaagatttgggaaagacattccagggaaagagaacagaaaattcata

SEQ ID NO: 283924 - DNA, 498 bp, Homo sapiens
tgtttttaaaatattttgcttaccaatatttagttcagtgtctgtcacatagtatgcaaaaattgttgartgagtgggctagtcaatttttctcagacaaaatgataaaatgtagttttcttagcttactcaaaattaagactaaaatgaatttagtgatttagttctagtttagtaccaaaccagtgttctttagttgtatatattacctaaatacatacaaacttattcatgataagaactatttgtcactcattttactctactcaggagagactatctgcctttaacatactaagtgctcaatagatgcttattgaataaaataattggtcaatgaattatacttatgtttacgtaacacttttgtatacaatcatacttttgttttaaatagagaaatcattataatcaatacaaagaatcctgaaattgcagagccaaaaagtatttaatgattgtattattcaaaatcttcactttaggaatgagaaaaca

SEQ ID NO: 283925 - DNA, 498 bp, Homo sapiens
tgtttttaaaatattttgcttaccaatatttagttcagtgtctgtcacatagtatgcaaaaattgttgaatgagtgggctagtcaatttttctcagacaaaatgataaaatgtagttttcttagcttactcaaaattaagactaaaatgaatttagtgatttagttctagtttagtaccaaaccagtgttctttagttgtatatattacctaaatacatacaaacttattcatgataagaactatttgtcactcattttactctactcaggagagactatctgcctttaacatactaagtgctcaatagatgyttattgaataaaataattggtcaatgaattatacttatgtttacgtaacacttttgtatacaatcatacttttgttttaaatagagaaatcattataatcaatacaaagaatcctgaaattgcagagccaaaaagtatttaatgattgtattattcaaaatcttcactttaggaatgagaaaaca

SEQ ID NO: 283926 - DNA, 498 bp, Homo sapiens
tgtttttaaaatattttgcttaccaatatttagttcagtgtctgtcacatagtatgcaaaaattgttgaatgagtgggctagtcaatttttctcagacaaaatgataaaatgtagttttcttagcttactcaaaattaagactaaaatgaatttagtgatttagttctagtttagtaccaaaccagtgttctttagttgtatatattacctaaatacatacaaacttattcatgataagaactatttgtcactcattttactctactcaggagagactatctgcctttaacatactaagtgctcaatagatgcttattgaataaaataattggtcaatgaattayacttatgtttacgtaacacttttgtatacaatcatacttttgttttaaatagagaaatcattataatcaatacaaagaatcctgaaattgcagagccaaaaagtatttaatgattgtattattcaaaatcttcactttaggaatgagaaaaca

SEQ ID NO: 283927 - DNA, 498 bp, Homo sapiens
tgtttttaaaatattttgcttaccaatatttagttcagtgtctgtcacatagtatgcaaaaattgttgaatgagtgggctagtcaatttttctcagacaaaatgataaaatgtagttttcttagcttactcaaaattaagactaaaatgaatttagtgatttagttctagtttagtaccaaaccagtgttctttagttgtatatattacctaaatacatacaaacttattcatgataagaactatttgtcactcattttactctactcaggagagactatctgcctttaacatactaagtgctcaatagatgcttattgaataaaataattggtcaatgaattatacttatgtttacgtaacacttttgtatacaatcatacttttgttttaaatagagaaatcattataatcaatacaaagaatcctgaaattgcagagccaaaaagtatttaatgattgtattattcaamatcttcactttaggaatgagaaaaca

SEQ ID NO: 283928 - DNA, 466 bp, Homo sapiens
attatattgaaaatgaatacaggagataaaaataaataaaattgagcatctgggagcataataatgaatgttaggcagttgaaaataagtgagtgcttcattgaccaaactgattcattttgatagtgtrtactaaaaaatatgacagtaacaattaaagagcatggtgtaaccaatatataataaaagaattaaaagtgggcaagcagttacatagtaggatgtagctatatgaattaattattgtattttacattcatacttctaagaatgtgaacagaaagatgtgctagaagggaaccataatagggtaatcttcctgtcagccttctaccttgaagtctttccttctaaaactgaatctattttttctcaaaacaatgctgtcaacacatatagtatcatccctagtactgagaaaaaacaagacgatttcttgtaatgcaaaagttaaaacagacagaaa

SEQ ID NO: 283929 - DNA, 1464 bp, Homo sapiens
attatattgaaaatgaatacaggagataaaaataaataaaattgagcatctgggagcataataatgaatgttaggcagttgaaaataagtgagtgcttcattgaccaaactgattcattttgatagtgtgtactaaaaaatatgacagtaacaattaaagarcatggtgtaaccaatatataataaaagaattaaaagtgggcaagcagttacatagtaggatgtagctatatgaattaattattgtattttacattcatacttctaagaatgtgaacagaaagatgtgctagaagggaaccataatagggtaatcttcctgtcagccttctaccttgaagtctttccttctaaaactgaatctattttttctcaaaacaatgctgtcaacacatatagtatcatccctagtactgagaaaaaacaagacgatttcttgtaatgcaaaagttaaaacagacagaaawattatattgaaaatgaatacaggagataaaaataaataaaattgagcatctgggagcataataatgaatgttaggcagttgaaaataagtgagtgcttcattgaccaaactgattcattttgatagtgtgtactaaaaaatatgacagtaacaattaaagagcatggtgtaaccaatatataataaaagaattaaawgtgggcaagcagttacatagtaggatgtagctatatgaattaattattgtattttacattcatacttctaagaatgtgaacagaaagatgtgctagaagggaaccataatagggtaatcttcctgtcagccttctaccttgaagtctttccttctaaaactgaatctattttttctcaaaacaatgctgtcaacacatatagtatcatccctagtactgagaaaaaacaagacgatttcttgtaatgcaaaagttaaaacagacagaaawtggggcccagaagcagtgagtgaaatacaaaccaagaactctttttccctctcccttctaagttttttcatcctcagacttctaaggttaggggaaacatgcttccaacccctgtcactcctgggggttgagggaaagtctctttcttcccttttttggtgatagacaggtcagtaggggctctccgcttgccttcccctccctgccagagctgcgatgcatgtcctaagggtcccacaaagctggttcgcaaccacaagccaacacagctttcctgagccaagggattcagctttawcacacagtaattaaactaatctccgtggtggaggaatcatttgcataagaataagagattcttccccaggcatttttaaactgtttctttttcaagttaagttttaaagttttttattctttttagaaagcattttactatgccagcccttcctcaaactattactgtttttattttctgtaatgtttgaattgtgaaaaaggatttgttgggctggtcttgggctgtcacc

SEQ ID NO: 283930 - DNA, 530 bp, Homo sapiens
tggggcccagaagcagtgagtgaaatacaaaccaagaactctttttccctctcccttctaagttttttcatcctcagacttctaaggttaggggaaacatgcttccaacccctgtcactcctgggggttgagggaaagtctctttcttcccttttttggtgatagacaggtcagtaggggctctccgcttgccttcccctccctgccagagctgcgatgcatgtcctaagggtcccacaaagctggttcgcaaccacaagccaacacagctttcctgagccaagggattcagctttatcacacagtaattaaactaatctccgtggtggaggaatcatttgcataagaataagagattcttccccaggcatttttaaactgtttctttttcaagttaagttttaaagttttttattctttttagaaagcattttactatgccagcccttcctcaaactattactgtttttattttctgtaatgtttkaattgtgaaaaaggatttgttgggctggtcttgggctgtcacc

SEQ ID NO: 283931 - DNA, 563 bp, Homo sapiens
tatatacatatatatatatatatataatatatgtccacagacacacacacatacacaaatatacacccaagtcattcatttcattatatcactcatcttccaagttatgaaataaagtaacattgtaattgaattttatataattgttgtatatggaaatactgcatacatctatacataaacatattatacggatctgccatagcaaatgaggcaaatgcaaaattgattgagatrcagaaaatccattttcttagaaataggtaacttttatttattcggggtttaattatcacttcctacatgcagcatacatatcactagacattgggaataaaggaagaaatgatacattttctgacattaaaaacttctggactaagaagataaaatggattcataaataatatttttgaaattgtaatatatcttaaggaagaaaaagataaagcctacttttcagaggaatttaaaatcaactcccaatgttatgaggtttttatcccaaaatagaaaccaaatcaaatgcctcaatccatgttaaaaattagaccaaacatttg

SEQ ID NO: 283932 - DNA, 563 bp, Homo sapiens
tatatacatatatatatatatatataatatatgtccacagacacacacacatacacaaatatacacccaagtcattcatttcattatatcactcatcttccaagttatgaaataaagtaacattgtaattgaattttatataattgttgtatatggaaatactgcatacatctatacataaacatattatacggatctgccatagcaaatgaggcaaatgcaaaattgattgagatacagaaaatccattttcttagaaataggtaacttttatttattcggggtttaattatcacttcctacatgcagcatacatatcactagacattgggaataaaggaagaaatgatacattttctgacattaaaaacttctggactaagaagataaaatggrttcataaataatatttttgaaattgtaatatatcttaaggaagaaaaagataaagcctacttttcagaggaatttaaaatcaactcccaatgttatgaggtttttatcccaaaatagaaaccaaatcaaatgcctcaatccatgttaaaaattagaccaaacatttg

SEQ ID NO: 283933 - DNA, 598 bp, Homo sapiens
tgtgttatgagggtttgttgtacagattattccatcacccaggtatgaagcatagtatccactcattatttttcctgattatgtgctttctctcactctctaccctccagaaggccccagctatattgctcctctctgtgtccacgygttctcatcatttagctcctaccaataagtgagaacatgcggcatttggttttctgtttctgtgttagtttgctgaggataatggcctccagctatatcaatgtccctgcaacagaaataatctcattctttttgatggctgcatagtattccatgttgtatatgtaccacattttctttatccagtctatcgtgatgggcatttaggttgattccatgtctttctactgtgaatagtgctgcagtgaacatatgtgtgcatgtgtctttatgataaaatgatttatattcctttggtatatatgcggcaatggggttgctgagttgaatggtatttctgtctttaggtctttgatttcctgatcgtccagctctcagtctcatcagaataactggtctaccctctgcttcctttcacactgttgaggatactactttttttaatgttaat

SEQ ID NO: 283934 - DNA, 598 bp, Homo sapiens
tgtgttatgagggtttgttgtacagattattccatcacccaggtatgaagcatagtatccactcattatttttcctgattatgtgctttctctcactctctaccctccagaaggccccagctatattgctcctctctgtgtccacgcgttctcatcatttarctcctaccaataagtgagaacatgcggcatttggttttctgtttctgtgttagtttgctgaggataatggcctccagctatatcaatgtccctgcaacagaaataatctcattctttttgatggctgcatagtattccatgttgtatatgtaccacattttctttatccagtctatcgtgatgggcatttaggttgattccatgtctttctactgtgaatagtgctgcagtgaacatatgtgtgcatgtgtctttatgataaaatgatttatattcctttggtatatatgcggcaatggggttgctgagttgaatggtatttctgtctttaggtctttgatttcctgatcgtccagctctcagtctcatcagaataactggtctaccctctgcttcctttcacactgttgaggatactactttttttaatgttaat

SEQ ID NO: 283935 - DNA, 598 bp, Homo sapiens
tgtgttatgagggtttgttgtacagattattccatcacccaggtatgaagcatagtatccactcattatttttcctgattatgtgctttctctcactctctaccctccagaaggccccagctatattgctcctctctgtgtccacgcgttctcatcatttagctcctaccaataagtgagaacatgcggcatttggttttctgtttctgtgttagtttgctgaggataatggcctccagctatatcaatgtccctgcaacagaaataatctcattctttttgatggctgcatagtattccatgttgtatatgtaccacattttctttatccagtctatcgtgatgggcrtttaggttgattccatgtctttctactgtgaatagtgctgcagtgaacatatgtgtgcatgtgtctttatgataaaatgatttatattcctttggtatatatgcggcaatggggttgctgagttgaatggtatttctgtctttaggtctttgatttcctgatcgtccagctctcagtctcatcagaataactggtctaccctctgcttcctttcacactgttgaggatactactttttttaatgttaat

SEQ ID NO: 283936 - DNA, 598 bp, Homo sapiens
tgtgttatgagggtttgttgtacagattattccatcacccaggtatgaagcatagtatccactcattatttttcctgattatgtgctttctctcactctctaccctccagaaggccccagctatattgctcctctctgtgtccacgcgttctcatcatttagctcctaccaataagtgagaacatgcggcatttggttttctgtttctgtgttagtttgctgaggataatggcctccagctatatcaatgtccctgcaacagaaataatctcattctttttgatggctgcatagtattccatgttgtatatgtaccacattttctttatccagtctatcgtgatgggcatttaggttgattccatgtctttctactgtgaatagtgctgcagtgaacatatgtgtgcatgtgtctttatgataaaatgatttatattcctttggtatatatgcggcaatggggttgctgagttgaatggtatttctgtctttaggtctttgatttcctgatcgtccagctctcagtctcatcagaataactgktctaccctctgcttcctttcacactgttgaggatactactttttttaatgttaat

SEQ ID NO: 283937 - DNA, 626 bp, Homo sapiens
ctttttattaaaaataacaggcaggcacattaaaacttcatgattagtaaaatgggtttccgaagtgctacttgcagatgtcatgttattattcaattgataattcatgcatttctctataaatatcargatactttaaagatgcaaacagacttatgccctttagctctaaaatattatataaaaaattaatccaaaaagaaaaaatatagataactggaatttgagatttaaattttgtgcttttcaaaagacaatgttaaagaaatgaaaatcaattcaaacactgggaaaatatttgccaaatatgcatatgataaacattatatgtaaaaataaataaagatttcttacaattctgtcataagatgacaagtgtattagtctgttctcacactgctataaagaaatacccgagactgggtaattgatgaagaaaagtggtttaattgacccccagttttacatggctggggggactcaggaaacttacaaccatggagaaaggaagcaggcatattttacagggtggcagggaagagagagtgcatgagtgcaagagagggcaggaaaaactggcttaaaccacctgatctcaaaagaactaactcactctcacaagaaca

SEQ ID NO: 283938 - DNA, 626 bp, Homo sapiens
ctttttattaaaaataacaggcaggcacattaaaacttcatgattagtaaaatgggtttccgaagtgctacttgcagatgtcatgttattattcaattgataattcatgcatttctctataaatatcaggatactttaaagatgcaaacagacttatgccctttagctctaaaatattatataaaaaattaatccaaaaagaaaaaatatagataactggaatttgagatttaaattttgtgcttttcaaaagacaatgttaaagaaatgaaaatcaattcaaacactgggaaaatatttgccaaatatgcatatgataaacattatatgtaaaaataaataaagatttcttacaattctgtcataagatgacaagtgtattagtctgttctcacactgctataaagaaatacccgagactgggtaattgatgaagaaaagtggtttaattgacccccagttttacatggctggggggactcaggaaacttacaaccayggagaaaggaagcaggcatattttacagggtggcagggaagagagagtgcatgagtgcaagagagggcaggaaaaactggcttaaaccacctgatctcaaaagaactaactcactctcacaagaaca

SEQ ID NO: 283939 - DNA, 451 bp, Homo sapiens
tagtaattctaatgagaaattgccaagtaacagcctctccaacaatgaactacatcaatgaactctgtttctaagcaggttatgtgaacctcttccttttcacaaataaaagcttctctttacccttccctcaccaaatgcactggtagcttaccattctgtgcattttggattrtaattctcatttctcatttctcatttcctagtaaacgcaacatattttgggaaaattttctttagtgactttttaggttgacactggttactctatttagaacctcaaaaaaatttctaggcaccaaacaaatgaaatgaggaaaagaaagggctctttatctgtcaagtctattaatcccattacttaattcccataataagaacattaacagtgataaccattattaagtatcttcaaatttagtaagcacatcaatatgaatatttccattgt

SEQ ID NO: 283940 - DNA, 452 bp, Homo sapiens
aaatgtccatactacataaagcaatctacagattcaatgcaatccatatcaaaataccaatggcattcttcacagaaatagaacaaatgctaaaaatgtgtatgagaccaaaaaagacccagaatacccaaatctatgctgagcaaaagaacaaaactggagaaatcacattacctgacttcaaattatactacagaattagtattacagtatagtaaccaaaacagcctgrtactggcatcaaaatagacacatagacaaaacaaaacaaagtagagatccagaaataaatttatacatctacagtgaactaatttttgacaaaggtgccaagaacatacactggggtaaggatagtctcttcaataaatgttgcttggaaaactggacatctttatgcagaagaatgaaattagatccctatatattaccatataccatttacattaatc

SEQ ID NO: 283941 - DNA, 452 bp, Homo sapiens
aaatgtccatactacataaagcaatctacagattcaatgcaatccatatcaaaataccaatggcattcttcacagaaatagaacaaatgctaaaaatgtgtatgagaccaaaaaagacccagaatacccaaatctatgctgagcaaaagaacaaaactggagaaatcacattacctgacttcaaattatactacagaattagtattacagtatagtaaccaaaacagcctgatactggcatcaaaatagacacatagacaaaacaaaacaaartagagatccagaaataaatttatacatctacagtgaactaatttttgacaaaggtgccaagaacatacactggggtaaggatagtctcttcaataaatgttgcttggaaaactggacatctttatgcagaagaatgaaattagatccctatatattaccatataccatttacattaatc

SEQ ID NO: 283942 - DNA, 606 bp, Homo sapiens
atgcatagtcaaacattataatacacgtttgaacaaagaatttcaagcgatagaatagctaattcattattagctaattcattattattttctaataaattttatacatttatttgcaaacatgactggtgagagagtacacaaaatagaaagccataaatatatgcaaaatttgacataattaaaagttaaggtggctttttttgaatatgttttagtatacatttttctggaagttaaatggtagttctcttgtgcattactggacaagcaaacaatagctgttccattgtggactatgtataaaacaacttgcaatgaattattgaagygaatatatgttgcaaagctacttttcacccagttaacataaagacataccttgtttttctgagtaagtaatctataccccaaaatgcacctgtgccctcagctgcctgctggaaaaaaaaaaaaaagtatggttaattaactaggatgtggttcataaggtttgtgatgttatctgcctaaggagtatggaatcaattattcacttttgaaaatgagggaaatgacaaataaaatgtactttgggggaatttgaaatatttttctttcaagaat

SEQ ID NO: 283943 - DNA, 606 bp, Homo sapiens
atgcatagtcaaacattataatacacgtttgaacaaagaatttcaagcgatagaatagctaattcattattagctaattcattattattttctaataaattttatacatttatttgcaaacatgactggtgagagagtacacaaaatagaaagccataaatatatgcaaaatttgacataattaaaagttaaggtggctttttttgaatatgttttagtatacatttttctggaagttaaatggtagttctcttgtgcattactggacaagcaaacaatagctgttccattgtggactatgtataaaacaacttgcaatgaattattgaagtgaatatatgttgcaaagctacttttcacccagttaacataaagacataccttgtttttctgagtaagtaatctataccccaaaatgcacctgtgccctcagctgcctgctgraaaaaaaaaaaaaagtatggttaattaactaggatgtggttcataaggtttgtgatgttatctgcctaaggagtatggaatcaattattcacttttgaaaatgagggaaatgacaaataaaatgtactttgggggaatttgaaatatttttctttcaagaat

SEQ ID NO: 283944 - DNA, 489 bp, Homo sapiens
catgagaaaaagttaaatgcatattactatgtgaaagaagccaattgaaaggctacaaactgtttgatttcaactatatgatactttggagcaggagaaagtatggaaacagtaaaaaagatcaatcattcccagtgatggatataatagtgcatacagggtggaaacatgccattatatatttgacaaccccaagaatatacgacatcaagagtgaaccttaaggtaaactatgaactttgggtgatgatgatgtgtcaacgtgggttcatcacttgcaacaaatgtrccatcctggtgcgggatactgataatagaggctatgcatgtgttggggaaggcatcaatgaagtatctccgtacctttctcttaattttgctgtgaacctaaaattgctctaaaaaatcttaaataatatatgtgccaatgcatatcacacgtatcacaaatataaagagctgaagaaaatcctgcagtcaaagaatagt

SEQ ID NO: 283945 - DNA, 553 bp, Homo sapiens
gttatcaccctttggtgggaaactgataacacagataattccaaatttgactaattttcaataaaagaaagcaactacttttgcaacctgcaaatttttgtctattgacacattttcctgttaactatttktttagttggcttctaccccttgattacagggtttttttttttcttttctttctctgtacttagattctgactatgcaatcagttatatcatgaaaatagaaaataaaagcagaataggaagtattgttgacaacgatagttaatcttcataggatatttcttaggtgccaagagtttgaaactcttttatctgtttcaaactgtactatacacttttgatcatttttcgtctcattttacagattaggagactaagtcttagaaaggttaagcaactttctcaaacaaattgtactaataattgatgaagtcagaatttaacccaggttcatatgactccagggactgagattttcactgcagcagacctaagaggaagtagatctggagagacgttggtcattttcaaggcttatattttg

SEQ ID NO: 283946 - DNA, 559 bp, Homo sapiens
tggtcattttcaaggcttatattttggaacttgggactggatagacctttccaaatatgctggatatgtttggccatacacacaaaagaaaactccaatgaaagctttcttcattgcaaaatattacttaggttgaagactatctctgaaatgttccttaaatgtgctaatctaattgcctcaaatgtttctcaggattacacacatttacataacctgctataatctccagatagtcagtctgtagattgaagcaggttaaatcctgtctaatagtcaggatagttctacattttcagtggcctttagaaagaatgcttagttgaatgaatatcctgtctccaattcctcaggaagttttctaataccccttcgaagtgccaaagaatrctaacgtacgtagaaataactgggtacgtttaaagtatgccaaaacatatttttttggctactctttggttaagctcttccagccaaatctgcattccaatatcagtctttgcatcttaccgtatggttaatttcagtgttgtcacctccaggattatttgtattgagc

SEQ ID NO: 283947 - DNA, 559 bp, Homo sapiens
tggtcattttcaaggcttatattttggaacttgggactggatagacctttccaaatatgctggatatgtttggccatacacacaaaagaaaactccaatgaaagctttcttcattgcaaaatattacttaggttgaagactatctctgaaatgttccttaaatgtgctaatctaattgcctcaaatgtttctcaggattacacacatttacataacctgctataatctccagatagtcagtctgtagattgaagcaggttaaatcctgtctaatagtcaggatagttctacattttcagtggcctttagaaagaatgcttagttgaatgaatatcctgtctccaattcctcaggaagttttctaataccccttcgaagtgccaaagaatactaacgtacrtagaaataactgggtacgtttaaagtatgccaaaacatatttttttggctactctttggttaagctcttccagccaaatctgcattccaatatcagtctttgcatcttaccgtatggttaatttcagtgttgtcacctccaggattatttgtattgagc

SEQ ID NO: 283948 - DNA, 567 bp, Homo sapiens
ctgggtacgtttaaagtatgccaaaacatatttttttggctactctttggttaagctcttccagccaaatctgcattccaatatcagtctttgcatcttaccgtatggttaatttcagtgttgtcacctccaggattatttgtattgagccttatctgtacttgagaaataaaagaattttgtcttacaataaactgattttagaaatctatcaactgtgagaagatatggcctatataagccagtctaggcaatcacaattctctaaattcccaaggagagagacaatagattaaatgtagtggrcattcttgactcttgcggaggggatataaggaagggaaataaatgaggaaagagagagaaagagcccacaatatatgatttccactcaatttttcttttaatggaggaccttcccagatgtaggcttctgtctttatctgttttctgcaaactgggtaatttataaagaatataagtttagtcttgtgtgtttagtgtctagcgtgtggcttcttgcatggagaaatgaccactgcagagctctcctgctccagaaagaaa

SEQ ID NO: 283949 - DNA, 574 bp, Homo sapiens
gccaaaacatatttttttggctactctttggttaagctcttccagccaaatctgcattccaatatcagtctttgcatcttaccgtatggttaatttcagtgttgtcacctccaggattatttgtattgagccttatctgtacttgagaaataaaagaattttgtcttacaataaactgattttagaaatctatcaactgtgagaagatatggcctatataagccagtctaggcaatcacaattctctaaattcccaaggagagagacaatagattaaatgtagtgggcattcttgactcttscggaggggatataaggaagggaaataaatgaggaaagagagagaaagagcccacaatatatgatttccactcaatttttcttttaatggaggaccttcccagatgtaggcttctgtctttatctgttttctgcaaactgggtaatttataaagaatataagtttagtcttgtgtgtttagtgtctagcgtgtggcttcttgcatggagaaatgaccactgcagagctctcctgctccagaaagaaatgttttctcacccacagcaactaagg

SEQ ID NO: 283950 - DNA, 567 bp, Homo sapiens
ctgggtacgtttaaagtatgccaaaacatatttttttggctactctttggttaagctcttccagccaaatctgcattccaatatcagtctttgcatcttaccgtatggttaatttcagtgttgtcacctccaggattatttgtattgagccttatctgtacttgagaaataaaagaattttgtcttacaataaactgattttagaaatctatcaactgtgagaagatatggcctatataagccagtctaggcaatcacaattctctaaattcccaaggagagagacaatagattaaatgtagtgggcattcttgactcttgcggaggggatataaggaagggaaataaatgaggaaagagagagaaagagcccacaatatatgatttccactcaatttktcttttaatggaggaccttcccagatgtaggcttctgtctttatctgttttctgcaaactgggtaatttataaagaatataagtttagtcttgtgtgtttagtgtctagcgtgtggcttcttgcatggagaaatgaccactgcagagctctcctgctccagaaagaaa

SEQ ID NO: 283951 - DNA, 598 bp, Homo sapiens
attccacgttatgctgagttgtataattatttcattatatattacaaygtaataatataaagtgcacaataaatgtaatgcccttgagtcatcctgaaatcatcttccttcccacgaaactgaaccctggtgccaaaaaagtttggggattgctggtatacaaaaacaaaaaaactggtataggtaaaaacttaattggtgtttatgaagacgtaatgcttcaaataatttaagcaattctcaattatattaatttatgaaaaaaagaaagaaaaacctgctttaaaattgtgataatatcagggttcctcagagttccatcttggatcatttttctgcatattctccctattgaataacatctacatgtaactttaacaatgatcattcccccaaggtatctgtttctatgctttcagcccaaaccaatattctaaaattcagactgtaatatcatcagacctactaaaggtttccagttagatactctaatgatatcttaatatcatatatcaaaaatgcctcttttcccttagacctattttttcccaaatttttacaccattaatatcagtctcatttcaattcctgaaagcag

SEQ ID NO: 283952 - DNA, 598 bp, Homo sapiens
attccacgttatgctgagttgtataattatttcattatatattacaatgtaataatataaagtgcacaataaatgtaatgcccttgagtcatcctgaaatcatcttccttcccacgaaactgaaccctggtgccaaaaaagtttggggattgctggtatamaaaaacaaaaaaactggtataggtaaaaacttaattggtgtttatgaagacgtaatgcttcaaataatttaagcaattctcaattatattaatttatgaaaaaaagaaagaaaaacctgctttaaaattgtgataatatcagggttcctcagagttccatcttggatcatttttctgcatattctccctattgaataacatctacatgtaactttaacaatgatcattcccccaaggtatctgtttctatgctttcagcccaaaccaatattctaaaattcagactgtaatatcatcagacctactaaaggtttccagttagatactctaatgatatcttaatatcatatatcaaaaatgcctcttttcccttagacctattttttcccaaatttttacaccattaatatcagtctcatttcaattcctgaaagcag

SEQ ID NO: 283953 - DNA, 598 bp, Homo sapiens
attccacgttatgctgagttgtataattatttcattatatattacaatgtaataatataaagtgcacaataaatgtaatgcccttgagtcatcctgaaatcatcttccttcccacgaaactgaaccctggtgccaaaaaagtttggggattgctggtatacaaaaacaaaaaaactggtataggtaaaaacttaattggtgtttatgaagacgtaatgcttcaaataatttaagcaattctcaattatattaatttatgaaaaaaagaaagaaaaacctgctttaaaattgtgataatatcagggttcctcagagttccatcttggatcatttttctgcatattctccctattgaataacatctacatgtaactttaacaatgatcattcccccaaggtatctgtttctatgctttcagcccaaaccaatattctamaattcagactgtaatatcatcagacctactaaaggtttccagttagatactctaatgatatcttaatatcatatatcaaaaatgcctcttttcccttagacctattttttcccaaatttttacaccattaatatcagtctcatttcaattcctgaaagcag

SEQ ID NO: 283954 - DNA, 595 bp, Homo sapiens
ctgagttgtataattatttcattatatattacaatgtaataatataaagtgcacaataaatgtaatgcccttgagtcatcctgaaatcatcttccttcccacgaaactgaaccctggtgccaaaaaagtttggggattgctggtatacaaaaacaaaaaaactggtataggtaaaaacttaattggtgtttatgaagacgtaatgcttcaaataatttaagcaattctcaattatattaatttatgaaaaaaagaaagaaaaacctgctttaaaattgtgataatatcagggttcctcagagttccatcttggatcatttttctgcatattctccctattgaataacatctacatgtaactttaacaatgatcattcccccaaggtatctgtttctatgctttcagcccaaaccaatattctaaaattcagactgtaatatcatcagacctaytaaaggtttccagttagatactctaatgatatcttaatatcatatatcaaaaatgcctcttttcccttagacctattttttcccaaatttttacaccattaatatcagtctcatttcaattcctgaaagcagactgagagat

SEQ ID NO: 283955 - DNA, 305 bp, Homo sapiens
caggtgtgttacatgtatacatgtgacatgttggtgtgctgcacccattaacttgtcatttacgttaggtatgtctcctaatgytatcccttccccctcccccgaccccacgacaggccctggtgtgtcatgttccccaccctcgtgtagagaacatgttcccctgactgtcactagaggtcacttgactaatttccagaagtttgtaacttgcattaattctacagtccttttcattactccaatttataaaacatcaacattctgtttaccattgcataagaagtaatcactataaaactaag

SEQ ID NO: 283956 - DNA, 875 bp, Homo sapiens
caggtgtgttacatgtatacatgtgacatgttggtgtgctgcacccattaacttgtcatttacgttaggtatgtctcctaatgttatcycttccccctcccccgaccccacgacaggccctggtgtgtcatgttccccaccctcgtgtagagaacatgttcccctgactgtcactagaggtcacttgactaatttccagaagtttgtaacttgcattaattctacagtccttttcattactccaatttataaaacatcaacattctgtttaccattgcataagaagtaatcactataaaactaagwactatcagaatcagtcatataaacatatatttataacttaaaawatatatatataaaacttaaaaataatgataatatctcacctttttctaagagaacaattcaatattctaagtagacaggtagcagcagcacttaaacactatggcaaggtaaacatgttcatgtaatatcattaggcatgagtaagtatcatagtagtttgacctacatggctcttcaggacgggctaattgatcaggatctttgccactaaaataagttggcatcctgtgagattaaatgtgagatatatagagaaagaaaaaactaggtctaatgaagagaatcttgatggaaatctccattttatattcacagctcctctccagattccaagatattagctcacagatctgagaccttgaatgaagagtctgggtaagccatgagaaaaaactttcagtagtctcaaagatatacatcttccttctagaccttcccaataagttctacagcctttttaatatttgcaacaaatatgccactctggtgggggatattgataatgggagaggctgtgcatatgt

SEQ ID NO: 283957 - DNA, 569 bp, Homo sapiens
actatcagaatcagtcatataaacatatatttataacttaaaatatatatatataaaacttaaaaataatgataatatctcacctttttctaagagaacaattcaatattctaagtagacaggtagcagcagcacttaaacactatggcaaggtaracatgttcatgtaatatcattaggcatgagtaagtatcatagtagtttgacctacatggctcttcaggacgggctaattgatcaggatctttgccactaaaataagttggcatcctgtgagattaaatgtgagatatatagagaaagaaaaaactaggtctaatgaagagaatcttgatggaaatctccattttatattcacagctcctctccagattccaagatattagctcacagatctgagaccttgaatgaagagtctgggtaagccatgagaaaaaactttcagtagtctcaaagatatacatcttccttctagaccttcccaataagttctacagcctttttaatatttgcaacaaatatgccactctggtgggggatattgataatgggagaggctgtgcatatgt

SEQ ID NO: 283958 - DNA, 569 bp, Homo sapiens
actatcagaatcagtcatataaacatatatttataacttaaaatatatatatataaaacttaaaaataatgataatatctcacctttttctaagagaacaattcaatattctaagtagacaggtagcagcagcacttaaacactatggcaaggtaaacatgttcatgtaatatcattaggcatgagtaagtatcatagtagtttgacctacatggctcttcaggacrggctaattgatcaggatctttgccactaaaataagttggcatcctgtgagattaaatgtgagatatatagagaaagaaaaaactaggtctaatgaagagaatcttgatggaaatctccattttatattcacagctcctctccagattccaagatattagctcacagatctgagaccttgaatgaagagtctgggtaagccatgagaaaaaactttcagtagtctcaaagatatacatcttccttctagaccttcccaataagttctacagcctttttaatatttgcaacaaatatgccactctggtgggggatattgataatgggagaggctgtgcatatgt

SEQ ID NO: 283959 - DNA, 509 bp, Homo sapiens
cccaataagttctacagcctttttaatatttgcaacaaatatgccactctggtggsggatattgataatgggagaggctgtgcatatgtgggggaagggatcaatgagatatctctgtacctttctcttaattttgctgtgaacttaaaattgctctaaatattcttaaataatataagtgtcaatgcctatcacatgtatacacaaatataaatggttgaaaaaattaccgcagtcgaagaatactatcatcactttgcctcagagctacaacatttatctttcaccgagtgtcataattcagtttggaaaaactttgatgatctcaccatatcagaaacaataaatatatgacatcataatgtttggtcctggagagaaggaagtgatatactccataactattacaagataaaggcttataaagcatacaaataagttagaagtaagaacagatatggaattgtattttgatggtattttatccaaattctccttttttgattacc

SEQ ID NO: 283960 - DNA, 509 bp, Homo sapiens
cccaataagttctacagcctttttaatatttgcaacaaatatgccactctggtgggggatattgataatgggrgaggctgtgcatatgtgggggaagggatcaatgagatatctctgtacctttctcttaattttgctgtgaacttaaaattgctctaaatattcttaaataatataagtgtcaatgcctatcacatgtatacacaaatataaatggttgaaaaaattaccgcagtcgaagaatactatcatcactttgcctcagagctacaacatttatctttcaccgagtgtcataattcagtttggaaaaactttgatgatctcaccatatcagaaacaataaatatatgacatcataatgtttggtcctggagagaaggaagtgatatactccataactattacaagataaaggcttataaagcatacaaataagttagaagtaagaacagatatggaattgtattttgatggtattttatccaaattctccttttttgattacc

SEQ ID NO: 283961 - DNA, 509 bp, Homo sapiens
cccaataagttctacagcctttttaatatttgcaacaaatatgccactctggtgggggatattgataatgggagagkctgtgcatatgtgggggaagggatcaatgagatatctctgtacctttctcttaattttgctgtgaacttaaaattgctctaaatattcttaaataatataagtgtcaatgcctatcacatgtatacacaaatataaatggttgaaaaaattaccgcagtcgaagaatactatcatcactttgcctcagagctacaacatttatctttcaccgagtgtcataattcagtttggaaaaactttgatgatctcaccatatcagaaacaataaatatatgacatcataatgtttggtcctggagagaaggaagtgatatactccataactattacaagataaaggcttataaagcatacaaataagttagaagtaagaacagatatggaattgtattttgatggtattttatccaaattctccttttttgattacc

SEQ ID NO: 283962 - DNA, 601 bp, Homo sapiens
ttggtcctggagagaaggaagtgatatactccataactattacaagataaaggcttataaagcatacaaataagttagaagtaagaacagatatggaattgtattttgatggtattttatccaaattctccttttttgattacctttaagtctctttggcatcctctccttcaccccagccttcctatgctaaatcttcagggagatacacatgactcacagaaggcaattaactcatcactgagctaaaatgtctgataaacccaattgcagaaattaggtaaagatttatgggagcatgtggtttaggcaagagatataagaatgttctcctacctatctcaaatttaagtattaaaatttttattatgttttgtatgtctacatgttttaaaaaaagaaaaaacaaacactatctcaagagaatgaaaagacaaaccatgctgttatccaaaatatactaaagactcaaaactcaataataagaaaaaaaccaacccaattaataaatgggcctaagactttaatggatacmttaccaaagaagatatacagataacaaataggcatatgaaagtatgtttcatatcaaatacagtca

SEQ ID NO: 283963 - DNA, 509 bp, Homo sapiens
gattgcacatataaattcatatttcccatgtatacttccgttttgaactataatctttttagtaaaattcrtcagaatctacaaatctgtaaaagtatccgaagagtatctcatcaactcctttgtgttctgtagaagctttcacaaagctattgtcatgctcaagaattcatgatattccaaagtttcaccgttaagtagaaatagagatacagaaagaggcatgctatgaagtttttaatacagaaagtcatgattttggcaatgaatctatgataccttattttgtcatccttctcgtcttggattagttgaagtgggaatgtgtttgcagtcacacatgctgtaggcaagaaggtgtttatcgaggagccactatttattcctattttcagagagctgtccccagcctaatgaatacataagataataagaacaattctgttacccattttcattatttcctttcttttttctctaaatgtttttttttactgtaatcacttatg

SEQ ID NO: 283964 - DNA, 509 bp, Homo sapiens
gattgcacatataaattcatatttcccatgtatacttccgttttgaactataatctttttagtaaaattcgtcagaatctacaaatctgtaaaagtatccgaagagtatctcatcaactcctttgtgttctgtagaagctttcacaaagctattgtcatgctcaagaattcatgatattcmaaagtttcaccgttaagtagaaatagagatacagaaagaggcatgctatgaagtttttaatacagaaagtcatgattttggcaatgaatctatgataccttattttgtcatccttctcgtcttggattagttgaagtgggaatgtgtttgcagtcacacatgctgtaggcaagaaggtgtttatcgaggagccactatttattcctattttcagagagctgtccccagcctaatgaatacataagataataagaacaattctgttacccattttcattatttcctttcttttttctctaaatgtttttttttactgtaatcacttatg

SEQ ID NO: 283965 - DNA, 562 bp, Homo sapiens
taaattagtaaggcacagaaggtctaccacacagcttaagccaactctttctgaggaaatgatgataaatttcttttgatcatgcacaaatggcttaggaaatgactgggaggtagttgatattccaagattcaagcatctggtattctaaaaaaaccaatataactgcgtcctagttctgcaratttgttatcaaaacaatttaggctaagcactatagtcatatacttattccagggcacatcaggctactaatgtaattactgaatgggttctaagcagaaggaaattaaattaagaaaaactgttttgcatagcagtgatttatggcctactttactccccaactagtgagaagtgtgaaatccaagttttgcaaaatacagttttaatagtaaaatatttgaaaaagaattcataggaggaaaaggagactcatcaaatcaaaggagaagttataatcacatgtgagtctttacagtagtatttgaacaataatggttctaatcctagtaaatgaaaatccattatttttcaagtgctgcagactatttcagattct

SEQ ID NO: 283966 - DNA, 580 bp, Homo sapiens
ttcacattatctgattatcaactttaattctcmcttgccagataacatatttatgggttccttggattaaaaattgaacaattttggtggccatcattctgtctaatgcagatcccaatccaaactcatatctctcttattctgtagcagttgcttattatctataactatgaattgttttatagcattattttcattgctatttgtgtaacttatccttctgaacagcattctcaatgcattaaatttattcatattcctttcagggtttgacaccctgaagggccagcctagcaccccaaatctaaatatatctttatattctttctaaaagttacttttcaagaaacctaaaataagacattaactttaatcaattgaggtattgtacctcaggacactcagctggttatttgatactttttaacaattcatgcatatgctttgatggctcatcagaaattcataacaaaccagatgatcaatgctgatacaatggccatgtgcagatacaatttattctaaagctgcagttatcagaactcgattgcagagtaagatagactctttgcaaagtatc

SEQ ID NO: 283967 - DNA, 580 bp, Homo sapiens
ttcacattatctgattatcaactttaattctcacttgccagataacatatttatgggttccttggattaaaaattgaacaattttggtggccatcattctgtctaatgcagatcccaatccaaactcatatcyctcttattctgtagcagttgcttattatctataactatgaattgttttatagcattattttcattgctatttgtgtaacttatccttctgaacagcattctcaatgcattaaatttattcatattcctttcagggtttgacaccctgaagggccagcctagcaccccaaatctaaatatatctttatattctttctaaaagttacttttcaagaaacctaaaataagacattaactttaatcaattgaggtattgtacctcaggacactcagctggttatttgatactttttaacaattcatgcatatgctttgatggctcatcagaaattcataacaaaccagatgatcaatgctgatacaatggccatgtgcagatacaatttattctaaagctgcagttatcagaactcgattgcagagtaagatagactctttgcaaagtatc

SEQ ID NO: 283968 - DNA, 633 bp, Homo sapiens
tcctatgctacataaatattcagagaaatactgcaattatgaatacatatgtaattttataaatacactgtacacatatatactgattttcattcacaatactacttgtcaaccaaacccacatattctacatgtcctactgtctaatgttttgttatcagaaccaaaattatttattttgccttatttttaacactccatctgtacagatatattgttctttcctatataaccaactatataaaaattcataattcttttttatttttaaaattacgaatcattaatttgaatgttatttctatatgtgtgtatgcctgttctgttattacacaaaataaaaaaacaggattagaattttctagttcagagaaggctraaccaagggtgaaatcttatggctctctgacagaaaaaaaaatgtttcactttcaggatactctgattttggattgttccattttgaaatggtaattagcagttgatgctactaaaggagaagtattgggatttctgctagccttcatatcttgccctgatgttgagatataatcctttattattataatcctcaattataatgttttattgaatacgtattacaatataaatgtaaattctataaatacacca

SEQ ID NO: 283969 - DNA, 562 bp, Homo sapiens
caaatttcaagtcttagaaaaaatatttttaactcagagtttgctaggttgcaaaataaaagctgtaaaccaaaaataaaattttaaaccccccaccaactgaacggacctctcctcttggtcaagggcattctaaaatcaacctgaaacactaattcatgttacgatggaaatggatggccagacatgcctcatcataccctcctctttttgaaattcaagcatagctgtctagagttaacatgaaaaccaagactctctgtagcaataagacaataacatgacagatagcaagcctgaaagaaatggaagtattttgtcccaaaatctattcttttttatattttgaaatggccctgcaaaactgtcttttgtggggaaaaatttacattctgtagagaatttcttttgctcctaggtctttttcctgatccaggagagaactaactaagagtttggcaccttttaaagtcccgtaagaaacatttacaatctrttctctctgaagcctgctacctggaggctacctctgcataacaagaacttcggtctccacaaccca

SEQ ID NO: 283970 - DNA, 1064 bp, Homo sapiens
tgtgcttggctcgtgcagccagcccagatcccgtacctgccaaatgcaagcagggcacagaacggcaaggggtgtgtgggtaagtgagcacagggcccagccactgtgcacagccagctaggcaaactggctgctgtggcatggcaggtagctccaggcactggcataggtgctggctccatgagaggctgtggctggaccagatgtactgcacgtggcttctgctgacsccacctgcctctggactagaggaatatagtggtacctgcaagcttggagaggccaggaacctcagcaccccaaagagggtgtcacagccctggcttagggagcccctgtggctgggcttcccaaagggccacagctcttctctctttctcatcccctgtaaagtggtacgtgtttcagccctgtttgtgttacagtttttttagtcctgaaattcagtgggtcatgagttcttttcccgtatccaggaaaaatgaggtatgtggacaactggagggtgagggaaaactggatagtgagcaagtggagtgcagcttcattgagtggcacaacagttctcaggagacccaaagtgcggtctaagaatatctaagaatgaaacgaacttggcaatacaatgaagttgggawagccctggcttagggagcccctgtggctgggcttcccaaagggccacagctcttctctctttctcatcccctgtaaagtggtacgtgtttcagccctgtttgtgttacagtttttttagtcctgaaattcagtgggtcatgagttcttttcccgtatccaggaawaatgaggtatgtggacaactggagggtgagggaaaactggatagtgagcaagtggagtgcagcttcattgagtggcacaacagttctcaggagacccaaagtgcggtctaagaatatctaagaatgaaacgaacttggcaatacaatgaagttgggaacagagacagatccatgcagctggaactttgtgagagagcggggaatgttgtacaaaatgaggttggatgatggacaagactaggtcagaaaagattatataat

SEQ ID NO: 283971 - DNA, 628 bp, Homo sapiens
ttaataagcctgcaagcatccatgaaaatcagtgtagaggaagtcatgaacataaaaatactatttttatatgatagctcaggcagagcatgcggaaaagaaagaatgaaaggaagaatgtctgaaaactgagccttcaagtgttctgccaataatagattagtaggaaaggagaagccagcagataaatctcgaaggataggtccttaaataggagaataaaataggaagagaggttaacaaaaattaagtgaagaaattgtttcatggtggaaagatgagctgtcagacgtggaagacttcaagaagtgagaaaagataactatatatgaatgactatagccttttctcttctctttcttctccctctycaaatcagagtttcagaatcaaccctcagacatttcagttccaaatgtctgcagcagggcacccaaaccataaatgattcttattcaagtgaattttagaaacgctgccacagaatgattagagaataaattgttccttgcaaggagccacaaatttgtttttgtgtatttgtgtgatttaaaagcaattagttaaaaaacactattatattttaaaaaattcttccctgtgtgctttctcctaaggataacagcag

SEQ ID NO: 283972 - DNA, 616 bp, Homo sapiens
tccaacttctgtcatgcatcatgaaatgtgaactttaactccaatactggaagagtgctcaccatccaaggcacagttcttgggatgtgtgtacgttgtgttacttaaacctaacttaaaaataggtgggtactgtaagattttcctgttgccactataacaaattaccacaaacttgatgactgaaaacaataaaactttattctcttatagttttctggragtcagaagtccaaaatcagtttcacttaagctaaattcaagttgtcggtaggcctgtttcttgtggaggctgtgaggggataagccacttccttttatttttcagctcctgtggctgtgcttcttttatcacctcccatctcattatggtttgtagtattctttgctccgaggaaatattaaaacaatgtcgaaacacaaagtaagtgtataatacagtggggttagtaacaatcagtccagggaaaacaaacaagactgttttgtgtgtagacccaacctgactattttaagattcactaattcttctgaagaaaacaaacagtatatgcattcagatttgtgaaaaaatttatttttttatttcataatagtacctgtgtaaggctgaaaa

SEQ ID NO: 283973 - DNA, 616 bp, Homo sapiens
tccaacttctgtcatgcatcatgaaatgtgaactttaactccaatactggaagagtgctcaccatccaaggcacagttcttgggatgtgtgtacgttgtgttacttaaacctaacttaaaaataggtgggtactgtaagattttcctgttgccactataacaaattaccacaaacttgatgactgaaaacaataaaactttattctcttatagttttctggaagtcagaagtccaaaatcagtttcacttaagctaaattcaagttgtyggtaggcctgtttcttgtggaggctgtgaggggataagccacttccttttatttttcagctcctgtggctgtgcttcttttatcacctcccatctcattatggtttgtagtattctttgctccgaggaaatattaaaacaatgtcgaaacacaaagtaagtgtataatacagtggggttagtaacaatcagtccagggaaaacaaacaagactgttttgtgtgtagacccaacctgactattttaagattcactaattcttctgaagaaaacaaacagtatatgcattcagatttgtgaaaaaatttatttttttatttcataatagtacctgtgtaaggctgaaaa

SEQ ID NO: 283974 - DNA, 616 bp, Homo sapiens
tccaacttctgtcatgcatcatgaaatgtgaactttaactccaatactggaagagtgctcaccatccaaggcacagttcttgggatgtgtgtacgttgtgttacttaaacctaacttaaaaataggtgggtactgtaagattttcctgttgccactataacaaattaccacaaacttgatgactgaaaacaataaaactttattctcttatagttttctggaagtcagaagtccaaaatcagtttcacttaagctaaattcaagttgtcggtaggcctgtttcttgtggaggctgtgaggggataagccacttccttttatttttcagctcctgtggctgtgcttcttttatcacctcccatctcattatggtttgtagtattctttgctccgaggaaatattaaaacaatgtcgaaacacaaagtaagtgtataatacagtggggttagtaacaatcartccagggaaaacaaacaagactgttttgtgtgtagacccaacctgactattttaagattcactaattcttctgaagaaaacaaacagtatatgcattcagatttgtgaaaaaatttatttttttatttcataatagtacctgtgtaaggctgaaaa

SEQ ID NO: 283975 - DNA, 547 bp, Homo sapiens
ttattatttgttattttgctggaaatggatgccagagacccaatgatttactggggctcatgcttacaagacatcacaattatagaagttgaagcaacatttggctgtctggtgggacagacattgtggacatgatgtgcccagcagatagtgtgagttagggccaagatccttttcctacattaatgctactgttttgacatctcatcaactaaagttgagagtatggcctaccccaaaaactaatgagaaagaatgtctgtattttcttttttctgtacttcctctaagtacacctgcactttctcacaatccctagaatatggtaaatattgatgaaatgcagcaaaatcaagaaagcctcagaacaaaacctggcaaataaaaatgtatttcatttcaatagtaaactgaattttttacagtgcattttcagaagggcagtaatattgcccmcagaattagtaatgcccactgacttgagggtttcccttaaacagcaggtgatttaaatctccaccttatttatttttttaagtcctgctga

SEQ ID NO: 283976 - DNA, 1026 bp, Homo sapiens
ttattatttgttattttgctggaaatggatgccagagacccaatgatttactggggctcatgcttacaagacatcacaattatagaagttgaagcaacatttggctgtctggtgggacagacattgtggacatgatgtgcccagcagatagtgtgagttagggccaagatccttttcctacattaatgctactgttttgacatctcatcaactaaagttgagagtatggcctaccccaaaaactaatgagaaagaatgtctgtattttcttttttctgtacttcctctaagtacacctgcactttctcacaatccctagaatatggtaaatattgatgaaatgcagcaaaatcaagaaagcctcagaacaaaacctggcaaataaaaatgtatttcatttcaatagtaaactgaattttttacagtgcattttcagaagggcagtaatattgcccccagaattagtaatgcccactgacttgagggtttcmcttaaacagcaggtgatttaaatctccaccttatttatttttttaagtcctgctgawaagaaaaaaaatctttcagtccttcttacattggtttaacaatctcaagcaagtctattatttcttatttttttctgaacaattttagtctacttacaatgttttttgttgataattwctagtcaagcaggttataaatttttttcccacaggagttagctaaaagcaaaatcaatattctagatgagtattaaccatgtgtgtatcttatcaatatataaatgctttgcttcatcattgctcattgaagattttcacaagtttattgaatagtaaacctggatctgtaaagaaatagaaattgtaaggctagaagaaaaatgaaatagattgcttcaaaagagagaaagaagagtaatggcaagttattcaataagactttaagagggaggatacaggaaaagaaaaaatagaaaaagctatataaaacacaaaaatacgtgtttttaaaataatttttaaataaataaaaccaaac

SEQ ID NO: 283977 - DNA, 1190 bp, Homo sapiens
tatttttttttttttaattttttagtagagacagggtttctcctacattggtcaggctggtcgcaaactccagacctcaggttatctgcccacctcagactcccaaagtcctaggattacaggcatgagccaccacacccggccctttttatgttttatcaccagaaaataactccccattttttataagtttaaatttctaaaaaacaatacaattagagatgtcttccactgtccagcctttggcttttcaaatacatgtgtgtgcacgtgtgcacgcaaacacacacacacgggcatgtgcacacacatactaacagagaaacataaatatttatctttcatatttaatttgaaaaataccacagataacccaattcaatagtcctgtatgcaattcaaaactatatccatgagggaatatctggtttttatattagtattttgatgtgcggtcaatgcctgtcaaacagatctgaaaataaacttctcatgattagtcrtgaaataaattgtatattttcactctgtccatcataatcaaatcataaaataaaaaacaaaataacttaaataagaaagtttgaataatatgggaaatgcatttataaagagaattcttacatctggggagaaaggtattcwagttagtgcagcccaaacttgctcttcgagcttctcttaccactataactcatttgcttttgcttactgagggaagaggagatgttgattctctttgattttttttttttttttacttagatatagaactgtgaaaagtaagggggaaggatgagaaaccaagagtggttccgtggaagccaaatgaatttctaggtttctaagatgtcttgcwtgttaaatactacttacttattgctcaattaacataaagatgaagagctcacctttcatagctatatggtagtcatggtcatcatgaacacaccaattttaaagcagtgtttaggaaaatcttaacagatcatttaagagaaaaatggaaaaatgaaatttggagacagaaagcctaagcaactctttaggagttttgctgaaaaatgaacaaataaatgaattgagagctccagggaaatggagatgaaagaaaaaaaggtatttcttgtaacaaccaaaaatataaattacttatatgctagctaatgttattcagtaaagaaggaaaa

SEQ ID NO: 283978 - DNA, 533 bp, Homo sapiens
tggcatttgtaagaactgaaaaagagggttttgagcattggtttctaaatgactccaaaatgttgccaaagagtcaggcattgagggaagacaaatgagtgtctcaatgcatggttcttcattagaaattatatattgtctccaatcaacaaaatagggtagaatttttgacgatgtttgaatggatatatggtaatatagatagaagccaatatattattcaccttaagactatttgattatagggtcatatggtaagtgtctaacttaaaaakaaactgccatgcttgtttcaagattggctgtgcccagctcaattatcttcaaccacatacaagagactcagagcctctgcattctcaccagcagttggtattgtcactaatttttcttttagccattctaagatgtgtataatacctcttatcggggttttagtttgcacttttccaaatgtagtaattatgaacatatttttatgtgtttatcttccatctgtacatatcttcagccaaatgtcaacgtttattttg

SEQ ID NO: 283979 - DNA, 561 bp, Homo sapiens
tgtctgctttcatggcacagagttaaacatttctttggatacagcatttgggaaacacagtttctgtccattctacgaatggacatttggcatctcattgaggccaatggcgtaaaaagtaaatatccaaggataaaaaatagaaggaacctctctgagaaaccgcattgtgatatgtgcattcatgtcacagagttaaaacttccttttcatgcagcagttttgaaccactgttttcgtagaatctgcgaagggatattgggggrtgcattgaggtctatggtgaaaaagaaagtattttcagtaaaaaactacaaagaatctttctgagaaactgctttgtgatgcgtacattcatctcacagagttaaacatttctttggattcagcagtatggaaacactgtttttgtagaatctgcaaaggggtatttaggagctctctgaggccaaggcaaaaaagtgaatatcccaggataaaagctagaagaaaactatctgagaaaccacttgcttatttgtgcatttatctcacagagttaaactttcttttaattcagca

SEQ ID NO: 283980 - DNA, 793 bp, Homo sapiens
acctctgtgtaatgtgtgccttgatctctcaaagttaaaattttcttaacattcagcagtttggaagcgctgtttttgtaccatctgcaaaggtatatttggttgcgcattgcagcctatggtgaaaaagaaatatcttcagataaaaactacaaagaagatttctgagaaactgcttcaggaaaggtgcattcatmtcacagagatatacatttctttggattcagcagtttggaaacactgtttttgtccawtagatagctgccttctagtttttttcccttgatattcawtttctcacctttagcctcattaagcctccaaatttcccttcatagatactagaacaagagtatttccaaactgctgaatccaaagaaagcttcaactttgtgagatgaatacacacatcacaaagcagtttctcagaaagcttcttactagtttttatctgaaggtatttcattttccaccttatgccataatgcactcctaaatatcccttctttgattctgtcaaaacagtatttcaagctgctgaattacaaaaaagttttacctctgtgatgggaatgcacacatcacaaagcggtttcactgatagcttccttccactttttatccagggatattcactttttcaccattggcctcattgggctccgaaatgtccatttgcagaatggacaaaagcagtgtttccaaactactgaatccacagaaatgtttaagtctgtgagatgaatgcacgcatcacaaagcagtttctcagaaagattctttctagttttta

SEQ ID NO: 283981 - DNA, 496 bp, Homo sapiens
tttgatggtgggatatttgctttttccccattggcctcaatgatctccaaattctccattcacataatggacaaaaacagtgtttcaaaactgctgaatccaaagaaatgtttgattctgtgagataaatgtacacatcccaaggagtttctcagaaagcttctttctagttgttgtctgaagatgtttcctttttcaccataggcctcaatatgctcyaaatatccctttgcaaaagactccaaaacagtttttccaaactggtgaataaataggaaggtttaactctctgagatgaatgtacacatcacagagcagtttctcagatatcttctttctagtttttatcctgagatattggcttttttgacattggcctcaatgagctcccaaacatccatttgccgaagggacaaatacagtgtttccaagctgctgattaaaaagaaagctttaactctttaagaagaatgtacacatcataaagcagtttctc

SEQ ID NO: 283982 - DNA, 602 bp, Homo sapiens
aactgctttgtgatgtgtgcattcacctcatagagttaaaactttcttttcattcagcattctggaaacactgttgttgtagtctctgtgaagtgatatttgggagctctttgagaccaatggcaaaaaagaaaacatctcaggatgaaaactagaaggaagctacttgagaaactgctttgtgatgtatgcattcatctcacagagttaaaattttcttttcattcagtagttcagaaactctgtttttgtagaatcttcaaagtgatatctggragtgtattgaggcctatggtttagaaagaaatatcttcagataaaaactagaaagaaactttctgagaaactggtctgtgatgtgtgcattcatctcacagagttcaacctttctgttgattcagcagtttgcaacactgtttttctccattctgtgaaagaatatgtgggagctctgtgaggccaaatgtaaaaaagtgaatatccaagtataaaatctccaaagaagctatctgagaaacagctttttgatgtgtgcattcacctcacagagttaatgctttcttttcattcagagtctggaatactggtttggcagaatccac

SEQ ID NO: 283983 - DNA, 557 bp, Homo sapiens
taaacctttcttaggattcagtagtttgaaaaactgttgttgaaaagtctgtgaagggatatttaggagcttaatgaaaccaaaggcaagaaaatgaatatctcaggaaatgaactagaaggaagctatctgagaaacygatttgtgatgtgtgcattcatctcacagaattaaacatttattttcattcagcagtttggaaacactgtttttctgtgaagttatacttcagagtgcattgaggcctatggggaaaaaggaaatatcttcagataaaaacaagaaagaagctttctgagaaactgtttgtgatgtatgcatttatctcacaagattaaacctttcttttcattcagcagtttggaaacactgttttcatagaatctgtgaagtggtatcttggagtgcattgaggcctatggtgaaaaaggaaataacttcagataaaaactagaaagaagatttctgacaaaatgattgtgatgtgtgcattcatctgacagcgttaaacctttctgtggattcagcagttcagaagcacagttgtagcagaatct

SEQ ID NO: 283984 - DNA, 494 bp, Homo sapiens
ctagaaggaagctatctgagaaaccgatttgtgatgtgtgcattcatctcacagaattaaacatttattttcattcagcagtttggaaacactgtttttctgtgaagttatacttcagagtgcattgaggcctatggggaaaaaggaaatatcttcagataaaaacaagaaagaagctttctgagaaactgtttgtgatgtatgyatttatctcacaagattaaacctttcttttcattcagcagtttggaaacactgttttcatagaatctgtgaagtggtatcttggagtgcattgaggcctatggtgaaaaaggaaataacttcagataaaaactagaaagaagatttctgacaaaatgattgtgatgtgtgcattcatctgacagcgttaaacctttctgtggattcagcagttcagaagcacagttgtagcagaatctacaaaggcatatttgggagcttattgaggccaatggcaaaaaagggaacat

SEQ ID NO: 283985 - DNA, 552 bp, Homo sapiens
taccatgataaaaacttgaagaaagctatctgagatactgctttgtgttgtgtgcattcacctcgaacagttaatgctttcttttgattcagcaatctgtaaacactgttttggcagaatccacagagggatatttgggagtgcattgaggcctatggtgaaaaaaacatcttcagataaaaattagaaaaaacctttccragaaactgttttgtggtgtgtgcattcatctcacagagttatacctttcttggtattcagcagtttgaaaacactgttgttttagaatctgtgaaggaaaatttgggaacacaaggaggccaaaggggaaaaatggactatcccagaataaaaactagaaggaagctatctgagaaaccactttgtcatgtgtgcattcatctctcagaggtaaaacattcttttcattcagcagtttggaaacattgttttgtagattatgtgaagatatatattggagcgtatagaggcctatggtgaaaaaggaaataacctcagataaaaactagaaaaattttcctcagaaactgc

SEQ ID NO: 283986 - DNA, 552 bp, Homo sapiens
taccatgataaaaacttgaagaaagctatctgagatactgctttgtgttgtgtgcattcacctcgaacagttaatgctttcttttgattcagcaatctgtaaacactgttttggcagaatccacagagggatatttgggagtgcattgaggcctatggtgaaaaaaacatcttcagataaaaattagaaaaaacctttccgagaaactgttttgtggtgtgtrcattcatctcacagagttatacctttcttggtattcagcagtttgaaaacactgttgttttagaatctgtgaaggaaaatttgggaacacaaggaggccaaaggggaaaaatggactatcccagaataaaaactagaaggaagctatctgagaaaccactttgtcatgtgtgcattcatctctcagaggtaaaacattcttttcattcagcagtttggaaacattgttttgtagattatgtgaagatatatattggagcgtatagaggcctatggtgaaaaaggaaataacctcagataaaaactagaaaaattttcctcagaaactgc

SEQ ID NO: 283987 - DNA, 602 bp, Homo sapiens
cactgttgtagaacctgcgaagagaaatttaggagctcactgaagccaaaggtgaaaaagygaatatcccaggataaaaactagaaggaagctatctgagaaaggactttgtgaggtgttcaactaacggagataaacctttcatttcattcagcagtttggaaacactgattttgtagaatctgtgaaatgatatctgctagtgtgttgaggcccatggttaaaaaagtaatatcttcagataaaaactagaaagaagctttctgagaaactgctttgtgatgtgtgcattcatctcacagagtcaaacctttctttggattcagcagtgtggaaacattgttttagaatgtgcgaagaaatattaaggagctcattgaggccaatggtgaaaaaataaatatcccaggataaaaactagaagaaagctatttgagaaaccactttctgatttgcacaaccatctcactgagttaaacatttcttttcattcagcagttggaaaacaccgtttttgtggaattctgtggagggttatctgggagtgcattgaggcctagggagaaaaattaaaaatcttcagataaaaaccagaaagaagc

SEQ ID NO: 283988 - DNA, 636 bp, Homo sapiens
ttgggagctcattgatgccaattgcgaaaaagtgaatatcccaggataaaaactagaaggaagctatctgagaaactgctttgtgatgtgcacattcacttcacagagttaaacatttcttttcattcagcagcctggaaaaactgtttttctttttttttccgaatccatgaagacatatttctgagcacattgatgcctatggtgaaaatggaaatatcttcagaaaaaaacgagaaagaagctttctgagacactgctttgttatgtgtgcattcatgtcacagagttaaacctttctttggattccacagtttgtaaacactgttgttgtagattctgcaaggagatatttggagctcattgaggccaaaggtgaaaaagtgaatatcccaggaaaaaaactagaaggaagctatctgagaaacagctttgggatatgtgcattcatctttcagaattaaaattcttttcctttggcagtttggaaacrctgcttttgtagaatctgtgaagggatattagagagagcattaaggcctatgatgaaaaaggaaatatctttagacaaaaaatagaaagaagatttcagagaaactgctttgtgctgaatgcattcatgtcacagagtgaaac

SEQ ID NO: 283989 - DNA, 499 bp, Homo sapiens
  misc_feature (1)...(499): n = A,T,C or G
atatcccagggtaaaatatacannggaagctatctgagaaaccaaattgtgatgtgtgtattcttctcacatggttaaacctttcttttcatttggcagtgtggaaacgctgatctggtagtatctgcaaaggaatayttgggagagcattgaggcctatggtgaaaaaggaaatctcttcagttgaaaactagaaagaagctttcttaaaaactgccttgtgatgtgtgtgttcatctcacagagtgaaacctttctttagatccagcagtttggaaacactgtttttgtccattctgtgaatggacatttgggagccttttgaagccagtggcaaaaaatcgaatatcccagtataagaagtagaaggaagctatctgagaaaactctttgtgttctgtgaattcatcttgcagagttaagcctttcttttcatttagcaagtttgaaaacactgtttatgtagaatatctgaagggatatttgggagcacattgaa

SEQ ID NO: 283990 - DNA, 304 bp, Homo sapiens
atcccagtataagaagtagaaggaagctatctgagaaaactctttgtgttctgtgaattcatcttgcagagttaagcctttcttttcatttagcaagtttgaaaacactgtttatgtagaatatctgaagggatatttgggagcacattgaagcctatggtaaaaaaagaaatatcttcagaaaaaaactagaaagaagctttctgagaaactgctttctgatgtaggcattcatctcacagagtgacacctttctttrgattcagcagtttggaaacactgtttttgtacaattttcgtggag

SEQ ID NO: 283991 - DNA, 300 bp, Homo sapiens
tcagcagtttggaaacactttttttgtaaaatccgtgaagggatatttgtgagttcattgaggccaaaggcaaaaaattgamtatcccaggataaaaactagaaggaagttatctgagaaactgctatgtgatgtgtgcattcatctggcagagttaaattttgttttcattcagcattttggaaactctgttttggtagaatctgtgaagggatattgagagcacattgaggcataaagtgaaataggtaatatcttcagatgaaaaatagaaagaagatttataagaaactgctttgt

SEQ ID NO: 283992 - DNA, 583 bp, Homo sapiens
aaaagtgaatatcccaggataaaaattagaaggtagctatctgagaaaccgctttgtgatgtttgcattcatctcgcagagttaaacctttcctttcatttggcagtatggagacackgtttttgaagaatctgtgcagggatatttaggagcgcatggaggtctatggttaagaaggaaatatcttcagataaaaactagaaagaagctttctgagaaactgttttgtgatgtgtgcattcatctcatggagttaaaacgttctttggattaagcagtttggaaacactgtttttgtccattctgtgaatggatatttgggatttcattgggatttcactggggccattggcaaaaaatcgaatatcccaggataaaaactacaataaagctacttcagaaactgctatgagatgtgtgcattgatctcacagagttaaacctttcttttcattcagcagtttggaaacactgttttgatagaatctgcgaaggaataattgagattgcatggaggctgatggtgaaaaaggaaatatattcagataaaaaccgtaaagaagctttcttagaaactgttttg

SEQ ID NO: 283993 - DNA, 1769 bp, Homo sapiens
aaaagtgaatatcccaggataaaaattagaaggtagctatctgagaaaccgctttgtgatgtttgcattcatctcgcagagttaaacctttcctttcatttggcagtatggagacactgtttttgaagaatctgtgcagggatatttaggagcgcatggaggtctatggttaagaaggaaatatcttcagataaaaactagaaagaagctttctgagaaactgttttgtgatgtgtgcattcatctcatggagttaaaacgttctttggattaagcagtttggaaacactgtttttgtccattctgtgaatggatatttgggatttcattgggatttcactggggccattggcaaaaaatcgaatatcccaggataaaaactacaataaagctacttcagaaactgctatgagatgtgtgcattgatctcacagagttaaacctttcttttcattcagcagtttggaaacactgttttgatagaatctgygaaggaataattgagattgcatggaggctgatggtgaaaaaggaaatatattcagataaaaaccgtaaagaagctttcttagaaactgttttgwactagatagaagttatctgagaaactgctttgtgatgtgtccattcatctcaaagagataaaggtttcttttcattcagcagtttggcaacaatgttttgctagaatctttgaagggatatttgggagcacattgagacgtwttttgaaaaaggaatacgagaaggaagctttctgagaaactgctttttgttgtgtgaattcaactcacagaaataaaactttattttcattcagtaatttggaaatacttgttttctacaatctgcaaagggatatttgggagctcattgaatccaaaggtgaaaatgtgaatattccaggataaaaactagaaggaagaaatatgacaagctgatttctgatgtgtgcattcatctcagtgagttaaacctttcttttcattcaccagtttagaaacactgtttttgtagaatctgcaaaaggatatttggcagcgcattgaggcctctggtgaaaaatgaattatctacaggtaaaaaataaaaagaagctttttgaaaaaactgcttcatgatgtgtgcattcatttcacagagttaaacttttctttccattcagcaatttggaaawactagatagaagttatctgagaaactgctttgtgatgtgtccattcatctcaaagagataaaggtttcttttcattcagcagtttggcaacaatgttttgctagaatctttgaagggatatttgggagcacattgagacgttttttgaaaaaggaawacgagaaggaagctttctgagaaactgctttttgttgtgtgaattcaactcacagaaataaaactttattttcattcagtaatttggaaatacttgttttctacaatctgcaaagggatatttgggagctcattgaatccaaaggtgaaaatgtgaatattccaggataaaaactagaaggaagaaatatgacaagctgatttctgatgtgtgcattcatctcagtgagttaaacctttcttttcattcaccagtttagaaacactgtttttgtagaatctgcaaaaggatatttggcagcgcattgaggcctctggtgaaaaatgaattatctacaggtaaaaaataaaaagaagctttttgaaaaaactgcttcatgatgtgtgcattcatttcacagagttaaacttttctttccattcagcaatttggaaa

SEQ ID NO: 283994 - DNA, 578 bp, Homo sapiens
gttctacgtcagcctggctctgtaatagtagacataacagaagctaaatctaaaaagagaatgctagagatattctctacctacttttctcaagctctgaagccaaggaggaacaagggacarcatctaaaaatttcctatgtcccttgtccctgagaaaaaggtgtgataagtggctaaatgtggaagatgacccctggagtagcatcataataaggatgaatggagaggctactgtgatcagtatgaatctagttagcagagtaccaaaggggaagaggacattttagtgcactgcagtaagtgtcagttccggtgaccaaagatgttaatggtgactatatttttcaacacaaggcagcatgcatggatgcaataaaccatggacacattaacctcttccctgaagccagaatgacaaggccctacctgtatggaatttagatcaaaggtgtgaggagaagaaaataagtgaaaaggaaagaccctgaagtcactaagtagaaacatagaattgagcaaacttaaatcataaagtgaatgatttgctctgaaagtgtttttttattatactttaa

SEQ ID NO: 283995 - DNA, 578 bp, Homo sapiens
gttctacgtcagcctggctctgtaatagtagacataacagaagctaaatctaaaaagagaatgctagagatattctctacctacttttctcaagctctgaagccaaggaggaacaagggacagcatctaaaaatttcctatgtcccttgtccctgagaaaaaggtgtgataagtggctaaatgtggaagatgacccctggagtagcatcataataaggatgaatggagaggctactgtgatcagtatgaatctagttagcagagtaccaaaggggaagaggacattttagtgcactgcagtaagtgtcagttccrgtgaccaaagatgttaatggtgactatatttttcaacacaaggcagcatgcatggatgcaataaaccatggacacattaacctcttccctgaagccagaatgacaaggccctacctgtatggaatttagatcaaaggtgtgaggagaagaaaataagtgaaaaggaaagaccctgaagtcactaagtagaaacatagaattgagcaaacttaaatcataaagtgaatgatttgctctgaaagtgtttttttattatactttaa

SEQ ID NO: 283996 - DNA, 237 bp, Homo sapiens
gaagatatttcttttttcactataggcatcaatgcactgccaaatattctttcacagttactacaaaaacagtgtttccaaactgctgaatgaaaagaaaggtttaactctgtgagatgaatgcacacatcatgaattggtttctcagataacttccttctaggtattaccytgggatattcaattcttcaccattggccacaatgagttccaaattttccattccaagaatggaca

SEQ ID NO: 283997 - DNA, 610 bp, Homo sapiens
ttccttttgcaacataggcctcaatgcacaamcaaatttctctttgcagagtctaagaaatcagtgtttccaaactgctgaatgaaaagaaatttttaactctgtgagatgaatgcacacatcatgattcagtttctcagataacttccttctagattttatcctgggatattcgctttttcaccattagcctcaatgagttcccaaatgtccattccaagaatggataaaaatagtgttgtcaaactgctgtatccaaagaaagctgtaactctctgagatgaatgcacacatcccaaagcagtttctcattaacttctttctggtttttatctgaagatttttcctttttcaccaatggcctccatgctcttccaagtatctcttctcagattctcagaaaacagtgtttcttaactggtgaatgaaaagaaagatttaactctgtaagatgaaagcacacatcatcaattggtttcaaaaacaagttccttctagtttttatcttggtgtattcacttttttgccattggcctcaaagagctcctaaatatccattaacagaatggaaaaaaacagtatttccaaactgctgaatccaaaggaacat

SEQ ID NO: 283998 - DNA, 1832 bp, Homo sapiens
ttccttttgcaacataggcctcaatgcacaaccaaatttctctttgcagagtctaagaaatcagtgtttccaaactgctgaatgaaaagaaatttttaactctgtgagatgaatgcacacatcatgattcagtttctcasataacttccttctagattttatcctgggatattcgctttttcaccattagcctcaatgagttcccaaatgtccattccaagaatggataaaaatagtgttgtcaaactgctgtatccaaagaaagctgtaactctctgagatgaatgcacacatcccaaagcagtttctcattaacttctttctggtttttatctgaagatttttcctttttcaccaatggcctccatgctcttccaagtatctcttctcagattctcagaaaacagtgtttcttaactggtgaatgaaaagaaagatttaactctgtaagatgaaagcacacatcatcaattggtttcaaaaacaagttccttctagtttttatcttggtgtattcacttttttgccattggcctcaaagagctcctaaatatccattaacagaatggaaaaaaacagtatttccaaactgctgaatccaaaggaacatwttccttttgcaacataggcctcaatgcacaaccaaatttctctttgcagagtctaagaaatcagtgtttccaaactgctgaatgaaaagaaatttttaactctgtgagatgaatgcacacatcatgattcagtttctcagwtaacttccttctagattttatcctgggatattcgctttttcaccattagcctcaatgagttcccaaatgtccattccaagaatggataaaaatagtgttgtcaaactgctgtatccaaagaaagctgtaactctctgagatgaatgcacacatcccaaagcagtttctcattaacttctttctggtttttatctgaagatttttcctttttcaccaatggcctccatgctcttccaagtatctcttctcagattctcagaaaacagtgtttcttaactggtgaatgaaaagaaagatttaactctgtaagatgaaagcacacatcatcaattggtttcaaaaacaagttccttctagtttttatcttggtgtattcacttttttgccattggcctcaaagagctcctaaatatccattaacagaatggaaaaaaacagtatttccaaactgctgaatccaaaggaacatwttccttttgcaacataggcctcaatgcacaaccaaatttctctttgcagagtctaagaaatcagtgtttccaaactgctgaatgaaaagaaatttttaactctgtgagatgaatgcacacatcatgattcagtttctcagataacttccttctagattttatcctgggatattcgctttttcaccattagcctcaatgagttcccaaatgtccattccaagaatggataaaaatagtgttgtcaaactgctgtatccaaagaaagctgtaactctctgagatgaatgcacacatcccaaagcagtttctcattaacttctttctggtttttatctgaagatwtttcctttttcaccaatggcctccatgctcttccaagtatctcttctcagattctcagaaaacagtgtttcttaactggtgaatgaaaagaaagatttaactctgtaagatgaaagcacacatcatcaattggtttcaaaaacaagttccttctagtttttatcttggtgtattcacttttttgccattggcctcaaagagctcctaaatatccattaacagaatggaaaaaaacagtatttccaaactgctgaatccaaaggaacat

SEQ ID NO: 283999 - DNA, 555 bp, Homo sapiens
acatcacaaagcagtttctcagataacttccttctagttttcattccaggatatttggtcttctgcctttggcctcaatgagtatcaaaatgtccatttgcagaatggacaagaacagtrttacctaactgttgaatcgaaagaaaagtttaactctgtgagatgaatgtgcacctcccaaaccagtttcttattaagcttctttctagattttatctgaagatatttcctttttcacctttggcctccatactcttccaaatatgtctttgcagattctaagaaaacagtgtatctaaactgatgaatgaaaagaaagatttaactctttgagattaatgcacacatcatgtagcagtttctcagataacttccttctagtttttatactcgggtattttgtttttcactgttggccttaatgagctcccaaatctccatttgtagaagggacaaaagcagtatttccaaactgctgattacaaagaaatttttaactctgtgagataatgaacacatcacaaagcagtttctcagaaagcttctttctagttt

SEQ ID NO: 284000 - DNA, 985 bp, Homo sapiens
tctcagataccttccttctagttttaatcttggaatatttgctttttcaccattggcctcaatgagcacccaaatgtaaattcaccaaagggtcaaaaacactgttaccaaattgctgaatccaaagtttgaactctctgagacgaatgcaaacatcccaaaccagtttctcatttaacttctttctagrtgttatttgaaggcctttttcaccataggcctcaatgcactaccaaatatctcttggcagattctaagaaaacattgtttccaaactgctgaatgaaaagaaagatttcactctgtgagatgaatgcacacatcatgaatttgtttctcagataacatccttccagcttttatcctgtgatattttcttcttcaccattggccccaatgagctcccaaatgtcaatttgcagaatggacaaaaacagtgtttccaaactgctgaatccaaagaaaggtttacttctgtgacatgaatgaacwttttatccttgatattccctatttgggaataccattggcctcaaagagctccaaaatctccattcacagaatggacaaaaacagtatttccaaactgatgaatctaaagaaaagtttaactctgtgacatgaatgaacacatcacaaagaagtttctctttctagcttttatcttaagatatttcctttgtgaccatagtcctcaatgcgcagccaaatatccttccacagtttctacaaaaaacagtgwttccaaactgctgaatgaaaagaaagtttaactctgctagatttatgcacacatcacataggggtttctcagagagctttcttctagtttttatcctgggatatttcctttttcaccattgacctcaatgaggtcccaaatgtccattccaagaatagaaaaaatagtgttaccaaactgctaaatgcatagaaaggtttaactctctgaggtgtatgcacacatcccagtcagtttgtcatt

SEQ ID NO: 284001 - DNA, 493 bp, Homo sapiens
ttttatccttgatattccctatttgggaataccattggcctcaaagagctccaaaatctccattcacagaatggacaaaaacagtatttccaaactgatgaatctaaagaaaagtttaactctgtgacatgaatgaacacatcacaaagaagtttctctttctagcttttatcttaagatatttcctttgtgaccatagtcctcaatgcgcagccaaatatccttccacagtttctacaaaaaacagtgtttccaaactgctgaatgaaaagaaagtttaactctgctagatttatgcacacatcacataggggtttctcagagagctttcttctagtttttatcctgggatatttcctttttcaccattgacctcaatgaggtcccaaatgtccattccaagaatagaaaaaatagtgttaccaaactgctaaatgcatagaaaggtttaactctctgaggtrtatgcacacatcccagtcagtttgtcatt

SEQ ID NO: 284002 - DNA, 615 bp, Homo sapiens
agtttctcattaagcttctctctagtttttatttgaagatatttcatttttcatcattggcctccagactcttccaaatatctcctcaaagattcaaagaaaactgtgtttctaaactgctgattgaaaagaaagttttaatgctgtgagatgaatgcacacatcacaaatcagttactcaaataacttccttctagtttttttcctgatatattcacttttttgccattggcctcaacaaggtcccaaaagtccattcacagaatggacaaaaagagtttccaaactgctgaatccaaggaaaggtttaagtctgtgagacacatgaacacatcacaaagtagtttctcagaaagcttctttctaatttttatctgaacacatttcctttttttcaccataggcatcaatgcacagccaaatrtcttttcacagtttctacaaaaaccgtgtttctaaactgcacaaagaaaacaaaggcttaactctgctagatgaatgcacacatcacaaaggagtttttcagatagcttctttctacttttgatcctgggatgttcactttttcaccattggctgctcccaaacttccattcacagaatggacaaaaacag

SEQ ID NO: 284003 - DNA, 1219 bp, Homo sapiens
gtacattcatctcacagagttaaatagttctttggattcatcagtttagaaacactgtttttgtataatctgtgaagggatatttgggagcacattgaggccaaaggtgaaaaagtgaatatcccaggataaaaactagaaggaaggtatctgagaaaccactgagtgatgtgtgcattcatcttgcattcatcttgcatcagcagtttggaaaacctgttttggtagtatctgtgaaatgatattttgacacacatttaggcctttagagaaaaaggaaatatcttcagataaaaaatagaaagaatctttcagagaaactgctttgtgatgtgtrcattcatctcagagagttaaacaattctttggattcagcagtttggaaacattatttttgtccattctgtgaattgacattatggagcacattgaggccaatggtgaaaaagagaatatcccaggataaaaactagaaggaagctatctgagaaaccacttggtgatgtgtgaattcatcttgcagagttaaacctttcttttcatttagcagtttggaaacactgttttggcagaatcttcaaagwtgtttaaggccatctgggatcttgaagatatggagacaaaaaaaagtttaatgttaaattgtgggaaggaaatattactcatgaaagtaattaatattactgaaggcaggatatttttaaagccacaataaggaaaatctgaatgtatatttatgtttttcaggatagaatccccttgcaggaagaggcggaggtawaatagaaaggaaaataatttttcagggtcaatttcaggatgttctaagaaggttaggtgattagtagtagcacagggagaggctggtcacatctcagaagaggaagggaattgaatcagttcattacttaaactaagtaactcattatttatttaacagatttttttgagcattttctttgtaagtactgtgctggaggatgaggattctgtggtaaataaaacaactgataacaaccctaattgcaaagagtttgccatctaatggggacttcagtcttctcagataattgtaaatgaggtcctagcttgagattaactggtatggggataggagccaggggagtgtagtaggaaataagcatgaagtacagaaaagattgtagagccataatgaggaacttggcaaaattaacatttgttgtcactttagtcaaca

SEQ ID NO: 284004 - DNA, 617 bp, Homo sapiens
tattttcctttggccatatccatgctaaaaatcctcctgtttacagatgtggggttgccactgtgtcttgagatagaactatctagctctagtcttgggaaatcttgtagtaatagcagaactggtagaatattaatagtaatggtggtagtaatattaatggtagtaatagtagcartaatttttaaaactttttattttttgtgggtacataataggtatatatatttatggggtacatgagatattgtgatacaggaacacaaggcataataatcacatcagggtaaatggggtatccatcacttcaagcatttaacctttctttgtgttaccaacaatccacttatactcttttagttatttttatatgtacaataagctattgactgtaattaccctgctgttgactgtagtcaccctagatcttattcattctaattatattgttgtccccgcactgccccccgccacacccagcctctactctctatctcatctcatcattctacctctgtctctgtgaattcaattgttttaatttttagctcccacaaataagtaagaatatgttaagtttgtctttctgtgcctggcttatttcacttaacataatg

SEQ ID NO: 284005 - DNA, 503 bp, Homo sapiens
cccaactggagaagcctaactctggcatttgatggtcctggcgggtgtgcacatatgtgcatatatgaccaagtgtgtgtatgtccacacttgggtgtttccatctatgtggcggggtgtggaggtgggaagtcctagccgtgtgtgcacagagggaggggctgctgtgctgaaggtcacagccctcattctggtcctcagatgaggaagattgaagagtctttccatatttgtcgatatcagtgttttgttaatcttttctgcacattggaaaacattataagaatgtgggtgcctgaggcctaccccagaggccctgatttaattgatctggyggtggcctgggcccaggatttcaaagctcccttggtgttttaatgtgcatccagttgggcactgctgctccttggggcagacagaggaggctcaagcccagatttgctggggctgttcccagtctgagggctgaggaagctggtgtgtgtgtgtgagggaggctacct

SEQ ID NO: 284006 - DNA, 565 bp, Homo sapiens
aaacactgttattgtagaatcagcaaatgaatattttggagctcattgatgccaatggtgaaaaagtgaatatcccaggataaaaactagaaggaagctatctgagaaactgctttgtgatgtggacattcacctcacagacttaaaactttctttccattctacagtctggaaacactgttttggcagaatgtgcgaaggratatttgggatctccttcaggcctatggagaaaaaggaaatatcttcagataaatactggaaataacccttttgagaatctgctttgtgatgtgtgcattcatctcacagagttgaaccattacttatattcagcactttggaaacactgttgttttagaatctgagaagggatattttggagctcattgaggccaatggcaaaaaagcaaatatcctaggataaaaacttgaagtaagctatctgagaaactgctttgtgatgtgtacattcatctcacagagttaaacctttcttttcattcagcagttaggaaacactgttttcatggaatctgtgaatggatatctgagagccctatgt

SEQ ID NO: 284007 - DNA, 547 bp, Homo sapiens
agcttaacagactgttttctagaggtagccccttcgataaaccatgtagcctctcccaaagcttcctgtcatgtttctgttcactggtgtcgccatgatcatgctaatgacttgttttaaggatttcactgggtattggggtggattcagttcatgacagttcatctttcatctggctggggatgtaatcacaggaactgaccttgccttccaacttagaaatccatagagctcatttatattcatttggtttcttcaaaaatgacaagcaaagaagattctactgtgttaaaatcaggattttgatattttcaaatgctttttaaaattgaaaagtgaacattcagaaacatgaaaatgatttgggcttacattatgttytaaatatgggttaactacagaggtatataaacacactaattgtaattgtaaattaccatgttgtgcagaaaaacagacatatggcaggtgtcttcactcactgtgctacactgaagctctttaacattaatgggcctctgattaaaaaaaaaaaaacccaaacctt

SEQ ID NO: 284008 - DNA, 604 bp, Homo sapiens
aaaagtcaggaaggggaggaaaagtgaagggagtttattttgactgaaaatctggactgtaatttgttactgcaataaagagttaaatgtagtggtaaaaatacagccatagccaaaaagttatatagttctcagtatataattacttgagccttccaaaatgcatgagaagaaatattttcttaacattaaagattaatatatcagtctttcaaaaagacattgaacaacacaatagatcatttatttaattgtagtacgtttgttaatgatgttgttgttgtcattcaagacaaaaaataattcttcctgtgactggtttttatattgacttatgtcaaatagcctaagtcataatactaagttctaaggttctaacggcctttcttccaggaactaatgtaatttagtactggtgtaaagcttctcgatggtttgccttggcaccatggatcagcaagtccagagaaattaatggtttagcagatccactggcctgttcttrtcaagagtcaattgtctccatcaggcttttgattttaaaaaaaactgttaatcagtttctttaagtttattataatctcataaataaactactgaaaag

SEQ ID NO: 284009 - DNA, 577 bp, Homo sapiens
tgtttgagatgaactcagtgtaacactgtcttccaagaaaagacaaagtgatcaatgcaagaacacatcaggctgccttggacaggccaatcaatgcaagaaaaaaccttgcccagggccttatgcaaatagaagcacgtcctgcaacctagggagggaacatgckcaatagatcaattggatataaaaaaccttacggctatatcggcttcagacagtaaatatatactgatgaatatctcatactgcccgcgaattcttaaaatgggttatttttaatagctagttaaaaactcttcctgggatctggagtgcagcaaaatggaagaaaatatcacaagagaaatactcagcattacttttaagactgtgcaaataaaattctgatttcttaaatttcttggcatagctgaattttgctgacatttcagaaggttaagttttaagtatgtttgtattcgagaacaggaaataatctaaaaaaaaaaaaaacccacatacaatcccaggtagtttttgaacaaagaaaaaaataaaaatgttatgggagaaatcattcaaaatgtaaaattatggt

SEQ ID NO: 284010 - DNA, 593 bp, Homo sapiens
tatgcacttgctattttttctttcttatcctgaaacttctctctgatctctagactatttccttaaataaaggttctaacataaaaagagagcatggttaaatgccaaaattttgctcccaattttccctcccaaacctgttcttctcctagacttccttatcttagtaaatgacaccacccagatgttcaagccaacaatctargagtcatttttcatccttcctatcccctcacttcccatctctaaatgattatgttggacacttcttcccatctccaactcctgccaccaaaatccaagtcaccataattgcctgcctaggctattgagccagcttcttaagtggtcagctgcttacccacttgttcccccaccaatccacttttaatctaaaatagatatgatcactatccaactcaagaccctcagtggtttcccactgtacttacaagaaaataaaaatttggactccaaggctccaaggctctaagcaatgtggcttctgcctagatctccttgttctacctgctacaggctcactcacctttgtttgttccttcaacaggagcagcccctccttagtctgccta

SEQ ID NO: 284011 - DNA, 593 bp, Homo sapiens
tatgcacttgctattttttctttcttatcctgaaacttctctctgatctctagactatttccttaaataaaggttctaacataaaaagagagcatggttaaatgccaaaattttgctcccaattttccctcccaaacctgttcttctcctagacttccttatcttagtaaatgacaccacccagatgttcaagccaacaatctaggagtcatttttcatccttcctatcccctcacttcccatctctaaatgattatgttggacacttcttcccatctccaactcctgccaccaaaatccaagtcaccataattgcctgcctargctattgagccagcttcttaagtggtcagctgcttacccacttgttcccccaccaatccacttttaatctaaaatagatatgatcactatccaactcaagaccctcagtggtttcccactgtacttacaagaaaataaaaatttggactccaaggctccaaggctctaagcaatgtggcttctgcctagatctccttgttctacctgctacaggctcactcacctttgtttgttccttcaacaggagcagcccctccttagtctgccta

SEQ ID NO: 284012 - DNA, 593 bp, Homo sapiens
tatgcacttgctattttttctttcttatcctgaaacttctctctgatctctagactatttccttaaataaaggttctaacataaaaagagagcatggttaaatgccaaaattttgctcccaattttccctcccaaacctgttcttctcctagacttccttatcttagtaaatgacaccacccagatgttcaagccaacaatctaggagtcatttttcatccttcctatcccctcacttcccatctctaaatgattatgttggacacttcttcccatctccaactcctgccaccaaaatccaagtcaccataattgcctgcctaggctattgagccagcttcttaagtggtcagctgcttacccacttgttcccccaccaatccacttttaatctaaaatagatatgatcactatccaactcaagaccctcagtggtttcccactgtacttacaagaaaataaaaatttggactccaargctccaaggctctaagcaatgtggcttctgcctagatctccttgttctacctgctacaggctcactcacctttgtttgttccttcaacaggagcagcccctccttagtctgccta

SEQ ID NO: 284013 - DNA, 593 bp, Homo sapiens
tatgcacttgctattttttctttcttatcctgaaacttctctctgatctctagactatttccttaaataaaggttctaacataaaaagagagcatggttaaatgccaaaattttgctcccaattttccctcccaaacctgttcttctcctagacttccttatcttagtaaatgacaccacccagatgttcaagccaacaatctaggagtcatttttcatccttcctatcccctcacttcccatctctaaatgattatgttggacacttcttcccatctccaactcctgccaccaaaatccaagtcaccataattgcctgcctaggctattgagccagcttcttaagtggtcagctgcttacccacttgttcccccaccaatccacttttaatctaaaatagatatgatcactatccaactcaagaccctcagtggtttcccactgtacttacaagaaaataaaaatttggactccaaggctccaargctctaagcaatgtggcttctgcctagatctccttgttctacctgctacaggctcactcacctttgtttgttccttcaacaggagcagcccctccttagtctgccta

SEQ ID NO: 284014 - DNA, 467 bp, Homo sapiens
ctgaaactattcctgaactatctctgatcatggcattaccttttctatgtcccctagactgggaaccacatagtcakctttgcttccttcccttttctcatgcaccatattcatttgcccattagattttgctggttttattattgtcccttgaatcccacctcccattctcagtctcatggctactttagaaaatcaagcctttatcatgactcagctggatgactataacagctccatcccttttctcaccaaatccttcaattttccactactgggtagcagctgcaatccttttatccccatatttaaaaatatttgcttgattcctcagggcctactgacttcttagcctggcactcctcaatgccaacattagactccttaatctggctctctcgtaacctcaaattactttttcctttgccattcattaccattcccatcacactacacctcttccaaaa

SEQ ID NO: 284015 - DNA, 467 bp, Homo sapiens
ctgaaactattcctgaactatctctgatcatggcattaccttttctatgtcccctagactgggaaccacatagtcatctttgcttccttcccttttctcatgcaccatattcatttgcccattagattttgctggttttattattgtcccttgaatcccacctcccattctcagtctcatggctactttagaaaatcaagcctttatcatgactcagctggatgactataacagctccatyccttttctcaccaaatccttcaattttccactactgggtagcagctgcaatccttttatccccatatttaaaaatatttgcttgattcctcagggcctactgacttcttagcctggcactcctcaatgccaacattagactccttaatctggctctctcgtaacctcaaattactttttcctttgccattcattaccattcccatcacactacacctcttccaaaa

SEQ ID NO: 284016 - DNA, 581 bp, Homo sapiens
ttgcatatgcataatgagatatcttgggaatgggacccaagtctaaagacaaaatgcatttgttttatatacaccttatgtacacagcctaaaggtaattttacacaaaattttttatacttttgttcagaaaacaaagtttgtatatattgaactataagaaagcaaaggtgtcagatgtgtaattttccacttgtggcatcatgtcattaccgaaaaagtttcagattttagagcatttcaaatttcagattttcagattagtgatgttctacctatattgtgttcattagtcaaaagactcaataatgctaagaaagccactcttcccaaaccaatccatacatttaaaccaatcccarttaaaattctagcagggttttttgtagaaattaactgattctaaaattgatataaaaattcaaaggacccagaatagccaaaacaactctgaaaaaaaaagatgaacaaatttagagaactaacacttattatgaagctacaataatcaagacagtttggtactggtgtaaagatagacaaatagacaaatggaacagaagagagtccagaaatagacc

SEQ ID NO: 284017 - DNA, 581 bp, Homo sapiens
ttgcatatgcataatgagatatcttgggaatgggacccaagtctaaagacaaaatgcatttgttttatatacaccttatgtacacagcctaaaggtaattttacacaaaattttttatacttttgttcagaaaacaaagtttgtatatattgaactataagaaagcaaaggtgtcagatgtgtaattttccacttgtggcatcatgtcattaccgaaaaagtttcagattttagagcatttcaaatttcagattttcagattagtgatgttctacctatattgtgttcattagtcaaaagactcaataatgctaagaaagccactcttcccaaaccaatccatacatttaaaccaatcccagttaaaattctagcagggttttttgtagaaattaactgattctaaaattgatataaaaattcaaaggacccagaatagccaaaacaactctgaaaaaaaaagatgaacaaatttagagaactaacacttattatgaagctacaataatcaagacagtttggtactggtgtaaagatagacaaatagacraatggaacagaagagagtccagaaatagacc

SEQ ID NO: 284018 - DNA, 460 bp, Homo sapiens
cgctatttttgctccgtagtttcacccaggatcttttcaaatgtgtaaagacctgcttatcttatttaaaaaattattacagaaccctacaactaaacttttacttttcctaattatctatttttttcattgttgagctccaattgtaaaaggtccatgttagccacgtctatttcattttatttccagcacaatttttttgtaatagccctatcaaaatattaagttgttattytcagttgagttaccacataagcgtgatgccatgtgataaaggaggtgctagaccatatggaaatttactaaaggggatgtgctgaaacctagttacaaatttcctggaagccctcacccacctcaaggatataaaagtgtcaggtttgagagatgaaagaggaatttctgaggaggaccactttgaaaagaactgctcttgagtccagttcccaacagggagagg

SEQ ID NO: 284019 - DNA, 594 bp, Homo sapiens
gaatttttaaccccaaactgaaaaatgtatatccttctcataaaacctttttgacattcaaatactaagacgacagataatttagacccattaattacyaactacaccaactttactactattacataccaaccttgaaaatgaacaacagcatatgtactaggagagtgaaaagccttgaaagaacgcttgaggaaatccaacagaaagccttaaatacgtattgccaaaggtgattacgtttgttcctgaggaatgcctttttgttcctaaacctagcaaccatccaaggagtaaagggattattggaaaagtaagaaaagaggagaagatatgaaataggtttcaaaccgggcaagccccctgaaaaattctgactatacagtgcttctttgaatttgtatattttttacaacacacttaaaatttgagtattctaaataaaatccagatcattaggtttcctttagatatcagaagatctggaaaagtgagcatgtaattccacagggcagtaagccgctgggctgagaaatggttactgccttccatccctttcatgggaagggcttgtgctcttcagtttgctgaact

SEQ ID NO: 284020 - DNA, 610 bp, Homo sapiens
tgtggaaaacagtttggcagtttcttatgatgttaagcatgcacctgtcacatgacttaccaatcctactcttaggtatttaacgaagtcagttgaaaactttacagaaaaaacatgtacgtgaatgtttataaaagccttatatataattgctaaaaaattggaaacagctcagatgtcctgcaacaggagaatggattagcaaactgtagtttatgcttgaaatgcaatatgtatcagcaataataaggaacaaattgtkgattcatgcaatgacatgaatgagtgttaaattcattttatttaataaaagaagttagatatagaagtctacatgttatgtgagtccttttatataacattttatataacattctggaaaaggcaaagttatagccatagaaagcagatcagtattgagagagtagagacagaggtgaactacaaaggagtagcatgagagattttaggggtgatgctctgaatggtattgtgatggtgtatatatggctctatgcatttgtcaaacccatagaaccgtacatcacaaaaaattaattttacttatgcaaattcaaaaaattaaccaggatgccaggggaagccaaga

SEQ ID NO: 284021 - DNA, 577 bp, Homo sapiens
acacgttacagtggagaaaactggcagaaaactatcttaaccaagccatcatggtgaatatcaccaataataaagcatagcaatatcatatacctcctgatatgatgcactgagagggccrtctcacctgtgtgatattcttctccaagtctcataatcttagtctaatcatgggaacacatcagacaaactcaacttgaagtacattctacacattttctgagcagtattcaaaaagttcaaggtcatgaaaaacaatgataaattgagtaactgtgccagattggagcaaactaagaagatgcagcaattaaatgctatgtgaatcctgagttggaccctagaatgaaaaacggacattagtggaaaactagttgtattagtctgttctcacactgctaataaagacatacctaacactaggtaatttataaaggaaagaggtttagtggactcacagttccacatagctggggaggccttacaatcatggcagaagatgaaggaagagcaaagggacgttttacatggcaagagagagaacttgtgcagggaaactcccctttataaaaccatc

SEQ ID NO: 284022 - DNA, 590 bp, Homo sapiens
cttgcactggcgcttggttgcttccactccaccaacaatgaccaaccaggataggaacataaaagcccagtttgcttgccatgaattggttaatttatactctagaactcccctgtgagatgagactaaagatggtactcttcttgaaactgtcactttgattggctgctgcttctttctaaagcttccctggaacattttcttaataaatcccttgyatgcagatcctcatctcaaggtccccttcatgaaagttgacccaagacacacaaatacaaatttaggtttccatatttgatcaatggtacttctttatctcacctttatgttccaactgcttgtgtcaacttcatgtaataatccaatctcaaagagcccctaggactctactctagcataagctgtgatggccagtctctaattacctgatgtatttgacctggctccacttaaagagaaatagagcttctctttctatacagtcccacatttataaatcctggatagtgtctatttagttcatggcagcttataattaaagaggtatctgtgaaagacatgtgttggaattgttgtttttaaacttgtaa

SEQ ID NO: 284023 - DNA, 635 bp, Homo sapiens
tacatttgcctcaaaactgtgaaagtacctcctgtatttatgtgctatgaatgctgcccaagtgcagaatctttgccatttaaatgttcagattttaaaccagaaatgtgttggggtaaagaagaaaattattagagcatgaccttagggaaatsaagtcacaaaaaagaaaagagctgaactgaattctatttcccattctgttactaaccagctggcttattaatgtccataaagagagagatttttgtccttttcactgataatcctccacaccttgaataaatagataatgttgaatgatcttgggaaagacactttgttaaagtctcagtttcctcagctgcaaaacaaagatgtgatcttaaacttaaactttattgtgtatggaattaaatagagtttttgtttaaaatgcaggttctttgagtccatgcccagaaattcagatttggtagaaccagatgctattcagcaatccacatggatttggggcttgggttgtaaggagcaaaaatccaacttaaaaagaaaggttttattttttattttgcttcattttttgtcccccctctcttcccctccccgcacataaattggaaaatacaatgcaaggactgcttaaggcataatta

SEQ ID NO: 284024 - DNA, 567 bp, Homo sapiens
attccattctcagacccagcttcctccaacacccagagaatctaaccatgttgggttccagagcctatcttttcagttccatccgtaaagaaagtcaggcacacagtgcagggtgggggtgtccggagatccagtgccggaggggaactgggatttcagagcactcgctgcagccatccctttcccaagtctgcacgtcctcttgcccttctagtgctgtttccccttcctgtcacactgctgaggctctccgggagaagtggcaatgaagggagcctgggttgctgayaattactctcaggctgtgtccctgcaaatgcagagcactgggtaggctgcagggggagccctggtgctgacctggtgggtatctgccaggaccccaggtgacttatccaggtaaggtcaagcagctctacagagctttctttccaagcactggttgagacaattataattatgtattcaattataaaaatagaatgctgaagagaaaccagcataggaggtaaagaaagggttgccatgaaaggtctaaatgctggagagtgcggagacaataaaatc

SEQ ID NO: 284025 - DNA, 647 bp, Homo sapiens
tgagttgctgggtcccctagttacccccactttctttctgtgtccagaccaaaaatcacagagtgccttgactactctgtgatccagcgagctacaggttttccccagcaggcttgaacccagcctggggccttgaacattcccaggtactaataaaggtatctaggttgttgcccaaaacactgaaagaaaccggccccagccctgagccaaattcctcatatagactccataccctgacaccctcgctgtggacatacctaggtagaccttcccttttctctcactgtccaccgcaagcattgctgcaggccactctgtatataagttccccctaatagctgcgttggactcatcatcctggcatttagtgcttctttctttggaatcccaaccagccccatctcaggatggcttgggctctcccttgtgggaattctcctctgtgatgcttggggcaactccagcccagttttggccagaagaaacatggggagagaggcaagctgccatttcttgtttgagttgtttggtatttctgtgggttgataaatttctcttgccatgtcttctctctcatgtggggctctgccagaactcaagatatgtaaacyctggctggatgtgatgactcgtgcctgtaatcc

SEQ ID NO: 284026 - DNA, 561 bp, Homo sapiens
tggttatgttttaggagtagagctctacaccagatgagacactccatttcttccaaccctgaaaattaccatgtataagggaacaaatcacagacattacttctgtttttggggtgtgtgtgtgtgttttaaagatcgcaaagaagcatctctctaggactgaagggacaaccgctatttacagtaagggttttgtgagcacgggcaaatattcttaccgaattayggaggaaatactaagcccttgttcacatggaaaaggaccattcatctgagtacttaaatctaattttggctagtgagaaaagacacatactctcagagtctcctccaggtctaagcctgtaagattcaaggacatagtgactgttccttctttattttggtgaatgtaaacagcattaatctaaatgagttttcactgacatatatgttccactccccacctctaatgcccctctgcattgattacatttgtgaagactatgctaccgatgcatttaaattagcgtcttttctatcacccacaattctcaaatgttacataaactctgaagtgtt

SEQ ID NO: 284027 - DNA, 519 bp, Homo sapiens
atattttataccagaattattccagattagaatgacagcattacatatttctatgtgacatgagttctaggagttttgtcacctgaatgtgctcactattcccctatttctggctatttagactgtttctaccttttctgagagrccaggttacagtaaacatctttaggcacaaagcttggctcttcctttaaatcctttccttagaattttcagaggtggactaccctgatacagattatgtacatttgatgaagttacctacatatttagccagcttgactgcatggtcccaaacagcaaaacatgatgccattgcatatacaatttcttttacaattattccttaaaaataaaatgcagagaattttacaaacctgtaacagctactaactgaatttagaagttacttaagagtgtcaagcttgcttcagacactctgagacccataacagtcagcatcacatatcaagacaaacttgagtttcagtcatagttgcagagataaagatgagggca

SEQ ID NO: 284028 - DNA, 587 bp, Homo sapiens
gtgttgaatactatgattatgttcagcagggactataaacttaaatgcctacagagactaagtaggtaacctaaatgagtgcagtggatctgtattggaacttgggaacaatagagattgaagatttgaagggtggatacttcatctacagaaggcagcagctatttgattctagtcagttgttggccttctggaaatgtgggtgcagtgctgtcagaccttcctatttttaaaacacttttatttggaaataatttcaaatttacaaaaagttgcaaaaataagacataacaaaagaatacttatgcaccttacctatattcttttatttaattttgcagtccatttgaattctctctgtgcacatgtacatacatacacacacacacacacacacaatttttttctgaaccatttgagggtatgttaaatatatcatggctttttgctcctaaatactccattgtgtatttcctataactagagacctgaaacctrctattcttgagctgggatacctggagtgggatgaagagatggcctgaggaagtcctctccccctggccactaagggacagtcaatcagc

SEQ ID NO: 284029 - DNA, 553 bp, Homo sapiens
cacccgtaaaaataatacctccaatatatgcatatttatttataaattagatttatgtacaagtctactaatatattatgtgtcttaaaaaacatatactttaaaaaggatgagatgaaattagatattaatacaaatacaagattgaaattttcttcctgtactccaagggaacatcttgcaacctctaaggcatgtgcctcccaaccttgggggctattgctctacactgtgggggttaaacaggaaaaagaccatcacgatttccaaayctgagtctgggtcctgttccctgatgtatcttcttcacatcagccagctctatctatcacaacatacttttttgccttcctggcacttatcacaactggcagtcatcttgctcatctgtgtgttcatttgtccaacatctttctcccccaactagaatacagcttcctgagaggcaggatcttgactgacttgttcattcctaatttctcagcatctagaagaaggtatggcacatagtaggtgcttgttagatacttgctaataaatggaaataaacata

SEQ ID NO: 284030 - DNA, 608 bp, Homo sapiens
gagaagtggaaggagaggcaggtgcaggtaaagagggaccaaagagcaggaagagcctcactttataacaacccactctcatggcgactaatccattcccttgagattgagaactcgatcctgggagacagcattgatctattcatgaggaacccgcccccatgacccaaacacttcctactgggccccacctcccaagatgcagtggcaattagacttccacatgagctttggtggraacaaaccacatccaaaccatagcactacttcatgtattatgatggaaatgaagtgacattgcttatgatcttttcttggcagggtacctgacacaacctaagtgctcaatacatggtagtaactgctgttgttcttaaaatttacaacaacccaaatagtttagtattataaccattttgtcacgttttttaaaaggaagtttgaaaaagccaaacagtgaatagatggcaatgctaggattccaacaaggtctgtgtgacaccccaggcctctgcccctagagcaccacactcctgctatccctagtatagagtgggctcacacatgtaggccacataaactttcacttcctgatgaaaaccacaagt

SEQ ID NO: 284031 - DNA, 608 bp, Homo sapiens
gagaagtggaaggagaggcaggtgcaggtaaagagggaccaaagagcaggaagagcctcactttataacaacccactctcatggcgactaatccattcccttgagattgagaactcgatcctgggagacagcattgatctattcatgaggaacccgcccccatgacccaaacacttcctactgggccccacctcccaagatgcagtggcaattagacttccacatgagctttggtggaaacaaaccacatccaaaccatagcactacttcatgtattatgatggaaatgaagtgacattgcttatgatcttttcttggcagggtacctgacacaacctaagtgctcaatacatggtagtaactgctgttgttcttaaaatttacaacaacccraatagtttagtattataaccattttgtcacgttttttaaaaggaagtttgaaaaagccaaacagtgaatagatggcaatgctaggattccaacaaggtctgtgtgacaccccaggcctctgcccctagagcaccacactcctgctatccctagtatagagtgggctcacacatgtaggccacataaactttcacttcctgatgaaaaccacaagt

SEQ ID NO: 284032 - DNA, 568 bp, Homo sapiens
aattctgtcgagtatgtttttaatgtacaggcaagatttaggtttaattagcaactatcttcaacttttgtacttaaaagttcctaaaagtagcttgtttatttattatgtaaatcaaatgtgtctcttaaagcttatttacgctaaagttcagtttatactaaacatctgattggctgaccacttctttatggctcactctaacaaaagttcaaaggatctcaaactgaaagtgaggttcaagtcattaaggtccttcatgtgccagctagtcagagacccagagcccgtgagtccccctcccagatcagcgcacccaggccgcatctgagcgactgcgctggtgcacatgtggctcaaatctccagtctgctcatggttttgaatgtcccaacaactgcaggctttggccaaggccaccctctcatctcgctgtgtggtaagggcttacatatccagacgtgcatgtatgcactgttgtctagatttttgtttttaaaaataatcgtggacctaaaaatagtttyttcctaaaattaattccctaaaatacactgactagaagccc

SEQ ID NO: 284033 - DNA, 513 bp, Homo sapiens
gttgccaatattctgtcctgagacataagttacttaaacagccatgctattgatgaatctttagaatgtcttcaatatttttgctattataagtagcaaaataagtattattgtagctaaatcttttacttayctataattgtttcctaagaagagtattacagaagtgaaattactgaggcaatttttagggcatagggaacatattgccaaattgctcctcagcaaggtttgtgccaatgctgtgtctcaagctgggtatgaaacagcctgttctccaaactagggacctcctcctagatataaaacaaaacaaaatccttagtatttaaatctgtatttctttgattgctaagggccagcatgagggcagccacaggggtattttgggtccctgacgctcctctgttcttctgaggcaggaggcagagaacctaaggccgatccacgctggacttcctagaactaaatcaaatggaaacacttcagctacgacaggaaatatcctcttca

SEQ ID NO: 284034 - DNA, 614 bp, Homo sapiens
acttccatgcttccaggcttcacacttgccatttcttctcccttgccatcccccaagacttcttccagcacaaatgcatcctaagtaatggagtaaccaggccctgtggatctgagcctggaggagcccgggggcagattagaacccaatggctgtgctctgcatgaggtgggagcaccagacttggaggaattaatagaaggtttcccaggggaggcagagcttagctggagtcttgatgaaggagtaggaattggctggaagaagagaataggatttctttttttccatttaaagcagtccaggcagatgaaataacacgtgcaaaagcatagaggtgtgaaatagcatgttgagcttgggaaactgcaagaagcacaatatggtgcgagtggggagagggagagaggaagacgraatggggaggatgtttggggtggatcacgaagagcctgtgtgctacaccagatactcaaaatgtgccttgaaggtgatggggagttattcttttcatcatgcgacaaacattcctgaggacctacttgacccaagacatctttgtagcgggcactgcgatgtgctgccaatgcctgtgcctcctacccccacacctc

SEQ ID NO: 284035 - DNA, 614 bp, Homo sapiens
acttccatgcttccaggcttcacacttgccatttcttctcccttgccatcccccaagacttcttccagcacaaatgcatcctaagtaatggagtaaccaggccctgtggatctgagcctggaggagcccgggggcagattagaacccaatggctgtgctctgcatgaggtgggagcaccagacttggaggaattaatagaaggtttcccaggggaggcagagcttagctggagtcttgatgaaggagtaggaattggctggaagaagagaataggatttctttttttccatttaaagcagtccaggcagatgaaataacacgtgcaaaagcatagaggtgtgaaatagcatgttgagcttgggaaactgcaagaagcacaatatggtgcgagtggggagagggagagaggaagacggaatggggaggatgtttggggtggatcacgaagagcctgtgtgctacaccagatactcaaaatgtgccttgaaggtgatggggagttattcttttcatcatgcgacaaacattcctgaggacctacttgacccaagacatctttgtagcrggcactgcgatgtgctgccaatgcctgtgcctcctacccccacacctc

SEQ ID NO: 284036 - DNA, 585 bp, Homo sapiens
gtggatccattattcaaaaaactgacaattcctcatggtttgacctactacatgtcattcgggcctgctacgtgcctgcacaatgcaagatgttctctgtaattctcacaagaactgtgcaaggaatgtgttattttgatttgaaaagctgaggaaactgaggctaagacagatcaggtgactatccagttgctcctagcaagtcagtagtgggaccggtccttgaactcaggtcagtttccaaagcagtgcaacagctgaaaatctatgtgctgagtttgctaatttgaccagctcttcttaaggttatatttgtctttgggggatggaagctgtcakcatggagatgcagggccctgcttggggtcaaggtgggattcagggacttggtcttattaatataattatcttatgatgaagaaacaaagccccagtcacatggggacaagtcatagcctggaacttccagggctcctgaggtgcatggggaggtaggcagagccatttatcaaaagatctggtttcaatcctggttcagctgtgagccctgcccaccctgggcctcgcttcctcagctacacagag

SEQ ID NO: 284037 - DNA, 616 bp, Homo sapiens
atgtgactttctatactgttctgttataaagaggggcaccttaggataaaatgcatgcctgggaacctataggctcgctattcaaggctgcccagcaaactggtcagtcatgtccttgggagcttgaccttgtaaccatgtggccatgctttctcttttcacaatggcggcccaggtttaggtttcaattcctggcttagggaatgagtcctttatcttctgcctgtctgtgtatttatatgtgttgtgtgtgtaatgtaaaagagctttaattgattggtttaataataataagagtgttgtgggaagtcagggaccctgaacggagggaccagctggagctgtggcagagsaacataaattgtgaagatttcatggacatgtatcacttccctaataatactcttataatttcttacacttgtcttactttaatctcttaatcctgttatcttcgtaagctgaggatgtacatcacctcaggtccactgtgatgattgcattaactgtacaaattgattgtaaaacatgtgtgtttgaacaatatgaaattagtgcaccttgaaaacgaacagaataacagtgattttaggaaacaagggaagaaaaccataac

SEQ ID NO: 284038 - DNA, 517 bp, Homo sapiens
cttaacaattccacgtggccggggaaggtctcacaatcatggcggagggcaaaacgcacttcttacatggcagtggcaagatacaatgaggaggaagcaaaagcttcctgcattcaattacctcccactgggtccctcccacaacacatgggaattctgggagatacaattcaagttcagatttgggtggggcacagccaaaccayatcagaagtcatggggagttaaaatggagttaacactcccttcctcaaggagttgccgcaagggctagagatcgttcgtgtgaaacacccagcacagcaccaggacgctgacaaatgtgcagccaatggtagatgaagccccctgagacacagtcaccgactacttccctccccacactctggggcactgacagggaggtgacagggcaactgtgcctggtgacaagagaagtcctgcaggatggtcaggagccctaggtctcagtgcctgctctgccatggactgtcctcatctcatctctgaacaagtc

SEQ ID NO: 284039 - DNA, 517 bp, Homo sapiens
cttaacaattccacgtggccggggaaggtctcacaatcatggcggagggcaaaacgcacttcttacatggcagtggcaagatacaatgaggaggaagcaaaagcttcctgcattcaattacctcccactgggtccctcccacaacacatgggaattctgggagatacaattcaagttcagatttgggtggggcacagccaaaccatatcagaagtcatggggagttaaaatggagttaacactcccttcctcaaggagttgccgcaagggctagagatcgttcgtgtgaaacacccagcacagcaccaggaygctgacaaatgtgcagccaatggtagatgaagccccctgagacacagtcaccgactacttccctccccacactctggggcactgacagggaggtgacagggcaactgtgcctggtgacaagagaagtcctgcaggatggtcaggagccctaggtctcagtgcctgctctgccatggactgtcctcatctcatctctgaacaagtc

SEQ ID NO: 284040 - DNA, 561 bp, Homo sapiens
aacaagatcactaacaccagctttggacccaggagactggggctctagtcccaggtgtgccactatctgtgtgaccttccctgttttctttgggccttggttttcttatctgtgtaacartattcacactgcctccctctgggacccgtactctacccccaggaaaaagagaaatgaagactggtagccaccaaagaaggctgagggagaaagggatctttcagtcaagattcaacatttttttccaaatcttgacctgcagatacaagatatccactgattgaccagattataaaacacaagaacaggaggacaagggcttagaaaccacatccatctgtgatttgggggatataccgtaaggccttccagtgcaggggccatgaatcatgcattgttgggcccacagggccaggtccacagtgactctaagtttgctgatggcctgcaaggacaaagagtaaatggtacggccccaacaggctccaggcaggtctccccaggtgacaccgcacacactgctatgagacacctctaaaacagctttggccacatcactct

SEQ ID NO: 284041 - DNA, 593 bp, Homo sapiens
ccagccgccctgtcccttcctctccccagcccagggccggagcctgggacccaccgctcgcctcttcctcccagccggggtctgagggggagtccgcacgctccgcccagcccctgcccagccagtccccaggcgctgccgatccyccgaccaccaatcccgtcgcagccccttgctgtcctgggacctcaggagggggagggggagggctgtctgcgcccccggccgggtagcggtggggaggactggggctgttgcccgaggaaccgggagaaaagtttggagccaagtcgtgggcccgaggggacggcgggggagcgggggggtggggcggcgttgggctctcggtgcgcacaccctctgcggacacccagcccagacacgtcggcaggcaccgaccacgtacgcggagacacgcgatgcgcccaccgacgcccacagccaagcgcaggcccgcaaacgtggacacgggcgcaaagcagccgcgcaaagccacggacacacaaaggcaccgacagcggcgcgtccccgaccgcaaatccacaaagacccacaaacgtgagatgcacgtgtccgcacaaagacccacacgg

SEQ ID NO: 284042 - DNA, 593 bp, Homo sapiens
ccagccgccctgtcccttcctctccccagcccagggccggagcctgggacccaccgctcgcctcttcctcccagccggggtctgagggggagtccgcacgctccgcccagcccctgcccagccagtccccaggcgctgccgatcccccgaccaccaatcccgtcgcagccccttgctgtcctgggacctcaggaggggragggggagggctgtctgcgcccccggccgggtagcggtggggaggactggggctgttgcccgaggaaccgggagaaaagtttggagccaagtcgtgggcccgaggggacggcgggggagcgggggggtggggcggcgttgggctctcggtgcgcacaccctctgcggacacccagcccagacacgtcggcaggcaccgaccacgtacgcggagacacgcgatgcgcccaccgacgcccacagccaagcgcaggcccgcaaacgtggacacgggcgcaaagcagccgcgcaaagccacggacacacaaaggcaccgacagcggcgcgtccccgaccgcaaatccacaaagacccacaaacgtgagatgcacgtgtccgcacaaagacccacacgg

SEQ ID NO: 284043 - DNA, 602 bp, Homo sapiens
tatcattagcacagaagacttctgtgaccaaatatgtgggggtttctcccacaaaccaggcaagcaatcaattctacagcagacaccagctgggtgttctccaaatcaatttaattctgaagctatctaattggagatagcctcagaaaccacaggttgagggcttggtcccacaagggagcctcctcttttcatcagtaacaartctagacctttagactgtctgaccaactggcttcaagttggggttcctccaaccccctctttgggttcaattaatttgctataatggctcacataactcagagaaacacttatttgtgtttatcagtttattacaaaggatattttaaaggattcaaataaacagccagatgactcacaatcagattagagtcctgccttggtcaggtgaaaggagggcagcagaagatgagagagagagattctgtttcctgaggcctgattctgaggcctacagtgtcccaacattacaacaaaagactataataagggttatgaaaattatgagccaggaaccgtggatgaaaacatatatatatatattatatatatattatatatataaaatatcacaatac

SEQ ID NO: 284044 - DNA, 602 bp, Homo sapiens
tatcattagcacagaagacttctgtgaccaaatatgtgggggtttctcccacaaaccaggcaagcaatcaattctacagcagacaccagctgggtgttctccaaatcaatttaattctgaagctatctaattggagatagcctcagaaaccacaggttgagggcttggtcccacaagggagcctcctcttttcatcagtaacaagtctagacctttagactgtctgaccaactggcttcaagttggggttcctccaaccccctctttgggttcaattaatttgctataatggctcacataactcagagaaacacttatttgtgtttatcagtttattacaaaggatattttaaaggattcaaataaacagccagatgactcacaatcagattagagtcctgccttggtcaggtgaaaggagggcagcagragatgagagagagagattctgtttcctgaggcctgattctgaggcctacagtgtcccaacattacaacaaaagactataataagggttatgaaaattatgagccaggaaccgtggatgaaaacatatatatatatattatatatatattatatatataaaatatcacaatac

SEQ ID NO: 284045 - DNA, 534 bp, Homo sapiens
ggtgccgagtttctaaagagcttcctcaacaggcaacacttcacacatgtcacaacctgttgctgtgagaattaggcaggcactatgtgactccactgtgagaggactctggaagcttgcaactggttttcccaacttcctcccaggtacctttttcctttgctgagtattatatgctgagttttgtgagtcctcctagagaatcttggtgctcttggggaacctgacataggacaatagagccttgccaccactkcaaaaacaaaccctccaaagtacaattatttttcctttcaaaattcactctccttcctaatttaccagtttctgtcaataaaaccacagctccaattgctaccctggctagaaatctctagcttcttctcacttcccttcgcctactaggtcctgttgccaagtcctagtactattatataatataatggctatttcacaatctctgtcactataagcacaatatttgcctttccattacctgttaagggcaaagtacttaaaacccagtacctagaa

SEQ ID NO: 284046 - DNA, 442 bp, Homo sapiens
caaaactccatctcaaaaaaaaaaaaaaaaaaaaaarggagtaataataataataataatagtaagatacacttataaatatttcaactaattcccacttattttcaagagaaaaatcaggttaaaaatacttcatctacctggttacaccaccccaggatattttagaaaacgtaaacctaacaccatcagttaaaaaaaaaatgaataaagaaaaatcttatctagtacacaggtcaaataattactgttttcaggtttaagatgatatatgcattatacagaaaatatagagccaattacaatgcagcataaccataattgaatagcttcaggattttatcacttgtaaaatattcccttacatttttgcatttaagaatatgtttctaagacaatctttaaccaaaaaatacttttaaaaagagagttgacttaccca

SEQ ID NO: 284047 - DNA, 497 bp, Homo sapiens
cttcccccaggtgctctgtcccagggagatgggagttttatctataagcccctgactggcatttctttcagagatgccctgctgagtgacgaggaatccagagaggcagtccggccacagccactttgccacgctgtgttgagttctgcccagtccaaacttccrggcccccttagcactatcaggggaaaaccacctactcaagcctcagtaatggtggacgcccctcctcctaccaagctctatcattccaggttgacttcagactgctgagctggcagtgagaatttcaagccagtggttcttatcttgctgggcactgtgggagtgggacctgctcgctgagtgagaccacttggctccctggcttcagccccctttccaggggagtgaacggttctgccccactggggttccaggagccactggggtacaagaaaaaaaaaaaaaaacttctgcagctaactcagcgtctgcccaaataaccgcccagtttt

SEQ ID NO: 284048 - DNA, 631 bp, Homo sapiens
tttgctctttttgcctagaatagctttgactattctgtttttttgtgtgtctgtggttccatataaattttaggattgttttttctacttctgtggagaatgtcattggtattttgataggaattgcattgaatcagtagattgctttgggtggtgggacattttaacaatattgattctccctatccatgaactcggaatatctttccgttttttgtgtgtcctcttcaatttcttttatcagtgtttatagttctcattgtagaaatcttttatatatttggctaattcctagatattttatttgtggctttattgtaaatggaattactttttacgtttctttttcagactgttcactgttaacatacagaaatgctactgatttttgcatgttaatcttgtatcctgcaactgtactaaayttattagttctaaaagttgtttggtggagtcttatatcatctgcaaacaaggataattttacttcttccttttcaactggaatcccctttacttctttctcttgtccagttgctctagctaggacttccagtactatgttgaataatagtggtgaaagtgggcatcctcgtcatgctcctgatatcagaggaaagccttttagttt

SEQ ID NO: 284049 - DNA, 556 bp, Homo sapiens
ggattgacagcagatttcagatgacagaagaaagaatcagtgaccatgaagatacatcagtggaaaagacctattctggagatcataccaacatacatgtcatgagagtcccagaagaaaagagaaagaaaagaagaaatgatgaccaaaaacccccaacttcatgaaaaaggttagtctaaagattcaagaagctcaaaaattccccaaaaggacaaagacaaagagatctgcatctaggcacatcagagtcaattacagaaagccaaatagacacagaattattttgaaataagcaaaagaaaaatcattcattgaatactagaaaacaatattactaatggctgacttatcagaaataatagaagccagaagataatggaatagcataatcaaagtgctgaaagaaataaaaaatgrctttcaacccagaattctatatccaaaaatgttctaaaattaattgtaattgccacacaactctgactatactgtcattgaagtgtacactttaaatgggtgaattatacagtatacacattatatcacattaatg

SEQ ID NO: 284050 - DNA, 552 bp, Homo sapiens
agtctggaagaatttattgctagtgtatcttccttagaagaaatgctaaaggtagtcttttatgctgaaagtaaatgacaacaaacagcagttgaatctgcaggaaaaaataaagagcactggaaatggtggtaaatataaaaggctatataaatattttccttttttcttctattattttctttacaagatatatgattgcatataaagcaaaaacaaatgatgccaaacacactcaggctcaaagagcgcaatagagccctccttgacaaaaagcagtagaagcctagtgtactatatgcctattgcctgaaagcttacrtaacagcttaccttaatagctctgatgaactaagagaaaacaatactgagaaaatcagaaaacttatatattaccaatgttctatcattgtttttatgtatgtctgtatttgaaatgtaaataattgttttatatatatacatgtttaggacaatagttcagagataaacagttttaaaataaatcagtttcacttgttacttaacactcttagagacaccggaaattac

SEQ ID NO: 284051 - DNA, 470 bp, Homo sapiens
ttccactgttttctatggagttataaaggattcagaggggaagagaagctatccttttagaacacttaagaggaagccttctttctggattattctcacttttttggcttaatttctttatttattttgagaaaaggtctcactctgttgttcaagctggagttcagtggcacaatcatggctcactgcagcctccaccctccaggctcaagcgatcctcccacctcagcctcctgagtagctgggtctagaggtgcatgccaccatgcccagctaatttttgtgtttgttgttgttgttgttgagatggggttttgccaygctgcctaggctggtctcgagctcctgggctcaggtgatccacatgcctcggcctcccgaagtgctaaaattataggtgtgagccatcatgcctggccccttttgcctttaaacagttatttgctgcttaaatctgtaggaccagtttt

SEQ ID NO: 284052 - DNA, 561 bp, Homo sapiens
gaatttaacctctgtgttttatttccctcagtggtaaacagaataataatagtgcctactcatagagttaccgtgaggattcagtgcaatgatgcacataaagtacttagtctaatataagtcygtgtccaatgatcattgtctattattactacatgaaatatcattttattacactgaattggttatgtttgtatatgttccatttatcttttgccaaattttctcacacttgcatgtttttaaggtagagtgggaaataagggtatgaatgtccctagtaccatcaaactttatatatgtgcatgccaaccccagggcacacatacattaatagtacagtacaccactgctgagaccagcttggtcggggagaccctaacctagtggcgctacaggaattaaagacgcacacacagaaatatagaggtgtgaagtgggaaatcaagggtctcacagccttcagagctgagagccccaaacagagatttacccacatatttattaacaggaaaccagtcattagcattgtttctatgatactaaattaactgaaagtat

SEQ ID NO: 284053 - DNA, 561 bp, Homo sapiens
gaatttaacctctgtgttttatttccctcagtggtaaacagaataataatagtgcctactcatagagttaccgtgaggattcagtgcaatgatgcacataaagtacttagtctaatataagtccgtgtccaatgatcattgtctattattactacatgaaatatcattttattacactgaattggttatgtttgtatatgttccatttatcttttgccaaattttctcacacttgcatgtttttaaggtagagtgggaaataagggtatgaatgtccctagtaccatcaaactttatatatgtgcatgccaaccccagggcacacatacattaatagtacagtacaccactgctgagaccagcttkgtcggggagaccctaacctagtggcgctacaggaattaaagacgcacacacagaaatatagaggtgtgaagtgggaaatcaagggtctcacagccttcagagctgagagccccaaacagagatttacccacatatttattaacaggaaaccagtcattagcattgtttctatgatactaaattaactgaaagtat

SEQ ID NO: 284054 - DNA, 509 bp, Homo sapiens
caaactttatatatgtgcatgccaaccccagggcacacatacattaatagtacagtacaccactgctgagaccagcttggtcggggagaccctaacctagtggcgctacaggaattaaagacrcacacacagaaatatagaggtgtgaagtgggaaatcaagggtctcacagccttcagagctgagagccccaaacagagatttacccacatatttattaacaggaaaccagtcattagcattgtttctatgatactaaattaactgaaagtatcccttatgggaaaagaaaggatgggccgaattaaaggaataggttgggctagttaactgcagcaggaacatgtccttaaggcataaatcgctcatgctattgtttgtggcttaagaatgcctttaagcggttttccgccctggacaggccaggtgttccttgccctcattctcgtaaacccacaaccttccagcatgggcattagggccattatgaacatgttacagtgctgcag

SEQ ID NO: 284055 - DNA, 480 bp, Homo sapiens
ccacctgcatggctctgtgcacttttagtgccaagaagcatgagaagattttataacragagtaattgtaataggatttaatcatggtgtcggcagcaaaagggccagcaaccttaatgataatgttacaatagagagccgtggaaatggtataagtaggtaaaatagtgtaaattgaagttgccctatgactgtaatgtacactgtaatagccattcaaagccaggcaccataaaaatatgtccagcatctataaggcattaaacattaagcaatcctctgaaaaataaatccaaaacctcagaggatgccgtcatgttaaaatccagtctgttagaaaatggaattataatgcatcaggaacatttcaagaatcaacagtgaaacaaagggaaggtttacaatttacaaataactagatctaagttttgaaaaaatgaaacttcatattacttcacctttctacatggtgtgggtaga

SEQ ID NO: 284056 - DNA, 587 bp, Homo sapiens
aatgttttttttaatctgaaaatccctaaaggcatcataaacattaataacacgaacaaaaggcctaataataatattagctgggtctcaaatagaaaagattactaacctcattttgtaaatgccgagatttaatcacaaataggctaggaaaattgactcagactaaagaagcagtcaccagccaagccagcaatagaaatcaatgctttttgattcttgtgtccccattccagatactgtactacttctcacagaagcaagaggcattacttggaagaaaagagatctttacttttgaatgtaacatttcgccttcacaaaaccattgaaaactatctagaactccctccttacctacatcagttatcttcagcacctttccaccttagaatctgatccaatatgaaagttgcatttcacttcagattagggtctttctactaatctagactgataacatatattctcagaaatttcactccatctagaatagtcatatagatattccaaatctgctttggaaatatcattttattctgctatatgakgtataaaatttcattctgggcttaagaattagaaat

SEQ ID NO: 284057 - DNA, 539 bp, Homo sapiens
acaataaatgagtaatttgccgcccttcactttggcaggctgatgcctaatgattacccagggacaggataatggtaccatagtgattacactatgtttttctaaccactttcaaggcctttgctttcagacctgccctaatgaaaagaaagctctgaaattgggccaggtctttattaaaaatgttctgacaggctctgcttagataaaatgtattcacttctcagatttgaatcttcttcagatttggaaggcatggtctcgagagtagatctgattgcctgaacactttcataatgaggaaatgaggtcttggctaattccacaagccactggaaagacttatttaaagaagatatgatgataacctatctctagatagtgaactggctcagggagaactatgcaagacaaggagcagaaaatcaaaaaatctgatctttgctgatgttactgagttactgtgtgatcttatgaaaatcaattartatttctgagtttcttggtcactgtaggcagagtcagcacagctgtcaatc

SEQ ID NO: 284058 - DNA, 486 bp, Homo sapiens
tatctattaggtccatttggtctatggtgcagattaagtctgatgtttctttattgatattctgtttgaaagatctgtccaatgctgaaagtggggtattgaagtctccagctattattgtattaaggtttatctctctctttagctctaatgtttgctttatacatctgggtgccccagtgttgggagcactggaggttatacatatttttgtatttataattgttataytctcttggtgaattgacccctttatcattatataatgagcttttggtctcttcttgcaggttttggcttgaaatctattttgtctaatacaagtgtagctactcctgctcttttttggtttcctttggcatggaatatcgttttccatcccgttattttcagtctatgtgtatatttatagatgaagtgtgctccttgtagccacagatcaatgggtcttgcttttttgtccattcagccattctgtgtcttttg

SEQ ID NO: 284059 - DNA, 533 bp, Homo sapiens
ttcacttagggccccagagcactctagcccacagtagcaaggcttgctgaaactcaatctctgaccactgggatggacgatttcctgctggctaggcccagtccaaatgctccctctgtggtgaacattagctgagtacagactgattctgccttctgcaggacagcactgggttcaatgcaaagcctcacaattgctgcagtcttttcctcctaagtgcacagattctccatgctgcatgggatatgggggaggggtgtcattggtacttcaagattgtctttcctgccctcttcaatgactctttccgtggtatgaagttaaaaccaggtactatgattgctcacatgatttttgsttcctgtgatggtgatttttttgtgtagttaccaaaatttggtgttcctacagaggggatgaatgatgtaagctgctatttggccattttgctctgccagaagttctaataaaattttgaaaatatttttgcattcttgagttggtgattttcagggaccttttctgctctgtag

SEQ ID NO: 284060 - DNA, 458 bp, Homo sapiens
tctgagttagcttcctgagaccttccttgcctcttcgattagttaaaaattagccacaaaggctgaggaatctggtgttcaaatattctttgttgtggacatgtctttcttttaaagcaatagcaaagcttagcaaaatctctgccagtggaaggatgcatgacaaagagaaggaagatagcctratgaggaccaggcagatttgcagcacatttggaggaagaacccctgtgccaggtcatggcccagcctagtgccctgatgagaaaggctgatgatgtggggagtaggtaacggcacagcacggatttcttcacgtgctaatacagtgaagccttgagcactgatgcccctctcaccctccaactgaaagaagtattaagaagaagagagcctgacattccagctctcgtgactgggtgagctccttgtggaatatcagaacatgagaggttaca

SEQ ID NO: 284061 - DNA, 598 bp, Homo sapiens
gttttggtgtttcactactctaaatgactctaacaagcatctttctgtccatagctttgagtacttttctaattgctgccttaggataactaatttttttttaacttttaggttcaggggacatttgcaggtttgttatgtaggtaaattgtggggcacagggtttggtgtacagattattttgttacctaggtaattagcatagtatgcaataggtagtttttcaatcctcacactcctcccaccctccactctcaagtggacccccatgtctcttgttcccttctttgtgtccatgtgtacttaaagtttagctcccaactataagtgagaatatgcaatatttggttttctcctccgacattagtttgcttgaaataacagcctccagctctgtctatgttggttcaaagaacatctaatttctcttttacagctgcatagtattycatggtatgtatgtaccacatttttaaaatccaatctaccgttgatgggcattcagtttgattccatgtctttgcaattgtgaatagtgctttgataaatatacacatgcatatgtctttatggtagaacaatttatattcctttgggc

SEQ ID NO: 284062 - DNA, 598 bp, Homo sapiens
gttttggtgtttcactactctaaatgactctaacaagcatctttctgtccatagctttgagtacttttctaattgctgccttaggataactaatttttttttaacttttaggttcaggggacatttgcaggtttgttatgtaggtaaattgtggggcacagggtttggtgtacagattattttgttacctaggtaattagcatagtatgcaataggtagtttttcaatcctcacactcctcccaccctccactctcaagtggacccccatgtctcttgttcccttctttgtgtccatgtgtacttaaagtttagctcccaactataagtgagaatatgcaatatttggttttctcctccgacattagtttgcttgaaataacagcctccagctctgtctatgttggttcaaagaacatctaatttctcttttacagctgcatagtatttcatggtatgtatgtaccacatttttaaaatccaatctaccgttgatgggcattcagtttgattccatgtctttgcaattgtgaatartgctttgataaatatacacatgcatatgtctttatggtagaacaatttatattcctttgggc

SEQ ID NO: 284063 - DNA, 516 bp, Homo sapiens
tagacatgtactgtgtctgattaaacacaaactcttgggatctcagctgggcttgtagcataaaagagaattgaataatagcttatgaattcattagaaatgacagcartatttcaaacatctcatctgttgtattgatgagtcacattagtagaatgaaaactttcaccactttgtatacaaaacctaggaaggcatcatacagcagcaattcataacatgtacacactcatcatctggtttgtaaaccattaggtttggccctgaatacactgttggagagatgctttcagcctcttaggttttaaacaacagttttcacttgccaaaattctcacttcattattatgagcataaaatgaagtggtagcagctggctcaggtaagctagcaattctcatctacacttaacagcaaatcctaaattacaaaccattttcttagaaaagtagaatacttacattggtgctttgaagtccttttctggtttcaatttcaaaatattgctcaaacgac

SEQ ID NO: 284064 - DNA, 516 bp, Homo sapiens
tagacatgtactgtgtctgattaaacacaaactcttgggatctcagctgggcttgtagcataaaagagaattgaataatagcttatgaattcattagaaatgacagcagtatttcaaacatctcatctgttgtattgatgartcacattagtagaatgaaaactttcaccactttgtatacaaaacctaggaaggcatcatacagcagcaattcataacatgtacacactcatcatctggtttgtaaaccattaggtttggccctgaatacactgttggagagatgctttcagcctcttaggttttaaacaacagttttcacttgccaaaattctcacttcattattatgagcataaaatgaagtggtagcagctggctcaggtaagctagcaattctcatctacacttaacagcaaatcctaaattacaaaccattttcttagaaaagtagaatacttacattggtgctttgaagtccttttctggtttcaatttcaaaatattgctcaaacgac

SEQ ID NO: 284065 - DNA, 1151 bp, Homo sapiens
ttattccttctttctgattgtgtattttttgtacccaataaccatccccaattctttctcaccccagcactacccttmccagactctagtaaccatacctctactctctatcctcattgattcaattgttttgatttttaggacccacaaataaggaaagacatgccaagtttgtctttctgtgcccgacttatttcattagcataatgatctccatttccatctatcttgatgcaaatgacagaatcttatccctttttatagctgcattgtactccattgtgtgtatgtaccacattttctttttccattcatttatcgatggacacttaggttgctttcaaatcttggccattgtgaacagtgctgcagcaaacatgggagtgcagatatctctttgatacactgatttcctttgttttggtatgtacccagcagtgggattgcttgatcttattgtagctttatttttagttttttgaggaacctgcaaactgttctctttagtggttgtactaatttgcattcccactatccttctactctctatctatataggttcagttgttttgattwttattccttctttctgattgtgtattttttgtacccaataaccatccccaattctttctcaccccagcactacccttcccagactctagtaaccatacctctactctctatcctcattgattcaattgttttgatttttaggacccacaaataaggaaagacatgccaagtttgtctttctgtgcccgacttatttcattagcataatgatctccatttccatctatcttgatgcaaatgacagaatcttatccctttttatagctgcattgtactccattgtgtgtatgtaccacattttctttttccattcatttatcgatggacacttaggttgctttcaaatcttggccattgtgaacagtgctgcagcaaacatgggagtgcagatatctctttgatacactgatttcctttgttttggtatgtacccagcagtgggattgcttgatcttattgtagctttatttttagttttttgaggaacctgcaaactgttctctwtagtggttgtactaatttgcattcccactatccttctactctctatctatataggttcagttgttttgatt

SEQ ID NO: 284066 - DNA, 565 bp, Homo sapiens
ctgggggcttacaccctctgaagccatggcccaagctgtaccttggccccttttacccatggctggagtggctgtgatacagggagccaagtcccaaggctgcacacagcaaaggggtcctggatatgatgcaggaaaccattttctcctcctcggcctctggggtgtatgggagagactgccacaaaggtctctgacatgccttggagacattttccccattgtcagtgattaacacttggttcctcattacttaaatttctgcagcagscctgaatttctcctcagaaaatgggtttttcttttctactgcatcatcaggatgcaaattttttgaaattttatgctctgcttcccttttaaacgtaagttctaattccaaaccatatcattgtgaatatatagaagggaatgcttttaacagtacccaaatcacctattgaatgctttgctgcttagaaatttcttccaccagataccctaaatcatctctctcaaggtaaaaattccacagatctctagggcatgaacaagatggtgccagtagctttgctaaagcataact

SEQ ID NO: 284067 - DNA, 567 bp, Homo sapiens
atgagttaaatggagaatctttaataatatttaggtgctatgaatgtactttttttgttttgggttttgttttgagaggaagaagttactgaaaattgcctctagcttggctactacaagattagaggacatcagatttctttaattgtctattttacagtagatcatattagtcaattttcttttaaaaattatttcctctgatttatttggagctatctggtcacagagcttcccagttattttgtggaggtgggaggcaagtacacatttaaagttacccatatattttattccttcatctaaggatgagttgtcagagttttcattgraactagataagaaggaaaagagactaagaaagataaccctttttaaatactttggaaaggccatctttccagggctctgggtttagctttacattcatggggaggcaatagccattctccacaagtctcacagagggactgtgagagtgaagtagaaaaaaattggagatattctcagagtacctacaaaacaggtattggcagagaaattacaaaataaaaataagatatttga

SEQ ID NO: 284068 - DNA, 376 bp, Homo sapiens
ggcgctaatattcctgggatcaaatccacagatctaaaactgctgttgcactcttgggcatactaccactgctataacataaatttaaaattaataccccaacattgctcatataaaataatagatamaaggataaggaatttttttattaatacatagaatttattaaaacaagcaaggagtaacatatgtttagatgcacagtgcttttttctgcaattggccattagaccatagatgatatttacaacttccgtcttctactaccagttctatgttctctttgtcctaacctagcatttcagttggttggagttttttttaatctgcatgggtgacccaaactttcattcctagaaacccgagtttttagtgg

SEQ ID NO: 284069 - DNA, 541 bp, Homo sapiens
ttttgtgtactcattaattcaatcctatgttactcatttccctattatgtgctccatatattttctacagaatttagttcatctataataggcaactaagaattaagaaataaatgaatgactgaatagaaaatattctattttaactttcaagaaactagcacataagatggaagttcttcagcccgcctccccattcccgctccctgaccactggtaccttacagtcctattttccctggccaggtgctrcttacccatgcagcacctttgtgggaattttctcatttattacagccataagtataagggggcaggtcatgggggattgtatcccacagccatcattcagaactatggctctgagaaatttgtcttgtttatacatcactacatttctggaaataaaattaaatattgccagtttatttcagtctccctaaaccattaccaattaataatttggcaataataagttatgcaaatagtggaagtcatcaactgggacctgttcagatgacattcataaagttgctaataa

SEQ ID NO: 284070 - DNA, 489 bp, Homo sapiens
tacaactacatgcagtgacaaggatgaatctcacaaacataatatggactaagagaagcaggaaacaaaagatcactgaacacatgattccacttatgsaaaaataataaacaggcaaaactaagttatggtattaaaagtggtagacatggcagggcacagtggctcacgcctgtaatcccagcactttgggaggctgaggcaagtggatcacctgaggtcaggagttcgagaccagtctgatcaacgtggtgaaaccccatctctactaaaaatacaaaaattagctgggcatggtggcaggcacctgtaagcccagctactcaggaggctgagacaggagaatcgcttgaacccaggaggtggggattgcagtgagccaagattgtgccattgcactctagcctgggtgacaagagtgaaactctgtctcaaaaaaaaagaaaaaaaaaaagtggtagacttcttttccaagaagatggagtagac

SEQ ID NO: 284071 - DNA, 489 bp, Homo sapiens
tacaactacatgcagtgacaaggatgaatctcacaaacataatatggactaagagaagcaggaaacaaaagatcactgaacacatgattccacttatggaaaaataataarcaggcaaaactaagttatggtattaaaagtggtagacatggcagggcacagtggctcacgcctgtaatcccagcactttgggaggctgaggcaagtggatcacctgaggtcaggagttcgagaccagtctgatcaacgtggtgaaaccccatctctactaaaaatacaaaaattagctgggcatggtggcaggcacctgtaagcccagctactcaggaggctgagacaggagaatcgcttgaacccaggaggtggggattgcagtgagccaagattgtgccattgcactctagcctgggtgacaagagtgaaactctgtctcaaaaaaaaagaaaaaaaaaaagtggtagacttcttttccaagaagatggagtagac

SEQ ID NO: 284072 - DNA, 489 bp, Homo sapiens
tacaactacatgcagtgacaaggatgaatctcacaaacataatatggactaagagaagcaggaaacaaaagatcactgaacacatgattccacttatggaaaaataataaacaggcaaaactaagttatggtattaaaagtggtagacatggcagggcacagtggctcacgcctgtaatcccagcactttgggaggctgaggcaagtggatcacctgaggtcaggagttcgagaccagtctgatcaacgtggtgaaaccccatctctactaaaaatacaaaaattagctgggcatggtggcaggcacctgtaagcccagctactcaggaggctgakacaggagaatcgcttgaacccaggaggtggggattgcagtgagccaagattgtgccattgcactctagcctgggtgacaagagtgaaactctgtctcaaaaaaaaagaaaaaaaaaaagtggtagacttcttttccaagaagatggagtagac

SEQ ID NO: 284073 - DNA, 474 bp, Homo sapiens
ttaggggaatggaactcctctgcatgtattggggtggtgggtacatgctttataaatttgtcaaaactcacagaaatgtacatcacaaacacaactgtcttagtccattcctgctgctacagcaaaatgccttaaactgggtaatttataaagaacagaaatttatttctaacagttatagaggctaggaagttcaagatcaagatcaaggcaagttcaagttcgagattcagtgcctggtgagaccccattttgcatgagttctgtgtgtccacacatggcacaaggaaggaaaagggcaaagacgcctagttgactcccttcaacctcttttataagagtactaatccygtgacagtggggtgctcacgacttaccacttcccaaaaagccccacctcttaataccatcacatttggtattaggctccaacatacaaattttggagggacacatacattcaaaccatagcat

SEQ ID NO: 284074 - DNA, 556 bp, Homo sapiens
cttctacctccaaaagaaactgaagcaacttatagattaaaacaaagtataaagaactaaagcatttagagataaaataggacgaataatgtatccctgtgctggaatttataagacacagtatgctttagtaaaaaaagtgttagaattgaagcacaaaaaatcctgggttctagccttaagtctctctaactgtgtggtcttgtgtaatctttattccattggcaaaacaaagtctctamaactttttcaatgtaattttgtaatatatttaaaaaataatatgctagcattagtatgtgaggcaaaatgcggtggttgaggttgtagaggaaccagttaagagattaaagagtgattaggtacagaggattaacagtaggaatagaaagaaaaggaggggggaatccttttaaggaaacgtttgacagagcttggaagttcactggaaatgagaatgagcaagatgagtccgagatgactttgagtctgaacaacacaaacttattgtctcacagttctgaaggctgcaagtctaaaatcaaggggtcagcag

SEQ ID NO: 284075 - DNA, 556 bp, Homo sapiens
cttctacctccaaaagaaactgaagcaacttatagattaaaacaaagtataaagaactaaagcatttagagataaaataggacgaataatgtatccctgtgctggaatttataagacacagtatgctttagtaaaaaaagtgttagaattgaagcacaaaaaatcctgggttctagccttaagtctctctaactgtgtggtcttgtgtaatctttattccattggcaaaacaaagtctctaaaactttttcaatgtaattttgtaatatatttaaaaaataatatgctagcattagtatgtgaggcaaaatgcggtggttgaggttgtagaggaaccagttaagagattaaagagtgattaggtacagaggattaacagtaggaatagaaagaaaaggaggggggaatccttttaaggaaacgtttgacagarcttggaagttcactggaaatgagaatgagcaagatgagtccgagatgactttgagtctgaacaacacaaacttattgtctcacagttctgaaggctgcaagtctaaaatcaaggggtcagcag

SEQ ID NO: 284076 - DNA, 561 bp, Homo sapiens
tctaaaatttattcatcctaaaggctcaagacttatctttctgcagtagtattttactgtgacctctactgaactctcctacctgaatttcaattacacttctaattcatagttcattacttctctctctctctctctttctctctctctcccgtccccccacccccacccttttgagatgaagtctcacaatgttgcccatgctggactcaaattcctgggctcaagtgatccttccacttcagtcttcccagtagccagtactacaggcacacatactgcacttggcttatgacttacttcttacatgattttttgtcgtaatttaatgctaattttctctctcaaattgtacattccttgaggataggaactgtatcttatattttgtctgaatctttcaaaaacctaatgctgggacatggtaagagggcttacaaatttsatatactaattatgaaggaaatgttgtatacaaataactttgttatcttctaaccagtataaacctggcattaatgtggaaaaaataaggttgtaaaatttatttgtcaaaatgca

SEQ ID NO: 284077 - DNA, 571 bp, Homo sapiens
ttctttccacaactctatattccaattttatttctaataattaaattaatataacgtaaagtaatggagtgtgggtttgaaaacaaagaattggaggctttagtaagtgtgggtaaaggtgaacsaaaaaattagttggtaagaaaactgtggccaggcgcagtggctcatgcctgtaatcccagcactttgggaggccaaggtggatggatcacctgaggtcaggagttcgagaccagcctggccaacatggcgaaacactgtctctactaaaaatacaaaaattagccgggcatgatggtaagtgcctgtaatctcagctactcaggagagtagctgagatttatgctcagctactgaggcaggagaatcacttgaacctgggaggcagaggttgcagtgagccaagatcgtgccattgcactcaagcctgggtgacagagcaagactctgtctcaaaaacaaacaccactgtaaaaatggaatatttttaagttcttcctctacagaaaataaaactagaaatcatagtcacctggttgtggcttctgcaagaaaaacaatgcagacc

SEQ ID NO: 284078 - DNA, 571 bp, Homo sapiens
ttctttccacaactctatattccaattttatttctaataattaaattaatataacgtaaagtaatggagtgtgggtttgaaaacaaagaattggaggctttagtaagtgtgggtaaaggtgaaccaaaaaattagttggtaagaaaactgtggccaggcgcagtggctcatgcctgtaatcccagcactttgggaggccaaggtggatggatcacctgaggtcaggagttcgagaccagcctggccaacatggcgaaacrctgtctctactaaaaatacaaaaattagccgggcatgatggtaagtgcctgtaatctcagctactcaggagagtagctgagatttatgctcagctactgaggcaggagaatcacttgaacctgggaggcagaggttgcagtgagccaagatcgtgccattgcactcaagcctgggtgacagagcaagactctgtctcaaaaacaaacaccactgtaaaaatggaatatttttaagttcttcctctacagaaaataaaactagaaatcatagtcacctggttgtggcttctgcaagaaaaacaatgcagacc

SEQ ID NO: 284079 - DNA, 571 bp, Homo sapiens
ttctttccacaactctatattccaattttatttctaataattaaattaatataacgtaaagtaatggagtgtgggtttgaaaacaaagaattggaggctttagtaagtgtgggtaaaggtgaaccaaaaaattagttggtaagaaaactgtggccaggcgcagtggctcatgcctgtaatcccagcactttgggaggccaaggtggatggatcacctgaggtcaggagttcgagaccagcctggccaacatggcgaaacactgtctctactaaaaatacaaaaattagccgggcatgatggtaagtgcctgtaatctcagctactcaggagagtagctgagatttatgctcagctactgaggcaggagaatcacttgaacctgggaggcagaggttgcagtgagccaagatcgtgccattgcactcaagcctgggtgacagagcaagactctgtctcaaaaacaaacaccactgtaaaaatggaatatttttaagttcttcctctacagaaaataaaactagaaatcatagtcacctggttgtggcttcygcaagaaaaacaatgcagacc

SEQ ID NO: 284080 - DNA, 1122 bp, Homo sapiens
tgccaaccctgaatccaggtatcattatctccagtttgcatatgaggaaacagaattagagagcttatgcactttctccaaggtaacacagctataaactaataggtccaggattcacaccacgatttcaccagaagtctgtggctctcaaccacccattgtaccttcccatgcactattttgtgttgttattccaacaatacaaaatgcaaacatctgaaaaagtaccttttcagaatctacaaagtgtgtagcaattcctgctctgtacacatctcttccttttagtctgaatcctgttaatgcaaggaagtaaccaagttttccttggagtcgtggcaagaaataacctccacccacatcagggaacagtcctgtaattaaatgtaacaaaaagagataatggtgattcaaatgaaaaagataaatataacctttttgccgtagatcacacaaaccayttctctctggagcttgaatatacattacaaacattattaaactaagtactatacactgcaatcaatatcacaaaagacttgctataaacwaattctacaacagctccaacttcatgccttgagtgaattcccaggcccagcacagtgcctcatttgagaagatgaagctgagtctagggaaaccaagacagctagaattcccacaacagagtaccagagcggagagagctgcagagagaaagctctggagatctgcagggtgtctcttttaagtacttagcttaggaatggagagagagagagagagagagagwgtgtgtgtgtgtgtcaagaaactacatgattagtcagttttcacattacccgagactgagtaatttataaaggaaagaggtttaattgactcatagttccaaatggctaaggaggcctcaggaaacttacgatcatggcagaaggcaaagcaagcttggaccttctcacatggtagtaggagaaaaaagagtgaggagcaaagggggaagagccccttataaaaccatcagctcttgtaagaactcactatcatgagaacagcaagggagacactgcgtccatgatccaatcagctcctaccagatctctccctggacacatggggattacggggattacaattcaa

SEQ ID NO: 284081 - DNA, 571 bp, Homo sapiens
aattctacaacagctccaacttcatgccttgagtgaattcccaggcccagcacagtgcctcatttgagaagatgaagctgagtctagggaaaccaagacagctagaattcccacaacagagtaccagagcggagagagctgcagagagaaagctctggagatctgcagggtgtctcttttaagtacttagcttaggaatggagagagagagagagagagagagtgtgtgtgtgtgtgtcaagaaactacatgattagtcagttttcacaytacccgagactgagtaatttataaaggaaagaggtttaattgactcatagttccaaatggctaaggaggcctcaggaaacttacgatcatggcagaaggcaaagcaagcttggaccttctcacatggtagtaggagaaaaaagagtgaggagcaaagggggaagagccccttataaaaccatcagctcttgtaagaactcactatcatgagaacagcaagggagacactgcgtccatgatccaatcagctcctaccagatctctccctggacacatggggattacggggattacaattcaa

SEQ ID NO: 284082 - DNA, 592 bp, Homo sapiens
gatccaaacaacaagctctgagaaagggaaaaaaaaatctatgccccaaatagagcagagtttagaactaaagacaatgctggcatctcattgtctccttaggttaggtgatctaatttatcttttcgttttatgaaattaatctcaagcgaacacactgttcacacttttaagttaagggatgcttaatgtgcttagtgcaagctagaaatattgatttcttaatgtarcacttaaacacatatattattgcatcaattcctggcagaaactattttaactctttgaactagtaaaaaaggaaagtcctgtttgtggttaaaaatatgagtgcatttagtaacacttccggcctggtaaaattacaatccagaaatgctaacaaaaaatgttgccttatttggttacttcactttagcacaacaaaaccttgtctttggttctttaagcagttaacttcagtacctcaaatgtttcttaatctaggtgctgaaaatgaaaagatacataagaaaagatttctgctggggcaatttaaagcttagtgcagacagatacagaaaattgattgcaacataatttggtaaatctt

SEQ ID NO: 284083 - DNA, 592 bp, Homo sapiens
gatccaaacaacaagctctgagaaagggaaaaaaaaatctatgccccaaatagagcagagtttagaactaaagacaatgctggcatctcattgtctccttaggttaggtgatctaatttatcttttcgttttatgaaattaatctcaagcgaacacactgttcacacttttaagttaagggatgcttaatgtgcttagtgcaagctagaaatattgatttcttaatgtaacacttaaacacatatattattgcatcaattcctggcagaaactattttaaytctttgaactagtaaaaaaggaaagtcctgtttgtggttaaaaatatgagtgcatttagtaacacttccggcctggtaaaattacaatccagaaatgctaacaaaaaatgttgccttatttggttacttcactttagcacaacaaaaccttgtctttggttctttaagcagttaacttcagtacctcaaatgtttcttaatctaggtgctgaaaatgaaaagatacataagaaaagatttctgctggggcaatttaaagcttagtgcagacagatacagaaaattgattgcaacataatttggtaaatctt

SEQ ID NO: 284084 - DNA, 578 bp, Homo sapiens
acatcttcaagagcaaatgcttgagccctaacctgcaagttatagtagaaaagtccagaagtccagcctggtcctcgccaagtttccaactcctatgcctaggggtattttatgcttacaggatctaacttggttacaacgtctaacttttagcagagaggcagtgctgagtagaaactggacttgttaaccatatcaagtcacttaagttggctaggatcccctacttaggtagcggccataaagcctagggcatccctgtgccctcaatggttcacttctgagtggtgggcttcctgctcctcaatagagcaatcggcagaaaggcccctagaaagctacattgtcttcatccgcgaaggaytccctgtctcctattcctcaaaggagcacccggattctactttcattcttcttttgccattgcattttataacttaaaagaaatagatgattgtaacagaagaaagaaaactttacattgtgagaaaatttagacctaaagcttatagtaatgtgaggacgaaagtctatactgtttaagtaaataggttctatgagcagcatccaggctaaca

SEQ ID NO: 284085 - DNA, 529 bp, Homo sapiens
tgaatacaacctcagagtccagtaggaggacaccaggcacgcagggagcaagtgagtgttgcaggagctaggatgttagtctgtacctggtaggaagaggcacaaagaaggaaggaattaatcttaccctaggatggagtcaaaactgtttgtgaatgactgaacgaagtaaaggaactgaatggttagatacattttaaagctctcatggagaggcyataatacctagacctaaccaaagaaattaatactagtttcttaactattaagctactttccaatacaagactcgtcggaaaaaaaactaaattagtagagaagagagactgctgttgtataaaatcatattccctagaaattaagtgacatttttcccacacaactctaatgaagagcttcctccaaagagggtgttggctaagataaaagggaaataattttgccctggaggagggaagtgaataacttgcaaaatccctaggctgccctgacccagggagtgtgaggttaaggacagacaccaccttcc

SEQ ID NO: 284086 - DNA, 529 bp, Homo sapiens
tgaatacaacctcagagtccagtaggaggacaccaggcacgcagggagcaagtgagtgttgcaggagctaggatgttagtctgtacctggtaggaagaggcacaaagaaggaaggaattaatcttaccctaggatggagtcaaaactgtttgtgaatgactgaacgaagtaaaggaactgaatggttagatacattttaaagctctcatggagaggccataatacctagacctaaccaaagaaattaatactagtttcttaactattaagctactttccaatacaagactcgtcggaaaaaaaactaaattagtagagaagagagactgctgttgtataaaatcrtattccctagaaattaagtgacatttttcccacacaactctaatgaagagcttcctccaaagagggtgttggctaagataaaagggaaataattttgccctggaggagggaagtgaataacttgcaaaatccctaggctgccctgacccagggagtgtgaggttaaggacagacaccaccttcc

SEQ ID NO: 284087 - DNA, 577 bp, Homo sapiens
ctcacaggaacctaaccccatatttcctatagaagtagttcagtattcactaattcagtgttctctgtaattttacagaacataactgctgcaaataatcgagaatcaactctattcatgtgatgtggttcactctgagtctccatttcactgttttgctgataacgcccagatatttgcagccctgggatgtaagaaaatgtagaatagagagaatcaatattcattcaatctcaactaatagcatttcaggagacaagatgttgtatccctatagcctttggagactgtgggaaaagccatttgctttcagagaggaaacaactggttaaaccagttgtttaaactgactattgctctcatttgctcatgaaaatccatcctggatrctggcctctgagaggtttgacatcaggctatccttcagatgtctgccaaacaggagaaatgcagaagcagtttaacaccacagcctccctgatcctccccgcttcagtgaagagcaaaattagctttccatgctgccacttttccttgctatgtgtaagcaaagaaagggatttgcttaccaacacag

SEQ ID NO: 284088 - DNA, 619 bp, Homo sapiens
accagaaatgcctgtggtcccctgtaatagtgatacaaaataatcacaaaactttgcttcagggtcctaagttaaagaaaacagccagctgcttaacaatggagactctcaggagagacagggccagttgaatgaaaaatcataaaagctttctcttgatgttgttttgtttctgtttttaagaggcaataaagcttaacagtaaaacatgtgagccctggagtccaaaaatctagttgcaaatctcatgtttgccagttataagctgtgtgactttagctgagttaactgacctctctgtgcttttatctgtaaaatggagattgtataagccaggtttctccagaggaacagaatcaatagtagatatatgagaaacataaaggcactacatgaatctccagaggaacctggctcatataatctctctctctctctctctctctctctctctctatatatatatatatatacacacacacacacacacacatatgagaaacatatatatatatacacacgagaaacatatatatatatatgtttctctctctctctctctmtatatatatatacatatatatatacacacacacacacataaacatatgtacagaaa

SEQ ID NO: 284089 - DNA, 558 bp, Homo sapiens
ttcactctcttgcctgccgcctcctaccggcatcctggaaaacaccaggtgatgaagggggctgatgagagagaaagccaggctagaagcctcatgggaacacycaccagctccagggactgagattgaatccttagcctcctcaagtctcagggtccttaactgtcacatgtgggtaatgactgctgagaattaaattcatggggaaaacctcccagggcgtctgacttagagcaggtactccataatcagcagctgttattactgttgttgttaaaatctggaagtctgtattgcttatgtttcttccaatgaggaatgtgctacaaatcagatgtgaacatcttatactcactgcaaattcacgttgaatattatagaatattagagtcacacattgaaggaaactcaggagacagttataataccaataagctaataaaatgttctctattctaacacatttgtcatttcttatatttagagtttaacttcctatccaacccatcaaaaactttcctcaagattagctgagatcttttgattttgcatatgtaa

SEQ ID NO: 284090 - DNA, 625 bp, Homo sapiens
acggatgttcactggtgattggctgaacctgcagagatcagtgcctgtggatggcaggtgccccttatgctcacacaagtcacaggccaggctgcagatcacagtacagatcccctaactttgaattttgaggaaaagaaacacacacatgcgtaacctataagagtaaacaaaaatcacttgcattacyatgcaaacttagaccacatggttcaaaaagtgtgggcaggagggcatgggtacactttttaccctgcctttgctggagccaattcattctgggagagcagcgtgagagctcacctcactccacagcaggtctgagcagggtacagcagtgtcacccaagggggtgtccctgataccgtgggccattcccagtggtaggggagcaggccaaatgccacagtcctctgaggctcaatggctcttcaagtccaccagacttagagcagtggagtccaagcagctctggatgctgttgtcaacctccagtcacatcactgggttcagattcacccccacacccgtatcgccataacacaatgctttacaatctgaggcctaatttagccagtcatctggtgaccatctcaagggacctttgtccagtggtgcactgagc

SEQ ID NO: 284091 - DNA, 1221 bp, Homo sapiens
tttataaattcatgtttttcctccaatgcaatggaaccttgtgcatgatactgggggcaatggtaagctcttactactctaaagggagtggctgagggcaaggtcagatgcatcagagaatatagtaaataagtttcaaagtktatttgtagccatcacatgcaatacaaaataacagaaagcaagttgtcttattaatttaaggcacccagtttgacaggttggagtatcatgtaatggacaaatcaaataattgaataagaattttcaaagaagtaatccaaatcttagttatccaatttaaaggttacagttggtcatatagtcatgtgtcttttaatagcagggatacattctgagaaatgcattgttcaggcagttctatccttgtgcaaagatgataaagtgtacttacacaaacctagatagtagagcctataagacatgttggctgtatggtataccctattgctcctgggttacaaacctgtacagcatgttactgtactgaatactgtaggtaattgcaacacaatgataagtattaacgtatctaaacatatgatggcatagaagacttagaaaatatggcatgcaagataaaaacggcwtttataaattcatgtttttcctccaatgcaatggaaccttgtgcatgatactgggggcaatggtaagctcttactactctaaagggagtggctgagggcaaggtcagatgcatcagagaatatagtaaataagtttcaaagtgtatttgtagccatcacatgcaatacaaaataacagaaagcaagttgtcttattaatttaaggcacccagtttgacaggttggagtatcatgtaatggacaaatcaaataattgaataagaattttcaaagaagtaatccawatcttagttatccaatttaaaggttacagttggtcatatagtcatgtgtcttttaatagcagggatacattctgagaaatgcattgttcaggcagttctatccttgtgcaaagatgataaagtgtacttacacaaacctagatagtagagcctataagacatgttggctgtatggtataccctattgctcctgggttacaaacctgtacagcatgttactgtactgaatactgtaggtaattgcaacacaatgataagtattaacgtatctaaacatatgatggcatagaagacttagaaaatatggcatgcaagataaaaacggc

SEQ ID NO: 284092 - DNA, 599 bp, Homo sapiens
aaaagttgttttctttggataatatgatgggagttacttttattttgtttgataaatttcggtattttccatgatgaacaaatggtactttcattattggaaaataaagtaacartgtgaactcttttatttcatgggagtttcatttgttataaccatgaaatattcaacatctttaatttctttctgcttttcaaggaaacaactgagctacacgataaatgaaataaaccacttttctatgtccagttcacattttcaaatttaacaatgcttgacatcccaggatagcacaactaataagtcagccattcttcattatgatcagaaacttgtttgagtggcagtgccagtactactcagcttgctgtacgggaagagcaagccctagaaaggcatgttaataggggacattcccaaagcaaggcttaccattttgtgaatgtagcttctgttgaatttaaatacttcatcatatataagttttatgaaatataaatctcacatatggagatgaagatgtgctaggacagaagttttcttagtcaatatgcagcgtgtagctttctgcgaggtaacacagagcaggctcacaccac

SEQ ID NO: 284093 - DNA, 599 bp, Homo sapiens
aaaagttgttttctttggataatatgatgggagttacttttattttgtttgataaatttcggtattttccatgatgaacaaatggtactttcattattggaaaataaagtaacagtgtgaactcttttatttcatgggagtttcatttgttataaccatgaaatattcaacatctttaatttctttctgcttttcaaggaaacaactgagctacacgataaatgaaataaaccayttttctatgtccagttcacattttcaaatttaacaatgcttgacatcccaggatagcacaactaataagtcagccattcttcattatgatcagaaacttgtttgagtggcagtgccagtactactcagcttgctgtacgggaagagcaagccctagaaaggcatgttaataggggacattcccaaagcaaggcttaccattttgtgaatgtagcttctgttgaatttaaatacttcatcatatataagttttatgaaatataaatctcacatatggagatgaagatgtgctaggacagaagttttcttagtcaatatgcagcgtgtagctttctgcgaggtaacacagagcaggctcacaccac

SEQ ID NO: 284094 - DNA, 599 bp, Homo sapiens
aaaagttgttttctttggataatatgatgggagttacttttattttgtttgataaatttcggtattttccatgatgaacaaatggtactttcattattggaaaataaagtaacagtgtgaactcttttatttcatgggagtttcatttgttataaccatgaaatattcaacatctttaatttctttctgcttttcaaggaaacaactgagctacacgataaatgaaataaaccacttttctatgtccagttcacattttcaaatttaacaatgcttgacatcccaggatagcacaactaataagtcagccattcttcattatgatcagaaacttgtttgagtggcagtgccagtactactcagcttgctgtacgggaagagcaagccctagaaaggcatgttaataggggayattcccaaagcaaggcttaccattttgtgaatgtagcttctgttgaatttaaatacttcatcatatataagttttatgaaatataaatctcacatatggagatgaagatgtgctaggacagaagttttcttagtcaatatgcagcgtgtagctttctgcgaggtaacacagagcaggctcacaccac

SEQ ID NO: 284095 - DNA, 515 bp, Homo sapiens
tgaaatatgtgacctttcagagaattaaaaatagctgtgttggccaggtgcagtggctcatgcctgtaatcctagcactttgggaggctgaggagggtggatcacctgaggtcaggagttcacctaaatggtgaaaccctgtctctactaaaaatacaaaaattagccaggtgtggtggcatgcgcctgtagtcccaggtactcaggaggctgaggcaagagaatcacttgaacctcggaggtggaggctgcagtgagctgagatcacaccactgcactccagcatgggcaacagagtgagactctgactcaaaaaaaaaatgtgttttgagtttgaagaaactcaaagaaattaaagataacacagagaaggaattcagaattctatcagacaaatttaacaaaaagactgaaataattaaaaagtatcaatcagtatttctagagctgaaaaackcaattagcatactgaagaatgtatgagtcatttgatagtagaataggtcaggcagaag

SEQ ID NO: 284096 - DNA, 503 bp, Homo sapiens
ttttactgtgtgaaatataaaattcatatggggaaggctcaagtgcttggtatctggaaagcttgaatccatctggaagctcctcaacactcatgggtaggttagggccattggggtcaagatccaaagagctcgtgagacttcttagaatgatcgtccttcagttgggacaatgattgcctaagtcatcaccttgttgtgagaacacctccactgtcaaggagaagtcagttgttccagtgatggaggtggggtactggtgctgaagtgcaagaggatcgtattacattgacagcagggaacagatgggrccaatatcatgaccctaagatgcacagcccacccaatcttttgtctttctctaggttatacagagtgattactgagtattgctaacatgatgggacagtgctgttcagtagaactttctgctggatggagatgctctgtatctgtgctgcccagtgtggtagctacttgtcacacgtggctattgagcactt

SEQ ID NO: 284097 - DNA, 597 bp, Homo sapiens
tgcatgtactatcattgtctcattcagcatgatgcaaaaagctgaagaagtcagaatgatgtttctccaatttatagaccactaaaatacacaaatgtctcttcatcatccaktgagtttgacaaaactttttacaattttgccttctctatagtgcattacataatgtgtacactcattgggatacataaactacttacgaaatcagaaaagaaataaatatttttaaaagcccaaaggacagagttttatatttatctcttattctatgcccaaagcttgagtcattattctcttcttatgaactttagctgttatctgggtttatgttacagataaagtaatttttaaaaacaaagaatcttttgttcaatcaggagggttaaaaatgatatttcagaagagaaatgatttaaagaagagttgaaaaggaagattagaaccaggatttcacctattttgtttatgaatacaatttccactgacacctgtgaattccacctgccaaaatttttgcctgtgactggacattttacacaaaggcagtaggctatgataacttcctgactcttttgttgaaactgaaacaaggttgtg

SEQ ID NO: 284098 - DNA, 643 bp, Homo sapiens
aatatagaggtgtgaagtgggaaatcaggggtctcacagccttcagagctgacagccctaaacagagatttacctacatatttattaacagcaaaccagtcattagcattgtttgtatagatatatgattaactaaaagtatcccttatgggaaatgaagggatgggctgaattaaagkaataggttgggctagttaactgcagcaggagcatgtccttaaggcacagattgctcatgctattgtttgtggcttaagaatgcctttaagagattttccaccctgggtgggccaggtgttccttgccctcattcctgtaaacccacaaccttccagcttcggcattagggccattatgaacatgtaacagtgctgcagagattttgtttatggccagttttggggccagtttatggcagatttgggggggcctgctcccaacataaatgtggagcaaaaagttaaggaaaactttctgaaggcacagaccatctctaataggaattttgagaaaatggtaagagccactgattctgggaaataacctaggaggcccagggacaaggaaggagagattttgctcctcactgattacagcgttgtgccttttgaataatgtgcattatgtatattgccttgccaaa

SEQ ID NO: 284099 - DNA, 606 bp, Homo sapiens
tgttaattccactgccttggatgacatcacaccagttgttagcctccactaactgctggctggtttctctgttgttttcagcaatgccctgggccataaattgctgcacagtctgatccaactaaattccaacttctatgaagtagtagtttttaggccagtttttggagcttatcccaaccccaagaaggcctttcttacctgtctctttctctggttctctggtaaactactaacttactgtggtttaccttcttgcttttgtggactatcagccatcttttaatcgctttccttcaaaatctctattgtttgcagtatcacccttaggcttgaccatctccacatacttttctaaattaagttggttctcttgaataaagaaatttattggggcaattccaagatggctaaataggaacaactccagtctacagctcccagcacgagcaacatagaagatgggtgacttctgcatttccaactgaggtaccgggttcatctcactgaggcttgtcagacagtgggtgcaggacagtggrtgcagtgcactgagcatgagctgaagcagggcgaggcatcctctcacccgggaaatgcaagggg

SEQ ID NO: 284100 - DNA, 576 bp, Homo sapiens
cttggctcaaggtaggcactcaataagtgtttatttaagaaaaagaaatayatatatctatatgtacatttctgaggacatgtgataaatgatgattgacaggtagatcatgataaatagatgattgattgatgacagatgatttgttgataggtgatttgttgatagattggtggttgactgatgatagatgactgatagataggtgacaggttaatgatagattgatgatagattgattggtgatagttagatgttagatgattgatagataggtagcacatgaaatctttgcaacctgaagaatcacttcctcctaaaacaatgtacagcccacctttacccatttgcgctatttcattctctgtcatcaaggttcttctaccctttccagagctatacaaatctataatgtctctggctgggagaaattacgagcagtgtcctctacattatgcccacattgccatgtgggtgactgtattccctttcagaatgtttggtattgaccaaatgaagggggaaatgctccatagcttttaagtgacacaaagcacagagctgaagggaacagaa

SEQ ID NO: 284101 - DNA, 598 bp, Homo sapiens
tgatagataggtgacaggttaatgatagattgatgatagattgattggtgatagttagatgttagatgattgatagataggtagcacatgaaatctttgcaacctgaagaatcacttcctcctaaaacaatgtacagcccacctttacccatttgcgctatttcattctctgtcatcaaggttcttctaccctttccagagctatacaaatctataatgtctctggctgggagaaattacgagcagtgtcctctacattatgcccacattgccatgtgggtgactgtattccctttcagaatgtttggtattgaccaaatgaagggggaaatgctccatagcttttaagtgacacaaagcacagagctgaagggaacagaagcatccatggtgatagactgagtgtggcagaggaagggtctgctctcccrggtgctactctgtcaccaagcacacataggatttcaaataagccattttatttcttagtagagatggggtttcaccatgttggccaggatggtctctacctcttgacatcatgatccacccacctaggcctcccaaagtgctgggattacaggcgtgagctaccata

SEQ ID NO: 284102 - DNA, 523 bp, Homo sapiens
ggcccactgtacatgaaagggcagtagggcagagtggttctcaacccaggggaccaaggaccacgctttgggaaattttatcctaaggccttactgcaataatttagaaccaggagtctcaactgagactagagaagcatctgatgcaagagaaaattcaggtaaatgttgtttcctgagatgtgcccgtttayatgactccagccacggctcatggcagtttattatggtgggaagagcaaagggttaagagttaagccacactagaactggctgtctctgcctcaaactggctgggtgacatttagcctacagtgtcagagcctttgttttcttttctccgggatttgaggattaaattagttaagatatgtgatgcatttggaatggggcctgccataaatgcttagcaaatgttattgtctccattttaaatctttgtgatcgcgaatatatgtctctcttccaaaccacagtttatctataaaatgggggccttaaactaaatcccaacgcttatagg

SEQ ID NO: 284103 - DNA, 591 bp, Homo sapiens
ttatctcagttactgtacaactygatgtcaatgaactttaacataaatgcaaaatgcagcatgaaaatcccaatgcatttctcagaaagtaatcaagcacgttatctagaaaactctgtttttaaatacacattattatccaaatgaaaataaactttcaataaaacaaagggggcaggtggaaacttttggaggtgaaggctaagtttattgagttgatgtgataatggtttcacaggtgtacacttttctccaaacacattaagttgtatgcattaaatatctacagctttttaatatcaataatacctcaacaaagtgatttaaaaaaaatacaggctgggcgtggtggtgtgcacatgcaatcccagcattttgggaggctcaggtgggacgctcactagagcccaggagctggaggctgcagtgagctatgatcacaatgctgcaccagcttgggtgacaggtaagaccttgtctgtagtctctaaaaaaaaaaaagaaaaaaagaaaagaaagaaaatacattttaagattttttttcagttagaaagaataaataatacctagtatttgatagcataacagggg

SEQ ID NO: 284104 - DNA, 591 bp, Homo sapiens
ttatctcagttactgtacaactcgatgycaatgaactttaacataaatgcaaaatgcagcatgaaaatcccaatgcatttctcagaaagtaatcaagcacgttatctagaaaactctgtttttaaatacacattattatccaaatgaaaataaactttcaataaaacaaagggggcaggtggaaacttttggaggtgaaggctaagtttattgagttgatgtgataatggtttcacaggtgtacacttttctccaaacacattaagttgtatgcattaaatatctacagctttttaatatcaataatacctcaacaaagtgatttaaaaaaaatacaggctgggcgtggtggtgtgcacatgcaatcccagcattttgggaggctcaggtgggacgctcactagagcccaggagctggaggctgcagtgagctatgatcacaatgctgcaccagcttgggtgacaggtaagaccttgtctgtagtctctaaaaaaaaaaaagaaaaaaagaaaagaaagaaaatacattttaagattttttttcagttagaaagaataaataatacctagtatttgatagcataacagggg

SEQ ID NO: 284105 - DNA, 682 bp, Homo sapiens
ttccttacatttttactctatattctatgactactaaatatttagaaaaatgattttgacctagtgtctttccttgccaaatacccaaggaacctgggtgtatagatgtgcatggtagaggcaaatgcacatagctttcttatatttttcattatgctaccatcatctcactctccccatgcactgccaaaccctgcatgtgggttaaatgtcccagctcaggatttaacctgtttctatatttgtgaagaagagattgatgtgggtttcttgttttaatagcaatagttggccatcagccaaaagacatacatcaatcctccccaacattctgactcccttggttcaaactcttggaatcattcccatttcccttctggyatattcacagttaatcccattatgcatggcttgaactaatattgcttttcatgagtcaccttttctctatatgtctaatcgcctttaatccaacccacattggctctaactccaacctaaaagagactttcatctcagcatctgctttgctgtcttcaaaattcggtaagacttgtgccctccacttactgtatttctcacatattgtctccctgctcccctatacacctgcatctccagggttccttacttgttcagtcaccccctgccgtggccactgccccttcattcccctccagtt

SEQ ID NO: 284106 - DNA, 636 bp, Homo sapiens
ctccgtctcaaaaaagagaaaaaaaaagatttagttccaactatattagtaattacaacaaatataaatggatgaaatactcaaattaaaacaccactattgttagacttattaaaatttttttaaaggactaaaatatatataccgatcacaagagatgtatgttaaagataaagactttaagaagttgaaagtaaaaagggacagaaaaagatgtaccatgsaaacagtaagcaaaaagctagtgtagctatatcgacgtcaggaaaggaaactttatgccaagaatatcacaaagatgaaaagggatatttaataagtatagaagggtcaattcaatgaaaagataataacaatactaaatttgtagtcatctgataacatagcttcaaaatatagaaaattaattaaatgattgctatgttactgtcttttgaggaaattgtctacagaccattagtgggagtttgactgttatctccatcacaggttttctacagcctctgctgtccccctggccaaaacagatacttggccaaaggacgtgggcatcctggccctggaggtctacttcccagcccaatatgtggaccaaactgacctggagaagtataacaatgtggaagcaggaaagta

SEQ ID NO: 284107 - DNA, 540 bp, Homo sapiens
gacgtggaaattctcctttaaaaattccaaatttctctttctctctccccctcccgctgactctctccccaacctctctctctccctttccccccyccctccctatttctcccactcttcttctgatgaatgaactaagttgacacatttaacagcccctctttgctactgacctgcccttaagaaccgtatttccaacatgcacacaggctcccgggcagtaccacagtcttcagggctgctaactgagctcgtcctctcaaaggcatcctgcggccctcagcccacttgtccacctctcctagccctaacaacatctgggctgcaacagcctagcacctgccaatatcccatcggtaaggaatgaacccagggcccctccacccgcacctctgcttcctctcaggtggctgtatctgtgcatctctgccacccactgacttcttccttcccttcctctgctccttccctgcctcggcacacctttttcttcttccctctccatctaccaaaaggaggggaaaatcttaaaaacttgag

SEQ ID NO: 284108 - DNA, 1085 bp, Homo sapiens
gacgtggaaattctcctttaaaaattccaaatttctctttctctctccccctcccgctgactctctccccaacctctctctctccctttcccccccccctccctatttctcccactcttcttctgatgaatgaactaagttgacacatttaacagcccctctttgctactgacctgcccttaagaaccgtatttccaacatgcacacaggctcccgggcagtaccacagtcttcagggctgctaactgagctcgtcctctcaaaggcatcctgcggccctcagcccacttgtccacctctcctagccctaacaacatctgggctgcaacagcctagcacctgccaatatcccakcggtaaggaatgaacccagggcccctccacccgcacctctgcttcctctcaggtggctgtatctgtgcatctctgccacccactgacttcttccttcccttcctctgctccttccctgcctcggcacacctttttcttcttccctctccatctaccaaaaggaggggaaaatcttaaaaacttgagwaaactttttattaatgaatatgcatatttaaaatgtgatcatatacatgtcttctttgagaaaattttctgttcatatcctttgctcatttttctattagggtatttattttattattgataatatctttatatattaaagatattaagctagtatctttggwatatgttatactttttgtttcgatagggctggtcttacaagcagtgtttgtgctaattttgatgttttagttagtggcagggttaggagtactagttagtaacaggggctacacttggtagcctattctactgttgataaaattgaccaaaatttgaaataaacaggtaccaagaagaaagggaaagattcctttcccagtggaaactgtattgaagacatttctttgtaaatattagtgtattagtgtagtgaatcaataaacagcattctttctgctttttcacatctaaggggatgagctggaacatccccattttatagatgggagaaaagcaaaagcaggacatgaattaagacaatggcaaatgagaatgggacc

SEQ ID NO: 284109 - DNA, 561 bp, Homo sapiens
taaaccacaaaccaagagccaaaccatgcctgacttaaccagaaacaaatgccaaccactgtcgaatgtgrctgcccagcctcttaacaccatcttctcaggtggctgacatcccttggtttcacactgggggccttgccctggattatttactttcttttatttagctcaagttagaagcaattttacacctgaagttgaatgacttccaaatggattttagcatagacccagggaagagtgtaagaaagaggacaggaaacaattctcttgacattattttcaaggcaggagagaaaagaccatctcatggcctttgggtacaaacccttggcctatgtaaatagagcccccactttctgccctctgaatctcataccttgcttccactgattctggatttttttacggtatgatgtgtaacatcgatccaaggcccgcaagtagcactggatggaaagcttcccatccactattgggtactccgaggccaaatttggtttgtagaagtcatacacattctccatatgggttcccctcagccctggaaaggcacacaaa

SEQ ID NO: 284110 - DNA, 286 bp, Homo sapiens
gggctcagtcctataagactgcactgacttcaaatgtcagtctcatctgggccaggccacccatgcttytgacctaccagctataaatcaaggattcccaagatcccctcctcaagttcaataatttgatataagagctcacagaactcagaaaaacagtttacttacatttactgacttattataaaggatacaactcaggaacagccaaatggaagagacgcagagggcaaggtatgggggagtagggtgagggtggcacagagcttcaatggcctctctgggt

SEQ ID NO: 284111 - DNA, 577 bp, Homo sapiens
attaatgctggaatgagttaagactttgggggactgttgggaaggcatgattgtattttgaaatgtgagaaggacatgagatttgggagcggctaggggcaggatgatatggtttggctttgtgccccgaccaacatctcacgttgatgtgtaatccccatgtgttggaggagtggcctggtgggagatgactgaatcatgggagtggacttcctctttgctattctcatgacagtgaatgacttctcacaaaagctggttgtttaaaagtgtgtagcactttccccttcactctctctgtctccctcctgccaccatgttaagaaggtgtttctaattgtgytgtagtcctttgaatctttcaaaatataatctgaagtccttcaatctctaaactattatattaagtttagaaacagcaacacaaaaaggcttgaatgtcatattaatgacagatagaaatcaaggatttgtgttgcctgttgtgcatttactaactgggtgccagatgtaaacagaattgactcttcccctccctgctccctttatcttgcagcatgtggattaccataccctc

SEQ ID NO: 284112 - DNA, 577 bp, Homo sapiens
attaatgctggaatgagttaagactttgggggactgttgggaaggcatgattgtattttgaaatgtgagaaggacatgagatttgggagcggctaggggcaggatgatatggtttggctttgtgccccgaccaacatctcacgttgatgtgtaatccccatgtgttggaggagtggcctggtgggagatgactgaatcatgggagtggacttcctctttgctattctcatgacagtgaatgacttctcacaaaagctggttgtttaaaagtgtgtagcactttccccttcactctctctgtctccctcctgccaccatgttaagaaggtgtttctaattgtgttgtagtcctttgaatctttcaaaatataatctraagtccttcaatctctaaactattatattaagtttagaaacagcaacacaaaaaggcttgaatgtcatattaatgacagatagaaatcaaggatttgtgttgcctgttgtgcatttactaactgggtgccagatgtaaacagaattgactcttcccctccctgctccctttatcttgcagcatgtggattaccataccctc

SEQ ID NO: 284113 - DNA, 578 bp, Homo sapiens
tgcttggcatttaataggagttcagtaaatggcccagaaatcttgttgagacactctccttggaaattctctttgcttagcacccacaatattgcactgtcctagtcctcctcatacttcactgaccaccctgtctcctcttcttaactcctaaaataggtcagccttcaagggtcttttttacatttcttctccctctccctcaackgttttgcctcttcctgtagctttatacagctcttctatccaaagacctcacaaatttgaacctctcacccaacccctgacctgcactccagatccacatttctcatgatgccccaagcattacaactgaggaggctgaatgtcccttccagtcctgaggtgctgtcccgcatgtcccatgtaacaagggacaggaggcagcagaaacaggaaaagcacatgcgaaggagtcaacagcacgggttaaagtagaagtctgccactgacatatggtgtgccccgggacagctatttcacctcttcgagtcttagtttaatcatctacacaataggggaaaacaagctaccttgaaaggatgctataaagactc

SEQ ID NO: 284114 - DNA, 578 bp, Homo sapiens
tgcttggcatttaataggagttcagtaaatggcccagaaatcttgttgagacactctccttggaaattctctttgcttagcacccacaatattgcactgtcctagtcctcctcatacttcactgaccaccctgtctcctcttcttaactcctaaaataggtcagccttcaagggtcttttttacatttcttctccctctccctcaactgttttgcctcttcctgtagctttatacagctcttctatccaaagacctcacaaatttgaacctctcacccaacccctgacctgcactccagatccacatttctcatgatgccccaagcattacaactgaggaggctgaatgtcccttccagtcctgaggtgctgtcccgcatgtcccatgtracaagggacaggaggcagcagaaacaggaaaagcacatgcgaaggagtcaacagcacgggttaaagtagaagtctgccactgacatatggtgtgccccgggacagctatttcacctcttcgagtcttagtttaatcatctacacaataggggaaaacaagctaccttgaaaggatgctataaagactc

SEQ ID NO: 284115 - DNA, 563 bp, Homo sapiens
atgtcctacagcatcattctttcgaccatgagccttgcatactcctgcctggccatataagtggcattcttaaaggttcatttggttcctcaaacgtattccacattaaataatatccacatgttggcttgttgagagaagaaggtaaacagttgggggcatcaacaaaaaatcaggtgaggggagaaaggagagatagtgagtgtggccccttaggcatgctgagttcagttacaacagtcacacttggactgtattcaaagttgcccactcatccaccacagctactcaaagacatttaactcgctagccattatccaaccgcatttaccagacgctcagtcttgagggaggagggtaacgcagtaggggatgcggagtattggtgtcatcctacaggttaaggacaaacatgcccactacaaggacagggatacatcaccaacttcaattcarcccagggttcatgtagtaaggggtgggtgattcactcctgtgggggaggcagggcgggggcggttgggggaggcggttaggaaaaaggaaaatcgtggaaagtccca

SEQ ID NO: 284116 - DNA, 527 bp, Homo sapiens
aagaatcaaatgaggaacattgtaaaaataccaatatcagggattcgttttcagacctgcagcatcagaatttctgggactggaggccagacctgctttgggagcagtagaccagatgcctccctaagtccctcacattccccagattctgacattcccattggacaaagtcctcaaaygaaagtcctttccctgtgagtctatgatcacatcagcaaaattcagtagcgaagttgcctctgttgtgtggatgggaaccagaagcctgaagctctctgagaacagcacgtctttgggttcctttcctttcccatggttacttacccagctcgtggctgtcagaacacaggctctcaaggcagaaaagcacaaggaatgaagcaaggatttgagagaaactggtggaaggtagaatttaaaagcccatccccctcagccacatcagtacaatggattttgctccccactcagtttctattttttttaattcaaaatgtatattaatgccccaatatacagccacacac

SEQ ID NO: 284117 - DNA, 527 bp, Homo sapiens
aagaatcaaatgaggaacattgtaaaaataccaatatcagggattcgttttcagacctgcagcatcagaatttctgggactggaggccagacctgctttgggagcagtagaccagatgcctccctaagtccctcacattccccagattctgacattcccattggacaaagtcctcaaatgaaagtcctttccctgtgagtckatgatcacatcagcaaaattcagtagcgaagttgcctctgttgtgtggatgggaaccagaagcctgaagctctctgagaacagcacgtctttgggttcctttcctttcccatggttacttacccagctcgtggctgtcagaacacaggctctcaaggcagaaaagcacaaggaatgaagcaaggatttgagagaaactggtggaaggtagaatttaaaagcccatccccctcagccacatcagtacaatggattttgctccccactcagtttctattttttttaattcaaaatgtatattaatgccccaatatacagccacacac

SEQ ID NO: 284118 - DNA, 527 bp, Homo sapiens
aagaatcaaatgaggaacattgtaaaaataccaatatcagggattcgttttcagacctgcagcatcagaatttctgggactggaggccagacctgctttgggagcagtagaccagatgcctccctaagtccctcacattccccagattctgacattcccattggacaaagtcctcaaatgaaagtcctttccctgtgagtctatgatcacatcagcaaaattcagtagcgaagttgcctctgttgtgtggatgggaaccagaagcctgaagctctctgagaacagcacgtctttgggttcctttcctttcccatggttacttacccagctcgtggctgtcagaacacaggctctcaaggcagaaaagcacaaggaatgaagcaaggatttgagagaaactggtggaaggtagaatttaaaagyccatccccctcagccacatcagtacaatggattttgctccccactcagtttctattttttttaattcaaaatgtatattaatgccccaatatacagccacacac

SEQ ID NO: 284119 - DNA, 527 bp, Homo sapiens
aagaatcaaatgaggaacattgtaaaaataccaatatcagggattcgttttcagacctgcagcatcagaatttctgggactggaggccagacctgctttgggagcagtagaccagatgcctccctaagtccctcacattccccagattctgacattcccattggacaaagtcctcaaatgaaagtcctttccctgtgagtctatgatcacatcagcaaaattcagtagcgaagttgcctctgttgtgtggatgggaaccagaagcctgaagctctctgagaacagcacgtctttgggttcctttcctttcccatggttacttacccagctcgtggctgtcagaacacaggctctcaaggcagaaaagcacaaggaatgaagcaaggatttgagagaaactggtggaaggtagaatttaaaagcccatccccctcagccacatcagtacaatggattttgctccccactcagtttctrttttttttaattcaaaatgtatattaatgccccaatatacagccacacac

SEQ ID NO: 284120 - DNA, 619 bp, Homo sapiens
tgggttttatttgatcaatttctgtaatactgactttttgagagaagaaatactgttggaaaaagatccacgaactgttgttcccagaatgaggcttctggatggcagtgcagtaagttgggggtaaaatgtttcccaaaagagttgattgcaagatcctgaacattgttttgaagatagtcaacaactatctgatatgtagcaatctgaaatttattaaaaacattttttctgttaaactaatattaktatattctatcttctgcagacataactttttaaattaaaaatcgttaaaagacagtttctatttcttgtagtctttaaaaaaatacaacatgtaaaaagagatgtgttgcagcatcatagctttggaaatggaggtatttggtatgtaactgagaggtttaaggacaccactggttttgcatcccaaggagtttggaaatgaaagtatttagtatgtaactgagaggtttaaggacaccactggttttccatcctaaggagtttggtcacttcggtggttattcccgtacctggtaccttttctggatatataaagactagactttatgatcataaaaagttcctttcatcttattctactgcaattagt

SEQ ID NO: 284121 - DNA, 619 bp, Homo sapiens
tgggttttatttgatcaatttctgtaatactgactttttgagagaagaaatactgttggaaaaagatccacgaactgttgttcccagaatgaggcttctggatggcagtgcagtaagttgggggtaaaatgtttcccaaaagagttgattgcaagatcctgaacattgttttgaagatagtcaacaactatctgatatgtagcaatctgaaatttattaaaaacattttttctgttaaactaatattagtatattctatcttctgcagacataactttttaaattaaaaatcgttaaaagacagtttctatttcttgtagtctttaaaaaaatacaacatgtaaaaagagatgtgttgcagcatcatagctttggaaatggaggtatttggtatgtaactgagaggtttaaggacaccactggttttgcatcccaaggagtttggaaatgaaagtatttagtatgtaactgagaggtttaaggacaccactgrttttccatcctaaggagtttggtcacttcggtggttattcccgtacctggtaccttttctggatatataaagactagactttatgatcataaaaagttcctttcatcttattctactgcaattagt

SEQ ID NO: 284122 - DNA, 620 bp, Homo sapiens
  misc_feature (1)...(620): n = A,T,C or G
tggaattntctttgtagatcatcatgtcatttgcaagtaagaagcattttatttcttccttttccatctgtgtacttttatttccttttctagggctattgcattgcctagaactttcacactatgtggaattacagtggtaggagcacacatccttactttatcataggggaagcattcagtctttctccattatgcatgagggaacctgtcggtttttggtagatgctcttaactttaggaagtttcactttatttctagttgtctgaaggttttctgacatgatgggtgttgaattttatcaaatgcttcttctgcatcaattgatacaatcatgtaacttttcttctttgatctgttaatatgatggattgtagtaattgatttttgaatattgaaccaggcttgaatttttgcagtaaacaccatttggtcayggtgtataatttcttttatatattgctgaatttcatttactaatatttcattaagggttttttgctttcatattcatgaggaatattggcctatatagctttcttttctttcttccttttctttgctgctgtctttatctgattttggtatcttttctgaattcttttgaatatatgtttat

SEQ ID NO: 284123 - DNA, 604 bp, Homo sapiens
gctttactctctaatgttagactttctaatttctgttattcttaattctcaattattttcaaatagcttaaatrtcttttcaagaataaaactggtatatggatgcttatatatttttttaagtagacgaaagacatggatgtaaatgttccaaaatggtaacagctattggttataattacagaattatgtccaccacttcctaacacactttaggaataatttctgtattacttttttacaatatttatggttaatttagggagtacatttttaaaacattgagtttgtaatctacaaagctccaaatacaaatactgttttaaagatttaaccgagtcctccaaactttttctcccaagcacatgacctggtgctatactcaaactagttttcctttctttgacatgtgatgaaaatcacagtttggctttagtttttgcccacatttacttctgctggtcaatatggtgactgtgacatacaatttttaatcctctgtttcaatctttgctggtcttcactcttcgttctcctgctaaagagtgaccagctcctattctgatctctcaggagtatcccactgatgctggtgacaaagaac

SEQ ID NO: 284124 - DNA, 604 bp, Homo sapiens
gctttactctctaatgttagactttctaatttctgttattcttaattctcaattattttcaaatagcttaaatatcttttcaagaataaaactggtatatggatgcttatatatttttttaagtagacgaaagacatggatgtaaatgttccaaaatggtaacagctattggttataattacagaattatgtccaccacttcctaacacactttaggaataatttctgtattacttttttacaatatttatggttaatttagggagtacatttttaaaacattgagtttgtaatctacaaagctccaaatacaaatactgttttaaagatttaaccgagtcctccamactttttctcccaagcacatgacctggtgctatactcaaactagttttcctttctttgacatgtgatgaaaatcacagtttggctttagtttttgcccacatttacttctgctggtcaatatggtgactgtgacatacaatttttaatcctctgtttcaatctttgctggtcttcactcttcgttctcctgctaaagagtgaccagctcctattctgatctctcaggagtatcccactgatgctggtgacaaagaac

SEQ ID NO: 284125 - DNA, 510 bp, Homo sapiens
caacctacaataaaagcgctatatttcatgtagcaaccagcacaaatgtacataaatataaaactgcaacagattatgaaataaaaccatttctatttccaacatactcaaacattttctattccttttacctcattctctttaaacattgctgatgtcagcctactcagacaatttcaaagcctgacaatgcaaggtaactcatgcctgtaatcccagcactttaggaggytgaggcaggaggatctcttgaagcccagagtttgaaaccagcctggacaatgaagcaagacttcgtttctccacataaaaaacaaacaaacaaaaaccacaaaagagagagagagaaaagacaaattagagtcaccaagacccatgaggtaggagacaactttaatgggaggcattaaagaacctagaatcttctgaagtcatctctttccatttcttctctctttggcatctccactcctgtggttttcttggatagcttctgtgtgtttgattcac

SEQ ID NO: 284126 - DNA, 510 bp, Homo sapiens
caacctacaataaaagcgctatatttcatgtagcaaccagcacaaatgtacataaatataaaactgcaacagattatgaaataaaaccatttctatttccaacatactcaaacattttctattccttttacctcattctctttaaacattgctgatgtcagcctactcagacaatttcaaagcctgacaatgcaaggtaactcatgcctgtaatcccagcactttaggaggctgaggcaggaggatctcttgaagcccagagtttgaaaccagcctggacaatgaagcaagacttcgtttctccamataaaaaacaaacaaacaaaaaccacaaaagagagagagagaaaagacaaattagagtcaccaagacccatgaggtaggagacaactttaatgggaggcattaaagaacctagaatcttctgaagtcatctctttccatttcttctctctttggcatctccactcctgtggttttcttggatagcttctgtgtgtttgattcac

SEQ ID NO: 284127 - DNA, 537 bp, Homo sapiens
tgaggtaggagacaactttaatgggaggcattaaagaacctagaatcttctgaagtcatctctttccatttcttctctctttggcatctccactcctgtggttttcttggatagcttctgtgtgtttgattcacgattcttttccatttcatgttacccatgtggctaaggctagggtgaaagctaagcaagacgcagggtggaacccatggagatctaaagaagcgactgctgcccaggcctgactgggtcagtacagcttcattcagaaaggcaagaggaagacttccagcccatctataagaaaccgggtcccaagccctggctagtgagaaagagtgtgtatatggcaactatctctgtgatgattctcctagaacrctgtccaacacaactgtctgccatgatggaagtgttccatatcactagttactgtggttaccactagctacaagtggctattaagcacttgatgtgtgactaattcaacaaaggaatgaattcttagatgtatttaattttaattaattgaaagct

SEQ ID NO: 284128 - DNA, 573 bp, Homo sapiens
ttactgaattgagacaattttcaaatggtgacttcagtcactcagcattcttcacacactgagaacaattcacaaatagataaattagtaggtaattagtttagcaaatrtgtttctctaaaactttatttcatatttttgaactaaaagtgatcattctaatttgacatgatttttaccataaggtgtcagtataaaaaaaggaggctattatcatgccactaaaattactaggttttctatgcatttgggctcccttctttgacgtattagagccaagaaaatgaagagttaaacaaatttaattttaatttcaattttaaaaattgtcctacaataaaatggcagtcactgacttctaagccaagaggatgcaaaaggagagactttaagtctaatatgtaacattattaagaaaaattggaatgagtataaataaaacggggacagggcagaaaagcacaggagattaaagttgtagacagatgtgcttgttagcagaaaatccacttgtttattgagagacagcctcaattagctgatggtggaagtagataatgtgtttattgtttc

SEQ ID NO: 284129 - DNA, 573 bp, Homo sapiens
ttactgaattgagacaattttcaaatggtgacttcagtcactcagcattcttcacacactgagaacaattcacaaatagataaattagtaggtaattagtttagcaaatgtgtttctctaaaactttatttcatatttttgaactaaaagtgatcattctaatttgacatgatttttaccataaggtgtcagtataaaaaaaggaggctattatcatgccactaaaattactaggttttctatgcrtttgggctcccttctttgacgtattagagccaagaaaatgaagagttaaacaaatttaattttaatttcaattttaaaaattgtcctacaataaaatggcagtcactgacttctaagccaagaggatgcaaaaggagagactttaagtctaatatgtaacattattaagaaaaattggaatgagtataaataaaacggggacagggcagaaaagcacaggagattaaagttgtagacagatgtgcttgttagcagaaaatccacttgtttattgagagacagcctcaattagctgatggtggaagtagataatgtgtttattgtttc

SEQ ID NO: 284130 - DNA, 573 bp, Homo sapiens
ttactgaattgagacaattttcaaatggtgacttcagtcactcagcattcttcacacactgagaacaattcacaaatagataaattagtaggtaattagtttagcaaatgtgtttctctaaaactttatttcatatttttgaactaaaagtgatcattctaatttgacatgatttttaccataaggtgtcagtataaaaaaaggaggctattatcatgccactaaaattactaggttttctatgcatttgggctcccttctttgacgtattagagccaagaaaatgaagagttaaacaaatttaattttaatttcaattttaaaaattgtcctacaataaaatggcagtcactgacttctaagccaagaggatgcaaaaggagagactttaagtctaatatgtaacattattaagaaaaattggaatgagtataaataaaacggggacagggcagaaaagcacaggagattaaagttgtagacagatgtgcttgttagcagaaaatccacttgtttatygagagacagcctcaattagctgatggtggaagtagataatgtgtttattgtttc

SEQ ID NO: 284131 - DNA, 551 bp, Homo sapiens
ttggaggagataagacagaggtcttgacttttagaaagttcactgcatcccttggtgggaccctgggaggccctggccaaattctactttgagtgatgacattctgctcaccccaagctctgtgctgcttcagttgcacagaggagtatttattgctacttcctgcccttgaatgttttgcagactttctctattctgtttaaacaaatgctgtgtttcacctgtcagagccccatcccctggaataaaggaggcccagaaatctaacaccacggctatcacttttagggcctagacccctggtttattttgttatgtagattggrtgagctattaatatatcaagtttacatgtgtagtttctgtctttatctctgttatttgcatttcaaacctggaaaaacagttgagaggttatgtaagcattgtcctgggtcctgatctgcaaatttctttgccaacttttattggtctttgaaaactgcattcctttgtcctaaagaatgctgtctttcatatcctgtcattagtattatacaatgttaggagcc

SEQ ID NO: 284132 - DNA, 553 bp, Homo sapiens
cacttttcccaaaaaaggacaactgacaaaaacctgttattcagacttaggcatttaaaaagccattttcttgaaaatgakcaaaatgagcctgtccctttgaggaaaaccactgacagtatttgttgccaatgataaaatttgagctttcaagtgaaaatcagaactttggaaaacttgtgtctaccatcatgactttgatggttgcataattaagatttctgttatctttttttattgtatgacagagtgtaccatctgttggaggatttgcataactcagtggtctcatattttccaagtgaccaatgcatggtataagtaaaacattcatgggcaaaagggctattggaggtgcaagagagatgagcggttttaaggtagctgtaagaaaagttccctaaggttttaggtttcacattacaataactagtaagaaactaccacttgtcaagttttgatccagaaaaatatctgcaattagattgtattgtcttcacagacattaaacaacacaatgaatcagactgactaaaggagcaaataggaggat

SEQ ID NO: 284133 - DNA, 553 bp, Homo sapiens
cacttttcccaaaaaaggacaactgacaaaaacctgttattcagacttaggcatttaaaaagccattttcttgaaaatgagcaaaatgagcctrtccctttgaggaaaaccactgacagtatttgttgccaatgataaaatttgagctttcaagtgaaaatcagaactttggaaaacttgtgtctaccatcatgactttgatggttgcataattaagatttctgttatctttttttattgtatgacagagtgtaccatctgttggaggatttgcataactcagtggtctcatattttccaagtgaccaatgcatggtataagtaaaacattcatgggcaaaagggctattggaggtgcaagagagatgagcggttttaaggtagctgtaagaaaagttccctaaggttttaggtttcacattacaataactagtaagaaactaccacttgtcaagttttgatccagaaaaatatctgcaattagattgtattgtcttcacagacattaaacaacacaatgaatcagactgactaaaggagcaaataggaggat

SEQ ID NO: 284134 - DNA, 556 bp, Homo sapiens
caccacttttcccaaaaaaggacaactgacaaaaacctgttattcagacttaggcatttaaaaagccattttcttgaaaatgagcaaaatgagcctgtccctttgaggaaaaccactgacagtatttgttgccaatgataaaatttgagctttcaagtgaaaatcagaactttggaaaacttstgtctaccatcatgactttgatggttgcataattaagatttctgttatctttttttattgtatgacagagtgtaccatctgttggaggatttgcataactcagtggtctcatattttccaagtgaccaatgcatggtataagtaaaacattcatgggcaaaagggctattggaggtgcaagagagatgagcggttttaaggtagctgtaagaaaagttccctaaggttttaggtttcacattacaataactagtaagaaactaccacttgtcaagttttgatccagaaaaatatctgcaattagattgtattgtcttcacagacattaaacaacacaatgaatcagactgactaaaggagcaaataggaggat

SEQ ID NO: 284135 - DNA, 556 bp, Homo sapiens
caccacttttcccaaaaaaggacaactgacaaaaacctgttattcagacttaggcatttaaaaagccattttcttgaaaatgagcaaaatgagcctgtccctttgaggaaaaccactgacagtatttgttgccaatgataaaatttgagctttcaagtgaaaatcagaactttggaaaacttgtgtctaccatcatgactttgatggttgcataattaagatttctgttatctttttttattgtatgacagagtgtaccatctgttggaggatttgcataactcagtggtctcayattttccaagtgaccaatgcatggtataagtaaaacattcatgggcaaaagggctattggaggtgcaagagagatgagcggttttaaggtagctgtaagaaaagttccctaaggttttaggtttcacattacaataactagtaagaaactaccacttgtcaagttttgatccagaaaaatatctgcaattagattgtattgtcttcacagacattaaacaacacaatgaatcagactgactaaaggagcaaataggaggat

SEQ ID NO: 284136 - DNA, 558 bp, Homo sapiens
cacctaccacaattcttggcccacagtcaaattgtggggaagtgagtaatcagtcacaaaggctgccagatacactgacagacagatgtgtacaagaactctgggcttgtgcaaagactttaaacccttgactatttcacagggctgaaacatacagaccaaaggaaagraggaaatagaaggaaaagaataactagaagtctgtaacctcaatcagctttagtttttgttacaaagcaggtattttttaaattatgctaatagcttgcaaaacccccaaaaccctcccccacaaattctgttgcaaccaaattctaataatttacgatttaaatcattttttagatctccctcctttctgccacagaccacacagtgactttgtgaaatacagagaaaaccctcattcctcaagacacttggctgccaactgccagaaaaaaaatcaccggaagtgttccaatccacgctatagttttatagcaccccttggagttgtattgtctgtaccttgctcaactggtcctctacaacctcagcacaccccaattccatttg

SEQ ID NO: 284137 - DNA, 315 bp, Homo sapiens
tcctgctaccccatctcagtttcctttgctccttgtcgcttctgtactgatctctcaacacaggarattcccaagggctcaaaactagcccttctttctcttccattctctccctcgatgatatcgtccatttccatggttttaaataccatctgcatgttgatttccacatccataactccagtctacatgtcttctctgtccaccatattcacatatctaaccatttgcttgacatctcaaactcagcatgttctaaactcaacacttacaatgctctaagcctgtttctcttgctttctgcatctcaaaaag

SEQ ID NO: 284138 - DNA, 609 bp, Homo sapiens
ctacaatggccacagcaggaacaagtcaaaatcctaagatatgtggctttttcttgaccccagaggaagctaggaaagtgaagaggcaggaggaagtgcaggaggtgagtccctgcccatcttcaggcccagcctctgctgccgccatccccttcctctccagctcccaggctttcaccacacacatcgcttcaccctctccctggccgcccacttcctcttcttagagcctggcattcttctttcaaaattcaagtccctctgcttgccattgcrtctgacaccttactgcactcatacaggattaaggtttgtggatttgacttctgaaaactgataaagtgaacagaggagtgtttttcttaaaataattttttaaaaacactgcagatagatttgaatgctttattaatttgttttctaacgcatgaaaacatttttcatttcacccggcctatctagcatgctaagagaatttaggccagataggaatatttatcaattgagttcagatgtcagcataacaggctaaatacagtcagattaggcaagttcaacaaacaggtgttaaagatctcatttcctgctgattctcacctgaaagtccca

SEQ ID NO: 284139 - DNA, 407 bp, Homo sapiens
agcagccatcagatgcgcagccccaggggatggggggactgtatccggagcatacgctgtggtggtctgcctgccgccaactacaatggccacagcaggaacaagtcaaaatcctaagatatgtggctttttcttgaccccagaggaagctaggaaagtgaagaggcaggaggaagtgcaggaggtgagtccctgcccatcttcaggcccagcctctgctgccgccatccccttcctctccagctcccaggctttcaccacacacatcgcttcaccctctccctggccgcccacttcctcttcttagagcctggcattcttctttcaaaattcaagtccctctgcttgccattgcatctgacaccttacygcactcatacaggattaaggtttgtggatttgacttc

SEQ ID NO: 284140 - DNA, 564 bp, Homo sapiens
agccccctgatccttttctccaagagcaatggtgcactggggyggggatcctgtcattcagtgtttcctccctggtatccagcacaaggtcagcagaagtgagtgctcagtgaatgtttgcgaaacagaacgacgtttcttccctttagtttttacgataatggaagctctgtatcctgatggtgtggttggtacatgaatctcttgatgtgttaaaattcattttattttttaacataccctagagttgcttttttgggtgaacaactctttgaattttaacacacagaacttcataccacaaaaaaagtccattttactgtatgttaatttaaagataaaattttaaaacatggctccccttttgaaagagtcactttcagcactctgaagagatgaaccaacaactgaaacttctctctccaaagcattctatgcccttagtatagatggcttttcatttccttctaattatagttctctttgatttcttcataatttatttaaataaactttttacgctgagataaggatctgcgtttgttataaaatactgcttttaaa

SEQ ID NO: 284141 - DNA, 524 bp, Homo sapiens
ccatcattttctgtatgtgttttttaatttttgagtttttgtggaggtggggtgtcactatgttgcccatgctggtcttgaactcctgtcctaagggatcctcccacccctgtctcccaaagtgctagtattgcaggcgtgatctaccatgcccagctttctctgtgtgttaaactctccaggatacaggcatgctgcacagatggtgactttaagcaaatatgtgacctctagtccctttttcttcaaaagggcattgtgacacaggtagatggcgggtgtttgcctcttgacttgaacctgctccctytgtgggaatcttttctttcctgttctaagaattaggtttagtttccaattcttagcagtttttccacagagccctttattgggccttaaaaacatgtcagctccctaatgtagaatctgaatatgcgaattaacttaaagataaataaaaagaaaatctgcacctcttaatttactctgtagagagcattcgctaagaaatgtgaatcaaaagg

SEQ ID NO: 284142 - DNA, 1265 bp, Homo sapiens
cagtggggtgttttgaagaaaaacttattttaaagactattgctaaaccttacaagataattggttccggatattctgttcatctatttttaaatatggcagcagatttttaagacttttttaaaaacactgtatcatgtttcaaagtatggtattaggaaaaacacattcattacaaaattaattgtatttttatttatcgcaggatgctatgcattattattccgtgtaatttttttctaaagacctctaattttggtagcagcagaaatattactatttaaatagtaaaatatttcaatagtattcatactgcagagagaattatgttgctttgctgaaaacccaaatgatggttttaatagcaaggaaacttgccagtagttacttttcaatgacayttatttcattataaaaacagtagaatttgttgtcatcctttgttgtcattttgtttgctttttgctatccccattcatcctccagttcaggttttgtccatcattgttgactgtaatggtacatatggctgatctggcagacagcagtgatctcatttgtaacgcattattgtaaaacccatttagcagattagtttgagattacgttagctgaatgaagacattgctgtgwcagtggggtgttttgaagaaaaacttattttaaagactattgctaaaccttacaagataattggttccggatattctgttcatctatttttaaatatggcagcagatttttaagacttttttaaaaacactgtatcatgtttcaaagtatggtattaggaaaaacacattcattacaaaattaattgtatttttatttatcgcaggatgctatgcattattattccgtgtaatttttttctaaagacctctaattttggtagcagcagaaatattactatttaaatagtaaaatatttcaatagtattcatactgcagagagaattatgttgctttgctgaaaacccaaatgatggttttaatagcaaggaaacttgccagtagttacttttcaatgacacttatttcattataaaaacagtagaatttgttgtcatcctttgttgtcattttgtttgctttttgctwtccccattcatcctccagttcaggttttgtccatcattgttgactgtaatggtacatatggctgatctggcagacagcagtgatctcatttgtaacgcattattgtaaaacccatttagcagattagtttgagattacgttagctgaatgaagacattgctgtg

SEQ ID NO: 284143 - DNA, 523 bp, Homo sapiens
tacttactgtcttctgataaacctttttgccgtccgtttacaaaacttgtctcttttctctctctcctcgtattcctttttgtattatttcacagaaaagtttggcatgcacagaaactgagcccttaaatataaagcttcttaaataacacttccattcatagtcttttcattctaggcagagcaagttctaattgcagaagagcagaatggaaaattggggtgttcattggccttgtgtatatatatataatatataataaatatatataatatataattrtacatttattatatatgatatatatctactatatatattttctatataaattatatatttattatgtagtatacattacatctattatatacagtaaatatataatatatagtaaatataatagatacatgtagtaaatataatatatagtaaatatatataatagatataatatatactatatgtaataaatatataattatatatataatatatgtatttagcttttctctttccctg

SEQ ID NO: 284144 - DNA, 1709 bp, Homo sapiens
ttatcttcttggtttagtctatttctgmatatttcattttttttttgagatggagtcctgttttcttgcccaggctggagtgcagtggcatgattttgactcacagcaacctctgtctcccaggttcaagaatttctcgtgctttagcctcccaagtagctgagactacaggcatacaccaacatgtccagctaatctttgtatttttaatagagacagggtttcaccatgttggccaggctggtctcgagctcctggccccaggtgattcgcctgcctcggcctccgaaagtgctggggttacagtcgtgagccagtgcacctagcttcatattttattcattttgatgctatggtaagtgagatttctaaaaacctattttagatattttattttttgtatatagaaacacaactaaattctgtatgttgattttgcattctacagctttattaawagcacatatgctacaatcatctcagtaaaattaacaatgawaaaattagctaaagggcagataaagaaaggtgttaggaaatactattttgatctaaaattctaagttccccaatttgcacaatgaagatatgtgtgtgtgtgtgtgtgtgtgtgtgtgtaataggatgataagttattctcaattttcacatttctgctgggcttagtggattatataatgtgataataggccagtaatttccagctttctttttgtagcagtagcatctttattgaaaaaaaatttatattaagatatagtatcaaaatgcataagggtgtctttgctttggcttggcagggttggtgtctgtaagccttgttctcttgactcttattaaactgaacctttgcgtgacagctaattgtctgtagagccattttagtaaaaccattactgggaatataatattctttggagcttggctgtctgataattagggtctagtgcttgtcttcagctttctctaaacttccaatggcaaagagaagagtctacttgtatgctataaatgagactctatggcttttacacacagctcacagcctctccttatttattcattttttcctagagtatgcatcacgtctttcaacagcwcaaacaggctttgtgtgatcagtaaagttttttaatcacctgggtgcaggcaggctgagtctgaaaagagagtcagggaagggagataggggtggggccgttttataggatttgggtaggtagtggaaaattacagtcaaaggggttgttctctggcaggcaggggagggggtcacaaggtgctcagtgggggagcttctgagccaggagaaagaatttcacaaggtaatgtcatcagttaaggcaggaaccggccattttcacttcttttgtcattcttcagttgcttcaggccatctggatgtatatgtgcaggcttgggctcagaggcctgacacwtggctcatagttagaacccaaaacttgatagtcataatgattatttatttaacctcatcgcctacagtcctgaaaatgtgccctaaattcaatcacactgagcagctttcttaacacactgggacaaaccgtaagtttaacatatttataattctaatttagattactgttttttaaatctatttgtctcattaagttttcttttgatagaaattgtttttatttggttcccgagctttctacatatgcaatcatatcaactgcaaaggg

SEQ ID NO: 284145 - DNA, 563 bp, Homo sapiens
ttgatcccaatttttctaagaatgcattgagtattaattttattataccctaactagatccataattatggttacaaagagcagagaaaggttttcatgctatttaaaagcaacagatcctaagagagtgtcattcagtgtccagagaggagcgcattttctgaagatgaagatgaaaggcagaaatttcaagaggttgagcgtaatgtagtttacaacaagggcactttgtggacccagaagtgtgtcattatgtgtacatgtttaaaggaccattataggtgattttctatcatgttaagctcttaaatctagtgactctgtctctctctttctctgtctcgctctctctctstgtgtgtgtgtgtgtgtttctaacagtacttggcagatttgttgatgttttccgaaattcatgtgttttgatttgcttttcttcttaggttaggaatttggggcatatttattcagcaatcactatgaactatgctttaataaaccccagctgagattttattaaccatgttaatgttaataaatatgaaacaggaaatggatacgaa

SEQ ID NO: 284146 - DNA, 577 bp, Homo sapiens
acagcagaaaatcttccagacaaaagattagaacrcttaattaaataaaacgcaaagagcacaaagaaagtgtatgaaagcgatttggaagtcatctatcaaaaggacacagctcaagatatcccagggatggtgtttagatggtattccatattaaatcatatttttatctttagactgatgagcactgctgcctaattggaatttcctgttcagtgtgtgttaggagacaattgtataataatattttgctcctctttctacatgggaaatgcctgaactgcatgggttagatagaatttacacttcattcttcatattcagttagagctcagtcctgcttgggcccagtgaggagccaaatactgtacacctcacaattgtatgccctctggacaacagaaggaaacatatatgtaccagattccacataatcctgttcccattgatccaagggttgccccacaaggcattaataaatgtgcactttcagattctgttgcaattttgcatttataggacatggaagaactaacaactaaaaccttccttgattagtcatctgagttttagtttt

SEQ ID NO: 284147 - DNA, 577 bp, Homo sapiens
acagcagaaaatcttccagacaaaagattagaacgcttaattaaataaaacgcaaagagcacaaagaaagtgtatgaaagcgatttggaagtcatctatcaaaaggacacagctcaagatatcccagggatggtgtttagatggtattccatattaaatcatatttttatctttagactgatgagcactgctgcctaattggaatttcctgttcagtgtgtgttaggagacaattgtataataatattttgctcctctttctacatgggaaatgcctgaactgcatgggttagatagaatttacacttcattcttcatattcagttagagctcagtcctgcttgggcccagtgaggagccaaatactgtacacctcacaattgtatgccctctggacaacagaaggaaacatatatgyaccagattccacataatcctgttcccattgatccaagggttgccccacaaggcattaataaatgtgcactttcagattctgttgcaattttgcatttataggacatggaagaactaacaactaaaaccttccttgattagtcatctgagttttagtttt

SEQ ID NO: 284148 - DNA, 543 bp, Homo sapiens
cttttatgaggactaccctttgccttctagtttctggtatctttcaccactagtcacaagggctgtcttttctatatgcattgcttcttggtatattatttctgcctgtgattggcacaggcaaatctcaaaccccaatgcttcaaaccctaaccctgtattaatgagctctcacatgctggttgcatttataacttgacatatataactttatttaatcttcccagcaattctatgaagcaggttctattattttattcccatggtatagatacaaaaattgacgcacttagaattgaatcacttgtctaaaatctcacagctagtaagtgacagagtcagaatttaatcccaggcagcaatgtcagtgtccatattcctatccacaatgatatgctattccaaatgttcatacaattgcatctagcaaatgtggataagagtaagaatcctttgcatttggacagcatttctcattgccsaaagttttcactatctgctgcttctgtcagtgaagagattacttgagggagtttggaggat

SEQ ID NO: 284149 - DNA, 563 bp, Homo sapiens
aagtatggtagttcccttttatctgtgggggataagttctaatatgcccagtggatgcctaaaaccatggatgataccaaactctatatatactaatttctgcacacatttctttttccttatttataattttatggatagaatatttgttcatacactaaatcttagcaacctgagcatgcaattttatttctttattaggtagacaactttttctttttcacttaaagaaaaggcgttatagcttctctttgacatatctgaattaccagcatcagaattcttggtctttgggccattattaagtaaaataagggtgactcaaacatgaacactgcactaccaatacttccacagtcagtctgatatgtgagaaagctactaaatgactaacgggacaggtagcaaattcagcataaatacacyggacaaagggctgattcatatcccaggcggggcatatcaggatggtgtgagattttattaccctactcagaatggtgcacaagttaaaacttatgtattgtttatttgtggaatgtttcatttaatattagtggacc

SEQ ID NO: 284150 - DNA, 596 bp, Homo sapiens
aaatcttagcaacctgagcatgcaattttatttctttattaggtagacaactttttctttttcacttaaagaaaaggcgttatagcttctctttgacatatctgaattaccagcatcagaattcttggtctttgggccattattaagtaaaataagggtgactcaaacatgaacactgcactaccaatacttccacagtcagtctgatatgtgagaaagctactaaatgactaacgggacaggtagcaaattcagcataaatacaccggacaaagggctgattcatatcccrggcggggcatatcaggatggtgtgagattttattaccctactcagaatggtgcacaagttaaaacttatgtattgtttatttgtggaatgtttcatttaatattagtggaccacagttagttgtgggtaactgaaactgtggaaagcaaaactgcagataagggaggacgactgcacagtcttctttactggtaatctttaactgactgttcatttgtgatcacctctataaccaacgatttccttcaagcatctacagcaggctctcagacacatgatgaagggcagagattctagatacaga

SEQ ID NO: 284151 - DNA, 530 bp, Homo sapiens
atgaaagaggatgttgaagtggtaataaaatgttttccatcaaagaaaattcctgggtctaatggctttactactaaattctaccaaacatttagaaaagaaccagtatcaattatccayaaactactccaaaagatccaagaagcaggactacttccaaactccttttataaggccagcattattctgataccaaagccaaagaaagatatcacaaaaaaagaaacaaaatggaaaactataggccaatatccttgataaacactgatgcacaaatcctcaacaaaatactagcaaaccaaattcatcaacacattaaaagatgattcaccactatcgagtgggatttttccctggaatgcaaggatggttcaacataggcaaatcaatcaatgtgatacacaacattaacagaataaagaacaaaaagcatatgatcatcttgctagacacagaaaaaacatctggcaaaattcaacagccgtttatgataaaaagaactcttaccaaattaggtatagaaggaacgt

SEQ ID NO: 284152 - DNA, 530 bp, Homo sapiens
atgaaagaggatgttgaagtggtaataaaatgttttccatcaaagaaaattcctgggtctaatggctttactactaaattctaccaaacatttagaaaagaaccagtatcaattatccacaaactactccaaaagatccaagaagcaggamtacttccaaactccttttataaggccagcattattctgataccaaagccaaagaaagatatcacaaaaaaagaaacaaaatggaaaactataggccaatatccttgataaacactgatgcacaaatcctcaacaaaatactagcaaaccaaattcatcaacacattaaaagatgattcaccactatcgagtgggatttttccctggaatgcaaggatggttcaacataggcaaatcaatcaatgtgatacacaacattaacagaataaagaacaaaaagcatatgatcatcttgctagacacagaaaaaacatctggcaaaattcaacagccgtttatgataaaaagaactcttaccaaattaggtatagaaggaacgt

SEQ ID NO: 284153 - DNA, 490 bp, Homo sapiens
agaaacaaaatggaaaactataggccaatatccttgataaacactgatgcacaaatcctcaacaaaatactagcaaaccaaattcatcaacacattaaaagatgattcaccactatcgagtgggatttttccctggaatgcaaggatggttcaacataggcaaatcaatcaatgtgatacacaacattaacagaataaagaacaaaaagcatatgatcatcttgctagacacagaaaaaacatytggcaaaattcaacagccgtttatgataaaaagaactcttaccaaattaggtatagaaggaacgtacctcaacacactaatagccatatatggcaaacccacaggtaacaacatcatactcaatgaggaaaagtttgaagcttttcccctaggattcagaacaagaccaggatgcccactctcaccactgctattcaacagctctgcttcttatcagccaccatgtctacgccagtacccaacaca

SEQ ID NO: 284154 - DNA, 538 bp, Homo sapiens
gactattttcttccaggccattgggcatgagggacactgccacccatagacagggtctgtctccttgctggaagttctcctatttcagtatgtggcggaggcctaagactagacttgctcttggtgagtggcacgataaatcttcccacatctctcttgttctaaaaatcctacaaagacccttccttcttcacaagattaaattcaacctcaggaacatggcagaagtggccttttgtgacctggaccgtgacagattttcaagccataagattttctacttttcccttacccctggggctgacacaccgacttcttagctgttactgaaacaccccatgctatttcatgtttcttcactttttgtgtatcatttctttaagctgaaatacttttacatattttttttgcrgtttttagcatccagaatagcatcctgcccatgaaagtcacataaaatatttgttgaattgaaatacttctgtatctctgaacttgtacactaatataatccaagatctttcaccaactgtggaac

SEQ ID NO: 284155 - DNA, 567 bp, Homo sapiens
taagtctgaaactgaatgactagataagaaaatactatttttattaccaggtgtttgttaagctacatagaaggtagaaaaacattctgaaaaagagttaaaaaatgtgaaatactttgaggagaacatcaaggatttcaaggtcgataggataatgaattggacaaggtagatttttgattttacacacaatgtgaagaaataagagtcagattgctgaggcagtacactaacatttgcagtttacttcaactcttctcttcccaaatgacctgtcattcttaaagtagtattttgcaatggaactttctgtactgatgaggatattttgtatcagtgttacaaaatatgatagctgtagccacatgtggcttttgaactaatgaaatatggctagtgtaactatgaagctaaaktgtcaattttatttaatttaaacacatttaaatgtaaataactgcaagtggctagtaactatatttaaagctctgggaggtataggagtatactagcatactaactaaaatgcccagatctatagttttcaatctcccagtgattttatct

SEQ ID NO: 284156 - DNA, 567 bp, Homo sapiens
taagtctgaaactgaatgactagataagaaaatactatttttattaccaggtgtttgttaagctacatagaaggtagaaaaacattctgaaaaagagttaaaaaatgtgaaatactttgaggagaacatcaaggatttcaaggtcgataggataatgaattggacaaggtagatttttgattttacacacaatgtgaagaaataagagtcagattgctgaggcagtacactaacatttgcagtttacttcaactcttctcttcccaaatgacctgtcattcttaaagtagtattttgcaatggaactttctgtactgatgaggatattttgtatcagtgttacaaaatatgatagctgtagccacatgtggcttttgaactaatgaaatatggctagtgtaactatgaagctaaagtgtcaattttatttaatttaaayacatttaaatgtaaataactgcaagtggctagtaactatatttaaagctctgggaggtataggagtatactagcatactaactaaaatgcccagatctatagttttcaatctcccagtgattttatct

SEQ ID NO: 284157 - DNA, 444 bp, Homo sapiens
gagttcctaaattgaatcagtaataaaaagactaccaagcagaaaaagccaggacaacacagatttatagcaaaattctatcagatatataatgaagagctagtaccatttctactgagacaattccaaaaaattgagaaggaacaactcttcctaaaatcatgttatgaggccaccatcattctgatactcaaacctggcagagacataacaaaaatagaaaacatcagggcaataaccctgatgaacatagatgcaaaatttctcaacaaaatactatcaaactgaayccagtagcacatcaaaaagctatttcactgtaaccaagtaggctttattcttcctatacaacatattcaaatcaataaatgtgatttatcacataaacagaactaaaagaaaaaactctatctcaatagatctatctcgatagatgtagaaaat

SEQ ID NO: 284158 - DNA, 444 bp, Homo sapiens
gagttcctaaattgaatcagtaataaaaagactaccaagcagaaaaagccaggacaacacagatttatagcaaaattctatcagatatataatgaagagctagtaccatttctactgagacaattccaaaaaattgagaaggaacaactcttcctaaaatcatgttatgaggccaccatcattctgatactcaaacctggcagagacataacaaaaatagaaaacatcagggcaataaccctgatgaacatagatgcaaaatttctcaacaaaatactatcaaactgaatccagtagcacatcaaaaagctatttcactgtraccaagtaggctttattcttcctatacaacatattcaaatcaataaatgtgatttatcacataaacagaactaaaagaaaaaactctatctcaatagatctatctcgatagatgtagaaaat

SEQ ID NO: 284159 - DNA, 455 bp, Homo sapiens
ctgggccctggcaaagatttcatgaagaggactccaaaaacaattgcaacaaaaccaaaaattggcaaatggactgaattaaactaaacagcatgtgcacagcaaaagaaactatcaacagagtaaacagacaatttacagaatgggagtaaacatttacaaactatgcattcaacaaaggcctaatatgtaggaaatttaaataatataaatagattaacaagtaaagtaccaacaaccccattaaaaagtgtgcaaagcatatgagcagacacttttcaaaagaagatgtacatgtggccaacaagcatatgaaaaacagcttcatatcrctaataattacagaaatgcaaatcaaaaccaccatgacactgtattcgtccattctcatgctgctaataaagatatactgagacttagtaatttataatggatagaggtttacttgactcaca

SEQ ID NO: 284160 - DNA, 455 bp, Homo sapiens
ctgggccctggcaaagatttcatgaagaggactccaaaaacaattgcaacaaaaccaaaaattggcaaatggactgaattaaactaaacagcatgtgcacagcaaaagaaactatcaacagagtaaacagacaatttacagaatgggagtaaacatttacaaactatgcattcaacaaaggcctaatatgtaggaaatttaaataatataaatagattaacaagtaaagtaccaacaaccccattaaaaagtgtgcaaagcatatgagcagacacttttcaaaagaagatgtacatgtggccaacaagcatatgaaaaacagcttcatatcgctaataattacagaaatgcaaatcaaaaccaccatgacactgtattcgtccattctcatgctgctaataaagatatactgagasttagtaatttataatggatagaggtttacttgactcaca

SEQ ID NO: 284161 - DNA, 522 bp, Homo sapiens
gggaagtgctggaaagaaaagggcagggtctctggagagggctccaccttctgggctgtgcccaccgacctaggtaagaacagagactcctgtttttgcacccaaatgttggattttccaagatcactctggcctaccatgcctgcatcctgtgcctgtaaaaaccccaagaccctcatgggcttggayacaagcagctggatgtggtgaagaacccattggcagagagcacacaggcggctggacatcaagaggagcagagtagcataggagcacactggaaggcaccagcagatgctgtcaggccattgaccagcagaaccacacagacaccgagggaaatttgcctggggcagttggaggtgagttcagctgctgagcagcccggctccagggaaaaaccctcttctggctcgtctatctggggagagctactgccaccatttaataaaagcttgcactcattctccaagcccacatgtaatccaatttttccaatataccaagggaacaaccccagga

SEQ ID NO: 284162 - DNA, 610 bp, Homo sapiens
accagcagatgctgtcaggccattgaccagcagaaccacacagacaccgagggaaatttgcctggggcagttggaggtgagttcagctgctgagcagcccggctccagggaaaaaccctcttctggctcgtctatctggggagagctactgccaccatttaataaaagcttgcactcattctccaagcccacatgtaatccaatttttccaatataccaaggsaacaaccccaggatacagaaagccttctgtccttgccataaggcagagggtttaattgagctgattaacacaagccacccacagatggcaaaactaaaagagcaactgtaccacacgcccactggggcttcaggagctgtaaacattcaccgctagatgctgccatggggtcggagcccacgtggcccatgagcccacgtggcccagtacctgccatctgcatgcttccctgagaggtttgaggagcaggacaccaaagaagggagccacacctccttctcacaccctgtgagggcgataaaagaacttttcctgtttcattgccatctgaaaccacctcaggctggacttcattgtccatatcactatcagcattttggtcaaagc

SEQ ID NO: 284163 - DNA, 601 bp, Homo sapiens
attagcaatgtgagaacagactaatacaccaatcctgaaatggactatgctgtactctaactgtagctcttattaatcattactgatcttaaccaaatccatctttatgcaaacctttcacctggaagccacccatctcgaatacctgttgttgctatttgctaatgcctaaccatttcctggtgaaaacaatatgcaggtaattaatatgcatcggagaaatgcatactttctctttcttcccaatggccatcaagctatttatkgaatgcaatttgttagcaataatcattggactttaaatctcaacatctcaatgaaattaaagttcatttaaattcttaacttgcattttaaatataaatgttcttaaataatttccaaatcagtgctttcatatagataattagaaaatataagcacaatggatttaaattcctccaccacacaaaaccaaaatcgaaacctttaaatataaccaggtccataaattttgaaaaagatgacctaggttaaaatcataactctgttgctttttgtttttatttcagacacgttacttgagctcccagggcctcagattccttaaaaaaataatgat

SEQ ID NO: 284164 - DNA, 601 bp, Homo sapiens
attagcaatgtgagaacagactaatacaccaatcctgaaatggactatgctgtactctaactgtagctcttattaatcattactgatcttaaccaaatccatctttatgcaaacctttcacctggaagccacccatctcgaatacctgttgttgctatttgctaatgcctaaccatttcctggtgaaaacaatatgcaggtaattaatatgcatcggagaaatgcatactttctctttcttcccaatggccatcaagctatttatggaatgcaatttgttagcaataatcattggactttaaatctcaacatctcaatgaaattaaagttcatttaaattcttaacttgcattttaaatataaatgttcttaaataatttccaaatcagtgctttcatatagataattagaaaatataagcacaatggatttaaattcctccaccacacaaaaccaaaatcgaaacctttaaatayaaccaggtccataaattttgaaaaagatgacctaggttaaaatcataactctgttgctttttgtttttatttcagacacgttacttgagctcccagggcctcagattccttaaaaaaataatgat

SEQ ID NO: 284165 - DNA, 563 bp, Homo sapiens
tgataaagttaaacagtcaaggaagactttttcaaggctattgtaatagggaagaaagaccggaacacagtctacattcaaccttctgaaataaaggatgagagagagtttaaggtgtggtatgtgtaatggaaaagaactagagagtgttggaagggaygctgatgaatgggaggtattgaacatattgagtattttctaagtttgcaaatgttactggctctgattagacaagctgtgtttgctaattggtgcccagtgaagttaggtttctaccttcaacagaaactgagacataggggtactatctttcttattcgttacacttcagtggctcctaggttcctgaaaaagacattcctttgctgtaaatctggcaagaagctttttttaaaaagtgacctatatgtttcaaaggggcagagaactaacttaaattacatgttttctaaaggaaatgcactaagaaaaaaaaaaaaaaagatcgtgcctagagttaggaagattgtctaaagttcagttcagccgagagaaagattaaggtatcttggtcaagagaaagc

SEQ ID NO: 284166 - DNA, 636 bp, Homo sapiens
atttttatctgcagattttctcagggatgataacatctgagggaggtgttcacacctagaaagcaggaggctagagttgcagttcggccacttccttttcatatttttataatctggggaatttgatctttttctctatgtctcataattctggtgtggctgaaaagaccatatcagaagtctgaacagcttcttaggagccatttttggcccacagacatgtttggattaaatgatattgttttttgtctgttcatttcattatttttttaaataaactatatttcttaaaggagttttaggyttacaagagagttcccatataccctctacccccaaacatgcacatctcttactgtgaacatcctccaccagcatggtccatgtgttacaacgcatgaacccacattgacatgtcattattacccaaaattcatagtttacattagggttcactcttggtgttgtacattacatgagtttggataaatgtataatgacatgtatccaccactataatatcatacagaatggtttcactgcgctaaaatcctctgtgttccaactattcctttttcccaatccctaactcagctatgcatactttttaaacttttatatttttataaaacccaa

SEQ ID NO: 284167 - DNA, 636 bp, Homo sapiens
atttttatctgcagattttctcagggatgataacatctgagggaggtgttcacacctagaaagcaggaggctagagttgcagttcggccacttccttttcatatttttataatctggggaatttgatctttttctctatgtctcataattctggtgtggctgaaaagaccatatcagaagtctgaacagcttcttaggagccatttttggcccacagacatgtttggattaaatgatattgttttttgtctgttcatttcattatttttttaaataaactatatttcttaaaggagttttaggtttacaagagagttcccatataccctctacccccaaacatgcacatctcttactgtgaacatcctccaccagcatggtccatgtgttacaaygcatgaacccacattgacatgtcattattacccaaaattcatagtttacattagggttcactcttggtgttgtacattacatgagtttggataaatgtataatgacatgtatccaccactataatatcatacagaatggtttcactgcgctaaaatcctctgtgttccaactattcctttttcccaatccctaactcagctatgcatactttttaaacttttatatttttataaaacccaa

SEQ ID NO: 284168 - DNA, 553 bp, Homo sapiens
gtgttgagctggttggtgtgcggaagtcaagaattgaggtttgggagcctctgcctagatttcagaggatgtatggaaacacctggatgtccaggcagaggtgtgctgtagaggcaagccctcatggaaaacctctgctagggcagggtggaaggaaaatgtggtgttgcggcccccacagagtcctcacttgggcgytgcctagtggaactatgagaagagagtcactgttctccagaccccagaatggtagatccaccaacagcttgccccagtcgccaggaaaagccatagacactcaacactagcccatgaaagcaaccaggtggggactgtatctgctaagccagggaagtgaagctgcccaagaccattggaacccacctcttgcatcggtgcccctggatgtgagacatgaaattgaaggagataatttgggagtttaaggtttgactgccccaccgaatttgggagttgcatggggcatgtagcctcttcattttggccaatttctcatatttggaatggctgctattacccaatgcctgtaccc

SEQ ID NO: 284169 - DNA, 553 bp, Homo sapiens
gtgttgagctggttggtgtgcggaagtcaagaattgaggtttgggagcctctgcctagatttcagaggatgtatggaaacacctggatgtccaggcagaggtgtgctgtagaggcaagccctcatggaaaacctctgctagggcagggtggaaggaaaatgtggtgttgcggcccccacagagtcctcacttgggcgctgcctagtggaactatgagaagagagtcactgttctccagaccccagaatggtagatccaccaacagcttgccccagtcgccaggaaaagccatagacactcaacactagcccatgaaagcaaccaggtggggactgtatctgctaagccagggaagtgaagctgcccaagaccattggaacccacctcttgcatcggtgcccytggatgtgagacatgaaattgaaggagataatttgggagtttaaggtttgactgccccaccgaatttgggagttgcatggggcatgtagcctcttcattttggccaatttctcatatttggaatggctgctattacccaatgcctgtaccc

SEQ ID NO: 284170 - DNA, 594 bp, Homo sapiens
gaaaaacggcaaggcgcacacccagctaataacgttctcaagagctctccaccacaatgagaggaggcgacgtggagggatatggtctctaaccatttcggtgccaaggtggccacacaatgcaggagggctttgccaaccttcccccgcctgaatgtgtttaattatttgtctttaattagtcagagtttttgaggtctgttcaggattgctgtccctgctgctgctgctgcggtggcggtggtggtggccggggcggatgctgaaggatggtgaccagcgggaaggtggggaggcttcccgtggcctctgcaggagacgcttgggttgagggaggaatgtccccgagtttggcaggtgtcctcgrgagagaataaagattctcccaagattggagtagagtgttttatacctctttttgttccttttcttcttcttctgtggttgagccccctttttccccatgtgggtgaagctgcaccctttgcggcagagccagagttaacctgaggacgaggacatcagtggtggcctccgcactgccagggtgtgaacattctgactgccaggtgacctctccaactggctgtggtt

SEQ ID NO: 284171 - DNA, 543 bp, Homo sapiens
gaaattgggaatgggggaggttaagaatagaagggttagagttttatggaaagatcaagaagatgacccaaaagttccgagacaccttgtctaagccctttactcacagtccaatgtgatttaaccattcaaatttttttttttttttttgagaatggctttgctcttgttgaacctccgcctcccaggttcaagcgattctcctgcctaagcctcccgagtagctggcattacaggcacccatcaccacacctgactaatttttgtatttttagtagagacggggtttcaccgtgttgcccaagctggtctcaaactcctgacctcaggtgatccaccggcctcggcctcccaaagtgctgggattacaggcataagccaccgcgcccagcctcaagtattcttttatagcacttactttgtgtcaggtaccattctatttgcatcgtgaatgttaacrcaattatttttccgaggacctaatccacaagtgtagtttcagtggcattgtatgctgagatagattacacatacacacacaca

SEQ ID NO: 284172 - DNA, 543 bp, Homo sapiens
gaaattgggaatgggggaggttaagaatagaagggttagagttttatggaaagatcaagaagatgacccaaaagttccgagacaccttgtctaagccctttactcacagtccaatgtgatttaaccattcaaatttttttttttttttttgagaatggctttgctcttgttgaacctccgcctcccaggttcaagcgattctcctgcctaagcctcccgagtagctggcattacaggcacccatcaccacacctgactaatttttgtatttttagtagagacggggtttcaccgtgttgcccaagctggtctcaaactcctgacctcaggtgatccaccggcctcggcctcccaaagtgctgggattacaggcataagccaccgcgcccagcctcaagtattcttttatagcacttactttgtgtcaggtaccattctatttgcatcgtgaatgttaacgcrattatttttccgaggacctaatccacaagtgtagtttcagtggcattgtatgctgagatagattacacatacacacacaca

SEQ ID NO: 284173 - DNA, 543 bp, Homo sapiens
gaaattgggaatgggggaggttaagaatagaagggttagagttttatggaaagatcaagaagatgacccaaaagttccgagacaccttgtctaagccctttactcacagtccaatgtgatttaaccattcaaatttttttttttttttttgagaatggctttgctcttgttgaacctccgcctcccaggttcaagcgattctcctgcctaagcctcccgagtagctggcattacaggcacccatcaccacacctgactaatttttgtatttttagtagagacggggtttcaccgtgttgcccaagctggtctcaaactcctgacctcaggtgatccaccggcctcggcctcccaaagtgctgggattacaggcataagccaccgcgcccagcctcaagtattcttttatagcacttactttgtgtcaggtaccattctatttgcatcgtgaatgttaacgcaattatttttccgaggacctaatccrcaagtgtagtttcagtggcattgtatgctgagatagattacacatacacacacaca

SEQ ID NO: 284174 - DNA, 584 bp, Homo sapiens
actttaacaacaaaaaaagaaacttgagatgattaacatttaatggggacttgttgacttgccatgtactttttaagccatttacatataggtacaaaaaaatgtaagcagagaatgatttgaagaaatagaaaaatagaaatcaactaaatgtcaaaatgaaagaaaggttgaatcaaatgatagtatatctatgtgatttaaaaagcaaacaaaataagtttatacaatcatgaatgttataagcatagaaatatctcataagctggttgaatgaaaagtttatacagaaaaagtatatgcagcaaaatctttatttccacaaaaacaatagtaatacatgaatgtatgtgtgcatatatatatatgactatgtacttgtatacatacatatatacacacactctcatatatacacacaaatatgcatgtgtacgtgtgtatatatatgtatatrtacacatacacacaatttgtattaaaatgctaatttggagactagggaaatagaatataagtatttttaaatatcctccttattttctattcttctagtatagactgtttttttcttaaatagaaaa

SEQ ID NO: 284175 - DNA, 603 bp, Homo sapiens
actttctcaaggaaatatcatgcctggtttaacttgctttgcagtcgtgaaagttccagagagctgggtaagttggttgttctgaacagtcctcaggctaactttgatattctgagggaaggggctagtttactttgaaaatagtacaagaactgtaataggtgtaagtttgatatttaacctatttgttttctcttaaattgagacttctgttgttgcatgttcaaaccccttatggatctgtatcatacgagttcacctgagtgttatagaaaatggaggggttgaaaggcggagctagacagaggctagaggtgggaaggtggggaagggatgttgactggagctgcmgtggaattgatttgctttgtcctcctaagagataggaatggacatcaggggcacttacttaaagaaagtaggtgctagaaatctgtttgctgaggaacaattggcaggaaaaaaggacataactgaaattttgctctcttgttcttgttttcagcttttaacatagtcttgaccttggcatatatgtctttgagctaagtgagcttatgtaaagcttcctttttgtgtgtctgaatacctagtccagagagg

SEQ ID NO: 284176 - DNA, 625 bp, Homo sapiens
tgagtttgggtaatcaaattggttttcttatttttctctaygcatgtttctaaaagggtaatatcatagcaaaggagtttcaaaatttgttatcagggtgattgaaaacttttgatggcttaaatatggttttaaatgttgctcaattgcctttttttaaaactgaaagagtgggcaagaccgctgaaatagagtgtagcctttgcataatcacatagttcactaggtcaatttgtatataaggcagttacatggtgtgcttaggtcacagaagtactttaaaactatggaaacataaggcacttttccctatggctttaattgagcaaggaaggggccagcttgcttaatccaccttgagaataatccttcctgacccatgtggtgctcacatcttatctagggcttctaaacctgtggatgctgagtacaagatgcttatattcataaaggcaggcttttctgttctttccatgtgattcatactagagcagatggcttgatctgctcctatctctcacttcatccatgagttttatgccgctgtctcctatttctttttctccagccagtcctccctccagaccacctgttcacagagccgtgtgtacccagacatcccatg

SEQ ID NO: 284177 - DNA, 598 bp, Homo sapiens
tttcatagtcttcctagccttccttgctggttgcttttccttctctctgactgcgtgcatcaccttccctcaggaagaaaagagcatggaccttccctcctgtccatgctcttttctatcaatatgttcccccttggagagttctcacaagcagcagatatcacctctatgctgatggcttcctcattgtggtcctatccttgaacacctacttggtcgtcaataccatatcccatctgtgttyagaactttttcaaccagatgtcccactacagtgtctcttccagcttgagaacctgtaattctttaggtgtaagaaggtccaccgggtgctgtggctcatgcctgtaatcccagcactttggtaggccgaggcaggcggatcacgaggtcaggggatcaagaccatcctggctaacatagtgaaaccccgtctctgctaaaaatacaaaagattagctgggcgtggtggcaggcacctgtagtcccagctactcaggaggctgaggcaggagaatggcgtgaacctgggaggcggagcttgcagtgagccgagattgcgccactgcactccagcgtgggcgacagaggaagactc

SEQ ID NO: 284178 - DNA, 598 bp, Homo sapiens
tttcatagtcttcctagccttccttgctggttgcttttccttctctctgactgcgtgcatcaccttccctcaggaagaaaagagcatggaccttccctcctgtccatgctcttttctatcaatatgttcccccttggagagttctcacaagcagcagatatcacctctatgctgatggcttcctcattgtggtcctatccttgaacacctacttggtcgtcaataccatatcccatctgtgtttagaactttttcaaccagatgtcccactacagtgtctcttccagcttgagaacctgtaattctttaggtgtaagaaggtccaccgggtgctgtggctcatgcctgtaatcccagcactttggtaggccgaggcaggcggatcacgaggtcaggggatcaagaccatcctggctaacatagtgaaaccccgtctctgctaaaaatacaaaagattagctgggcgtggtggcaggcacctgtagtcccagctactcaggaggctgaggcaggagaatggcgtgaacctgggaggcggagcttgcagtgagccgagattgcgccactgcacyccagcgtgggcgacagaggaagactc

SEQ ID NO: 284179 - DNA, 581 bp, Homo sapiens
ctctgtctcccacctactcagcaccacttgacgtttggtaagctgcattctttcttttggtaattttagttacgttaagtccttcttgtttgtattgcctgcttcaccccattcttagtcctacccacctttcaaggaccaccaaaatatctctgaatcaacaacatctgaagtcagtcctgtaattgagtatttttcatttatgtcttgtatgtggataaataaatggtcccatcaccttccctcagaagcctttccatatactaccatttcctaaaaaatattataggctccattttcctaacttactttaagcttaagagtgagaatatatttcatacccttctctgtctcctctggtgaccaataatatacaaagaataatttcaataatgacttcatggttattaattgttatcagtttaaatacttagcaagttgagaaaatataaasaaaataagatttcaaacaatccaatcatctatattcagcaaaacacaaaaagtttctgttagatatgacagggtctagtgtttatggaattaaagcaatgttttctaaatgaaatatatgctgttga

SEQ ID NO: 284180 - DNA, 597 bp, Homo sapiens
ttattgaaaataacggtcgacttttgagattatttacaaaggctcattactggattttagagaagaagccrttatgtttgtcatcttaagtaatctagtaaatgaaaacatcactttcattttctctttccataattcatttcatcactctattcaatataatctatgctttattttgaaacagttaatttggttaattgttcagatggcatcccttatttgcaaatagctcaatcttttaattcaagagcctggtctaaaaatatgaagtagcattttaggccttagatttctgtttaagtttagaaagaaatgaagttaaaatgtctattgctgtggatgatttagtcagaactagttaaatactttggttgatactttaaaaaatgaggtatgatttacatacagtaaaattcacactggtttgtgtcgagttctgtgaactttgaccaatacattcagtcatttaatcaccaccatcatgaagatatagggcactaacatcacctcaaaaaactcccaggtctctgtgatctttcgctcccctcatccccagacaatggcaatcttcggttcttttttaatcagtaggaaatt

SEQ ID NO: 284181 - DNA, 452 bp, Homo sapiens
ccaggacaatccaggtttacatcttttgctgtgmcaagattattaatagtgcctcctttaactctcaaaggcatctcagcttggacgataaataatatggtcatcttacttgtaatcttcttttcacaaactgccttacaacctatgctggagccccatgagattcccctctgtgcctaaacttagcctttatggtgacacctctgtttcctcaggtttccttctctcttagtaatctttaaggttttcctcagttaaccacttcccagttagaatgaattatttctctgtcttccagccaccactctccctgtatctccatacagtccttctgcctcttaggcaactacatctttttcatcctgaatttatgaaaacacctagtttaatgtcttgtgaaaagtatttgtttaagtatgtatttgttgaataaatgtgtgaatggataaata

SEQ ID NO: 284182 - DNA, 614 bp, Homo sapiens
actgagtttcccttttgcataagttcccaagatgaccaccacaatattgcatcctacatgatcctcttcagtgtgcacctgccactcccccaycaaggagtggggtctcatttccatctctctgaatcagtgctggtctatgaatcacttgtaactaaaagaatgcagtcaaagtgactcagtgtaacttctaagcttaggtcagaagaggccatgcagcttttatctagttctcctgggaggcttactctggggaacatccaactatctggaactatcatgagtggagaggctacacatagacactctggctgacactctcagctgagcccaacagtcctgctatccctgcaaaggtacccaacatgtgagtatggaagccatcctggaagtgaaccctccagcttctagtcatcagaatccccacagctagttgaagccccagacatcagagagcagagacaagacatttctgatgtgtcctgttcaaactgtcaacccacagaattcatgatcataataaaatggtcactgttctatgccactaagtttgaggtggtttgttatatagtttgtaggtaaccaaatgagcatgttttgacctaaaacaaaag

SEQ ID NO: 284183 - DNA, 614 bp, Homo sapiens
actgagtttcccttttgcataagttcccaagatgaccaccacaatattgcatcctacatgatcctcttcagtgtgcacctgccactcccccaccaaggagtggggtctcatttccatctctctgaatcagtgctggtctatgaatcacttgtaactaaaagaatgcagtcaaagtgactcagtgtaacttctaagcttaggtcagaagaggccatgcagcttttatctagttctcctgggaggcttactctggggaacatccaactatctggaactatcatgagtggagaggctacacatagacactctggctgacactctcagctgagcccaacaktcctgctatccctgcaaaggtacccaacatgtgagtatggaagccatcctggaagtgaaccctccagcttctagtcatcagaatccccacagctagttgaagccccagacatcagagagcagagacaagacatttctgatgtgtcctgttcaaactgtcaacccacagaattcatgatcataataaaatggtcactgttctatgccactaagtttgaggtggtttgttatatagtttgtaggtaaccaaatgagcatgttttgacctaaaacaaaag

SEQ ID NO: 284184 - DNA, 405 bp, Homo sapiens
atgttcatcatcaattatttggacttttcctcttaattaaaaagatsatagcattatatgaagcacactcatttgatgccacaatgccactgattctttacatggatggtattaatttacttcttttagaatattttctttgacatactgggtgctcttggcagaaagttattcctggagttttggcaatattgaactcaaatgccaagctccagaatatattttttccatcagaaataatttaaggagaagctacttcccacctgaccattcctctatgctatgggccattttcttattttccttctttaatgctggagggaggatactctcagtagatgcagggactaattcactacagaaacccatctgcctcagtgaaacctataacccaacaaaggatgt

SEQ ID NO: 284185 - DNA, 572 bp, Homo sapiens
tggagtgtctgaatacaatactttgcttgttagattcaactagttgaaaccccttcgctctcccaaatacccaaaatgctttactagctgccctctggtctcccctttattttcctggcaaacatttctctctcctctctctctcgatgataggtagatagatagatagatagatagatagatagatagatagatagatagatagatakagatatatcatatctatagataaatatataaaatcagatatattttatagatatataaaatcagtgtgtatatatgtatggaatatataataatatataattatatatgatacataattataagtttgtataatatattaggtatattatgttatataatagcatttatgtgtgcatgtacattcatatatatgtatatgcatacaaagagagagatttcaaggaattggcttatgcagttgtgaatctgacaagcttgaaatctgtagggcaggccaacagctggattttcttcttcttcagagaaacctcagctttgctcttaagattggatgaggaccacccagattatcaaaaaatttt

SEQ ID NO: 284186 - DNA, 549 bp, Homo sapiens
gcgcaggcgcgggagccgcctaggctgctgggagtggtggtccggccgcggaatgggtaggtctcccgcgcactctgcggccgcagctcaaaggacaccgagagggtgccagtgcgcatgcgccgccacttccgcccgtgcccggccctccccttccttccgcctcccggaggacttgggtttctagtagtaagagtccggggggcattactcacggtctccccgcctcctcttcatcgtgattgggctgtcaaagtgatgttggcaagtagattggctactgcggttgccagttctgtttcgggccctacttatactgckctgtggggcggggacgaagagtcaggggctgaggagcgagttgcggtagttgctgtgtaccatggtctcggaggtttctgtcccgcggcccgttaggtcctggtcgggttttcagcgaagcaggccgctcccctgcgtttcccagcgggcgtgctgtgccgcccaacaggctctgcctccaagtgccaaaaactcctagtaaagtttgcgcctcgcccgccgtccaca

SEQ ID NO: 284187 - DNA, 526 bp, Homo sapiens
aattgttggctgttggggaaactttcctgcgaggtcagtcaaggctttgggggctctgttttgaatgtggatcaccactcggagtttactaatgtttacaaggctgcgcagtagggaaacggaagagttgggtgggggcaaaaaaaaaaattgaccgctrtccccgaaagtactagacgcctctgccgggaaggcgcccctgcgcgttctatccgagacgtagcttcgcagcgaattttataggaacttcattagcatattatggaacgtcccgcctcagccccccagtagttggctgtgatgtccttcgtggaatgtccttatcattcccctgcggaacgattggtcgctgaggcggatgaaggcgggcctagcgcaataactggtatgggtctgtgtttccgctgtcttcttttttctttttcggggaggagcggggtggagggtggacgagttgatttgaacgtcttcgggtcgctcggcctccagccttggattggttcttctcgctgctggggcgggccgt

SEQ ID NO: 284188 - DNA, 570 bp, Homo sapiens
ggtctcagatggagatgaggaccttcttgggaactggagcatacgttactcttgccatgcttcagtaaagagactggcagcattttgcccctgccctagagatctgtggaactttgaacttgagagagattatttagggtatctggctgatatggtttgactgtgtctccacccaaatcttatcttgaattcccatgtgttgtgggagggacccagtggggggtaattgaatcatgggggcaagtctttcccatgctgttctcaygatagtgaataagcctcatgagatctgatggtttttaaagaggagttcccctgcataagctctctctctttgcctgctgccatccatgtaagatgtaacttgctcctccttgccttctgccatgactgtgaagcctcccagccatgtagaactgtaagtctattaaacctgtttcttttgtaaattgcccagtctcaggtctgtctttatcagcagcatgaaaatggactaatacactggtagaagaaacttctaagcagcaaagccctcaagatgtgacctggctttttctgaaggcatacagt

SEQ ID NO: 284189 - DNA, 552 bp, Homo sapiens
tcccctgcataagctctctctctttgcctgctgccatccatgtaagatgtaacttgctcctccttgccttctgccatgactgtgaagcctcccagccatgtagaactgtaagtctattaaacctgtttcttttgtaaattgcccagtctcaggtctgtctttatcagcagcatgaaaatggactaatacactggtagaagaaacttctaagcagcaaagccctcaagatgtgacctggctttttctgaaggcatacagtcatatgggttcacaaagagatgatctgaaattggaacttatgtttaaaagggaagaagaggataaaagtttgaaaaatttgtagcctgaccctgtggtaaaaaagaaaaacccattttctgaggaaaaagtcaagtcaccagctgcagaaatttgcataagtaaagggaagccaaatgttaatagccaagacaatgggraaaatgtgtctagggcatttcaaaaattttcaaggcagtccctcctatcacaggcccagaggcctaggaggtaaaaatggtttcatgggccagg

SEQ ID NO: 284190 - DNA, 557 bp, Homo sapiens
aaaactaaaacttggttcttgcagaagtctagcaaaataaataatcctctggcaaaagtgaccaagaaacaagtggcagggaagtgggggtgggggrcacaaaataatattcaacatcaaaaatgaaaagggagcatatctacaaagcctgcagaattaaacatggcaacaagaggatgtcatgcgtaattttataattatttgaaaattaaatgaagtagacaagttcccataaagttacaacctactgttggtagaacttaaccctttactgttcgcctgagcatactcgctggctatgtttgtggctgcagcatttaccccgagataattctccacaaaatatctcacttttattattatctttgcatagctcgaatgtatcaactttggaaacaaaatacatcattctatttatagcattctgcttttagtagtggtattttccatttacaaaatacaataattctcaattgctgaaaatgtcaaatcctagaaaatgtagaattcctacacgtgatgttaacgtggttctcacagttgttgctgaagattca

SEQ ID NO: 284191 - DNA, 557 bp, Homo sapiens
aaaactaaaacttggttcttgcagaagtctagcaaaataaataatcctctggcaaaagtgaccaagaaacaagtggcagggaagtgggggtggggggcacaaaataatattcaacatcaaaaatgaaaagggagcatatctacaaagcctgcagaattaaacatggcaacaagaggatgtcatgcgtaattttataattatttgaaaattaaatgaagtagacaagttcccataaagttacaacctactgttggtagaacttaaccctttactgttcgcctgagcatactcgctggctatgtttgtggctgcagcatttaccccgagataattctccacaaaatatctcacttttattattatctttgcatagctcgaatgtatcaactttggaaacaaaatacatcattctatttatagcattctgcttttagtagtggtattttccatttacaaaatacaataatyctcaattgctgaaaatgtcaaatcctagaaaatgtagaattcctacacgtgatgttaacgtggttctcacagttgttgctgaagattca

SEQ ID NO: 284192 - DNA, 501 bp, Homo sapiens
catgacttttcttgaacccataagaacactgaggtcaaaggacatggcttcactaggaattagaggagaaacaggggcccaaggcagacacctgcttacctggggcagatgcagccagacaccatgaggagaagctggtgggagagcacaagcccttgggggccacagatgtaggctgttcctaccattttgtagtttttcctacatcagaccaatcaggcactcagggagaacayggggagtcttgaacaagcttccctcatgtcataagcctagaaaacttgtactgaagcataatatagaacatcagtgaacacatgctcttggccagcgaacataggctaaaaagcgctaagtaaaggcagcactggaatactgctgggcagcgggggagcagcctctgcaggaggaacacaaaactccgcccagacctttcctgtctcctttggaacaaaagccttaatctggggaggggagcaccaaaataattacattttaaag

SEQ ID NO: 284193 - DNA, 471 bp, Homo sapiens
tgtaacaggaaacaacatctgtttctactcagggaccaaataatatttttcaaagtctgagctgagcaactaggtttccttttactggaaaacccagtgtggcgcctcatacactggaagctcagccctttttcctaacttgccctttctcctgacctgccaggaaacaggaaggcttctacccttccatccackcatggtcctgcggtttcctcagccctggccgggattgcagtcagcgctgggagggaggaccgggtgctgtgcccagactgtcagtctttcgtgctgagcccgacagtgtgatccactctctgttctgacgctacgcttcccttcctcggtgcccaagctgaaagaggtctttgtccatccaacagggagagaaaagtgcgctaagttagtttttctaaacggagggccagcacacataccacacagtagaggaagtgcgcgaatcttaagcgcaca

SEQ ID NO: 284194 - DNA, 582 bp, Homo sapiens
aatttatttatctattcagctgctgttggatgttgagtcrttgccagtttttggcaattataaatacaactgcaacaaacattcacatttggttcttttgtgtagatatatgttttcatttctctttggtaaatttctaggagtggaattgctgggctttagagtaagcctttgttttactttattaaaaatctgtcttgctgggtgccgtggcttgcacctgtaattccagaactttgggaggccgaggcgggccaatcacttgagtccaggagttcgagaccagtctgggaaacatggaaaaactgtccctacatgccacccctccctcccccaccaccaaaattaatccaggcttggtggtatgctcctggaagctgaggtgagagaatcacctgagtccgcgaggttaaggctgaagtgagctttgattgcgccactgcactccagcctgggtaacatagtgagaccctgtctcagaacaaaacaaaacaacaaaatctgttttccaaagtagtaaagtgcttgtctagctcctgccttttaaatgcccagtgttactgtaactggctcatgatttgt

SEQ ID NO: 284195 - DNA, 582 bp, Homo sapiens
aatttatttatctattcagctgctgttggatgttgagtcattgccagtttttggcaattataaatacaactgcaacraacattcacatttggttcttttgtgtagatatatgttttcatttctctttggtaaatttctaggagtggaattgctgggctttagagtaagcctttgttttactttattaaaaatctgtcttgctgggtgccgtggcttgcacctgtaattccagaactttgggaggccgaggcgggccaatcacttgagtccaggagttcgagaccagtctgggaaacatggaaaaactgtccctacatgccacccctccctcccccaccaccaaaattaatccaggcttggtggtatgctcctggaagctgaggtgagagaatcacctgagtccgcgaggttaaggctgaagtgagctttgattgcgccactgcactccagcctgggtaacatagtgagaccctgtctcagaacaaaacaaaacaacaaaatctgttttccaaagtagtaaagtgcttgtctagctcctgccttttaaatgcccagtgttactgtaactggctcatgatttgt

SEQ ID NO: 284196 - DNA, 603 bp, Homo sapiens
ttctgcttaatctttcttgaatcacagattattttaagaatctaatgaacctctctcagaaaactgtgcatcaggatatacacacaacagtttttataaacagtccagtattagcagtttcccagattccacattaaacaccattaatcttattttagaccattttttataccygaaccaaactctgaatgatgaataggcaagctcctatgcatgcttcagaacccagctcaaacgttccctctccagcaaaactttcttccatgcccaaatcggttgggcagcccttccttcatggtttcattgtttatcactttctgagatctgcattccataatcacgcctttcctgattggtctcctctactagactgtgagctcttattcatctttcttactcattttttggtcccagtgcctagcacagaaatgttgaaggaacaaagtataaatgaagataatgagttccctacttgaaatgcaaagcaagccgtctctaccttctgcaaatgcgaggaaaaaataggaagccatatctgatgggacttcttttgggggctctgccaatctgctgggacagctgcaagccagcctgcagaactag

SEQ ID NO: 284197 - DNA, 603 bp, Homo sapiens
ttctgcttaatctttcttgaatcacagattattttaagaatctaatgaacctctctcagaaaactgtgcatcaggatatacacacaacagtttttataaacagtccagtattagcagtttcccagattccacattaaacaccattaatcttattttagaccattttttatacccgaaccaaactctgaatgatgaataggcaagctcctatgcatgcttcagaacccagctcaaacgttccctctccagcaaaactttcttccatgcccaaatcggttgggcagcccttccttcatggtttcattgtttatcactttctgagatctgcattccrtaatcacgcctttcctgattggtctcctctactagactgtgagctcttattcatctttcttactcattttttggtcccagtgcctagcacagaaatgttgaaggaacaaagtataaatgaagataatgagttccctacttgaaatgcaaagcaagccgtctctaccttctgcaaatgcgaggaaaaaataggaagccatatctgatgggacttcttttgggggctctgccaatctgctgggacagctgcaagccagcctgcagaactag

SEQ ID NO: 284198 - DNA, 576 bp, Homo sapiens
aaagtagaaaacatctcccaacaagtaaaccttgacctaattcctgaatagagacagcccagattaataaacctgtcatcaccaaacctttatagaagtcatgatttcactgagattctggaaggatgacttttctttatatatatataatgatgtcaatatcatctatatctatattcacatctatatccatatctacatttatctgtatatttgagaagaaaaaacaaacaagtcttagaggcttttaaataaaatataaagaagagaaatctacagataaatattttctaacatcagggctttataattcagtagaaagagaaccaccagaaactttttcatgtcaggtgtaactagagtctgatattgggaaaatgggaccaaccacatgagtagggagccagttctgttgtgatttttaaggtctattttaaagacctccgtgccctgaaatagctcccacactggtacttgaaacccctgttagatatcttaagccctaaagaytttggtcctcatatttccctattaaattgaaattgctttacaggatgtaacaccataggaagcacc

SEQ ID NO: 284199 - DNA, 605 bp, Homo sapiens
gtgactcaactatgatttctacattgtggtttggagaggcagaggaactggattcaagggataaagaagaaaacatatgtgacatagcccattattagaggggcatccagtttggttttagttctttcttttcccttgtctttgaggtaccatgaggtactcctgaatcctcaaacataagccgcctttttagaaaacaaaagctagcttgattagccttcatttaatcctcataataaatcatgagggatagttcaatattcctatttacagatgaggaatctttgggttcagtgagattaagattagtcgtagagcatggattcaaatctatatggcttacataaattgaaaacattattttgcattatgttataatatttgtaaggtacaagtttatgctggaatctgaaaataaagaaattaataaggaatggctcttggttagttacagtcttactccattgtggtccaaacgaaaggaaaggaatagagattaggaagatatccacgtatcggctrtagtgaataatgctgaagtgaatgtaggagtatagctatctttatgaggtggtgattttgtttcctttggcgatatatgcagg

SEQ ID NO: 284200 - DNA, 629 bp, Homo sapiens
atcaatgataatagtaacacctatattactgttataatataaaatgattttcattccactaactttaatattacyaaaagagagcatgtcagactgggtgcggtggctcacacccataatcgtgcactttgggaagccgaagttggaggataacttgaacccaggcgttcaagaccagcctgagcaacatagtgagaccttgtctctaaaaaaggaaaacaaaaaattagtggggtcacctattcacgaggttgaggtaggaggatcactggagcccaggagttagaggctgcagtaagccatgatcacatcactgcattccagcctgggcaacagaatgagaccctgtctctaataataataataatagataatgcatgtaagagtccctgttatagagtctattacacgttaattggttggttactttcatagttgattaataaattgtgtcaatttgattatttgtccagactctagtcaacagctttcaggtatatctttttttctcattttcctgttttgtcatctgccactctcctcccccagcccactaccaccactgaaagaagacaggacactatagaaaatatcagtctatgaaaacatgactgaggatattggtttga

SEQ ID NO: 284201 - DNA, 629 bp, Homo sapiens
atcaatgataatagtaacacctatattactgttataatataaaatgattttcattccactaactttaatattactaaragagagcatgtcagactgggtgcggtggctcacacccataatcgtgcactttgggaagccgaagttggaggataacttgaacccaggcgttcaagaccagcctgagcaacatagtgagaccttgtctctaaaaaaggaaaacaaaaaattagtggggtcacctattcacgaggttgaggtaggaggatcactggagcccaggagttagaggctgcagtaagccatgatcacatcactgcattccagcctgggcaacagaatgagaccctgtctctaataataataataatagataatgcatgtaagagtccctgttatagagtctattacacgttaattggttggttactttcatagttgattaataaattgtgtcaatttgattatttgtccagactctagtcaacagctttcaggtatatctttttttctcattttcctgttttgtcatctgccactctcctcccccagcccactaccaccactgaaagaagacaggacactatagaaaatatcagtctatgaaaacatgactgaggatattggtttga

SEQ ID NO: 284202 - DNA, 644 bp, Homo sapiens
caatctttctaatagtagcatatgttcatgaacaaactcaaagcatgaaataaaacctcttacaagtaaatgttttagtacttaccatgagttatatatttatttcagaaaaaattttactgatggactgaacaatctacaagtagccacagaataatatttgttgcaaaatgtcccaaagtgtaataacatcaggcttgttcatttgtaggctccttatgagcctacaaaatcacctcatggaggtgaatgtttattagttactgtcattaattttgcagtcattatttgaaagtccacaagacttaaaggacaaaattaaagaaatattattctatcccatattaaagcaggttgaataaatggtgtcaccaaacaaaaggaaagtgcaaaacatattttattttaaagaaaaagagatgtgacatgaactrtgaaaagaaaataactgtatatcctcacactacatcttgattctatactataaattaagggaaatattagccaattatatagacttactacataggattttggtcaccatctagtaaccaaaaataaatccatcatgtttggatttggcaagttagctagcatgtaatcaatgacaatcatttgtgttttatttatttatgcatgtgaca

SEQ ID NO: 284203 - DNA, 605 bp, Homo sapiens
aaattttattttgaaacctcattctgaatgtgatagtattaagaagttgagttttgtgggatgtgatcaggttatgagcatagccctcataaatgggattagtgcccttataacagaggctttgggaagcttgctcaccctttcttgaatttgtactttccagcttccagaactctgagcaaaaaaaaaattstattatttatagaagtttatttctatattagtcagggttctatagaaagacaaaatcgaaagcatgcatagatagagatagacgagaagatttattaggggaattggctcatgcggtcatggaggctgagaagtctcactacagctgtcttggagtcgaagaaccggggaaaccaatgttgcgactctcagtcctaggcagaagacctgagatgctggagggctgctcatgccagttccagagtctaaaggccagaaaacctagagttcggatgtccaatggctggagaaagaaaaggtgtcctggatccagaaaacagagcaaattggcctttcctctgactttttttttatctgggcccccatctgattggatggtgcctgcccccactgagagcagatcttcccccact

SEQ ID NO: 284204 - DNA, 1193 bp, Homo sapiens
aaacattggattatttagtctcttttattatttgctttttgttgaacattataatattcttatataaaacatatgcaaaacaagcatagttgaacaaaggcccttgtgcactgaaagaaaaagaacttaagaaaaataatttaacaaagatccttgtttataaatgatccctgtataatcatgctctgtataactaaaacctttttttctttcattaaattattagtgattatcagcaattggtgtatttraatttaatttgtatttgttaaatggcacttgcttagagtgtttagcagacagtttaattcagtaagttttatataatgacatataatctattgtgttaaatcagtgaatatttgtcattaacaatgcaatgtgttaattgtcttctttttatcatgtacttttgtaattatcttatttctatgtttaacttattcacagtaatttaatgatatttattcaacattttttatgtgccaccattcttgaacatttatgagttaatctaaccagctccaggccctcctattgtgtaatatctaacwtgtagttgcatatggctacacatttgttccaaaaccatttgttaaaaagacttttcagctgggcgtggtagctcacacatgtaatcccagcagtgggggaggctgaggtgggcagatcacgtgagcccaggagtttgagaacagcccgggcaacccagggcaaatgcatctctacgccaaatatgaaagttagccagtgtggtggtgcatgcctgtagtcccagctacttgggagcctaaagtgggaagatcacttgaaccccagaggwccagtctgcagtgagccaagatcgcatcactgcactccagcctgggcagtagagcaagactctgtctcaaaaccccaaaataagcactttcctttctgctatggaattcccatgtcatttttgttaaaactcaagtgaccatatatgtacaggtctatttcaagattctctattgtgttcccttgatatatagatcctgacaccaaaaccacattatcttaattgccacaactttataggaattcttgtaatccagtaatatgaatccaccaatttaatccctttatcaaagttgttttggctattcaaggtcacttgcattatttaagatttaaaatacattttacaatcagcttgtcaaactctaccc

SEQ ID NO: 284205 - DNA, 639 bp, Homo sapiens
tgtagttgcatatggctacacatttgttccaaaaccatttgttaaaaagacttttcagctgggcgtggtagctcacacatgtaatcccagcagtgggggaggctgaggtgggcagatcacgtgagcccaggagtttgagaacagcccgggcaacccagggcaaatgcatctctacgccaaatatgaaagttagccagtgtggtggtgcatgcctgtagtcccagctacttgggagcctaaagtgggaagatcacttgaaccccagaggaccagtctgcagtgagccaagatcgcatcactgcactccagcctgggcagtagagcaagactctgtctcaaaaccccaaaataagcactttcctttctgctatggaattcccatgtcatttttgttaaaactcaagtgaccatatatgtacaggtctatttcaagattctctattgtgttcccttgatatatagatcctgacaccaaaaccacattatcttaattgccacaactttataggaattcttgtaatccagtaatatgaatccaccaatttaatccctttatcaaagttgttttggctattcaaggtcacttgcattatttaagatttaaaatamattttacaatcagcttgtcaaactctaccc

SEQ ID NO: 284206 - DNA, 578 bp, Homo sapiens
aattgcttgaacccaggaggcagaacktgcagtgagctgagatcatgcctttgcactccagcctgggcgacagagtgagactctgtcaagaattttattttatctataaatcaatttgtggataattgacatcttaacaatattaatcttacatccaagaacatggtatctcttttcgtttatctaggtcttctttaatttctctcaaaaaggtttgtagtttcccaggttcaggtcttgcacatattttgttaaatttatctttaatatttcataggtttttttgttttttgtttttttgagatggggtctcgctctgtcacccaggctggagtgcagtggtgtgatcttggttcactgcaacctctgcctcacgggttcaagtgattctcttgcctcagcttcctgagtagctgggactataggtgaccgccaccacacccagctaatttttgtatttttagtagagatggggttttgccttgttggccaggctggtcttgaactcctgacctcaggtgatccacctgcctcggcctcctaaagtgctgacattacaggcgtgagccactgcacct

SEQ ID NO: 284207 - DNA, 578 bp, Homo sapiens
aattgcttgaacccaggaggcagaacttgcagtgagctgagatcatgcctttgcactccagcctgggcgacagagtgagactctgtcaagaattttattttatctataaatcaatttgtggataattgacatcttaacaatattaatcttacatccaagaacatggtatctcttttcgtttatctaggtcttctttaatttctctcaaaaaggtttgtagtttcccaggttcaggtcttgcacatattttgttaaatttatctttaatatttcataggtttttttgttttttgtttttttgagatggggtctcgctctgtcacccaggctggagtgcagtggtgtgatcttggttcactgcaacctctgcctcacrggttcaagtgattctcttgcctcagcttcctgagtagctgggactataggtgaccgccaccacacccagctaatttttgtatttttagtagagatggggttttgccttgttggccaggctggtcttgaactcctgacctcaggtgatccacctgcctcggcctcctaaagtgctgacattacaggcgtgagccactgcacct

SEQ ID NO: 284208 - DNA, 612 bp, Homo sapiens
tattcctttaactttaaaaaaatgtctagcccaggcatggtggctcatgcctgtaatcccagcactttgagaggccaaggcaggaggatcccttgagcccaggagttccagatagcctaggcaacacagtgaaaccctgtttatattaaaaatacaaaaattagctagaaatgggtgcacacttctgtagacccagctactcaggaggctgaggtgggaggatcactcaagactgggaggtcaagcctgcaggaagctatactgggtgcagtggctcacacctgtaatcccaacactttgggaggctgagaagggcagatcacttgaagtcaggagtttgagaccagcctggccaacatggtaaaaccccatctctactaaaaatacaaaaagttagccgggtgtggtggtgygtgcctgtaatcccaactactcgggaggctgaggcaggagaatagcttgaacccaggaggtggaggttgcagtgagctgagattgcgccactgaactccagcctgtgcaacaagagtggaaactccgtttcaaaagagaaaaaaaaaaaaaactgcaggaagctatgatggtgccactgcactctagcctggacaacag

SEQ ID NO: 284209 - DNA, 540 bp, Homo sapiens
ctcactatgttgcccaagctggtcttgaacytctggcctcaagcagtcctcccgcttcagctctcaaagtgctgtgattactggcatgagctaccatgcccagcccagacttaaaacaatattgccttgagatcttaattttatatttatttaattactaatgatgatgtgtctaattcctaatacagtaattatctaattcctaatgatgttgaacatcttttcttacatttattcatttaagtgtccatttctgtgaaacacctctttatggtttctttcccctactttcttttgaattatttatccctttgaaattgctttcttcagttccttttgtattctggatactgattttttattgtttatgtacactaaaaatctcttgccctggttgtgtccaggtgggctgtgtgttgaattggaaagggtgcatgtccttgaaaggcagcagctactactcagcatctgcctgtgttgccatggacatgtggactcagtgtaactacgtcttccaactcaaaaagatttatgtaaaat

SEQ ID NO: 284210 - DNA, 609 bp, Homo sapiens
ggtaacagaataatggttaaaatcctacatgtataaagagctctcacaaatcaagaaaaattataaatatgtaaacagaatatcctttaatgttaagaaaaaatgctgccaattaacatgtgtgagcaggcttacaataaaagaataagcaaatatgagaaaaacattttcactcactagtaatcaaataattgggaattaaatcaagaaaatgtaggttacaatattttacccagcagcttggcaatgtgcaacactggtaaraaagtgaaaaacatagctactcttgtatactattaagattgtaaatgtgtaccctcttcctgaaaggcaatttaggacactgaattttgtttctgtattttatttaactcaagattttatgaaaaattcaaacatatggaaaattagagaaaaatacaacaattttacctattgcccagatttcacattttgacatctttaccttttttaaggagaaaataaaaagctccttttcccaatatctttaaaaaagtaaccactgttctaaagttaatgtgtattattttcatgtgtgttttatatgtacatactactatccataaattgtacctatcatatttcatc

SEQ ID NO: 284211 - DNA, 609 bp, Homo sapiens
ggtaacagaataatggttaaaatcctacatgtataaagagctctcacaaatcaagaaaaattataaatatgtaaacagaatatcctttaatgttaagaaaaaatgctgccaattaacatgtgtgagcaggcttacaataaaagaataagcaaatatgagaaaaacattttcactcactagtaatcaaataattgggaattaaatcaagaaaatgtaggttacaatattttacccagcagcttggcaatgtgcaacactggtaagaaagtgaaaaacatagctactcttgtatactattaagattgtaaatgtgtaccctcttcctgaaaggcaatttaggacactgaattttgtttctgtattttatttaactcaagattttatgaaaaattcaaacatatggaaaattagagaaaaatacaacaattttacctattgcccagatttcacattttgacatctttaccttttttaaggagaaaataaaaagctccttttcccaatatctttaaaaaagtaaccactgttctaaagttaatgtgtattattttcatgtgtgttttatatgkacatactactatccataaattgtacctatcatatttcatc

SEQ ID NO: 284212 - DNA, 608 bp, Homo sapiens
tattgtaatcaagaagtaatactgtcataaagccagacagacatacagatcaacagaacaaaatagcctagaaatcakcccactctcagatatagtcatttagttttagacaaaagcacaaaagcaatccagtggaaaatgtaaagtctttacaactaacagcactagaacaattggatatgtgtacagaaagaaataaatcctgatccttatttcacactatatataaattttaattttagatggactgcagatctcaaagtgaagctaaaactgtaaaactaaattatgtatgaccttgggttaggcaaaatatttcctatgacaaaaaacaagcactaatcattaagaaaactgtgattaattagactttatcaaaattaaaacttttgctccttgaaagactattaagaaaatgaaggcaagccatgatacagaaaaaaaaattgtaaaacatatctgatacagaactggtatccagaatatttaataatttctacatctcagtaagaaaacagatgactcaattaaaacagaaggcaaaaatttaaacactttaccaaataagatgtaagaacagcaaataagcacaaataaagataatcaac

SEQ ID NO: 284213 - DNA, 608 bp, Homo sapiens
tattgtaatcaagaagtaatactgtcataaagccagacagacatacagatcaacagaacaaaatagcctagaaatcatcccactctcagatatagtcatttagttttagacaaaagcacaaaagcaatccagtggaaaatgtaaagtctttacaactaacagcactagaacaattggatatgtgtacagaaagaaataaatcctgatccttatttcacactatatataaattttaattttagatggactgcagatctcaaagtgaagctaaaactgtaaaactaaattatgtatgaccttgggttaggcaaartatttcctatgacaaaaaacaagcactaatcattaagaaaactgtgattaattagactttatcaaaattaaaacttttgctccttgaaagactattaagaaaatgaaggcaagccatgatacagaaaaaaaaattgtaaaacatatctgatacagaactggtatccagaatatttaataatttctacatctcagtaagaaaacagatgactcaattaaaacagaaggcaaaaatttaaacactttaccaaataagatgtaagaacagcaaataagcacaaataaagataatcaac

SEQ ID NO: 284214 - DNA, 569 bp, Homo sapiens
tgggtgcctgtaatcccaactactcaggaggctgaggcaggagaatcgcttgaacctgggaggtagaggttgcagtgagctgagatcgtgccattgcactccagcctgggagacaagggtgaaactccatcaagaagaagaagaaagaagaaagaagaaagaagaagaggaagaggaagaagaagagcaagaggaggaagaagaagaggcagaaggggaggaagagaaggaagagaaagaggaggaggaagagggagaagaggaagaggaaaaaggggatgaggaagaagaagaaggagaagaagatgaagacaaagatgaagacgaagaagaagaaaaaaactggtyccaagtaagtctaaaacccgacaggttacccacactggatcttaaggcttaagaataatgtcttttggctccagcttctgctttctggacacagaggtggggatttgtccccaaaactctggcagccccaataccataggtttgatgggcacagcccaggcttcagctcttacacattaaaattgcttgttggcaggtctccaaggctgacactgcacact

SEQ ID NO: 284215 - DNA, 609 bp, Homo sapiens
gtgtctggagaggaaagccaccttgaattcacacggctactagggtccattctggtaagtaaacaagttttcaaaagaaaaacattttgggagatgaacagacactttagttgtaaccactagtaggacctaaattaaattttatytcttaagttttagcacacatcatgctagtctctgaatttttgaatactgactaaattatacaagaccttttagcatatatcataacaaaattttatctgcaaatttgaaagttatgtatcctataactatttcctttttaaaataaaagcctttcaatgcttcatcaacaaaagaattattcaacttttcactacagattagtctctatgttgttatggaacaattgattctgttgagattacatacttgtgggttattgccatatagaagcatatgaacacttattttaggttagaaatattattttttgtcattatgatatattaaatgtcaatatgtataagctacttatttaaatatcaatctcaattttgccaagaataacatgtgagtttacactttgcctcaatttatagtgttctgctttgtaatcttgaaaatagtagtatacttgaaataaaa

SEQ ID NO: 284216 - DNA, 532 bp, Homo sapiens
attgtcatgtctagagaagaattctataaacaattatagcaacttgcctcacaactggagatgaattaaacttactacatctaataattctataatttagggtactaaatctgatcagatacatgagaatayataatgcatactaaggtaataaaattggtattgtagtattttttttaacttagaaatggttgttaataagaatatttgaggcaacccagtcaaggaagtcttccccaacctaataagtgcctaagacagagcaaagatggcaccactaaaatatgtctaagtcaagtttctaaaactcaaaataacacattttaaataaacatgaatcatcaaaataattactgcagatgtgatcatgggtaaatcacttctgagcttcattaattttattgtaaaatttgggatatagattgggggatacttaagtggtacaatgtttataagtctatattttatgaatttatatctactaccaattttcttcatctctgacataatccattaatgctttttatgccaa

SEQ ID NO: 284217 - DNA, 588 bp, Homo sapiens
atagtaataataataatattaagtgtccatcatagtgccagggatcacatagagacataataatatagggtggaataagggaaacttactctctctgagtatctcttatgtgctacttgtcagtgcacagacctttcaaagaaactcccagaaaacttatcctcacatctaaatgtcgtggcatccctatgcctaaatcaatcactggaaaagcaaacttgrctactgtggtaagttaagagaatttaaatcctaaaacccaaagctccttaggaagagccaatacatgaagaaaattagggtttcattgagatggagaagagtgggcatgtttggttgacaatcatcagtatctacatacaagcaatattcctaagtatgtagcattaattatgtactcccatgaaaacagaggaatatatatagatataattaagaagtcagattttatatatgttgaaattatttttctgatttttatgttggcaaaaaattttctaattttcaataattctagatcttttctgaaattgttagaacaagatacattcatgggagacatattaaagggttaaaattttagaaaag

SEQ ID NO: 284218 - DNA, 475 bp, Homo sapiens
catttttctttacttctgctcacactttgtgcctattatctgttggacttactgaattttctctggccctctctcttttctctttctgatttgtaggttaaacattctctctttctctgtctctattctttgggtaactcttaacgtttccacattaatagtttacttaaaaattcacttttgcccctttgacttgtatttcagccttaccctttttttcactgcccctccaatttgttaatttttaaaaatcaatgtttctttcaatttatacacatatttaccaatttctgtattcactattaattttatcatccggttatttctttctaggttgacttytctgcttatttgatcctctgcaattcttcctccagtgatggtcagtttctatgaattaaggcagcctggagataagttgctagtgagcaggagcagcaatgcagctcagctacttggtgactgtgatacacag

SEQ ID NO: 284219 - DNA, 529 bp, Homo sapiens
gtaataattttgatgttgaaacacttcataaaacatggtatatataagaaatgacattttaacaattggatgttgtccagcatgatactgtttgatgaggtcagaataagttagtktggctgatgtaaaatctaatttaaaaaaaaactaacttttattttctttttggaaataaaatatcttttacagataaaggccaaagagatcatatatcacaatttagaattttataacgttttctttagttttactgttatacctgacaagatgagtaaatcagtttgttccaatagcgacttcagttcattctgctatattaaaacatcctggtttaataattctaactacagataccaggtttaaaatgtctatctcaactgcactattttttcatgagtgctcttttttatgggagtatatcacacataaatacggaagtataaacagttaaaataaatgttttcatgaagccatttttctcatgttaaatagttttatacatttttaaaaatcctgatcctatgcattc

SEQ ID NO: 284220 - DNA, 529 bp, Homo sapiens
gtaataattttgatgttgaaacacttcataaaacatggtatatataagaaatgacattttaacaattggatgttgtccagcatgatactgtttgatgaggtcagaataagttagtgtggctgatgtaaaatctaatttaaaaaaaaactaacttttattttctttttggaaataaaatatcttttacagataaaggccaaagagatcatatatcacaatttasaattttataacgttttctttagttttactgttatacctgacaagatgagtaaatcagtttgttccaatagcgacttcagttcattctgctatattaaaacatcctggtttaataattctaactacagataccaggtttaaaatgtctatctcaactgcactattttttcatgagtgctcttttttatgggagtatatcacacataaatacggaagtataaacagttaaaataaatgttttcatgaagccatttttctcatgttaaatagttttatacatttttaaaaatcctgatcctatgcattc

SEQ ID NO: 284221 - DNA, 529 bp, Homo sapiens
gtaataattttgatgttgaaacacttcataaaacatggtatatataagaaatgacattttaacaattggatgttgtccagcatgatactgtttgatgaggtcagaataagttagtgtggctgatgtaaaatctaatttaaaaaaaaactaacttttattttctttttggaaataaaatatcttttacagataaaggccaaagagatcatatatcacaatttagaattttataacgttttctttagttttactgttatacctgacaagatgagtaaatcagtttgttccaatagcgacttcagttcattctgctatattaaaacatcctggtttaataattctaaytacagataccaggtttaaaatgtctatctcaactgcactattttttcatgagtgctcttttttatgggagtatatcacacataaatacggaagtataaacagttaaaataaatgttttcatgaagccatttttctcatgttaaatagttttatacatttttaaaaatcctgatcctatgcattc

SEQ ID NO: 284222 - DNA, 493 bp, Homo sapiens
agaagtccaaaatgtgattcagtcattgtaatcctgatcaaaatattactttaatttgcgtaacattgaacagaaaatgacagtttattcattttatgtattcattcatttcgaaaatttttactgagcatctaaatgctagacagtatgttagaccctccagatataaggagcaaaatattatgatcyttgttctcaaagaacttagagaaggggaattagatatttcacaaataatctcacaaataagaacatagctccacaacatgaagagtgcaatgtgcagcttttataagaacgtggaagggagggaaagggggttactttaggattagggagttaaggcaggcctctctgagggcatgactagtttgactggaagaagagcaggatttagtgggtgaagtgtcagcatctagacagagaaaacagcatatgcaaaggcctccaatgcaaaagaaccacatgcatttcaggtattgaaaagactgtg

SEQ ID NO: 284223 - DNA, 549 bp, Homo sapiens
gattctcttgggcttttcatcatgttattttttttgcataacatttcaaaccttctgataaatatatgcattcacatctaatggtgttaaacataataaacattagatgttggctaaacatctatagtactgtttagataggtttttaattttttattttctttttacataataataaatgtgtctcttttcaacttttgttgttcttaagtctttaagttctagccaactttataaatttcctttagaaatcatatatattatgtatgaaagactcagtatacaaatacacaatggccaggccatatataaaaacagaactctggctcagcaaccagctcaggaaaccatactcttatctacagtaaccatccygggaagccattctattatctgtaagtctgacttgtaggaagtcagatgaccatatctagcaaccagccccggaggccaaacaataagccctttaacaatcagcccaaagcaattaggggttgattaataactgacagcttccctaatttttgtcctggcttccaacttaggacc

SEQ ID NO: 284224 - DNA, 228 bp, Homo sapiens
tccttcaagcaaggaattagcattagttaatagaaarctgatgctaacttcttgaataataacattttaggttgggcaatgtgaaatggccatttttaaagcaaaagatggttaaaaactggcaatttcaaaggattcaacctctatattcttaatttaactatggtattgtaaattgccagtttatacacaatattccaacctgtagagctaaacacagaacctgta

SEQ ID NO: 284225 - DNA, 228 bp, Homo sapiens
tccttcaagcaaggaattagcattagttaatagaaaactgatgctaacttcttkaataataacattttaggttgggcaatgtgaaatggccatttttaaagcaaaagatggttaaaaactggcaatttcaaaggattcaacctctatattcttaatttaactatggtattgtaaattgccagtttatacacaatattccaacctgtagagctaaacacagaacctgta

SEQ ID NO: 284226 - DNA, 228 bp, Homo sapiens
tccttcaagcaaggaattagcattagttaatagaaaactgatgctaacttcttgaataataacattttaggttgggyaatgtgaaatggccatttttaaagcaaaagatggttaaaaactggcaatttcaaaggattcaacctctatattcttaatttaactatggtattgtaaattgccagtttatacacaatattccaacctgtagagctaaacacagaacctgta

SEQ ID NO: 284227 - DNA, 228 bp, Homo sapiens
tccttcaagcaaggaattagcattagttaatagaaaactgatgctaacttcttgaataataacattttaggttgggcaatgtgaaatggccatttttaaagcaaaagatggttaaaaactggcaatttcaaakgattcaacctctatattcttaatttaactatggtattgtaaattgccagtttatacacaatattccaacctgtagagctaaacacagaacctgta

SEQ ID NO: 284228 - DNA, 538 bp, Homo sapiens
ctcccaaagtgctgggattacaagcatgagccaccacacccagccaagagttcacaacttttcattgttggtctgatggtagcaagtgtccactctgtccagagaggacatgtcaggtgcagtggcttacacctgtaatcccagcactttgaaacactgaagtggatcattcgcgcccagaagtttgaatgttagccaggcatggtggcatgcacctgtagccctagctacttgggaggctcaggcaggaggatcacttgagcccaggagtttaaggttatgatcacaccactagactgcagcctgggcgacagagtgaaacccccaactcttaaaaagaaaaaagagagaacataagtgctagcctggccaagggatgatccccaagcccatgtcttccaggccagaaaggggaattctaacaggttgggaagatgcactgagagatgcatgtgtctggcctctaggcaaacccaagaaaacccacatcctscttcacctgcaggaagagtgaaggagttcttcaccaaggcctgaa

SEQ ID NO: 284229 - DNA, 643 bp, Homo sapiens
tttcagttgtattttgaaattccttaagtgagtttttttaattctagaagttctgattgatttcttattaagatgtttatctcttccttcatttcccggattgatgtagaagtttctttttgttgatttcaaccttgaatctcattgagcttccttgcaacccaagttttgaaatgtttattgttatctctgagttttcattttggtacgaagcattgccagagagctagtgtgatcctttggtagtgtcactacattcagatttctcatggtgctagaattcttgtgtgggtccttctcatctggagatgctagcacttctaatttgtgtaattatttttgtttgggtaggattttttctttttctttccttttctataatattattgttatttttttcttctttccctttccctcctccctaggggtgtggctgtagagcatgctgggtagggtcttttggctttgcttctgtagccctaatgcacttctgccagcaggttttatattgggtgtgtggtttgacctacaagccagtagatggcgccatgggtaagagctggctgttgccagtgctgctggctgtgtacttgatccttgtttattgggaggagctytctcctgccccaggcaaagggctgat

SEQ ID NO: 284230 - DNA, 643 bp, Homo sapiens
tttcagttgtattttgaaattccttaagtgagtttttttaattctagaagttctgattgatttcttattaagatgtttatctcttccttcatttcccggattgatgtagaagtttctttttgttgatttcaaccttgaatctcattgagcttccttgcaacccaagttttgaaatgtttattgttatctctgagttttcattttggtacgaagcattgccagagagctagtgtgatcctttggtagtgtcactacattcagatttctcatggtgctagaattcttgtgtgggtccttctcatctggagatgctagcacttctaatttgtgtaattatttttgtttgggtaggattttttctttttctttccttttctataatattattgttatttttttcttctttccctttccctcctccctaggggtgtggctgtagagcatgctgggtagggtcttttggctttgcttctgtagccctaatgcacttctgccagcaggttttatattgggtgtgtggtttgacctacaagccagtagatggcgccatgggtaagagctggctgttgccagtgctgctggctgtgtacttgatccttgtttattgggaggagctctctsctgccccaggcaaagggctgat

SEQ ID NO: 284231 - DNA, 643 bp, Homo sapiens
tgttgtgggggaggtgtattttaaaagagaaaataaaaggrgaaataaacttttcaaaaccccttctgtataccagacagtattgcacttttacgtatctcatttaatacccataacacctatatgaaatatacactgttactctgttttttcttttagaaacattttgttatggaaaattttaatcatatacaaaagtccagagcatcatacaatatatccacatatagtcgtcacattgctgcaacagtcatttcagccggcagccagccacatttcatccgttctttcccactccactcacacccctcaaccccactctccactcttgctttccctaaatctgagttattttaaaggaaatttcagtcgtcagatcattttatcccatagcattttagtatgacatttaagtactcttaaaacaacaacaaaaaaccttaacactttttatcatatctaaaaatattataccttaaaaatccttcatatcaaatttgtagtccatgtttgtttccagaattgtcttaaaatctttgaaaatttagtttgtttaatcagaattcaaacaaagtccacacatttcatttggttgctgtgtctcctaagtctcttttaagaatctaagttcatagatttctca

SEQ ID NO: 284232 - DNA, 580 bp, Homo sapiens
ggccttggtccctccctgagtctgagggtcacgctttaggtgctgcccacatgctggggactctggcttctcctcagagaatcctgctttctattctatactggttattgtttatggagctcaggagttgattattttcccaaagtaggaaggtccagtacccaaggctccaggactctgaagtgtgtctaaaatcaccagcctttgatttcaatgtaaaaaagatccaagtctttcacaaacccttacttgggcaattcaacccttgcaaaacatcacaaagaactgtttttggatgactcatggttgtgtgtgtgtgtgtgtgtgtgtgtgtgtgtgtgtgtgtgtattttctgtgtgttgtgggggaggtgtattttaaaagagaaaataaaaggagaaataaacttttcaaaaccccttctgtataccagacagtattgcacttttacrtatctcatttaatacccataacacctatatgaaatatacactgttactctgttttttcttttagaaacattttgttatggaaaattttaatcatatacaaaagtccagagcatcatacaatatatcc

SEQ ID NO: 284233 - DNA, 509 bp, Homo sapiens
ctgccctgtgtcccatgggtcttgactttaccacaatcctaagtggtcccatgaagaccagccccccacagcacacgtggcaggtcagcgctgcttcatcggcattggcttcccagctaaatgctcaaaggtaaagtgtctggctgcacatgtcatccttttcaaaatcaacagggtctccaagaaatacatcaagtgtcctctttttgtagacttttcyctctttatggtcgatcttgttgcatttaagcataagaaaattctgcacattcacagtaagtccaaaccgaagtaaatatcaaggaatgccagagccacaggtataataataatatgggacctgcttgattttggaatgaaacagggagggaattcactgagttcatcacagagactctggacaacagagtcagaaaccctctggacaggaagcgggcttgaagccaggcatcctatggccagctctgccctccgtgtctggaaccatctcacccactaactagatggtg

SEQ ID NO: 284234 - DNA, 595 bp, Homo sapiens
gggggaggtgccacacacctttaaatgaccagatctcacaggaactcacttgctatagtgaggacagtaccaagcaggtggtgctaaaccattcatgagagatccacccrcatgagccaatcaccttccaccaggccccacctccaacactggggattacatttcaacatgagatttgggcagggacatacattcaaactatatcacctactttcctgattatgcatgtgggaaaagaaactgaaagtgttccataaactttcaaccaatgcttcttttttttcttttattttttttttgtagagtcaaggtttttgctatgttgcccaggctagtctcaaattcctggactcaagtgatcctccctccttggcctcccaaagtgtttggattacaggcgtgagccatcgtgcctggcccaaccaacacttcttattttcatccacatgtttcaaccagccctcagaaacctggggaaattcagagctaattgtctagacattgctcagctctgtgcaaccagggctctcccgagtctctttagatttgtgctttttccatcttttagaccattttccattccattccaacttcc

SEQ ID NO: 284235 - DNA, 545 bp, Homo sapiens
tgggtaatttataaagaaaagaggtttaattggctcatggttcttcaggctttacaggaagcatgacagcatctgcttcaggagaggcctcaggaagcttccaatcacggcagaaggtgaagggggatcaggcgtctcacacagcaggagcaggagcaagagtgagatgggggaggtgccacacacctttaaatgaccagatctcacaggaactcacttgctatagtgaggacagtaccaagcaggtggtgctaaaccattcatgagagatccacccgcatgagccaatcacctyccaccaggccccacctccaacactggggattacatttcaacatgagatttgggcagggacatacattcaaactatatcacctactttcctgattatgcatgtgggaaaagaaactgaaagtgttccataaactttcaaccaatgcttcttttttttcttttattttttttttgtagagtcaaggtttttgctatgttgcccaggctagtctcaaattcctggactcaagtgatcctccctccttggcctc

SEQ ID NO: 284236 - DNA, 558 bp, Homo sapiens
ttgttttcatttatgttgatgtatccatttatataggttacatgtttacatataaaattatgcaattttatttgtatatatattcctagttttgactttcttgtgtaaatttaaggggtgcaagtgcagttttgttatatggatatattgcttagtggcaaagtctgggctttcggtattagccatcatccaaataatgtatattacagscatgaggtaatttatcatccttcatctccttctcagtctccaatgtttattactccacactctatgtccacgtgtatacattatttagttccaacttacaaatgacaacatgtagtatttgatttttaggaaataaaaaaactttaaatctggtgttccaaatctaatagctaccttaaaattgaccaatggccaggacttactgatcccccattctcaaaatgctcctttgaatatgttttctgccttaagatattcactttcagttgtacaccctaaattttgtgatgcctcctgtgtactaagcactatgctaagtcttctaatgttttcatttattcctcaaat

SEQ ID NO: 284237 - DNA, 497 bp, Homo sapiens
cttctccactgcctttttctgatgttcttagggaggcactatgatgatcacttggaaggtttgcttcaagagtgcatcaagtttgtgtaaactattcctctacctgctcactgcctctcccccttcacctggttaactcctattcatgctttggatctcatttcaaatgtcatttctccaagaaagccttcttggacatctcttttacctggccctgtattttttccttgcttataattrgtaattataacttgtttgaaaaatgcaatctccccctcaagaatacaggctccatgagggcaaaactgctcctgttttgtggacattacatacagtaaaccacccagcgcctacagcagtgtctgccacatggattctagaaatattgatggaaggagtcaatgaagtgctgcattacacctattgaccggtgttcaccaaatgcttcacggcaagccctgtgttgtgttcttggcaatgtaggggatataaaagaa

SEQ ID NO: 284238 - DNA, 579 bp, Homo sapiens
ttatgtgcccaatatcacaaaactatgaaaaaggtcaggtacagaattttaagcaacagtatatacagatgagattagctttggaggcaatgtggcagtatttatcataatttcaagtatcccctgacccactactttcacttccgggtatctgtttaatatagcatgtgcaaaaagacacatgtacaacatacacactgcttgtaagggtgttgattttagagcaaaaagtagaaataacctaaatatcggggtgtggttgaaatgagttttgatttttagtgtgatggaatgttatataggcaatcaaaagaatgatgttccagtgtggaaaaatgtccaaattatactgttaagtttaaaaaatcaaaytgctaaataatatgtatgatatgacctatttttataaaaacaggacaagctatatatgtgtcattcaaacacatggctatgtataaatccatagaataaatttgagaacaacatgcaccaagatgcttccagatctggcctctgggaaggtagaaggtttgggaatgagagatgagaaatgatggaaattttcatttgttactcgtt

SEQ ID NO: 284239 - DNA, 579 bp, Homo sapiens
ttatgtgcccaatatcacaaaactatgaaaaaggtcaggtacagaattttaagcaacagtatatacagatgagattagctttggaggcaatgtggcagtatttatcataatttcaagtatcccctgacccactactttcacttccgggtatctgtttaatatagcatgtgcaaaaagacacatgtacaacatacacactgcttgtaagggtgttgattttagagcaaaaagtagaaataacctaaatatcggggtgtggttgaaatgagttttgatttttagtgtgatggaatgttatataggcaatcaaaagaatgatgttccagtgtggaaaaatgtccaaattatactgttaagtttaaaaaatcaaactgctaaataatatgtatgatatgacctatttttataaaaacaggacaagctatataygtgtcattcaaacacatggctatgtataaatccatagaataaatttgagaacaacatgcaccaagatgcttccagatctggcctctgggaaggtagaaggtttgggaatgagagatgagaaatgatggaaattttcatttgttactcgtt

SEQ ID NO: 284240 - DNA, 636 bp, Homo sapiens
tgttctttgtgtcatcctcaccacattctggcatctaatgattaaataatttaccaccactgcaggaaatattttctgagaccttacatataaactggtttaaacaccctcctcaggaacacccaaatggttgaagtcactcctaaccatattattttcaaaatagcagcagcaacaacaacaaaaacaacactgagaaacagtaatggttgtttcaggtaaagaaattaagggtgattctctcctctcttttcaccactattaacaccatgtggttagactcctacatgtttaraattcagagggaaagatccagaaataaaacaatcagcagttatttgctttaaaaataatagttgcagaccggatcaaccccagagcctttcttcatgcctttcttttgtgttgtagaaactgccttagatttgtgtgctgcgtgtgttttcccatgttactatttctcacactgtgtggaaattccagcaagggtattaataattcaacgtaaaggaggaacaatattatggttgaaaattagcctgagaaaggtgaatgtaacctttttatacaagaaaaataatgggtgagaaggagccaaattagctgaacaaagagctgcataatgacgtgatacac

SEQ ID NO: 284241 - DNA, 580 bp, Homo sapiens
tctcccaattttcccttgggctggagtggggttatagcataggtgagtttcatagctggaatgtcaggctcagccattgttttgcattttcccatggtagacatttcctgtcttaccctcaaaagtccaggttttatcttttttcttctttctttctctttttaaaaaatatgtcagcagaaraggatctgataacacttaatgactctaaggtaaagtgctgataaggtttgaattgtgacccaactttctggtatgcttgcaactggcttgaaagcaaagtgggcaaaggatgtctaactgaggcattatagcagctggtggtctagtgattgcaaaactcttcaccccaaatcactgttgtaaatagagatttccccacttacaaaccataagcctgaaaagtctatatttattaaaatgaattcatcaagtggtttcccccataatcatcttatgagttgatataatttgaatcaaaagcaaagaaacttaatatagaatatgtagttttatactggccaaaagtatatttgtttttaataatattggctcttaatccacagtttaaacattagct

SEQ ID NO: 284242 - DNA, 1161 bp, Homo sapiens
tctcccaattttcccttgggctggagtggggttatagcataggtgagtttcatagctggaatgtcaggctcagccattgttttgcattttcccatggtagacatttcctgtcttaccctcaaaagtccaggttttatcttttttcttctttctttctctttttaaaaaatatgtcagcagaaaaggatctgataacacttaatgactctaaggtaaagtgctgataaggtttgaattgtgacccaactttctggtatgcttgcaactggcttgaaagcaaagtgggcaaaggatgtctaactgaggcattatagcagctggtggtctagtgattgcaaaactmttcaccccaaatcactgttgtaaatagagatttccccacttacaaaccataagcctgaaaagtctatatttattaaaatgaattcatcaagtggtttcccccataatcatcttatgagttgatataatttgaatcaaaagcaaagaaacttaatatagaatatgtagttttatactggccaaaagtatatttgtttttaataatattggctcttaatccacagtttaaacattagctwtctcccaattttcccttgggctggagtggggttatagcataggtgagtttcatagctggaatgtcaggctcagccattgttttgcattttcccatggtagacatttcctgtcttaccctcaaaagtccaggttttatcttttttcttctttctttctctttttaaaaaatatgtcagcagaaaaggatctgataacacttaatgactctaaggtaaagtgctgataaggtttgaattgtgacccaactttctggtatgcttgcaactggcttgaaagcaaagtgggcaaaggatgtctaactgaggcattatagcagctggtggtctagtgattgcaaaactcttcaccccaaatcactgttgtaaatagagatttccccacttacaaaccataagcctgwaaagtctatatttattaaaatgaattcatcaagtggtttcccccataatcatcttatgagttgatataatttgaatcaaaagcaaagaaacttaatatagaatatgtagttttatactggccaaaagtatatttgtttttaataatattggctcttaatccacagtttaaacattagct

SEQ ID NO: 284243 - DNA, 537 bp, Homo sapiens
ggtgcaattccagagtctggaacaatgtatgccacttagttggtgcttagtaaatatttgctgaatatttgaggaaaaatagtagaaagtatatcagcttaatttgtacacccatatagtattagagcaagtcaccagatatcatttataagcaactggaaaaacacagagcaatgtctggaagtaagatgttttagtacaatgtttagcctaaagaaaacaaaggggatttattttggacagtccaaaagtgaatgcacttaaatcatggctggttggattgggtttgtcatcaagtarcaaaatgaacatcagtcaaattggagattttagtatgttttgttctcttctattaaaacagcactatttttaaatgacttggagcttgcagttctgttacaatgactcgtcaagttgaaaaatgtgtttctttagggtgggaaaagaattttaattcataattcatttattgtaatgtttattaaaacaaagacatactctcttatactctttttcatgacattatgccttttgtct

SEQ ID NO: 284244 - DNA, 601 bp, Homo sapiens
gatcgtttctcctccctcctgcagaatgcatatccaaaaccttagggtataaactcttgaaaacatttattcagccccctcatctaagtttcaccctatggcatattgcatcattcctagtagaatcttcccaacttgtgcaacaaagagaaagcaatgcatcttgtagtgaraagacaaatacttctcgctcttccttggcatgaagcaggaggctgccaagtaaaagtacctggcaggattcccagagacagggcttgggccacgggttgggcagaggagaagttgctgtctcattatttcattgtcatgtggttgctgggcacactagctgacatgaagaatcaaagtaaaaattaccactgtcagagaagtgatactaatggcggtgagtctgttcagtccttccctgttttccagggacagccgcctcaatttagtggacctgtttccagcttcattaaacccctaggaagatgactggaatatgcttcctgaattggtgatgctgggtgatttgttgtaataatggtttcagggcaagatgaattaatcactgtcacttgaaggaagaagaagaaagtgtattcaaaagcatcac

SEQ ID NO: 284245 - DNA, 527 bp, Homo sapiens
gatggagtcctcatgacctaaacaccactcattagactgcatccaactctgttccattggggattaagttttgccatgagttttggagggaacaaacattcaaaccatggcaccatggggaaggagtaagatcaccaacctagcttgatgaagggagggactacttgagatgaaaaagtagctaagagatggtaaatattcctgtatgctaatttataatcttttgtcaaaagtcagggactgcaagccctcttcctcagggcacaaagcaaaggtgaatctaaaggaaagttacaaccactgttccttctggaccatccctcttttaagagttatttggccattacataaagattgaatcagataaacctgggcaggttaggataaaggtattcaggaaggtgtggccactataatgcttcccaagcatctygcaggagcctccaggagcaaggtgaaagacagactgtatctttgctccttttattcctcaactcccaactctggggattattagaagaagtctt

SEQ ID NO: 284246 - DNA, 430 bp, Homo sapiens
caattaataaccttctgctccttatgaaaaatctgtagaatattatcttaaaagtaatcatagaaaaaacttcaagaaatgtttaaaaaagasagagagaaaaagaaaaaaagcttatttaaccaaaataaacacagattgaaggaacaatccaaaagaattatcttcattattccacagccaacagtaaaggcttatatcccattatggtaatgagcaaacctttgaactttgcattgttcactgccaggcatcagcacttaaggcttaggcaaacaatgttgtacaattgctttagggagttgctaggataatacctcggcttgtgtttctgagtaggcttgatccttccttcccagtctgcatttcccaaagcagaggctggaaaggcataacactggattaaaaagtagactgttaggagtcacac

SEQ ID NO: 284247 - DNA, 609 bp, Homo sapiens
tgcattcttagttcatcttcagtgctcttgccataattatgagttactcatctaagtctgttttccattatagctaaaaacattataacaggagattcaaattctacatggtgggagcaaaagtggatcttgtttttctatagcaacatggttgaccttcatagtgaagtttgaatctgacagcattcatgctcaaatgtccaagccctgcatttctgataccatggaatcacaagcacgctgtgtgatactgtgcagcatttgatcctgcctgacttctgtgtctcagcctatcaacgaagatatttatagctgccttatgccaacktactttttaaagctgggtaataccagtgtaagatggtcacatttatcttgaaagccgaggtagggtaccatgtgtgctccctgaactactgtctccttgttccttttgttttttcctaactcattcattcattcattgaacaaatatttcttgagaggtggccctatgctagatattttagtaagtgttggagatacaggggcaaataggatagacctatttcctctctttaccatctagtgcagaaaatagacactgaacaattagttacagggataata

SEQ ID NO: 284248 - DNA, 602 bp, Homo sapiens
aagctaaaatgacaacatgtcaccctggaaaagaaggaaaataatggctttcaaaggaatgagaaagcacttttcaagaaaattagagttaataagatatctgaagatggaaaacatgccatcatccttccaaatgttagttgttgatgactgttccatctagtgggagatgtcacttggcatagagaaaaatgcactgggctgttsataaccatggtcttacctgtaccattgactgttggtgaggtgttgggtacatgttccaagttcactgaacctccgtttactcatctgtaaaataagcacttttactcacacagtctcagagcactgaacactgtgcctgaaagggaggacactcagtgtgtggtagagaagatgatgatggtgatgttgagggtgaccacaatgatgatgacaatgtgatgatgacataatgagccatcacattagtaagggttttctagagaaacagccaatagaatgtcctaagatatgcagttggcaagctggagacccaagaagagccaatatttcagtttgagtctgaaggcaggaaaagactgatgtcccatctcaaagcagtcaggcagagggagttc

SEQ ID NO: 284249 - DNA, 590 bp, Homo sapiens
caatatttcagtttgagtctgaaggcaggaaaagactgatgtcccatctcaaagcagtcaggcagagggagttccctcttgttctcactcaaggaagggtgagtcgttgtgttctactcagtcttttgacctattggatgaggyctgccacatttaggaatgcaatctgcttcactcagtctctcaattcaaatactaatttcatcgagaaacacccttatagacacacttagaattatgtttgaccaagtatctgagaattttgtggcccagtaagtcaacacataaaattaactaccacaattatgatcatcaagggatcttgccctttacttccaaattcggtgattctaataagggtgcttttttttgtaaagcagtcttcaaaaacttgctttttgtaaaggttctgacttataggaagctcagagttttgcattcttttgcttggggaagcaatttgaaaaaggaatcttacactttcagaacatgcttttcaaaatcctgttttctgacctcttgcttaatgacacccaatctcacggtgctacattgtatatatcagagaagcagcctagcctagtgcctaa

SEQ ID NO: 284250 - DNA, 590 bp, Homo sapiens
caatatttcagtttgagtctgaaggcaggaaaagactgatgtcccatctcaaagcagtcaggcagagggagttccctcttgttctcactcaaggaagggtgagtcgttgtgttctactcagtcttttgacctattggatgaggtctgccacatttaggaatgcaatctgcttcactcagtctctcaattcaaatactaatttcatcgagaaacacccttatagacacacttagaattatgtttgaccaagtatctgagaattttgtggcccagtaagtcaacacataaaattaactaccacaattatgatcatcaagggatcttgccctttacttccaaattcggtgattctaataagggtgcttttttttgtaaagcagtcttcaaaaacttgctttttgtaaaggttctgacttataggaagctcagagttttgcattcttttgcttggggaagcaatttgaaaaaggaatcttacactttcagaacatgcttttcaaaatcctgttttctgacctcttgcttaatgacacccaatctcacggtgctacattgtrtatatcagagaagcagcctagcctagtgcctaa

SEQ ID NO: 284251 - DNA, 584 bp, Homo sapiens
gattgttgtgaggatgacatatgttaatgcatgtaaagtacatagactagcacctacctggcacagggtacacacccattaactatcagatattatatatacaactgaaaaattaaagatttacagtggtaccacatttcaatcctgttcatttataatctgttgtgaaacttaccagataatatctttaattgatggtattttgtagttgtcactcagcttcgggatttgttctcgagtcttccttgaaaagcatktgtgtgtgtgtgtgtgtgtgtgtgtgtgtgtgtgtaaaagcctctgctaatgaacgttgatgcagtgcatctgcccaccagatggcgcagtgctcccgctgttccgaggctcagctaccctgagggaggcagggaattttgatcagcttctgaagaatcacctcatctctccccgcagagagcacagagcacaggacttcacgttatgtcaagtacatgtcgctagttcttgtttgtgactttgtaagaactcgtaggctatagcattatattttgcaagaaatttgtattatagaaaaatgattcataaattaaataaattaaaat

SEQ ID NO: 284252 - DNA, 1169 bp, Homo sapiens
gattgttgtgaggatgacatatgttaatgcatgtaaagtacatagactagcacctacctggcacagggtacacacccattaactatcagatattatatatacaactgaaaaattaaagatttacagtggtaccacatttcaatcctgttcatttataatctgttgtgaaacttaccagataatatctttaattgatggtattttgtagttgtcactcagcttcgggatttgttctcgagtcttccttgaaaagcatttgtgtgtgtgtgtgtgtgtgtgtgtgtgtgtgtgtaaaagcctctgctaatgaacgttgatgcagtgcatctgcccaccagatggcgcagtgctcccgctgttccgaggctcagctaccctgagggaggcagggaattttgatcagcttctgaagaatcacctcatctctcccygcagagagcacagagcacaggacttcacgttatgtcaagtacatgtcgctagttcttgtttgtgactttgtaagaactcgtaggctatagcattatattttgcaagaaatttgtattatagaaaaatgattcataaattaaataaattaaaatwgattgttgtgaggatgacatatgttaatgcatgtaaagtacatagactagcacctacctggcacagggtacacacccattaactatcagatattatatatacaactgaaaaattaaagatttacagtggtaccacatttcaatcctgttcatttataatctgttgtgaaacttaccagataatatctttaattgatggtattttgtagttgtcactcagcttcgggatttgttctcgagtcttccttgaaaagcatttgtgtgtgtgtgtgtgtgtgtgtgtgtgtgtgtgtaaaagcctctgctaatgaacgttgatgcagtgcatctgcccaccagatggcgcagtgctcccgctgttccgaggctcagctaccctgagggaggcagggaattttgatcagcttctgaagaatcacctcatctctccccgcagagagcacagagcacaggacttcacgttatgtcaagtacatgtcgctagttcttgtttgtgactttgtaagaactcgtaggctatagcattatwttttgcaagaaatttgtattatagaaaaatgattcataaattaaataaattaaaat

SEQ ID NO: 284253 - DNA, 593 bp, Homo sapiens
ttttctgtctgcagcatctcttgcaaaagcccagctcctagagagcaggagccttcccagactgtgtcaaattacctcggggayggagagacttacatggcattaatagaaatcaaatggcagagctcgggtttctggtaagagcgggtcctggctccttccttacatgaagacctgtccaacactgcttgctatctcctcctgtgccatctgaaatctgtgcctcaaaccgaccagcagccttctaaatctctttattctaaatttggcgcaaacttctttcatctgtgacttttggagtcttctgctgcatcaccccatgatccaacttggagttgggctctgtttcattgacttaccagctctcatcataaagaaccttttttagcccccaaagagtctgaacaacagacctcctccacatggaaatggtgaattgatcacactgaaaactattttgaagtcaagcaaggccagcttatgtcactctcctgcagcagagaatgactttcacttgctcactttcacacttgcaaccttccattttccacaaactgtcactgtggtctgttagaaatataaattatgtcatt

SEQ ID NO: 284254 - DNA, 593 bp, Homo sapiens
ttttctgtctgcagcatctcttgcaaaagcccagctcctagagagcaggagccttcccagactgtgtcaaattacctcggggatggagagacttacatggcattaatagaaatcaaatggcagagctcgggtttctggtaagagcgggtcctggctccttccttacatgaagacctgtccaacactgcttgctatctcctcctgtgccatctgaaatctgtgcctcaaaccgaccagcagccttctaaatctctttattctaaatttggcgcaaacttctttcatctgtgacttttggagtcttctgctgcatcaccccatgatccaacttggagttgggmtctgtttcattgacttaccagctctcatcataaagaaccttttttagcccccaaagagtctgaacaacagacctcctccacatggaaatggtgaattgatcacactgaaaactattttgaagtcaagcaaggccagcttatgtcactctcctgcagcagagaatgactttcacttgctcactttcacacttgcaaccttccattttccacaaactgtcactgtggtctgttagaaatataaattatgtcatt

SEQ ID NO: 284255 - DNA, 593 bp, Homo sapiens
ttttctgtctgcagcatctcttgcaaaagcccagctcctagagagcaggagccttcccagactgtgtcaaattacctcggggatggagagacttacatggcattaatagaaatcaaatggcagagctcgggtttctggtaagagcgggtcctggctccttccttacatgaagacctgtccaacactgcttgctatctcctcctgtgccatctgaaatctgtgcctcaaaccgaccagcagccttctaaatctctttattctaaatttggcgcaaacttctttcatctgtgacttttggagtcttctgctgcatcaccccatgatccaacttggagttgggctctgtttcattgacttaccagctctcatcataaagaaccttttttagcccccaaagagtctgaacaacagacctcctccacatggaaatggtgaattgatcacactgaaaactattttgaagtcaagcaaggccagcttatgtcrctctcctgcagcagagaatgactttcacttgctcactttcacacttgcaaccttccattttccacaaactgtcactgtggtctgttagaaatataaattatgtcatt

SEQ ID NO: 284256 - DNA, 539 bp, Homo sapiens
gactgttctgagttctttacatacataaagtacttaatcctattaggtgtgcacctttactatctttgttttatagatgaggaatacaggtgccaaaaggttacataacttttccaaggtcacacagttggctagtggcagagctagaattcatatccaggcagggacaygcatgcataacccctgtgtttgctgcatgggtatgtttaggtaataaagcaaatattgactgaatgctttctacaaggaagacagtatgtggcgtgctgcaagctgccttgctaagccccagaggggccccactgaccatagtctagttaaatgcagtgcatagcctgcacagctgtacacagcaaccctagagcacaccaagatgtgatcctttgcctgaaatcggtcagtctgtaaagctgccattatggagagcaaaaaatgtaggagcagagaggactgaaagattaattttgagccttttatctatttaaaaagcacagagttatggggtaagtttgtaggtacatgtttcaaactcatagatt

SEQ ID NO: 284257 - DNA, 581 bp, Homo sapiens
aagctgccgtcgaacatttcctgctgccatccacctttctaagggcaggagaatgttggttttacagagctggcagatctgactcataaaaatcacttaacccrgtattttaattgcccagaatccaggttgctgcctcaatttttttttttttgagatggggttttgctcttgttgcccaggctggagtgcaatgggcgatcttgtcccactacaacctctgcctcccgggttcaagcaattcttctgcctcctgagtagctgggattacgggtgcccaccaccacacccggctaaaattcgtatttttagtcgagacagggttttgccatgttggccaggctggtctagaactcctgacctcaggtgatcaacctgcttcggctcccaaagtgctgggattacaggcataagccaccatgcccagccactgcctcaattttttcgtaaaggagaagtagtctggagctgtgattctccttcctggcaactcctcagagcaaaagccaagaaaagagccttagggttgactgaaccatattatgggctggcagattaaaataagaaaacttggcttttta

SEQ ID NO: 284258 - DNA, 581 bp, Homo sapiens
aagctgccgtcgaacatttcctgctgccatccacctttctaagggcaggagaatgttggttttacagagctggcagatctgactcataaaaatcacttaacccggtattttaattgcccagaatccaggttgctgcctcaatttttttttttttgagatggggttttgctcttgttgcccaggctggagtgcaatgggcgatcttgtcccactacaacctctgcctccygggttcaagcaattcttctgcctcctgagtagctgggattacgggtgcccaccaccacacccggctaaaattcgtatttttagtcgagacagggttttgccatgttggccaggctggtctagaactcctgacctcaggtgatcaacctgcttcggctcccaaagtgctgggattacaggcataagccaccatgcccagccactgcctcaattttttcgtaaaggagaagtagtctggagctgtgattctccttcctggcaactcctcagagcaaaagccaagaaaagagccttagggttgactgaaccatattatgggctggcagattaaaataagaaaacttggcttttta

SEQ ID NO: 284259 - DNA, 581 bp, Homo sapiens
aagctgccgtcgaacatttcctgctgccatccacctttctaagggcaggagaatgttggttttacagagctggcagatctgactcataaaaatcacttaacccggtattttaattgcccagaatccaggttgctgcctcaatttttttttttttgagatggggttttgctcttgttgcccaggctggagtgcaatgggcgatcttgtcccactacaacctctgcctcccgggttcaagcaattcttctgcctcctgagtagctgggattacgggtgcccaccaccacacccggctaaaattcgtatttttagtcgagacagggttttgccatgttggccaggctggtctagaactcctgacctcaggtgatcaacctgcttcggctcccaaagtgctgggattacaggcataagccaccatgcycagccactgcctcaattttttcgtaaaggagaagtagtctggagctgtgattctccttcctggcaactcctcagagcaaaagccaagaaaagagccttagggttgactgaaccatattatgggctggcagattaaaataagaaaacttggcttttta

SEQ ID NO: 284260 - DNA, 544 bp, Homo sapiens
agaagttaggccatgttcttgctatctattgcaccctagagtgaactactttaggccaaacagccaaaatggttcactgaaaaataaatgagaatacgcaccaaaagttcagagcatagcaaagtgaaataaagttcttgccaagtcaacctttgcaaaaaagaaatggagaaggaaatgtgatggtggtaaatagctctgttaaagagmttttaagaaaggaagttaatgaattttctattgtaaataatgtataataaagcaggctatttgaccttctctagtgattttagttgaagaattctaatcctagaggataatgctcagggcaaattatccatcaagttttgttttcattatactcaccaacgtgtgcttggggcctgaatagatcatgacctacacaaagaagatcccacagcctcctttcctaggaaaaaaaactggttagttttaaaactaaattggcagaaggtacaatgacaactacaattttgagatatagggacagtttataatgtacctcaagcaagttgttacatat

SEQ ID NO: 284261 - DNA, 618 bp, Homo sapiens
cctgtcatcccttttgtaaaagcatgagtgagcagacagtctagggaaagaacgtcacttgatacatgttatctgaagtccacagttccttctctctgtttgttctaccagacccaaatgtgttgtgccttctgcatgttctattcaggattaccttctgttgaatctaagctccagtcccctataaaagggaaaaacatgcaagagaacaaactgtttcattgtaactaagagtgtgatacagaagttgctcacattacttctgttcacatagctttgtccaaacttagtcatgttgcttcaaggagcctgagagtacagtttttaactggtaagctatacaccacactaaaacttggggtttctattactaaaaggaagaatggaagaaatgatactggggactaacagcagtctccaccamagaaataataacccttaaatatggtaaagagtctatctttgctgtctttgctacgtttctctttttctctctaccaatgggcttcattttatcttattgcaggatacacagcaagaagtatggtaatcaatggccctgtgtttatacttccctagtttcaaacttgccttctccaacaggtagactcaatggtt

SEQ ID NO: 284262 - DNA, 480 bp, Homo sapiens
tttctttcttctgaccatttttcatatgacttgctccatttctccatttttgctctcatactatttgtattattttgaaaattagtgaattacctgcaattgaaatcatatattttttctctcatttgaatatctccattcttttcattttgttcctcaattttcttaaaattttrtggatacgaattcagaatgtagacattctttcagttagattgaggttactcattataggcctcactcaatctgcaaagtaatgcagcacattagattaacaatcatgtactctctgctgtaggatggcatcccaccaatgtctgattataagtatcaagattagagccttcctctaacacagccattgggagttcagaatttgtctgtctagaaatatgctgccatcagtatgtggataattaatataatgggaagtaatgaaatgggggtaaaggtaccagggcctcatggtaggagaaattt

SEQ ID NO: 284263 - DNA, 606 bp, Homo sapiens
atttctgcatttccaagtaaggtacctggttcatctcactgggactggttggacagggggtgcagcccacggagggcaagccaaagcagagtgggctgtcacctcatctgggaagagcaaggggtcagggaattttctcccctacccaagggaagctgtgagggactgagcctgaggaaccatgtgcactccggcccagatactgagcttgtcccatgaccttcataacccacagaccaggagattccctctggtgcctaccctaccagggccctgggtttcaagcacaaaactgggcagccatttgggcagacactgagctagctgcaggagtttttgttgttgttgttgtttgtttttccatacccctatggcgcctggatcaccagcaagacagaaccatccacttccctggaaaggggtgctgaagccagagagccaagtgatctggctcagygactcccacccccacagagcccagcaaactaagatccactggcttaaaattctcgctgccagcacagcagcagtctgagatcaaccctgacactggagcttgttggggaggggcatccatcattgctgaagcttgagtaggtggtttta

SEQ ID NO: 284264 - DNA, 591 bp, Homo sapiens
ggggtaagatggggagacaggctkggctggttattcgttgctcactgcagagatgaaagacacatgtttggatgaaagtcaaaggaaggcagaataaaccggcaactcagacagttggaatcttaaaaaaggagtctggtgacactgctcttagatagaatagcaattaaatagagaaatgttacttgtcccatcgaatattgaatccatttaagaagaaataaaaagcaatgcaatgtctttatctttgaaataatgcgggcagacttttaagcatttcaagacaatatctttgggagtccaattttcttgtcttcttaatgccgaaaggatggaattaatctgttctaattaaagatatcctcaaaaagatcactgccactttactccaataaaaaaaaaactcgtcataaaaatacaaattagaagtaaaagttgaagtgcatcgtttccttataatgtttttattttatcaataaattaatattgttaatgtcattcattttccaagaagatgacatgaggatttatgttactctttgaaacattctgctttcatcttaggaggaacccagtttaagctttgaaata

SEQ ID NO: 284265 - DNA, 600 bp, Homo sapiens
ggtatttgtatacatattatttaattttttgattgccctacaaagtaagtattattatgtccattttaggataagaaaattagatgctcaaaaagttcaagaaatttaagcaagtcacttgggctggtaaatgacagtgagattccaaccaggtttgtctgattttgaaaattcatgcatttttttactacaaggaataaagccagacgcattgaaacagcaaagtttcagagttccaagcaacaaaattcatacttggcaggcataagcagtaaaggaattttactgaaagactgttagaaagttcacagaatcgttgggagcactgaagaaacatgctggagtttcccagacaggagcagtgcttcatcataccacagaactcatctactggaaaaaatagccaccggcagagccggcgtggtcatgaaaggctggggctgacatcactgctggaataccctgggaactcaggctcactgctrccaagatcacttccaaagagcactccctacaatctctgcttctctgcatgactaagctcccaggtatttagtccttgcttaacactttatctcacttaatgtattttgtaggtat

SEQ ID NO: 284266 - DNA, 561 bp, Homo sapiens
tcatccgcttatgtagaccagacacctgacataaggcatctgcagcagagaaggaaatgttgtctgctctttcccttctgtaactctagcctcttagaggatggatggaaacatgacaacacccaaaactcctcctccctcttctgctgggtytaacctctcacatggctagggggcagcgagaaagaatgaatctttctgcaaatctccctttgcttaattccctgcagttttagttatttccttggtgtcactactctcttgagtcaagacctccatgcggtaggcatccacatggtggctcactcctggaactcctatgtacattcttcattgcgtcatgcagggctgactcactgcacagctccctagtgtgggaggcaggggcccaactcggcctcttctactctaccttagcatcctctatgtgtgatacattccaccttcacttgctgctgagcttttttccgtatggctcaagtggttcgatcccagatatctaccatgttattaacttgatacatgagggtatcattacaccaccaaatctggggaatgcag

SEQ ID NO: 284267 - DNA, 561 bp, Homo sapiens
tcatccgcttatgtagaccagacacctgacataaggcatctgcagcagagaaggaaatgttgtctgctctttcccttctgtaactctagcctcttagaggatggatggaaacatgacaacacccaaaactcctcctccctcttctgctgggtttaacctctcacatggctagggggcagcgagaaagaatgaatctttctgcaaatctccctttgcttaattccctgcagttttagttatttccttggtgtcactactctcttgagtcaagacctccatgcggtaggcatccacatggtggctcactcctggaactcctatgtacattcttcrttgcgtcatgcagggctgactcactgcacagctccctagtgtgggaggcaggggcccaactcggcctcttctactctaccttagcatcctctatgtgtgatacattccaccttcacttgctgctgagcttttttccgtatggctcaagtggttcgatcccagatatctaccatgttattaacttgatacatgagggtatcattacaccaccaaatctggggaatgcag

SEQ ID NO: 284268 - DNA, 561 bp, Homo sapiens
tcatccgcttatgtagaccagacacctgacataaggcatctgcagcagagaaggaaatgttgtctgctctttcccttctgtaactctagcctcttagaggatggatggaaacatgacaacacccaaaactcctcctccctcttctgctgggtttaacctctcacatggctagggggcagcgagaaagaatgaatctttctgcaaatctccctttgcttaattccctgcagttttagttatttccttggtgtcactactctcttgagtcaagacctccatgcggtaggcatccacatggtggctcactcctggaactcctatgtacattcttcattgcgtcatgcagggctgactcactgcacagctccctagtgtgggaggcaggggcccaactcrgcctcttctactctaccttagcatcctctatgtgtgatacattccaccttcacttgctgctgagcttttttccgtatggctcaagtggttcgatcccagatatctaccatgttattaacttgatacatgagggtatcattacaccaccaaatctggggaatgcag

SEQ ID NO: 284269 - DNA, 593 bp, Homo sapiens
ctgaccctggaggctctttccccgctccccagtctttttaaatgggctgagaaaggtgtgatttggtggtggctagtggtacttctgtaccccttattaagccttgtaaacataagtctgtccccaaatgtgaaaattattttttaattaggaaattttttaattaggaaaattatttttaagtaggaatgcttaatacctgttattttcatctatgggccctaatgcaatttcctgggcaacagaaaatacctttctacagagaaagacaaaaaaagaaagaaacatagaggttttctgtgcatgtttgtttgttttgttttatrgaagagtgaataacttcaataaaatacctacgaggaatgttaagggtctagtcgtgtgggggttttttaataatactttaacattattaatgatcagcatttaatttcgcccaggcaatatgctaagctctttagatacgtcatttcactccatccaattaaaagtccttaattttaccacctccgttttacagatgacgaaactgagacttacagaaattaatttgccaaggtcagaaaattcttcctaagttgacatttaaatca

SEQ ID NO: 284270 - DNA, 586 bp, Homo sapiens
ataaatggcaatgaactttttaaatgactagataaataattgatagtattaaagaactgtgaaatgataacaagacagtataataattgtctagytagcatcattagactgatgatttgacactgctaccaactaaaacattatcttcttttaaggcagccctgagtagctttatgctttatgtgtatagtataaacttgaatgtctttaaagtttctataatttaacatttttattaggctttcctaagattctgatttattggcaattacaattgagggatgttcctcatacttcccaggacttcccaagttgtttcatacagtgtgggcagatttctagacattgttgttaccctgattacttatacctaagcaggtgtgatgtttaataactgcaatagtaataggaataagtagataacaccgccgtagtgctaagtcataagtgctttacacagactaactctttactagtcagcactctatcattagctccattttagaggtgaggttattgagacccaccactggtaagtgacagaactgcgggatttcatcctaggttcttgtattcacctataaat

SEQ ID NO: 284271 - DNA, 586 bp, Homo sapiens
ataaatggcaatgaactttttaaatgactagataaataattgatagtattaaagaactgtgaaatgataacaagacagtataataattgtctagttagcatcattagactgatgatttgacactgctaccaactaaaacattatcttcttttaaggcagccctgagtagctttatgctttatgtgtatagtataaacttgaatgtctttraagtttctataatttaacatttttattaggctttcctaagattctgatttattggcaattacaattgagggatgttcctcatacttcccaggacttcccaagttgtttcatacagtgtgggcagatttctagacattgttgttaccctgattacttatacctaagcaggtgtgatgtttaataactgcaatagtaataggaataagtagataacaccgccgtagtgctaagtcataagtgctttacacagactaactctttactagtcagcactctatcattagctccattttagaggtgaggttattgagacccaccactggtaagtgacagaactgcgggatttcatcctaggttcttgtattcacctataaat

SEQ ID NO: 284272 - DNA, 586 bp, Homo sapiens
ataaatggcaatgaactttttaaatgactagataaataattgatagtattaaagaactgtgaaatgataacaagacagtataataattgtctagttagcatcattagactgatgatttgacactgctaccaactaaaacattatcttcttttaaggcagccctgagtagctttatgctttatgtgtatagtataaacttgaatgtctttaaagtttctataatttaacatttttattaggctttcctaagattctgatttattggcaattacaattgagggatgttcctcatacttcccrggacttcccaagttgtttcatacagtgtgggcagatttctagacattgttgttaccctgattacttatacctaagcaggtgtgatgtttaataactgcaatagtaataggaataagtagataacaccgccgtagtgctaagtcataagtgctttacacagactaactctttactagtcagcactctatcattagctccattttagaggtgaggttattgagacccaccactggtaagtgacagaactgcgggatttcatcctaggttcttgtattcacctataaat

SEQ ID NO: 284273 - DNA, 1144 bp, Homo sapiens
ataaatggcaatgaactttttaaatgactagataaataattgatagtattaaagaactgtgaaatgataacaagacagtataataattgtctagttagcatcattagactgatgatttgacactgctaccaactaaaacattatcttcttttaaggcagccctgagtagctttatgctttatgtgtatagtataaacttgaatgtctttaaagtttctataatttaacatttttattaggctttcctaagattctgatttattggcaattacaattgagggatgttcctcatacttcccaggacttcccaagttgtttcatayagtgtgggcagatttctagacattgttgttaccctgattacttatacctaagcaggtgtgatgtttaataactgcaatagtaataggaataagtagataacaccgccgtagtgctaagtcataagtgctttacacagactaactctttactagtcagcactctatcattagctccattttagaggtgaggttattgagacccaccactggtaagtgacagaactgcgggatttcatcctaggttcttgtattcacctataaatwagtaatatctaaacaaggggagggggtggccctgagcttataagggtctctaagagccaggagacagtcagcctggctacctctaatctcaccatcaaaactgttaccttgttcattttctgcttcacatcagcaaagagaatagcaaaagcaacttcaagcggcccatagcaagaacatacattcaacatccattctgcttgwcagatgtcaataatttaatctcaactgctttgttatcattcaaaccccaaaagtagaaatgtttttgctttactcaaactgattttttttctcttttagcaaaaacaaaagcaaaggaatgaatgttcattttatctcaaagttctgagaaagagggtttggtaacaagatatatgtccttgcctccaaagtcatctttcaactaagtgaatgggaataaaatgcagagtatgctggccttgaccaataatacaaatgtccaaattccaagcaaagtccagggtcttgcttcatcattccctgtcctcaaaaatatacagatcccttttttcctttttcctataatgaggaaa

SEQ ID NO: 284274 - DNA, 1143 bp, Homo sapiens
cagcatgaaaatgcactaatacacccccagtcacagaaagggtctaacttgatgtatcagtcccaagtcccaagctggcccagtttcagacagaccttcccctggtccagtcagctaggctttagcatctgagtcatatgggaccaacgtgactgtcaggatacatacactctctggctggggatttgtggggaggggatatgttaatattctattgctgctataacaaatgatcacattttggcttaaccaatttgaatttgttatcctacagttatagaggtcaacagtctaatgtgggtttcactgggctaaaatcaaggagctggcacggctgtgttccattctggagactctgggggagaatccatttatttgccttccccagctcctagatgctgcccacgttctttggttcacggccccaccctctttctcygaagccaggtatgatgggtggagatcttctcacatcgcatcactctgacactgactgtcctgcctccctcttccacatttaaggacccctgtcatgacattgggcccacccagatagtccaagataagccccctatctgaaggctagcwaacatagttgaaagaaattaatgacaacccaaataattaaaaaggcatcctatgttcatggattagaagacttaatattattaagatggcaatatttttcaattaatctgcatctgatatgatgcctatcaaaattccawctgccctttttgcagaaaccgacaagctattaaaatttatatgaaaatgtaagagacccagaaaagccaaaacaaactttaaaaacacaaagtcagagaacttagacttcctaatttcaaaactcactatgaaactataataatcaatatgtgatatctagagtagtcaaattcacagaaacagaaagtagaatggtggttgccaggggtggaggatggagaacagggagttattatttaaaaagtacagagtttcagttttgcaagatggatggtggtgatggttacctaacagtgtgaatgtacttaatgttgttgaactgttcactaaaaaattatgaagaggaaaaattttatgttatgtatacttcaccacaatttaaataaataaataatccaaaaaatgaaaaaaata

SEQ ID NO: 284275 - DNA, 555 bp, Homo sapiens
aacatagttgaaagaaattaatgacaacccaaataattaaaaaggcatcctatgttcatggattagaagacttaatattattaagatggcaatatttttcaattaatctgcatctgatatgatgcctatcaaaattccatctgccctttttgcagaaaccgacaagctattaaaatttatatgaaaatgtaagagacccagaaaagccaaaacaaactttaaaaacacaaagtcagagaacttagacttcctaatttcaaaactcactatgaaactataataatcaatatgtgrtatctagagtagtcaaattcacagaaacagaaagtagaatggtggttgccaggggtggaggatggagaacagggagttattatttaaaaagtacagagtttcagttttgcaagatggatggtggtgatggttacctaacagtgtgaatgtacttaatgttgttgaactgttcactaaaaaattatgaagaggaaaaattttatgttatgtatacttcaccacaatttaaataaataaataatccaaaaaatgaaaaaaata

SEQ ID NO: 284276 - DNA, 327 bp, Homo sapiens
ttatcactgcatcatccgttcatccattcatgtgttctataagccctggcagagcagccaccatggcctggccctgggaatgggcagagtggtttagagatrgtgaagatttatcctgtgccccctagaaatttgcagatgtgcctccactgactacagaggagagagagggagggatgctgttgactttgaaatcagagagggcttcctggaggaggtgatgtttcagctggcgcttaaaggaggagggagacttcaccaggtggagtgtgatacagatatatattctgaaccaagggaatagttgagggtgagtatggggacttg

SEQ ID NO: 284277 - DNA, 485 bp, Homo sapiens
attaacttcatctgtagctcaaggaacactttaaataacctaatcaatctatctaaagctactaacatttytgtttctagtcaaatgttaagctttatggaaagtcctaatgaaattttcagggaatgcatttcccatttcagaccactagggaccaataggtgccttccattcccgagtcagttactgaacagttaatagaattaacatgctgcgaaaataagcatgtattaccttctccctaatagaaccaaatcattagctgtaaaacagctgagaagaactgaacactatataggcaaaaaagggaatgctcaaatgagattttaaaaggacgactagttcaaatggtgtagttgttaaatcatcatctactctggaaaactttctactttctgtttccccatggtagaattattgaacaagaaaattgaaatactaaaaccatgcttttctaacttaaaggtggatgaaactgcaatacc

SEQ ID NO: 284278 - DNA, 485 bp, Homo sapiens
attaacttcatctgtagctcaaggaacactttaaataacctaatcaatctatctaaagctactaacatttttgtttctagtcaaatgttaagctttatggaaagtcctaatgaaattttcagggaatgcatttcccatttcagaccactagggaccaataggtgccttccattcccgagtcagttactgaacagttaatagaattaacatgctgcgaaaataagcatgtattaccttctccctaatagaaccaaatcattagctgtaaaayagctgagaagaactgaacactatataggcaaaaaagggaatgctcaaatgagattttaaaaggacgactagttcaaatggtgtagttgttaaatcatcatctactctggaaaactttctactttctgtttccccatggtagaattattgaacaagaaaattgaaatactaaaaccatgcttttctaacttaaaggtggatgaaactgcaatacc

SEQ ID NO: 284279 - DNA, 662 bp, Homo sapiens
tctaaacctccattgtttcccaatcctacttctgtatggtttggccctatctcctgtccttcctgcctctcatggactcactgtacctgttgcatgatactgcttctttgaatcatgctccctcaactgaaatcccctaactatgattatactcaacccttaggtaaaatttataatccaggtggtcccagctcaacctttgggtcccaacactggcacagaaagtcaacactgcctctgaaaaggaaatcaaggaggacctggggaatcaatgctaaaaaagttacagttgttactcatacctgagttgttgtgctacctgtgtctgcttttccactagaatgtaaatgtgttgagggaggaacggaatcttagtaataaaagctactatttactgaatgtttactcttaataccggactaagtataaatgtgcatcatgtaatattcaagaatcatgtgagkatcacagagctttagaactgcaatgagccttggacagagatcacctagccccaaaactgagagagacagtagattaacagttattcattaattcaagaagtatttattaagcacctgcatccccacactgttctagaagctacagattcagtgctaacaacacaaagttcttcattttcagaaaacatatattcgagt

SEQ ID NO: 284280 - DNA, 647 bp, Homo sapiens
atgcccagcccacactacggtcacaggagtcttttgagtgaatgaggctctcaccacagtctgggaataagaagataaataaacaaaggaggtggcaaaataaatgcaaaccaaaggatgcaagaggctagggggtggagaaccaatgggcttggtgaatatggggaatatgaggaataaaggaatatggagatgggaagatctagagggaagaaggaaccatagatgactagtggaaaacaacgatactgtgaatggaaacaaagaagtcaggagggcaggcttattatggataatgtttgtggaaatggaaagactgaacaaggggtaacctgatgaagcccaccgttcaacctgccttgcctgcttttcatcacttttttctagttccaaactcccactagcaagtcgagttgccaaacaacacataactaaactcccaatagcttccttataaataataactgactgtggctcactacaataactggtgcttaaagtttttctccaggaactaggaggcagctcttgctcattaaagctggttgagacccccaayccttcaactgggcctgtgtgaatgcccaagaggtgatcttttgacatcagagggccaaaacactcctccctcagatggtgctgacgcc

SEQ ID NO: 284281 - DNA, 541 bp, Homo sapiens
caaggttcaaaactgggttacaagaagccttgcagctccttctcagtctcttggaatgcttgctctgtgataaaccagccagcatctacagagcccgactgcagggaggccaccatgctgtgaggaagcccaagatagtcatgtggagaggctgtgtggagagccagcaagtgagtgagagagagagagagagcaagaagagagagaaagacacacacacacacacacacacacacacacacacacacacgacacgggatggggggagggagagaaagagagagagttaccgagataccgagatactgagccagtttccactgttctggactcgtgaatgaagaggccaccygggatgtccagctcagtggaggcttctgatgaccccagccccagctgccatctgactgcaaccacatgagaaaccccaagcaagaaccacccttctgagcccagtcagccacggaattgtgagacaggataatgaattgttgttttcagttttggggatggttcgtgatgcagcaatagataaccagaa

SEQ ID NO: 284282 - DNA, 541 bp, Homo sapiens
caaggttcaaaactgggttacaagaagccttgcagctccttctcagtctcttggaatgcttgctctgtgataaaccagccagcatctacagagcccgactgcagggaggccaccatgctgtgaggaagcccaagatagtcatgtggagaggctgtgtggagagccagcaagtgagtgagagagagagagagagcaagaagagagagaaagacacacacacacacacacacacacacacacacacacacacgacacgggatggggggagggagagaaagagagagagttaccgagataccgagatactgagccagtttccactgttctggactcgtgaatgaagaggccacccgggatgtccagctcagtggaggcttctgatgaccccagccccagctgccatctgactgcaaccacatgagaaaccccaagcaagaaccacccttctgagcccagtcagccacrgaattgtgagacaggataatgaattgttgttttcagttttggggatggttcgtgatgcagcaatagataaccagaa

SEQ ID NO: 284283 - DNA, 594 bp, Homo sapiens
acaggcgttcatcagcctggaagggaggccttatcagaaactgaacttgctggtaccttgatcttggacttcagcctccagaaaygtgagaaataaatttctgttgtttaagccacccactctgtggctttttgttgtggcaggctgaatagactcatacattaccaaaagcacaaaaagcagtttcgaaaattctagagtgaggtttgcgaagatcacttttctaatcctgttggtaaatagtccttgcaatgccaccacccagctccagggaggccagcgacagagggtgtgagaaccaggccccagattacttttctactttcatacctaaccataagatggaagcattgtctgaagacagactgagggagagtgttctcagaattttaatcattgcctgtgtagttgctgttctgcgaacactgagatcatctcctcttgtatagaaaattaataccaagaggtaatgtgttgtcgttttttttaatgtaaaatgcttaacccatctctgcatattctggcaatataaccaaactcttgacaaggagttgaaaagaacaagcttagagactggagacacaattttgggga

SEQ ID NO: 284284 - DNA, 628 bp, Homo sapiens
tgtggtctggcttctttaacttagcataatatttttaaggttcatccatgtcatggcatgtatcggtacttcatttctttctgttgctgggtaatattccattctacaggcacactgtattttatttatccatttatcagttgatggacatttgggttatttctactttttggctattctggataatgctgctgtgaacattcatgcacatgtttttgtgtggacataggttttcatttatcttggctatacacctaggagtggaagtgctgggccatatggtaatactaccggactattttccagctaaaaarctgccgtaacattttacattcccaccagctgtgtatgaggagggttccaatttttccacatccttgtcagtaactgttattatctctcttttgatactagccatcctagtagggatgaagtaatgtaaaaggtttttaatgccattttattgtcggatttcaaagtctaaactttggtgtcagatgaagtcacttcagaccctgcgcttctagttatgaagcatgcgattgtggacagggtgtctaaacctcccttaagacgtggtttcctcatctgtaaacatggaaaatattagttcttgggttggttgtag

SEQ ID NO: 284285 - DNA, 626 bp, Homo sapiens
ttcaagctaaatgttactacaaaagagtaaaaaattaaattaaaagtttataaagtaaaaatattacagtaagctaaggttaatttgttattgaagaaagaaagtctttcaaaaaataaatgtagtatagcctaagtgtacagtgtttacaaagcatagagtactggtcagtagtgtcctaggccatcacattcactcaccagtcattcactcactcatccagagcaacttccagccctgcaagctccagttacggtaagtaccctatacaggtgtaccattttaaaaatcttttatgacatatttttactgtactgtttctatgtttagttatatttagatacgcaaatacttgccgttgagttatagttgcctacagtgtcagcacagtgatgtgctctatgggtttgtagtccargagcaataggtcatgccatacagatgaggtgtgtgccatctagatttgtgaaagtacactctgtgatgttcacataggatgaaatcacctcataacacatttctcagaatatatgctcattgttaagcaactgataactgtagcaccgttgaaaaccatagatgaagagaaagagagaaaggcggaggttgcagtgagtcgagatcac

SEQ ID NO: 284286 - DNA, 578 bp, Homo sapiens
aaaattccatatagaaagttatgcaatatttttctttctgtgtctggctcatttcacttagcatattttctccaggtcacctacrctgtggcaaattacaagatctccttcttttttaaggctgaataatattccacacacatacacactacacacacacacacacacacacacacaccccacagtttatttgttcattcttctgatgatgggcacttaggttgattttatatcttggctattgtgaataatgctgcattgaatacaggagtgcagagatctttacagctggaaactccgttttcttttggtgtatacccaaaagggaaattatttttaatttctttacgaacctccatattattttccataatggctgtgttttatgtctttgtaccacctaaaattctttctggaagaaaggagaactataaagaaataaaattcatagtcacctttgtatcgtccatagcatcttgcacgggattgtacttgttataagattaataagtgtatactgaataaatgaaaaacactggatgtggcttgttggaggtctagataaggccttgatgtga

SEQ ID NO: 284287 - DNA, 615 bp, Homo sapiens
tatgcaaacactgtcaaaactgaataacaaagatgaaacaaaaactttagaaagtctttcaaaacaaaaccaactaataagatttttaatgtaaaaggaaatggacattaccaatgygtcaaaattctaggataagaaggcccaatcactaatcattgcccatttgattcactcatttttcctagtagttgttactacttctgtctttttttaaaatgaagaaaacattaaagtaatattacttctgttgaaacttggtatctatagcttataccttgtgatgttaattaaaaacataatttttatgtacttatcacaaaggaaatatcatttcattaaaatccaattagattcagacaatatctgtaaagactatgaaatcactgctgtttgaacataggcagctttgttctgttttcattacttgaataaaagcaaccacaacaaacaatcaaagaaaaaaaattattaatctctgaggttacagacacacttgcattttgaatagtattttgttagggaggaaaaaacatggaagattttatgttgcatagactacaatttagttgacctcatttctaattattcttatttgtctctctccaggaaaaataa

SEQ ID NO: 284288 - DNA, 615 bp, Homo sapiens
tatgcaaacactgtcaaaactgaataacaaagatgaaacaaaaactttagaaagtctttcaaaacaaaaccaactaataagatttttaatgtaaaaggaaatggacattaccaatgtgtcaaaattctaggataagaaggcccaatcactaatcattgcccatttgattcactcatttttcctagtagttgttactacttctgtctttttttaaaatgaagaaaacattaaagtaatattacttctgttgaaacttggtatctatagcttataccttgtgatgttaattaaaaacataatttttatgtacttatcacaaaggaaatatcatttcattaaaatccaattagattcagacaatatctgtaaagactatgaaatcactgctgtttgaacataggcagctttgttctgttttcattacttgaataaaagcaaccacaacaaacaatcaaagaaaaaaaattattaatctctgaggttacagacacacttgcattttgaatagtattttgttagggaggaaaaaacatggaagattttaygttgcatagactacaatttagttgacctcatttctaattattcttatttgtctctctccaggaaaaataa

SEQ ID NO: 284289 - DNA, 580 bp, Homo sapiens
cagaaagcaagagcaccacctttgaataaaatacttgattttttaaaacaaattagacattccactcaacaaacttgaacttatttgtatttggagctttttattccactctcaactgtaaaatctgagggcagagactgcgtctgttgtacacagtgacatgcacaggtgaatgaatcaatttattggccatataaaataaggaaaactatttgcaaacttgacataacttacccatgtttcccaaataaataaattatctcagcttttcagtttcttaaagtccgtgtagaattagtaaactgttraaaatctgtaaatggatttaaattgtatgcgatctcatactttatcttgctcaactgcctaaattttcataaagaaatgcaaactatgatttaagcgattaactcaatgtcatgtggatgacattgcaagttaaatatatgtagaaaaagaataataacgaacaaacttggacccacttataggacacttctagattcctgggaaactaaaacatatagttaccaactatgagaaagatcatgcagaaagaggacagcaacaaaatgagtac

SEQ ID NO: 284290 - DNA, 580 bp, Homo sapiens
cagaaagcaagagcaccacctttgaataaaatacttgattttttaaaacaaattagacattccactcaacaaacttgaacttatttgtatttggagctttttattccactctcaactgtaaaatctgagggcagagactgcgtctgttgtacacagtgacatgcacaggtgaatgaatcaatttattggccatataaaataaggaaaactatttgcaaacttgacataacttacccatgtttcccaaataaataaattatctcagcttttcagtttcttaaagtccgtgtagaattagtaaactgttgaaaatctgtaaatggatttaaattgtatgcratctcatactttatcttgctcaactgcctaaattttcataaagaaatgcaaactatgatttaagcgattaactcaatgtcatgtggatgacattgcaagttaaatatatgtagaaaaagaataataacgaacaaacttggacccacttataggacacttctagattcctgggaaactaaaacatatagttaccaactatgagaaagatcatgcagaaagaggacagcaacaaaatgagtac

SEQ ID NO: 284291 - DNA, 1239 bp, Homo sapiens
cagaaagcaagagcaccacctttgaataaaatacttgattttttaaaacaaattagacattccactcaacaaacttgaacttatttgtatttggagctttttattccactctcaactgtaaaatctgagggcagagactgcgtctgttgtacacagtgacatgcacaggtgaatgaatcaatttattggccatataaaataaggaaaactatttgcaaacttgacataacttacccatgtttcccaaataaataaattatctcagcttttcagtttcttaaagtccgtgtagaattagtaaactgttgaaaatctgtaaatggatttaaattgtatgcgatctcatactttatcttgctcaactgcctaaattttcataaagaaatgcaaactatgatttaagcgattaactcaatgtcatgtggatgacattgcaagttaaatatatgtagaaaaagaataataacgaacaaacttggacccacttatagracacttctagattcctgggaaactaaaacatatagttaccaactatgagaaagatcatgcagaaagaggacagcaacaaaatgagtacwggcttccttaccacttgtgttattctaacctcacagtgatctttcagataggcaaatctgatcatggcacttattcttcatgtctcagctctgcaactcctgttgcacccattttccagacaagccagtgagtgacagcaatggagttgcacatagaattgtgctaagactacgattctcaggcttcatcatgcatgaaaaacaatcctcacgcttgccaagagtgtggaatctcawttcttcccaccttcctaccatctttctatcctttgccatttctagaatggcaccttttcaattgcctttgtgcttcaatcccttttgttctcttactcatctgagagagttgtctatgtttcaggtaaaaggtcaaccattttatcatctggtctaggaggtctaattgactgcattaggcagattaaatcctctttcatcttttcatattgtattttattcttaatgtttacttgcctgcctctgtcatgcatgaaaaagtattgataacaaaattcgtttacagatatttttattaccaagataaacaaaatgtcaagcatagaggatgctcttaataaatatttgttgaattaattttagcacagatattagctagattcaccttgctgtgtttcagatctaaataatgttgacatgt

SEQ ID NO: 284292 - DNA, 658 bp, Homo sapiens
ggcttccttaccacttgtgttattctaacctcacagtgatctttcagataggcaaatctgatcatggcacttattcttcatgtctcagctctgcaactcctgttgcacccattttccagacaagccagtgagtgacagcaatggagttgcacatagaattgtgctaagactacgattctcaggcttcatcatgcatgaaaaacaatcctcacgcttgccaagagtgtggaatctcatttcttcccaccttcctaccatctttctatcctttgccatttctagaatggcaccttttcaattgcctttgtgcttcaatcccttttgttctcttactcatctgagagagttgtctatgtttcaggtaaaaggtcaaccattttatcatctggtctaggaggtctaattgactgcattaggcagattaaatcctctttcatcttttcatattgtattttattcttaatgtttacttgcctgcctctgtcatgcatgaaaaagtattgataacaaaattcgtttacasatatttttattaccaagataaacaaaatgtcaagcatagaggatgctcttaataaatatttgttgaattaattttagcacagatattagctagattcaccttgctgtgtttcagatctaaataatgttgacatgt

SEQ ID NO: 284293 - DNA, 578 bp, Homo sapiens
tccagcctctgactctgtgagaaataagtgtctgttgtttataagctgcccagtctgtggtattttgttacaacagcctgaacagactaagacagttgccttaaaaagaaaaggattaagccatattatgtttcctcattctgctttcctgaaaatctcagctggaaaggaaattytactggataatatttaaagttgcaccttttaaaagaaatttttaaaaatccacttatgtctgagacaggactgtgtattttcaaacaaaatacttttaaagcttagctttttttccctttcacctattaaagcaaactcttttaaagtatagtattttaagataacattttacataataaatcctgaactgcaccattaaggttctgtatgctaaataattctaagctttcagttactcacaccaatcagagatagaatagtaggtacccaaccctatttctctaacagtgggggagaagcaattgaaacatcagtgatgtcctttatcacttacaagatgaactttcattgtttccagatttcacattattttcaattttatataagcaagagtctaaaac

SEQ ID NO: 284294 - DNA, 578 bp, Homo sapiens
tccagcctctgactctgtgagaaataagtgtctgttgtttataagctgcccagtctgtggtattttgttacaacagcctgaacagactaagacagttgccttaaaaagaaaaggattaagccatattatgtttcctcattctgctttcctgaaaatctcagctggaaaggaaattctrctggataatatttaaagttgcaccttttaaaagaaatttttaaaaatccacttatgtctgagacaggactgtgtattttcaaacaaaatacttttaaagcttagctttttttccctttcacctattaaagcaaactcttttaaagtatagtattttaagataacattttacataataaatcctgaactgcaccattaaggttctgtatgctaaataattctaagctttcagttactcacaccaatcagagatagaatagtaggtacccaaccctatttctctaacagtgggggagaagcaattgaaacatcagtgatgtcctttatcacttacaagatgaactttcattgtttccagatttcacattattttcaattttatataagcaagagtctaaaac

SEQ ID NO: 284295 - DNA, 1214 bp, Homo sapiens
tccagcctctgactctgtgagaaataagtgtctgttgtttataagctgcccagtctgtggtattttgttacaacagcctgaacagactaagacagttgccttaaaaagaaaaggattaagccatattatgtttcctcattctgctttcctgaaaatctcagctggaaaggaaattctactggataatatttaaagttgcacsttttaaaagaaatttttaaaaatccacttatgtctgagacaggactgtgtattttcaaacaaaatacttttaaagcttagctttttttccctttcacctattaaagcaaactcttttaaagtatagtattttaagataacattttacataataaatcctgaactgcaccattaaggttctgtatgctaaataattctaagctttcagttactcacaccaatcagagatagaatagtaggtacccaaccctatttctctaacagtgggggagaagcaattgaaacatcagtgatgtcctttatcacttacaagatgaactttcattgtttccagatttcacattattttcaattttatataagcaagagtctaaaacwgtggctaagtttgtcctggctaggtctggttagtttaagtcttcctcactgtactgtagcctcctggtctacctctaacctctgggtcaatattctatgcaaatgaaagcaaacattggtcttgatacataaacatgcttctccatacttatatctctgttaattttcccgaacagcttaattgggtatagctatattattatgagatttttaagacctttattttatttatcatcatttttacttggtctctctccttttcaagactgtgtcttggatttctaactatcttgtatagatataagacattgagcaaggtgtgagaaattctccatatttatatctctgttaattttcccaaacagcttaattgggtatagccatattattatgagatttttaagacctttattttatttatcatcatttttacttggtctctctccttttcaagactgtgtcttggatttctaactatcttgtatggacataagacattgagcaaggtgtgagaatcataatttgaaagcatttatatccttattttgcatttacctataaactacattaattgattatgcttatcatattatactwtattaactataaattatattaattgattatatgtgtta

SEQ ID NO: 284296 - DNA, 538 bp, Homo sapiens
cacaaccattgaggaataagagctaattcagagaaactgagaggtggaacaaacaggttgagttgaatttgaaaatggaagaccatggatatcaagccaaggagtttcagggcctctttcaaaatcacaaatcatgagtgatgattctaagtaagccataaaatccattccaaaatcctcaaaaagtggtttgttcaaattcaaattactcattttacraaaccaaaggatttcccagcataaatgttttcctggtgatgcacacctctgcaattcatacaacaagtgattatttgaagtttgcaatccctttaactttctgctgttcctgttattttacgagtgataacattgcctcttagttctcttaagatgccagcagcattcctccaatatattcctttgcatagtttactgttttccaaagagacgtagtttcattttaaaatctatttcttgacaccaggttttgatctctgcattacattatctgattaagcaaaggtatattttagtagtcatcactaccattagcaag

SEQ ID NO: 284297 - DNA, 462 bp, Homo sapiens
cagcttataaaaaaaaattgtgggatttcttggtctctataatctcatgagccaatccccacaataaatctccttctatatatctatgtcttattgtttctctttctttggagaatcctgacaaatacagcacttttaaatctatagcattctactggccactttcttcccctgccacccygcccgccatgcccaagacttgctctgtcacccaggctggggtgcagtggcacgaactcagctcactgcaacctccacctcttgggttcaagcaattcttctgcctcagcctcccaagtagctgggattacaggtgcccaccaccacactcagctaatttttgtattttcagtagagatggggtttcaccaagttggccaggctagtcttgaactcctgacctcgcaatctgaccaccttggcctctcaaagtgctgggattacaggtgtgagccactgcac

SEQ ID NO: 284298 - DNA, 587 bp, Homo sapiens
gatcaggtttaatctgaaatatatatcaccctgctgtccgtatgatgttgcaggtagagaaaggcaagagtagagaaagaccatggaggtttctcgtgtgatgatccaagtaatagtggaggtaggctgaactaagatgttagcagtgaygatggaaagaaattattgtgtttgaaatatatttaagaggcaggtagaagcagcagggagcatttcttgaagggagaggaatccagattttgttctttatgtaatggggagtccctgcaggtttttgatcagaggagccaggaacagtgctattcatttgcaattcaagataaatcgaatggatgagatgcccaagacagtgaaacctgttaaaaggttattgcaatagatcaaacattaagaatatcaacgtgtcaaggtgaaccataaaactaacagaaaaacaaaacaacagcaacaaagcctgaagttaattttatttagttaaaaaaatgagtattgaaataaaattgattttttaaaatcctggatgtattttattaatttaataatatctgaactcaataacggtaatgttattagctttattgttcata

SEQ ID NO: 284299 - DNA, 563 bp, Homo sapiens
cacaaacttttacaaaaaattaaagcagtttaattcataatattaaaaaattggaacaccccaaatgtccatcaacaagataaacccttctatatagtaatacttagtaataaaaagaaaaaagaattgctatatgaaacaacatgaatggactcctcccaaagcattgctttgcacaaagragccagataaatgacaacatagtacattaggattctatttgtgggaaactctggaaagccaaatctacagtgatagaaagttaatcaatggtaacctggggtaagatgtaaggattagggaatgcctaggaaatgtcacaagggaatctttttgatgatagaagtgctctctatctttattgttaaggtggtaatttcattggatacattcatttgtcaaacctcattgagctttacaatcaaaatgtgtacatttcatcatttataaattatgtctcagtaaagttgattaaaatcaaatcaactaagtaatgtggatcttttaaagcccactgtttaagatgttaagtagctaccaaaacaatgaagaatagaggcatt

SEQ ID NO: 284300 - DNA, 510 bp, Homo sapiens
ctctaaaatgaggtcttcagagtccacctcttaaatatagtgtgatataagttggtatacctaatccacagcactgttgtattggatctaatttaataagtttgttttatgtatacccacacatgcgcccgtgcacacacacatacacacacacattcaccacatatcatagtgtctgatayagtttttttcaggacattccattaagtatcatatacttcagtgtgcaaacatttaataatatacaggaaattaaataaaagcacataattagagagtatttggtactcattttgagggaatatgttgataaatataggatatgtcccccaaaatattatttacttaaaaaaaatgaaaattcatttgaaaataattaaatttaagctcattattttttctgactcctaacatatgaacattacaaagtgttaatagcatctcaatttcttttccatttaattaattatgtctacttacatgagatccaaaatctacaagacattgctt

SEQ ID NO: 284301 - DNA, 582 bp, Homo sapiens
gttcccataaacaccctgacttcacacatgcatgacctcctccattatcagcatccttcaccagggcgacacattttttacaattaatgaacctacattgacacatcataaacagccaaagtccatagtttacagcaggagttcactcttggtgttgtacattcaatgagtttgaacaaatgtataatgacatgtatccatcattattgtgtcatacacagtacttttgctgcccctaaaatcctctgtttctcctcttcatccctctctacctccaccccttgccaaccactgtctcttaaatgtctytaacttttgtctttccctaaatatcatagagttggaatcatacagtatgtagcctttcccaattgacttctttcactcggtagcatgcatttaacttttgtccatatctttctatggcttggtaggtcattcctttttagcactgaattgcctggatgtagcagagtttatccattggctggatgtaccacagcttattctttcacctactgaaggacattcctgaatatttccaagttttgtcagttaagaataaagctactataaacattt

SEQ ID NO: 284302 - DNA, 625 bp, Homo sapiens
aagaggaactggactttaaattttccttctgggcttttccaaatgccatttccattgcctcagtgtcatttaactatagacctacctgaagggttttcggcccagctctctacactctkataataaataatcaagtaacagtgcacaagtcaatatatcaatattttatctgcttcacctagactctcccctctaattcagaatttttaaatggaaaattaaattcatgcttttgcctttactttgctgtggtttccactttttattttacgtgattcttacctaccagctagataacaaaaataattccatctgccccacagtagcccaaactgtcactgcaatcacaatacattcaactactatgttaactatactttgccttattttatacatacttctatccatgtcatctacttaactaaattttatatcttttggtggcagaaagcttgtctttttatcctctgtagcacaagacacagtgccttatacatagtaagttttaaatgctttttttttaccaaaatggaaccccaaaatagtcatccatgtctatgctgataaattaattaattgattcattcattcatttattcttttattccacaaacatgtagcaaag

SEQ ID NO: 284303 - DNA, 579 bp, Homo sapiens
tcacacatctttcattccattcttcggataacagtacatttccatgatactttgcaacatttaatgttttacaactaccacagaagggtttttttttttaaataaaattagatttgtaaaaatagggtaaaaagagctcaacatgtgcaagctatgcagcaaataaagtaatttcctctaagtctgtgatattgccacttaccttagcagtcttgattctccttcatgatggcagttgcttaggacttagagccacagaaaacataaaatacctaggggacatattccagtactgtacattaaatytgaggattttacatgtgataaagtatgtcagtgttgcttacagggaattccagtgatacctcagctttcttggacttattataaatcctttgttggaattattgtggctggttcaataattcagattagccctcatgtttattaatgcactacatctgtgcaaacaacatgtcaagcagagagtttattgtaattgcctgagcaaacagaacctgaaagaagcaatttccagttacaatgtgctatgacaagtaatgaggtaattggcattct

SEQ ID NO: 284304 - DNA, 531 bp, Homo sapiens
attgtcaattctgtgccagatgctatactatgcactggacatagagaaattgaggtagcacagtgctaggcatagaaatgagcctaggagaagacttgctcatgaggtgaagcttaatgacagctgggacttayttgggtgggaaaattgtggtgtgggaagcttcccatgtaaagaacggcatgagtgtctcttgtatgtatttacagcctctgcgcttacttcagcaatgcttttagcataataggtgactgcaattgtttgctgagcaaaattcagtaactatctacataacctactgttgcttgaccctgggcctgccatttcagtcagttgtcctggaagtttccaaatgggtataaagtgggttattttgttttattttatgttatttttattatactttaagtcataggatacatgtgcagaacgtgcaggtttgttacataggtatacacatgccatggaagtttgcggcacccatcaacctgtcatctacattaagtatttctcctaatgctatccctcccc

SEQ ID NO: 284305 - DNA, 613 bp, Homo sapiens
gtaaaatcaatgagaaatctgagtgatgataatttcctttctaacacatgcagtagaatagtcattttgccttattttattctggtttggtgggtttttattacctcaacccaatggctcatacaatcctggaataaagatgaggaaacagtggctcagggaactgggtgatctgcctaaagctcagaatccagactatactctattgttcttttctgatacaagaagaattttgtatttctgtaaggcattatatatgacagttatttcagtggatttttcattgtaggatttctttaacatccaatatgccttctcatagtagtagactattagtaattgatgtacaaacaagaaacaaacggattttaatattttctttagcaaaacaaaataggattttctaaaattttgaaacaattatcctaaatttcaaacaagaaaaagtaatttgtattatgtacagattcaggtaaactacattatttctttctattatcatttatcaacagaagctgattgtaaatrccactatattggattcatttttaagggtaaaatattttaattaactcattcttcctcactttctccatctgcgcaataaaattgc

SEQ ID NO: 284306 - DNA, 564 bp, Homo sapiens
agtcatttccccaaggagccctggccagtagcatcatatttagaagtcaatacctaggtgctaggagagttacccctatatattagggtgacactcttaacataagatattaggagtgtcaccccattaacactggggtgactcttcttccaggtcttgccactggatagaaatacatgtatagacataaacacgtgtatatctatatctatacatctaaatctatttgtttatatcaaaaataatgaattaatattratatctctatcaattcaacattctaggatacattttagttttcactcttatatgtacctcccttttcaaacagtgaagaacctgcttctcttgtccaaaatacacttaaataatctctcccccatatccaactcattcattgacaccatccctgtgcctcaactttccctgctctgccatccccacctggtttactgccagcacctgttacttatcacatggttgttcttcctatgctgctcatgtttaaacaaccattttcatcatccacatttttaaacacagtcaaatttgtgttttggatgg

SEQ ID NO: 284307 - DNA, 563 bp, Homo sapiens
aactataaaggtgaggagcataaggatgacatatggatctttctctctttgttccttaacatggaagaatgcacaccatctgcttcagctggaaactattagtcccggaagtttgactgtcctagaaattccctgtggacccacaagacttgtctgtgactagctatttttttcctgtttgttttaaaattattaattttaattatcctatatttttaaacttattttctcttcttttgggtgacacagtatatcttaatactatgtctcaatacctctctttctttgatatccaattacattgactttttatattttgtcacttttagtcactttctttctcatttaattttttatatctaaattaacactttgaacttttcattcatctttgtccatttttctctagctggtttttctacatttactttaaaatctcacttgttttgttgcttactttttcttctctaacttagcaaatgcatatcaatcacctcctrtatgatagacatcatttattccatgtaattttatcagaaataagatcagatctatcttagaca

SEQ ID NO: 284308 - DNA, 556 bp, Homo sapiens
taggcagggaaagaaccaagcccttttctttcacagctgggaggcagatagcctggggtatgttttcaagcctgtatcgctctccagctggaaatggtctgggggctattgatggggcacaatgggagtgagaccggcccttcagattgcgtgggaactgggtgaggcctgtgactgccgactttcctcaactttcctgacaacctgcatgactcagcagaggcagcaatcatcctcctagatacacaactccaatgacctgggaatctcacccccatccctcccagcagccgcggcaagacctgcccaaggagagkctgaactcagacacacctagccccgccctcacctgatagtccttccctacccaccctggtagtggaagacaaagggcatataatctgggagttctagggccctggccactgccagttcctccccataatatcacagctgatactctctggaaagtgccaccttctggcaggaggccaaccaacacaaaaatagaatattaaaccaccaaagctaagaaccctcatggagtccattgcac

SEQ ID NO: 284309 - DNA, 516 bp, Homo sapiens
tcaatttttttatatttaaaaaatcatctattgggatctggaattcaaatttaatctggtgtctgtattttatctggtagtcttaccaatattatatagcctagtttttaacccagatttgttgtataaaaatacaaagttcaaatatattttattccttccctattataagtaccacatgtttaataattactaagcacagtcattttccccttaaataaaagtaatctttgcattaaattktttattatttaaataatggaaattatatatactctagttcttaaaaacttaactttaaattatccaggtaataatagttattgcagaaaaaatttaaatgcaaacagaaaaggcaagcaacctttataatcctctctttcacagatgacttcttttgtcatttagttttttatatcttctgactttcttatgcaaatagctatatattgctttaaaaaagaatcagtgttatacattcttttaaatacaaagtgacttaaaaaaacacaactt

SEQ ID NO: 284310 - DNA, 538 bp, Homo sapiens
acatattaacattgaagttagagacatattaacttggagygcatttaaaaaacaaaaaacaaaaaaaacaaaaaaaaacaaaaagcagattggtcgctccccagcccagcacaacctccaacttgatcatatttagttagaaatatattattataatagccagaattttctttttttctccctaccttcttctcaaggatataaaattaggtctgaaccaatttagtggcctggagagaaccagactcagacaattttggaagtgccaccctttgacatgttattttctttttttaaatgacggcttaatggccttcagtcacctacagggaggctctgccattcctgtttgtggggctccatgtctgatagcatcatgtggtcacacagcacaaaatcatgatttactaggaccttacaatgcatggtaaggcctttgaaaacatttttttacatgtccactgggacctgttgtgtcagttcataggatttttacaaaacacatacaaagaacaaataaaatgaccccagtcccaaa

SEQ ID NO: 284311 - DNA, 536 bp, Homo sapiens
acatattaacattgaagttagagacatattaacttggagtgcatttaaaaaacaaaaaacaaaaaaaacaaaaaaaaacaaaaarcagattggtcgctccccagcccagcacaacctccaacttgatcatatttagttagaaatatattattataatagccagaattttctttttttctccctaccttcttctcaaggatataaaattaggtctgaaccaatttagtggcctggagagaaccagactcagacaattttggaagtgccaccctttgacatgttattttctttttttaaatgacggcttaatggccttcagtcacctacagggaggctctgccattcctgtttgtggggctccatgtctgatagcatcatgtggtcacacagcacaaaatcatgatttactaggaccttacaatgcatggtaaggcctttgaaaacatttttttacatgtccactgggacctgttgtgtcagttcataggatttttacaaaacacatacaaagaacaaataaaatgaccccagtccca

SEQ ID NO: 284312 - DNA, 580 bp, Homo sapiens
tgcatgttctcattcatacttgggaacgaaaataacagatctcatggaggtaaagagtagaatagtgattggtagaggctgggaagggaggtggggatgaacagaagttgcttaacgtgcacaaaaatacagttagatagaagaaataagctctagtattcaataggacagtagggaaattatagttaataatttattatatatttcaaaataagtagaaaagaattggaacgtttccaatacaaagaaaagataaatgtttgaggtgatgtgtattcccttgatttgatcattatacattgcatattacacatcagtggtcctcaacccccgggccatggaccagtatggtctgtggcctgataggaatcccacagcacagcaggaggtgagtggtgggtgagccagcattaccaccygagctccgactcctgtcagatcagcggcattagattctcataggagcacaaaccctattgtgaactgtgcatgtgagggatctgggttgtgtgcatcttatgagaatctaatgcctgatgatctgaggtggaacaatttcatggcaaaaccaaccccctcc

SEQ ID NO: 284313 - DNA, 606 bp, Homo sapiens
cctggggcatcacatttacaatttgctctcagaatttttgtaacttttaagtatgaagttacttaaatatagataaaaaaactagaaggcacttttaatatacatagtaagrgaataagaggatggcatgaagagaaaaaagtctgcatttgtacaaatttaaatcttttcaaagaaaaagacaaatttttaaacaaaattcacattctatttagattgaaataaatgatacaaaattgactttcttcaccaaaaataacagcaatattttccatatttttctagataaaccacaacacttatttttgtaggttttccaggttttgcttataaatgaagacaagtcatggaaaaagacagaaaaaaacagataaatgagttgtcagtatccatggcctctgattctgtcttatccatgaaacagaagtgttcaacatatacctgctaagaagcttaggaagctgtaggctccacagaggaatgtaaacagaaacaaccagatgtggaacaatggcagacttcaattcaaactttaactgtcatttgttcccttaagttcatttgagaaagacaaaatctacactgaaatccttgtttggtgagctc

SEQ ID NO: 284314 - DNA, 606 bp, Homo sapiens
cctggggcatcacatttacaatttgctctcagaatttttgtaacttttaagtatgaagttacttaaatatagataaaaaaactagaaggcacttttaatatacatagtaagggaataagaggatggcatgaagagaaaaaagtctgcatttgtacaaatttaaatcttttcaaagaaaaagacaaatttttaaasaaaattcacattctatttagattgaaataaatgatacaaaattgactttcttcaccaaaaataacagcaatattttccatatttttctagataaaccacaacacttatttttgtaggttttccaggttttgcttataaatgaagacaagtcatggaaaaagacagaaaaaaacagataaatgagttgtcagtatccatggcctctgattctgtcttatccatgaaacagaagtgttcaacatatacctgctaagaagcttaggaagctgtaggctccacagaggaatgtaaacagaaacaaccagatgtggaacaatggcagacttcaattcaaactttaactgtcatttgttcccttaagttcatttgagaaagacaaaatctacactgaaatccttgtttggtgagctc

SEQ ID NO: 284315 - DNA, 606 bp, Homo sapiens
cctggggcatcacatttacaatttgctctcagaatttttgtaacttttaagtatgaagttacttaaatatagataaaaaaactagaaggcacttttaatatacatagtaagggaataagaggatggcatgaagagaaaaaagtctgcatttgtacaaatttaaatcttttcaaagaaaaagacaaatttttaaacaaaattcacattctatttagattgaaataaatgatacaaaattgactttcttcaccaaaaataacagcaatattttccatatttttctagataaaccacaacacttatttttgtaggttttccaggttttgcttataaatgaagacaagtcatggaaaaagacagaaaaaaacagataaatgagttgtcagtatccatggcctctgattctgtcttatccatgaaacagaagtgttcaacatatacctgctaagaagcttaggaagctgtaggctccacagaggaatgtaaacagaaacaaccagatgtggaacaatggcagacttcaattcaaactttaactgtcatttgttcccttaagttcatttgagaaagacaaaatctamactgaaatccttgtttggtgagctc

SEQ ID NO: 284316 - DNA, 622 bp, Homo sapiens
ccttccttggcatttgaaattggaggggatgtgtctaaggtactatgtattgtactttgctatgaccacatttattgtttcacaagtgggcttctctattccatttaggcccatgagactgcaaaaggtatttgctagggacatctaattaaaaaaaaaaatctaagtctttatgcaaatggttgatgatgtcccataaayttagcagccatggtttaaccacaagagtcaccagatgaaactgccttagtacagtgcctgttacaaaactagaatacagaacagaacaaacataacgagcctgtgatgccatcatagagttgctaaattaaaaaatccaggaagtttcccttttggatttccaacttgcatcaggcaacattatttgagctgggttgtctgtcacttgtaactaaatgcatactaccaagacaatatttattctattatgtcagtgatgcctgcagggctaataacagtatttgccatattacataaagttactcaggactttctatgttttctaactcatgtgtttaatttgtatagtgtatctctcttctcctgttgttagctattactctatggactaagaaattaattgctaaaagaaaagaatcgt

SEQ ID NO: 284317 - DNA, 622 bp, Homo sapiens
ccttccttggcatttgaaattggaggggatgtgtctaaggtactatgtattgtactttgctatgaccacatttattgtttcacaagtgggcttctctattccatttaggcccatgagactgcaaaaggtatttgctagggacatctaattaaaaaaaaaaatctaagtctttatgcaaatggttgatgatgtcccataaatttagcagccatggtttaaccacaagagtcaccagatgaaactgccttagtacagtgcctgttacaaaactagaatacagaacagaacaaacataacgagcctgtgatgccatcatagagttgctaaattaaaaaatccaggaagtttcccttttggatttccaacttgcatcaggcaacattatttgagctgggttgtctgtcacttgtaactaaatgcatactaccaagacaatatttattctattatgtcartgatgcctgcagggctaataacagtatttgccatattacataaagttactcaggactttctatgttttctaactcatgtgtttaatttgtatagtgtatctctcttctcctgttgttagctattactctatggactaagaaattaattgctaaaagaaaagaatcgt

SEQ ID NO: 284318 - DNA, 655 bp, Homo sapiens
gtataagttagttggatcctttagctcagcacctttcacaaggctgcaattaggtttttagtgcaggttcacagtcatctcaaggttaaattggggcaggatctccttctaagatcatttagtggttgtcgataagattcacttccttgtgtgctgttgaacagaggccaccttcagtttcttgaaatatgaggctcttcatcatggcagcttgcttcatcaaatctagtaaaagatagcatctgctagcaaggaaaaagtcatgatattttataacttaatatggaaaggacatcttctcacttttgccatattctgttcattaggtgcaagtcactaggttcagcccacaatcaataggagaggattactcaaggtcatgaataccaggaggtagggatcattttaaaagtttgcataatatgtggttctttctatagctaaaaaaactacatataaatcacataatgtatactttataattatgtatttttattcttaagccaaggacaatgtaagtgtaaamtaacaatatgtactcatgtatatcatcatataaacccttattattaaagtccatttactttcaatggtccaaatcacagtggtccaaatcacagattaaaacagtaaaaatgttaagttcaaataaaat

SEQ ID NO: 284319 - DNA, 262 bp, Homo sapiens
cagatcataatcatatttccatcaaaatgacttaaatgcttatattttataatcatatagtcttttaaaaaccctccaaatcatttataatccaatgattgagaattgtctatggtcccagcatttttaratatcttagaattagaggggaggggggcacctaatggatggggtgtgtgtgtgtgtgtgtgtgtgtgtgtgtgtgtgtgtgtgtatagaggcaggaggtgacaggtggctttggaggccatggagtacagct

SEQ ID NO: 284320 - DNA, 556 bp, Homo sapiens
atggactttctcaaagagcaatacataatatttctatttatttatttatttattgagacagtctcgctccatagcccaggctcaagtgcagtggtacaatcttggctcactgcaacctctgcctcctggcttcgagagattctcctgcctcagcctcccaagtagctgggattacaggcacacaccaccacgcccagctaatttttgtatttttggtagagacggggtttcgccatgttggccaggctggtctcgaactcctgacctcaggtgatccgcctgcctcagcctctcaaagtgctgggattacaggtgtgagccactgtgccrggcctcatttctctctctctctctctcttttttttttaaataaaaccgctaaccttctctttgatctttggacatgccaaagaccatccagtctgcacgtatgccctgaattgcaattctttcttccccaacaaaatgttttaatttcagagattcatctgcattttatttgactttgacacttactacgaagttgaaattttcactctataatgtccgccattaa

SEQ ID NO: 284321 - DNA, 571 bp, Homo sapiens
tttatctttatttttttgaataaatacttaattacccacatcataaggaaggaatgttttaatcaaagataatagaatgcattaaacaaatgcatttcctcttcagttactgtttctttggttatgttttttctgtgttttagaacatgcggagattattacaaaatgtacaaacaatttcacataaaattgctgcccttactcrctctgtccacattataaaattggaatctgtagacatataattatatgcatgctttgtttcaattaggtaaatatacaaatttaaaggacatatatttgaaatagatctcataaggcaaagaaatgtgagtatatcaacaacaaattgcaactactgccattgatcttgataaaaatttagatatccaataagaaattcaatataaagtgatttcctcaattcttagccagtatggattaaatgtcaaccttgtgaaggagaaagagactagtgagataaggttatggtttctcatggcctacacatccctgtttcatccagaatgctatcagtcttaccctgccactatgcttaaaaccatttatc

SEQ ID NO: 284322 - DNA, 512 bp, Homo sapiens
gtttcctgttaagatatttatcaagataatgtgtgcacagtgggacacagaccctcatcagtaactctaattttgccttgccttgtgatctttattgccctttgaagcatgtgatccttgtgacctactccctgttcatacaacccctccccttttaaaatcccaaataaaaacctgctggttttgtggcttgaggtygccatcatggtcctaccaatatgtgatgacacccctggatgctcagctgtaaaatttctctctttgtactctttctctttatttctcagactggccaacacttagggaaaatagaaagaacctatgttgaaatattgggggatggttcccccaataattcttctcaaggtgacttataatcagctacagcccagggcttacttcttttaaggagttcatgaaaaggacttttgaacactggtttcttataactttatagattatgccattggattagagagaaaacttccgggactctaattaaaaggctaatg

SEQ ID NO: 284323 - DNA, 518 bp, Homo sapiens
cctgggatttttcagaacttcacactattcccattctatctccagaaagtggtctgaaaaaacttgctcttgaacatttctcccttattttagcacctgcttgcttgtctgaacaccatcttagttgcctttatggcaaattagtgggtgcatggactttttgaagctcctttttaaattttattttattttatttttttagagactgagtcttattatgttgcccaggctagtctcaaactcctgggctcaagcaatcctttggaactataggtgcaccctcygacaacagcttagtcacacaagtacgactctaagcactttcagtttctcttgctctcaccaaataattgccctctttcagattgtttccaccttgctttagacctcttttgatcctaatggtgtattctttttggctgtttcccggtaatcatctaaaacccttcattgcagtagtaagatgatttttatatttttcttcattttctttttatttccctcctattcttatcaga

SEQ ID NO: 284324 - DNA, 511 bp, Homo sapiens
aattgtagacacatcctttgtttgggcatatatttttaattatcctgccttttaatattcttctccatttgaggataatcagacaaaatggatcctgctgggcattgtcatgcttaataaaagtaagactgaacatctgcaaatatggcgacagtgtggcgcatacgatgcgccagtgactgagctgcattctgatgtaattataacaccacatggagctgtaataatgtgactccctgtttacattagttctagcacttggagtaaactctccttgagttaggtgctaaccaatttcaaccagggtaggcatataaactaatgaaggattgtattaaaygcagagtgtagataatgctgagaataggcagataaaaggctgtagactatcattttgaatctgcagccaggtgtcaattctctgggtttaatcccatcgattgctatctgtgtgaccttgagtgagtcctcaaattcagtgaaatggagataatcactgtgcatttctcat

SEQ ID NO: 284325 - DNA, 565 bp, Homo sapiens
atcactgtgcatttctcataagactatagtaaggctttaatataataatatacataaaggttttctctacctcctcttccactgcttttttttcctttctctttactttttaaaataaatatctattgccatttttttccttcctttatcaaaaagctactagaaaagaccaagtgaaataagtggcccagggttgtcagacttcattgatggttggggctagtgtacaaagggggtggcaactagttggtgtcaggaaattggctacatttcggggttggagatgagagccggcttcctcagtgtcagagaagggaaggggaagctagaatgaactctgyggtgttgaattggaatcaaaggtatcagcagaaaagcagcattttgtagataggatacagagataaatacagatataaatgtatgtatgcatgtatacatatatacacaagtacatatgtttcctagctctgtgtcctgaaagagcctgagagcagtgataacacaatagcaatgaacacacttagtgtccagatcttggtttccaaataccagtgaacattca

SEQ ID NO: 284326 - DNA, 420 bp, Homo sapiens
ccagtgaaaacatcttagcacttgagtctaaccatgaagaaacattacacaaacctaatttgaaggatgttgtactcaacaactggcttgtaatcttcaagaacatcaaggtcatgaaaaataaggggagcgtgaggaactgttccacgttgaaaaagactagagagacaacacaactgggcacaattcctggrttaaattttttgctaggatattactgggacaattggtaaaactggaataaggtctctgagtgaagggcatgtgagaattttttgtactcttcttgcaatttttctgtaaggttgaaactaatgcaaaataaagtatttaatttaaaacatgtaagaaaatcaaactatgtcaagtgccttgtagtaaggatctattaaaattttagttattattgttttaatggct

SEQ ID NO: 284327 - DNA, 574 bp, Homo sapiens
acacccaggggcaccagcataggctgtaagtagctgagaacttttcctgctgcatcatagaagctgttggaagctaagaaatggaagcatttgaaggatgaatgaaaactcctcctcatccatgatgtttggctgtggctggagggaatagtcaagttgaagttatacaacaaacagttgtttttatgctgagccaaggaagtgactatgattctccatacctaggtagtgctgaagcaggggtctccaaactgtgacctgagagccaaacccatccctcttgctgttttcctataccctgtaagttcagaatggcttctacattactaagaagatgaaaaaaatcaaaaatattttatcacgttaaaattatatgaaattcaaatttcagtacccacaaataaagttttattggaatactgctatgcctattgacttacaygtcatctctggtttctagcttcaaatgcagagttgagtagttacagctgagacctcataaggctttacttacaaaccttttcaatccctgtgctaaagcagtggccagtgtaaccaaagacagggggaagtg

SEQ ID NO: 284328 - DNA, 574 bp, Homo sapiens
catgactttactgagacacagacgactgggtgagaataagtctatatctcataagaatacactccaatagtctttattttttcccttagagctttactttatttttctggggttacattgtttcaattcttttgtgaaatatgctgggaagtacttcctagacttgatgtacttggaacagccccatttgacccattctccacagaattctagggagttgttggatttgaggattattttcttctacggttttacatattgaaagtcttgcttcaactctcaaaggatgttgttaaacacaggataaatattgaattgtctctctatcctcacagtcttcatggtggcaaataaaagtttctgtgaaagggtttgctccctgaagacccacaagtggtggttagaaagtgtccacaaattaaaggcaatgaaagatcactaaccacaagtaatagatgttattttaaaaatgtaaaatacataaaatagcctttatacgcttgtatattctgtagccactctaaccaggtggctaaygtataagtattttcccaattttgagcacttttacaca

SEQ ID NO: 284329 - DNA, 1143 bp, Homo sapiens
caataaaatgaaatgtcatggagaatcagaaatacctttttttagattcaaggtaactaaatctgtctaaacagtattttgctaaaatgctaaaatcagtgatccatgaaaatgaatgcagcttctaagctgtgctttgctgcttgttatgttttaaaacaagagttggtgaactttttctataaagggacacataaatatgtaggttttgcaggccataatctgttgcagctactttactctgctgttgtagtacaaaagcagccmtagacaatgcataaacaaatgagtttagctcattagtattggagtttagctttgttccaatagaattttatggacactgaaattgaaatttgtataattttcacatgtaatgaaatatttttcttttgatcttttttggtcgtttaaaattgtaaaagccaccctttgctcagaggctgtacaaaagcagggggtggggtggatttggcttgcaggttgtggattgccagctcctattctaaaaattattcatwtctttttagccacattgctgaagtaaattacactgttcagtccaaaaagtgctttctaaaaccacctatacgtgccaaggtatcacttggaaagtatgaatacaagcatgattaaaatgcagttcccacctgtgataggttaatttatgggccccaattcatcattctcctgtagtagtagtataaattcacacccttgtcatggcttatggcaagttgagtataattccttactccctagctttgggcttgcccatgtgactggcwgtggcttatgggatgttggtggacttgaggacattggaggcttaaaaaaatgtgcttgtatttctgccattgccagaaaaatatttcagaatgagacaaatggagcagacacaactggactagaagccaaaagccctgcccaacccagactagccaaggtttgcaaaaccccaatccatccacaaacccttgaagatgaaaatgaatgatgtgttctttaaagcagtacaaaattattatagttagaggaaagtgatttatagattatctttcagaagcatatagattaatgtaggttcatggaaatgattctattctcttctcctaaactcacctccaaaaagcagtggttctc

SEQ ID NO: 284330 - DNA, 642 bp, Homo sapiens
gaaatgaaaaaatatcaatcattttatatacatgtatatgaaagtaaaacccaaaggagaacaaacagcaaataattgaaaattaaaagcaaaaacaaagaacaggaaaccaagtccaaatttctcttctgctcagtttaccttggaggccacagtgttactcagaatctaaaaaattcacatgatgtatattttgttcctggtacacaaattgatgtttttaagtccaccaaaaacactatactttctgtacaattaagaaattcactttaggtgtatgatcagtaagtacttagtgctggtagcatctatgcagaaggccaaatacagtgtgaaataaagcaatggaagcatttatgttaaatttggctccatgttaatcttctttcacttaaatattttataacaaaacaggaacaaagtaagaacaaacaaacaactaatttattgttagctatttaaaagagtatcatcacataattccaagattagtttctagatacagtttggcttcatgcttaactgccattgtatttcattacaaaatgtattaatttaccttcatcaagaccaagagctttaattatgagcaatgttaactagccamatttctctaattttctctcaggttttaaagaatat

SEQ ID NO: 284331 - DNA, 593 bp, Homo sapiens
atgttgagcattcttccatacgttcattggccacttgtatgtcttcttttgagaagtatctcctcatgacctttgtctatttttagtgaggttatttgattttgcttagtgaggttatttgattttgcttattgaattaagtttcttatagattctggatgttagacctttgtcagatgcacagtttgtgaatattttctcctatagggtgtatgtttaccattctgatagttttttttgctgtgcagaatctctagtttaattaggtcccacttgtcaatttttgttttcgtagcaattccttttgaggacttagccataaattatttgcccaagctgaaatccagaatggtatttcctagtaaagatgggaatgataaacacaggggactactagatggggaagagagkagggagggtaagggctgaaaaacacggctaagaactattggatgctaagctgggtaaagggataaaccatactccaaaccttagcatcatgcaatatatctatgtaacaaatttgcacatgcacccctgaatccaaaataaaagttgaaataataaaaaaaagaattgagaagcatgttaaa

SEQ ID NO: 284332 - DNA, 584 bp, Homo sapiens
agagctttgaggggaatcatctaagtcagtcagggattgaggaggaagaaggtgtcaggaaagctgcrcagaggaggcaactcattagggacgtctcgaaggatttcataaataaaaaagaggtttggcaataaaaatggtgaaggaaaacactgaaagggcccagagatcagagaaagactagagtgtctgagagattaaaaggggctctgcaaaacaacttagacttaggggttttggggagaaataaggctggccatttgccccagtcatgatgggggagagctttgtatgacagagtgagaaggttggatttcatcctgaaggaaagggggaagcaaaggcctagaaatattaaaagaaggctgaggaatgacaggatcatacaaaaaggagaggcaagttagaaagccactgcaacagctcgtgttaaaagaggtgagccagcaaagagagcaaaaaggaaggttcagactgagtgttttgtggaagtcctttgttttttactgaatcgacatgttcttatttctaggtttagaaatttgttaatgttttgttcaatgaggttacagatttctaaaatg

SEQ ID NO: 284333 - DNA, 513 bp, Homo sapiens
cagcagaggctgcagaatagcaaagattgctgcctgctccttcctctggaagatttgttccagaggagcacctgccagattccagctggggctctcctgtatgaggtgcctgttgacccctgctaggagatgtctcccagtcaggggcacggggtcagggacccacttgaggaggcagtctgtccattagaagaacttgagcgctgtgctgggagatcctgctggtctcttcagagccrgcagggaggaacgtttaagtctgctgaagctggcccacagccgccccttcccccaggtgctttgtcccagtgcaatgggagttttatctataagaccctgactggggctgctgcctttctttcagagatgccctgcccagaaagaaggaatctagagaagcaggctggctacagtgtctttgtggcactgcatgggctctacccagtctgaacttcccagtggctttgtttacactgtgaggggaaaaccacctacccaaacctcactaatggt

SEQ ID NO: 284334 - DNA, 513 bp, Homo sapiens
cagcagaggctgcagaatagcaaagattgctgcctgctccttcctctggaagatttgttccagaggagcacctgccagattccagctggggctctcctgtatgaggtgcctgttgacccctgctaggagatgtctcccagtcaggggcacggggtcagggacccacttgaggaggcagtctgtccattagaagaacttgagcgctgtgctgggagatcctgctggtctcttcagagccggcagggaggaacgtttaagtctgctgaagctggcccacagccgccccttcccccaggtgctttgtcccagtgcratgggagttttatctataagaccctgactggggctgctgcctttctttcagagatgccctgcccagaaagaaggaatctagagaagcaggctggctacagtgtctttgtggcactgcatgggctctacccagtctgaacttcccagtggctttgtttacactgtgaggggaaaaccacctacccaaacctcactaatggt

SEQ ID NO: 284335 - DNA, 559 bp, Homo sapiens
tgattagaaagatggccttaagatgctccccagagtatactccatagaacatacagccttccatrtctatgttctgttaataattttttaatgatcataaagccgtacgaggtgatcttgaacaaatatttgagaaatggcgaagaaaattggaagagaaagttctgatattctaaacaagagaacaaatacattgcagaaactatgaaaaagtaagaataatgttaattcccaggaaaaatactagatccaagtgtaaaaggttgcagaacattatgtcaagttgaatctcattttatgatttataaatcttattttatacaaagatttaaaaacctttattaatatttatgcaatgagattcaatttgacattatgtataagataatgtaaaagatatatgtgtgtattttacatgcataatatatgtacttataaatgcatagaaaaacttctagtctacataaaaactctgtagtgtcttctctacacaaactggggaatctagaggaattacatttgtgacccataagaaaaaaaaacttactaaaatatagca

SEQ ID NO: 284336 - DNA, 596 bp, Homo sapiens
ttcgggtgttagtttgtcaatggctatgtgtcagaactgagcataagggtttttagatatcctttatcatactcaaacaaacctttctcattccacagtcagatattttagaatccacaaaaacacagaattcactgggaggaaactactttgtagttacctgatgaagcaataggaatcacacaactttcattgaactgctgggggtaaagtggattgctggccttttatcttttatctctgaaattggccccccagcagtagctttgttaaatctgacacatyttgaatttgccttttttaaattgcaaatatagcagctagtggttttatctttttcagtacctatacttccacattttgaagagactatttttaatgagactattgttagctactttaaaacatgtggcattcagtttttaacaggttcaattggacgtcttcccccaagtgcagaggaagcatttataaaacaaacaaataaaaggtaagaggaataaatatggggtatttgtgatgtacggcgatgcattttgaaaagagcaacattcataataagaaagggaagtttatccaaaacactgaaaataagc

SEQ ID NO: 284337 - DNA, 596 bp, Homo sapiens
ttcgggtgttagtttgtcaatggctatgtgtcagaactgagcataagggtttttagatatcctttatcatactcaaacaaacctttctcattccacagtcagatattttagaatccacaaaaacacagaattcactgggaggaaactactttgtagttacctgatgaagcaataggaatcacacaactttcattgaactgctgggggtaaagtggattgctggccttttatcttttatctctgaaattggccccccagcagtagctttgttaaatctgacacatcttgaatttgccttttttaaattgcaaatatagcagctagtggttttatcttyttcagtacctatacttccacattttgaagagactatttttaatgagactattgttagctactttaaaacatgtggcattcagtttttaacaggttcaattggacgtcttcccccaagtgcagaggaagcatttataaaacaaacaaataaaaggtaagaggaataaatatggggtatttgtgatgtacggcgatgcattttgaaaagagcaacattcataataagaaagggaagtttatccaaaacactgaaaataagc

SEQ ID NO: 284338 - DNA, 557 bp, Homo sapiens
tatcaattagtgatagaggaatattaaagactccaactgtaatagtacatttggctattttccccttcagtgttaccagtttttgccttattatttttatttttatttttgagatggagtttcgctcttgttgcccaggctggagtgcaatggcacaatctcaggtcactgcaacctctgcctcctgggttcaagtgatcctcctgtctcagcctcctgagtagctggrattacaggtgcctgccaccacgcctggataattttttgtatttttagtagagacagggattcaccatgttgggcaggctggtctcgatcacttgactttaggtgatccacctgcctcagcctcccaaagtgctcagattacagatgtgagccatcgtgcccagcctgtttttgctttatttttaagctctttggttacatataaatatttaagattgttatcttttttggaaaattgatccctttatcattatctaatgcttccctttgttcctgactaatgttcatgctctgaggtctaagagagctactccagctttcttttgatt

SEQ ID NO: 284339 - DNA, 625 bp, Homo sapiens
ctttttccattagatcctttaacataataatcatagtaattttaagttccctgtctgatcattctaacacctgtgtcacatttgagttttgttctgatgattgctttgtctctgcagaccatgtttttttcttgcctctgagccaatgctaaccctctgctgctctcctttagaaaactggtttaccagcccacacctgcttgagaccttaggcttgtattctaggagggagggccaagactcctggccagccagaccactgacatgctttattttgttttgctttctagtaaatctgaaaataagccaacaaatttgaaaaactccagttcccttctgcttycaggagaaggagttttatgtcatcgctgctgtctccagcaaattcaaagggaatggttgccggcttggcaaatgtgcaggcagtactagctgggtgtctcagtgtaacttgtgttacactgagaagcaaacatatcatcccgaatcaatcacctaattccacgacaatcacccacatcagacctgtccaatctgtgtgacttggctcacatgaaaaaccagttaaaagcctggtaaccttggggtcactgcattgcttctagccttgtcaacatgatgagtt

SEQ ID NO: 284340 - DNA, 556 bp, Homo sapiens
aaccatgagccaattaaacctctttctgtataaattaccagcctcaggtatttctttatagcagtgcaagaacagacacatgcacccctgcttgtagagtggcttgcatgagatcattgtgcaatagcctaagatgcagtcgacacatggcagctctcactcattgattaagggtaggttggagggtgcagggaggtgtagtccctgtgggaggtcraagggcaagggtgtgggctttgaagttcacatgccactgctctccacctgacatggggaaagtcacttatcctctctgcctcagtttccctatcttcaaaggagaattataccctttctgggttacaggacacactgtgaaccaggctatgcatttcataaactattctttggacgtgtactgacactgagctcatggggcatcctgagagccagaggtaacattgggcaagggcagatcacatgtgcagggagcccaggacgtggcggctgtcgcgtggtcatcccagggaccaccagggggtgacctggaccatccttccgccctttgtgctgacaa

SEQ ID NO: 284341 - DNA, 556 bp, Homo sapiens
aaccatgagccaattaaacctctttctgtataaattaccagcctcaggtatttctttatagcagtgcaagaacagacacatgcacccctgcttgtagagtggcttgcatgagatcattgtgcaatagcctaagatgcagtcgacacatggcagctctcactcattgattaagggtaggttggagggtgcagggaggtgtagtccctgtgggaggtcgaagggcaagggtgtgggctttgaagttcacatgccactgctctccacctgacatggggaaagtcacttatcctctctgcctcagtttccctatcttcaaaggagaattataccctttctgggttacaggacacactgtgaaccaggctatgcatttcataaactattctttggacgtgtactgacactgagctcatggggcatcctgagagccagaggtaacattgggcaagggcagatcacatgtgcagggagcccaggacgtggcggctgtcgcgtggtcatcccagggaccrccagggggtgacctggaccatccttccgccctttgtgctgacaa

SEQ ID NO: 284342 - DNA, 460 bp, Homo sapiens
gccagtaaaaaatttatgattcatgggrggaagtcaaaataatcaacaaagtatcaacaacaggagttgggaagacgttgattccaaccctcatggatgactttgaggggttcgagccttcggtggaggaagcaactgcaaatgtggcggaaatagcaagagaactggaattagaattagaagtggagcctgaagatgggactgaattgctgcaatctcatgagaaaacttgaacagatgaggagctgcttcttatggacggacaaagaaagtggtttcttggatggaatctacccctggtgaagatgctgtgaacattgttgaaatgacaacaaaggattgagaatattccataaacatagttgcttaagcagtgacagggtttgagaggatttactccaattttgaaagttttactgtgggtaaaatgctatcaaacagcatcatcaactacagaaaa

SEQ ID NO: 284343 - DNA, 494 bp, Homo sapiens
tcacagactaattagacccctggcatctagtgtatagaggccagggatgaggctaaacatcctgcagtccacaagacaccccccgccccccaaaaacaattagccccaaatgccagtggggctgaggctgaaaaacctgggtgtatacatgcttcacaacttacataattgcacactatttatgtatgtatgtacatatgtatttattttgagacagagtcttgctctgttaccaaggttggagtgtagtggtgcaatctcggctcactgcaacttccggcccctgggttcaagggatcctctgtctcagcctcccaagtagctgggaccacagtcatgtgcccccatgcccagctaattttgtattttcagtagagacagggtttygccatgttggccaggctggtctcgaactcctgacctcaggtgatccacccgcctcggcctcccaaagtgctgggattacagacgtgagccactgcgactggcccagc

SEQ ID NO: 284344 - DNA, 612 bp, Homo sapiens
ttgtgagcacagtttccctgctgttagtgcccaccaaggggacctcgtcgtcatccacgaagagaagctctgcactggggaaatagcaagaaggtcctgagtcttcagaaaaggcagtggtgagcagggtgtctgggtctaggatggtcccctctacagcttccatctgcccatctgtctgtctatctatctatctatctatctatctaatctatctatcatctatttaccaacctagtcatatgtccatctactatctatccatccatccatcaatccatctagccatccatccatccatcatctctctatctatcatctctctatctatctatctatatcctatctatctatcrtctatcatcaatctatcatctatttaccaacccatccctctgtccatccaatatctcaatatctgtctatgtatatatccatccatccatccatccatttatccatccatcatctttctattcacccatccgtctgactatctgtctatctattatctatcttctctcatctatcttctatcatccctctattctctgtcttctgtcttctctctatccttctatccatccaccgatccatccctcatccacccat

SEQ ID NO: 284345 - DNA, 574 bp, Homo sapiens
cccttcctggtggaggaattacctagcagtcagcttatccatgcaggaggaaggctggtggggtgccagtgcagttcaggtgaagctgggctaggacatttggatatgccattgagagcgctcaggccctgggtgggctttgggagagtgggtgcttcctgatcttaaggtgtttcctgatcttgaggtttggaggttctcttgaggtaagagcctggggtctgctccatgcattgcaaactccagggtaagaggagatcaatccagggtctttaaagagaaaatttaagaaggttaagaacaaagaaaaaatagtgctttcagaagtatcagccagaagttatgatttttatataagttcccctagtaagttttattgcaagrccccatagtaatttgtttaaaatcaaaagagaacagagataataagattttaaaaagagaagtctctagcttctgagcagcttgttttaatgtcatggttgggagcctaggctctgccactgtgtgatcttgggcaagtttcttaatatctctgctcctcaactttttcatctttaaaatgggtataaat

SEQ ID NO: 284346 - DNA, 654 bp, Homo sapiens
atacagaggcacaggcacatcttcctggggttgaagacatgggattcctttcttcattaacctttcatggagttctggacttggtagggccttgggaaatgaatggggaaattggaggatagggaagtagcattatcagaggcttggactctgccccaagtttttacccttttgactgttattttaaaatcgctttggcttcatctaggatggaaagtaaatacagtaaccccctatttatccatggggaatacattccaagacccccggtggaygcctgaaaccacagatagtattgaaccttatctatactacatcttttcctatgtctaggataaagtttaatttataaattaggcacaggaagagattaacaacaatagcaaagtaaaatagaacaattataacaataggctggcatcaccactcttgtgctttggggcagttattaagtaaaggaagggttccttgaacgcacctgcaataccatggcagtggatctggtaaccaagacatctgctcagtgactagcaggatggtagcatctacagtgtgggtacgctggacaaatggatgattcatgtcctgggcaggatggagctggacaacgtgagattccatcatgctactcaaacagcatataacttagaactt

SEQ ID NO: 284347 - DNA, 654 bp, Homo sapiens
atacagaggcacaggcacatcttcctggggttgaagacatgggattcctttcttcattaacctttcatggagttctggacttggtagggccttgggaaatgaatggggaaattggaggatagggaagtagcattatcagaggcttggactctgccccaagtttttacccttttgactgttattttaaaatcgctttggcttcatctaggatggaaagtaaatacagtaaccccctatttatccatggggaatacattccaagacccccggtggatgcctgaaaccacagatagtattgaaccttatctatactacatcttttcctatgtctaggataaagtttaatttataaattaggcacaggaagagatkaacaacaatagcaaagtaaaatagaacaattataacaataggctggcatcaccactcttgtgctttggggcagttattaagtaaaggaagggttccttgaacgcacctgcaataccatggcagtggatctggtaaccaagacatctgctcagtgactagcaggatggtagcatctacagtgtgggtacgctggacaaatggatgattcatgtcctgggcaggatggagctggacaacgtgagattccatcatgctactcaaacagcatataacttagaactt

SEQ ID NO: 284348 - DNA, 586 bp, Homo sapiens
cggtgagcaaagtattaatagatgcaactcaccctcatggtgcttacaatctataggaaaggtgacattcaacagccatgcagacacaagtatggctgtagctaaaggggggttcctactttaaatctgggtgtgtgaacaaaggcttctctgaggaagtaacatgtaaggtgaaatctgcacagtagaaaggcactgactaggtggagaggtgttgactggagggagataagcattcaaagtggaaggaattccatacttaaaaggacctgagatccctaagcaggaagaagaggtcttttaagaacttccagtaactgaagaggaractgaagagcatgcaaggatcaggtcagccagcagttgtaggccaggttaatgactggtctctactttgagtgtgatggaagcccgagagagtcaggcttgtgtatctgaatgaatgggaatgccatttcctgaggcagggaacattggcggaagaatacatctggagttcaaaatcatggaagtttttgttgttgatattcaatttatatgcaatcttctttgaatgcctctatttgcccccataactgctgaaata

SEQ ID NO: 284349 - DNA, 542 bp, Homo sapiens
ctccacggcagattgtgaatggagaaaataaagatggaaaagccccaaatgtgctcattaatttcaaccagagttgtcctcttgtactaactagtatcttatttgattatgaacaagattatctggatagtggtgggaagacattgaaggggtacatttccctgtctcatctcccctctccactactattccatgcaagctatctcaagattagtcttcagagattggctccagagtccaaatggcaaaatagtaatgcacctttaaartatgtagtttctggttctatagatattcctcagcattcttttgaaacagtataaatatcattattgcattttcttgggttaggactaaagactttaataaaagcagtgcctttcattagcttgtagttagtgtgttcatgtggtacagcttttagtaaaaatatatgtgatgaactgcatggatggtatgttatttttggttcaaaaacatgggaagttgggttaggggagtcatttctggatgacgatcagtgaaactacaaatttcaggtg

SEQ ID NO: 284350 - DNA, 600 bp, Homo sapiens
cagttggcttccttctttgcttgctgccagctaacctgctgtagtgttcatgcgtgcacatgggaaacacaactgccaataggccacatcttatgtttcttccttttcaaacagcagcaagattgacctgagtcttagtctaattccaaactcctgggaaagggttaagattgatcccatttgggtcaggtagccacccctgaatgaattaatggtagccactgggtcacaatgtattaactcagctcccatcrctgccatatttgtaaacatgtggaggggacagttcctaggaaagaatggtactgactagacaaagggtatttatgtatcaagatgctttgggctgggtatttattatgtcacataacaaaaagtcttgcctgcaatttaatgagtctgagattcaagtcaatgcaatttaaccagtacttattgagcacctactaagtgccaggcactgtttttggtgctggtgatgtatgagtgaataaagcaggcaataatctctgccttcagggagcgtatattctatggttggttaattcagtgactcaggagcattaacaagttctcagattttttgtttgtttgttttaa

SEQ ID NO: 284351 - DNA, 632 bp, Homo sapiens
aattctgtttgttgctttcaaacaccacaactttctcacgtaaaaatgaaaaattcttggccacacttttcccctcagtcgttataaggctgttaaaccagggatcacctatcactccctggtgtgtgtttgtttcaatccccaratatattttaagagattttaaaacattatttgttattgtggagtagctaatagattctgtatggttgctgctgaatctttttatttctttgagaaagaaggagaaaaaccacattgttttgaaaaacatgttttaaaaataattttatagattgcagattttgtaaatgatcagttaattgttgggagggggttcccaaccttgttaatgtcctcttagcattaggcttttgttccccagtattgaatatgtcattttctcccacagactgcatttctaggggtataattgctgtctccatgtaaaagacaactcatgtgcataaatttccactcgctgaaacaagactctgcctcccctcattttaatgcagatgtgatccagggggtagagttacacttacttccccaagcaaatgaaacagattacacattaaatattgtctttggaaccaggtgcacagaaacaaccaattacctagacagct

SEQ ID NO: 284352 - DNA, 579 bp, Homo sapiens
tagcagttgctctctggagtttcactgaacaaaagtaggttaataaaaaggaagcctttggattttagatattggtagaatggggctacattaggacttagaaaattaatctgatttcttatccatgaaaatgtcttcatgatgccattgctcagaggacccatcaggaaaaagaatgcttcctaaaactgaaaagccactgtagtgctgggttctaccaagagccacacagttatatttgaaatgcatttgtttaatttgaggaagaaattaatttgatcttcccrccatgggactagcttttaaaatccacatctcaacaatgtagctaaattaacagtagttaagtaaattagaaactcaaggagcttcagaatgtgagcaagaccatggacagtcccgatgggcatctatccctcgaggctacaaggaggttgtcacaaagagcctgagatgcaggcaaagaagcaagtcaaagctctatgagttctttgaaaaaatttcttctgaaagagatggacttactaccggagaacaaaaatgtcaaatttgaattccattcacaacaccgcacctccc

SEQ ID NO: 284353 - DNA, 626 bp, Homo sapiens
ccctggaaggattagcagagaaactccccagctgacccaaatcagattgctgacccatgtaattgcacaatgtaggaagatggttttgattttaagcctgtaagtttttgtatcatttgttacacagcattcactaactgaaacaatgatataactctacacacccaccagagtagctaaaatgaaacatagaggcaataaaaatatttcgcacagttcagagcaactgaaatgcttatactttgttgcyggaagtgtaaactggcacaattcttttggaacaccactggcagtatctaccaagtttaaaaaaaagtaaatggtgatacattcctgtattatacagccatgagagcaaagaaccacagctatacacaactacctggattggtatcacaaccacaatgctaagttcctaggaaagaactaaaccaagctacgtggagacaagagtctctgctttcctggcagttttaatgttttgctttctccatgcgtttttccccttattggagattattctgcagagaaagagcagtcgctagacagaaacttagacaaagcttccctcaggcttccctcccctcctccctcatcaaatatgtattatggtgcaatgtgccagc

SEQ ID NO: 284354 - DNA, 587 bp, Homo sapiens
cttatactttgttgctggaagtgtaaactggcacaattcttttggaacaccactggcagtatctaccaagtttaaaaaaaagtaaatggtgatacattcctgtattatacagccatgagagcaaagaaccacagctatacacaactacctggattggtatcacaaccacaatgctaagttcctaggaaagaactaaaccaagctacgtggagacaagagtctctgctttcctggcagttttaatgttttgctttctccatgcgtttttccccttattggagattattctgcagagaaagagcagycgctagacagaaacttagacaaagcttccctcaggcttccctcccctcctccctcatcaaatatgtattatggtgcaatgtgccagcctcagaaaggggtcctgcaacaatatgaaaattaattttatttccttctcaatgaactctgtggaaaattctgtgagattagacaaacgaacagcaaagaaacatctaacatggacttctaagttggagtgagtcatggaggtcctaaacagatatctacaaatcaatatggggaatccaggaaggctctgagct

SEQ ID NO: 284355 - DNA, 526 bp, Homo sapiens
gaggaaatgatctcaggagaaaggggatgaaggaaggatgacagagtagggcaaagataggcaaagatgtggtctcagctggagactgacttcagcctgatcccatggggagttcttgtgtgtgaattgtattgcagagtgcaattaggcaaaaagccagacttttatcacttagtcattagctgtgagctgtccataggggaggggccacaaactcccaatcaggcagcttctaatagctaagtgtgattctctggagaaaggggcagctgtgagccattagcagccaacacgcaaaggagctgagggtaggtgaccagtggctggcgagagagtggagtgattgaagggatyaagaggaaccaacagcatctcccaaagcagacattattagagctctacggccatttctacaggggattcccagttagtatgtgctttcattgcctacatcccacttcatcactgcccctcaggcctgtcttaagacaggcctccccatgaagtctccctggaccattccaac

SEQ ID NO: 284356 - DNA, 526 bp, Homo sapiens
gaggaaatgatctcaggagaaaggggatgaaggaaggatgacagagtagggcaaagataggcaaagatgtggtctcagctggagactgacttcagcctgatcccatggggagttcttgtgtgtgaattgtattgcagagtgcaattaggcaaaaagccagacttttatcacttagtcattagctgtgagctgtccataggggaggggccacaaactcccaatcaggcagcttctaatagctaagtgtgattctctggagaaaggggcagctgtgagccattagcagccaacacgcaaaggagctgagggtaggtgaccagtggctggcgagagagtggagtgattgaagggatcargaggaaccaacagcatctcccaaagcagacattattagagctctacggccatttctacaggggattcccagttagtatgtgctttcattgcctacatcccacttcatcactgcccctcaggcctgtcttaagacaggcctccccatgaagtctccctggaccattccaac

SEQ ID NO: 284357 - DNA, 551 bp, Homo sapiens
ttataacagaatccagaggtcacacartgtaacattaaaaatgtcctggatacaatccagaattacacaacaaacaatcagcaaaatatgaccaattctcaaggaaaaagatggtcaacagaggcaaaccctgaaatgcgtcagatgttgaaataaacaggaaaaaattataaagtagctactataactttgttctgtaaaagcaagaaattaacaaatgaaaccccaaaaccttgaaatgaatgaaagctaagcattctcagaagacaaataaaaaccatagagaaagaaataaagggaaatgttagaagtcaaagctatagcattggaaatgaaaatttgctacatgggctcaaaagaaaatggagatgagaaaggaaaggatcttgaacatagattaataaaaattaacacatctgaaacacacagcaataaaaaacgatggataaaatgaacagaggctcagggatctgtggagcaatatcagaaagtctaacatgcatggcactagagaccaggcagaagagaagaagtggaccatagtgtagcaa

SEQ ID NO: 284358 - DNA, 551 bp, Homo sapiens
ttataacagaatccagaggtcacacaatgtaacattaaaaatgtcctggatacaatccagaattacacaacaaacaatcagcaaaatatgaccaattctcaaggaaaaagatggtcaacagaggcaaaccctgaaatgcgtcagatgttgaaataaacaggaaaaaattataaagtagctactataactttgttctgtaaaagcaagaaattaacaaatgaaaccccaaaaccttgaaatgaatgaaagctaagcattctcagargacaaataaaaaccatagagaaagaaataaagggaaatgttagaagtcaaagctatagcattggaaatgaaaatttgctacatgggctcaaaagaaaatggagatgagaaaggaaaggatcttgaacatagattaataaaaattaacacatctgaaacacacagcaataaaaaacgatggataaaatgaacagaggctcagggatctgtggagcaatatcagaaagtctaacatgcatggcactagagaccaggcagaagagaagaagtggaccatagtgtagcaa

SEQ ID NO: 284359 - DNA, 583 bp, Homo sapiens
ttaatgggagttccagaaaaagaggtaagaaaaagaagggagcagaaaagtacgcaaagaaatgatgtttttaaactccccatggtgaaaaacattaatatgcacatccaagaagttcaaatgatttaaagtaggactaactaaagaaagccacattcagacccatcacagtaaaaatattgaaagataaagacaaaaagaaaatcttgaaaacagcaagagaaaaattacttgtcatgtacaaggaaaattcaacaggattaacagctgaattcttcttgtcagaggcaatgaaggccagaggcagtgggataacatattcaaattgccaaagaagaaaaaaactttcaaccaagaatcttgtatctgtcaaaattatctataaaaatgaggtgaaagaaatatgttttcaaataaagaaaaacagagaattcattcctagcacatgtgccttacagaaataatacaggaagatattcagaacataaggaagtgacccagagagtaattctaatccaagtgaaaaatcaaaaagcaatagcaatagtaaytacaataggcagtgtcattggatatgtacttc

SEQ ID NO: 284360 - DNA, 562 bp, Homo sapiens
aaagtgcattctcttgaacacatgacacaaaatggatgaatcttgaacacattttctaaatggcaagaagccagtcacaaaagaaaacacattgtgtgattccatttctatgaatgttcagaatagttaaatctatagggaacgaaggttagtggttgcctaggatgcagaagtttgaggggaaaatgcagaatgaatgctaactggtayaatattactttttaaagtgatgaaaatattctaaaattgatcatggtcatgtttgtataactgtgagtataactgaaattattaaatagtacacttaaatgtatgggttgtgtggtatatgaattacatctcaaaaaaatcttagaaattatctataagttcactgctctctagaaaggaaggagataaagttttcttcttttcagtttttcccaatttttaaaaactttaaatgaatttgctcaactattaactataacttgcagggcagtggtgagagttaaataacagaatgcatgtgtagctcttccaaagcctagagctcaatggttgctgataagtaatagcttct

SEQ ID NO: 284361 - DNA, 512 bp, Homo sapiens
cagtaaaacatattggtaacatgtttgacaagaagcagacttccacagcggctgtgcagggagacaagagacctgggttctcaccatgccatgtcatgcttttcccatgtgaccatggctccttctcaaaagtcaggctgcatcttctccatctatgagcgttggtttgtaacagtacctacagcactccttttcctgccacattgcttttaggaaatgctaataggagtgccagaagagttcaaggttcaaatatatttatgaaatattttaattgtattttcttcctggaaatttaaaatgaatrtcagcatattaacaacttgagaaatttcagcagaaaaaaaaaacgcctgtggaattacacatatcccaacatctctcaacttcacatgagtatagagcttatatttattccacagagccatgcgccaaggaggcacaggctgggaaaccctggatgaggcccttccaaacttcccaccactaacacacctctgtaatgtggtgat

SEQ ID NO: 284362 - DNA, 581 bp, Homo sapiens
ggtgttatgttttcttgattctttatgttctttgaagtttgtcttactgtccttgtgtttgaagaagtagtyttctcctccactctttactgactaattttaggacagaaagacttttattagtcagcccagctagatatttgggaaatctgtcaggccttttctatggatgcgcctgcctcacacctcttgtttcttctttttaagattgtatgtcctctttcaatattccaaaatcaagctgtctctctgtgagtgcttgttcataatctgcagggactcacctgtgctgcagagactttcatataccatctcaaggatacctgtggaatgctaagttcatgcaggggctttaggtgagatgtctcacaggggtcatgggcaggcctcttgggaaagttttcaggacagttaatagtatctgtgtccagtttttgaaattcacttgaaagtttcagtgagcccccatcatttttccccacttctaactcctctagactgtatagttatgctgacgctctcagtagtttgggtggaatgaggcagaattgggcctcttgggcaatatctcacaagcctgg

SEQ ID NO: 284363 - DNA, 606 bp, Homo sapiens
tgtttcttctttttaagattgtatgtcctctttcaatattccaaaatcaagctgtctctctgtgagtgcttgttcataatctgcagggactcacctgtgctgcagagactttcatataccatctcaaggatacctgtggaatgctaagttcatgcaggggctttaggtgagatgtctcacaggggtcatgggcaggcctcttgggaaagttttcaggacagttaatagtatctgtgtccagtttttgaaattcacttgaaagtttcagtgagcccccatcatttttccccacttctaactcctctagactgtatagttatgctgacgctctcagtagtttgggtggaatgaggcagaattgggcctcttgggcaatatctcacaagcctggggaagtcaggatctcacattactctcactttcacatgtgggacaaaytgtgggccaatgaggtctctcttggcactgagctgtgctgctttgggggaagggtaatattttaaagtgacactgttcttcttaccttcttaactatatttgtaattatatttttgctagaacagcatgctggaatctctccattgtattcctaggttctcatataga

SEQ ID NO: 284364 - DNA, 590 bp, Homo sapiens
tgagaaactcaagaatcagaaaaatgatgagattgtcccacactctttgctagtaagtgttatattgaaacaaytgagatttttcactcccagcccatccagttgcctctgaactatctccttagcaatatatacctatctctcataatcagacaatcccctaatgactaaatcaaaggagtcctttgtaacttcaccctttcctagttgctttgttctcagttgatgcaaatataagcaactccttgaatagcatgtgctctaccttcatagctctctatgatcctcttgtcaccttcagtgttgttagtgaattagcatgaaagtttgagctattagagtcttattccagcaagtggattcaggttttattcccctttcctgaaactctaatagaaaggtgcactcaaggcacagagatacaaaaagtagctgtgatgggctaatcacagacttgtctcatctgattagtgtacagcctcagcttggcctgcatagatcacattccctagactctcataggatttgaccatattattgatggcactggcgagagcaggtgggatctgcaccccaagcgcccccactaa

SEQ ID NO: 284365 - DNA, 522 bp, Homo sapiens
gttctcatgctcaccttgtaggtcgtcttctgggttctgttattataaagagaagtctccttgtccttcctgtgcagatactctggctagttttctcttgtgggttgcagtttcttcagtggttcttggtctggatttattttcattcattctgcttggtgctcattataattcccacatgtgcagagaacaggaccaggagtgagttgcctaaagagaggctattgtgattgaaaaccaagttctgagatcagctccacgcatcacaacctaattgcatttattcctgtcctatttaataaactactatctctggaaattaagattaaggccataatttgtttttagctacaaagagaaagctggcctgcraggtgggaagacaggaaaaaatctaaagagctgttggcttgggggcatcaaggagcctgggagataggccatagtcctgggttgttttcccagccacacacacatgccaagaccctcgaacaaagactagctggtcatcagctcctcata

SEQ ID NO: 284366 - DNA, 577 bp, Homo sapiens
ttccaggctgcatattcatcctagactcccagacatgcaggatgtaaatggggataaaagttctcttcttttatggaaaatataaactttcccagaagcctcagagtagatgtcttcttatatcattggccaatatcagtcacatggccagccctagctgcaagggatgctgagagtgaaaacttccagcaaaatttctcagtccagacacattgctgctccaatrcaaaattaggtttctatcaacaaaaatgtgaaggaaaaacttttaaaggaactcacacatttcctctggaaattgagcactcatgagttgccgctcagagccatgtcttgagcatgagttgagtccccccagcagtggctcagggtgctgacctccctgcataatcatgggccctacaccactttccctacaaatgccttctcaccaccctctgcagtttcctaatcttggtcatcagtgcctggccctcagaaggctgtcactcattcaacagcattggcagagaggccgatgtgcacaaggccctctggtgggtgcttgaggactggtatcaaatcacctgtaagtgaa

SEQ ID NO: 284367 - DNA, 541 bp, Homo sapiens
agcaatccctcttatatatccaaaaggactgaaattgaagagatatctgcacaatcatgttcattacagtacaattcacaatacccaaagtttaaaaaatctaagcgtccatctatagataaatggaaaaagacatggcatgtatatacaatggaatattagccctcctttaaaaagaaggaaatcctgccatttgcmacaccatgaatgaatgtggaagacattatgctacgtgaaataagcccgacacagaaagataaacaccgtatgatctgacttatatgtggaatctaaaatagtccaattcatagaggcagaatagaatggtggttaccaggggctaggggaaggggatgtgggtagatgttgatgttgaggagcacaaagtttcatgtatgcaaggtgaatatgttctggagatccaatacacagcatggtaactacaggtaacaatactgtactctctacttaacatttgctacgagggcagaacctgaatatcctcaccatacacacaaaaaaggtaactacgtaaggtgtt

SEQ ID NO: 284368 - DNA, 538 bp, Homo sapiens
aatttgcattctaaccagcagtgaatgaattctccactttgtaactatgccaacagttggtattttaactccagtcattctggtagatgtgtagtgatacctcattgtaattttattatattttccttataactaaaaggttggaaaactgcccagtatgtgtggaagtattagagaataattaattaatcactaaaggacacartgaatgaatggaaagaaaagcatggcttcaattaaaactgcatttgctgcattgtggaagtagaggttcgctaatcactgagcgccatgctcccactggcatggactgttaacagggctcagttctgtctgaactcccctcccattattcagagtctcagcagtcccagggctcagaatgctaacaaccagtcctccttcctggtgtgggttccaggccgccaggtctccagactgttcgccaacattgtagggtttcagctatgtcctttgtaggcaccttcttgtttagttgaagatgaagtaggacagaaggactaaccctcttccccca

SEQ ID NO: 284369 - DNA, 559 bp, Homo sapiens
gcatggactgttaacagggctcagttctgtctgaactcccctcccattattcagagtctcagcagtcccagggctcagaatgctaacaaccagtcctccttcctggtgtgggttccaggccgccaggtctccagactgttcgccaacattgtagggtttcagctatgtcctttgtaggcaccttcttgtttagttgaagatgaagkaggacagaaggactaaccctcttcccccacctttctgaaaaatgcctaaatttgggtcccaaggattgtaacttcagtgaacatcctactggagacagccaagagtaaagaatggctgggacaaccttaagttagccagggtttgtgggaagcattagtgtcaactggggaactcagtgactgactataagtttcaaaggtcagagatggtgtgaccagtattgaagtcaggcattgcagggctattagcactaatggaaccagagactatatgatgatctgggtacagtgtgaccaagctggggagaggggaagagcctcttgcactgccgccctcagcagagttgtgcatt

SEQ ID NO: 284370 - DNA, 559 bp, Homo sapiens
gcatggactgttaacagggctcagttctgtctgaactcccctcccattattcagagtctcagcagtcccagggctcagaatgctaacaaccagtcctccttcctggtgtgggttccaggccgccaggtctccagactgttcgccaacattgtagggtttcagctatgtcctttgtaggcaccttcttgtttagttgaagatgaagtaggacagaaggactaaccctcttcccccacctttctgaaaaatgcctaaatttgggtcccaaggattgtaacttcagtgaacatcctactggagacagccaagagtaaagaatggctgggacaaccttaagttagccagggtttgtgggaagcattagtgkcaactggggaactcagtgactgactataagtttcaaaggtcagagatggtgtgaccagtattgaagtcaggcattgcagggctattagcactaatggaaccagagactatatgatgatctgggtacagtgtgaccaagctggggagaggggaagagcctcttgcactgccgccctcagcagagttgtgcatt

SEQ ID NO: 284371 - DNA, 612 bp, Homo sapiens
tgtattcttaatttttgacttctcacacccagtccctggcaccatactgggggttggccccactgggcacagcacttgacctgctctgccttggcagggtcccatgacccagagtggtctgacctttcacacttgacttcaaaaacagtcacctgatcccttcatcatttcttcaggatttttctcataggtcacagctagcttgataattaccttattttaacataaataaacccatgtatgattctataattaaaatgaccataatttaagattgtaatagaaagatcatcaggcaccactgyagtcaatgaaaaagatattttctgaattgatgatgctctttcgtaaacacagtttatattataatggcagcatcctaatctatttaagccctgctcagtattttctactctgcagctgagcaacatggaaccttcctgccatgaacctcacatcagagaagtggatgaaccttaactcttacgatagaaatcctggaataacgcaaagttgaaaagaacctcaaggagcttaacatataatgggggaaaaaaacaatcaaagttgcattcaatgtctcagtataggagatccaattatgcctaaaga

SEQ ID NO: 284372 - DNA, 574 bp, Homo sapiens
ggattagtgaggtaatcagccaagctgaggcaaaggccacagctcctgcctagtggcctcctctacatagtctctctgaatccaggttcaggcacctgctctttcactatgcccttttgggcttaaaaatggtatcacctgcccaatgattactagtcccaagagtacttcactatctctatatctacagctttataaatactgacttttaaaaattcttctcaagttactctaatataaatgtgccattttttttcctattaggacagtcactaatataacagacaaatccttgccatcttgaagtggggtggtaatagaaaggacagagatcagaaattatatagtatacaaggagataaatgccactgaggaatataaggcaatacagggaaccaggaagtatgtagcagatgggaattttatacaggtgaccagagaaagccttactaagaagctaacatttgtgcacaggttcaaaggaggtgaaggagtaggtcaagtgagagactttraaggcctgagctagggtagtgattggtcggacagagaaggatggcagattggagaaata

SEQ ID NO: 284373 - DNA, 616 bp, Homo sapiens
aaatttctagatgaagctgaagagaygggatgggtttgccttcaatagagatgactacatctattctgtggtcatgaatggaagcgaatgaaggctgaaggtcactaaaatggaaaaggtctagaaagtctgaagctgtaataatgattgcaatatgaccaccaccactggctagactttagataaagaacactgtgagccagacaacaaagttttaaataaacatagaagaaaagctggaaaatcatactttctcttccctggggagcccaaaagacagcttgtcagccctccgagcctgcaagtgtccagcctgacaactagcatgacatgcctgtccctagcaaaactataccaccatcaaaaactcctgcagcctaggccactgaggaaatcagacattgctgtgaagattacagctgacgaaactacacagagaccatggtactgaatccaccccaaaccaaagccaatgtaccatacccaaccaacactctaggacccatctacaggaaaagtctctccctgtgaaagctactgcatacaactggaaaatgtgactattccactagatgtgcagatgtcacaagaaacatgaaaaagcaaggacacacga

SEQ ID NO: 284374 - DNA, 526 bp, Homo sapiens
taataatgattgcaatatgaccaccaccactggctagactttagataaagaacactgtgagccagacaacaaagttttaaataaacatrgaagaaaagctggaaaatcatactttctcttccctggggagcccaaaagacagcttgtcagccctccgagcctgcaagtgtccagcctgacaactagcatgacatgcctgtccctagcaaaactataccaccatcaaaaactcctgcagcctaggccactgaggaaatcagacattgctgtgaagattacagctgacgaaactacacagagaccatggtactgaatccaccccaaaccaaagccaatgtaccatacccaaccaacactctaggacccatctacaggaaaagtctctccctgtgaaagctactgcatacaactggaaaatgtgactattccactagatgtgcagatgtcacaagaaacatgaaaaagcaaggacacacgacactgccaaaggaacacagtgagtctctagtaacagaccccaaagaaa

SEQ ID NO: 284375 - DNA, 526 bp, Homo sapiens
taataatgattgcaatatgaccaccaccactggctagactttagataaagaacactgtgagccagacaacaaagttttaaataaacatagaagaaaagctggaaaatcatactttctcttccctggggagcccaaaagacagcttgtcagccctccgagcctgcaagtgtccagcctgacaactagcatgacatgcctgtccctagcaaaactataccaccatcaaaaactcctgcagcctaggccactgaggaaatcagacattgctgtgaagattacagctgacgaaactacacagagaccatggtactgaatccaccccaaaccaaagccaatgtaccatacccaaccaacactctaggacccatctacaggaaaagtctctccctgtgaaagctactgcatacaactggaaaatgtgactattccactagatgtgcagatgtcacaagaaacatgaaaaagcaaggacacaygacactgccaaaggaacacagtgagtctctagtaacagaccccaaagaaa

SEQ ID NO: 284376 - DNA, 599 bp, Homo sapiens
agtctctagtaacagaccccaaagaaaagggtgtttataaaatgcctgaaacaaaattaaaaataatgatcttaaaaaaattcagcaggmtacaagagaatacaaacaacccaatgaaatcaggaaagttataaaatgagaaattaaaacaagatctatcatttaaaacacagaaatctgaagaatgcagtgaataaaagacacaatcgagagcttcaagaatagaccagatcaagcagaagaaagaatttcaaaatctgaaaataggttttgtgaaataacccaaagtttaaaaaaaactaagcaaagaaatttttgcattatagaactggcagatggagaaaagttgaagaaaggcacagaaaacctatttaatgaaataatagctaaaaacttcccaaatattgggggagatatagacatccagatgaaggaaccacaaagattcccaattagattaaacccaaaaagattctctctgtggcacattatagtcaaactgtcaaaagttgaagacagagaattctaaaatctgcaagagaaaagcatcaagttacatgtaagggaatcctaattagactatcagtagatttctcatc

SEQ ID NO: 284377 - DNA, 555 bp, Homo sapiens
aaaatctgaccagaccaataataagtgaggaaattgaatcagtaataaagtctttcatcaaagaaaggcccagaaaygaatggcttcactgctgaactcaaccaaacatttaacaaaccaatatcaattcctctcaaaatatttcagaaaactgaagcaaagggaatacttccaaactcatttcatgagtcaagcatcaccctaattccaaaatcagataacaatacaacacaggaaactatagtacaatatccctgatgaacataggtgcaaaaattctcaagatattagcaaaccaaatccaacagcacattagaaagataacttgctacattcaagtgcgattcatcactgggatcagaggcatgcaagaatggtttaacatacacaaagcagtaaatgtgatacacattaacaaagacaaaaactgtatgatcattttaatagatgcattaaaagcctttgacaaaatgtggcataatttcatgattaaaaacccaacaaattaggtatggaaagtttgtacttcaacacaaaggccacatatgacaaatc

SEQ ID NO: 284378 - DNA, 555 bp, Homo sapiens
aaaatctgaccagaccaataataagtgaggaaattgaatcagtaataaagtctttcatcaaagaaaggcccagaaacgaatggcttcactgctgaactcaaycaaacatttaacaaaccaatatcaattcctctcaaaatatttcagaaaactgaagcaaagggaatacttccaaactcatttcatgagtcaagcatcaccctaattccaaaatcagataacaatacaacacaggaaactatagtacaatatccctgatgaacataggtgcaaaaattctcaagatattagcaaaccaaatccaacagcacattagaaagataacttgctacattcaagtgcgattcatcactgggatcagaggcatgcaagaatggtttaacatacacaaagcagtaaatgtgatacacattaacaaagacaaaaactgtatgatcattttaatagatgcattaaaagcctttgacaaaatgtggcataatttcatgattaaaaacccaacaaattaggtatggaaagtttgtacttcaacacaaaggccacatatgacaaatc

SEQ ID NO: 284379 - DNA, 576 bp, Homo sapiens
gtacaacaatggatgaataaagaaaatgtgatacagaaacataatggaatactagtcagccattaaaaaataaagtcctgtcaattgtgaatgctaagcctggaggacatcgtgttaagagaagtaacccagacacagaaagacaaataccacatgtcactcacatgtagaatctttttctattataaaaggttgatatagataaggcasagattagaatagttaccagagactgggaaggggaggggagaaggaaggatggagagaggttagtcaaaagacacaaagttacaactaggtaggaagaataaattctggtgttttgttgcatagtatggtgactatggttaacagtaaaatactatatattacaaaataactagaagagagtcttttgaatgttctaacccacaaggaaataatgaaagtgtgaggtgaaggataactaactactttgattggataattgtacaacgtaaatatcaaaacatcaaatagtatctcataaatatatacaattacaatgtgtcaattaaatttttttaaacaattaaaaagttattagaccagctgttg

SEQ ID NO: 284380 - DNA, 633 bp, Homo sapiens
gctcccttttccacctcttccccctatagctcatcctccacttcctatatacacatatacactctatgcatcagtcactctgaaatttgttcaggtctgtgaaaatgctatacttcccctcatccccaacactattccttctgacagatgcgctttctccctcatcacctggccaactcctgcttatccttgaggtctcaagatagcattttctccaggaaaattccttaataaattccctccaccaagcttcattagtacccttactgtgtgttcccagagcactcaacctttgccctaacaaagtactctgtgtcaatcacactctgtaactgtctgcttacttatcacctttcctctaattccatgctggcctatgtggctcttggacactaaactgtaactagtatgactgaggaactgaattcttaatttcaattgctacaaattgtaaattaacactgatatctgaatcagttayagtaaaaatttaaagatgtttggaacaacttgggtatgtgagtctactttttcaactgtaagttgatgagatctaaatacagatgagaattaagcatctgaattgagatgtgctgtaagtataaaatacattgaattttgaagacttagtac

SEQ ID NO: 284381 - DNA, 300 bp, Homo sapiens
ggctaaagactgtttatgctaagtttgatggttgtgtgcacatccaggtgacaagtggaccatttgatatacatgttcaaattttgaaagagagctctgcccttgagacacagatttgggacacatgagcatagtagcatcaattcatctagaaagagaaagatacataaaagaaaaatatattkcatataaaatcatacctttcaagtacaaatatgacatgcaattaccagcctcacctcaagatatgtagagctgggatgttatctggctgcctagtttgaagataggatacaacat

SEQ ID NO: 284382 - DNA, 537 bp, Homo sapiens
gagatgcaggtgctggcagttgaaagtctgtctagcatacactgtaatggtaaggtccaaggattatgggtgaggattattgtcagcatctgagatggagcataatcaaagccaggaaagccataggataacaatggggccattagaaaaggataagaagagttaaaacaaaaaaggagacagagtctaagggaattttctgagttaaacaaggtgtttacagtgactcagattattccagccatcttgggtatcagcaagaagagacytaaggaacactatgctataaaactgcaactttggtggcatttgaaaagtaattcctgcttttactactaactcttaattctcagcagactaaaaatacattttcccatcttaaaaaagaacagtccttgagagaaaatgaaacaaagcaaccaaaacctctgtccactcctaaaatatttcactccatcttgtttttcttcttgtagttgttttgtaattttaaaaaatttaactttcattttaagttcaggtgtacatgagcaggtt

SEQ ID NO: 284383 - DNA, 537 bp, Homo sapiens
gagatgcaggtgctggcagttgaaagtctgtctagcatacactgtaatggtaaggtccaaggattatgggtgaggattattgtcagcatctgagatggagcataatcaaagccaggaaagccataggataacaatggggccattagaaaaggataagaagagttaaaacaaaaaaggagacagagtctaagggaattttctgagttaaacaaggtgtttacagtgactcagattattccagccatcttgggtatcagcaagaagagacctaaggaacactatgctataaaactgcaactttggtggcatttgaaaagtaattcctgcttttactactaactcttaattctcagcagactaaaaatacattttcccatcttaaaaaagaacagtccttgagagaaaatgaaacaaagcaaccaaaacctctgtccactcytaaaatatttcactccatcttgtttttcttcttgtagttgttttgtaattttaaaaaatttaactttcattttaagttcaggtgtacatgagcaggtt

SEQ ID NO: 284384 - DNA, 546 bp, Homo sapiens
ctgatttttctgccctaccaccaccctccaaaaaagcattcttgttctagaaataggaaactaaagtaatcagagggagggaagactttccaggtgaagataaaattgtcccccacccctcacaaactagaatgatttagtaccaagaaagatgaaaaaaatgagtccatgaaatcactaggacagagctaggatgaataattccgctgactactttgtgctactccaggtgcacagatcagagacaaaaatacctgccctcatggagtatatactttagtggagggagacagacaataaactatgaaagtgtattgatatggtttggctctatgtcccyacccaaatctcatcttgaattgtactcccataattcccatgtgttgtaggagggacctggtgggagataatttgaatcatgggggtagtttctcacttactgttctcatggtagtgaataagtctcatgagatctgatggtttatcaggggtttctgcttttgcatcttcctgattttctcttgctgctgtcatgtaagaagtgcc

SEQ ID NO: 284385 - DNA, 1097 bp, Homo sapiens
  misc_feature (1)...(1097): n = A,T,C or G
tagaagattgtaaatgggtgggggggtgcaatacatgatcaggtctatctttctgaaagatcactctagatgaagagagcagattgagaggagcaagctgtgtgaaagggganacagttaacctactcrtgcaatactgcagggaggaggtaatggtgctgttgaactttactggtagcagtgggaatggacagagacagacatggacacaactgagacatttagggattagaacagataggactgggagattgattgggatgtggagtttctggtacggaaggttaaaatagaaagaaggatcaaagacgtcattcaaatttctgacttcgaccacttgatggatggctacaaatagggaacaaaggagaaagtacaagattagagatggaatttggctttcagaaaatgccactgatgtacctcagaacagcaatgactgtatttgttttccgtaattccttctcctaactgaaaatttaaagataattgaatcaaattgttccttgggtgacttagttttatatctatacttaacacaggaatatwtagaagattgtaaatgggtgggggggtgcaatacatgatcaggtctatctttctgaaagatcactctagatgaagagagcagattgagaggagcaagctgtgtgaaagggganacagttaacctactcgtgcaatactgcagggaggaggtaatggtgctgttgaactttactggtagcagtgggaatggacagagacagacatggacacaactgagacatttagggattagaacagataggactgggwgattgattgggatgtggagtttctggtacggaaggttaaaatagaaagaaggatcaaagacgtcattcaaatttctgacttcgaccacttgatggatggctacaaatagggaacaaaggagaaagtacaagattagagatggaatttggctttcagaaaatgccactgatgtacctcagaacagcaatgactgtatttgttttccgtaattccttctcctaactgaaaatttaaagataattgaatcaaattgttccttgggtgacttagttttatatctatacttaacacaggaatat

SEQ ID NO: 284386 - DNA, 548 bp, Homo sapiens
  misc_feature (1)...(548): n = A,T,C or G
tagaagattgtaaatgggtgggggggtgcaatacatgatcaggtctatctttctgaaagatcactctagatgaagagagcagattgagaggagcaagctgtgtgaaagggganacagttaacctactcgtgcaatactgcagggaggaggtaatggtgctgttgaactttactggtagcagtgggaatggacagagacagacatggacacaactgagacatttagggattagaacagataggactgggagattgattgggatgtggagtttctggtacggaaggttaaaatagaaagaaggatcaaagacgtcattcaaatttctgacttcgaccacttgatggatggctacaaatagggaacaaaggagaaagtacaagattagagatggaatttggctttcagaaaatgccactgatgtamctcagaacagcaatgactgtatttgttttccgtaattccttctcctaactgaaaatttaaagataattgaatcaaattgttccttgggtgacttagttttatatctatacttaacacaggaatat

SEQ ID NO: 284387 - DNA, 1189 bp, Homo sapiens
  misc_feature (1)...(1189): n = A,T,C or G
tagaagattgtaaatgggtgggggggtgcaatacatgatcaggtctatctttctgaaagatcactctagatgaagagagcagattgagaggagcaagctgtgtgaaagggganacagttaacctactcgtgcaatactgcagggaggaggtaatggtgctgttgaactttactggtagcagtgggaatggacagagacagacatggacacaactgagacatttagggattagaacagataggactgggagattgattgggatgtggagtttctggtacggaaggttaaaatagaaagaaggatcaaagacgtcattcaaatttctgacttcgaccacttgatggatggctacaaatagggaacaaaggagaaagtacaagattagagatggaatttggctttcagaaaatgccactgatgtacctcagaacagcaatgactgtatttgttttccrtaattccttctcctaactgaaaatttaaagataattgaatcaaattgttccttgggtgacttagttttatatctatacttaacacaggaatatwttatgacaggtgggcagaaagagggtatacacagaaggtatagtatcttatagtaattacgtgtttacaacagaccaggtgctttacatgggttatttcacgtaatcctcataacaacctatggacactttttaaatgaatgagtatttttaatatctgtattttacagatcaggaaacaaaaacagagaatgaaataatttgcccaaggtcttacactctcctttaaagtaaacttatagaaatgaattctaactcaggcattcaccctctaaacccgacaagcttgatagaaacctcaaactacccttaaattgaaaatatccttatggcacagacctgaaataaacctccaatcaagaatcaagccaataattcagtagaagattcagagagcwaaagatttggaactgaaggcagagggcagaacccggaatgattctctggagtgcagaagttctttttaatggttcgagagtcttggaactgcttgggccacatgtgacaacacaggtccttgagacttcagagggtgagtgtgggagagactggcactgccacagatgagcctggaggaatccgggaatttaccattgtcctcttcacaattgtttttaggatcaagcctagagataaagagc

SEQ ID NO: 284388 - DNA, 1152 bp, Homo sapiens
ttatgacaggtgggcagaaagagggtatacacagaaggtatagtatcttatagtaattacgtgtttacaacagaccaggtgctttacatgggttatttcacgtaatcctcataacaacctatggacactttttaaatgaatgagtatttttaatatctgtattttacagatcaggaaacaaaaacagagaatgaaataatttgcccaaggtcttacactctcctttaaagtaaacttatagaaatgaattctaactcaggcattcaccctctaaacccgacaagcttgatagaaacctcaaactacccttaaattgaaaatatccttatggcacagacctgaaataaacctccaatcaagaatcaagccaataattcagtagaagattcagagagcaaaagatttggaactgaaggcagagggcagaacccggaatgattctctggagtgcagaagttctttttaatggttcgagagtcytggaactgcttgggccacatgtgacaacacaggtccttgagacttcagagggtgagtgtgggagagactggcactgccacagatgagcctggaggaatccgggaatttaccattgtcctcttcacaattgtttttaggatcaagcctagagataaagagcwtgggtgcagcgccagcatagcacatgtatacatatgtaactaacctgcacaatgtgcacatgtaccctaaaacttaaagtataataataaaattwaaaaaaaaaaaaaaaagaaaagaaatcaagagctttgtagctttctacttcactatcaccaggtagcaacaaggattctattgttggccccgagatggctgcaggagtgctaagcatcataccctctcccaaaaaatgtccaaaagcaagaatggaaggggcatttgtaggttttccttgggcatttcttttttcttaaccagaaaaaaaaatattttcaaaaatcccacccagcagacctcctatcatgtcctattgtttagaattgggcaacatgcctgtgctgtagcttccagagagactgggaaaggtgttttcagcttccaggtgggaggtgagacctactaaaaaggaaaaagaatttggggatgaatattgatgaggcaactaacagtgtgctatctcctttttccccc

SEQ ID NO: 284389 - DNA, 482 bp, Homo sapiens
gggcacatctgggattctatttgtgggtgacacttttctttctacttcaaaattgcatttttagtgttagtgctaccctaaaaataagtggaacaagtttcttagcactggaaaaaacaaatcttaccttatttattgcatgtactctctcctgatttccaagatgacaactagtggttccaataaattacacacaaaactaaaaccaagccaaaccaaacaaaaataacaacaaaaccaatatattgatatgtattgattattaataggtttagtggaacagggctagtcctgatggcttytcttttctactgacatgagaacctgttgtgggaacatttggacactatgtcttaatccatagaaatgtctcaaaggatgggaattttaggtccttgaaggaggcattttggaacaggtggatcttgtatgggtctccatatataaacatttagatagctctgtatccacccacaattaga

SEQ ID NO: 284390 - DNA, 511 bp, Homo sapiens
caatagagctcttatccattgcttgtgggtgggtaattggtacaactactttggaaaaaataccctctggctcagcaaatttattcttaggtatgcagcttagaaaaactgttagacatgtgcatctggagtcaagtccaagaatgttagagaagttctactcacagcagcaaaatgctggaaacaactcatatgtacattaactacagaatggataattgaatgttgctagtcgtacaatagaaaactacataacagtgcaaaaggatgactcatagaaagcatttgtcaacatggaagaacctggaaacataatgctgagtgaaggaagcaaatcacaaaagagarcatatgaatccatttatatgaagttcgaatctaggcaaatttaaagtcatttctgtagagatttagtaaagtgatcaagaaaagcaatgaattgttaaaagaaaaactgaataaatggacacaacagttggtatagctgtttcccctaactgagaaaagtagt

SEQ ID NO: 284391 - DNA, 561 bp, Homo sapiens
ggaggtcaaggtggttgaatcatttgcgccmaggaactggacagaccagcctgggcaacatgggaaaaacctctctctaccaaaaaagaaaaaaaaaaaaattagctgggtgtggtagcatgcaccagtagtcccagttactcgggctggtcacatgagcctggggaggtcaaggctgcagtgagcagtgattgtgccattgcactccagcctaggcaacagagtgagaccatttctctaaatacatacatacatacataccttttgtggagttaaatttacacactttttctttattggctctggcttttgcattgtagtaagactttctttacactcaacttatagataaattcacccatgttttcttctagtacttgcatagttgaattttagatctctagtccatttggagtttattttttgtatggtagaaggtattgatcctattttttcccaaatagttgttacccagttgtcccaaaacaagttattgaaaagtccatctttgtcccagatagactggaacaaaatgaattaaagacttaaatatgaagattt

SEQ ID NO: 284392 - DNA, 575 bp, Homo sapiens
caatgtgattggctttcatcattttcattcatttcaagaagggcaattttgttgagatcatttgttccttgattttactacctacttatgtatttgcccagacctttccttttatatgtccacttccatctcagtccctcaggaaaaacatttayaaatgtatagggttgggggaggtctccaagaatggcaccaacagaaaacatgaccttaatggattcatcttaatcaaaaacctagtctttttttttttggcattatcagttcagctacacagatcagtttgtatatacagttcatatatatcataccagatgatctttgcaccaattcctcctgagcctcagattatggtaattggccctttctccagcttctcagcaattcacttcaacaatatcttcatcattatcttcatctctaatctctgtatcccagcacctagcttaatgcttcaaacacaggctaggcttccaataaaagttttttattgactgtatttactatcaatcagaaaatcccttaatcacactgtatacatttccacctctggacctttgctccttcatttccta

SEQ ID NO: 284393 - DNA, 575 bp, Homo sapiens
caatgtgattggctttcatcattttcattcatttcaagaagggcaattttgttgagatcatttgttccttgattttactacctacttatgtatttgcccagacctttccttttatatgtccacttccatctcagtccctcaggaaaaacatttataaatgtatagggttgggggaggtctccaagaatggcaccaacagaaaayatgaccttaatggattcatcttaatcaaaaacctagtctttttttttttggcattatcagttcagctacacagatcagtttgtatatacagttcatatatatcataccagatgatctttgcaccaattcctcctgagcctcagattatggtaattggccctttctccagcttctcagcaattcacttcaacaatatcttcatcattatcttcatctctaatctctgtatcccagcacctagcttaatgcttcaaacacaggctaggcttccaataaaagttttttattgactgtatttactatcaatcagaaaatcccttaatcacactgtatacatttccacctctggacctttgctccttcatttccta

SEQ ID NO: 284394 - DNA, 570 bp, Homo sapiens
caaggtcctgtggcaaatgcatacttggtgtgttcaaggaacggtaagatgtggctggtgctagtgagaaagcaggagagggataagacataagagtagagggatcaggcacaagtagcccatgtagggtaatatagactacattaaggacattggattttatgctgaacatgcagaagaacgatgtgctctaatgtacactttaaaattaacatctgggccagacatggtggctcatgcctataatcccaacactttgggaggstggcacagaaggattacttcaggccaggagttcaagactagactgggcagcaaagggagaccccatctctagtaaaagttaaaaaaaaaaaaaaattagtcaagtgtggttgtgtgcctgtagtcctagctactggagaagctaaggcaggaggatcacttgagcccaggaattaaaggctacagcgagctatgatcaccagtgcattccagccaaggcgaaagtaagacccaatcttaaaacaaacaaaaacgaaattgctacatggagaacagactgatgggggacatcgttggacagacact

SEQ ID NO: 284395 - DNA, 616 bp, Homo sapiens
agtggtgacaatgatgctgctcaagcgtggatatatttccaaggaagaggcaacaggatttgttgataggttggatgtagaatgaaagacaaagggtggaatgtagcaagtctccaagtgtttttggtttggacaatcagaataatgaagttcccacttactgaaatgggaaaatctataggaggtacatatttagaggctgcaggagaaaatgtggagtttgttgtagaacataagtttgagaagtttattagacctctaatatttaagtagaagatttataaaactggaattcagaggagaggtctagactagagttacaaatttgaaagacatgagcatttagatagtatttgaagccagaaactagagaagktccaaccagagaaaacagaaacagagacaataagaagtcagaggacagacatgggaaaatgagaatacccaagaatggagactgggaaaaagcagcccaatggggtaggaggagaaccaaaagaatgacatccaagaaggtaggtgaagaaagctgtatcaaggagcatagtgtgactacttgtcagactcttagtaggtcaagtcagatgaggactgaccttgacgagtaagctgtaga

SEQ ID NO: 284396 - DNA, 597 bp, Homo sapiens
tggccaattggtatgcacatacccacttatcccctcttaagataaaacattctcagaaaaggagagccagctgtgcaatttaatggtaaaacccactccccaactgaagtgctttaattacactgcaaatggagattatttctgagagagaaccttctactactttggtcttgctgtggccagttttaaagccccatttatcccaatgctcactaattgtttgaaattggacctgtgaacacaggcttcaggcttttatcaaggtttcccagtaggagtcaaaatgcttccacaatgagctgattacagagaaagctgcagcttcaagagtagaattagcatccagcatgctctttcagaaggaaaatttagctgttttcaaaacatctgatttttttttctttcagtttatgcttgtctagccagakaaactaaatggctttaattctgtaaaggcttaaatgatatgttttatttgatcaagtcattcccctgctggaaatccctcaattgtattccatagctttgagactagaaattcaaatttcttagcatagtacagacaaaaatctacatgatttggttcctgcctacctc

SEQ ID NO: 284397 - DNA, 593 bp, Homo sapiens
taaaaccaaaaactgtcaggcattataacatttttagttctctccctcccaagtcaccagtgctctattctagcactgtcaaataatgatagctgccgtcattatttttatacaatagctggcagcaagttgcacagaaacccttcatcttagaagagttaccaaatagcttaaacaaatgctgggaccttacagtagtactgaccaccttcctaargccaaaataagtgagctctcatgccttattgatacttttctggccagaatgttagctgttttactaaaaaaaaaaaaaaaatttacttattttatttttttaactgtttaaaaataacttttttcctccttacacatatattcccatcctctccttcctgctactagaaactgtcttaaaggttttcacatttacttttagctttaacactttcaatcaaaattgcaattctgtttttggaagcaggcaccctccaggaagtatatttgaagatattaaaaaatgcagaaaataaataagttcttttcattaaacaaagtcaacaatgcatgtaaagggatttaggaaaaccggtgatctcagacacaagtgattt

SEQ ID NO: 284398 - DNA, 593 bp, Homo sapiens
taaaaccaaaaactgtcaggcattataacatttttagttctctccctcccaagtcaccagtgctctattctagcactgtcaaataatgatagctgccgtcattatttttatacaatagctggcagcaagttgcacagaaacccttcatcttagaagagttaccaaatagcttaaacaaatgctgggaccttacagtagtactgaccaccttcctaaagccaaaataagtgagctctcatgccttattgatacttttctggccagaatgttagctgttttactaaaaaaaaaaaaaaaatttacttattttatttttttaactgtttaaaaataacttttttcctccttacacatatattcccatcctctccttcctgctactagaaactgtcttaaaggttttcacatttacttttagctttaacactttcaatcaaaattgcaattctgtttttggaagcaggcaccctccaggaagtatatttgaagayattaaaaaatgcagaaaataaataagttcttttcattaaacaaagtcaacaatgcatgtaaagggatttaggaaaaccggtgatctcagacacaagtgattt

SEQ ID NO: 284399 - DNA, 594 bp, Homo sapiens
taacatttacattttattaggtattataagtaatctataagtgatttaaaatattcaaarggatgtgcacaggttatatgcaaatactactccattttatgtaagagacttgagcatctgtggattttggtactttctatgagtcctggaaccaatcctctgcagataccaagggatgactataatttagtctgagtctgaaggactgagaactggggataggaggaaaggctggtgtaagtcctagagtccaaaggcctagggaccagaagttccaatatcccagggcagaagaagatggatgtcccagctcaaaaagagagagagagaatttacccttcctctgccttattgttctatttaggccctcaacaggctggtgagggtggtcttctttacttggtctacttacaaaaatgctaatctcttctggaaataccctcacagacacacacaaaaataaagttttaccagctatctgggcatcctttagcccagtcaagttaacccataaaattaatcatcacaagcaccctatttttaaacttgtgtttctgcagggaaaatacatacacaggccaagaagcaaaacac

SEQ ID NO: 284400 - DNA, 609 bp, Homo sapiens
aatgaacctggacctttgtaagctagcagtggaaatagcaagcaacaagagtgcttgattcataaggatttttttggtttgttttttatttttttaaaaaacacaactaatttttagttcaaaaagtaagtacagaaaggatgagaggtgggtgttgtgttggaactgttcagtatcttgactggcagatacaggcataaacgcaggaaacgaaattgtaaagaacttcacacacgtatgtacacaatacactcatgcatacgcatgaactcacaaatgagtacaaataaaaatgggaagtctgaataagattgctggattgcatcaatatggttgtaatattatattacggttttacaaaatgttaacattggaagaaaccaaacaaagtatacaaggaatatttatgtattatttctcacagtgtcatgtgagtacatgtacaattatctcaatgaaaatttcaataaaaagtaattatataattctaaattaactttattaaacagtgagttaaaatgaaaatcaaattaattttttaaaaaactacttttttaayatgaaaaacactacaagtatttctcaacttggatgataataataataata

SEQ ID NO: 284401 - DNA, 565 bp, Homo sapiens
ggtcatgtgtgaaataacagtagtatagacacaatatctgacctcctaagcctttctttgagattaatgtctaattattcctgtcactattttttttccagcactaccaaaatatttttaattaaatccttattcctttaaattgtttcattttatttttaaaagtgtacatgtttgatatgaaccacaattagttcaggagagttggttagctgggcctaagtaagctcttttgtgttgaatactaagaacaactggagatacagaactcagaggcagatgttgactgggtttacttgcattcagaatggcagcaattggatatgtgatcttggacctgagtatgaagccaatatcggtgatagaggtaacaaacacacggaattgtgagtctcragaaaggtcagaaatgagaggatcagcatgaggaacaaggacaaaccatccaaatcaagggaagaaagcccaggtgatctatctaaggagaggtggggcaggtgttgtgcaatggtcaaaatggcaggcaaatgaaagagatctaagcagtggggtgttcagtgttgga

SEQ ID NO: 284402 - DNA, 565 bp, Homo sapiens
ggtcatgtgtgaaataacagtagtatagacacaatatctgacctcctaagcctttctttgagattaatgtctaattattcctgtcactattttttttccagcactaccaaaatatttttaattaaatccttattcctttaaattgtttcattttatttttaaaagtgtacatgtttgatatgaaccacaattagttcaggagagttggttagctgggcctaagtaagctcttttgtgttgaatactaagaacaactggagatacagaactcagaggcagatgttgactgggtttacttgcattcagaatggcagcaattggatatgtgatcttggacctgagtatgaagccaatatcggtgatagaggtaacaaacacacggaattgtgagtctcaagaaaggtcagaaatgagaggatcagcatgagraacaaggacaaaccatccaaatcaagggaagaaagcccaggtgatctatctaaggagaggtggggcaggtgttgtgcaatggtcaaaatggcaggcaaatgaaagagatctaagcagtggggtgttcagtgttgga

SEQ ID NO: 284403 - DNA, 565 bp, Homo sapiens
ggtcatgtgtgaaataacagtagtatagacacaatatctgacctcctaagcctttctttgagattaatgtctaattattcctgtcactattttttttccagcactaccaaaatatttttaattaaatccttattcctttaaattgtttcattttatttttaaaagtgtacatgtttgatatgaaccacaattagttcaggagagttggttagctgggcctaagtaagctcttttgtgttgaatactaagaacaactggagatacagaactcagaggcagatgttgactgggtttacttgcattcagaatggcagcaattggatatgtgatcttggacctgagtatgaagccaatatcggtgatagaggtaacaaacacacggaattgtgagtctcaagaaaggtcagaaatgagaggatcagcatgaggaacaaggacaaaccatccaaatcaagggaagaaagcccaggtgatctatctaaggagaggtggggcaggtgttktgcaatggtcaaaatggcaggcaaatgaaagagatctaagcagtggggtgttcagtgttgga

SEQ ID NO: 284404 - DNA, 612 bp, Homo sapiens
ctgtttcttcttcagcttgatggcaggtaccttgaggctatctgaaacaatatgctacagtggaaaagtatctctcttaatctgatgtttactgaagggctgagttgtttgagaaatctcaccggctctttgtcactcaggaccattttttatttggggtccaaaagctatcaacttgtcaaccatgtaaggcccttgatctctgaactttcttctgtccattctctgcttggaaatcagctcgagctcacctgagtgcatatctttcttgcttaagttctggccaactcactaaccctctgacagttccaactacttgccctagagccacagattcagtagatgtgtggtctgctttccaagctctcccatgacagctttactgaaaacctgctgagacacagcagaactctccaaacagccaggctgctctatcatagcctcactttctgttggccagccactaaattaatgycacttatttttggatattgtgattatagtagcacatgtcaaagtaccaatttctgtacttagcaaggtggaatagctactgtaaccaaacaccaaaatctcaatgccttaatatactaatagttaatttctattgac

SEQ ID NO: 284405 - DNA, 597 bp, Homo sapiens
tattagaataagaaaacagctgttatatattttctataattttaaaattttacaattaagaatgcagtcattatggttaatccaagataagtgaagatccagtataatatcagttatgtttcgagttactgtagaggaaatgaaaactgattttttttgactgatacagtgctcaggctgggatctctgtggaaaataaaattgtttcttttaaacttgaaaatatactcagaaaattggcttttcgagtattttatattctaattttaactctccttgtatctttagctctcaaacaatagtcattgggtactctgaaactttgctgtgtttcataaatcatctcaaaaatgtagaatrtgacaaattcttgggaataaaagaaaaaaataaatttaatgtttttaagaaatgccagaatataacacataaaagagaaaagaatgatcagaaatccaaatgaatctcatttgacttttagcataaattttcataaccaagaagttaaaggtggaaaattaatatagaatactctcaagctagttttatttgtctcttctgttcataatgacatactaaattttaattttaatatga

SEQ ID NO: 284406 - DNA, 597 bp, Homo sapiens
tattagaataagaaaacagctgttatatattttctataattttaaaattttacaattaagaatgcagtcattatggttaatccaagataagtgaagatccagtataatatcagttatgtttcgagttactgtagaggaaatgaaaactgattttttttgactgatacagtgctcaggctgggatctctgtggaaaataaaattgtttcttttaaacttgaaaatatactcagaaaattggcttttcgagtattttatattctaattttaactctccttgtatctttagctctcaaacaatagtcattgggtactctgaaactttgctgtgtttcataaatcatctcaaaaatgtagaatatgacaaattcttgggaataaaagaaaaaaataaatttaatgtttttaagaaatgccagaatataacacataaaagagaaaagaatgatcagaaatccaaatgaatctcatttgacttttagcataaattttcataaccaagaagttaaaggtggaaaattaatatagaatactctcaagctagttttatttgtytcttctgttcataatgacatactaaattttaattttaatatga

SEQ ID NO: 284407 - DNA, 617 bp, Homo sapiens
taaaacgatctaaacagctgtagaaacatttctgagccttgttgatgaagaagtaatctcgtttgatggacgtcttcatttctatcttaatcacagcatgcaagattagcaatacatgtgtttcactccacttaattgctcagaacgcatgcacaaatgcagggctttacttcaattaattattttgaatttcaatgaacttaggagagaccacactgaaagtatctgatagagtccttagataaatgtaatgaatgttagagaaactttatataacagtctcctccaagtcttgattttctgccatcatagtgaaagaatctgaaaatataaacatgaacatataaaaataaatcagataattggatgacctaatgtgctgtctttagctatagtcattaactgagkgttcaaagaatactgaaaaactattagattaactgtgccgtggttataggaaaaaaggaaaggcatatgttcttactcatacattgatctaccatttctgaccctcatcataaatttattagtgactattctgttatacttgtcttgaaaaacattctagatttaagtcaagattgtttttaaattttcatcatatgtgctaaaacacc

SEQ ID NO: 284408 - DNA, 564 bp, Homo sapiens
tctcttctacagcaacaggctcttttatattttaggcttcgaaatcttctgccagtagtacaactcacaaattcaaaacctctgaatcatcgttgagtcccttcttgctccatatccaatcagctaccaaatacctctagtttcctcctcacaatattcacaatacactcaaacaattttttttttttttttgagatggagtcttgatttgtcacccaggctggagtgcagtggcgygatcttggctcactacaacctctgcctcccaggttaaagcgattctcctgcctcagcttccttagtagctagggttacaggcatgtgccaccatgcctggctaatttttatatttttggtagagacagggtttccgcatgttggccatactggtcttgaactcctgatcccaagtgatccacctgcctcggcctcccaaagtgctgggattcttccatctcaattcttccatcaccaagtttcccacctggataattacaaaagcctgctagctagggtatctctcctctaagatctaaccatccactactccccttccactactat

SEQ ID NO: 284409 - DNA, 472 bp, Homo sapiens
cttctgatgaagcggcaccttacagacaagcctttctatggtaaacatgtggtgtgttattgtgaacaaggaatatctgtctcatttctcggccttacaaaaatcttgttcaactatcttagtctggtaagagttgaggtactagaaatggtggatgaggatatgtggctgtacccccaggtaaaacaaggatgaggaagctgtatggggaaaaactgtcccatcctttgggaaagtatcctgtgctacatgggtcatcatcttctgtacaatgtgaagctcaacatcctcttcttaattggcacaaaatgaagtgtttctcaggaaggatgtcacagctttttccaaatgtgactccatattaatctcaaaaaccatgtggaacaacctrctgtgtagacccgtgccaagaattatgaatgagtcaggaaagcatcagccagatctctaagagagaccatgtatatgtttt

SEQ ID NO: 284410 - DNA, 635 bp, Homo sapiens
tttcatcttttgtttctcgtttctttttcttcttatcacatacttggtcccgtatggatacttaagacacatcaacaaggcagtgtttgagaatggggatatagtctagaattacaaaagcaaagtgcttatgtggacgataaggacttggtgaggaaaatatggttctgctctaacatatagacatatgataggcctcagattaggatctcagtgttggaagagaccttaagattcataaggtctgattgtacatccattgcttaaatcttttctgtgacagcctctccaagtggacatttgagttatgcctacgtgtacctccagcacagaaaagtcactcaatccaaagagtactcattctatttttgtacagttacatgtttttaaagggtttttttgaattgaccctttacccatgtatgttgcaagagagagatggggtcttcaaaacttagggaagtatggyggaaaaacggattttgcctaggagaaagtcaggagcctataggaccaaggctagaaggaccaagatattacaaaggaaacaatagatgcaggaggaagcaactaaaatacacgagactgtctgattagcctcagtagtcttgctcaaaaaatgttgtgaggagacg

SEQ ID NO: 284411 - DNA, 535 bp, Homo sapiens
gaactgagggtctttgtcagtcaagattcaatcagaaaagcagaaatgactctacatacttcagacagaagaaatttaacataggaaattgattatacaggtgatgaaagaattgagaagccaaaaagacaatggaacaagcagggaatcactgccacccctaggaatagaggctcatctctagaaggtagtgttaccagggcccaaaatccagggtcaccaggtaaagctggaactgtgcttacacataccacaagttccagctcggggtctgggagacacagcctcagccggagatagtatatgaagtagagagagagaagacaagaaacactgggttctccttccacccatcctccaatcttttacctgtcatgcacattggccaaacataccttgaagccagagggcaagagagtctaggaattayagttttctgaaactcagaaaggaagaggaagaggaagaatgaatctgaatgaaaaaaaggttggttcagtgttcaagtatcccatgatgttctcttaacagacaa

SEQ ID NO: 284412 - DNA, 497 bp, Homo sapiens
acattttattcttgtcttatagtttttttyttttagcactttgaatacaatatcccattctatactggtctggaaaatttcatctgaaaattttgctaatagtctaatgaagatttccttatatgtgatgaaatatttctcttgcagcttttacaattctttttgtctttgactttcaacagtttgattataacatgcctcagggaaggttttttttttttttttttttttttggttgaatttcaccggggacttttgagcttcttgtatctgaatgtccatatctttccctaaacttggagagtttttagctattattttgttaaacagattttctgtgcctttctttatttcttcttcctctatactcctataatgtaaacatttgttcacataatggcatcccataattcccatagactttcttctcttctatttctctgaatgggttatttcaaaagactgtcttcaagttctgaaattcatctggtctgcta

SEQ ID NO: 284413 - DNA, 599 bp, Homo sapiens
tccagtgcaggaatgcacctcccattggtgttgccaatgcactgcaaggggactcatgcatctgtgcatgtgtgtggggtaagaagcctcaggcagaagtgagtgtttcatgaactacactatggtgataattgtagcaagaattgccacagaatcttctctactcagaagcagcaagtactgcttcccacatagtaactgacagaaacgtcctagaaaagagggtagaaaaatggaggcaggtgcagtggctcatgcctgtaatcccagcactttgggaggctgaggcgggcggatcatttgaggtcaggagttcgagaccagcctggccaacatggagaaaccccatctctagggggatggagccaagatggccgaataggaacagctccagtctacagctcccagtgtgagcgatgcagaagatgggtgatttctgcatttctaactcaggtaccaggttcatctcacttgggagtgctggacagtgggtgcaggacagtgggtgcagcgcaccatgtgtgagccgaagcagggcraggcattgcctcaccctggaagtgcaaggggtcagggaattccctttcctagtcaaagaa

SEQ ID NO: 284414 - DNA, 448 bp, Homo sapiens
ctctctttccctctgccatgtgaagatagaagaagaagatggccatatgaaaacctggaagattgtcgtcatcagacaccagatctgtcaatgccttgatcttgtacttctcagtcttcatgcyggtgagaaatatgcgtttgtttcttaagccacaaagtctatggtatttttttaatagcagcccaagctgacaaaaatagatagatgggacatgacatgatgaatggatgggtggatcaatgaatcaatcactattccttaggattattgtattggttttatgacaaagccccctctctacctatgctcaccatcactgtggttgctaaacacaggttaaaaaaaattcacatcttgtaggcctagaataaataaactttgctcttggactcctgatatctaaaattaacattcttactataagattaaatgttttcttggtaag

SEQ ID NO: 284415 - DNA, 1146 bp, Homo sapiens
ggttttatgacaaagccccctctctacctatgctcaccatcactgtggttgctaaacacaggttaaaaaaaattcacatcttgtaggcctagaataaataaactttgctcttggactcctgatatctaaaattaacattcttactataagattaaatgttttcttggtaagacattcaaataaaaatgatctttcctaaccaatgcatctccaccagttctactccccttgggcacagattattaaaagattattaacaactttttatctagccttttagaagtgtgttttggggtggataagtgaggctgtaaaagaaggtgcaccaagttgacacaagagggggagtcaataaataatattctggaacttgatttttctttaacttgaaacatagcttgggtatatttttatgtgaagacatatakatctacttaccatttcattcttttttatggttacataatattctgttttatattggtgaagttatttatttaactaatctgtacaagatggatgcttacaatatttacagcctttcatcawggattgttggacattaagagcactgggaacaaaggaattctagctgttcctagctctttgtacctctggatgcacctttctctatttaatcttctagtagacatttgggtatatggcaattgcatcctcaccacccttgttccatctaacaagcttgtatttgatttggatatccaaatccaaacagttctggagaggctgactggacctctggctgtggaaatgaactatgtgacctagtctaagctagtcaatatgttccactctgattcctcacatcctggcctgagtaataattttagaaatagatatgcgacttaagcttgtccaatcagaatgaatttcaaaatttgctctaaggatggtgggacaaaggtctcttctctcttctaaggcaggtctgaacgaggaagcatctagctgttggaactgtagcagctctcttggagccatgaagtcaggcttagaatgcwgcccacagcaggtgaagtagagcaaagaaatgggaagtaaatgggccttaggacaacactaggactccatatcaagctctctggtagctagccctatttccagaaatttcatttatatgaggca

SEQ ID NO: 284416 - DNA, 633 bp, Homo sapiens
ccagcaagtcttttcatagttaacagataaaaaacaaataagttggtggggtgtggtggctcacgcctgtaatcctagcacttttggaggccgaggcaggtggatcacttgaggtcagaagttcgagaccagcctggccaacatgatgaaaccccatctctactaaaaagtacaaaaattatctgggtgtagtggtgcgcacctgtakttccagctacacaagagtctgaggcaggaggattgcttgaactctgaatgtggaggttgcagtgagctgagatcaggccactgcactccagcttggatgaccagctagactctgtgtcaaaataaatacataaataaataaaatacaaaataaataaataaataagttattatcttttttactctactttagttagaaagttccagttgaagttaacagtgagttgcttacattttagagctcatggggatttcagaaatagaaatttaatatttaagaatattaattataatttaaaagaaagtgatgtacttaatgaaatatgatattgtgggttggatcttgaaaaaaattagcacattagtgaagaaactggtgaaatgaacaaagtctataatttagttactaacaatgtgcccataccc

SEQ ID NO: 284417 - DNA, 572 bp, Homo sapiens
ggagctgtgtgagtgaatgggtggtctcaaagactgctttggactccagtatgaggttggcaaagcaggaaaagggcccgcagggcagtacagaattggcyaagtctgatggttcctgcaagggtctcccagtttggacaaagaaactcggagaacatggaccttagccgtggtggaattgcatgggatgcaatgaggaaaggttctgactcctcaagaatctccacaccacatcttttcccctaatgctatgagctctggtgaaaagacaagaaaatagagaggaggagaacacaataaactaattatgtatttaaacaaaattcagttttaaacaaaaagaaatttatataaattggtacattttaattttctaccaccagaagaaagttatatatctgtactcctgaacctttgactataagagttcctataaatgttaagaaagaaagaacaatagtaagtatgaattgaaaaggattttcagaaagagcatagtttcttaggactttgttgagagattttcaattaatcggtagaaacagaaagtaggttgaggaatgaatgggaaa

SEQ ID NO: 284418 - DNA, 572 bp, Homo sapiens
ggagctgtgtgagtgaatgggtggtctcaaagactgctttggactccagtatgaggttggcaaagcaggaaaagggcccgcagggcagtacagaattggccaagtctgatggttcctgcaagggtctcccagtttggacaaagaaactcggagaacatggaccttagccgtggtggaattgcatgggatgcaatgaggaaaggttctgactcctcaagaatctccacaccacatcttttcccctaatgctatgagctctggtgaaaagacaagaaaayagagaggaggagaacacaataaactaattatgtatttaaacaaaattcagttttaaacaaaaagaaatttatataaattggtacattttaattttctaccaccagaagaaagttatatatctgtactcctgaacctttgactataagagttcctataaatgttaagaaagaaagaacaatagtaagtatgaattgaaaaggattttcagaaagagcatagtttcttaggactttgttgagagattttcaattaatcggtagaaacagaaagtaggttgaggaatgaatgggaaa

SEQ ID NO: 284419 - DNA, 572 bp, Homo sapiens
ggagctgtgtgagtgaatgggtggtctcaaagactgctttggactccagtatgaggttggcaaagcaggaaaagggcccgcagggcagtacagaattggccaagtctgatggttcctgcaagggtctcccagtttggacaaagaaactcggagaacatggaccttagccgtggtggaattgcatgggatgcaatgaggaaaggttctgactcctcaagaatctccacaccacatcttttcccctaatgctatgagctctggtgaaaagacaagaaaatagagaggaggagaacacaataaactaattatgtatttaaacaaaattcagttttaaacaaaaagaaatttatataaattggtacattttaattttctaccaccrgaagaaagttatatatctgtactcctgaacctttgactataagagttcctataaatgttaagaaagaaagaacaatagtaagtatgaattgaaaaggattttcagaaagagcatagtttcttaggactttgttgagagattttcaattaatcggtagaaacagaaagtaggttgaggaatgaatgggaaa

SEQ ID NO: 284420 - DNA, 622 bp, Homo sapiens
ctgcatgccctaagtttctatcctacccaccttgagactctacttgtatcagagaggtagagacagaagataaaccctctcttgttgatttttaaaaacatacatgtatgatcttcttttcctttatcttcctacattttagcataatgaaacttcctactactaattgctgaccatcttggaacctagttgggcaaacaaaacctttagaaaatgattttttaaaataaggaatctgaggttgagcctatggcactctattttyctctgtggaactcaggagatatggttgtttacttttcttcctctggcaggtataggtcctccaaataaagagaactatatcaatcaataaaaaaagagagctatatcaatagtttgacaatagttattcaaaatggtgatggggatatggcttctttttgatagtattgagacttcagattctaataactttcaatttcatggcaacagaaaaggcttggtttgtattatagcttaacatctatgagagattcacgggatgtttgttggttgtgcatgaaagaataaggtgaatactttggggtaacagttttctgttaacctaaacaatttaggtcttcaataatacaaactgaga

SEQ ID NO: 284421 - DNA, 535 bp, Homo sapiens
aatgacattattaaactgtctgggacagtgcctggcatgtgatgagtaccyatcaaataatagctattgtgatagaagctgattgttttctatagaacaggggtccccaaacccagggccatggcccagtactggtctgtggcctgttaggaaccaagccacacagcagtaggtgagtgaatgaagcttcatctatatttacagccattcccccttacttacattaccacctgaggtctggctcctgtcagatcaactgtggcattagattctcataggagcaggaaccctatagtgaactgcacatgcgagggatctaggttgcatgctccttgtgagaatctaatgcctgatgatctgtcgctgtctcccatgacccccagatgagactacctagttgtaggaaaacaagctcagggctcccactgattctacattatggtgagttgtatactataatataaattataatatatataatttcattgtatattataatgtattaataatagaaactaaatgcacaataaatata

SEQ ID NO: 284422 - DNA, 535 bp, Homo sapiens
aatgacattattaaactgtctgggacagtgcctggcatgtgatgagtacccatcaaataatagctattgtgatagaagctgattgttttctatagaacaggggtccccaaacccagggccatggcccagtactggtctgtggcctgttaggaaccaagccacacagcagtaggtgagtgaatgaagcttcatctatatttacagccattcccccttacttacattaccaccygaggtctggctcctgtcagatcaactgtggcattagattctcataggagcaggaaccctatagtgaactgcacatgcgagggatctaggttgcatgctccttgtgagaatctaatgcctgatgatctgtcgctgtctcccatgacccccagatgagactacctagttgtaggaaaacaagctcagggctcccactgattctacattatggtgagttgtatactataatataaattataatatatataatttcattgtatattataatgtattaataatagaaactaaatgcacaataaatata

SEQ ID NO: 284423 - DNA, 548 bp, Homo sapiens
tgcttgtacttattggccaagtactacaattctttkgattgagtaagccatttccttctgaaacatggacaatactcccttacctgggttatgataagccctgatcctagttttcagtcaataaagatatgtagggacagattttaaagataggcatcattttttgaagcatttgccttggttaatgtatttgcatggttcctcaataaagggaagctggtttccagctagagctggcgtgcttctgcaggtccagatgattttgttttagttttatttttccacaaattattggggtgcaggtggtatctggttacatgagtaagttatttagtggagatttgtgagatcctggtgcacccgtcacccaagcagtataccctgcaccatatttgttgtcttttatcccttgccctccctcgctctttccccaagtccccaaagtctattgtatcattctacccctttgcatcctcatagcttagctcccacatatcagtgagaacataagacatttggttttccattcctgagttacttcacttaga

SEQ ID NO: 284424 - DNA, 548 bp, Homo sapiens
tgcttgtacttattggccaagtactacaattctttggattgagtaagccatttccttctgaaacatggacaatactcccttacctgggttatgataagccctgatcctagttttcagtcaataaagatatgtagggacagattttaaagataggcatcattttttgaagcatttgccttggttaatgtatttgcatggttcctcaataaagggaagctggtttccagctagagctggcgtgcttctgcaggtccagatgattttgttttagttttatttttccacaaattattggggtgcaggtggtatctggttacatgagtaagttatttagtggagatttgtgagatcctggtgcacccgtcacccaagcagtataccctgcaccatatttgttgtcttttatcccttgccctccctcrctctttccccaagtccccaaagtctattgtatcattctacccctttgcatcctcatagcttagctcccacatatcagtgagaacataagacatttggttttccattcctgagttacttcacttaga

SEQ ID NO: 284425 - DNA, 583 bp, Homo sapiens
attctgttcaattggtctatgtgcctatttttataccagtaccatgctgttttggtgaccatggccttatagtatagtttaaaatcaggtagtgtgatgcctccaggtttttttkttgttgttgttgttgttgttgtttttgtttttcttttttgcctagttttgctttggctatgcaggctcttttttggtttcatatgaattttagaattgctttttctaactctacgaagaatggtggtggtattttgatggggaggtgttttaaggcaacataagactcacagctctcagacccgttcatccaaatatcttcatcctaggtctcagggttttttcagttttcctgtcagttcctattatctaagaaaataaacctactgtggctgcacattccatgttctttgtatcccttgtaattacacctttacaattaaattatgattagaattttgagcactctttgacctgtggctgcaaaagataagtatcactttaatcattgctatgggtactttcttgctttaaccctatgacctgacttagtagttatttttctttagagcatccatagaagttaata

SEQ ID NO: 284426 - DNA, 583 bp, Homo sapiens
attctgttcaattggtctatgtgcctatttttataccagtaccatgctgttttggtgaccatggccttatagtatagtttaaaatcaggtagtgtgatgcctccaggttttttttttgttgttgttgttgttgttgtttttgtttttcttttttgcctagtyttgctttggctatgcaggctcttttttggtttcatatgaattttagaattgctttttctaactctacgaagaatggtggtggtattttgatggggaggtgttttaaggcaacataagactcacagctctcagacccgttcatccaaatatcttcatcctaggtctcagggttttttcagttttcctgtcagttcctattatctaagaaaataaacctactgtggctgcacattccatgttctttgtatcccttgtaattacacctttacaattaaattatgattagaattttgagcactctttgacctgtggctgcaaaagataagtatcactttaatcattgctatgggtactttcttgctttaaccctatgacctgacttagtagttatttttctttagagcatccatagaagttaata

SEQ ID NO: 284427 - DNA, 583 bp, Homo sapiens
attctgttcaattggtctatgtgcctatttttataccagtaccatgctgttttggtgaccatggccttatagtatagtttaaaatcaggtagtgtgatgcctccaggttttttttttgttgttgttgttgttgttgtttttgtttttcttttttgcctagttttgctttggctatgcaggctcttttttggtttcatatgaattttagaattgctttttctaactctacgaagaatggtggtggtattttgatggggaggtgttttaaggcaacataagactcacagctctcagacccgttcatccaaatatcttcatcctaggtctcagggttttttcagttytcctgtcagttcctattatctaagaaaataaacctactgtggctgcacattccatgttctttgtatcccttgtaattacacctttacaattaaattatgattagaattttgagcactctttgacctgtggctgcaaaagataagtatcactttaatcattgctatgggtactttcttgctttaaccctatgacctgacttagtagttatttttctttagagcatccatagaagttaata

SEQ ID NO: 284428 - DNA, 560 bp, Homo sapiens
ttcttgctttaaccctatgacctgacttagtagttatttttctttagagcatccatagaagttaataaaatttaagggcaatagaggctagattttgcagggatctcatgaaacatgttcagattgtctcccagaatagtgcatccaaaagggtaaagaaagcaagaacatttatccaaagtttcccattcccaaatggttaatagttttctccaagggcatgagaacccctgcacttcttagctgcccatatgttctagataagtaagttgcttctgatattcaaattttaggagaagccaaatagcagaaagtaaagatatgtggaatacacctttgatgcaggacagtcagtatgaagtgagttaaagccctcatgggactttccactgcaactgcagatgaagtcagagataagaccaaagagatgcaaggtggggcatcagaggtgtctgatgccacaggtaaagcagttccacaattcaaggactaasatccttttgtcatcttacttttcatcctgaaagtgatgccctcactataatgtttaaaaaaaaaat

SEQ ID NO: 284429 - DNA, 537 bp, Homo sapiens
tggttgaagttatcgcaagccaaaaagaaggcaaaggaaaatgccagtagagcatgagtagacgaagaagccaccatgaaataaattagaagtagttgtaaagaaagaatcaggatgaatggggttccaaagctaaaatacgaaagatattaagaaggaagcccttactaagcccatactctgctgagaaacttagtaagtcgagattaaaatatatccactgcatatggacactttaccctttccttcatccagaaattagctgaaaattttaggagaaactcaaatccagaaagcctatggatactaagtctagcctgaaaatatctctttatagagatcaggaccaatgctctgaaaatatttccaaatcccatatttaaagaaaattttccccaagtgtgggttgatgcaccctaggatttggaggtgtcataacaaaattaytgcatttttgaattttgcactaatagaaaaaacttggatcagaaaacagctttatcactgaaatgagtagagtggtcattggaaattact

SEQ ID NO: 284430 - DNA, 457 bp, Homo sapiens
ggaaaagcaatataattgtctatttgacctcctataggaggtctacctggcctgaaacagtactcccaagcagcagctacaggtggggacaaagtctggctctttggtgaaacatgtgggaagacccatsgcatcatcattcaagcaagctagggtgtcaggggagggttgaacaagtaaatcatgatggaaaggtttaagatatgcaaacatcttgggtgttagtggagaaagcttcagcttagaagatacacaagtatccagagattcacctgtgatgatcaaatacccagcctggagcaacatgagtaattccagatcccacctgtgggaacaagctactgaattcattgttagtgtactataggccaaagtctacaggaactattagaaattataggccaaaagtctccaaaaccagcatttgaggagagttggcacaggtagtctgaaagtc

SEQ ID NO: 284431 - DNA, 414 bp, Homo sapiens
tttttatatatgtgtgtttacccagaacatgaatatagcaagcacttggtaattactggatgaaaacaaataacatttcaaagaaaagtaggaagggattgagaaatagtaaatgcagagaagcaactacacctaggtggagcatgayggaatctcatctcaacctcttaattggctactgtcccattcaaacataattgatagtagtgggagttgggatggggatgagatccaggaaagcagaacagaatatcccaaatttatccacctcttacatcactttttcctgtggtccaccctactcgctgctttgctgaaacacagtttgtcacagttaatatactcagctctgttctgagctcagcacctctggagtctatcacctcagatttcacagcatctctggcttctccc

SEQ ID NO: 284432 - DNA, 1003 bp, Homo sapiens
tttttatatatgtgtgtttacccagaacatgaatatagcaagcacttggtaattactggatgaaaacaaataacatttcaaagaaaagtaggaagggattgagaaatagtaaatgcagagaagcaactacacctaggtggagcatgacggaatctcatctcaacctcttaattggctrctgtcccattcaaacataattgatagtagtgggagttgggatggggatgagatccaggaaagcagaacagaatatcccaaatttatccacctcttacatcactttttcctgtggtccaccctactcgctgctttgctgaaacacagtttgtcacagttaatatactcagctctgttctgagctcagcacctctggagtctatcacctcagatttcacagcatctctggcttctcccwgtgtatcagctctatccacatgcaatcagacttttagcatctaactcaaatgtaaatggataccccagaatcaccagacttggaggcaaggatttaacatgaaagttagagaccaatacaggaaagacagaaagaaacttagagawaaacagagaaaatcacagagaatattttaaaatcctatagttaatatccaaatagatattggctgcatgaatgaaacaagattagattctaggtatcaggactttcaaagagtgagaagttcccaagaaaactatgagaagaaagaaaaacaacataaatgaaaatctgaaagaaataataaaattgaagtgttaatgcataggatcacacacctgaataatatgagttctagaaagagaataaaaaaacagagagaacattaccaaatattgacatattttccaaaagtcaaagagataacattaaaagggcctggtgagagctcatcacagtggatggaaacaaatttccattaaggctcaatcatggtgaagctgagaacaccaggagtgacccagacacttttcagagagaaaaaaaatgggtcttttacaaaggact

SEQ ID NO: 284433 - DNA, 588 bp, Homo sapiens
gtgtatcagctctatccacatgcaatcagacttttagcatctaactcaaatgtaaatggataccccagaatcaccagacttggaggcaaggatttaacatgaaagttagagaccaatacaggaaagacagaaagaaacttagagataaacagagaaaatcacagagaatattttaaaatcctatagttaatatccaaatagatattggctgcatgaatgaaacaagattagattctaggtatcaggactttcaaagagtgagaagttcccaagaaaactatgagaagaaagaaaaacaacataaatgaaaatctgaaagaaataataaaattgaagtgttaatgcataggatcacacacctgaataatatgagttctaraaagagaataaaaaaacagagagaacattaccaaatattgacatattttccaaaagtcaaagagataacattaaaagggcctggtgagagctcatcacagtggatggaaacaaatttccattaaggctcaatcatggtgaagctgagaacaccaggagtgacccagacacttttcagagagaaaaaaaatgggtcttttacaaaggact

SEQ ID NO: 284434 - DNA, 541 bp, Homo sapiens
agacttacagggcattatgttaagtgaaataaaccatgcatagaaagacaaatacaatgctcttcctcatatgtggaatctaaagaagttgatctcataataatatagagtagaatggtggtgtgttaggccattctttgtgttgctataaagaaatacctaaggctgagtaatttataagaaaakaagtttaattgactcacggttctgcaggctgcacaagcatggcaccagcatctgcttggcttcggcggatctttcactcacagtggaaggccaggtgggatcaagcaggtcacatggcagagtaggggcaagaccagagtagaggggaggtgccacaccttgtaaaccatcagatcttgtaagaactcactatcgtgaggacagcaccaagctatgagagatccatccccttgatccagtcacatcccaccagtccctacctccaacattgggaattacatttcaacaggagtttaagagaggatacatatccaaactatatccagtgattaccagaggctgggcgtttaggcag

SEQ ID NO: 284435 - DNA, 1185 bp, Homo sapiens
ggtttagtgttcactctgtggggaaacaaacgtgtatcagtcaccatgtctacctccaagttatttgtaatataataataggggatttattttatagtgactccaaaattatttattgagcatctactatgatcgaggcattttgcttggaataaaatggtgaacggcattggcatattccttttatttgcaacagtaacagattagtgaggatttgaggtaagtaaatagtatagtgttatgatagcagtgaagcacaaggcagaaacatttaacccacttccagaagatcattgaaggttttcatataaaagtgtcatctaagctgaacagtgggaaagaaggatggtaccaagaaaagcaggagtatattaggagaagaaaatagaaagggargaagaaagagtgttgcaggcatagagaccaccatgaatctgaagcaggagagaatatttagtctggccagatcagagagggcgaggtggagaatggcaagatgtaaaactgaataagtaatcaaatgacaaatcatgaattatcctttacatcatattaggaaatttttwttaaaaaaaacacagaaatgggaggaaatcaacttgcagatgtcacttgtctccagattttcctgttttatcaaatttagaacagcacttttcaacagaagcaaagcactagctacgaatgctggtcacatagggaattacaaactcctagcagtcacagtttagaaagtaaaaaggaacaagggaaattaatttctaaaacatactaaatataatcaatatattcaaaatatattcaatataagtggaatatatccaaaatattttcatttaaacatttaaacaatatwaaattattaatgagatgctttgccttcttttctgtctttgtactaactctttaagatctagaatgtgtgtcacaccaagtgccaggttccagcccaagctgaggtccaagcgggggtggtgagtgacaggtagctgggaaaacactcgaggaatcacagagagtttcgacatgcctttattctctctctggacacaagccgttatgtacagcattagcagggtaattataccttatatagacaatagtggctcccagccaagcacaagctcacatgagtggttacctaatgtacttcatgtgacatggttacataatgtgtggagttgt

SEQ ID NO: 284436 - DNA, 624 bp, Homo sapiens
gttttatttttaagcataagagttctggcatttgcagcagcatgacatggtagcaaaattatatactttggaatgtgacatacttgagtccaatcttatttaattattattagatcatatataagctgaatgacctaacggaagttaacagacctctctgatcctcagttatcttgtctataaaatgtatatatcaaagcctactttatatatgtgttgctataattattaaatagtatcatgttaataaattgccctgcacactctgccagcaacccaataggatctcaaaaatgttcctcattatattcactaattatcctttctgaacaatcacattttacagaatcactcattagataattacattgatgactaatttctgatacaaaggtcttcacaaatgcagactttttctaagtttgttaaatcctaataccaaccatactacaactccagaaagactggracaagaaacagcctcagttccatttctcaaacctttttctaatagcaatgccctgaaaattcaatttgtttccaccaagaatgagagatctagaaatgctgaagtacagattactattaggactcatatagtaggactggaggtgaggtcttatg

SEQ ID NO: 284437 - DNA, 636 bp, Homo sapiens
gcttattttgtaacactgtcttattttcatgttttttttttatgggtgttcttcctgacatgctttcactgcctaaaggaactttattctgctccttattgtctgtcctctattgacctccagctccatccacgtcccataatcattctctattggaactaactcagatacttttctgttgccgtccatttttaagccaaattggtttacttaaccttttgacagagtgatagttcaggatatcttttctagtttcatggctcttaagtttctggttatgttcatgaagcrttcaaaaatatgccctcattctttctgagatctcttcccctcccctggaacttcattcccttgcctttaccgtctctacactgattaatttggattctcttcctagcagtttttcctaagtgtagaaccttttccccaagggactttagatttttgtttcaagagttcacaaggccttgacaatgaattagctttttagaccttactgcaggtgcaccccttgtacttttcagaaatttggatggtaaaaatcactcccaatttcagcttctctttttgtattgacctatccttcttccaaataacttgaagatttgagagacttgagtgtttgcctgctttggg

SEQ ID NO: 284438 - DNA, 387 bp, Homo sapiens
catgctgtacagtttgtgcagttaatgcaattattacagggtcctgaggcaacatacatcctcctcagccgatgggattaagagattaaagtaaagacaggcataggaaatcacaagggtattgattggggaagtgataagtgtccatgaaatctttacaatttacttttagagattgcagtaaagacagccataagaaattataaaagtattaatttggggaactaataaatgtccatgaaaacttcacaatccacgttcttctgccatggcttcagccagtccctccatttggggtccctgacttcccgcaacaatatctgcattcctcagcacaaaccctakgtcatagcctatgtacactgcgcctgtcatagaaacaggtta

SEQ ID NO: 284439 - DNA, 1126 bp, Homo sapiens
ctgttccgcccagctcaccggcggtcagagtttaaggttatctctcttattccctgaacaattgctgttatcctgttcttttttcaaggtgcccagatttcatattgctcaaacacacatgctgtacagtttgtgcagttaatgcaattattacagggtcctgaggcaacatacatcctcctcagccgatgggattaagagattaaagtaaagacaggcataggaaatcacaagggtattgattggggaagtgataagtgtccatgaaatctttacaatttacttttagagattgcagtaaagacagccataagaaattataaaagtattaatttggggaactaataaatgtccatgaaaacttcacaatccacgttcttctgccatggcttcagccagtccctccatttggggtccctgacttcccgcaacaatatctgcattcctcagcacaaaccctaggtcatagcctatgtacactgcgcctgtcatrgaaacaggttaacctgattttctggttttagttactgtcttcaatcccatwtgagaacacaaagacacagggaggggaacatcactcaccatggcctgttggggggttgggggaaggggagggagcgcattaggaaaatacctaatgcacgcggggcttaaaacatagatgacgggttgataggtgcagcaaaccaccatggcacatgtatacctatgtaacaaacctgcatgttctgcacatgaatcccagaacttaaagtaaaataagaaaaaaaatacatactataaagtttgaaatttttagagatgtatattatgtttcaatatatgatctattttgaagaactgcttatgtgttctcaaaaaggaatatattttgcagttatttaatctgatgttctgtaagtgtcaattaagtcaaggtgattggtaatattcaaatcatatatattctttatttttwgttcacttgttctaacaatttttgagaggggggtgttaaaatctctagctttgtgaatctatttttctcttctccttcaatttttgccttatctgttagtagctgcatatacatttagaattatgactttctgatgtattaaactagttaaatcattatgaaatgccc

SEQ ID NO: 284440 - DNA, 439 bp, Homo sapiens
atagtctcagccactcaggaggcagaagtgggagactgcttgaacacagaagattgaggctgcagtaagctctgactgcaccactgcactccagccttggtgacagagtgagrctgtgcctctaaaataaacaaatacatacaaataaaaaaattaagttgataaattgaatccaatatttatttaccaaaatagttccaattacacactttaaaacatcatgactagtcttttggaagactggctgaacacctaagcagttgtccttacttttgactatgaatgttcataacatatggaagatgtcaaaattctactctaaatttgaataatattaatttattaacaatttataatacaattataacattagtattatggtattaatatgttaatagtagtgtcttcctaatttatcagtccttcaaattataatgaa

SEQ ID NO: 284441 - DNA, 566 bp, Homo sapiens
atgtctgttgccatatctactatygactttcttattagtggcatcttttctcttttcttcctgcatttttgtaaatcttattacattttgcatctgaataaataattacctacaacttcaattctgcactttactatttttagttcagattttaattttttaatttggtttctgtaaccttttattattatattatgcttccttatcatttatgctcctaagcagagctttatttttatttcaagctggtgattaataacttcttaaacatcaagcttgtttcaatgtcaaaacacatgaatctttttgaataaacagagcagatgcttttaaaagatatcttccatacccttttaatgtctttttccaaaagtatgctgttactctatatcttgaagacaaatttcttcctgtttttgtattttaggatattttgaaaagttcatattttttattcctctttaccaaacttaattaaaaagggattagtgcaagtctaatgtttgccaatagaaaacagaagtggattcttctttgtgatcatcaccatttatcttaattgtaaa

SEQ ID NO: 284442 - DNA, 493 bp, Homo sapiens
cactcacatttgcattgaatatcctagagttatgttattcaaagatagtatagttatagacaaacctgaataaatcattgcattttgtataaagttacagtttgccaaaatgagattcttcctccatcagaaagtatcaaggggccaataacatgctgcttcttttttttatagtgaaataaacaagaaaatccttagaaaggtgccaaatgatactgcagaaaaaggaatccaatttacacgtagatggtctaggcttactttatgacaataataaagcaagtattttctctaggaaagagagcttaaatctctgaagggcagtggatagctttataacrtataatactggctttattacccttttatggttttgcatcttctctttactttgacaaaagatcattcagaagtgaacttacttcaatgatacctgcacagactttatgcctacaaaagtaattcatagtatttatcctggtgacaggtcaga

SEQ ID NO: 284443 - DNA, 488 bp, Homo sapiens
taatctcctggggtatttatacttcatgtaataaatacagtttttaatgcaaaaatgcatcaaatcattttcgggtaaaaatttaaaacctagtaattttaaaattaattttatggtgaatcccattgtcagataccaggactcacttatttgctttgtaaataatgaatttgcttaaaattccatctgtattttcagtgctagtgtcaactgactgcagataatgaacttagatttctttaaaggctactaataaacaaatagaaaagaatattaagcactttcttggaaacttgagaacttctgatggtgctgacaatttgtttggaaatattttagttactttttatttttaaataattacctggccgggcctggtggctcatgcctgtaacctcagcattttggaaggccaaggtgggtggatcacctgaggttgggagttygagaccagcttgataaacatggagaaaccccgtctctaccaa

SEQ ID NO: 284444 - DNA, 516 bp, Homo sapiens
gtagtgacaacttctaggggcaagctttctatctgccttgcactaggtggactagaagaattggcccttggcttatgaacaagaccgtagggctgggccattgaagacggtgagaaggtaagaaacccagtcaggtgatatagaaggtaagttagaatcactagattttggcaggctttctgggtgctctacgcttagcctaggcaagctaaataaaaaagcatcatatctaaggtagtagtaagtggattctctaccaaaagacatatagaacactgcaactttgaattacctaacaattactataacaaactgtgaataagtaatccactctaatactaataaccactgaaagttcctttagtatcagtctatattcatatccattgcataaaattacagtcacatsctcatactctttgaaacaactttgcccaaatatttttacaatgtcttaactgagggctttcaatcctttccttctacagtcttcagtgctgaccctctttctccatt

SEQ ID NO: 284445 - DNA, 590 bp, Homo sapiens
tgctgatggtagcaaccaggtaggaacagttacaggctcactgcgttagacaaacagtggcatttgagtttaaataatcagcaatacaagaagctgaaagttcttgacaattcagatgctgataacctttgctggaacccaatcaacattgctagttattcttttctttatcttatttactttacttcttcctttaggaaaaagcaaattagctttaatgatacctttgtataaactacatcaaaaatcatttcctaatatggaaaagagagagtggttttttcctatgaaatgaacttcctttctggtgaatgaaaggtgcagaaaagatctacatttttttctgccacagtgtatcttatttttttaattaaaatttttatttttattgacaaatgataattgtatatatttacagggttcaatttgatgttttgatatatgtgtacattgtggaatgattatatcaagctaattaacatgtctatctcctcacatgcttatcattttttttgtagtgataacatttaagaatctattctgttagcakttttgaaacatacaattaattcattgttattaactgtggt

SEQ ID NO: 284446 - DNA, 596 bp, Homo sapiens
cctgataccagattgaaccactatattctgcctctttgaattcatggtgttgtaagaatccagacactttttctatcctaaactgtggcatggtgatctgaaacaaatgatggtccagtgtgggccatttcagcactggatggaatgattctgcacttcttgacctgtcttcaagatgtttggggaaatagtttcatgtgagcacggccccttaggcccttcctgagagcatcaccgcaaagtaatgtctcataccaacttgcgcttttgagcatagaacaagaccattgttgtgtgasctgatttcattttagtgactgcctcagtaaagaatgacatcatcccattctttttccttaatatccacttgtgaatgtcccccagtccccaccctcatcgtaattaaactcctttccttgccaggggaagagctatttttctcttaacttcctgcctgaatgtatcattatggcaagagcaaagagttttccttgggttggtcaacatctctggagtttgcttcctcaccattatcaggcaaagcacaattttactggcagccgaagcatactgacagagccacctgctgggacagg

SEQ ID NO: 284447 - DNA, 596 bp, Homo sapiens
cctgataccagattgaaccactatattctgcctctttgaattcatggtgttgtaagaatccagacactttttctatcctaaactgtggcatggtgatctgaaacaaatgatggtccagtgtgggccatttcagcactggatggaatgattctgcacttcttgacctgtcttcaagatgtttggggaaatagtttcatgtgagcacggccccttaggcccttcctgagagcatcaccgcaaagtaatgtctcataccaacttgcgcttttgagcatagaacaagaccattgttgtgtgagctgatttcatttyagtgactgcctcagtaaagaatgacatcatcccattctttttccttaatatccacttgtgaatgtcccccagtccccaccctcatcgtaattaaactcctttccttgccaggggaagagctatttttctcttaacttcctgcctgaatgtatcattatggcaagagcaaagagttttccttgggttggtcaacatctctggagtttgcttcctcaccattatcaggcaaagcacaattttactggcagccgaagcatactgacagagccacctgctgggacagg

SEQ ID NO: 284448 - DNA, 596 bp, Homo sapiens
cctgataccagattgaaccactatattctgcctctttgaattcatggtgttgtaagaatccagacactttttctatcctaaactgtggcatggtgatctgaaacaaatgatggtccagtgtgggccatttcagcactggatggaatgattctgcacttcttgacctgtcttcaagatgtttggggaaatagtttcatgtgagcacggccccttaggcccttcctgagagcatcaccgcaaagtaatgtctcataccaacttgcgcttttgagcatagaacaagaccattgttgtgtgagctgatttcattttagtgactgcctcagtaaagaatgacatcatcccattctttttccttaatatccacttgtgaatgtcccccagtccccaccctcatcgtaattaaactcctttccttrccaggggaagagctatttttctcttaacttcctgcctgaatgtatcattatggcaagagcaaagagttttccttgggttggtcaacatctctggagtttgcttcctcaccattatcaggcaaagcacaattttactggcagccgaagcatactgacagagccacctgctgggacagg

SEQ ID NO: 284449 - DNA, 474 bp, Homo sapiens
tacaatattggatatgcactgagctaggtgatttatgtgttttctttaaaatgttcccaagataagtactcctatctgtattttacagaggaaggagctgaatctcagaatgggtcagttcgctgtccaaggccacacagctagagaggtggtccctggattagaacacaggtctgtttgaacccagagcctgtactctcctgctccaaagccatatttgggattttatgatagagcagcagccaatacatgtaatttctactacagttaaagctgaacttcatagggatttttcatataatactcaagcttaatctggggcaattatttcactttctgccttaggggcattttccttaagtttcccccarataaaacccactgagtttcatttttttttttttcgtttcctgtcctgggtggggaggaagctaccggagccagtgaatggctctaaattggggtaactctaga

SEQ ID NO: 284450 - DNA, 572 bp, Homo sapiens
ttttaaaacctcatttccattgtaaagccaaaatggaatgactggaactccraaagacttcagcttatgaacttggatctattttggttatgtaatattgggaatcagataatactcagtcggaataactgcctgggtatttatgaggataatttctcattgaaggagaagtttgagagtataactggagaacattttgaataaaaattaaagaccatattaaaatattgttttaatcttaacttttttaaaaaaaggattttaaaaaaattatctgcatggttgcaaaaatatgtataatgcaacttgaaacataattttacaggcatctttatgcaatcgaatactaaaatcacaaagcactagccataaatcctgttattcaacctaccaaacagctcttatttcagaacagcttatatacaatattattcatagaatctctcacctgcaaagggtgaggataatgctggatttctctgccaaatgtgaaagtccagtaggagccagaagctctgcataccacaggtatatgaatgttgctatcggagggcaagtatattagggtagca

SEQ ID NO: 284451 - DNA, 580 bp, Homo sapiens
caaaaaacaaaaacattctcttaaagaacaaaacaaaatgactgagaaagatgtctgttttacttactaatgttatatgtaacaataacagctaagatttattaaatacatgcttaccatgtacaagtaagtgctatacatacattatctaatttaatttatgcaacatctctatgacatagaattatcttggtcccagtcttacaagcaaggaaataggctctgagagtttgactgacttggccaagtttacagacttgcaggggccaaggttggatatggacccagaaatctgactccatacccgctaccattaactagtccttattccacattttcctttttttcctttaagctcagttgactttttaacgaatgtcttttcctcatatttagtaatttttaaattctgaaattaagataatsctttctagaaacatagtttatatggaaaaatatttgcatgaaaaaatagaccctccttcttatttgcaacctcttgaaagcaggcaccacatcttatctgcatcaacagcagctcctggcacacatggaacattcaataaatgtttgttaaatg

SEQ ID NO: 284452 - DNA, 394 bp, Homo sapiens
gagttagttggagtaatatcaggttgagatatcactaagaggttagactgcaacgctgagtaaaaataaaaagcaatttttttaagcataaaattatcatctggatgtggtggcatgtgtctgtagtcccagctactcaggaggctgaagcaggaggatctcatgagcccagaggttcaaggctatggtgcactataatcaagcttgtgaatagatactgcactccagcctgrgcaacatagtgagaccctggctctttaaaaaaaaaatgctagatttttgtctttgaaattttgaggagatacataaagactgagctctccctactatgttctaatgccccccaagaaatggtcactatctggactcaatgaaatcagagctttaatcttgt

SEQ ID NO: 284453 - DNA, 522 bp, Homo sapiens
tttttacttcttcagagacttcagaaatgagcagagactaaagatctatgagctagtagaatacttattcataaaaagcacatatgcatgaagaagtaatacttatcaaaaacaaaccctttccttaacagggattcttcacttctcttgaacaaggaactcactcagagactaacacaaaggaagtaatttcttacctggtcattatttagtctacaataagttcatccttcttcagtgtgaccagtaaattcttcccatactcttgaagagagcataattggaatggagaggtgggtaacattygcaaattttttaaagatgacaactggaagaattttaacattttgaatgaatagaaatcaatctgattagcaggcaggaagctgtgactttttaaatcttgaggtctgattacttgataaccctggttttcttataccctttcaccctttctgtgctcagcacttaatcttctaggcaaagcctctatcggatttcctggatttcagagctgttacc

SEQ ID NO: 284454 - DNA, 467 bp, Homo sapiens
ataattggaatggagaggtgggtaacattcgcaaattttttaaagatgacaactggaagaattttaacattttgaatgaatagaaatcaatctgattagcaggcaggaagctgtgactttttaaatcttgaggtctgattacttgataaccctggttttcttataccctttcaccctttctgtgctcagcacttaatcttctaggcaaagcctctrtcggatttcctggatttcagagctgttaccctacctgagcacttcagagcaaatgccatttcttataaaaggggcttagccccagactttatggctagtcttgcaaagtggtataatatttctttctggtacgtgaactgtatcaacacatttaaaaacagatttaaaaagctatttccacctctaaatataaagagccttaccacttattagaaagatagcatttgataacaatctgaatttcttccact

SEQ ID NO: 284455 - DNA, 553 bp, Homo sapiens
atagagaagaaaggatccaggcaatcagtcctctggggtggagattttggagctgagaactgtgagggccaagtcatcctatcacccttctctattctgggaaacaaacaaaccttcatacaacacagcaggaagtatttgactctcacrtgcatacacatatcagcaggaacttaggctgcctctgttctttcttcaatagcccataacaattaaattattatatgattataccacacattattattatttatttttttaaagacattctagctctgtttcctagactggagagcagtggtgtgatcatagttcactgcagcctcaaacacctgggctcaagtaatcctaccgcctcagcctcccaagtagctgatattacaggtgcacaccaccacacccagctagtttttaaattttttggttgagatgagggtcccactgtgttgcccaggctggtcttgaactcctggcctcaagcaatcctcccatctcagcctcccaaagtgctgggattataggcatgagccacctcacctggcctacacattat

SEQ ID NO: 284456 - DNA, 605 bp, Homo sapiens
ataggacacatgtttaagttcagtaacaaatatctttttctgaatctttcagagtacctstgggtcagtgaatgtaatagaatttgtagatactacaaatggctaaatttgggtctatttgttgttgtaaagtttgggcctgttgcagaacaaggccatgcgcagctaaggaaaaggacatatgaaaagtgtcaagatggggaggtaagcagggaaaggggagacagagaaagagatgaggggagagaaagattagagtttgaggtccactaattagagaaagttcagaattcaagtggattggcaagaggccaggagtcatgatgctctagagagctcagctaggtgggaggaaatggagccttggtaacaagcttggattggacttgggggttcatgatgactggagagaaaaaataacttcatgccaagagaacagaaaaccattgcagaatctggaagaggtgtgtgcatttgcttaactagtatatgacggctgtcaagccagcagctttcttctcgctgccttgattttaagcactttcctggaaatggtgggtaaagactaagaggaccagaattttagtacagactgaatgaagtgg

SEQ ID NO: 284457 - DNA, 619 bp, Homo sapiens
tgcccttcatggatgtcctaggaaggggctgtggtggtgcagctgtctactttcagttggttcctgcatatcctgcagaaccatctgtgaacaaggccctagttttctcttcctctttctctgatyatagaacactccccatgatgccatcagtacaggctgggggagaaaaggcagggtggcaggagtggagaccatgggcatttgagacacttcctcatgtaatttacttttgcctttaggacctgcttgagaccagtcacgtatataccacttccatttcataatagaatgctgctgtgcatgacctactttatggctagatgggtcagaaagcacccagttcatgataggcccttctggttgcatggtgacttgatgacccatagtcaaatgttcagttcctaccaaagcccagtaacaggccaagagcattctctcaaaaggaagagttacttgcagaagacggcagggcttgctcaaaattcctagagacctccactgtgattaacctatacaggcctgacagaggctccaaacagcatttctccctgactctgacaaattaagcaccattggatgtgctgggtccaatcacagagtggtagagcaagtaata

SEQ ID NO: 284458 - DNA, 619 bp, Homo sapiens
tgcccttcatggatgtcctaggaaggggctgtggtggtgcagctgtctactttcagttggttcctgcatatcctgcagaaccatctgtgaacaaggccctagttttctcttcctctttctctgatcatagaamactccccatgatgccatcagtacaggctgggggagaaaaggcagggtggcaggagtggagaccatgggcatttgagacacttcctcatgtaatttacttttgcctttaggacctgcttgagaccagtcacgtatataccacttccatttcataatagaatgctgctgtgcatgacctactttatggctagatgggtcagaaagcacccagttcatgataggcccttctggttgcatggtgacttgatgacccatagtcaaatgttcagttcctaccaaagcccagtaacaggccaagagcattctctcaaaaggaagagttacttgcagaagacggcagggcttgctcaaaattcctagagacctccactgtgattaacctatacaggcctgacagaggctccaaacagcatttctccctgactctgacaaattaagcaccattggatgtgctgggtccaatcacagagtggtagagcaagtaata

SEQ ID NO: 284459 - DNA, 619 bp, Homo sapiens
tgcccttcatggatgtcctaggaaggggctgtggtggtgcagctgtctactttcagttggttcctgcatatcctgcagaaccatctgtgaacaaggccctagttttctcttcctctttctctgatcatagaacactccccatgatgccatcagtacaggctgggggagaaaaggcagggtggcaggagtggagaccatgggcatttgagacacttcctcatgtaatttacttttgcctttaggacctgcttgagaccagtcacgtatataccacttccatttcataatagaatgctgctgtgcatgacctactttatggctagatgggtcagaaagcacccagttcatgataggcccttctggttgcatggtgacttgatgacccatagtcaaatgttcagttyctaccaaagcccagtaacaggccaagagcattctctcaaaaggaagagttacttgcagaagacggcagggcttgctcaaaattcctagagacctccactgtgattaacctatacaggcctgacagaggctccaaacagcatttctccctgactctgacaaattaagcaccattggatgtgctgggtccaatcacagagtggtagagcaagtaata

SEQ ID NO: 284460 - DNA, 619 bp, Homo sapiens
tgcccttcatggatgtcctaggaaggggctgtggtggtgcagctgtctactttcagttggttcctgcatatcctgcagaaccatctgtgaacaaggccctagttttctcttcctctttctctgatcatagaacactccccatgatgccatcagtacaggctgggggagaaaaggcagggtggcaggagtggagaccatgggcatttgagacacttcctcatgtaatttacttttgcctttaggacctgcttgagaccagtcacgtatataccacttccatttcataatagaatgctgctgtgcatgacctactttatggctagatgggtcagaaagcacccagttcatgataggcccttctggttgcatggtgacttgatgacccatagtcaaatgttcagttcctaccaaagcccagtaacaggccaagagcattctctcaaaaggaagagttacttgcagaagacggcagggcttgckcaaaattcctagagacctccactgtgattaacctatacaggcctgacagaggctccaaacagcatttctccctgactctgacaaattaagcaccattggatgtgctgggtccaatcacagagtggtagagcaagtaata

SEQ ID NO: 284461 - DNA, 582 bp, Homo sapiens
cattttacataagttctccccattgattcttatgcacagtaaaagttggaaatttttgtatcttaaaatgaaataaatgggtggagctcaagtatgtgcattttgaaaagctaccttggtgactttgtatattctattttctttcccccatcagactggtagattttcaatagtgcacttcttttgaaccaggataaaatctactcgtaaggtcatkcttgttttctggcatttgaacgatggtgctttctgctgaaacagcattctaagataatagggttattcctgcctctgccttttcctagatcacttatcttggtctactaataacagggcatccatcaacaaagaaacaccaccatctttcatgttctgttattaattggactctctggactactgttatctctggtactctaaaaaagaaaattttatagtgtctactggtgggactaaatatctttttacctacctacctataggtaaactgtactccttcctccaagaggcaaattataggtggtacacatttttttttcagattagttttgttcatcatcttaatgagattttccaataatt

SEQ ID NO: 284462 - DNA, 582 bp, Homo sapiens
cattttacataagttctccccattgattcttatgcacagtaaaagttggaaatttttgtatcttaaaatgaaataaatgggtggagctcaagtatgtgcattttgaaaagctaccttggtgactttgtatattctattttctttcccccatcagactggtagattttcaatagtgcacttcttttgaaccaggataaaatctactcgtaaggtcattcttgttttctggcatttgaacgatggtgctttctgctraaacagcattctaagataatagggttattcctgcctctgccttttcctagatcacttatcttggtctactaataacagggcatccatcaacaaagaaacaccaccatctttcatgttctgttattaattggactctctggactactgttatctctggtactctaaaaaagaaaattttatagtgtctactggtgggactaaatatctttttacctacctacctataggtaaactgtactccttcctccaagaggcaaattataggtggtacacatttttttttcagattagttttgttcatcatcttaatgagattttccaataatt

SEQ ID NO: 284463 - DNA, 514 bp, Homo sapiens
cctagggccctgatgctctgtggagcctcaggacatgggggcttctgtcccagccacttcagctccattcatggcaaaaaggggtcaaggtacagctcagactatgaattcagagggtgcaagccccaagccttggcagcttccayatggtgttgggtgtgtggatgcacagaagtcaagaattgaggttcgggaacctccacctagatttcagacgatgtagggacacaaggaaggcagaagtcagctgcatgggcggaaccctcatggagaacctctgctaggacagtgccgaagggaaatgtggggttggagcccccacagagtccccactggggtatttcctaatggacatgtcagaagaggaccactgtcatccacaccacagaatggtaggtccattgacagcttgcaccacgtgcctggaaaagccacagacactcatcaccagcctgggaaggagctgcccaaggctgtaggtaccagcctcttgcatcggtgtgccctggatgtg

SEQ ID NO: 284464 - DNA, 546 bp, Homo sapiens
gagtctcttgtataagagtgtacaatagtggcaatcctgcctctattttttctgtgktgctaacttcaaatgctatttgaaatagcaatgtttgtactgtgatttctgcctttggcatacacagggttttaaagtttttttttgatggcagtgatttaacaaatcacatatatggacaatcagctcatttgattaaggaacattgctaatcacagggatattgctaatcacacccagtttattttggtattattagtgtgattccttaataagcatgttgacttttatttattaattttttcagaaaatagcttcctgacttactcaaacttatttttctttccttattatttaaacaaacatttcttaatcaccaattatgtgtaagaaattatattttagctatgaggaagtgagtaatgccctgttgtgatgaagcttacattctaatgtaggtgcagtattatagctttacatacacacacacacacacacacgcacacacacacccatcttatatatattgcatatgatatatggacatgc

SEQ ID NO: 284465 - DNA, 546 bp, Homo sapiens
gagtctcttgtataagagtgtacaatagtggcaatcctgcctctattttttctgtggtgctaacttcaaatgctatttgaartagcaatgtttgtactgtgatttctgcctttggcatacacagggttttaaagtttttttttgatggcagtgatttaacaaatcacatatatggacaatcagctcatttgattaaggaacattgctaatcacagggatattgctaatcacacccagtttattttggtattattagtgtgattccttaataagcatgttgacttttatttattaattttttcagaaaatagcttcctgacttactcaaacttatttttctttccttattatttaaacaaacatttcttaatcaccaattatgtgtaagaaattatattttagctatgaggaagtgagtaatgccctgttgtgatgaagcttacattctaatgtaggtgcagtattatagctttacatacacacacacacacacacacgcacacacacacccatcttatatatattgcatatgatatatggacatgc

SEQ ID NO: 284466 - DNA, 546 bp, Homo sapiens
gagtctcttgtataagagtgtacaatagtggcaatcctgcctctattttttctgtggtgctaacttcaaatgctatttgaaatagcaatgtttgtactgtgatttctgcctttggcatacacagggttttaaagtttttttttgatggcagtgatttaacaaatcacatatatggacaatcagctcatttgattaaggaayattgctaatcacagggatattgctaatcacacccagtttattttggtattattagtgtgattccttaataagcatgttgacttttatttattaattttttcagaaaatagcttcctgacttactcaaacttatttttctttccttattatttaaacaaacatttcttaatcaccaattatgtgtaagaaattatattttagctatgaggaagtgagtaatgccctgttgtgatgaagcttacattctaatgtaggtgcagtattatagctttacatacacacacacacacacacacgcacacacacacccatcttatatatattgcatatgatatatggacatgc

SEQ ID NO: 284467 - DNA, 546 bp, Homo sapiens
gagtctcttgtataagagtgtacaatagtggcaatcctgcctctattttttctgtggtgctaacttcaaatgctatttgaaatagcaatgtttgtactgtgatttctgcctttggcatacacagggttttaaagtttttttttgatggcagtgatttaacaaatcacatatatggacaatcagctcatttgattaaggaacattgctaatcacagggatattgctaatcacacccagtttattttggtattattagtgtgattccttaataagcatgttgacttttatttattaattttttcagaaaatagcttcctgacttactcaaacttatttttctttccttattatttaaacaaacatttcttaatcaccaattatgtgtaagaaattatattttagctatgaggaagtgagtaatgccctgttgtgatgaagcttacattctaatrtaggtgcagtattatagctttacatacacacacacacacacacacgcacacacacacccatcttatatatattgcatatgatatatggacatgc

SEQ ID NO: 284468 - DNA, 1197 bp, Homo sapiens
tactggtgattgtgataatcattagataaaccattagacattagatacttcgatctttaccttgattcactcctccatcctttcaaagtgaagcctgaggtgtgctctacaaaattttacccacagggagaattccctgtctttctaagcaagctttgttggaggcaatggtgcagaagcaacacacttctagcctgcagcagcatatcaagcagaacatctgcaaagcagtacgttttgtagcactgtagctagayaaaagattatttgtggagtcatgaactaaaagagaagcaataatataaaaacaatatgacttgaatgaaagccaacttctcatgaaaatactcgtgtttccccaacctgagcaagcctgacgtcatatataccacttccccttaacaatggaaaattacttagcacctctaattttgtattttatcaaatagatagtactcatttcaagtctcatgatcatgtagtcttccacaggtagtgatttagtttctgtcacctccccgtgtcaagccaagagttgtgtctcaaaaagaaagtattgatgtgtgtaaaagtccactttaggtgtaattacaggctcwtactggtgattgtgataatcattagataaaccattagacattagatacttcgatctttaccttgattcactcctccatcctttcaaagtgaagcctgaggtgtgctctacaaaattttacccacagggagaattccctgtctttctaagcaagctttgttggaggcaatggtgcagaagcaacacacttctagcctgcagcagcatatcaagcagaacatctgcaaagcagtacgttttgtagcactgtagctagataaaagattatttgtggagtcatgaactaaaagagaagcaataatataaaaacaatatgwcttgaatgaaagccaacttctcatgaaaatactcgtgtttccccaacctgagcaagcctgacgtcatatataccacttccccttaacaatggaaaattacttagcacctctaattttgtattttatcaaatagatagtactcatttcaagtctcatgatcatgtagtcttccacaggtagtgatttagtttctgtcacctccccgtgtcaagccaagagttgtgtctcaaaaagaaagtattgatgtgtgtaaaagtccactttaggtgtaattacaggctc

SEQ ID NO: 284469 - DNA, 622 bp, Homo sapiens
acctccttggttaggtacattcgtaagtattttaatttttttgcagctatagtaaaatgatttgagttcttgatttgattctcagcttggctgctgttggtgtatagcagagctactgatgtgtgtacattaattatgtatcctgaaactttgctgaattcatttatcagttctaagagtttttggatgagcctttagggttctctaggtatacgatcatattattagtaaacagtgacagtttgacttcctctttactgatttamatatgtcctttatttctttctcttgtctgagtcttctgggtagaacttccagtactatgttgaatagaaatgttgagagtgagcatccttgtctccttccagttctcagggggaatgctttctgtttttcctctttcagtattatgttggctgtgggtttatcatagacggcttttattacactaaggtatgtcctttctatgttgattttgctgaggattttaatcataaagggatgctggattttgtcaaatactttttctgcatctattgaaatgattatttgatttttatttttaattttgtttatgtggtgtaccacatttattgacttgcagatattaaaccaaccctgc

SEQ ID NO: 284470 - DNA, 577 bp, Homo sapiens
gatcttggactcaagggctgctgttgagattcttttgtcccacgaggtgctcccttgatgcagtgctctcccacttcccctagggatgtggcatcctaggatccaaagtgaagtgattgttatttatcttctggacctagccatctagaaccaggcttcgagtaggtactggagggtgtctgcayggagtcctgtgttgtgaaccatggtcagatctctcagccatggataccagcacctgctctggtggaggtggcaggggagtgaaatggactctgtgagattctttacttgtagtgttgtttattgcactagttttgttttggctggcctcttgctaggaggtggggctttcaggagtgcatcacccctggtagtatagagaagatcagttggtgggcggggccttagaactcctaagagattatatcctttgtcttccactaccagatccagtagagaaagaccatcaggtggggacagggctagatatgtcttagctcagactctgctggggcagggcttgctgtggctgctgtggggattgaggatgtggttctcaggccaatggagttat

SEQ ID NO: 284471 - DNA, 563 bp, Homo sapiens
tttacttgtagtgttgtttattgcactagttttgttttggctggcctcttgctaggaggtggggctttcaggagtgcatcacccctggtagtatagagaagatcagttggtgggcggggccttagaactcctaagagattatatcctttgtcttccactaccagatccagtagagaaagaccatcaggtggggacagggctagatatgtcttagctcagactctgctggggcagggcttgctgtggctgctgtggggattgaggatgtggttctcaggccaatggagttatgttctgaggaggatttattatcctcctgggaacaygggtacctctgctgtgtcatgcaggttgctagggaagcaggggaaagccggcagttacaggcctcacccagctcccacacagcccaaaaggccagtgtcactcccaccatgcccccaacaacagcattaagtttatttccaggcaatggatgagcagggctcagaagttgccccaggctaccagcctcctggctgtgaaagcaagcagggctttcaggttttgcacctcccccacct

SEQ ID NO: 284472 - DNA, 582 bp, Homo sapiens
aataaagacaattggaaaatatttttaaactataaagcagcaatatcactgtatttcaaagtatttttctccaacactgagagaccattaaacatcatgagagttaagacatagttgaaattgcaaaaatccagcaaccctaaaccttagtatttatgtgcaattttttaattttttaaaaacgtttattcttggtttaagagtacatgtgaaggtttgttatgtaggtaaacttgtgtcacaagagtttgttgtgcagattattttatcacccaggtattatgcccaggaccctatagctatcttttctgcttctctcccacctcctatcctccatcctcaaatagatccaagagtctattgttctcttctttgtgttcatgagttctcacaatttagctcccacctgtaagtgagaacatgtggtttttggttttctgttgctgcattagtttgctaaggataatgggctctggatccatccatgttcctgccaaaaatatgatctcrtttttatggctgtatagtattccattttacacatgtaccacattttctttatccaggctatcactgattgtt

SEQ ID NO: 284473 - DNA, 614 bp, Homo sapiens
tttcacaaggccagaattaaactctttataaaatttatgtaaagtgatttggtaatgtaaaaattgtatcatcttaattttttaaaatgtggaattaatttgaattttacaaattatatttcttttggaagataatttttctatttactagttttatcagtacatgcagatatactttacaatgaagtaaataacatcgcatacagtttttgacataaggaaataaaaagctgtttccattgctccctaattattattgttgtgattctaactccaagtatggtcaacaagaacattgtcataatattttaggaacattgcaatgtaacttttcagtatcagtcttaaataagactgccttaaatagacatattcttagcttcaggttttgatggtagtggtggtggtagttgtgtttgygtgtttgtgtgtgtgtgtgtgtgtgttttgaacaaaattggcaatattacttcatctaaaatttgattagtcattaattgtgttacaaagatttacaagtgttgattgcatgttttaaacaatgttacttagaaaatgtgccatgtgttgttcatgatgttaaacagcaaaaatatattgtagtcagttagctt

SEQ ID NO: 284474 - DNA, 388 bp, Homo sapiens
aagataataaagtagtttgattgagattggttgaaaaaagttttgttctcttttgtgctatatgaaacactctatttgacttgtgcatatcaaatctattttaactaacatgccctattgaatgtgttctgacagcttccttcatacataaaatatacacacatatgacaataaaaatgctatgcattcattattattgtrtgaaaagaaaagatgatgtcttatgatctcatactgagataaatttactaaaaaaaaaggatcaggtaaatccaattacttataaagtgttcttgagaggataaaatgaaggattactacataactcattatacaatgcagttaaaaccttaaaaaacaaaatcagaggtcaatatgagaattgaaa

SEQ ID NO: 284475 - DNA, 404 bp, Homo sapiens
actcctgggttcaagcaatcctcctgcctcattctgagtagctgggaccacaagcacttgccactttgccacttgacacccaactaactttaactttttttttttcctttttcagagatggcgggtcttgctatgttgcctagactggacttaaaccccgggcctcaagcaatcctcatgtcttgaactcccaaaatgctgggattactgtcatgagccaccatkccttgccaaaatttaagttatacatacaggagactcttacctgcattgtatacaacactagaccactacttgtattaaaacaaatatatctacatagatagatattttccacacatatgcacaaatgtgtgcatatctaagtcaagaaatgtgtggcagtgtatattgggtctatggcc

SEQ ID NO: 284476 - DNA, 478 bp, Homo sapiens
ttagttaaattatttttcttgctagctactgattatattctaaaaagaaaatagaaaagatgggggaatgcaagaatgtagttttgttrttatttctcccatcatttcaattgctaaattcaattatcaaggtaaatgaatccatgcaagtttttatattaatgaaacaaggtttcatctcaagattacaattgattattataaaaatggtttattaaaatgcaagaaaatacagatagtcttatatgtgttcattaccagttgctttataaatatagattagatattgttctaaattaaaggactcaaaatattacccattgttatatcttgctacttcttttaaacatgtggacacattcagttttgtattccccattgattcaatgcacttcaatattttcagcatttcttcattttttttctatatttccaaagaacaaagatgctactctttctcattctttctgttagggct

SEQ ID NO: 284477 - DNA, 574 bp, Homo sapiens
gaattttgtggccgggcgcagtggctcacgtctgtaatcccagcactttgagaggccaaggcgggcggatcatgaggtcaggagatcgagaccatcctggctaacatggtgaaaccccgtctctactaaaaatacaaaaaattagccaggcgtggtggtgggcgcctgtagtccsagctactcgggaggctgaggcaggagaatggtgtgaacccaggaggtagagcttgcaatgagccgggattgtgccactgtgctccagcctgggcaacagagcaagactccatctaaaaaaaaaaaaaaaaaaagaaaagaaaagaaaaaaaaagaaattgagttttgtttctagacaatttcctaacgaattaaaagagctgtagatattttatagctgcctttagttctgtttcatctagggacttatacctagaactcagaaaatataataaagaatggcatttgcattaaatgtaattttttcatttaaaataatcacgtagggctcttttggctctgagttccacatcaaattgtgaatcgtgacacccaaagcagtctagtaagaatgtgtcca

SEQ ID NO: 284478 - DNA, 574 bp, Homo sapiens
gaattttgtggccgggcgcagtggctcacgtctgtaatcccagcactttgagaggccaaggcgggcggatcatgaggtcaggagatcgagaccatcctggctaacatggtgaaaccccgtctctactaaaaatacaaaaaattagccaggcgtggtggtgggcgcctgtagtccgagctactcgggaggctgaggcaggagaatggtgtgaacccaggaggtagagcttgcaatgagccgggattgtgccactgtgctccagcctgggcaacagagcaagactccatctaaaaaaaaaaaaaaaraaagaaaagaaaagaaaaaaaaagaaattgagttttgtttctagacaatttcctaacgaattaaaagagctgtagatattttatagctgcctttagttctgtttcatctagggacttatacctagaactcagaaaatataataaagaatggcatttgcattaaatgtaattttttcatttaaaataatcacgtagggctcttttggctctgagttccacatcaaattgtgaatcgtgacacccaaagcagtctagtaagaatgtgtcca

SEQ ID NO: 284479 - DNA, 393 bp, Homo sapiens
actacagttatacagtcatctgccagagatgttattgaaaagattcctaagggagtagaaaattggggatgacctttaaagtgcattgaacctctaaaagtatttgattctataccttcaatatattggcacttgtatgtcacaataccttgctgattttcacttgtgtaggaaaatgatgcagtttcaacagaataacattctgacccagttattctctcattctgaagaattcttattttattattastagtactagtataggtaggtgtgtgtggagacatacagctttgaaaactgaattgatgacacttgacagaaagtgaagtctacttcattgcaaaaatacaattaaaataagcgttactaaattagagcacaatcccaaacaag

SEQ ID NO: 284480 - DNA, 616 bp, Homo sapiens
tagaatgaaactaccgtaatgtaataaaagtcaaatataaaaaaccccacagaaaaatcatattcaatttcagactaaatggtgaaagactgaaaaattaggaacaaggccaggaagcttgcttttgtcatgtatattcatcatagtcctggaagtcctagacagagcaagaaggccagcaaaataaaaggcttaatactggaaaggaagaaatgacattatatatgttcacacataagatcttatgtatagttcatgcttgggaccgctgaacctctatagaggggtaattagtgtcatatgacagctatgggtgctgtacaatttgtgtgctgaacatatattaatctccttctaattaaaccaaatttggttmtatttcttgaaaatataaataatatctatttagtttacataggtgaaaagttctgattaaagtaagtaggaacataatattagcagaaagtctccacaactggagggagagatctaaaaaacaaaattttataaaagtaattacctaaaatcttcaattaagaaatattaagggttttaaaagtcataaatggtgttactttgggaataagattttttaaatccaaattccaccattatg

SEQ ID NO: 284481 - DNA, 649 bp, Homo sapiens
gatgaatgaaacatcacacaaatttaaattaaccacttagcaatcagagaaataaaaatattaaaatataaaatataaataattcaaaaggtaagataaactctatgctaagtatagccagagagataattcatgaacmcagtattgaggaatttaatctaaacacaacatagtaaggcagtgaaggatatatatgtatgtatacacacagagacagagacaaagaaataaaggagttatctgaagcatagtgaaaagtcagactgatttgatgattggaaattactatttggaaactgaatacagtaaatttgcaaagagaagggaatggaagatacacacagaaattggtgactgagtcaggtatcccacttttttagttcttgtgatacctaactggtttgcaattcctgccctgtgagtctttgtatccttaaaataaaaccccacatttattgcactggtttgagtgggtctcttattcttgatacccaaagaacattgactagaacatgcagcaaggttgatattcgaaaatctacccttcaatctgtcttattagctaagagtgcaagctaatttacagttgaccaagaacggcttctttatagcacaacctcatgaaaacttattaacctggctttttatc

SEQ ID NO: 284482 - DNA, 649 bp, Homo sapiens
gatgaatgaaacatcacacaaatttaaattaaccacttagcaatcagagaaataaaaatattaaaatataaaatataaataattcaaaaggtaagataaactctatgctaagtatagccagagagataattcatgaacccagtattgaggaatttaatctaaacacarcatagtaaggcagtgaaggatatatatgtatgtatacacacagagacagagacaaagaaataaaggagttatctgaagcatagtgaaaagtcagactgatttgatgattggaaattactatttggaaactgaatacagtaaatttgcaaagagaagggaatggaagatacacacagaaattggtgactgagtcaggtatcccacttttttagttcttgtgatacctaactggtttgcaattcctgccctgtgagtctttgtatccttaaaataaaaccccacatttattgcactggtttgagtgggtctcttattcttgatacccaaagaacattgactagaacatgcagcaaggttgatattcgaaaatctacccttcaatctgtcttattagctaagagtgcaagctaatttacagttgaccaagaacggcttctttatagcacaacctcatgaaaacttattaacctggctttttatc

SEQ ID NO: 284483 - DNA, 604 bp, Homo sapiens
tgatacctaactggtttgcaattcctgccctgtgagtctttgtatccttaaaataaaaccccacatttattgcactggtttgagtgggtctcttattcttgatacccaaagaacattgactagaacatgcagcaaggttgatattcgaaaatctacccttcaatctgtcttattagctaagagtgcaagctaatttacagttgaccaagaacggcttctttatagcacaacctcatgaaaacttattaacctggctttttatctgtatatatactatactacaaaatatctgaaaatacatagttatttcctacaggcattgtaatttctttctcctttgaatttcagctaaaactctttaatgtgcttgcactataggttggtttcttcttatatgtaggtatttttctgccacgtcattgtttttatttgattgcttttattttgatattccaaacatcctatttaccaatttttcayacttgtgatattaagatgcattttaatatattttagaaagtatatatagacatacgtacatcactatttcctgtctgtttccttgttaatttctccaacagtgacatgaaaccctttaacaaca

SEQ ID NO: 284484 - DNA, 590 bp, Homo sapiens
acctaaaaactcagtggcttaaaatataagcatttttttcttacctagtgtgtagaggtcagccaggtcagcttggacagctgctatttaagctgtgcattggctgggctaagcttcaggcttcagatagggttcaaataagttgtacatgtcttcatgctctccgtgaaccagcactaactgaggcatatttttctcaaggcacgtctcccagcaaaagaacaaactaaagcatgtaggtacatttaaacactctcttcccgttaaaccaaccaaataagtaaaatcaaagtgaatcacaatatcaagccaaagttgatcatgtaaagaagtatagtctgccccaaagatgaggctgagagaatatttgctaaccaatgtaccaatatrttacagcaggcacttatatatttgttgttgaaggtaataatcgcaacaggtaacataaaccttttattgatcatttaccagagccaagcactgggctaagacacttgtcatttaatttgattctgaaaagacccctttgaggaaatactataattatccacagtgtacatataaggaaattgagatacaggggatgtaag

SEQ ID NO: 284485 - DNA, 575 bp, Homo sapiens
agctacaccagcctttgtttttcttgttcttccttccttccctccttccttcatttttccttcttctcttttcctttctctctctctctctttgtttctttctcatgacttcttccgttttatgacatttgtgtatgtttcctatgtctggaactattttaatctttcacccttcatttgttatatagcaataagttttaaattcatctttcaattatttgtatagtgtatcctataagaaacaggtttttatgtctcatattaagaaagataaatatagtaacattaaattatatccacaaattatttgcttctctcctttttaaaaggtagagcctaattacatttcttgccccttgaatgtaggttgtgcttagtgacttgtttctaacaaacagaatctggtgaaagtgacattatgtaacttacaagatgaggccataagagatattttaacttcctgcttgctatctctcttgrattattcattccaagggaagccaaggaccgtattatgaggatattcaagcagttctctggaaacatcagtgtgtgaagaactgagactcctgcca

SEQ ID NO: 284486 - DNA, 626 bp, Homo sapiens
tcttttcctttctctctctctctctttgtttctttctcatgacttcttccgttttatgacatttgtgtatgtttcctatgtctggaactattttaatctttcacccttcatttgttatatagcaataagttttaaattcatctttcaattatttgtatagtgtatcctataagaaacaggtttttatgtctcatattaagaaagataaatatagtaacattaaattatatccacaaattatttgcttctctcctttttaaaaggtagagcctaattacatttcttgccccttgaatgtaggttgtgcttagtgacttgtttctaacaaacagaatctggtgaaagtgacattatgtaacttacaagatgaggccataagagatattttaacttcctgcttgctatctctcttggattattcattccaagggaagccaaggaccgtattatgaggatattcaagcagttctctggaracatcagtgtgtgaagaactgagactcctgccaatagccaagtgagcaagccatgtctaaactggatcattcagtcctagtcaagcctctcattaacaacctcaccagttgatatcttgactgcaatctcatgaaagactctgagccaga

SEQ ID NO: 284487 - DNA, 621 bp, Homo sapiens
tcatctctactttatcaagtcaaattaccacgaagttcaccaactcaaagcataaaaatctcaaatacttttctcttactacaataccttatgtttcaagttttcaaatttctttacttttttgtgactttcagtaagtagttcattagcgtrttacatactgggttcaaattcttcaaccaataccctcaataagagaaaagcaagcacactgaccttctctatcaccagtctcatttattccctaacctggattaacccagttcatcattgtcttcattatttttgtagaatgttgaataatataaccagaccaaactgattagctcctttatgaatcctgtcatactttattcttccacagttgagtccccacctcagcttctaaacttgccctcatgactattctaagcactcttcatgttcctcactctcccaattttttcctctatcttaccagacatcttgccttgtgtatcacaaagcctgtctttatgaactctttcatgttctccagactttctcttaaagtagccatgttccttgagccatttgtttcttatttttttgtttcccaagaatttaatgcatcacaatttctttctcatggtaatttactac

SEQ ID NO: 284488 - DNA, 621 bp, Homo sapiens
tcatctctactttatcaagtcaaattaccacgaagttcaccaactcaaagcataaaaatctcaaatacttttctcttactacaataccttatgtttcaagttttcaaatttctttacttttttgtgactttcagtaagtagttcattagcgtgttacatactgggttcaaattcttcaaccaataccctcaataagagaaaagcaagcacactgaccttctctatcaccagtctcatttattccctaacctggattaacccagttcatcattgtcttcattatttttgtagaatgttgaataatataaccagaccaaactgattagctcctttatgaatcctgtcatactttattcttccacagttgagtccccacctcagcttctaaacttgccctcatgactattctaagcactcttcatgttcctcactctcccaattttttcctctatcttaccagacatcttgccttgtgtatcacaaagcctgtctttatgaactctttcatgttctccagactttctcttaaagtagccaygttccttgagccatttgtttcttatttttttgtttcccaagaatttaatgcatcacaatttctttctcatggtaatttactac

SEQ ID NO: 284489 - DNA, 450 bp, Homo sapiens
gcagctgcctgctgtctaagccatctgacctccttgggggacctgcaggagccagcactgggactcacaactgcctaaaatgctaagctcggtgggcaggggaagagtggaacccatttctgtagctccaggctgcacttttaccctgctggagccagggaggctgaatggcttggttctaagacttgtactcacagcccaaaatacaccagctgtggcagtctgtggtgagagtgcctcttcaggtctaaccctgacccatcctttctcagtgggtggggtttccctacaggatctccaataactccagccagtctcagaaatagaattcagatctccctgggcctgagccactagcgggaggagcrgctgcagtctctgcagaccagcagacttagcctctcctcctgatagttctcaggaatccaggcagcccagacaagtgggctt

SEQ ID NO: 284490 - DNA, 602 bp, Homo sapiens
taaatgccgtatgcatgtttatcaccaacagagtgtttcttattttgaagacaatctctattttttgaaaaattaaacagttggaagccagatytgacagagaaagtcacaaaccaacttgataatggcaaaatgactgtggcattttctagtggattttacagttccttaaagtgctaatttcctagagaatagtaagactagaggagtaaagaaatcatgtagctaggttttaattaggaaataagtgttagtttacttactctccaactagcttaattctaatttattgaagcataatctttcctatttgcaaaataatagcacaaatatttgtaaaaaaaattctttttatgatttaaccaaactactggaagcaacaccctataatgttcaaagatataagaaaaaaataacccatgccaataaactagacagaaaaagcaaaattgtgaatacatgtatgcatgtatgtgtgtgtgcatgtgcacgcatgtgtgtgtgtaaattctaattcaaggaggtacaacgctttgaaccttcctcaattcttgatactttagaataaatgagtctaaaatcatcactatattttttcaccc

SEQ ID NO: 284491 - DNA, 602 bp, Homo sapiens
taaatgccgtatgcatgtttatcaccaacagagtgtttcttattttgaagacaatctctattttttgaaaaattaaacagttggaagccagatctgacagagaaagtcacaaaccaacttgataatggcaaaatgactgtggcattttctagtggattttacagttccttaaagtgctaatttcctagagaatagtaagactagaggagtaaagaaatcatgtagctaggttttaattaggaaataagtgttagtttacttactctccaactagcttaattctaatttattgaagcataatctttcctatttgcaaaataatagcacaaatatttgtaaaaaaaattctttttatgatttaaccaaactactggaagcaacaccctataatgttcaaagatataagaaaaaaataacccatgccaataaactagacagaaaaagcaaaattgtgaatacatgtatgcatgtatgtgtgtgtgcatgtgcacgcatgtgtgtgtgtaaattctaattcaaggaggtacaaygctttgaaccttcctcaattcttgatactttagaataaatgagtctaaaatcatcactatattttttcaccc

SEQ ID NO: 284492 - DNA, 580 bp, Homo sapiens
tttttgagacagagtctcactatgttgtccagggtggagcacagtggtgcattcatggcttactgaagcttcgacctcacaggttcaggcaattctcccacctcagcctcctaagtagctggggctacaggtatgccaccatgcctagctaattttttgtattatttgtagagacaaggtctttccatgttctccaggctggtcttgaactcctgggctcaagtaatcctcttgcctcagctccctaaagcggtaagaatacaggtgtgagccactgcgcccggccaacattcactttcaagtataagtaagcattctatgtgtaaattgggttgaaatttttcttgtgtgctttttatgctgaaatgtactctgtcagtttaagcataaaggtatttgttattgcaaaaatatcattaattcrtaatgaaagtgattaattttgtgtacagaaataatttttaagggcttttacatggttaatcagcacaagactgataattagctaggtaaaattttaaagcatacacagctcttgaaccaaaaatgctaacaatatacaattcaaagcaaaatactg

SEQ ID NO: 284493 - DNA, 566 bp, Homo sapiens
atttcattatattttttaagttctgagayatttttctgtctgcctcattagatatgaaatattaatatttaatattaaattttttttatgtctctgactcatcctctcctatcctatggggtctccaaatacatcttcattaggctgctccagttttaatgttttaactattctcacctctatataacttttctgtatggaatcacatgaatgctgcttctgttccatgaatatgtagctatttgaaattgtctgcagctccctgatgacaggttctttttctattaaaaaaaaaagtttgtgtctctcattttggttcatttctgtggctgtgaattcaagttcattaacttttctactgcagtacctaaccttccattaatcccatcaagttttttttgtttgtttgttttgtttttgagatggagtctcactctgttgcccaggctggagtgcagtggtatgatctcggctcagcacaacctctgcctcccaggttcaagctattctcctgcctcagcctcctgaatagctggaactaaaggctcacgccaccatgcctggct

SEQ ID NO: 284494 - DNA, 566 bp, Homo sapiens
atttcattatattttttaagttctgagatatttttctgtctgcctcattagatatgaaatattaatatttaatattaaattttttttatgtctctgactcatcctctcctatcctatggggtctccaaatacatcttcattaggctgctccagttttaatgttttaactattctcacctctatataacttttctgtatggaatcacatgaatgctgcttctgttccatgaatatgtagctatttgaaattgtctgcagctccctgatgacaggttctttttctattaaaaaaaaaagtttgtgtctctcattttggttcatttctgtggctgtgaattcaagttcattaacttttctactgcagtacctaaycttccattaatcccatcaagttttttttgtttgtttgttttgtttttgagatggagtctcactctgttgcccaggctggagtgcagtggtatgatctcggctcagcacaacctctgcctcccaggttcaagctattctcctgcctcagcctcctgaatagctggaactaaaggctcacgccaccatgcctggct

SEQ ID NO: 284495 - DNA, 549 bp, Homo sapiens
ggaattttaagatttggcttattaaggataatcatagaaatgacaaaacccaaacatagttcaactcttgaatagacagattcaaactcctgcaatgaagatgtagtagaagagaaagctcacctatttctagtcatatgtcctatttacttcagtttattctatcctaaaatgctgcttgttaaccaaaaaataataaaacacctgaaaaascaagggaaaaaacccctttgtccagtgaccaatatatcaacagaatcagaatcaaatatgatccagccattaaaactctcaggaaataagaatgtagtaaaaaggatgatgtacaaatgtacatgattatatgaggaatttgagcagaaaggtagaatgtataagaaaaaataaaatgaaatcgatgtagaggccaagggaaaatttctcctttgccctctgaaggtttgctgaaaatcactgagaagaagcatattaataggagaagaggcatacaaatttatttgatcatagttttgtgtgacacacaagccttcaaaatgaagagccaaagat

SEQ ID NO: 284496 - DNA, 549 bp, Homo sapiens
ggaattttaagatttggcttattaaggataatcatagaaatgacaaaacccaaacatagttcaactcttgaatagacagattcaaactcctgcaatgaagatgtagtagaagagaaagctcacctatttctagtcatatgtcctatttacttcagtttattctatcctaaaatgctgcttgttaaccaaaaaataataaaacacctgaaaaagcaagggaaaaaacccctttgtccagygaccaatatatcaacagaatcagaatcaaatatgatccagccattaaaactctcaggaaataagaatgtagtaaaaaggatgatgtacaaatgtacatgattatatgaggaatttgagcagaaaggtagaatgtataagaaaaaataaaatgaaatcgatgtagaggccaagggaaaatttctcctttgccctctgaaggtttgctgaaaatcactgagaagaagcatattaataggagaagaggcatacaaatttatttgatcatagttttgtgtgacacacaagccttcaaaatgaagagccaaagat

SEQ ID NO: 284497 - DNA, 534 bp, Homo sapiens
atccccaatgtacagtagaggaagctgaggttcacgtgcaacaactttaattgaatatgttcctgaagttctgtacacarcactgaagttaccttagagtcatgatttgtgtaagtgttctttcattttacagaacataaaagttatagtgtataacttttttcctatgataaataatcctaaattaagtatctgtatacataagtctctttgtatactttggaatattctttctttcttttggggtggagtttcgctcttgttgcccaggctagagtgcaatggcaagatctcaactcactgcaacctccgcctcctgggttcaagtgattctcctgcctcagcctcccaagtagctgggattacaggcatgcaccaccacggccggctaattttgtatatatatatatttttagtagagacggagtttctccatgttaatcaggctgatctcgaactccaaacctcaggtgatctgcccgcctcgacctcccagagtgccaggattacaggcgtgagccactgcacccggcc

SEQ ID NO: 284498 - DNA, 621 bp, Homo sapiens
gtaatttaaagaaatatactagtgatatttgcaacaacatggattaatttcaaactccattgatgtgacactaggaaacaggaaaaactacggggacagattactgattaaacattgccagcagctggagttgggaggaagattgtctgcatagggacatgagcaaagagtttgaggatgatgaaatgcaacatgctgaatgtagtgttatccaaccacacccatttatcgaagcctgaaaaattgtataccaattttggtgtacatctgctgtgaatttattgcatggaaatttacatagtatataatatgtaatttacctcaatgagattttcttaaaaataatgcaataggcaaaaaatgattaaaatactagcaatgataaatccatctactctatgaattctaggagggttttcatatttaaaaatattaagagaaaacacaaagacccataaattcataatatcctgattttttcttatatctttaagaaaaaaatttttctagagataaattattttattgatgaatattaagtatgatcaagttaatgtgatatgcctggggaatctctaaataacctgarcaaacacaagtggaccaggtcacttgattatt

SEQ ID NO: 284499 - DNA, 605 bp, Homo sapiens
ggaaaggaaaaatcaaattagttaacatagacaaatatatgtgtatataataaccaaagagatggtatgtacagctactactgtcctttttttctacaaatggccataaagttgtagttgatatttataactcattccataggtcattccattttcccttaagtcaacattttctattgttgtgattctttacctgatgattaactagaaaaaaaaatcacctttcccccacagtggttttccattaacttttatcttyggatatgggagtaataatcatctgatagaattcccagtgtttcagacaaagtcatcatatagcaaaaatctattttattgttaataatcaggagccattatttctattatcttcttctttatgtattggctaattgacatagagcccaaaatggtcaagtgatgatcttaactttgagatcaatggagccgttgttatgtgttctgataaaagctttcctcccctaataattaagacctcaaagctgtagtccccaaattcctgcgtcaggaataaaaattctctgaatgaattattaggtgtaatagcaagaagagtcatttttacttcttccggaaaaaagagc

SEQ ID NO: 284500 - DNA, 605 bp, Homo sapiens
ggaaaggaaaaatcaaattagttaacatagacaaatatatgtgtatataataaccaaagagatggtatgtacagctactactgtcctttttttctacaaatggccataaagttgtagttgatatttataactcattccataggtcattccattttcccttaagtcaacattttctattgttgtgattctttacctgatgattaactagaaaaaaaaatcacctttcccccacagtggttttccattaacttttatcttcggatatgggagtaataatcatctgatagaattcccagtgtttcagacaaagtcatcatatagcaaaaatctattttattgttaataatcaggagccattatttctattatcttcttctttatgtattggctaattgacatagagcccaaaatggtcaagtgatgatcttaactttgagatcaatggagccgttgttatgtgttctgataaaagctttcctcccctaataattaagacctcaaagctgtagtccccaaattcctgcgtcaggaatraaaattctctgaatgaattattaggtgtaatagcaagaagagtcatttttacttcttccggaaaaaagagc

SEQ ID NO: 284501 - DNA, 568 bp, Homo sapiens
ttaagggagacatttcacttttgacmgttttaaaataaatgttctacaatttgtgcaggtctgagttgataaatggggatcagttaataagcaatcctggtaagagatgaaagtcgctctagattattggcagtggagatggacagaagtggagaaatataagatatatttagaaaataaaaccaacaaatattgctgacaaattgtaagagagatgaagatgtcaaaaatgcctcttctatttctggcttatgtaactttactgttgttggtactatggactgatagcacacaatagaaaaggacatgcctggatttattgaatcatccaagtaaaggtatctaataagtgtataattaaaattttctatgaaaagtacatttaaaaacaagccaaactgaacatataaatacaatttcatttaaaatgatagaaatgtctgttcatggcagtcaggttttaaaatgtgctctttgtcattaatctgtcactattgtcatttcccaagttcttttcactcttaacacttccttttaaaatttttattctaatccaatattcttatgc

SEQ ID NO: 284502 - DNA, 568 bp, Homo sapiens
ttaagggagacatttcacttttgacagttttaaaataaatgttctacaatttgtgcaggtctgagttgataaatggggatcagttaataagcaatcctggtaagagatgaaagtcgctctagattattggcagtggagatggacagaagtggagaaatataagatatatttagaaaataaaaccaacaaatattgctgacaaattgtaagagagatgaagatgtcaaaaatgcctcttctatttctggcttatgtaactttactgttgttggtactatggactgatagcacacaatagaaaaggacatgcctggatttattgaatcatccaagtaaaggtatctaataagtgtataattaaamttttctatgaaaagtacatttaaaaacaagccaaactgaacatataaatacaatttcatttaaaatgatagaaatgtctgttcatggcagtcaggttttaaaatgtgctctttgtcattaatctgtcactattgtcatttcccaagttcttttcactcttaacacttccttttaaaatttttattctaatccaatattcttatgc

SEQ ID NO: 284503 - DNA, 578 bp, Homo sapiens
gccatgatttgatatatggtaactccagcttcaaaagtctatgttttcaaccacaacatcatcagaagcccattcttttgccgaagaaacccctgaccttgcctgaaatagcttgtgactcttcaaatcttggggtatttcctgagacatccaaccaacaccaaggggaagtgggctatgaaagtcggcatgttccacgatgccactatgttcatagcagagatggcaagaggtatctttcccctcagcagaaccaggaactgccagcttcattccccaagaacatcttctactttcagattagaaagttcttccccatctgatccctcaggattcgatatrttctagaagttagccaatgctgtttattccctattccttcctttctgaatgggaattatttttaaaactgtaatttcctgctttttctaaactattatatattgtataacatcgacaatagtgttggtgtcagacaagctttaaggcttaaattgacaggtcttcagacctttaagaagctattcctggacctgacagagcttcagtaatcactaacctttgactggagagagtca

SEQ ID NO: 284504 - DNA, 457 bp, Homo sapiens
cccaatttgcagagctagtcagtgacaccgccaagactagaactcacatctcagcaaggcattcggtattgctaagttccctgaccatttcgtataataactattacaaatcttcaccactgctttcatgaacctcataatactgcctccctatcactctggcccctgcttcacagaaaattggaagctaccaagcatgaactccagtttccacttttaaacttcctcatatctcatctcaaaagaagaatatcagaatattattacccttcagggtaatcttrccatttgtcatctgtgtcacactgtctcttttttttttttttttttttttgagatgtggtcttgttctgtcacgcaggctgaatcgcagtgatgtgaacatggctcactgcagcctcaacttcctgggctcaaacaattctcttgcctcagcctcctttgcagttgggaccac

SEQ ID NO: 284505 - DNA, 593 bp, Homo sapiens
atgccaggaagttttgcgaattttcacttgcctttgctccacctttgtcccagactcagtgacagtcttggagacagcagccagtgttggaccctgcactctggctccagagataaaagagcagatcatattcacaaagaatcgtgtttgtcttttctaacctgtctgaaagctacctgaaggactgacacaaggagcttgcctttgtttcacctaactcagacttactcatgggagaaaagtggctatgcagagagtattccttgcaaacattataagaccaataaacaacatgccacacctggaacaaaaaaattrcaattgaggcaaactatagatatgctgaaagcctggaaggaaaagacagggagacagtttctttggaaaattaggcattcaaaagtgtccacatacattggggaacttaaaagccatgtgcatacccaaggtagaacacatgctggaaaagacctgagaagatctatgtggaagatcagcttccacttctggctgatctctaggttcaatgcaagcaggaaatgaaggctacagcagagctataaacagcctgtctaaacattgaaggagtgctc

SEQ ID NO: 284506 - DNA, 598 bp, Homo sapiens
ttcttcctggaataaccctttccttccctttcccccaacttagtccctgatgaagttccactcatctactaactgatctcagacctcactctctccatgagatcttctccctttccatctactagaccagaatgtctctatatttcctgtacctatttttatgattctgggtggtaatgatattttttcatgtttgcattccccttctagcctctgtaccttgagggtggcacccatgcctgacttatttgggagtcctgagtgccttgtagagtgcctgacacacagcaggtcctccataaaattttattaaaatgagttaaattaaataggagtccagagaagacttgaggtagccaaaggtcctcactgagccttgggttttatatcaattgaaagttgaaaaggggaamacaggagccacaccccagagatgggcacgagcctagcaaaagctggggactatgaatggacacatctggcttgagtggagcctgtagaatagggagtgttgggaaataaggtcagaaaggctaggcagggccatggaagacttcgtcaaaagcagaggaggtgaaacctgatataatagctagtg

SEQ ID NO: 284507 - DNA, 598 bp, Homo sapiens
ttcttcctggaataaccctttccttccctttcccccaacttagtccctgatgaagttccactcatctactaactgatctcagacctcactctctccatgagatcttctccctttccatctactagaccagaatgtctctatatttcctgtacctatttttatgattctgggtggtaatgatattttttcatgtttgcattccccttctagcctctgtaccttgagggtggcacccatgcctgacttatttgggagtcctgagtgccttgtagagtgcctgacacacagcaggtcctccataaaattttattaaaatgagttaaattaaataggagtccagagaagacttgaggtagccaaaggtcctcactgagccttgggttttatatcaattgaaagttgaaaaggggaacacaggagcmacaccccagagatgggcacgagcctagcaaaagctggggactatgaatggacacatctggcttgagtggagcctgtagaatagggagtgttgggaaataaggtcagaaaggctaggcagggccatggaagacttcgtcaaaagcagaggaggtgaaacctgatataatagctagtg

SEQ ID NO: 284508 - DNA, 594 bp, Homo sapiens
ggacaacactgttatcagtgttgggttgtgagtgagaattaaattagttaatatatgtaaagcatttagcattgaggttggtaaatcccaaccctgatacaagccagatagcataaatgaggagcattcatgccctgtctgaagaggtcagaggctactcagctctgctagtcactgtcacatggggatgaaggtcaagttctgccaggtgttacaccttgtcaagacaaactacaaacacaaatgttaatttgaaagatctcaatttttaaatgttgacttttttaatgtttaaatattccctttcttaaatcactgggaacacataactgaattcttaccaaatttagtccacaagaccattctgtgacctctaaccaaccacgtggtagacatgtaatgttgtctgcatttgtaaacagtgaaatccctagacaaaattctgaatctggcaatgcgtttagtgatcctgttacttttccattcctctttactcataatctccatccyagtctttgttttgtaaacagactacaagtagggtggcctccctggaactgcttgccaaatagctttccacagccaagaccccta

SEQ ID NO: 284509 - DNA, 440 bp, Homo sapiens
gttgctagaatgtttgagggttttgcrtgtttgttttgttaattcattggtaagtctttcttctgccttctagactacatgaaataaatctattttcttttctatgtaatagcatttctatgaatttgaaataactattaggtcactagttaatcttaaatactttactaaaagagcctaaattcctcacaccatttctcatatgagatggtttccagaactctcatcccttctgagtccttctctggatttcttacagatcacatgtttttaatataaagtatgtcatttttctgttcttctgaatgccattttaaaaccctctttcagaatccattttatgtgcactgctgtaatgttgtcaacttcctccatgttgtttgacaatctacaaagatacaataaaatttcaagtgtgattaaagtattatagttaaaat

SEQ ID NO: 284510 - DNA, 525 bp, Homo sapiens
agggacttaaactataaactacaacaaatggactttatagatatttacagaacattctacccaataactgcagactatacattcttttcataagtacgtggaccattccccaagattgaccacatgacagaatacgaaacaagtctcaataaatttaagaaaatcaaaattatagcaagtgctgtctcagaccacagtggaataaaattgaaaatcaattccaaaaggaaccctcgaagccatgcaaatacatgaaaattaaatcacctgttcctgaatgatcatttggtcaacaatgaaatcaagatgaacattaaaaaattatttgaactgaacaataatagtgacataacccatcaaaacctcttggatacakcaaaagcagtgccaagaaaaaaattcacagcattaaatacctgcaacaagaaatctgaaagagcacaaagagacaatctaaagttacacctcaaggagctagagaaacaaaaacaaaccaacccacaacccagcagaagaaaagaaata

SEQ ID NO: 284511 - DNA, 525 bp, Homo sapiens
agggacttaaactataaactacaacaaatggactttatagatatttacagaacattctacccaataactgcagactatacattcttttcataagtacgtggaccattccccaagattgaccacatgacagaatacgaaacaagtctcaataaatttaagaaaatcaaaattatagcaagtgctgtctcagaccacagtggaataaaattgaaaatcaattccaaaaggaaccctcgaagccatgcaaatacatgaaaattaaatcacctgttcctgaatgatcatttggtcaacaatgaaatcaagatgaacattaaaaaattatttgaactgaacaataatagtgacataacccatcaaaacctcttggatacagsaaaagcagtgccaagaaaaaaattcacagcattaaatacctgcaacaagaaatctgaaagagcacaaagagacaatctaaagttacacctcaaggagctagagaaacaaaaacaaaccaacccacaacccagcagaagaaaagaaata

SEQ ID NO: 284512 - DNA, 565 bp, Homo sapiens
acttgtactcatccatgcgtgtgtgtttgtgtatggcatatttagttttgtgcaattttattacatgtgcaagctcatgtatccccccaccacagtcaaaatacaaaattccatgctgcaaagatccctcatgttgcactgttataaccacaccaaaacctgatccttgacaatcgctattctccatctctayaattttgttatttcaaaaatgtcatataaattgaatcacacagtacatagtctttagagattggcttttaatcaatataattctccagagatctttctaaattgtgtgtgcatcaagagtttattcctttttttttttttttggcttaagtattccatgacatgaacttaccacagtttaaccattcacttattgaaagacatccaggttacttccagtttggggctattacaaataaatctatgaatatgtgtgcacaagtttttgtgaaaacacaaagtttttatttctccaggataaatacccaggagtacaattataggggtcatatgataattgcatgtttagctttataagaaactgtcaaactgt

SEQ ID NO: 284513 - DNA, 565 bp, Homo sapiens
acttgtactcatccatgcgtgtgtgtttgtgtatggcatatttagttttgtgcaattttattacatgtgcaagctcatgtatccccccaccacagtcaaaatacaaaattccatgctgcaaagatccctcatgttgcactgttataaccacaccaaaacctgatccttgacaatcgctattctccatctctacaattttgttatttcaaaaatgtcrtataaattgaatcacacagtacatagtctttagagattggcttttaatcaatataattctccagagatctttctaaattgtgtgtgcatcaagagtttattcctttttttttttttttggcttaagtattccatgacatgaacttaccacagtttaaccattcacttattgaaagacatccaggttacttccagtttggggctattacaaataaatctatgaatatgtgtgcacaagtttttgtgaaaacacaaagtttttatttctccaggataaatacccaggagtacaattataggggtcatatgataattgcatgtttagctttataagaaactgtcaaactgt

SEQ ID NO: 284514 - DNA, 613 bp, Homo sapiens
tgcactgttataaccacaccaaaacctgatccttgacaatcgctattctccatctctacaattttgttatttcaaaaatgtcatataaattgaatcacacagtacatagtctttagagattggcttttaatcaatataattctccagagatctttctaaaytgtgtgtgcatcaagagtttattcctttttttttttttttggcttaagtattccatgacatgaacttaccacagtttaaccattcacttattgaaagacatccaggttacttccagtttggggctattacaaataaatctatgaatatgtgtgcacaagtttttgtgaaaacacaaagtttttatttctccaggataaatacccaggagtacaattataggggtcatatgataattgcatgtttagctttataagaaactgtcaaactgttttccagagtgactgcatcattttacattccaagcagcagtgtatgagtgatccagtttcttccccggcttgccagcatttggtgttgtcactatttttattttagccattctgatagatgtgtagttatagctcattgtggttataatttgcatttcccaatagctaatgatgcgagacac

SEQ ID NO: 284515 - DNA, 470 bp, Homo sapiens
tcaaaatacaaaattccatgctgcaaagatccctcatgttgcactgttataaccacaccaaaacctgatccttgacaatcgctattctccatctctacaattttgttatttcaaaaatgtcatataaattgaatcacacagtacatagtctttagagattggcttttaatcaatataattctccagagatctttctaaattgtgtgtgcatcaagagtttattcctttttttttttttttggcttaagtattccatgacatgaacttaccacagtttaaccattcacttattgaaagacatccaggttacttccagtttggggctattacaaataaatctatgaatatgtgtgcacaagtttttgtgaaaacacaaagtttttatttctccaggataaatrcccaggagtacaattataggggtcatatgataattgcatgtttagctttataagaaactgtcaaactgt

SEQ ID NO: 284516 - DNA, 1127 bp, Homo sapiens
ggaataaaaccaccatacttattgtccctgggattatgcaggcacatataccaaggggcagggaatcttggggccatcttaggcttctgcctgccccaccatctgtagctttacttgtcctagtgatacaatgtaataayagaatcactgtcatcaagatccaatatggtcaagagttaccacttgctatttgaggattctaatttttttaataacaaatctgtattccaccagcactatttccattaaacctaatgtttgaattgtgctattcaattgcaaaaaaggggaagttaataatcttgaatatataaggaaggtgaaaagatttaatctttcccttatatctatttcttcatgggcccatctctattgccattttttttctcatttagcccacaaaacaaaccgcctgcagctcctgttataaatgagtatgccgatgcccagctacacaacctggtgaaaagaatgcgtcaaagaacagccctctacaagaaaaagttggtagagggagatctctcctcacccgaagccagcccacaaactggtaagcattgctcwggaataaaaccaccatacttattgtccctgggattatgcaggcacatataccaaggggcagggaatcttggggccatcttaggcttctgcctgccccaccatctgtagctttacttgtcctagtgatacaatgtaataacagaatcactgtcatcaagatccaatatggtcaagagttaccacttgctatttgaggattctaattwttttaataacaaatctgtattccaccagcactatttccattaaacctaatgtttgaattgtgctattcaattgcaaaaaaggggaagttaataatcttgaatatataaggaaggtgaaaagatttaatctttcccttatatctatttcttcatgggcccatctctattgccattttttttctcatttagcccacaaaacaaaccgcctgcagctcctgttataaatgagtatgccgatgcccagctacacaacctggtgaaaagaatgcgtcaaagaacagccctctacaagaaaaagttggtagagggagatctctcctcacccgaagccagcccacaaactggtaagcattgctc

SEQ ID NO: 284517 - DNA, 563 bp, Homo sapiens
ggaataaaaccaccatacttattgtccctgggattatgcaggcacatataccaaggggcagggaatcttggggccatcttaggcttctgcctgccccaccatctgtagctttacttgtcctagtgatacaatgtaataacagaatcactgtcatcaagatccaatatggtcaagagttaccacttgctatttgaggattctaatttttttaataacaaatctgtattccaccagcactatttccattaaacctaatrtttgaattgtgctattcaattgcaaaaaaggggaagttaataatcttgaatatataaggaaggtgaaaagatttaatctttcccttatatctatttcttcatgggcccatctctattgccattttttttctcatttagcccacaaaacaaaccgcctgcagctcctgttataaatgagtatgccgatgcccagctacacaacctggtgaaaagaatgcgtcaaagaacagccctctacaagaaaaagttggtagagggagatctctcctcacccgaagccagcccacaaactggtaagcattgctc

SEQ ID NO: 284518 - DNA, 561 bp, Homo sapiens
tatgtatctctctttcttacctgaggataagtttcttgagagtagggacagtattcgattcacttatttatctaccctaggaacttagagtatactcaagaaatgtttgaaggagtgaatgaatgataatctcagttcgaggattttatttctttgaataattatttaatctgcattataattgtttcaggtaatattattttaaaatacttcttccatctgtcctgtgtaaaattatgaagtttctgtgaattgtttatcagaaggagtgaatacgggttgcggtgtgcrgcttggcgcaggctcacaaagagctgcagtggcgccccatgctcagctttgcggactgagttggcggcggcggcacggggacagcagcgcaccctcgcagccctgcacctgggccagtctcctgaatatttacacattgccgaatctcctgtggacaagacaccacggaggccaggactgttccatgatgggttgagcctcttctcgtgcctagagattccaagaatcctatccatctttttcaccaatatggtttgtggactgtgatga

SEQ ID NO: 284519 - DNA, 413 bp, Homo sapiens
ttaattattttaggtctgaatattaacaaatgccactctagtcatctatcactcgtcacacatttattgaacacctactgtgtgttagacactgtgttaggamctgaggaaatagaggacaaagattggaccctactgtcttacatagctcagaatgtctaggacagaccaacaaaagaaaaatggtgggattttatgttgtgagtcatgaaaaggcatgcccagggtgctataaggctcagagaaaaccatctgacagagaagacccttagtccaaatcttgatggatgagttggagttacctgcacctttttcctccacaagaaaaaaagaaaaacatgttctgagctctgggacagcatgggcaaaggcatccctctgacgcatttgaggaaatgctgaacagagtgggt

SEQ ID NO: 284520 - DNA, 612 bp, Homo sapiens
tttttctaccgtggataagtttgcctgttttagaatttcacataaatgaaatcgtacagtatatatgcttccgtataagatgtcttttactcagtatggttttgagagttatttatgttgtgtattggtaatttattcctttttattgctgcatagtattcattgtatctttataccacagtttgtttatttattcayctatggatgaatacctagcctgcctcaagtttttggttttgatgaatagagcttctgtgaaaattcttgaacaagttttattctgtgaacatatattttcattacttttgggtaaaatacctacattggaatttttgagttgtagggtagttgtgtttagttgtaaaataaactgtcagatctttttccaatatggttttatcatttcacattccctctaacaatatgtgagttccagtaaccccatgttatcctaacacctggcattgtcattatcccagcacttggtattgtcagtcttttaaatttcagccattgtggtaaatctgtagtgggacatgcaatttttaaaagtaccccttctatacttatctttctgtgtggaccttcctaactacctcaatccatcttagt

SEQ ID NO: 284521 - DNA, 635 bp, Homo sapiens
ccaacctcctttgctcagctcatcagaacactcattttattttatagaattgaggtgttgcgtgattctagaattgcaaataaaagccaattaagatcattaaaataaatttgttgyaattttgtcttttgacaatcatgaatcaaaacttttatcattatatggtgaactttttctctaaaatggttttgttttaaagcttattttgactaatgttaattgacaatctctattagcatgtgagtttagttcacattaatttactgcacatatttgtcagaggtgtttgaaccagagtgactccctcttgaaaaggggctgggtaaaataaggctgcgacctactgggctgccttcccaggaggttaagcatcctaagtcacaggatgaaacaggaggttggcacaagatacaggtaacagagagcttgctgataaattaggtttcagtaaagaaactggcccaaatccaccacaaccaagatggcgatgaaagtgaactcttgtcatcctcattgctcattatacgctaattataattcattagcatgctaaaagacactcccaccagcaccatgacagtttacaaatgccatggcaatatccagaagttaccctatatagtctaaaaagggga

SEQ ID NO: 284522 - DNA, 635 bp, Homo sapiens
ccaacctcctttgctcagctcatcagaacactcattttattttatagaattgaggtgttgcgtgattctagaattgcaaataaaagccaattaagatcattaaaataaatttgttgtaattttgtcttttgacaatcatgaatcaaaacttttatcattatatggtgaactttttctctaaaatggttttgttttaaagcttattttgactaatgttaattgacaatctctattagcatgtgagtttagttcacattaatttactgcacatatttgtcagaggtgtttgaaccagagtgactccctcttgaaaaggggctgggtaaaataaggctgcgacctactgggctgccttcccaggaggttaagcatcctaagtcacaggatgaaacaggaggttggcacaagatacaggtaacagagagcttgctgataaattaggtttcagtaaagaaactggcccaaatccaccacaaccaagatggcgatgaaagtgaactctygtcatcctcattgctcattatacgctaattataattcattagcatgctaaaagacactcccaccagcaccatgacagtttacaaatgccatggcaatatccagaagttaccctatatagtctaaaaagggga

SEQ ID NO: 284523 - DNA, 549 bp, Homo sapiens
ctcttgttttttcatactttctccaaattagtccacacgctaacaaccagagcttggttcaatcttattttgcacatgctgtcagcccttattctctgaggaatgtctacttaatttgaatgctaattaaacttgcagaaaaggcttaaattagcctagaaatatgcaagaaatagtggaagttttggttcgttgattatgccagatctccttggaaaattattgaaatgatcattaaaaaataattaaaagagctgaactgtatttaagtacccactatgtacttctacctccagtcagttgtaataactgcctttgaaaaatcattccagttccttgagaattacttcacgcaaagaataaggaatatgaccctgtcctcatcattacttcctaaagtatctcttggaaaactaattttcagatatcttkccttattttttaattcattcatggctatttcattggtttttaagagatcagttctgatattggagtcaccgttagatgtggtctgtcttcatgtattatatagagtcagatgacata

SEQ ID NO: 284524 - DNA, 541 bp, Homo sapiens
tttcctagctgctaagaagttatctttgtgttctggaaatatggataattttagatgacttcatattagcattgttagggtttctttggaatgttgaaacatgttatttctctgttgttaatgtggcttctctttttaatttttttctccttgtttaacgactgattatttgttaaggtgatcctctgaggatcttgctcttgggcagtggtggaaacacttctcagaacatacgagacctgagttctttgcctgttttctatcatttccttcctgggagtccttgcaaaagtgatttaatattttgtgacttaataatcactgtaatcttcaaggtcataaaacatgcaacagtttaatctgaaacactgcagaaattaattagctgacctttcccaagggttgagtactccctgaagaataagctttataaatacaagtatgttarttgctgatattatcatcacaggaggaaataccctaagaattgaatccaggtgtttctgagttgcaactgaaagtaatcctagattcctgacag

SEQ ID NO: 284525 - DNA, 1133 bp, Homo sapiens
ctataataaactgcatcatttgatagagtcaccgtttttgcatgtagtgttagagtatcacaaaatataacaagttttactaaaggatggttggttttttcaggatttaagggaatatggacaaattgttaaatagtatttatttgataaatgggagtttgtatgcagaaagagtgaattgcgtataaaaagggtgatttaaaaacccagaaacaaaaggtagaatagggctgaagcatctgataataggaaaagaaaaggacaaaagtcctcaacttgtgagcaatatgctttccctttacaccctgtaatttattcaaatgatattaaaatacaagaccattgcaatttatgcttttcgmctggcagttattttcccccccaagctatcctgtttcagataatatcaatttatttccaatccatcagactaaaatctaagaaaattcaagaactcttttattgttgatttggtgccaccaaattctttttctttttaaatctttctaattatcctttctttttcaatcccattgctaacacccagaacatattttctgttcaatgcaaataaacattcwctgctggtgggaatataattaaattagtccagccactgtggaaagcagtctggcaatttcttaaataacttaaaacagagctaccatttggcccaacaatcccattcctgggtatatactccaaagaaaataaatcattctaccaaaaagacacatgcgctcatatgttcattgctacactattcacagtagcaaagacatagaaccaacccaggtgcccatcaatggtagawtggataaagaaaatatagtatatatacaccatggaatagtaactacatagccataacaaagagtgaaatcctgtcctttgcagcaacatagatggaactggaggccataatcttaagcaaattaatgcagaaacagaaaaccaaatgctgcatattctcacttataagtgggagctaagcactgtgcacacatggaagatgggaacaacataaatatgggaacaacatagagggtggtaggggtgtgggctaaacaactacctgtctggtactgtgctcattactagagtgacaggatccatactccaaaccccagcat

SEQ ID NO: 284526 - DNA, 552 bp, Homo sapiens
ctgctggtgggaatataattaaattagtccagccactgtggaaagcagtctggcaatttcttaaataacttaaaacagagctaccatttggcccaacaatcccattcctgggtatatactccaaagaaaataaatcattctaccaaaaagacacatgcgctcatatgttcattgctacactattcacagtagcaaagacatagaaccaacccaggtgcccatcaatggtagattggataaagaaaatatagtatatatacaccatggaatagtaactacatagccataacaragagtgaaatcctgtcctttgcagcaacatagatggaactggaggccataatcttaagcaaattaatgcagaaacagaaaaccaaatgctgcatattctcacttataagtgggagctaagcactgtgcacacatggaagatgggaacaacataaatatgggaacaacatagagggtggtaggggtgtgggctaaacaactacctgtctggtactgtgctcattactagagtgacaggatccatactccaaaccccagcat

SEQ ID NO: 284527 - DNA, 602 bp, Homo sapiens
gtcaatattcagtggcttcccccaccactccagaagctcagtcaaggagtggcagcacaaagaacaacagggcctgcagctcacagttgttaaagatggagagcagatctcccagagagaaaaggagaccctcttcacatcatgttctctcattggcttcttcctgaagtctgaggcctgaacccccaaatactgctaataaaaagattttttaaaatttaaattttagaatcagggggtacatgtgcaggtttgttacaagggtctgttgcgtgatgcyggggtttcggtttgtattgatcctatcacccagatagtgaacagagtacctaacaggaagattttcagcccttgttctcctccctctctcctccttttggagtccccagtgtctatggaagggtatttcctaggttttcttctaggatttcaaagcttgaggtcttacatttaaagctttaatccaccctgagttaatttgcgtatatggtgataggtaggggtccagtttcattcttctgcgtatggctagctagctatcccagcaccatttattgaataggtagttttcgctattgcttatcctctttctcctatttccc

SEQ ID NO: 284528 - DNA, 600 bp, Homo sapiens
cactataaaaccaactagcagacatatatagaaaaccccacccagcaacagaatacatattcttctcaagtacgcatggaaaattctctgggatagaccatatgttcagccataaagcaagtctcaatcaatctaaaaagattaaattctacaaaatgtcttctctgaccacaatgaacaaatctggtaaattcacaaattaaacactgcagtcttaaacaaacactggaaaaagaagaaatcacaagggaaattacaaaagtgtagctgatagaagttgcaatgtacaaagtgggaaaaataaaaaggatagactcatcttgcaaatgcagacttgaggcctattgcctatagtggatgaaacaaaaaaayagagatttagatacacattacaaaagctaccaataaagcaactatagatatatagttttgggaggaaaagaggtgagggagctgaatcttcatctattttagcaagtagtatatctaaatcttacaaatttaaaaaactgcataatatacatttaaagatttggtagagaaggagccagtaagataccacttaaaaaaaagagagagtagccacatacataaaaggaa

SEQ ID NO: 284529 - DNA, 645 bp, Homo sapiens
aggaactaatattaccaacatttgtatatatcttttattttatctgttgctgtctcaagttttgtgttggatatttcatatattagttttcagtcttttaaattttctcataaaagcatttaagcctataaatttccctctraaaatcacttcagcttcttcccataagtcttgaaatttagtatttttcttattatttagttctaaacattttgtaagttccatgttttactgtgatttcttttttgatccatgtgttatttagaagtacaccttaacattttgaaatgtatggattttttattctatggccattcttttctagtttaattgcattgtgaccagtaaatgtagattatgtgtaattggtactttaacgtttgctgaggtttttatttacttatttattgcctggtatgtggtcagtatctatagttgatgcttactatcaatgtatttgtctagtatttgtcagtattttgaagctatgtttctagaagcatacaagtttaaaattaatatatcttcttggtaattgttccttttattgttatgtattaactctctttattactaactccttcattaagcaagtattttatgagcatgggctatatgccaggcattgttctaggtagttgggat

SEQ ID NO: 284530 - DNA, 606 bp, Homo sapiens
ttttgcaatctactcatctgacaaagggctaatatccagaatctacgaagaactcaaacaaatttacaaggaaaaaacaaacaaccccaccaaaaattgggcaaaggatatgaacagacacttctcaaaagaagacatttatgcarccaacagacacatgaaaaaatgcttatcatcactggccatcagagaaatgcaaatcaaaaccacaatgagataccatctcacaccagttagaatggcgatcattaaatagtcaggaaacaacaggtgctggagaggatgtggagaaactaccagttttatgaagtgattataccattatactcccagcagcaatagagagttctcattgctcaaaatccttgccaaagtttgtcagtctttataattttagcaattctatgattctcattgtgcttttaatttgcattttctttattactaatgatgctgaacatcttttcaagcatcttttcatcttttatgaagtatcagttcaaatctgttacctgtttgaaaaaattaggttatctttttatcattctagatgcaggtcctttgtttgatatatatatattgagtgtattttctccatgtaaaaag

SEQ ID NO: 284531 - DNA, 672 bp, Homo sapiens
tatggtgtatcacatttatttgtgtatgttgaacctatgtggcatttttttaagttgctgtccacaagtttattgtctttatctgaaaaatcctcatagaaaattgtttggtttagctctcagcagcccactcctgagctctgaggaagcttgccttcttctgagttacccgatctttcttctgagcaagggacattttgggacagtgccacctcttctttttaactttttttcttgggcttcttttcatagactggattctcttgtatagcagcatgagctttctaacacatctcctccatcatgtctggagttatgctgttctttatgtattgagagaactgtttcttgtaagcatcttcatcttcttgcattaagtagcacgtataatctgcaacattctggcccatgatgtgcttccagtgtacttctgcattaaattccttgctttcagaatcataaccagggaatcgtttggtaccrtgagggatagacaagcctccatccacagcccccttcagggcaccaaaaactttattgccactggtagttctggcaaggcctgcatccaaatagcacgtaaaggcacctggctgaccattaatgctttccacattgtattcatcgccagtcacctccacttgggcttcatagatcttgtccatgccaaac

SEQ ID NO: 284532 - DNA, 594 bp, Homo sapiens
tagaaatcataaaaagctataagaaaattcagtaatatagcagaagtcaacagcttccatattacagataacaagcagaaagaagatataaggaaaaacctaactcacagtagcaacacagaaagataatgtatcttgtaataacctaataataaatatgcaggatctataaataaacttttcaaacattagtgaagcatacaaaagatttatacaaatggaaaaacatgccatgttttagataagaagaatttcaagcaaactttgtcaattttctttaacttaaaaatttcatataatcccaatgaaaatrccaaaaacttttttgttgaggctttttgacaagttgatactatagtacatgtggaaaaataaacataattagctacaaaaactccaaaaaagaacaatgagaagaaggctagcactattagatattaaggcatattataaatacctatcaattaaaacagggtggttgtaaagagatagtctaatgggataaatgatactgaggaaatgggatattcaatcagaaaagcatattgaaccccttctttgcaccatgcaacaaaaaattaactccagaccaaa

SEQ ID NO: 284533 - DNA, 477 bp, Homo sapiens
catgtgttctacatctatgaattcaatcaacctcagatttaaaaaaaagtaaattccaggcctcctgcctgcggcatttccagccagagcaacccacccacccatggtttccccctgcagaagcgaccctacccacagcaccccmagctggagtgcctcccggccacaacgcctccaccacttctgctggagcacacctcccaagcccacggtgccccctaccagagcacctcccaccctcagtgcccctgccagagtgcctttcgcccacagccctgcccactggagcatatcctgcccacagtgcccctgctgcccctgctggagcacctacacccatgccctgtcaatggtctgggaacaccccagcctctctatcccagccaaagctcaacagtgagagaccagaggacaaagctgctgacccagtcccagtcccacagggttagagcatgcatcccagcagtatggagctga

SEQ ID NO: 284534 - DNA, 1110 bp, Homo sapiens
gaagtccatatttttttaaggtctgtgggttaccatccttcgtgatataaggaacaccctttgttctgacttctcaaggttaaacaccaaagagctcagtcctaaaacttcctcactgcaaagcaaaaataaactttggattaaaccagtgttttaattgtttgggtccatgctattacctttttttaagaacatttgggacagatatttactcataaaatctacgatctcatctctactgaataatttggctggagaggaattggtttaaggccaatttagaaaaacgaaaaagcaaaaagaaaagaaagaaaagaggaaagacagctggmgagggatggaggaaggaggaaagggagatagcaggaagaaaggaaggatagaaagaaaagctggtcagggtggctcacacctgtaatcccagcactttgggaggcggaggtgggtgggtcacttgaggtcaggagttcgagaccagcctggccaatatggtgaaacccccctctctactaaaaatawtcaacccattttttcagtcaattgttggttatgttgwattttaagagttactttgatattttacgtaacagtccttcatcagatatgtcttttgaaaacattttcttctagtctgtggcttgtctttttcttatctttgcagtgtcttttgtagaacagaaactttccattttagcgaaggccagtttatccattctttttctctcatggattacgcctttagtgttgcatctaaaaactccttgccaaacccaaggtcatcgagattttctcctatgttattttctaggaattttatagttttgtgttttacatttaggtctgtgatccattttgagttaatttttgtgaacagtgtgaggtctgtgtctaggtacatcttaattttagcatgtagatgtcaagaatatcttttcttcactgtatcacctttggtcttttgtcaaagattaattgactatgtctgtgtaagtctatttctgggcttttattctgttccatttatctatttgtctattctttcttcaatactacactgtcttggttgctgttgctttatagttaagtcttgaaatcaagtaatgtcagtca

SEQ ID NO: 284535 - DNA, 1165 bp, Homo sapiens
tcaacccattttttcagtcaattgttggttatgttgtattttaagagttactttgatattttacgtaacagtccttcatcagatatgtcttttgaaaacattttcttctagtctgtggcttgtctttttcttatctttgcagtgtcttttgtagaacagaaactttccattttagcgaaggccagtttatccattctttttctctcatggattacgcctttagtgttgcatctaaaaactccttgccaaacccaaggtcatcgagattttctcctatgttattttctaggaattttatagttttgtgttttacatttaggtctgtgatccattttgagttaatttttgtgaacagtgtgaggtctgtgtctaggtacatcttaattttagcatgtagatgtcaagaatatcttttcttcactgtatcaccyttggtcttttgtcaaagattaattgactatgtctgtgtaagtctatttctgggcttttattctgttccatttatctatttgtctattctttcttcaatactacactgtcttggttgctgttgctttatagttaagtcttgaaatcaagtaatgtcagtcawagatgtgtaaacaccaaaataggtaattggaacacacagatgaatcagacacagtgcctgtctttgaggagattgtggactagtgagagagatatgcctaaaaatgtatagattgaatcaagtgtgagaagtgcaaagctttgctctatgtgttgtgggaccacggaagatggacacttagttcagcctggggttcaagaatggctcttgaaagaaaaggctatgcaggtttcctaaagcatcaaatcacttttcctatacatgacttaacactcacaattcaagcaaaatgtactaaaatttttaaatgtctctgaatttttttctgaagtagctagaacaagttcacaagtaatttatcaacttctcagtgcattgttcaagacaattwaaaaaaaggagaagaaaaaaaatacttgtattagtagccatcagcagaaataaggacttcactggggtatctcttgcaagactcttgctaaaactttgtagagtttttggaaacagccctttagggtaagcaccaatatataacagcaaaatattacatttctttaagtttcagtcttaaaa

SEQ ID NO: 284536 - DNA, 589 bp, Homo sapiens
aaatttttaagacaggtcattacattttgaaatatgtataagtgtgtgtgtgcatgygcacgtgttttagaatttaagtgttacaaataataagtccctcagagtgtgttttgtttgttttctagaacacaaagaacttttgaagtttggttaatttccatgctaagagttctgtggagtcaagaggcagcatccccactgtgaaaccaatggaactctcttcaaggatgctcagtgaaagacaaagtttaaaaatgtacagaacatagaaacgccagcacctgcaaaaccagacttgggatttgccacttgtttcttggaatttaggctgccctgggctatgagggctttctgtttctttgcctagacattcttctacaattattgaaaatcagacctaattttgcttagcttccctttgttttcaagcatggtcattgtgatggttaatactgagtgtcaacttgattggactgaaggatacaaagtattgatcccgagtgtgtctgtgagggttttgccaaaggagatcaacatttgagtcagtgggctggcgaagggaggcccacccttaacctgggtgggcaca

SEQ ID NO: 284537 - DNA, 548 bp, Homo sapiens
tgtgttttgtttgttttctagaacacaaagaacttttgaagtttggttaatttccatgctaagagttctgtggagtcaagaggcagcatccccactgtgaaaccaatggaactctcttcaaggatgctcagtgaaagacaaagtttaaaaatgtacagaacatagaaacgccagcacctgcaaaaccagacttgggatttgccacttgtttcttggaatttaggctgccctgggctatgagggctttctgtttctttgcctagacattcttctacaattattgaaaatcagacctaattttgcttagcttccctttgttttcaagcatggtcattgtgatggttaatactgagtgtcaacttgattggactgaaggatacaaagtattgatcccgagtgtgtctgtgagggttttgccaaaggagatcaacatttgagtcagtgggctggygaagggaggcccacccttaacctgggtgggcacaatctaatcagctgccagcatggctagaatataagcaggcagaaaaacgtgaaaagagagactg

SEQ ID NO: 284538 - DNA, 557 bp, Homo sapiens
cagtggaactgggaaaagggcaaagagagaagaaaacttccagctgaactttgtaacaattccaactgaatgagaagtctcctggccagaactcaggggaaggcrtaaatcttgtgtgcagactccacaggtcgggaagcacaaaagccccacttgcttttgcagctgggaggctggtagcctggggcaagttctcagccctgctcacccactgcctggaaacagactcagtcctgttgtggggggcatggtgagagtgataactgccttctgggttttgtggaagctgggtgaggcctgtaactgccgactttcccccacttccctgacacctgcgtgacacaggagaggcagccataatcctcctaggaacataactccattgacctcagaaccacacccgcatctgccagagcagccacaggaagacccgcccaaggcaagactgagctcagacatgcctaagccctgcccccacctgatggtccttccctaccatccctggtagctgaagacaaaggacatacactcttgggagttctagggcacagcccacc

SEQ ID NO: 284539 - DNA, 557 bp, Homo sapiens
cagtggaactgggaaaagggcaaagagagaagaaaacttccagctgaactttgtaacaattccaactgaatgagaagtctcctggccagaactcaggggaaggcgtaaatcttgtgtgcagactccacaggtcgggaagcacaaaagccccacttgcttttgcagctgggaggctggtagcctggggcaagttctcagccctgctcacccactgcctggaaacagactcagtcctgttgtggggggcatggtgagagtgataactgccttctgggttttgtggaagctgggtgaggcctgtaactgccgactttcccccacttccctgacacctgcrtgacacaggagaggcagccataatcctcctaggaacataactccattgacctcagaaccacacccgcatctgccagagcagccacaggaagacccgcccaaggcaagactgagctcagacatgcctaagccctgcccccacctgatggtccttccctaccatccctggtagctgaagacaaaggacatacactcttgggagttctagggcacagcccacc

SEQ ID NO: 284540 - DNA, 569 bp, Homo sapiens
cagcagtacctattttttttaaggctcccattcaaatcctattttatctagtaaactttctatgtyaacgacacccatgttggcaagaatgatgttttatctctattataacatttcatttttatgagcttcataataaagttattgatatatccctctgtctcctccacaagactttgacatttatgacaatagcagtttgatcttattcaactttgataccccctcatgcatagcaaggtttgtactcatggtaggaaatgagtaaatatttgtaggtttttttttttttctgttcattgaaaggtcaaaattcaagattataatcaactcctccaatattgagtcacaattaccatgatttttgccattcttcaatttgtttatttattggcactgtagagatgctgtgctttccacaggactcaaatttagtatccagtaggtgttcaataagttttcttcactgaaaatctgaaagggtggcagtaaatctgtgtacagaatctgcaataacatttgttatccacttagtttttcatatatttctgtattcttgcaattaaaaa

SEQ ID NO: 284541 - DNA, 569 bp, Homo sapiens
cagcagtacctattttttttaaggctcccattcaaatcctattttatctagtaaactttctatgtcaacgacacccatgttggcaagaatgatgttttatctctattataacatttcatttttatgagcttcataataaagttattgatatatccctctgtctcctccacaagactttgacatttatgacaatagcagtttgatcttattcaactttgataccycctcatgcatagcaaggtttgtactcatggtaggaaatgagtaaatatttgtaggtttttttttttttctgttcattgaaaggtcaaaattcaagattataatcaactcctccaatattgagtcacaattaccatgatttttgccattcttcaatttgtttatttattggcactgtagagatgctgtgctttccacaggactcaaatttagtatccagtaggtgttcaataagttttcttcactgaaaatctgaaagggtggcagtaaatctgtgtacagaatctgcaataacatttgttatccacttagtttttcatatatttctgtattcttgcaattaaaaa

SEQ ID NO: 284542 - DNA, 569 bp, Homo sapiens
cagcagtacctattttttttaaggctcccattcaaatcctattttatctagtaaactttctatgtcaacgacacccatgttggcaagaatgatgttttatctctattataacatttcatttttatgagcttcataataaagttattgatatatccctctgtctcctccacaagactttgacatttatgacaatagcagtttgatcttattcaactttgataccccctcatgcatagcaaggtttgtactcatggtaggaaatgagtaaatatttgtaggtttttttttttttctgttcattgaaaggtcaaaattcaagattataatcaactcctccaatattgagtcacaattaccatgatttttgccattcttcaatttgtttatttattggcactgtagagatgctgtgctttccacaggactcaaatttagtatccagtaggtgttcaataagttttcttcactgaaaatctgaaagggtggcagtaaatcygtgtacagaatctgcaataacatttgttatccacttagtttttcatatatttctgtattcttgcaattaaaaa

SEQ ID NO: 284543 - DNA, 609 bp, Homo sapiens
acttctacacctggaagataagaggcacagtagcttctgccttggtcactgaaacacttgtgcttgaagctctgagctgcaaagtgagaactctaattaccctgagatggctacattgtgtcgaagtcaaataacatggggaggtcacatgtagatgctctggctggcaatcctagcctttgagtcatttcatctccagtgcgaaacatgcgaccatgaatgaagctgtcttggaccttccagatcagctcacccaccagctgagaatcaccaagtgaccttaatcagtgctacaaagggcaaaagtatcaatgagatgaacacttccacaaattcctaactcacagaatctgcaagaaaaaaaatcattgagttttggggtattctgttacatagcaaaagtaactggaacagctagtaagttgtagaacctgaatgggagctgggcattctgactccagagttctcacacttcatccctaaagatgaacagtcccacaataatctatgacacgagtgtttgcatataacaggatcttgccttaactgcaagggctcaatttctaatggcaaaatttctggcaccartggaaaggttgatggtgtcct

SEQ ID NO: 284544 - DNA, 1273 bp, Homo sapiens
agtaactggaacagctagtaagttgtagaacctgaatgggagctgggcattctgactccagagttctcacacttcatccctaaagatgaacagtcccacaataatctatgacacgagtgtttgcatataacaggatcttgccttaactgcaagggctcaatttctaatggcaaaatttctggcaccagtggaaaggttgatggtgtcctcacatcaaatcaaggtgctcattatctatttcacactagaaagacattagccctgatcattgaatactttgtataatttatttactacttattagaaaacacattttcaactttttattggaatgtaacacacatatagaaaaaagcacaaatcataggtgtatcatttaataaatcatcataaagttaattctcccatgtaatcaccacccaagcaataaatagaagggaataaggagttgtcccttcattgctataagggttcttctatrtagcaacttatttgttgctttacactaccataaatttagaaaatgagtaataaaatgtggtagacttctttatgtaagaagcaaattgaatattatagaattagctttgggtttggtggcatctatttggctccacagggacttttattcttatttcaaagtwgcaataacaagtgcctgcccagaatgcatagagaaataaggtaatatttagcttcttgcattaaaaaatggaatttttacagcaagaatggaggcttcttwtctaaattccttcatctgctcttctggcatgccattaagcaggtttagcaggtatgagtttgatgtagaagaggtcttcaggctggagaaagaagtggggaagacatagtcttctttggccccaaaagattgtggagagaaagagagagagaggaggagagtgagctgttgtcctgttttcccttcttggggttggtttggggatgtggctgtgggggagggggcactgacattaagtaggtgtcagggagcagtgaaagcagaatgctcatgtcccactctcacatttggaattctggaaaaatgctaatttgccaagaatcttattaggagggaatagcattgcagtcagcataaataacttgctggtactcttgaggccttctcaggttctatgcacagtcgaatctaagtggacacatagctgacctgtcttcaggacatcaaggcagaggactgagttccacgagcaaagggactggctagtggacatggtggacatgcagaattttcccaggagccaaaaga

SEQ ID NO: 284545 - DNA, 614 bp, Homo sapiens
gaattcctatttgtacttttagcaattgcagaaaatgaaggaaattcttttaccatcccaagaggcccagatatcatctaaaagtgcttatttaactattttcaacttttcctgtacttccaagcagattttacttcacatatataaagtatgggcaatgtgtgtgcacactcacatgtttgcacacacgaacacacacacttattctcaatgcttgccttggaggcaggagatggcaggaaacatcagggactggttgtagacttatcaagctggagatcatttgttccaactgtcattttgttcaggaaactcaagactgatttgtgcaaaagcagttagttacctcaggggtagaactaaaaccagaaccyagataccctgactccttattaaattttatttttctctacttcttctcattaaaatccaattcacacaaaaggtaaagatcaaaggcaaagacaagcaagagtctattgatagtttcctccaacttgaggtttcagcagtacaattttggataaatttaaaaaatgttgattccacctgtgcttctcacctgctggaagccaaaagaatgataagcaacgtattaacaggttgcacagctg

SEQ ID NO: 284546 - DNA, 614 bp, Homo sapiens
gaattcctatttgtacttttagcaattgcagaaaatgaaggaaattcttttaccatcccaagaggcccagatatcatctaaaagtgcttatttaactattttcaacttttcctgtacttccaagcagattttacttcacatatataaagtatgggcaatgtgtgtgcacactcacatgtttgcacacacgaacacacacacttattctcaatgcttgccttggaggcaggagatggcaggaaacatcagggactggttgtagacttatcaagctggagatcatttgttccaactgtcattttgttcaggaaactcaagactgatttgtgcaaaagcagttagttacctcaggggtagaactaaaaccagaacccagatacmctgactccttattaaattttatttttctctacttcttctcattaaaatccaattcacacaaaaggtaaagatcaaaggcaaagacaagcaagagtctattgatagtttcctccaacttgaggtttcagcagtacaattttggataaatttaaaaaatgttgattccacctgtgcttctcacctgctggaagccaaaagaatgataagcaacgtattaacaggttgcacagctg

SEQ ID NO: 284547 - DNA, 614 bp, Homo sapiens
gaattcctatttgtacttttagcaattgcagaaaatgaaggaaattcttttaccatcccaagaggcccagatatcatctaaaagtgcttatttaactattttcaacttttcctgtacttccaagcagattttacttcacatatataaagtatgggcaatgtgtgtgcacactcacatgtttgcacacacgaacacacacacttattctcaatgcttgccttggaggcaggagatggcaggaaacatcagggactggttgtagacttatcaagctggagatcatttgttccaactgtcattttgttcaggaaactcaagactgatttgtgcaaaagcagttagttacctcaggggtagaactaaaaccagaacccagataccctgactccttattaaattttatttttctctacttcttctcattaaaatccaattcacacaaaaggtaaagatcaaaggcaaagacaagcaagagtctattgatagtttcctccaacttgagrtttcagcagtacaattttggataaatttaaaaaatgttgattccacctgtgcttctcacctgctggaagccaaaagaatgataagcaacgtattaacaggttgcacagctg

SEQ ID NO: 284548 - DNA, 643 bp, Homo sapiens
atgtattatgttgctattttcaagtggctgaggcatgcttaaagcatctaatccaccattaagggtccatccaatctcatgtgtgatctatcatcatcttccccaattgaaatttattaataacccacattcctgcaagagttgttcacaaaacacattaaaaaataatttttgtcctcaaataacttaactgctaagaacatgaaatataaattgagttctatatttctggtttgtcagagatgaagtattgagtatctatttgtgctcactattgaaatgatgaatttttaggtcctgctgtatttttaattccacagttttgagttgagaaaaagtggaccaaagtgtcatcacagaaaagtattatatttccttctcmcataaaattttgtgagttctcaatacatcaatattatatatacaaaggcatagatatttcttcagattcagatcattaaaaagtcatataattaatgtaacttctctgttgctaggtcctttgcaatgacactcgttgccagtaagtggcaatcattctccagaacgtttgagtggatccagggatctggaagtaattgataacaccagaaagatgtgaggaggcaaattgccaaagctgacttttaaaataatgacaatt

SEQ ID NO: 284549 - DNA, 643 bp, Homo sapiens
atgtattatgttgctattttcaagtggctgaggcatgcttaaagcatctaatccaccattaagggtccatccaatctcatgtgtgatctatcatcatcttccccaattgaaatttattaataacccacattcctgcaagagttgttcacaaaacacattaaaaaataatttttgtcctcaaataacttaactgctaagaacatgaaatataaattgagttctatatttctggtttgtcagagatgaagtattgagtatctatttgtgctcactattgaaatgatgaatttttaggtcctgctgtatttttaattccacagttttgagttgagaaaaagtggaccaaagtgtcatcacagaaaagtattatatttccttctcacataaaattttgtgagttctcaatacatcaatattatatatacaaaggcatagatatttcttcagattcagatcattaaaaagtcatataattaatgtaacttctctgttgctaggtcctttgcaatgacactsgttgccagtaagtggcaatcattctccagaacgtttgagtggatccagggatctggaagtaattgataacaccagaaagatgtgaggaggcaaattgccaaagctgacttttaaaataatgacaatt

SEQ ID NO: 284550 - DNA, 643 bp, Homo sapiens
atgtattatgttgctattttcaagtggctgaggcatgcttaaagcatctaatccaccattaagggtccatccaatctcatgtgtgatctatcatcatcttccccaattgaaatttattaataacccacattcctgcaagagttgttcacaaaacacattaaaaaataatttttgtcctcaaataacttaactgctaagaacatgaaatataaattgagttctatatttctggtttgtcagagatgaagtattgagtatctatttgtgctcactattgaaatgatgaatttttaggtcctgctgtatttttaattccacagttttgagttgagaaaaagtggaccaaagtgtcatcacagaaaagtattatatttccttctcacataaaattttgtgagttctcaatacatcaatattatatatacaaaggcatagatatttcttcagattcagatcattaaaaagtcatataattaatgtaacttctctgttgctaggtcctttgcaatgacactcgttgccagtaagtggcaatcattctccagaacgtttgagtggatccagggatctggaagtaattgataacaccagaaagatgtgaggaggcaamttgccaaagctgacttttaaaataatgacaatt

SEQ ID NO: 284551 - DNA, 540 bp, Homo sapiens
taaactgtcaaactaatgtttagttcagtagaccagtactactcaaattgtttgttactggtacagatattgagaatacrtgattaaaaccttttataacaatttggcatattgccatgacagccaagagcatgattttgtattttaccaaaatattagtctataatagattaaggtttaaaaacaaacagattaataaagaaattgccttcctccatggattatttgaatggtgggatactaggctatgtagaatcatagcctctggaagagtaatttagcatttcagtcaggatctcctgcactttcaattttagcctctgaagctccaggtaagagagttgaaataagcaaatcaacatgaaatcaaaacacacccacatgggaaatgctgagactcacctttccacactttgacatattaatatgtttcaactttctatttccctctggtggctcttggttcataaaactgaggagggcctgagagactaaacaccagcaaaaggcaaaatcgactaagtgccttgccttcctctt

SEQ ID NO: 284552 - DNA, 659 bp, Homo sapiens
tatgtcttaatttcttttgttccccagcagcttatttcagtgtgaagagcaaaatctttttggtaaaggaatgatgagatttgaatcttctatgcaatttaccttagttttccataacacttaaaaaacatctgtatttgggaaacttcaytggtttaattacatgccaaagtcatggaaattcttttagctttaaaaagtccttaacttctctgtctcccctttagtgtttggatgttatttacaccacattaatattgccaacccaagtcaagaaatccccaaagtctgtccattgtgtgtgttgctcaaggtaaaccacaaatgcaatttacactgttgtagattcacattgaacactcactgagcacctctcaggagccacattctgtccaatccacctcatgtgcacgttgcctcctttcattagataacataaggaatgagtttttgtccattttaataaaaattttactcagattctttgatgaaccttatagcactttgttttaagtaaatagattattttcattcaggtaaaaataaaagataaatatgagtcataattttgagcaataaaaatcgtttttaaaattgaaatagtagattttgtaaatataaaaggcctctgtctcagtttgttcaggcagctataacag

SEQ ID NO: 284553 - DNA, 659 bp, Homo sapiens
tatgtcttaatttcttttgttccccagcagcttatttcagtgtgaagagcaaaatctttttggtaaaggaatgatgagatttgaatcttctatgcaatttaccttagttttccataacacttaaaaaacatctgtatttgggaaacttcactggtttaattacatgccaaagtcatggaaattcttttagytttaaaaagtccttaacttctctgtctcccctttagtgtttggatgttatttacaccacattaatattgccaacccaagtcaagaaatccccaaagtctgtccattgtgtgtgttgctcaaggtaaaccacaaatgcaatttacactgttgtagattcacattgaacactcactgagcacctctcaggagccacattctgtccaatccacctcatgtgcacgttgcctcctttcattagataacataaggaatgagtttttgtccattttaataaaaattttactcagattctttgatgaaccttatagcactttgttttaagtaaatagattattttcattcaggtaaaaataaaagataaatatgagtcataattttgagcaataaaaatcgtttttaaaattgaaatagtagattttgtaaatataaaaggcctctgtctcagtttgttcaggcagctataacag

SEQ ID NO: 284554 - DNA, 1110 bp, Homo sapiens
tatgtcttaatttcttttgttccccagcagcttatttcagtgtgaagagcaaaatctttttggtaaaggaatgatgagatttgaatcttctatgcaatttaccttagttttccataacacttaaaaaacatctgtatttgggaaacttcactggtttaattacatgccaaagtcatggaaattcttttagctttaaaaagtccttaacttctctgtctcccctttagtgtttggatgttatttacaccacattaatattgccaacccaagtcaagaaatccccaaagtctgtccattgtgtgtgttgctcaagstaaaccacaaatgcaatttacactgttgtagattcacattgaacactcactgagcacctctcaggagccacattctgtccaatccacctcatgtgcacgttgcctcctttcattagataacataaggaatgagtttttgtccattttaataaaaattttactcagattctttgatgaaccttatagcactttgttttaagtaaatagattattttcattcaggtaaaaataaaagataaatatgagtcataattttgagcaataaaaatcgtttttaaaattgaaatagtagattttgtaaatataaaaggcctctgtctcagtttgttcaggcagctataacagwccctgtctcaaaaataataataataaaataaagtaatcctgcatgaattcaagaggatacagagaagtgatcaggccctttatatacaatgttctwtttgatacaaaagtggtgagtgtagagtattataggaacacgcagaagaggtacctggtccatcttggttagagaaggccatgcagacccaataatgctaaggaggaggcctctagcttctatttagaatcccatctttctaactccctccttctagccctccttccttctctctctgcctcctttccttttccctgccttcttcctccttcctttcactgtactagatttttaaaaattacagaagtatgacttgatttctgaagtacatctaataatgcagatagaaaggaaaagttaacaagctcctcattatacattctgaatactagttcactgaagtaactgaagaga

SEQ ID NO: 284555 - DNA, 450 bp, Homo sapiens
ccctgtctcaaaaataataataataaaataaagtaatcctgcatgaattcaagaggatacagagaagtgatcaggccctttatatacaatgttctttttgatacaaaagtggtgagtgtagagtattataggaacacgcagaagaggtacctggtccatcttggttagagaaggccatgcagacccaataatgcyaaggaggaggcctctagcttctatttagaatcccatctttctaactccctccttctagccctccttccttctctctctgcctcctttccttttccctgccttcttcctccttcctttcactgtactagatttttaaaaattacagaagtatgacttgatttctgaagtacatctaataatgcagatagaaaggaaaagttaacaagctcctcattatacattctgaatactagttcactgaagtaactgaagaga

SEQ ID NO: 284556 - DNA, 450 bp, Homo sapiens
ccctgtctcaaaaataataataataaaataaagtaatcctgcatgaattcaagaggatacagagaagtgatcaggccctttatatacaatgttctttttgatacaaaagtggtgagtgtagagtattataggaacacgcagaagaggtacctggtccatcttggttagagaaggccatgcagacccaataatgctaaggaggaggcctctagcttctatttagaatcccatctttctaactccctccttctagccctccttccttctctctctgcctcctttccttttccctgccttcttcytccttcctttcactgtactagatttttaaaaattacagaagtatgacttgatttctgaagtacatctaataatgcagatagaaaggaaaagttaacaagctcctcattatacattctgaatactagttcactgaagtaactgaagaga

SEQ ID NO: 284557 - DNA, 546 bp, Homo sapiens
agaactttcttttagtaataagacacctctttgaaaatgcaaatataatggcccaagactactacttccraatcatttttagtctaaaccttctaaatttgtatcccagccattatgaatttattttagttgcttaaacataccatcttcatgacaagctatcaactaggaactcttattatctcattctcacacatgtaaaatctgaggcttagagagtttaagtaaccttcctgagatcatggatcctgtatgtgaaggaattaggatttcaatccaggtctctaactctggagcctgttctctttagatatcgtctgctccagaaagcatctggcacaactgttctttctcctttatgttcatctgtgtatcacacagcctctattctaacacttactactctacagtataatcacttgtttcattctgtatgtctccaagtagtttgtaaacactatgaaatcagggactgtttgttcttgtattcttagcacccagcacagtggctggcacatagtaggtacttaataaatatttgatatg

SEQ ID NO: 284558 - DNA, 546 bp, Homo sapiens
agaactttcttttagtaataagacacctctttgaaaatgcaaatataatggcccaagactactacttccaaatcatttttagtctaaaccttctaaatttgtatcccagccattatgaatttattttagttgctyaaacataccatcttcatgacaagctatcaactaggaactcttattatctcattctcacacatgtaaaatctgaggcttagagagtttaagtaaccttcctgagatcatggatcctgtatgtgaaggaattaggatttcaatccaggtctctaactctggagcctgttctctttagatatcgtctgctccagaaagcatctggcacaactgttctttctcctttatgttcatctgtgtatcacacagcctctattctaacacttactactctacagtataatcacttgtttcattctgtatgtctccaagtagtttgtaaacactatgaaatcagggactgtttgttcttgtattcttagcacccagcacagtggctggcacatagtaggtacttaataaatatttgatatg

SEQ ID NO: 284559 - DNA, 500 bp, Homo sapiens
ctgtttcatttattcatttgtacacttatttaattatttattcaacaactattcagtgactactattttccaagtattatcttattttccttctcataaactatgaaaggtgattrgaaataagaagagtgcatcagtcagttattgctgtataaaaaactaccacccaattcaagtgacttaaaactacgactatttatttgctcatgggttccacagattggcaatttagactgagtttagaagtgtcatgagaaaagcaggtttgagtcacagaataacctgttaagatatttgaagaaagtgagatttgataatgatgccactgcacttgcctgcaaaattgaatgtttaatagagtgaactgtgaactgtttctttaaaaaaaaagaaaaagaagaagaaagaaagaaaaggagaaaaaaagcagattgatacattgtagaaatctttagtggagaaagcactagaacagactatcagagttgggacaccaattt

SEQ ID NO: 284560 - DNA, 648 bp, Homo sapiens
ggattacaggcgtgagctaccatacccgcctgaggccagtttacttttaatcagaatctaaagctatgaaaagcaatataccttaaaataatcttagtgaagaaaacttccaaacattctaaaagaataaggtttgcaaaactggcaggagcaatgatgtgtctaatgggaagactaaaaactrtaaacagttctttccaaatctattatagatttaatgcatttctagtcccagtaagaatttctagaatgcaaatttgatgaaactattctgaaattcatttgagaaagtatttttaaaatattgctaaaagaagcagaaaaaaaatgtgaatgagtgacttttttctgttctttattttacaaacatttctgtgatttttaaaagaaatttatagtaaaaattttaatttgtgaatatttgataagtaaatatccaaaatagtaccaaagtctttatacaaatcttgaactaaaaataatatatttctattgatgaattttgaaaaattagattctgtcagtgctaaccttgaaagagggactgtgctagtttctgaagatccaaagataaataagatacagcctctggtctcaagaaagttcacaatcttgtgaaaataggcaagtaaatataaaattataata

SEQ ID NO: 284561 - DNA, 579 bp, Homo sapiens
actattattatcccctttttacaggtgaagagactgaggctggcattgtgactatgtaaaartttacccaatttgcttaggatgccacagccagtaatttacagacctgtccacctttcaagtctacatgctcttaaaccgaaaattggtcaacttatctgtaccacaatgaatggaaggtgtatattcagacctatgctatatctcgcagaagatataacatagctcactcctcatctcactcccccacccacaactactgcccttctctgaagttcatctgtcacacattgccatagttgtccttctaaaccacaaacaaccccctccctccttctctctctcttaatctcaccccatttttgtctttatctctctttctcattccctcatataagcacacacactcaaagacctccaatggctggcttcccattgcctacaggatacaggacaaagttcaaacatcttacagccttcaaagctcttcacaatctggtcacaacctgacttccctgcaccctttctctctcaactcacagccatgttagttgcccttcacccatctcccaaaaggtc

SEQ ID NO: 284562 - DNA, 570 bp, Homo sapiens
ttttttgtggtggtctggaaataaagctgcgatatctctgaggtatgcctgttgtcatttctctattgataggtatttttgttgataccatttactacaatgtggtaaccaatattacaacagatacatttatctatgtcctttcagactcatagtttaatttttttgtagattcccacagtaggactccataaaggtaattttgcaaaatttaattattaaagatacctctagtttactttcccgaaatgtttagtaggtcatcctcctaccattaatatatttgaatttctgttgctccacactcttgacaataatggacatcaccaatccttttaatatttaccaacacaaaaggtttagaattagaattaggattcaagcaaaaaattgtatctcacaattgttttgttttgcatttctctgcctgctaatgaaattaagtcaatccattgtgtatttgcatatcttctttaagaattgcytttcattttgccattttttgtatttaatgtttaggagttctttgtattttaggaatatttttcattcataaatgatgcatatatt

SEQ ID NO: 284563 - DNA, 570 bp, Homo sapiens
ttttttgtggtggtctggaaataaagctgcgatatctctgaggtatgcctgttgtcatttctctattgataggtatttttgttgataccatttactacaatgtggtaaccaatattacaacagatacatttatctatgtcctttcagactcatagtttaatttttttgtagattcccacagtaggactccataaaggtaattttgcaaaatttaattattaaagatacctctagtttactttcccgaaatgtttagtaggtcatcctcctaccattaatatatttgaatttctgttgctccacactcttgacaataatggacatcaccaatccttttaatatttaccaacacaaaaggtttagaattagaattaggattcaagcaaaaaattgtatctcacaattgttttgttttgcatttctctgcctgctaatgaaattaagtcaatccattgtgtatttgcatatcttctttaagaattgcctttcattttgccattttttgtatttaatgtttaggagttctttgtatkttaggaatatttttcattcataaatgatgcatatatt

SEQ ID NO: 284564 - DNA, 409 bp, Homo sapiens
ccccactcagcctgacctaaacaggaagctcagatcactgtgcatgccacaatcagcccacttcctgaggcaatagagagcctctcccactaaacagggatcaagtatatacccagccacattgtccacagctggttcttacctgtaagtgccrtctactggcttgcaaaacaaactgcacagcctaatatgaaacctgccgacaaaggtacataaggctataggaagcaaaaccaaaagatcctacctagcattctctatagtctcacccctaaggagcaggggggaggaaaagggaaagaaaaagcccaatattatggggggagaaaagggaaaaaccctacatacacacaaattacaaacattagaagtgctagtgtctcagatgagaaggaaccaataaacacaa

SEQ ID NO: 284565 - DNA, 409 bp, Homo sapiens
ccccactcagcctgacctaaacaggaagctcagatcactgtgcatgccacaatcagcccacttcctgaggcaatagagagcctctcccactaaacagggatcaagtatatacccagccacattgtccacagctggttcttacctgtaagtgccgtctactggcttgcaaaacaaactgcacagcctaatatgaaacctgcygacaaaggtacataaggctataggaagcaaaaccaaaagatcctacctagcattctctatagtctcacccctaaggagcaggggggaggaaaagggaaagaaaaagcccaatattatggggggagaaaagggaaaaaccctacatacacacaaattacaaacattagaagtgctagtgtctcagatgagaaggaaccaataaacacaa

SEQ ID NO: 284566 - DNA, 879 bp, Homo sapiens
ccccactcagcctgacctaaacaggaagctcagatcactgtgcatgccacaatcagcccacttcctgaggcaatagagagcctctcccactaaacagggatcaagtatatacccagccacattgtccacagctggttcttacctgtaagtgccgtctactggcttgcaaaacaaactgcacagcctaatatgaaacctgccgacaaaggtacataaggctataggaagcaaaaccaaaagatcctacctagcattctctatagtctcacccctaaggagcargggggaggaaaagggaaagaaaaagcccaatattatggggggagaaaagggaaaaaccctacatacacacaaattacaaacattagaagtgctagtgtctcagatgagaaggaaccaataaacacaawcacgctggggcctgttgtggggtggtgggaagggggaggtatagcattaggagatatatctaatgttaaatgacgagttgatgggtgcagcacaccaacatggcacatgtatacatatgtaactaacctgcatgttgwgcacatgtaccctaaaacttaaagtatatattaaaaaaaagaattcaaagcatggattgcaagaaagctccataagatccaaaacaaggttgacaatcaacacaaagaaacttctaaagcaatccagaaaataaaggaagagataaacatcttaaaaagaaatcaatcagagattctggaattgaaaaactcacataaaaagttttaaaatacaattgaaagttctgtaaatagactggaccaagcagaataaggagtttcagagcttgaaactgatctttcaaactaacatagacagaaatttttaaagattataaaaaaatgaaaaaag

SEQ ID NO: 284567 - DNA, 469 bp, Homo sapiens
cacgctggggcctgttgtggggtggtgggaagggggaggtatagcattaggagatatatctaatgttaaatgacgagttgatgggtgcagcacaccaacatggcacatgtatacatatgtaactaacctgcatgttgtgcacatgtaccctaaaacttaaagtatatattaaaaaaaagaattcaaagcatggattgcaagaaagctccataagatccaaaacaaggttgacaatcaacacaaagaaacttctaaagcaatccagaaaataaaggaagagataaacatcttaaaargaaatcaatcagagattctggaattgaaaaactcacataaaaagttttaaaatacaattgaaagttctgtaaatagactggaccaagcagaataaggagtttcagagcttgaaactgatctttcaaactaacatagacagaaatttttaaagattataaaaaaatgaaaaaag

SEQ ID NO: 284568 - DNA, 469 bp, Homo sapiens
cacgctggggcctgttgtggggtggtgggaagggggaggtatagcattaggagatatatctaatgttaaatgacgagttgatgggtgcagcacaccaacatggcacatgtatacatatgtaactaacctgcatgttgtgcacatgtaccctaaaacttaaagtatatattaaaaaaaagaattcaaagcatggattgcaagaaagctccataagatccaaaacaaggttgacaatcaacacaaagaaacttctaaagcaatccagaaaataaaggaagagataaacatcttaaaaagaaatcaatcagagattctggaattgaaaaactcacataaaaagttttaaaatacaattgaaagttctrtaaatagactggaccaagcagaataaggagtttcagagcttgaaactgatctttcaaactaacatagacagaaatttttaaagattataaaaaaatgaaaaaag

SEQ ID NO: 284569 - DNA, 527 bp, Homo sapiens
aataaactataacatatattgtatacccagaacagaaagaaagtaactaatataaactaatagaatcaaacttatggaaagaaaaaaactgcagaatgaggagtatatttgatgtggttctaaagtgaaaaagcaaatcaagatgaaaggaatgccgtaagaaaaaaaaatgttcaagttgtaaaaggcctaytccaatcacatgcagtagctaggatttgttgattaggaaagaaggaaaagttgatcagataagtgtaatgggaataatatttcaatggcatcttatgtgtgagtgtgtatgtgtgtgcatccatgcatgaatttggctgaatattttaaatcaacttgagtgacatataacttacatataagaaagtgtacataagtatggagttcaatgagatttgaggatacatgtacctatgtaaccctcacaatctagatgtagacaatttctttttaactaagaacctttttctctcattgcaggcagcatctgaagcagacgtagaaactgcactgag

SEQ ID NO: 284570 - DNA, 546 bp, Homo sapiens
ggatcctgagagaggcatttaagaatactcagatttttttttttttttttttgcttattttttgttgtggttctatatttctgtttacttgaagagcttccattctccatgcacacagacaaaaaaagtataaatcctggaataataggagcaagctcttatacacctataacacctacactatctagtagagttactacatggcattagaagcacccaatgtaccatgtaattgatctttaattttatttattccattttgttagagaattttgaactaagatttctttataagtgcctagtttttcctatgtagcagaaataataatgatgataagagaagaatgaacacctatagaatgtgtactgtgtcctaggtatcctttgagttgctttgccaggattatcttatctgtcttcacaaacttatgaggtaggtactgttattayctccatcttcctggaatccacaggattttagatctgaaagataaacatgttagcaaagatgttgccttgttttccagttagctcttatgccatacc

SEQ ID NO: 284571 - DNA, 600 bp, Homo sapiens
acaaattattaattagacccattaggtgtaaacatttaggctgtgttyacttatttgccataacaatgctctgtggacaccctgtgtcaagtcaagcgtctttcccagtagtagaaattgagattctggttgattggagcaggaaagaaatttactaaaaggatttttggcagttcacagccagcagaacagataaagtattgattcagaaaatgggatgaagaaaaggttaggcattgagaactattgcccaaaccatgtgcagaggcagcagtgggggacttcccaccaccaccctcagctgctgcaatttgcgtgggttccccattggtactagtgtgtcccggatgctgctacctctgtttctcttagaaaagatacagtttttccagccactgccctacatatttccactgcctttgcttctttgtttaaccatatccaggttagaaatgaatcagtagcatgatggagttgagccttgctcactctcacacagttacccaatggaccacatcaggagggcaaccatcagcacgagggcccagcatcttcagtgtctatggtgagttatgggctctgttctcaccaagacttaca

SEQ ID NO: 284572 - DNA, 600 bp, Homo sapiens
acaaattattaattagacccattaggtgtaaacatttaggctgtgtttacttatttgccataacaatgctctgtggacaccctgtgtcaagtcaagcgtctttcccagtagtagaaattgagattctggttgattggagcaggaaagaaatttactaaaaggatttttggcagttcacagccagcagaacagataaagtattgattcagaaaatgggatgaagaaaaggttaggcattgagaactattgcccaaaccatgtgcagaggcagcagtgggggacttcccaccaccaccctcagctgctgcaatttgcgtgggttccccattggtactagtgtgtcccggatgctgctacctctgtttctcttagaaaagatacagtttttccagccactgccctacatatttccactgcctttgctkctttgtttaaccatatccaggttagaaatgaatcagtagcatgatggagttgagccttgctcactctcacacagttacccaatggaccacatcaggagggcaaccatcagcacgagggcccagcatcttcagtgtctatggtgagttatgggctctgttctcaccaagacttaca

SEQ ID NO: 284573 - DNA, 531 bp, Homo sapiens
aacatatctacatctcacacagttacctattttctcccctgtgacaaaaggaactataatctactcatttagcaaaagtcctgaacacaatacactattaactctagttctcatgttgtacattccaattttccacctgtttatcctacatatttgctactttgtatccstggagctacattaccgcatttcacccccaccctatcctgaccctgatcaccactgttttattttctatctttatatcatttgatgtttttaaaaatagagtttacatataagtgagatcatatatttttcttttcgtgtctggcttacttcatttagcccaattaaaattcgatttgtatcagtatctttagaaagcaactcatctgagaagtcttctcttgcttccttcctggggggtcctgttgccctttctttgtgctttcgtagtggcaccatgactctcctctcagctggtatcatgttgcagggcaaacatctgtctgtctcctctcactggatgataagatacttgaaggaagg

SEQ ID NO: 284574 - DNA, 531 bp, Homo sapiens
aacatatctacatctcacacagttacctattttctcccctgtgacaaaaggaactataatctactcatttagcaaaagtcctgaacacaatacactattaactctagttctcatgttgtacattccaattttccacctgtttatcctacatatttgctactttgtatccctggagctacattaccgcatttcacccccaccctatcctgaccctgatcaccactgttttattttctatctttatatcatttgatgtttttaaaaatagagtttacatataagtgagatcatatatttttcttttcgtgtctggcttacttcatttagcccaattaaaattcgatttgtatcagtatctttagaaagcaactcatctgagaagtcttctcttgcttccttcctggggggtcctgttgccctttctttgtgctttcgtagyggcaccatgactctcctctcagctggtatcatgttgcagggcaaacatctgtctgtctcctctcactggatgataagatacttgaaggaagg

SEQ ID NO: 284575 - DNA, 530 bp, Homo sapiens
cattgattgaagaggaggctgtgtctgctttaggaaggactctgcaataccactgcttatatggatgatatttaatatcccattacttttccacaggggcctgtggtgacttatgagaaaaactgtattccagagaaaggagcctgcctrtcattaccaatggttattggtagagtgtctgaattaggattgatatcagtcagtgctctggaataggcatagtagcacctagaatgtggactactggtaggcagattttaagtggagtactgacccaagttaatctcatactaagttccataggtaaatgactcatcccagaacctttatttgtaattgggatatagagtttggcagaactctgccgttggtatcttaacctgtgaaataaaagccagttcccctactcctgttacatgggattactgcccaaagaaactacctgtacacaaactctcgttttaggttatgttttctgagagagatctaatctaagtccagtgccttaatgcactgtagaagtcaagatt

SEQ ID NO: 284576 - DNA, 554 bp, Homo sapiens
atgcagagtctacagtgaaatgttcaattcctacatggcctaattagcctcgctccctggccttgggctgcaacttaaatccttrccagtcatttcataaagtagcattactttgtcacaatatgaataagtgaaaagagcatatttaggttagtgtataaggacttaccctactagaaaaaaggacttgaggtttttaatttatttatggtgagttcaggaatgtcattttcatacttcatctagaagtagagcatgattcatgcataggcaggtagcaaggcgctttagaggcttggccagaagcccccatcccttttgcagctacagtaagatgtattccaaaaagcctaaaagggtttatcctggcttcctctttagctccacttaggacctttattaagtggccctaccagaagaattatgccacctttgtccagagatccaaataatttctgtgtatctgaaaacacttatcttccaaaattggattatgttacctattgacataagaattaaatctgatcaatgtattctcacctaagttttttttt

SEQ ID NO: 284577 - DNA, 554 bp, Homo sapiens
atgcagagtctacagtgaaatgttcaattcctacatggcctaattagcctcgctccctggccttgggctgcaacttaaatccttaccagtcatttcataaagtagcattactttgtcacaatatgaataagtgaaaagagcatatttaggttagtgtataaggacttaccctactagaaaaaaggacttgaggtttttaatttatttatggtgagttcaggaatgtcattttcatacttcatctagaagtagagcatgattcatgcataggcaggtagcaaggcgctttagaggcttggccagaagcccccatcccttttgcagctacagtaagatgtattccaaaaagcctaaaagggtttatcctggcttcctctttagctccacttaggacctttattaagtggccctaccagaagaattatgccacctttgtccagagatccaaataatttctgtgtatctgaaaacacttatcttccaaaattggattatgttacctattgacataagaattaaatctgatcartgtattctcacctaagttttttttt

SEQ ID NO: 284578 - DNA, 561 bp, Homo sapiens
taaggtggcaacttccagcatgggagctaaagtcagtgtatgacagctggaagaaggcggttacttcaaagtcagccatcctattttttttcttagggttgagggacaacttagacctaggggtttcttgttcattgaatgagttgtccattccytttttaatgtgcaagtagcagtgcttttctctatttttctccacctccatttccctttctgtttctctaagttagtacatcaaatcatctggtcttgagagtagcatgggactaagccaagtgtcccagtttaacacatgctaattatggctggaaaataaaagagggagtaaagatctggagcaagtgatgtggattgggagaacagtcagaccgatctgggcatgctgtccaacactgcaatctataaatgctgtgtccttggcaagttccaagactcagtttcctcatctttaaaatgttaatagacacattcctcttgggattgtgatgaggaatgaaattcaaaagtgcttatggttcttgacggtgaatactataaaaatcccaaaggaatgaggtaagt

SEQ ID NO: 284579 - DNA, 965 bp, Homo sapiens
taaccagctatctcttccaaccaaattttggctagcttcaagttaccccaggtgccctgctgtaaggaatatggctgtgctttggtcaaggataggccaaggtaggatgtttccatcccacctgactcagcaagtttagagcgcaggcatataactccacttgttgtcacagctgtgtagccataacatggggaggccatcccttggccctatgctgctattgtctgtaaaaggtataatttctctgctgacaatgtacaggtgtgcccgcacccagagaaagagagagagagagagccagagctgtctgtctttgcagatgaayggagggcgggggttggccaggacacagcctggccagcttgtgcccagagaaagagttaagctgctgactctgaagaaagagcaggccgwgcaagctctttcaatgtttcttttccagagtagtatgtgaaatctttgacttttaattgctagctttatatatatatatggctataataaattaaaacaacatgtctgcaggctgttagcctgaattctatgcattatacaaatgtaatatcttaatataaggagccttttgtagcaggagataggaggaaaccacttagtccaccaggatgtccatgwcttgtctctaaaatggatctaagagttagggagttgcaccatgtgagtcttaaggttttcaaccctacctacttctacattttcagattctcatatgaaaaatcacagtgttgatgttaaaaaacctacattatgattgagaatatagaaatcatataggcaaaaaagacctaaaattccttttgcaaaagcttacaggcaagaatatatttgcaacatgtttgtggaagaagtgactgaaataagacattgaaaatactttaaagagggacagttatcagaaaagtataaagataaggccactgaaactctagcaatgaaatagcatttgg

SEQ ID NO: 284580 - DNA, 574 bp, Homo sapiens
acaggaatgataggaggcaaagtacacttggaagaaggccaagtgggtgacttgaaagatttaagtcagcagtttgaccttagacttgggtcttatacattggcatgcttctggggttgcgttacttctcccttkattcttcccttggggtgggctgtctgcatgtgcagtggcctgtcagcacttgggaggtgagcgtgcacagtgtgtttactgaagttgagcacaggctcacttgaggtgttttcctttaccagttgagtgtcctagaggaaggccatataccagttaaactccaccattttgcctcttaatgcacatgcttgagcccacttgcccaactcctgagaacttacctggaagcggctgatcatcagtttcaggtgttttctgtctgttgggagcctgcctttccctggtgctggctgcaaccaattattattttagacagacttttaacaaccacctgaccatcacctgatggtcacctgaacatttctgggggtgggggccctctccttccctgctcatgtctgcctaacaatctactgtaacaatatgtgcttggattaat

SEQ ID NO: 284581 - DNA, 1327 bp, Homo sapiens
cattttgggcaaagccatttcacaagtctctaggaagttcaaaactttcccacattttcctgtcatcktctgagccctccaaactgtttcaacctcaacctgttacccagttccgaagtcaattccacatttttgggtatcttttcagcagcacaccactctcttggtaccaatttactgtattagtccattttcatgctgcaggtaaaggcacacctgagactgggcaatttacaaaagaaagagttttattggacttacagttccacgtggctggggaggcctcacaatcatggcggaaggtgaaatcatgtctcacatggcagcagacaagagaagagagcttgggcaaggaaactccactttttaaaaccatcagatctcttgagactcattcgttactacaagaacagtgcaggaaagatatggccccataaatcaatcacctcctaccgggttcctcccacaacacatgggaattgtgggacgtacaatttaagatgagatttgagtgaggacacagccaaaccttatcagggggaaaaaaaaatggttctacagtcttacaattattctcagtctttcagtgagcttctgtccctctgtccccagcttgtgaccatcacaaatgtctcaccctaagtgagcgtgaaaggctagagtwcattttgggcaaagccatttcacaagtctctaggaagttcaaaactttcccacattttcctgtcatcgtctgagccctccaaactgtttcaacctcaacctgttacccagttccgaagtcaattccacatttttgggtatcttttcagcagcacaccactctcttggtaccaatttactgtattagtccattttcatgctgcwggtaaaggcacacctgagactgggcaatttacaaaagaaagagttttattggacttacagttccacgtggctggggaggcctcacaatcatggcggaaggtgaaatcatgtctcacatggcagcagacaagagaagagagcttgggcaaggaaactccactttttaaaaccatcagatctcttgagactcattcgttactacaagaacagtgcaggaaagatatggccccataaatcaatcacctcctaccgggttcctcccacaacacatgggaattgtgggacgtacaatttaagatgagatttgagtgaggacacagccaaaccttatcagggggaaaaaaaaatggttctacagtcttacaattattctcagtctttcagtgagcttctgtccctctgtccccagcttgtgaccatcacaaatgtctcaccctaagtgagcgtgaaaggctagagt

SEQ ID NO: 284582 - DNA, 663 bp, Homo sapiens
cattttgggcaaagccatttcacaagtctctaggaagttcaaaactttcccacattttcctgtcatcgtctgagccctccaaactgtttcaacctcaacctgttacccagttccgaagtcaattccacatttttgggtatcttttcagcagcacaccactctcttggtaccaatttactgtattagtccattttcatgctgcaggtaaaggcacacctgagactgggcaatttacaaaagaaagagttttattggacttacagttccaygtggctggggaggcctcacaatcatggcggaaggtgaaatcatgtctcacatggcagcagacaagagaagagagcttgggcaaggaaactccactttttaaaaccatcagatctcttgagactcattcgttactacaagaacagtgcaggaaagatatggccccataaatcaatcacctcctaccgggttcctcccacaacacatgggaattgtgggacgtacaatttaagatgagatttgagtgaggacacagccaaaccttatcagggggaaaaaaaaatggttctacagtcttacaattattctcagtctttcagtgagcttctgtccctctgtccccagcttgtgaccatcacaaatgtctcaccctaagtgagcgtgaaaggctagagt

SEQ ID NO: 284583 - DNA, 663 bp, Homo sapiens
cattttgggcaaagccatttcacaagtctctaggaagttcaaaactttcccacattttcctgtcatcgtctgagccctccaaactgtttcaacctcaacctgttacccagttccgaagtcaattccacatttttgggtatcttttcagcagcacaccactctcttggtaccaatttactgtattagtccattttcatgctgcaggtaaaggcacacctgagactgggcaatttacaaaagaaagagttttattggacttacagttccacgtggctggggaggcctcacaatcatggcggaaggtgaaatcatgtctcacatggcagcagacaagagaagagagcttgggcaaggaaactccactttttaaaaccatcagatctcttgagactcattcgytactacaagaacagtgcaggaaagatatggccccataaatcaatcacctcctaccgggttcctcccacaacacatgggaattgtgggacgtacaatttaagatgagatttgagtgaggacacagccaaaccttatcagggggaaaaaaaaatggttctacagtcttacaattattctcagtctttcagtgagcttctgtccctctgtccccagcttgtgaccatcacaaatgtctcaccctaagtgagcgtgaaaggctagagt

SEQ ID NO: 284584 - DNA, 691 bp, Homo sapiens
tctttgtgatcttgcattggcgatgatttttagatctgacaccaaaatcacaagcaacaaaagaaaatataaattaaacttcaccaaaatttaaatcttctgttcttcaaaagacagcattaagaaaatgaatagacaaatccaatgcaaatcgaaatcgaaatcacaatgagataccacttggagcccactaagaaggctacaattaaaaagataataaaagttttggtgaggagtgggagaaattggaacccctatacattgccggaatgtaagatagtgcagctattttgaaaaacaatttggtaattcctcaaaatgttaaacggacttaccctgtgacccaggaattktgtgtgtgtgtatattttatatatatgtgtgcataccatatatatgtatatgcatatatgcatataatatgtgcatctatatatttcatgtctatataaaataaaaatgtccccacaaatgttcatagcagcattattcataatagccaaaatatgcaaacaatccagtatctaagagctgatgatggattaaaatgtggcatatgattagaagactgacactacctaacttcacgacttacaataaagctgcagtgatcaagacagtgtggcattggtaaaggggtcaacaaatccatcagcggaacagagtagagatcccagaaatagacccatac

SEQ ID NO: 284585 - DNA, 553 bp, Homo sapiens
ggtcaacaaatccatcagcggaacagagtagagatcccagaaatagacccatacagtctagtatctattgactaatagatatttgacaaaggagtaatgacatttcaagagaaaaagaccagacttttcaataagtaatgttggaacaattggacatccacactcaaaaaaatgaatctaagtacagactttctacctttcacaaaagtcaactcaaaataaatcagaaacccaaatataaaataagaagctattcaactcctagaatataacaaagaagaaaatatagatgmccttgaatttggtgatgactttttagatatagtaacaaaagcatgatccatattaaaaatgcagtaagttggacttcattagtaatataacttctgatctgtgaaaggcacttttaagatagtgaaaagataaaccacggattagaagaaaatattttcaaaatgcatatctgataaaggaataatattcaaaataaataaagaactcttaaaacttaatggtaagccaaaaaaaaaaaaaaaaaaaaaacccacacaat

SEQ ID NO: 284586 - DNA, 619 bp, Homo sapiens
gtgctaaatgaataggctaaaaaacaagtgatgatctttttctaaatctgcttacacatgtatttgctgtattagtaaaataatgagttttgattttaaattccttcatttctaatgcatgctaatcaaaatttagataagtgtgatatraaggtagcacttactatcagcattagcaagtatcagaaacatttagaaattcaaatgtttttctaggaaaatggtagaagttaatcaaccaatctcttcaagtaatgctctcatgtcaatgtattaattaaatcaaacatgaattattccctttcttatatataaacattctatctataatataaattagttaacagtggcacagaattaataacattcaagaaattcagtattttgttaagatctaagttatactgtttccctattgatatagattgtaggttgtttttatttggatttgctttgtttttattcccctgagtatacaatgacattcgctatctgatgtcagcttgagacttctcagggttgtctgtgtttatatagtttataagattgctgttgcctttcatgcatgtgttaggacaattgtttcctttctgccaaacctaatcaaggaattgttttg

SEQ ID NO: 284587 - DNA, 619 bp, Homo sapiens
gtgctaaatgaataggctaaaaaacaagtgatgatctttttctaaatctgcttacacatgtatttgctgtattagtaaaataatgagttttgattttaaattccttcatttctaatgcatgctaatcaaaatttagataagtgtgatataaaggtagcacttactatcagcattagcaagtatcagaaacatttagaaattcaaatgtttttctaggaaaatggtagaagttaatcaaccaatctcttcaagtaatgctctcatgtcaatgtattaattaaatcaaacatgaattattccctttcttatatataaacattctatctataatataaattagttaacagtggcacagaattaataacattcaagaaattcagtattttgttaagatctaagttatactgtttccctattgatatagattgtaggttgtttttatttggatttgctttgtttttattcccctgagtatacaatgacattcgctatctgatgtcascttgagacttctcagggttgtctgtgtttatatagtttataagattgctgttgcctttcatgcatgtgttaggacaattgtttcctttctgccaaacctaatcaaggaattgttttg

SEQ ID NO: 284588 - DNA, 580 bp, Homo sapiens
ttacctcagggtagccagtctacaacccagccattgctgagatgataccagcctgcactccagggggaccgtggcttgagatagccacgagaacaagatacacagaacttatactcaacatccctcctgcatgccttccattccaagttccttttttaaaaactcctcttcccaacctaaagtttgaaggggtttctggaagcataagctggctgcttgcccactgctaactctggaagtaaagtcaccttcctttcactgcactttttattggctttgcaagtgtcaaggagccaagtctgcgctctgttaaaaaartggtggcaaaatggtctccactaattctaggcctaaaattctctacataggttagccctccaaaagtgaagactctgttttgcaaaggtttaagaaatagtcttggcctgaacaaggatcttattttcccagcttaaatcacatgcaagggggattggaaattttcattatgcaataaaaaaaggatttaaattgtgacactggcattgagacaagatggcaggtgaaagctggaagagactcaagaagactgtaggtgaag

SEQ ID NO: 284589 - DNA, 1249 bp, Homo sapiens
ccctaatctatgctcagggcttctttcataatactgtagagattccaaatttattttgtcacctggagacaaagtaaccttgcctgcattagatcaataaagccaaaatataatataatttctcaaaatattcctctagtgaaaggaatyacttgagccacttagagtccctgcaccacaagttgttccaaatatcttggcagataaagaaaaacagacaacctagcacagtatacactcaacagatgatctgtaaataggtactaatggttatgcttcaagactaacatggaaaaagtgtgtcttaccataactcttttcttacagtgataagttaggggaaccttaagttcttcatcagaggaagacttcactgaatgatatatccccattagatttatttttttctactgaattcattttcctcctgtaaagaaaatatgtagtattatttcattctaccaagaaattgagcacacaatttcaggagtcaattgtggatttgagaacagaaagtaactcaaaaatttttaccctagttacttcctgaaactagaagccaacagtgtatacacaaatggattagcwattttttggcagtccttactccactattctgggtgtgtttcttctattaataggttttaattgaaaaaaatccagaattaaataatatgtttagtgtgtattaagtgaaaattaagtggttgtggcccatagcacagccttttatatattcatgtacaatgagactctctatgtacggaatagtatagggaaatcttccccaaattatttgattacaagtaccwtttattagataagttttatttgttggtttgttgtttttgctttgtttcattttgttttaaatgggacatacttttcaaaatgtactttgagaagtgatgggataggtaaatttgggctagtctcactagatatttatagccagattagcaaaaagtcaccatataatcaaagagaaattacagccaccctctcaacaggctgtgtatcttctatatgccaagtagaagtttcctgcccttgcacaagaggatggttttatgtaatggagagtctgattttcttctcaactcatctcctaggggtatggtaggttgttaaacattaaatctcactataattggaaagccttatataatcacaccaactaattggaatgatgattaaatcactaaactcactaatattgtaataaattacaaaagcctttaaagaggtt

SEQ ID NO: 284590 - DNA, 539 bp, Homo sapiens
gtgatggcaaaatgtctgtagattctttaggcctgcataatccccatttcaaatccagtggcaaagatgtctattttctcagtaattcaaaaaagatcctcgatgatagctctgattcgacctgaaccaactattatggacaggaaaatagaatgatgagcctaaattatgtgcctatgattacacacactccaggggctagggtgtgtatgaagtcatctagacggaaaaagcatgaaaaggtaggccagatgcctctacagataacaattggggtattcttcctcagaaaaaaatgaccaaagctaaaaggcagctacaacaactgtccatctccctcatgcccttcctccctctgaggagctaggcctcatcstcttcatctgttgaattcgaccaaaccttccaggtctgtctaaaatgccacttcatctatgaagcgtatcttgactcctttactcttctcttacctaaattagatgtcttcctcaacttaggccaaattaaatctttaactttcttctgtggctttatataat

SEQ ID NO: 284591 - DNA, 566 bp, Homo sapiens
taatgcttttattccccttctggtgctttaattttttcatctttatctatatttttagcaatctgattagaatatgccctttcttggtgatttcttgattcaggttattttagcttcttggctttgtaggctggtttatttttcctaaaatttgaacagtgttggctttttttccctagcatcaccatctctcttttccttctctaattacgcatgtgtagaaaatctgataatgtcacttatccttgagtatttttaatccttttattttcctgattgatttaagttgcataatttctgtaactatttastcatattcattgtttctttttctgctgtatctaatctgctgacatgccagtgatttttttcttaagttctaagatatgatatttttcatctctacaaattctattaggttacttttaaaattacccatttctctgtgcattatctttgtttttcctttaattcactggatttatttataataaatataataacatccttctctgcaaatcccataatacctcttatttttagcatgtttcttatgattaatttct

SEQ ID NO: 284592 - DNA, 579 bp, Homo sapiens
ttctttttctttaacggttaacaaggaattcatttgtcataaaaaaaaaagatatcaataaatacattttgaaagagcactttatatttctgtcttctcaccagacctcacagcaaatgctgcaaatattttaatagggctgtcacagggatgtccctgggggtttaagaaaacaaacgaaagttctggagcagagaagcatgaacatgaaagcatgtgagaagcagaagttattgctgctttcccagctctgatgtgtggtttctcagtgagataattataacaatgaagtttttaaaaaatggtacaatcatakttaattagttccagttgcagttggctattttaaccctcacctctgaatactattagaaagcagattgaatcttgtgtgataacctgcatgaaataggtttttttgttcacttgctcattttgtttttatttcattggtttactttcctttatttttggcaaacaccaccaaggtaatagattagattactgttaaacctattatatattattttagcagtgcctataagacactaataaagagaaaatgcaatagtattggca

SEQ ID NO: 284593 - DNA, 579 bp, Homo sapiens
ttctttttctttaacggttaacaaggaattcatttgtcataaaaaaaaaagatatcaataaatacattttgaaagagcactttatatttctgtcttctcaccagacctcacagcaaatgctgcaaatattttaatagggctgtcacagggatgtccctgggggtttaagaaaacaaacgaaagttctggagcagagaagcatgaacatgaaagcatgtgagaagcagaagttattgctgctttcccagctctgatgtgtggtttctcagtgagataattataacaatgaagtttttaaaaaatggtacaatcatagttaattagttccagttgcagttggctattttaaccctcacctctgaatactattagaaagcagattgaatcttgtgtkataacctgcatgaaataggtttttttgttcacttgctcattttgtttttatttcattggtttactttcctttatttttggcaaacaccaccaaggtaatagattagattactgttaaacctattatatattattttagcagtgcctataagacactaataaagagaaaatgcaatagtattggca

SEQ ID NO: 284594 - DNA, 603 bp, Homo sapiens
gtaatagattagattactgttaaacctattatatattattktagcagtgcctataagacactaataaagagaaaatgcaatagtattggcatgattaagtgaaaactattaataaaagaaagagttcatcatagttattggatttgaatgtattagaaagaagcacagtatgttgggggatggcaaaattgcgttacaaagtcattcaaattctatatggatttttttagtgagtaattagtttttaaaaccatggatactgacaaaaataaaggagtagatgatgcaaagcagatggatcatttaatttatttctcaattacagttgacaggttgggcacagaaatctgcaagtcgtctatttctttatggtccattttgcagctgtgtttattgtcataataaataaatacattatctcattaatggaacactgaattttttttttccaaaaaacgcgctcacacccaatgtccatgctgcaaagaaaatacaaaaacgggagaatgttcacccaactgatgcaacagaatagggtccatgttgggtggagactttgggaaatgagagttggtcacaacaaagtaacctgttagtttttag

SEQ ID NO: 284595 - DNA, 1113 bp, Homo sapiens
tttctgtcgagcaatatgtgcataagagattaagygaacaggcaaatgcccaaatggcacacaattatttcatggcagattaagaaagcttcagcaggtgctatttttaaaaccaagatgctcttctgtagtgacagatgctgctgctctggggatgtctttcaataacagaatactttcaccagaaaaagaatttaaactggtatgattgtgtccccagaacaaaggtactctaggcactagaaagccctaaagatactgcagttattgatcttggtttgctctttcaacgcatccacaaagaagagaatgtacacgtgtcacaattcataacatttgcaaggcactttggtgcaacagttcagaagcatttaataatttaagtttcattgattatgacattgcttccacggtatattccccaccaaaaccccataatcagctactattcaggaataaaatttttttcaattagcctctaggaaagaggggtttccaccacaggtctgggaaatctgcaaattttaaaatgcaatgtaactaaaacatacataatwtttctgtcgagcaatatgtgcataagagattaagcgaacaggcaaatgcccaaatggcacacaattatttcatggcagattaagaaagcttcagcaggtgctatttttaaaaccaagatgctcttctgtagtgacagatgctgctgctctggggatgtctttcaataacagaatactttcaccagaaaaagaatttaaactggtatgattgtgtccccagaacaaaggtactctaggcactagaaagccctaaagatactgcwgttattgatcttggtttgctctttcaacgcatccacaaagaagagaatgtacacgtgtcacaattcataacatttgcaaggcactttggtgcaacagttcagaagcatttaataatttaagtttcattgattatgacattgcttccacggtatattccccaccaaaaccccataatcagctactattcaggaataaaatttttttcaattagcctctaggaaagaggggtttccaccacaggtctgggaaatctgcaaattttaaaatgcaatgtaactaaaacatacataat

SEQ ID NO: 284596 - DNA, 609 bp, Homo sapiens
caaataataaaattataaatgaagaagagattttttggatataacaccaaaagcaaaggaatcaagaacaaaaagaaataaatgagaccacaagaaactaaaatgattttgtgtaataaataatcaacatgagagaaaatcaactttaaagaatgagaggaaatatttgcaaaccacatatgtgatagagttaatattcaaatgatctaaggaattcatatgactcaatagcaaacaaaaaaccaaataactcaatttaaaaatggcctaacctcaatagacacttctcaaaagaagacataaaaaggacaaacaggtatatgaaaaggtgttcaaaatcactaatcatcagggaaatgcaaatcaaaaccacaatgagacatcaccttacacctctgaaaatggattttatcagagacaaaagcggtaagtgttggtgaagatgtgtataaaaatgatgccttgtaygatgttaggagtaatgtcaactggttcagccattatggaaaaaatatgaagattcctcaaaaattaaaaatagaactttcatatgaatcagcaatctcacttcggaatgtttatccaaaggaactgaaatcagggtcttga

SEQ ID NO: 284597 - DNA, 549 bp, Homo sapiens
aatatcattttattttattttttattttatttttgtgttgttgccatttgcaacaacaaaagagataacaaaatgttgccatttgcaacaacacaaaaggacctggagatcattatgctaaatgaaataagccatacacagaaagacaaatgctgtattatctaacttatgttacagtctcaccaatgcaccacaatgtagcagtctctcattgcctgaggtatcacccygagtcctttgtctcatgaccaagaaggttaaggagcataaacaccaagggtgaggttggagcaaaagtttaacaagcgaaagaacaaagctctttgctgtggagagggggcccagaaggctttcacaagatgaatgcaaacgctttttttatagttgaatgcgaaggctttcacaagaaaccaatgaggggctgggcatcttatttgcataagatgtgaatttctggtagctccaccccatcctcctagtgcgcatgaatgcctgtagcttgagttactccatattgctttgttccccttactgcacatgtgtcagaca

SEQ ID NO: 284598 - DNA, 569 bp, Homo sapiens
tatagatggcttaaaatctattagtaatgtcctatttctgtatctgggaggtaggtatatgtgaatccattaaattatttgttatatactttacctgtggaaataataataaatcaaaagtttattgcagacaaaaataaatcttcaaaatgcctatgatttccagatagaatacccttatattttgtatttcttatgttctcttctcacagaaacctcccagaagcagatgcctcacctcttttgccaataatccttctctgaattactgtgctgagcatcttatgtgactcatgattaaactgtttcatgtgtaattgtatatcttcagatggaatatattcaccctgagaacaggtgctgcatcttccaatccagtgtttatttccttgtggcatgaatttaactgtaaaactaatgacggaaggagccagctttcttttctttttaaactttaaaaaaatatttttaactgactcattggaattctacacatttataagatacaatttggtgttttggtrcatatatatgttatataatcacatgaacaaatcaggagagttagc

SEQ ID NO: 284599 - DNA, 586 bp, Homo sapiens
atgtgtgttaggcacataggtgtctattttattgtttacttttctatatgtttaaaatgttactttttttttttttgagacaagaatcttggtctttcaccaaggctggagtgcagtggcacgatctcggcttactacaacctccacctaccaggttcaagcgattcttgtgcctctgcctcccaagtaactggaattacagatgtgcaccaccatgcccagctaattttttattttcagtagagacagggtttcaccatgttggccaggctggtctccaactcctggcctcaagtaatccacctgccttggcctcccaaagtcctgggattacaggcgtgagcccccatgcccagccaaaatgtcactttttgagagttcagactgaatagtaaggcacttattctgcaaagccctttgaacctaagggttccacaatgccaggtaaaaaaaataaagagaaagggtgtctccmatctcaataacataacttcttctattcctcttcttaggaatgttcctggcagatataattgagaaatactttgtttccccaaccctattccgagtcatccgattggcccgt

SEQ ID NO: 284600 - DNA, 1290 bp, Homo sapiens
ttcaccctgaacctgttcattggtgtcatcattgataacttcaatcaacaaaagaaaaagataggtctcctcccctcattgccagtggttggaagtcagcccagataagaggcacctttgtccctatctctagaaagaaaatgtccctctttctttctctaaaatctatattgttagctcactgtgaccctggcccccatacgttagccccaacccactctttctgttcggggctggattttgcagcatgtagtttaccacacttactagcagtcttttattcttgaggcctattactggtcttggtctcccaccagaagcaggtaggtcagagagtgcagtygagcaacagagatgaaaaggaaagaaacagatgaatagctatcgcaagaagtagaaactgtctagacttgtgattatctagtcaatctctgagcacaagcaaattgggatttgagagacccacctttggaaagtttacttccttacttgttctagatggttaacaagttttacaaagcaaattgaaaaaattgctcgttgctcattttgtaagtcaagtctatcccagcatactccaagacaccctccaaattgctttcttgcaccagaatttccaaattttgggtatcatctaaaataaattggctatcagccaggwaaacttgttgcttttccatcagtacctcaggtcaggtagaagaaagttttaaaaagatcaaaaagaacatcaagattttagagggccttcaaaaaggagttcttcaaaattcctttttgacacaactatttcaaagcttctccagctgggtttggccatgggttgccccacttctcccacctatcataatgctcatgttagtttgtttatttgcwccatgtattgttaatgcaatatctcattttgtgtcttctaggataaaacaatttcaaaccaaaatgttactgtagcaagggtatcagccactgagagaacttcatgactctcctttggatgcagcaggacaaaattttaggctgcaaaggctcttcccccatggtcccatagccaccctgcccaaattaactcccaacttagggatttaggcccatgtaacctcctaactaacaacaatcctaggtaaggccaactctacacctctggtcagcaggaatcagctgaaagacaatcacccacatgccaaagatttgtcattgttgctctgtcagggggttgggacggggaaatgtggagtctcaattagagaaaaggagtcagcctggcaggaccaagggaaagcagaaagagaa

SEQ ID NO: 284601 - DNA, 629 bp, Homo sapiens
aaacttgttgcttttccatcagtacctcaggtcaggtagaagaaagttttaaaaagatcaaaaagaacatcaagattttagagggccttcaaaaaggagttcttcaaaattcctttttgacacaactatttcaaagcttctccagctgggtttggccatgggttgccccacttctcccacctatcataatgctcatgttagtttgtttatttgctccatgtattgttaatgcaatatctcattttgtgtcttctaggataaaacaatttcaaaccaaaatgttactgtagcaagggtatcagccactgagagaacttcatgactctcctttggatgcagcaggacaaaattttaggctgcaaaggctcttcccccatggtcccatagccaccctgcccaaattaactcccaacttagggatttaggcccatgtaacctcctaactaacaacaatcctaggtaaggccaactctacacctctggtcagcaggaatcagctgaaagacaatcacccacatgccaaagatttgtcaytgttgctctgtcagggggttgggacggggaaatgtggagtctcaattagagaaaaggagtcagcctggcaggaccaagggaaagcagaaagagaa

SEQ ID NO: 284602 - DNA, 629 bp, Homo sapiens
aaacttgttgcttttccatcagtacctcaggtcaggtagaagaaagttttaaaaagatcaaaaagaacatcaagattttagagggccttcaaaaaggagttcttcaaaattcctttttgacacaactatttcaaagcttctccagctgggtttggccatgggttgccccacttctcccacctatcataatgctcatgttagtttgtttatttgctccatgtattgttaatgcaatatctcattttgtgtcttctaggataaaacaatttcaaaccaaaatgttactgtagcaagggtatcagccactgagagaacttcatgactctcctttggatgcagcaggacaaaattttaggctgcaaaggctcttcccccatggtcccatagccaccctgcccaaattaactcccaacttagggatttaggcccatgtaacctcctaactaacaacaatcctaggtaaggccaactctacacctctggtcagcaggaatcagctgaaagacaatcacccacatgccaaagatttgtcattgttgctctgtcagggggttgggayggggaaatgtggagtctcaattagagaaaaggagtcagcctggcaggaccaagggaaagcagaaagagaa

SEQ ID NO: 284603 - DNA, 606 bp, Homo sapiens
gaacttgtatccagtaaaaaaaaaatatatatatatatatatatatgtatatggaacttgtatccagtaaaaataaagagttcttagaactgaacaataaacaacttaatttttttaaggcaaaagatttgaatagacatttctctaaagaaaagatgaacgtggttggtaagcacatgaaaagttgctcaacatcattagtcttcaggaacatgcaaataaaaaccacaatgagataccatttcattcycactaggatggctataatcttaaaaactgacaaatgttgttgaggatgcagagaaattggaaccctcatctattgctggtagattggaaagtggtgcagtcactttggaaaacactttggcagttcttcaaaaggttaaacatagagttagcatatgactcaacaattccaattcacaggatatacacctaagagaaatgaaaatatatgtttacataacaatgtttacatgaatgttcatggcattattcataacagccaaaaagtgaaataactcaaatgtccaccactcatggatgtggtatatccatacaatggaatattacttaggaaaaagaaggaatgaagtaatgtag

SEQ ID NO: 284604 - DNA, 606 bp, Homo sapiens
gaacttgtatccagtaaaaaaaaaatatatatatatatatatatatgtatatggaacttgtatccagtaaaaataaagagttcttagaactgaacaataaacaacttaatttttttaaggcaaaagatttgaatagacatttctctaaagaaaagatgaacgtggttggtaagcacatgaaaagttgctcaacatcattagtcttcaggaacatgcaaataaaaaccacaatgagataccatttcattcccactaggatggctataatcttaaaaactgacaaatgttgttgaggatgcagagaaattggaaccctcatctattgctggtagattggaaagtggtgcagtcactttggaaaacactttggcagttcttcaaaaggttaaacatagagttagcatatgactcaacaattccaattcacaggatatacacctaagagamatgaaaatatatgtttacataacaatgtttacatgaatgttcatggcattattcataacagccaaaaagtgaaataactcaaatgtccaccactcatggatgtggtatatccatacaatggaatattacttaggaaaaagaaggaatgaagtaatgtag

SEQ ID NO: 284605 - DNA, 544 bp, Homo sapiens
atgacggagaataacaggaaaatcctatttgccatacttccttaattctgggcagcrtacatttttaaaaacattttgctatttctgaaaccaagatgcaacttataatagatgcagcctgggatgctactgagtggtacttttactttctgagacatcttacagttgatggtatcttaggtcaataatagagagttgataaagcagtcagagaagacctttgttcatctaaaccaagtcctggaggctgagaaggagccagctatgccaggagaaggggaaggaacatttcagacaatgggatcagcatgtgagaaatgccaaaggcaaaaaggagcccagtggagaccagggtagctggagtgaggatggagttcccacgagtgcctcgaagaatatgtagcaggtctggcctcgggaccccttccgtagggtagggaggcagccaatgagcagaaataaatgcagaattacaaactgcgccagggaaatgaaaagagagccatgtgtgcaaccttatcaataggaagacttggaggtcatt

SEQ ID NO: 284606 - DNA, 544 bp, Homo sapiens
atgacggagaataacaggaaaatcctatttgccatacttccttaattctgggcagcgtacatttttaaaaacattttgctatttctgaaaccaagatgcaacttataatagatgcagcctgggatgctaytgagtggtacttttactttctgagacatcttacagttgatggtatcttaggtcaataatagagagttgataaagcagtcagagaagacctttgttcatctaaaccaagtcctggaggctgagaaggagccagctatgccaggagaaggggaaggaacatttcagacaatgggatcagcatgtgagaaatgccaaaggcaaaaaggagcccagtggagaccagggtagctggagtgaggatggagttcccacgagtgcctcgaagaatatgtagcaggtctggcctcgggaccccttccgtagggtagggaggcagccaatgagcagaaataaatgcagaattacaaactgcgccagggaaatgaaaagagagccatgtgtgcaaccttatcaataggaagacttggaggtcatt

SEQ ID NO: 284607 - DNA, 544 bp, Homo sapiens
atgacggagaataacaggaaaatcctatttgccatacttccttaattctgggcagcgtacatttttaaaaacattttgctatttctgaaaccaagatgcaacttataatagatgcagcctgggatgctactgagtggtacttttactttctgagacatcttacagttgatggtatcttaggtcaataatagagagttgataaagcagtcagagaagacctttgttcatctaaaccaagtcctggaggctgagaaggagccagctatgccaggagaaggggaaggaacatttcagacaatgggatcagcatgtgagaaatgccaaaggcaaaaaggagcccagtggagaccagggtagctggagtgaggatggagttcccacgaktgcctcgaagaatatgtagcaggtctggcctcgggaccccttccgtagggtagggaggcagccaatgagcagaaataaatgcagaattacaaactgcgccagggaaatgaaaagagagccatgtgtgcaaccttatcaataggaagacttggaggtcatt

SEQ ID NO: 284608 - DNA, 544 bp, Homo sapiens
atgacggagaataacaggaaaatcctatttgccatacttccttaattctgggcagcgtacatttttaaaaacattttgctatttctgaaaccaagatgcaacttataatagatgcagcctgggatgctactgagtggtacttttactttctgagacatcttacagttgatggtatcttaggtcaataatagagagttgataaagcagtcagagaagacctttgttcatctaaaccaagtcctggaggctgagaaggagccagctatgccaggagaaggggaaggaacatttcagacaatgggatcagcatgtgagaaatgccaaaggcaaaaaggagcccagtggagaccagggtagctggagtgaggatggagttcccacgagtgcctcgaagaatatgtagcaggtctggcctcgggaccccttccrtagggtagggaggcagccaatgagcagaaataaatgcagaattacaaactgcgccagggaaatgaaaagagagccatgtgtgcaaccttatcaataggaagacttggaggtcatt

SEQ ID NO: 284609 - DNA, 584 bp, Homo sapiens
tgatcaacagccagcaaggaagtagggacttcaatcctacagtgacatgcaacagaattctgccaagaatcccaatgagtttggaagaggtccccaagctctagatgagaaccacagctgcctgacacctgaatttctaccttgtgagaccctragtggagaacacggctaagcctcacctggactcctgaaccatggaaaccatgagataataaatatgcattgttttaagctgctgtgtttttggtaattaattatacaccaataagaactcttcctgatgtttcaagattcagctcaagaattatctcctgtaagatttacttgactctgccaggtggaatgggccaccccctgtgtagtcccaggctccccctgtagctggggcttatttgttaacatgtcacctgctatggactgaatggtatcccctgcaaaattcataattggagccctaactcccaatgtgatatatatggagatggggcctttgggagatagttagatttggatgccatggaatcagtgtttttataaaaggaaggcacacctgggttctttttgtgcaatgtgagaacatgatg

SEQ ID NO: 284610 - DNA, 641 bp, Homo sapiens
gagaaggcggctgtcaacaagccaagaagagagccctcaccagaacccaaccatgctgtcaccttgatcttggacttccagcctccagaactgtgaagaataaatttctgtggtttaagtcatccaggagatggtatttggttacagcagctcaagctgactaagatgctgtctgtttacttgtctgtttgcctcactggcctgtgagacccttgagggaagccattgccttgttcatccttatctccccagtgcctggcacaatgtctggcatatggtaactgcagtaaccraggctgggagccacagctccctccagcctagctttgttcctctccagcatccctcagatatccccagggtctgaggccttggaatgtccttcctcttaggatttctcagaggaaatcaacgagacatgcctctaaagtaaacaaacaggcactgggagatacaaatgcccacttgtaccgaaccccacagccgtttcataatttatggacagttctagggagataaatattggttttgattattttactatgaataattgaaagcaatctcagagtacattaagcagaatcctagtcccatgaaaagctcaacaaagaaaaaaggttacatagtgaaggaggtttgag

SEQ ID NO: 284611 - DNA, 641 bp, Homo sapiens
gagaaggcggctgtcaacaagccaagaagagagccctcaccagaacccaaccatgctgtcaccttgatcttggacttccagcctccagaactgtgaagaataaatttctgtggtttaagtcatccaggagatggtatttggttacagcagctcaagctgactaagatgctgtctgtttacttgtctgtttgcctcactggcctgtgagacccttgagggaagccattgccttgttcatccttatctccccagtgcctggcacaatgtctggcatatggtaactgcagtaaccaaggctgggagccacagctccctccagcctagctttgttcctctccagcatccctcagatatccccagggtctgaggccttggaatgtccttcctcttaggatttctcagaggaaatcaacgagacatgcctctaaagtaaacaaacaggcactgggagatacaaatgcccacttgtaccgaaccccacagccgtttcataatttatggacagttctrgggagataaatattggttttgattattttactatgaataattgaaagcaatctcagagtacattaagcagaatcctagtcccatgaaaagctcaacaaagaaaaaaggttacatagtgaaggaggtttgag

SEQ ID NO: 284612 - DNA, 555 bp, Homo sapiens
tagtcccatgaaaagctcaacaaagaaaaaaggttacatagtgaaggaggtttgaggagtgcttcttcccatttccctttcttagagagccacagagcacctgaacacattgaagaccacgagaagtcctgcagtaaagaaacctgcctaatagttcaatccaacacatctcacgtttatgtgttaaaaatgaactcaatgatgaaataatatctgttaatttctcaaggttggaaaatacytcaggaagtcttgtagtatatgatctaaaattctatagccctaaaagtcagctccttctgccttctgctgtgaggaatgtggatatccaagctgagacagtgaatccttgtgttgcacttgagggaaatgaggccgagaagaggcagagttacttgtcctaagcacatagtcagctttgactgaggcgggagcaaagcacagtacattccttactgccaattcagtgtcctgtccccttgttacattggcttgctgaaaagtagaccagtcagcacattcttcaccctgcttatatgttgctgtgtaacaaat

SEQ ID NO: 284613 - DNA, 461 bp, Homo sapiens
ctttatccaatatatacttttttagcattgtagtcagagccccaatttctgtgccaccagagctacccctaacaaaggcccagtgctctgtaatatgaatagaggcaggaaaggaaagtactcaacatgcaaaacttctcgctccctctctttctttctcagtctctctttctgatgtcgaaaatgacacccatacatgagacaagggaagatggaaaaaaaagatggagaccttctcctcagtcattaaatggctctgtgaacttggaaagtggatggttttttgttttgttttgttttgttttgttttgttttktttctgagatggagtcttgcttcatcacccaggctggagtgcagtggtgcaaccacggcttactgcaacctctgcctcctagtttcaagcaattctgctgcctcagtctcctgagtagctgggattacaggcatgtgccaccaca

SEQ ID NO: 284614 - DNA, 605 bp, Homo sapiens
aaaacctctccccaaaaaatcaataataattgccaacaaggaaagggagatagtggaatgcaaaactttaaaaagtgatatcagggaggaaaatgaaggattctggagcacagaggataagtagcctggctcctaatcacacaccacccctgaagtcatttgaaaagccccatatctgataattgaaaccctgaagattaacaactggaaaatagcctttcttttttctctcttcatagccatggctctaattcattctagtttccctctgggaaaattacctaaaggttaggcatattccctaaagggatggaccactccttgaaattgtgaaaaagcagaacattggttcagggcatctaacaaagaaaggaaatgaagagggaggcaagaaaggaagaccccctgcaaagattgataaagaaactgacctgggagaatacatgattaaagkaatagtaataaactgtgtatttgtgtatatacgttatatatacattaactaatttaaaataagacctcatagagaagaacataaacagcagcaacagaaacagataaatggagatcatcacacttaaaaatacaaagtgaggatccaaaca

SEQ ID NO: 284615 - DNA, 598 bp, Homo sapiens
tagggcttgggggaattaagtggcatctgccatagaagagttatcaaaagcacaaggaccagctttttaattcaaggaccagctggggaggtggttgtttcttagtgacactgaagagattaaagaaataagaatgacaagctctaagtcctaaatactcagttcaagacaggaacagaagtaatgactgctgaattaatatgtcatagtgtgaagctgcaggcagagataggcaaaaactgaactggaaatttgatcctatggattgctgaattacaatatcaggttratgcatagcatcatttattcctatgtagaagtttggacatggattaagaaacagtagattggaatggaatgggatatgaaaggagaattcaaatgcctcccaagctttcaaaccccagctgaaggagtctttcctttcacttctgatgaagctctccctttttgaggaccccaaagatcatggctgagacaggtatcttgccaagtgagccaattcacctcacgatttagccctgccacccttatagtttccaggctcatggctagattccagtcttatggctggaatttatgacctgtaattacaaag

SEQ ID NO: 284616 - DNA, 607 bp, Homo sapiens
gtccatggagtcattttctaggggctaaagcagtagacctttttccacccctctctaaggtacagctatctrttctaagagttcgcatgagtacttatagctactgcttttctatacactttgttttctattttatttttgtttataacaggccaggaacctaccttgaaaactgtattaaataaaataggagatgagatcattgtaataaatgaacttctaaataaattggaattggaaattcagtatcaagaacaaaccaacaattcactcaaggtaatgtttctctaatgaggaagcagtaaaaaagacaatacatacaaactccctaatcattaagtaatttttaaggatgctttgtttataatgttttttgtttataaattattaatggtacagtatgccatttatgttttattttcctagtatagtggaatttggagctccacagctgctactttctgctgatggccagtggaattgaactttactaaaaaggagagtttgctaataattcttggtagctttaatttaaacaatgatgttctagtagagtggtatgtaaagaacacctgctttgggtgaggagatatggattcttaccttg

SEQ ID NO: 284617 - DNA, 607 bp, Homo sapiens
gtccatggagtcattttctaggggctaaagcagtagacctttttccacccctctctaaggtacagctatctattctaagagttcgcatgagtacttatagctactgcttttctatacactttgttttctattttatttttgtttataacaggccaggaacctaccttgaaaactgtattaaataaaataggagatgagatcattgtaataaatgaacttctaaataaattggaattggaaattcagtatcaagaacaaaccaacaattcactcaaggtaatgtttctctaatgaggaagcagtaaaaaagacaatacatacaaactccctaatcattaagtaattyttaaggatgctttgtttataatgttttttgtttataaattattaatggtacagtatgccatttatgttttattttcctagtatagtggaatttggagctccacagctgctactttctgctgatggccagtggaattgaactttactaaaaaggagagtttgctaataattcttggtagctttaatttaaacaatgatgttctagtagagtggtatgtaaagaacacctgctttgggtgaggagatatggattcttaccttg

SEQ ID NO: 284618 - DNA, 607 bp, Homo sapiens
gtccatggagtcattttctaggggctaaagcagtagacctttttccacccctctctaaggtacagctatctattctaagagttcgcatgagtacttatagctactgcttttctatacactttgttttctattttatttttgtttataacaggccaggaacctaccttgaaaactgtattaaataaaataggagatgagatcattgtaataaatgaacttctaaataaattggaattggaaattcagtatcaagaacaaaccaacaattcactcaaggtaatgtttctctaatgaggaagcagtaaaaaagacaatacatacaaactccctaatcattaagtaatttttaaggatgctttgtttataatgtttttkgtttataaattattaatggtacagtatgccatttatgttttattttcctagtatagtggaatttggagctccacagctgctactttctgctgatggccagtggaattgaactttactaaaaaggagagtttgctaataattcttggtagctttaatttaaacaatgatgttctagtagagtggtatgtaaagaacacctgctttgggtgaggagatatggattcttaccttg

SEQ ID NO: 284619 - DNA, 633 bp, Homo sapiens
agaacgagggcagtcgctgcattcttcactgctgtatctttgtcacctagaatagtctctggcatatgttaagaactccatatatatttcttaactgaatagaccgtatacatcacatggtgggcaataagtgcggggcttaaaatcgtgggttttggagttaggaagagctgtgttcaaattccacctctgattttcacagaccacatgaccttaggcaattcaggtaacttctctcagcctcatctatgaaagggggctaaactgtaacagrgttgttttgcaggctaaaggggatactgtacgtaaatccctgagcacagtgcccattagacagtaagtagcaattaaccaaaggtcagaagtgtcaaaaaacaaaattaccacaaatttttaaatattttaattggctttatttgcaattttagaatcaggcaacacttcattccataaaatagaataattgttctgctgagctgagcagaggagattggtttatagacaaagaaaggctgaggaaagcagaaacaaaacaaaaagcaaattggtcatttcaaagcgactttccttgtaaaaaaaaaatgttaaagcagaggggacttccttatgctggctgggactggtctgtttggg

SEQ ID NO: 284620 - DNA, 499 bp, Homo sapiens
aataaggtaagggaagcagaaacactaaggagaaaaattaaatgatggttgacttcaattaggaagacaatagaaaaagatttaaatacttttcaacagtaaatagaagactgacaagttatttcaattttaaaatatgcatcaaaaatattgaaattcctgagggcaatatattatgtttttaagcagtttacacattctaatccaacaagtcaagtctacttggacacagtaaatttagactgatggtttatgaygctccaaactaaaatcggtatcataagaccataaacaatcccatttatgtttattttaattatgattaatggtttgccatttgtgtagttttaaatgctttaaataacctgaacttggaatgaatcaacctccccctgaatttacatgaagtattagttttttaccaaatttgattacaaattatgaaagcaagttttaaaattaccctcctttgttttgtaatggtaaacatcttttttca

SEQ ID NO: 284621 - DNA, 533 bp, Homo sapiens
aggtatcatattaagaaaagagaaataagtgattsgcacatagaacacaggcattttgcatcttagtctgagccagagagtccctaaaagatctcttccaataccattattttgtttatgaagcagtaaagtgaggctcagggagaggaattgccttatctgaggccaggtggctgaccaatggcagaggcaaaattagagcccaggtctcctgagtcccagcctaacctttgctcctgtctatgctgccttccaaaaagcccaaagatgttattggattttcccaagggctatcttgagtacagtagcaattatgttactaaggttgttgtagaaggcagtccagaccttctttctgatattcatccagccatgtattgtacatttactataaggtgatacctgcattgagtgattgggaataaagggtcatgaaaatgctgtgtcttctttgaactcctactccagtggaggtaagagctggatgggttctgagaggcatggtatggctttcttccattttattccttttt

SEQ ID NO: 284622 - DNA, 533 bp, Homo sapiens
aggtatcatattaagaaaagagaaataagtgattggcacatagaacacaggcattttgyatcttagtctgagccagagagtccctaaaagatctcttccaataccattattttgtttatgaagcagtaaagtgaggctcagggagaggaattgccttatctgaggccaggtggctgaccaatggcagaggcaaaattagagcccaggtctcctgagtcccagcctaacctttgctcctgtctatgctgccttccaaaaagcccaaagatgttattggattttcccaagggctatcttgagtacagtagcaattatgttactaaggttgttgtagaaggcagtccagaccttctttctgatattcatccagccatgtattgtacatttactataaggtgatacctgcattgagtgattgggaataaagggtcatgaaaatgctgtgtcttctttgaactcctactccagtggaggtaagagctggatgggttctgagaggcatggtatggctttcttccattttattccttttt

SEQ ID NO: 284623 - DNA, 581 bp, Homo sapiens
ggcaatgaaggagtaaaaaaaattaaaatgggacaggaagggttaaaaaagatgtaacccccaaaaacattaaaagatcstcaaatagactcaagtgcgagttttagtaaatgacaaagttggcatttccaaccatgggagaggattaattactcaggcaatggtatcaggacatgtggttttatattgaggaaaacataaaggttagagttagaaaaaaaagagtttttttttcttatttgacacattgagtaaaaaatctaaatggattaaagagttaaatgataaaaatggaaccataagagagttgggaaaaaaattgtttcatttggagtatggaagatctttcaaaggataaaaataaaagaagcagcatacagaaaaaagacgaagagatttactagataaaactgaaaggctctgtataccaagtcttacaaataaaattaaaaggttaatgaagcactggaaaaatatttgtactgtataagacatgcaagaaaggttgagtctcaatacaggaagagaacttaataaaaaatagatgaatgtcaattagaaatagaaatataggcaaagga

SEQ ID NO: 284624 - DNA, 597 bp, Homo sapiens
ttttggggtggtttgttacacagcagaaacttactgatacactacagaactaaagttgtactcagagatacaaagataaaaaaaaacaaaatctcttacrttggcagttgttgatagcttatcatttctctcctgcttgcatgagtaagttatatgactgattagcctactacaactcttttgctattggacaatgcttctgcttgcactgactgtttaaacctccaccttattcccatcttcttactttttctgcttttgaaaaaacatatcatgagtttccatcccaagatggctgaaaaggaacagctccagcctctgctcccagcgtgatcaatgcagaagatgggtgatttcctcatttccaaatgaggttcttggttcatctcattgggactggttggacagtgggtgcagcccatggagtgagtgcagccaaagcagggcagggcatcgcctcacccaggaagcacaaggggttgggggatttccctttcctagccaagggaagttgtgacagactgtacctggaataacaggacactactgccccaatactgcactttacccacagtcttagtaactggcagaccagga

SEQ ID NO: 284625 - DNA, 1195 bp, Homo sapiens
ttttggggtggtttgttacacagcagaaacttactgatacactacagaactaaagttgtactcagagatacaaagataaaaaaaaacaaaatctcttacgttggcagttgttgatagcttatcatttctctcctgcttgcatgagtaagttatatgactgattarcctactacaactcttttgctattggacaatgcttctgcttgcactgactgtttaaacctccaccttattcccatcttcttactttttctgcttttgaaaaaacatatcatgagtttccatcccaagatggctgaaaaggaacagctccagcctctgctcccagcgtgatcaatgcagaagatgggtgatttcctcatttccaaatgaggttcttggttcatctcattgggactggttggacagtgggtgcagcccatggagtgagtgcagccaaagcagggcagggcatcgcctcacccaggaagcacaaggggttgggggatttccctttcctagccaagggaagttgtgacagactgtacctggaataacaggacactactgccccaatactgcactttacccacagtcttagtaactggcagaccaggawttttggggtggtttgttacacagcagaaacttactgatacactacagaactaaagttgtactcagagatacaaagataaaaaaaaacaaaatctcttacgttggcagttgttgatagcttatcatttctctcctgcttgcatgagtaagttatatgactgattagcctactacaactcttttgctattggacaatgcttctgcttgcactgactgtttaaacctccaccttattcccatcttcttactttttctgcttttgaaaaaacatatcatgagtttccatcccaagatggctgaawaggaacagctccagcctctgctcccagcgtgatcaatgcagaagatgggtgatttcctcatttccaaatgaggttcttggttcatctcattgggactggttggacagtgggtgcagcccatggagtgagtgcagccaaagcagggcagggcatcgcctcacccaggaagcacaaggggttgggggatttccctttcctagccaagggaagttgtgacagactgtacctggaataacaggacactactgccccaatactgcactttacccacagtcttagtaactggcagaccagga

SEQ ID NO: 284626 - DNA, 523 bp, Homo sapiens
agaacagaagccactaggaggaacacttaaatactgattttgtgtaataataattttgacaaattgctggaggctgagtggcactggcatgattcaaaaactcctagggcatcattcttcagggccctcaacatttttgtggttttaaccttgaggaatcccactaggggttttgtagtaaagcactgagaaatatcatcctaaggattttgattgggagaggaacagtaatcattatgaaataggaccagagagtgcttcatataaaatccctacacttaaggagtaaaggccttatcagagcattattctacctgtgtgaaaggcaactcttgtaccctagctcctactttktgtttcacttacggggtgggggaaggactgagaaagctccataaaggtaaaggacaggcccattacaaaaaaaaatttaattaaattttaagattatagaaaaagtattctcctctctacattaataccaaataaacagacttcagcataatagcaatagattacagct

SEQ ID NO: 284627 - DNA, 523 bp, Homo sapiens
agaacagaagccactaggaggaacacttaaatactgattttgtgtaataataattttgacaaattgctggaggctgagtggcactggcatgattcaaaaactcctagggcatcattcttcagggccctcaacatttttgtggttttaaccttgaggaatcccactaggggttttgtagtaaagcactgagaaatatcatcctaaggattttgattgggagaggaacagtaatcattatgaaataggaccagagagtgcttcatataaaatccctacacttaaggagtaaaggccttatcagagcattattctacctgtgtgaaaggcaactcttgtaccctagctcctactttttgtttcacttacgggktgggggaaggactgagaaagctccataaaggtaaaggacaggcccattacaaaaaaaaatttaattaaattttaagattatagaaaaagtattctcctctctacattaataccaaataaacagacttcagcataatagcaatagattacagct

SEQ ID NO: 284628 - DNA, 1127 bp, Homo sapiens
ggttcatggtgcataatatttaagaagaaatacttagagaaactcaaagtcaacagatgagacaaaaattatactacagaaatttgaaatctctgttatgtatagctatagcaaactttaaatacagcctaacatctagccagaataacataaaactttacactaaagacaaatttaccaccattcctgtcactcaataatcatgtccagctcttaacaaaaacttacaaaacatgctaaaaaaaacaagtgaaaatcacagtctgaaaacgtagagcaaacatcaaaaccagattcatatatggtgcaaatgctgtaattcaggartttaaggtaaacctgattaatatgttaaaggctttaatggaaaaggtagacaacatgcaagaatacatgggtaatataaagagagagatgcaagaatcaaaaggaaatgcaaaaacagtaaaaaaaaatgtctttgatatgttcattaacttactagaaactgatgaagaaataattactaagcttgaacataggttgacagaaatttaccaaactgaaatctaaaagacaaaagwgtgtctctgtatcatcttctttctgtacctttgtctgcatccaaatatttcctttttatgaggacaactattatattgaatgagtactcatgttgatgacctcactttaacttgattacctctgtacaaattttatctccaaatcagttcatgttctgagatactgagggttaggacttcaacacaggatttggaggtaacacaactaaacccatagagccttgaaatgccaagagatagttgttttaccaaaaacttcctgaggctctagtttcagttggtcwctcttaccaatatattcatattatgtgtgggatttaagtaactagccaaaaaattacagttaacaatttattaaacatatgtgaagagaaaaatattggttaaaatgctgaccctattttgatcaatgtaacatctgcaagcacttgccattttggatttaaaggcaaatattgtgggagctgtgtgtttcaaatcttttgccttgaatctacatcagatcgagctcaacagaataatgtttggtacagtggatttggcaacaagatagatatatagctg

SEQ ID NO: 284629 - DNA, 388 bp, Homo sapiens
gaagcttggagatgccaggaaccacagagtcccaaagagggagttacagccgtgtcttggggagctcccaagtctgggttccctgaatggctgcagtttttgtcttctttgcctgcaatatggtgagcaaggggcatgtttcagccctgtttgcatttcagctattttagctttgccattcagaaggtcctgagttcttgttctgcaaccaggaagaattaggtacgcaatggaacaactcagaggagaattgcagtgggtagcccsttttcacagccagggtgtcccaacaaatgttcagctcctagcagagaggagatcttggagtgggaagctcctgtctgcagacaggacatcttgttatctctgcagctgtctgaagacagga

SEQ ID NO: 284630 - DNA, 552 bp, Homo sapiens
caaattaacaactcctcttgaagccagcagagaagagaggcactagggcacacaagtagccaaaaatctgaagagacacagatgccagaagagagaaacaactttccagtatttgcctccttggaacagattcagtagaacacattataaaccgttaagacattatagccaaaagactttaaagacttcctaaaagtgaagtgtagtcaagtgtgagtgtaaaacccttggaggccacagataaaakggagaaggagtgagatcttatcctctgcaggctttttctccattaaccctaccatgtactctcagagaagactggagaaaatcccgaagaggtttttcttgtggtgggagcagggaacactgattactgcagaaattttacagaggaagatttccccatcttctcaacagattataaaccttaatctgtagaggaaaagcaataaacactgctgcctgagccctttagggcatgggaggaaatgcattgcagctaggggaaagaacagaacagaaataaaactaaacaaaaatgcattctccttg

SEQ ID NO: 284631 - DNA, 562 bp, Homo sapiens
acaaggcaaaacaagccaaacacaataattttaaaaggacagttatgggaggaacaaagttactttgttgttaaattctgttgtattttccttttcatcctaacagttccacacaaaacaatttcctggcaaagttaaatgtctggcttagattaaactttatatagttacaatgtcctgaaataattcagggtgtgatttttcaccagtgggatgagttatttggtaatggttagaataatagacagtgtagccaaactacctagaattttacattggctctacatttatcagccatggaacaaaattatttatcctcacatagcaagtattatcatctgtaaaattgagatgataatggtacacgtcacatggagttattgttagaatcaagttaattaaagactacagaatctaggggagtacaatataaatactatacattattatcttgttcaatattgtttgcacttttataaaggcatttgatatagtagctaaaggrctgtcttttacctttgccgtatttaataaatttatcagcaatgccaaaggtataatc

SEQ ID NO: 284632 - DNA, 513 bp, Homo sapiens
tgttcttaataaacaaagagattttccaagtaaattaaatctggcttaattaaaatggcatctttaattacatttctaaattttagaaaacataattgtgatgtaagggagaaaaagattttgtactcatgacacatttatttagacatttaatcactctaagttttagtttctctttctgtaaaagaatagctctcttcagtatatttttaaagattacagaatacatagacttcttgakcaaaggagtttctcaacaacttgtagctattattaagtactctgtttattatccaaattttgtatctcagctcaattcagagcaaaacaaagaattttaaaatagacttaaataaatgtgctcagtatatagaggaactgtgccaaatttggtcagaataaatgacatctaatggaattcaattaatgttcaaaatagtttttggataaattttgaagacagatataattataactgatttttaatttagaaaaaaactattttaacaattg

SEQ ID NO: 284633 - DNA, 2202 bp, Homo sapiens
atatttttattctgactaacaaagtctgcactaccctttagattaccaaaataactgatttttatttgtcataaaaaaacatttaaaattcaaaatggaaacattgatatttaagtgagttgtttytcatgatgccttctggattcaaacaaagtaaggaaaactttgttactctctaccttaccttaaccgttaatatcaagagaaattttgttcatattgatttttccctctacataaagtgcaggcaggaggaaccccaggtgtatcaagttctgccatctttttctccattattttgtgacttcctggctattaagtagatggaatgatatccaatgttcacacaactctccacacacacttgcaagctggcacctacaccaatccttagggaatctacaaatgaaatgatgcgaacaaagttcatcttcactagccactctatcctggtgggataactccaggttctagtgccaaaataaatgaaagaaaaactttgtctccgaaatatcttatagaaagaaacaaaaaaaaaaactgaaawtttacataaagtagaaaatgaaataagttttaggtttcaaaacagtctgacatattctctcagaaatgtcaataatgcaatgtttactatgtttcttttttattatattccatgtttttcagaagcaggttcatatactaaggggacaaggtttagcagttacatgtcatagcaatcaggctgaagttacagcatgttaaaatgccagaatctgcatatgtttattgcagcactgttcacaatagcaaagacttggaaccaacccaaatgcccatcagtgatagactggataaagaaaatgtggcacatatacaccwtggaatactatgcagccataaaaagggataagttcatgtcctttgctgggacatggatgaagctggaaaagatcattcttagcaaactaacacaggatcagaaaaccaaacaccacatgttctcactcataagtgggagtcgaacaatgagaactcatggacacagggaggggaacaacacataccagggcctgtcaggggtggtggactaggggagggacagcattaggagaagtgccttatgtagatgacaagttgatgggtgcagcaaaccaccatggcacgtgtatacctatgtaacaawtgttgaagtttagttaactggcggtactgtgataaagctgttaaaaaaaaaatgagtatgatatgggagccaggtcttttctccctacatgtagacatcacagactgtctattgacactccccgcaccaaccccacaaagatctgccacctctctgttgtcagcatcttgtcatcacttcttttaacagtacacttcagaagttgcagatattttcatagtttacacctcttttagagtttctcaattgagactgctatgtgtctgttatatatatatacacctattttttttgactgaagtgtaataaaatgtctacatggtggcccatttgttgaacttttcttgtgagtggatataaaaaaccataagcagaaatatgccaaacatttattccctcattatatttccacatttccaawtcaagaaattttaaacatagcactgaaaatctgttatattggtaaatccaaaaaaaattaagactgcaaatccggtctagaagctgaagaaaacaaagttgcaaactcgcacagcacatttacawgaaatttctttagctctactctttcaactttagcttaatagcatgagagctttctttaagtttcactgtcagcagaatagcacaaatttaacatttatgwgatccatttttactaaatagcagaggagaaagtgttatgccaagggcaaagtgggtattaattttctgtatggtttatacaattacttgaatgcttccctaaagaaaattaatatattgattaaacctaattagcttcaacttatacataactatagcatgagttatttctatgatgcaggaaaataggttgtagtgaaaataagccatgggagttagaatactcatctggcacacaaagaatttaaggtatgataagagtaacatgagacaaaattcatgtttattacaataaatatacatccatatttaatttttttaaaatagtaaaagagggaatagttaaacattcactaacaataccactctccaaagatcaaatgttagac

SEQ ID NO: 284634 - DNA, 622 bp, Homo sapiens
gtttaatgattagtctgataaatttacattttacmaaaacttaagttatttttcaaatctatatatcttatttatttagacagtttggaattagcaatgcaaagtctttgattgttttcaaaatgttttttataattctaggattttatttttactttatgggaaaaataatgatttcttcttttttgtttaaaataacgtgtactttctacaagcaaaactaaaatctgaaaaacagctacttctttcttatctgtcacaatgtttcctccattctttatttttgaggaggttatacgcgtatctgactatcttttaagcactgaaaatacatctaatttgaatatactaacaaaaaagaacaggagtgatctataataaaaatgaacagatgagttttttaaaaaaagacaatgtccttctacactagtatagaatatgaaaaattggccagaaatgaaaagaacaaaaaataatgtaaaagacacagtccctgaatgaggatgtaatttaatctgtttagatatttgtgaattcactttacttttagaaatactatatgttagaagatataatacattagtgatgagctgtttttgttttataaactcatatcaattga

SEQ ID NO: 284635 - DNA, 579 bp, Homo sapiens
cttttagaaatactatatgttagaagatataatacattagtgatgagctgtttttgttttataaactcatatcaattgattctagccatattattcctgataaaatcattttactaayacatgaaaactgaaaagtttgaacaaaacataaccttattatctgagttttaaacatatttgttccttttacttcttataatttacttacaattcaaatgaaccactcctgccttaaaaataaaatggtagctgagcccagtttaatcctcccttcaacgaatatgtattgctggacctactatgtgtctggcacataggaaaagcctaaggatagaacactggacacagtttctgctcttacggagcttaacatttagtgatcaaaactttaattctaaaaacgcatacaaagcaatatataattgaaactttgataaaattatgtatggcaaatttgatacagaattgtgaaggccagggcatctgccttagtggaagaggcctgtctcttcctccatgaagtttagaagcttcatctgagacctgagggatgactaactagggagagcgacaagtcat

SEQ ID NO: 284636 - DNA, 412 bp, Homo sapiens
tgagttcctccaggtctcaggcaggtacagaagtgtcatctgggagccaggaaccggagtcaaaaaccctagaagcctacctgtttttctattgtactcaggctgagctggcactcaattcagaaccgtaagacacagtctttccaatcttccctcccctttccacargcagaggcacttcactcatggtcaccaccaccccaggcccacagggagtaatgtcaggttaccaccattgtttacttaagacccaagctttcttcagtcagcttgtggtgaatgcagcctgagctgggatgcagctttcagggaaatgggctcccctctggcccatagcaagcccaaaaatgctatccaagagcctatgcctggacttgaggaccccaggagaccacttagtgttctaccctac

SEQ ID NO: 284637 - DNA, 412 bp, Homo sapiens
tgagttcctccaggtctcaggcaggtacagaagtgtcatctgggagccaggaaccggagtcaaaaaccctagaagcctacctgtttttctattgtactcaggctgagctggcactcaattcagaaccgtaagacacagtctttccaatcttccctcccctttccacaagcagaggcacttcactcatggtcaccaccaccccaggcccacagggagtamtgtcaggttaccaccattgtttacttaagacccaagctttcttcagtcagcttgtggtgaatgcagcctgagctgggatgcagctttcagggaaatgggctcccctctggcccatagcaagcccaaaaatgctatccaagagcctatgcctggacttgaggaccccaggagaccacttagtgttctaccctac

SEQ ID NO: 284638 - DNA, 1092 bp, Homo sapiens
cccaggcccacagggagtaatgtcaggttaccaccattgtttacttaagacccaagctttcttcagtcagcttgtggtgaatgcagcctgagctgggatgcagctttcagggaaatgggctcccctctggcccatagcaagcccaaaaatgctatccaagagcctatgcctggacttgaggaccccaggagaccacttagtgttctaccctactgtgtccaagctggtacctgaagccagcacatctcagagtctcacccaaggcccacagtgtactacctgattgtcactgtttgttattcaggacccatgagtacttcagtcagtaagtgattaatcccatcaggactgagtccttccattcaaggaagtgggtttccttctattccagggtgtgtctggaaatgytgtgtgggagttagggcattgaatgtgtgcctcttgactttgcccactttcctattctactgtggctgagttggtatccaagttgcaagacaaattctttttactattctctctcctcttatcaagcagaaggaagwctgtagttcaataacaaaataaataatagcaaaagaacaacaaagcaatcatttaatgtcagactatcctttgataaagttgatgatgctgaaacacttactgctgttgaatttaaggatagtattaattctttgaaacttggaaggtaatagcccttataggctgaatagacagtgattctttcactgaagtattaactatagtgcctcaatatacagaatattttcatataaatgttgctatattttaawggtgatactcttttgtaaagcaaccagtgcatatttgacactaacagaaaacaaacatttgtactggattttcatgttttattggtttatgtcatgctatagacaattagttgcttccattcattttcttctgtctgcaatttggagttactaatagagtattattttgtaactaatcttataggtatttagtaaaattactggatatctacctttcacgtattaaaaaaaattacatttaacaacttttccttaacactaagtgtaaaaataaaatgggaaaaaaattgcaaaa

SEQ ID NO: 284639 - DNA, 547 bp, Homo sapiens
ctgtagttcaataacaaaataaataatagcaaaagaacaacaaagcaatcatttaatgtcagactatcctttgataaagttgatgatgctgaaacacttactgctgttgaatttaaggatagtattaattctttgaaacttggaaggtaatagcccttataggctgaatagacagtgattctttcactgaagtattaactatagtgcctcaatatacagaatattttcatataaatgttgctatattttaatggtgatactcttttgtaaagcaaccagtgcatatttgacactaacagaaaacaaacatttgtactggattttcatgttttattggtttatgtcatgctatagacaattagttgcttccattcattttcttctgtctgcaatttggagttactaatagagtattattttgtaactaatcttataggtatttagtaaaattactggatatctacctttcacgtattaaaaaaaattacatttaacaacttttccttaacrctaagtgtaaaaataaaatgggaaaaaaattgcaaaa

SEQ ID NO: 284640 - DNA, 527 bp, Homo sapiens
aatctgaatcaaataaaatcagattgtgtaacagggctgagcatcaaaagcagatttctgtgaaaagtatgtcatacaacatgatatgtgcacatttttcaaacctccaagttgatactgactttaactttacccttcatgtatacaaagtcaacaatggaaaatttcatgaaatactccaataagctgttaacgccttttcattttctaaattttactccaaatatgttatgtccatgatgactctcttgtcttccagtgtctcaataaaggttgctcatcttagagaatagctcatgcttcttagagacatcgccttattttgattttacacagggttttgaacttkctcaatacgtttattctaataatctatactaatagaacacatatacttgatgccatagcatatatattacatctaatatataacatatattatatatatatatccttcccaaatacacatctattgtcatttccctattagaatttcatcagtatctctctaaacttgaaaacaaatt

SEQ ID NO: 284641 - DNA, 613 bp, Homo sapiens
aatttctgtatggtttgctgacttttaataactataaagcaatagtaataatagataataattgattatacgatttactcttaaacagtagttttataagatctttactagaattatctctttgacttttcataataaccctaaaagacactrtgcctttgaggtactgttgttattcaattttacatatcaggaaactaaagaagattaattcatttcctcaagcatccaccaaaaaaagtggtgaagctgggattcaaatccaggttgagcatcaagtgcttatatttcctacaaaatgacaatagaataagatccagagtttgattagatgaaccatctccttttcctttttcagaaatggttataagtgatgctgtgttctttttctttgtttgttttggaaatacatcaagaggcataaaatgtgtatttctctcttactgctgttaagtttgaccaggtgtttgaatacggtcagtttgagagttttcttttattcgttcacctaatgatttatgcagcttaaatcagatccattattggtcattgtaaaatgatgaatttctgatgatcattccatccacatttattaaataaatttttatagaga

SEQ ID NO: 284642 - DNA, 621 bp, Homo sapiens
aaacatagactttgcaagaaactgtaacgatgtctttcaatgtggctttattttatggaattaccaccaccaatgaataagtattgctctgctaactctgtatgatcaccagaaattactattattaatttgttagattttagtccttctactgctatgccacattttaacattttcaattatctaattttaataatgttgagcatctttttatatgcttattttccatctgtatatctactttggtgagatatctattcagatttttcatccattttttcactgtgttgtttttgtactgagtgttaagctttctttgtatattgcatacacaggaataaaatctgcatttgtcacattatatctctcattctatgttttgtcttttgattatcttaacattatatttcacatagctrgggtttttaactttaacaaagcacagcttttcatgtattttcttcttatttttggatggtgctttggtattatatctagaagttcattgccaaactaagtcacatatataggaacaacgataaaaactgtagcagacttctcatcagaaaccacgcaagcaagaagaaagtaaagtgaaatattaaaagtgttgggaaaaag

SEQ ID NO: 284643 - DNA, 621 bp, Homo sapiens
aaacatagactttgcaagaaactgtaacgatgtctttcaatgtggctttattttatggaattaccaccaccaatgaataagtattgctctgctaactctgtatgatcaccagaaattactattattaatttgttagattttagtccttctactgctatgccacattttaacattttcaattatctaattttaataatgttgagcatctttttatatgcttattttccatctgtatatctactttggtgagatatctattcagatttttcatccattttttcactgtgttgtttttgtactgagtgttaagctttctttgtatattgcatacacaggaataaaatctgcatttgtcacattatatctctcattctatgttttgtcttttgattatcttaacattatatttcacatagctagggtttttaactttaacaaagcacagcttttcatgtattttcttcttatttttggatggtgctttggtattatatctagaagttcattgccaaactaagtcacatatataggaacaacgataaraactgtagcagacttctcatcagaaaccacgcaagcaagaagaaagtaaagtgaaatattaaaagtgttgggaaaaag

SEQ ID NO: 284644 - DNA, 423 bp, Homo sapiens
tcagaaaagtgcaacaacacaatttacaagtaatactaaaatatactataaaacactttttattgtaaattctatatagtgaatgactacacagagaaaagtatcatagaatgcttttgttgatttttaccatagtctatccatatccagtgctaatccatggttacatttgatgaatgaatgtagttctgatatgaatgttggttgatagtttttcttacattattaacaaataygacaaaagtgaaaccatggaggcatatgttggaacatctcttttacctttaagatgagtgaatgccaaattggacaattgttttttaatactgaaagtatatatttttttgtggctcatcataaaataatagctactgataaaacacatttttaaaaaattacttaatttccaggatacatgtgcag

SEQ ID NO: 284645 - DNA, 423 bp, Homo sapiens
tcagaaaagtgcaacaacacaatttacaagtaatactaaaatatactataaaacactttttattgtaaattctatatagtgaatgactacacagagaaaagtatcatagaatgcttttgttgatttttaccatagtctatccatatccagtgctaatccatggttacatttgatgaatgaatgtagttctgatatgaatgttggttgatagtttttcttacattattaacaaatatgacaaaagtgaaaccatggaggcatatgttggaacatctcttttacctttaagatgagtgaatgccaaattggacaattgttttttaatactgaaagtatatatttttttgtggctcatcayaaaataatagctactgataaaacacatttttaaaaaattacttaatttccaggatacatgtgcag

SEQ ID NO: 284646 - DNA, 430 bp, Homo sapiens
aatatgtttacatgtattctatccatatgagcaaaatacagtaattgcataggcttcaaaggtaatagaccagaggattttctataggaaatgaattaatgggtccattgcacatgaaatcccattttgttaaatgaaacaagcccagcggtctttattgatctcattgtttttagattggttatgcctcctagtttcctttaattaaatcaaagctactatgtgratgtgggaaaatagtcttgaaaatgtgtcataatcaactgccataaaattaacctcaaattcatactgcccccaaatattctatcataaacacatcctgaattaatataattctgaaatacttagtttcataataatgaaggataaagaaattaacatggcatttgtttacataaaagaaataaattgtcttgaattgtacagg

SEQ ID NO: 284647 - DNA, 508 bp, Homo sapiens
atttatcccagggatgcaagtttgattgaacataagcaaaacaatcaatgtaatataaaatagcaaacagaatttgtctcaaaaaagagacaaacataaaattaaagactttgagtaaaagtattgccatcttaaatttgactatagcaatatgaaatcttgatgtatgttactgttaaaaaatattttttgtttctgtccaccgacaaatatacaagcagtgagcaaccttatcccaatgagaacctttaacaatcagattggagtatctaaagactatttctcactaaaagtaactgggtctctgtgtagaaatgtttgattttagatctgggacatgaaatgtacaaatgattctaaaacatctttcataccayaaaactaggatactaggctcatttcaaaggattgaggagctaacttaaagagtttcattggtcaaagattgaacaataatgcctgcagtacattgaaatatgtaaaaatattaaaatcgatgtgcttacat

SEQ ID NO: 284648 - DNA, 508 bp, Homo sapiens
atttatcccagggatgcaagtttgattgaacataagcaaaacaatcaatgtaatataaaatagcaaacagaatttgtctcaaaaaagagacaaacataaaattaaagactttgagtaaaagtattgccatcttaaatttgactatagcaatatgaaatcttgatgtatgttactgttaaaaaatattttttgtttctgtccaccgacaaatatacaagcagtgagcaaccttatcccaatgagaacctttaacaatcagattggagtatctaaagactatttctcactaaaagtaactgggtctctgtgtagaaatgtttgattttagatctgggacatgaaatgtacaaatgattctaaaacatctttcataccataaaactaggatactaggctcatttcaaaggatkgaggagctaacttaaagagtttcattggtcaaagattgaacaataatgcctgcagtacattgaaatatgtaaaaatattaaaatcgatgtgcttacat

SEQ ID NO: 284649 - DNA, 892 bp, Homo sapiens
ttcaaaatatgtaaagaacttttacaagtcataataaggtaaaggactcaataagaaatggcaaaagacttgaataggcattttggcaaagaaaatgtacaaatggccaataagcacatgcaaagatgtttaatatcattagtcattagagaaatgcaaatcaaaaccataatgagataccacttcacacccactaggatgactctcataaaaaagacataataagaagtgttggtgggggtgtggagaaattggaaccctcataccttgccagtggggatgtaaaatggtacagcagctttgataaacagtgtaacatttccttaaaatgttaaacacagagcaaccatgtgacctagccatttcactcctaggtataaggtrtacccaagagaaataaaaacatacgttcacacagaaacttatacatgaatgttcaaagcagcatcttttgtactagccaaaaaatgggaatagcccgaagtctaccaactgatttcatttatatgaaatgtccagaaaagacaaatatatgaaggcaaagtttcatcatttcctttaatggggagagggwagggttatcattgcttacaaaagtgtcttgaacttggtggagcttatattgagaactgttaggtgagcatggaatagaaaactgctggaagagtcagagaggtcactgtggagaaggtgacctctgggttgcatgttgaaggttaagggagtgcttgccaagagaggagagagwaaaggctttcctggcagaggaagaggtaaagggctagagagaataaggcttgctcctgaggtggtgggaggtgggtgtagctggaccagaggctgtatgggatggggagatccacaggaagcaaaactagaataaggttgaggc

SEQ ID NO: 284650 - DNA, 561 bp, Homo sapiens
atctaaacataaaaagggttcactgaaaatacggtactcagaatgaaaaatggcacacctgtatagggtacttaccatgaatgtggcttgcaggtctggaagttgctctgggtgagtctgtaagtgagtggtgagtgaatgtaaaagcctaagatgttactgtatactactgtaggctttataaacactgtacacctaggctacmctaaaattatgtaaaatatattttctttctttaataataaattaaccttagcttactgtaacttttgtaattcataaagtttttaattttttaaactttttgactcttttgtaataacttagcctaaaatacaaacacattgtacagctgtaaaaaaaaaattctttttttaaattcttattctataaacttttttctatttttacatttttttcttacttttttaacttttttgttaaaaacaatgacaaacacacacagtagcctaggtctacacaggatgagaatcatcaatatcactgccttccctccacatcttgtcccactgcaaggtcttcaggggctgtaacacacat

SEQ ID NO: 284651 - DNA, 561 bp, Homo sapiens
atctaaacataaaaagggttcactgaaaatacggtactcagaatgaaaaatggcacacctgtatagggtacttaccatgaatgtggcttgcaggtctggaagttgctctgggtgagtctgtaagtgagtggtgagtgaatgtaaaagcctaagatgttactgtatactactgtaggctttataaacactgtacacctaggctacactaaaattatgtaaaatatattttctttctttaataataaattaaccttagcttactgtracttttgtaattcataaagtttttaattttttaaactttttgactcttttgtaataacttagcctaaaatacaaacacattgtacagctgtaaaaaaaaaattctttttttaaattcttattctataaacttttttctatttttacatttttttcttacttttttaacttttttgttaaaaacaatgacaaacacacacagtagcctaggtctacacaggatgagaatcatcaatatcactgccttccctccacatcttgtcccactgcaaggtcttcaggggctgtaacacacat

SEQ ID NO: 284652 - DNA, 595 bp, Homo sapiens
ttcagctgaggcttaatggatcagtgagttgtcagttacctaagagaagagatgggccaagggccttctctgaaaaacaggggatgcaaaacccacaaggycagaggaggatggggtgtctgaagaactacaaggaggctagcatagctgaaacagtgaagaagcagagtggagtgcgaggaggcaagagagtggcaggaagtccaatcacatggggccagcaggtcgtggtaagcatttcgaatttcttcccaactgtaagataaatcattaaaggcttttaaatcagtactatggtctgaataatggttttaaatacttctatggctactatctaaaaagagaagcaaaagtaaaaatggggctaccaagaggaggtcatatgatctccacatgagagatggtggtggcagtgggagtcgggagaagaggagggaacctagatctagatctactttgggagcctgaaattttatcggatgtagacatgagggagaggtaggtgttaaagattactcccagatgaatggcttggaccattcatctggtggatgaacctgcctcccagtgagaaaagccatgctggaggagtagc

SEQ ID NO: 284653 - DNA, 595 bp, Homo sapiens
ttcagctgaggcttaatggatcagtgagttgtcagttacctaagagaagagatgggccaagggccttctctgaaaaacaggggatgcaaaacccacaaggccagaggaggatggggtgtctgaagaactacaaggaggctagcatagctgaaacagtgaagaagcagagtggagtgcgaggaggcaagagagtggcaggaagtccaatcacatggggccagcaggtsgtggtaagcatttcgaatttcttcccaactgtaagataaatcattaaaggcttttaaatcagtactatggtctgaataatggttttaaatacttctatggctactatctaaaaagagaagcaaaagtaaaaatggggctaccaagaggaggtcatatgatctccacatgagagatggtggtggcagtgggagtcgggagaagaggagggaacctagatctagatctactttgggagcctgaaattttatcggatgtagacatgagggagaggtaggtgttaaagattactcccagatgaatggcttggaccattcatctggtggatgaacctgcctcccagtgagaaaagccatgctggaggagtagc

SEQ ID NO: 284654 - DNA, 563 bp, Homo sapiens
ttacctaagagaagagatgggccaagggccttctctgaaaaacaggggatgcaaaacccacaaggccagaggaggatggggtgtctgaagaactacaaggaggctagcatagctgaaacagtgaagaagcagagtggagtgcgaggaggcaagagagtggcaggaagtccaatcacatggggccagcaggtcgtggtaagcatttcgaatttcytcccaactgtaagataaatcattaaaggcttttaaatcagtactatggtctgaataatggttttaaatacttctatggctactatctaaaaagagaagcaaaagtaaaaatggggctaccaagaggaggtcatatgatctccacatgagagatggtggtggcagtgggagtcgggagaagaggagggaacctagatctagatctactttgggagcctgaaattttatcggatgtagacatgagggagaggtaggtgttaaagattactcccagatgaatggcttggaccattcatctggtggatgaacctgcctcccagtgagaaaagccatgctggaggagtagcaag

SEQ ID NO: 284655 - DNA, 549 bp, Homo sapiens
agtgagttgtcagttacctaagagaagagatgggccaagggccttctctgaaaaacaggggatgcaaaacccacaaggccagaggaggatggggtgtctgaagaactacaaggaggctagcatagctgaaacagtgaagaagcagagtggagtgcgaggaggcaagagagtggcaggaagtccaatcacatggggccagcaggtcgtggtaagcatttcgaatttcttcccaactgtaagataaatcattaaaggcttttaaatcagtactatggtctgaataatggttttaaatacttctatggctactatctaaaaagagaagcaaaagtaaamatggggctaccaagaggaggtcatatgatctccacatgagagatggtggtggcagtgggagtcgggagaagaggagggaacctagatctagatctactttgggagcctgaaattttatcggatgtagacatgagggagaggtaggtgttaaagattactcccagatgaatggcttggaccattcatctggtggatgaacctgcctcccagtga

SEQ ID NO: 284656 - DNA, 549 bp, Homo sapiens
agtgagttgtcagttacctaagagaagagatgggccaagggccttctctgaaaaacaggggatgcaaaacccacaaggccagaggaggatggggtgtctgaagaactacaaggaggctagcatagctgaaacagtgaagaagcagagtggagtgcgaggaggcaagagagtggcaggaagtccaatcacatggggccagcaggtcgtggtaagcatttcgaatttcttcccaactgtaagataaatcattaaaggcttttaaatcagtactatggtctgaataatggttttaaatacttctatggctactatctaaaaagagaagcaaaagtaaaaatggggctaccamgaggaggtcatatgatctccacatgagagatggtggtggcagtgggagtcgggagaagaggagggaacctagatctagatctactttgggagcctgaaattttatcggatgtagacatgagggagaggtaggtgttaaagattactcccagatgaatggcttggaccattcatctggtggatgaacctgcctcccagtga

SEQ ID NO: 284657 - DNA, 555 bp, Homo sapiens
gttgttattcccttgtgtatccatttatagttttgcatctaaatgtggcatagtgcttccacatggtggcatttcaataaagggaatatccaagcatttttccatgctgcaggatagctttcctaatgatcacagttaatgttcttcatgaagtggatgcacattcctaacatgaagggcgttcttatatcatagagactgtgccaatgaacattatgcctacagcttcttcctattgttggatacattccttagaatcaagtccaaagtttagactcattgagtcaaggggaatgaacacatgtatgggaaaatcaacatttcaaaggggtcatgcaggaggtagtcctagctagtggcagagtggagcataattgtaagagaccacattcagctgatgaatttagattgaattaaaagattggcttaagcttgtcagcakattctttttagcaaagttgttttctggtgaaaactctttctcagttttaaattaatcttctgccttccatctcgcagctcccccaccaccttcacctcccaaacttaccatca

SEQ ID NO: 284658 - DNA, 914 bp, Homo sapiens
gttttatactctcttcaattcctaatctctcctttgcagactcaaccatcacccagggcagacaactccctaacctccrtctccagctccatgctctctagagctgccctcaaggtgtggctgcttgcgtgcctcaatggtgctttagatatcacatgtctgagatgggacagatagaaggcctcactttgccctcaaaccagctctttcttctagaggagtggaaaagccaccggttctatggatagacagacttggtttcaaaccccagcaatgctgtggattgccttgcagcaatcttcctgagtttcagtttgctcacccacaaaatgggaacaataaagcctcactgagawtagttttctaaacccaaaataaggagaaccgagactgataagtgaaaatgttaacatctattaaatctagctgttaggtgtaaggatatctgttatacatcctgtacttatctatttttctaatatttcataatgtaaaatttttaattaaaacatggcatatctacacaatggaataccattcagccatttaaaacataagggaattctatataggttatcaaagaaatgtgcacaagaaatattttagaccaagaaaacagattgctgtatagtaggagcctatgatctatttctgtttagtatcwcacacacacacacacacacacacacacacacgcgatctcttttgaatttgtatccctaaaccattccaatgggccccatactccatattttatgcctgaaatctccatttggatgtcaccccagcaatccaaaacctactaggtccaaaaccaacctcttgatcctctcctccagatgttctcaccttctgcttctgctctttcccatctccggatgtgccaccacccttgcccaggtgatcaagtgaaa

SEQ ID NO: 284659 - DNA, 558 bp, Homo sapiens
tagttttctaaacccaaaataaggagaaccgagactgataagtgaaaatgttaacatctattaaatctagctgttaggtgtaaggatatctgttatacatcctgtacttatctatttttctaatatttcataatgtaaaatttttaattaaaacatggcatatctacacaatggaataccattcagccatttaaaacataagggaattctatataggttatcaaagaaatgtgcacaagaaatattttagaccaagaaaacagattgctgtatagtaggagcctatgatctatttctgtttagtatctcacacacacacacacacacacacacacacacgcgatctcttttgaatttgtatccctaaaccattccaatgggccccatactccatattttatgcctgaaatctccatttggatgtcaccccagcaatccaaaacctactaggtccaaaaccaacctcttgatcctctcctccagatgttctcaccttctgcttctgctctttcccatctccggatgtgccaccamccttgcccaggtgatcaagtgaaa

SEQ ID NO: 284660 - DNA, 554 bp, Homo sapiens
tgtgtttcagctgttttctacctcgctttctattctaccagaaacagagggccttcatcaattaggtagaaatgagatagactttaggaggaagtttcctttgggatctcagcaggcataagcctcttcattgccccataccctgaccttcccagcttcccaacttgggcatctccatgctaccccagctcatccaaaatgaggcagracatttcccaatggcctctagcttaaggggcttaggatggagttcctaaccccgctttggatctggtgtccagctccatgcatggagtctcctgtgccccttgctccaggtctccctgtatgccagttagacccaggaaccactggactggagatagctctaggcatctgtgtatcctccataccctatgacacaacactttgcctactcctgtgttggccccactgcaaagcctgggcctctgtgtaggtttcttctctttcatcctcaggtggagctacacctcctccctagccaggggccctgccctgcatctcagccagtggacaaggaaggcccccagttc

SEQ ID NO: 284661 - DNA, 554 bp, Homo sapiens
tgtgtttcagctgttttctacctcgctttctattctaccagaaacagagggccttcatcaattaggtagaaatgagatagactttaggaggaagtttcctttgggatctcagcaggcataagcctcttcattgccccataccctgaccttcccagcttcccaacttgggcatctccatgctaccccagctcatccaaaatgaggcaggacatttcccaatggcctctagcttaaggggcttaggatggagttcctaaccccgctttggatctggtgtccagctccatgcatggagtctcctgtgccccttgctccaggtctccctgtatgccagttagacccaggaaccactggactggagatagctctaggcatctgtgtatcctccataccctatgacacaacactttrcctactcctgtgttggccccactgcaaagcctgggcctctgtgtaggtttcttctctttcatcctcaggtggagctacacctcctccctagccaggggccctgccctgcatctcagccagtggacaaggaaggcccccagttc

SEQ ID NO: 284662 - DNA, 554 bp, Homo sapiens
tgtgtttcagctgttttctacctcgctttctattctaccagaaacagagggccttcatcaattaggtagaaatgagatagactttaggaggaagtttcctttgggatctcagcaggcataagcctcttcattgccccataccctgaccttcccagcttcccaacttgggcatctccatgctaccccagctcatccaaaatgaggcaggacatttcccaatggcctctagcttaaggggcttaggatggagttcctaaccccgctttggatctggtgtccagctccatgcatggagtctcctgtgccccttgctccaggtctccctgtatgccagttagacccaggaaccactggactggagatagctctaggcatctgtgtatcctccataccctatgacacaacactttgcctactcctgtgttggccccactkcaaagcctgggcctctgtgtaggtttcttctctttcatcctcaggtggagctacacctcctccctagccaggggccctgccctgcatctcagccagtggacaaggaaggcccccagttc

SEQ ID NO: 284663 - DNA, 579 bp, Homo sapiens
tgcctaatgatttcccatctctcacaaaattgcccttgtttgttgagagaaataagcaggagcatygtggtaaatgaagggctctcttgtgaagctttccaaggcacttttctgctaaagttttggctaaatttctcaaaacactcttataataagcagatgctatcattctttggccctcaggaagccaatgaggaaaatgctttcagcattccccaaaactatggccatgatgttcactcttgactcatctgctttggctggaccacttgtaccccttggtagccattgctttgattgtgctttgtcttcaggatcatactggtaaaggcgtgtttcatcttctgttacaattttttgatgaaatgtttctggatcttgatctcacttgtttaaaattctcattgaaagctctgctctttgtagctgatctggatgcaacagttttgagtttcatcaagtggaaactttgttcaattttaatttttcagtcagaattgtgtaagctgaaccaaattgagatgtctatgatgacagctattgtttctaatgttaattgtttgtcctcttcaattaggg

SEQ ID NO: 284664 - DNA, 584 bp, Homo sapiens
taaaggcatgagtcactacacccaactgatcactgttttattctccctccttcctctgacatcaatttatcccaaaggattaatctaaggcaaycagggtaatcacatttcccagggaaggaattgggcaaagacaagagaaatttcttgagctttggaaaaagatttccttgtttctaagaaggaggtagaggaaaatacagtgctttttttccctctggatttgctgtgaagtctgcatatgaattctgcacctgctgatatataaatgataggacactaaaaagataaacaccaaaatgttagcagtgcttgcctttagtactatttaattctacatcatttgaactttttacaatgagaatgtattcattaactagttgtgtcaacatttttaaaattgtaattatgctatttaatctttatttccttaaatcctgcttgctttcttgttctaaatatttgcctgacatatcactgtcccatccttttattttcgacctttcagcatcattttaagttatccttagtacacagtcattggattactttgttgtttttactccaactgagagtctgcccgt

SEQ ID NO: 284665 - DNA, 584 bp, Homo sapiens
taaaggcatgagtcactacacccaactgatcactgttttattctccctccttcctctgacatcaatttatcccaaaggattaatctaaggcaaccagggtaatcacatttcccagggaaggaattgggcaaagacaagagaaatttcttgagctttggaaaaagatttccttgtttctaagaaggaggtagaggaaaatacagtgctttttttccctctggatttgctgtgaagtctgcatatgaattctgcacctgctgatatataaatgataggasactaaaaagataaacaccaaaatgttagcagtgcttgcctttagtactatttaattctacatcatttgaactttttacaatgagaatgtattcattaactagttgtgtcaacatttttaaaattgtaattatgctatttaatctttatttccttaaatcctgcttgctttcttgttctaaatatttgcctgacatatcactgtcccatccttttattttcgacctttcagcatcattttaagttatccttagtacacagtcattggattactttgttgtttttactccaactgagagtctgcccgt

SEQ ID NO: 284666 - DNA, 584 bp, Homo sapiens
taaaggcatgagtcactacacccaactgatcactgttttattctccctccttcctctgacatcaatttatcccaaaggattaatctaaggcaaccagggtaatcacatttcccagggaaggaattgggcaaagacaagagaaatttcttgagctttggaaaaagatttccttgtttctaagaaggaggtagaggaaaatacagtgctttttttccctctggatttgctgtgaagtctgcatatgaattctgcacctgctgatatataaatgataggacactaaaaagataaacaccaaaatgttagcagtgcttgcctttagtactatttaattctacatcatttgaactttttacaatgagaatgtattcattaactagttgtgtcaacatttttaaaattgtaattaygctatttaatctttatttccttaaatcctgcttgctttcttgttctaaatatttgcctgacatatcactgtcccatccttttattttcgacctttcagcatcattttaagttatccttagtacacagtcattggattactttgttgtttttactccaactgagagtctgcccgt

SEQ ID NO: 284667 - DNA, 585 bp, Homo sapiens
aaaatacagtgctttttttccctctggatttgctgtgaagtctgcatatgaattctgcacctgctgatatataaatgataggacactaaaaagataaacaccaaaatgttagcagtgcttgcctttagtactatttaattctacatcatttgaactttttacaatgagaatgtattcattaactagttgtgtcaacatttttaaaattgtaattatgctatttaatctttatttccttaaatcctgcttgctttcttgttctaaatatttgcctgacatatcactgtcccatccttttattttcgacctttcagcatcattttaagttatccttagtacacagtcattggattactttgttgtttttactccaactgagagtctgcccgttatgaaagggagtttaaaagtgttgacatttgttgataaaactgttacacctggtgttgctttagtcatcttattttatgacttacrttttctttgtttgctattttgtctcttgctgtatgtatggtattttgtttgcttttatcttctacagttatttggaaactagacttcctgctttaaattctatgagta

SEQ ID NO: 284668 - DNA, 585 bp, Homo sapiens
aaaatacagtgctttttttccctctggatttgctgtgaagtctgcatatgaattctgcacctgctgatatataaatgataggacactaaaaagataaacaccaaaatgttagcagtgcttgcctttagtactatttaattctacatcatttgaactttttacaatgagaatgtattcattaactagttgtgtcaacatttttaaaattgtaattatgctatttaatctttatttccttaaatcctgcttgctttcttgttctaaatatttgcctgacatatcactgtcccatccttttattttcgacctttcagcatcattttaagttatccttagtacacagtcattggattactttgttgtttttactccaactgagagtctgcccgttatgaaagggagtttaaaagtgttgacatttgttgataaaactgttacacctggtgttgctttagtcatcttattttatgacttacgttttctttgtttgctattttgtctcttgctrtatgtatggtattttgtttgcttttatcttctacagttatttggaaactagacttcctgctttaaattctatgagta

SEQ ID NO: 284669 - DNA, 1035 bp, Homo sapiens
ttcctcactagtactaataagatagatcctgggctctcttttccatattagctatttctaatcttttatttatatttttattctgtttctgttataatttttctaatttattctttcattagggctgggcatggtggttcatgcctataatcccagtactttgggaggccaaggtgagaagattgcttgaggcttggartttgagaccagcctaggtaacatagcaaggccctgcctctacgaaaaaaaataaataaataaaaatagccaagtgaggtggtatgtgcctgtatttccagctactctggaggctgaggcagaaggatcacttaagcccaggagtttgaggatacagtgagctatgatcatgccactgcactccagcctaggcaatagagtaagacttgtctctaaaaaaattttttttaaatcctattattaatatactttttctacagtgttatatttgttatttttctacaccaaaaatggctgccaatgtgcactacatttttaawttcctcactagtactaataagatagatcctgggctctcttttccatattagctatttctaatcttttatttatatttttattctgtttctgttataatttttctaatttattctttcattagggctgggcatggtggttcatgcctataatcccagtactttgggaggccaaggtgagaagattgcttgaggcttggaatttgagaccagcctaggtaacatagcaaggccctgcctctacgaaaaaaaataaataaataaaaatagccaagtgaggtggtatgtgcctgtatttccagctactctggaggctgaggcagaaggatcacttaagcccwggagtttgaggatacagtgagctatgatcatgccactgcactccagcctaggcaatagagtaagacttgtctctaaaaaaattttttttaaatcctattattaatatactttttctacagtgttatatttgttatttttctacaccaaaaatggctgccaatgtgcactacatttttaa

SEQ ID NO: 284670 - DNA, 943 bp, Homo sapiens
ccagggctggagacatgaatgtaattcacccagttccagtttggaaagggagaggacagtagatttttttattcactgaatgaccaggctccatattgtaagacctatatttatacatttgacttactttgaagattcttggactctgttaaagatggatgcttcgaagaaagactctccatgaagcacctaatccattaaatgcccacaaatcgaatggtaagttctgtccttgagtagaaattaaaataccttgagtgactagagctagaaatccaccatataccgcagtgagaaattatgaaaaagctcaatgcygactgccatctctcaagaggctagatgtcagttctgacccattgttaaggacattacttcattttcttcagaatcttgagaacgcwttcattttcttcagaatcttgagaacgcacaaatcttgcttatatataacaaggatgcggtggggtagtatagtgtctaaattcttgggtcaaatgtgaaaaagatgtgattcccttggaagcaatgtatgaccacttattcatgctcctagaaatatgaaaaacaggcagaaaggattgaaaacaaaagtggaatcatttccaggcagagactgagccaagaaaggggcccaggtcctctcctttacccagagtacccttcagctttggcatcccgtcccttgaatcacagtcattgtctggctctaatgcaaacactggctccattgtgawtctgcaggggcacagccccacatgcactgctttctacccgcctggggcttcttgagcttatcccattgagctgtgactcaggcagtcagccagaagagcctctatgtagggtggtgcctggggatctgtgctgattgcacaacggctgccaggtaaatccctttgccatcccatgggaaatgtcaaatcaggggcaaagtatgggt

SEQ ID NO: 284671 - DNA, 548 bp, Homo sapiens
agatgtggtaggtgcaggaagttgaaataagagacaagcctggagagagatttcagagcagttggtgaaaggattctaggcagcatttagcccaggatgcttctctttctttctggggggctaaatccaagaaggtgtattaaggtctgtcataaagagagagctgcacctctaatgtatctatgatgggacaattagcaatacagaatagaaattgctagggcaatagaatcacaacagtctatgtggttgagaagtctggccagcagcatttttggtcagagtkgtgcccagtgtgacacaaaccagcaatggctgccaacatctggatcaccatgagctccgaatgtgtatctgcaggcagcgtgtcagccaaggaagacggtctcagcgggtcagcgctattattccactagctcttcctcatttgagagccccagggcattggatttggtcatgtaaaatgatgttaaatggaactctttcttatgaccccaaattttggcaaagaagccttaaagttgaagacatgtgagaagtccccacat

SEQ ID NO: 284672 - DNA, 548 bp, Homo sapiens
agatgtggtaggtgcaggaagttgaaataagagacaagcctggagagagatttcagagcagttggtgaaaggattctaggcagcatttagcccaggatgcttctctttctttctggggggctaaatccaagaaggtgtattaaggtctgtcataaagagagagctgcacctctaatgtatctatgatgggacaattagcaatacagaatagaaattgctagggcaatagaatcacaacagtctatgtggttgagaagtctggccagcagcatttttggtcagagttgtgcccagtgtgacacaaaccagcaatggctgccaacatctggatcaccatgagctccgaatgtgtatctgcaggcagcgtgtcagccaaggaagacggtctcagckggtcagcgctattattccactagctcttcctcatttgagagccccagggcattggatttggtcatgtaaaatgatgttaaatggaactctttcttatgaccccaaattttggcaaagaagccttaaagttgaagacatgtgagaagtccccacat

SEQ ID NO: 284673 - DNA, 548 bp, Homo sapiens
agatgtggtaggtgcaggaagttgaaataagagacaagcctggagagagatttcagagcagttggtgaaaggattctaggcagcatttagcccaggatgcttctctttctttctggggggctaaatccaagaaggtgtattaaggtctgtcataaagagagagctgcacctctaatgtatctatgatgggacaattagcaatacagaatagaaattgctagggcaatagaatcacaacagtctatgtggttgagaagtctggccagcagcatttttggtcagagttgtgcccagtgtgacacaaaccagcaatggctgccaacatctggatcaccatgagctccgaatgtgtatctgcaggcagcgtgtcagccaaggaagacggtctcagcgggtcagcgctattattccactagctcttcctcatttgagagccccagggcattggatttggtcatgtaaaatkatgttaaatggaactctttcttatgaccccaaattttggcaaagaagccttaaagttgaagacatgtgagaagtccccacat

SEQ ID NO: 284674 - DNA, 579 bp, Homo sapiens
aacttatcatttttacaaaattttgccattataaataataatgcaatgaagattcttgtatttacatctgtgcatattttatgatttcattattatacactttttgggatggaattgatttatcagggttatcaaagttataagccttaaaactcttaatgctgccaaattgctttctacaaacattttaccgatttccatttgcaccagcagtatacaagattcccacacttccaccaacaatgagtgtcacctctattaacactgagtgtacsccagaactcccagtcttctactgtttcaacttgcaatgtaacagataaccaaggaccactgctgtgccagctaccttcttcctgtccctccagatctactctctgcccttctcctccctgctctgtacccaggaagctggcaattgtggactgcatcaatggtcttgcttgcaccccagcttcctgttgggtaatgtcagtggaaagtactggtgggagatggaaggaagcaggaaaagtgaggtcagaatattgatttcgctgggtccctcccttctgaattgctgtgggttggttacgtccc

SEQ ID NO: 284675 - DNA, 605 bp, Homo sapiens
aaggaagataaggaggcttctagcaattgctagccccaagactcygcattatctatccctcattggtttctctacactttcctcacacctttgtacatactctctttattaaaccctccttgaatactcagttgaaattcatcatcagtttcctgtgaggaccatgaatggcacagccagacagacattaaataacctgacattaaaaagaaaggccaagattgaccaataaacttacttcaaaggaaacacgtactttagaacagaagaaaacttgctataaaaagaaaattctaattctaattaatatcttcaaaaaatattgagacaatgttatagccataaaataattattttaagagtaacattatgaaaacaacaaccagaaagaaagattttggaaatgaaaacaaaattaattgccaaaacaaaaaaaaagttagggttagacgataaagtccagaaaatattttaaaatgtgagagctattaaaattatcacaaatatgaatgaaaacagaagaaatataaagaattgacacaaatgatccagtgtccaaccagtgggagtcctcaaaagagaacagaacaaaaaaaaacaaggga

SEQ ID NO: 284676 - DNA, 605 bp, Homo sapiens
aaggaagataaggaggcttctagcaattgctagccccaagactccgcattatcyatccctcattggtttctctacactttcctcacacctttgtacatactctctttattaaaccctccttgaatactcagttgaaattcatcatcagtttcctgtgaggaccatgaatggcacagccagacagacattaaataacctgacattaaaaagaaaggccaagattgaccaataaacttacttcaaaggaaacacgtactttagaacagaagaaaacttgctataaaaagaaaattctaattctaattaatatcttcaaaaaatattgagacaatgttatagccataaaataattattttaagagtaacattatgaaaacaacaaccagaaagaaagattttggaaatgaaaacaaaattaattgccaaaacaaaaaaaaagttagggttagacgataaagtccagaaaatattttaaaatgtgagagctattaaaattatcacaaatatgaatgaaaacagaagaaatataaagaattgacacaaatgatccagtgtccaaccagtgggagtcctcaaaagagaacagaacaaaaaaaaacaaggga

SEQ ID NO: 284677 - DNA, 573 bp, Homo sapiens
tctttagtcttcacaacaactctgtgaagtattattaaactcagttttaaaacttggagaatgaggctgagaggttaaattaagtgccttaggtcactggttagggtggaattcacacacaccaaacaatagctaattgaacgatgccatctgtggtctgtgccaggrgagtggtgcacatggtaattgcttcaggggtgtaaacagacaaggtagaggttccaaaccacctttgtaataaatgaaaaaaatatcagtcatcttcatgtgttgtccctaatgccattttactgggaaacagagcattacttctctcaaagcacttttctggacatagatattccagaagctttccttgattgctcgtataaacttcctgactgggccgggcgtggtggctcatgcctgtaatcccagcactttcggaggccaagatgggtggatcacctgaggtcaggagttcaagaccagcctggccaacacagtgaaaccctgtctctactaaaaatacaaaaattagctgggcatcgtgagagacacctgaatcccagctactcaggaggttgaggtagg

SEQ ID NO: 284678 - DNA, 573 bp, Homo sapiens
tctttagtcttcacaacaactctgtgaagtattattaaactcagttttaaaacttggagaatgaggctgagaggttaaattaagtgccttaggtcactggttagggtggaattcacacacaccaaacaatagctaattgaacgatgccatctgtggtctgtgccaggggagtgrtgcacatggtaattgcttcaggggtgtaaacagacaaggtagaggttccaaaccacctttgtaataaatgaaaaaaatatcagtcatcttcatgtgttgtccctaatgccattttactgggaaacagagcattacttctctcaaagcacttttctggacatagatattccagaagctttccttgattgctcgtataaacttcctgactgggccgggcgtggtggctcatgcctgtaatcccagcactttcggaggccaagatgggtggatcacctgaggtcaggagttcaagaccagcctggccaacacagtgaaaccctgtctctactaaaaatacaaaaattagctgggcatcgtgagagacacctgaatcccagctactcaggaggttgaggtagg

SEQ ID NO: 284679 - DNA, 500 bp, Homo sapiens
ccatacactgggcaaggcactgggcaaggcactgggcaaggcactgggatgaaacagtggaaaagatgaacacagtttctactcaaattgagcttaaaacctagtgggaaaagtaatacaaagtcagttaataagcaaaagaactgatgaatgctatgaagcattcagatgcattcaacaaatatkatgatgaatgctgttgatgaacgctgtgaagttaactgggtagtgaaaaatggtggggggcacacattaaatggaatgttaggtgaaggtctccagggagggcaggagtccagaaaacaggtgaaggcaatgttactggcctcccggaccttggagattggagaaagtgtatgccaagcctctagcccaggacccagcacatacgagatactcaggatagaagttgaggtgaccattttgtgcttgcaccctgctctctgccctgagttaatctggtctacttctggtggtgccattcttagttcctccaaggt

SEQ ID NO: 284680 - DNA, 608 bp, Homo sapiens
ttggtatatgatgatttattaggggaacttacagacagaaacgtggtcttgggtggctgcaagacaggtcgatatctacactgttacttcccagacccaaggcttgtataccataggggaaaggtatacatgctccagcaagacaattcaaggcaaccctccagaacaccaagaatgttatatgtgtcatagcctataatttatgtgataacatcaaggttgctttgatctaaaatcgggatttgtagtgagcacatattcttacactaaggacaataaattaagaagaaatcaggaggcattcacagaaatggggtcattcagaagtcaatggtggattaacatccaagatggagtcattttgtctcyacacaaagagatctggttatttttgtggcatacaagatttaacattacgattatgactggtaacataaaccaagacatatcagatttctaggactcgcgtactattttggaacacatattacacatttatacaaatataactcaaggaaaactaaacaccattttgtatttgccaatgcttcccatgtgattttaacatactgagtatgcctaatacgtctctctggaccttccaaagg

SEQ ID NO: 284681 - DNA, 1091 bp, Homo sapiens
gctatattttggggtattggtttctgagccccagcactgcaattaatatactggtacatgggtccctttacatgtttgcaataactgttggataaattcttaaaagggagscaagaattcatatgtatttgtgattttgatagctagtgggtggcaaattgccctccgaagtggttgaaacaactaacacatccatcagcaatgtatgagagtggtttgctatccactatttggctatttgccagtctgataaggggaaagtggtatctcctgtagtattattagttttcatttgcatttatctaattttgagtgagctcaagcatcttttcacatgcttcagaactgaaccttcagggactgggctaggatgaagtgagtgcagtgccttgggtgaagaatttaaggaggcatttactaagttctccaggtctacttcacttacgtgccctaagcacctcccctacccaccctggtcccagctctgtgcagtgccctcctcgccctcgccctcaccctcgcccaggaaccacttacattcctttwgctatattttggggtattggtttctgagccccagcactgcaattaatatactggtacatgggtccctttacatgtttgcaataactgttggataaattcttaaaagggaggcaagaattcatatgtatttgtgattttgatagctagtgggtggcaaattgccctccgaagtggttgaaacaactaacacatccatcagcaatgtatgagagtggtttgctatccactwtttggctatttgccagtctgataaggggaaagtggtatctcctgtagtattattagttttcatttgcatttatctaattttgagtgagctcaagcatcttttcacatgcttcagaactgaaccttcagggactgggctaggatgaagtgagtgcagtgccttgggtgaagaatttaaggaggcatttactaagttctccaggtctacttcacttacgtgccctaagcacctcccctacccaccctggtcccagctctgtgcagtgccctcctcgccctcgccctcaccctcgcccaggaaccacttacattccttt

SEQ ID NO: 284682 - DNA, 583 bp, Homo sapiens
ggtgttcctgggggtcattggagtctgactttgagtcccacttgtgacactaatctcttaaaagaaaaaccttagacaaataagagtttaatagagcaaagaacagtttgtgaatcgggtagccctcagaagcagaacaggttcagaaagactttggggctgccacatgactggacacttatggacacaaaaagggaaggattgtacagaaaacagaagtgacttatagaaacagctggctcacttagagcttggagttcgctaaagcgaataaatttgaacctggtttgaatacgtggccacctgtgattgactgaaacttggctgccctgattggctgagactcagttatctgttacaaagccaaattcctaaattagatttatggtttgtttacagagttaggttttggttacataagggcttgagtatgcaaatatggaggctttctcaaatcacgtttcgtttaatttaacaccttcataaataggatggacttaagagatcatcccaacctycttactgtacagatcaagagatgggggtccggaaagctgctgatgttcatgctgtgagtttaaca

SEQ ID NO: 284683 - DNA, 514 bp, Homo sapiens
gcttttaactcgtaaacactggtcactcaggcacctgtttctatagaaacagaggtgacctttaggacagacaggtcttcactgacagccccagaactccaactctggtttccagacaatggccagaccctgacctcagttctggctacattaaactggagatttyagtctttcataggtccactcggttgggtagagttggaaggtcttttctcccttgtcccatttcccccttctcttacctcccaccaagtgtctgttgctgcaagaggccagttaagggtgtcttttccttctaataatctcagtgtttgggcacagattaaccaagcccaaacaacagaactaactcaaaaacaaaagctaagctccagccctgatgcagtgaatacacgtgtttgtaactcctctgtcaactacctcctaacctcctgcctgtctctaaagacaccataaaaggagaaatcagagccgaaagaacctcactgcagagtagatcagtgtattaatttat

SEQ ID NO: 284684 - DNA, 566 bp, Homo sapiens
gccctgttggtggtgctgccctgttaaaagtcagttaggatggccctgaatgtgagttttgctaggctattaatgaccgtttatttggccaacaagtgttacaaacacgtgattaagcaaaggtaagcaaattctttattacaggagttctcagagctcttactgtactgacatgaattataaatctttaaaaggacggtatrgtaactagactccagcaaaagggtcatagaaccatttttaaattggtggttgttgttagatctcttggcactaacattcttgaaaatatgcttggggaaatgctaactcagaaattaacgtttgctgaacccagagtccactgggttacccctaggtgaacttctagttcccgaagttggcctttggatgagtcatcttcccccatcaggttcaactatgtgaggatcattctgcagtcactcatgataaccatttctcagtttaatggtacaattccatattgccttacattttatataagttgtaagctcataaaacatctttgtatatttggaatgtactaaagactgcaagttaaccca

SEQ ID NO: 284685 - DNA, 566 bp, Homo sapiens
gccctgttggtggtgctgccctgttaaaagtcagttaggatggccctgaatgtgagttttgctaggctattaatgaccgtttatttggccaacaagtgttacaaacacgtgattaagcaaaggtaagcaaattctttattacaggagttctcagagctcttactgtactgacatgaattataaatctttaaaaggacggtatggtaactagactccagcaaaagggtcatagaaccatttttaaattggtggttgttgttagatctcttggcactaacattcttgaaaatatgcttrgggaaatgctaactcagaaattaacgtttgctgaacccagagtccactgggttacccctaggtgaacttctagttcccgaagttggcctttggatgagtcatcttcccccatcaggttcaactatgtgaggatcattctgcagtcactcatgataaccatttctcagtttaatggtacaattccatattgccttacattttatataagttgtaagctcataaaacatctttgtatatttggaatgtactaaagactgcaagttaaccca

SEQ ID NO: 284686 - DNA, 566 bp, Homo sapiens
gccctgttggtggtgctgccctgttaaaagtcagttaggatggccctgaatgtgagttttgctaggctattaatgaccgtttatttggccaacaagtgttacaaacacgtgattaagcaaaggtaagcaaattctttattacaggagttctcagagctcttactgtactgacatgaattataaatctttaaaaggacggtatggtaactagactccagcaaaagggtcatagaaccatttttaaattggtggttgttgttagatctcttggcactaacattcttgaaaatatgcttggggaaatgctaactcagaaattaacgtttgctgaacccagagtccactgggttacccctaggtgaacttctagttcccgaagttggcctttggatgagtcatcttcccccatcaggktcaactatgtgaggatcattctgcagtcactcatgataaccatttctcagtttaatggtacaattccatattgccttacattttatataagttgtaagctcataaaacatctttgtatatttggaatgtactaaagactgcaagttaaccca

SEQ ID NO: 284687 - DNA, 603 bp, Homo sapiens
ttcatctcctacaacttgctttctcatttcatctaccaagaccccattccctctctccccagctcctcactttctgaagcgctagaactatccaggtgcattgcattgtaagtaatcaaagtgtttgtgaaaggcagcctcatctgggcaagggttttgggtcctcacttctcttggcttcctcccaactatctgtatcttttgagatactatcttttggggccagaattttattcctcaatatttgcaaccatactgcagaagaacattytgagggggggaaaaaaaaaaagctaaacgtgagacaattacagcagaatctccgaatggccacaagaaaagaacccagaggaatggccttaactctgggctcctcccaccagtagacactggggacactgggtccaccttctccgatctgcagctaggagataaataaacctgaggacaagggacttcttaacaaaactacctggcatcctgttgccttagagaacaccctagttcttctcataaaattatgtaatgacttctctagaccctgcatagacttcctacccactgcccccaacccttgtgtctgtgtgagatagggtcttgttc

SEQ ID NO: 284688 - DNA, 557 bp, Homo sapiens
ttaacagggaagtcaggtacccaaggtcayaaagttagactgcagcatgcctcggatttgaaccccggttgaagtcttgtgatgttaacattttatggcccgattgctgtcacaggcttaagatagggaccattcaacctgacagcagacgtctctctctctcttttgccatacctagaattatgcctgatatgcagagagtactcgccaaatatttgagtgatgaattcattaactgcaagctgagccctttaaacaagcttgtccaacccgtgtcttgtgggccacatgtggctcaagacggaatgtaaatttgtaaactttcttaaaacattgagatttttttacattttttttttttttttagttcatcagctattgttagtgttagtgtattttatgtgtggccccagacaattcttattccagtgtggcccagggaagatcggacacctctgcctttaagcttggtatctggtctagctcacctagactccatttgggtattccccccttttaggcctccctaatagtgctgttcctatggggaggctggg

SEQ ID NO: 284689 - DNA, 557 bp, Homo sapiens
ttaacagggaagtcaggtacccaaggtcacaaagttagactgcagcatgcctcggatttgaaccccggttgaagtcttgtgatgttaacattttatggcccgattgctgtcacaggcttaagatagggaccattcaacctgacagcagacgtctctctctctcttttgccatacctagaattatgcctgatatgcagagagtactcgccaaatatttgagtgatgaattcattaactgcragctgagccctttaaacaagcttgtccaacccgtgtcttgtgggccacatgtggctcaagacggaatgtaaatttgtaaactttcttaaaacattgagatttttttacattttttttttttttttagttcatcagctattgttagtgttagtgtattttatgtgtggccccagacaattcttattccagtgtggcccagggaagatcggacacctctgcctttaagcttggtatctggtctagctcacctagactccatttgggtattccccccttttaggcctccctaatagtgctgttcctatggggaggctggg

SEQ ID NO: 284690 - DNA, 579 bp, Homo sapiens
aaagaatgacgggtgtcttaaaagaggtctatttggggcacgacagggagaggaagccaccctctctggggaccaagagtaacagcactatagaagaaatgacaccgaagctgtgtcttgccaggtgaacagctatttgccatgtgtacagataggaaaaggtattccccatagaaaaayaagtagggacagagcccagaggcatggcctattcagagagctgtacgtggtttggtatggttggaatgtttgctttaagaatggagaggtaggcaggggctagatcatggaacatactgaatgccatgctaaggaatttggacttttatctgtggacaatggggagaggcagagtgggcacagaggcaggggaataatttatattttagaatccctctgacggtaaaatgaaagctcacctgaaaaagaataagaaaaggaaggaagactagttagtagaccactgcaatggtccaaagaagatgatgtgaaatgaagctcttctgagacttcaagaataaatagaactgggtcaccaatgatcatggagaggtgggaatgaagaaggcatccagctgg

SEQ ID NO: 284691 - DNA, 579 bp, Homo sapiens
aaagaatgacgggtgtcttaaaagaggtctatttggggcacgacagggagaggaagccaccctctctggggaccaagagtaacagcactatagaagaaatgacaccgaagctgtgtcttgccaggtgaacagctatttgccatgtgtacagataggaaaaggtattccccatagaaaaacaagtagggacagagcccagaggcatggcctattcagagagctgtacrtggtttggtatggttggaatgtttgctttaagaatggagaggtaggcaggggctagatcatggaacatactgaatgccatgctaaggaatttggacttttatctgtggacaatggggagaggcagagtgggcacagaggcaggggaataatttatattttagaatccctctgacggtaaaatgaaagctcacctgaaaaagaataagaaaaggaaggaagactagttagtagaccactgcaatggtccaaagaagatgatgtgaaatgaagctcttctgagacttcaagaataaatagaactgggtcaccaatgatcatggagaggtgggaatgaagaaggcatccagctgg

SEQ ID NO: 284692 - DNA, 527 bp, Homo sapiens
aggatattacccggtatttggagccctgatatttaaaagccctctgaccatgaaaaaaaaaaaaatgctggtgactatacaagaaaatttaggttactaagagtaaagcaactaaaagstaaaagtttacactcgaatacaagttaaagatttaaatcactcttgaattttgtttccttggaaaagccattgatataatagtgaagagtttttaaaaagtaataaactcaaaagaaaaagaaaatagaaaaggagttaacggttacaaaatttaggaaaccggaaagcagaaggactcattgtaatgacttagccgacccaagaaagctgatcctaagcagcaataaaagcagcaaagctacgcagcattacggagtctccaaaaggtaactttggaaatgggggagaaagcagacctaaaaccgggacaactatctctaagagttgtaagaagtagttagaggttctgctttccagaatggttatcagtgcctctgaaaatcaactcttccataaaagcaaaaggc

SEQ ID NO: 284693 - DNA, 527 bp, Homo sapiens
aggatattacccggtatttggagccctgatatttaaaagccctctgaccatgaaaaaaaaaaaaatgctggtgactatacaagaaaatttaggttactaagagtaaagcaactaaaagctaaaagtttacactcgaatacaagttaaagatttaaatcactcttgaattttgtttccttggaaaagccattgatataatagtgaagagtttttaaaaagtaataaactcaaaagaaaaagaaaatagaaaaggagttaacggttacaaaatttaggaaaccggaaagcagaaggactcattgtaatgacttagccgaccsaagaaagctgatcctaagcagcaataaaagcagcaaagctacgcagcattacggagtctccaaaaggtaactttggaaatgggggagaaagcagacctaaaaccgggacaactatctctaagagttgtaagaagtagttagaggttctgctttccagaatggttatcagtgcctctgaaaatcaactcttccataaaagcaaaaggc

SEQ ID NO: 284694 - DNA, 518 bp, Homo sapiens
gccacatattgcataattccatttacatgaaatacccagaatattcaaatccatggagaaagaaagtaaattagtggttgccagggcctgaagagaggggataatgtggagtgactgctaataggtatcagcttccttcttaggatmaggaaaatgtttgcaatcatatcatgataatagttatataattgtgaatatactaaaacaactaagttggtgacttttatcatatatgaattttatttcaataaagttgtgattttacaaaaaggaaaagaagtaattagttttctagattcacaggaaatcatcaaataaataagacaatttctgtttccagattgcaggagtctatcaagtgcccaggaaaatggtgtcaggactgggatttgatctttccctacttacaatcaataagttatcctgttactgtttcatggatacaaacagaagacagaagatttctgagtgagagataaaaaagagcaagcagcatgagcattatagtatgtgtcagt

SEQ ID NO: 284695 - DNA, 518 bp, Homo sapiens
gccacatattgcataattccatttacatgaaatacccagaatattcaaatccatggagaaagaaagtaaattagtggttgccagggcctgaagagaggggataatgtggagtgactgctaataggtatcagcttccttcttaggataaggaaaatgtttgcaatcatatcatgataatagttatataattgtgaatatactaaaacaactaagttggtgacttttatcatatatgaattttatttcaataaagttgtgattttacaaaaaggaaaagaagtaattagttttctagattcacaggaaatcatcaaataaataagacaatttctgtttccagattgcaggagtctatcaagtgcccaggaaaatggtgtcaggactgggatttgatctttccctacttacaatcaataagttatcctgttactgtttcatggatacaaacagaagayagaagatttctgagtgagagataaaaaagagcaagcagcatgagcattatagtatgtgtcagt

SEQ ID NO: 284696 - DNA, 570 bp, Homo sapiens
tagtatttcattaaatgtctattagctgatgatataaaagaaaagcaaacacttataaggacatgggtatggattcttactaattgatgaaaaacattcaaactttacggcaacacagtttgcagataataattgctaaaagcctgaaacagacattttccaggatgtgagtatattaatagggttctgatgttactaggactactggatactactttgcatttgttctctgcatttgcctgaaattccctcattgaagttgttggaaccactgacggcttcagtttaaataatcagaagtacatttgcttcccaggctgaacttctgtttactttgcagctttcaaagggtaaagtgtccttttctaaatatttgattggatgcccagaattcraattgatttctctacttctctgacttgtggctgagaaagctgtcacttgcagacagttttccctaagatgtgcgtctgcatctgaaatagtgacacaaagcctctcctggccacatagagttgaaagaaatagccaggcttgcaagaaaagttaatgaaaggtgacaagccttac

SEQ ID NO: 284697 - DNA, 563 bp, Homo sapiens
cggcctggaatgggggcctcaggacttacctgctgccctatcctgtggtggatgagacaaagacctgtttcctcttccctctcctttcctcaagtggaaggaaggagtttctcccatagaggcaagctgcactgcctggggttggaggaggcggagtgtaaacactcctttgaccaacctggctggtgtctcactaggtttcgtgccccccaagtccactagctccaagcctaacatagcaccagaacattcccagcgattacacggcttgtggcctagactgcctttcaggtayatttaggaccccagagtacattagcccaccgtggcaagccttgccataactcaagttccaaccactgggatggatgagtgccctttgaactaggcctagtctcaatgctccctccatggcaacagctgggttctgcctggtgttgctttccactgtgacagggcagcactgagttccaatacaaagtcccacatcactgtgctctccctcccaaaagcgctccgactctctgcaccccatggctgctgctggggaataggagaggatt

SEQ ID NO: 284698 - DNA, 582 bp, Homo sapiens
gtattatatagtcatattcactatgccactattatttttgtttaacaaagatttatatggtatttactatgggatagaccttagtcatttcatttctatagcaacmttattagacagataccattatcacataatctctgcttcaggtacaaaaattaaagcatagagaggttaagtaacctccttaagatcacaaagctagcatgggtagacctggttgaaaacctagggcatttgtcctcctaaccattgtattgtcccacttcccgggagtcatgattatttcttctcctactttactctcatggttttcttctattcattttttccctcctgaaaaaatgtttcttttgctacacactgaatttaactcttacctgctacaattctttactagccttctcaattattagtgatttcagaaattttaggagtgaagacagataggagcaccatgctgaaatcacccgacaaaagctgacagttactctgaagctactagcatgctgttcatgtaagtggatgcagctgactcgccttttctgttttggaatcaaaggcgattaagtatcaaacttgaaa

SEQ ID NO: 284699 - DNA, 606 bp, Homo sapiens
ttttttccttttctttttactttaaaaaattggtatataataaatgtacataycttggggtacatgtgataatttaatacatttatgtaatttcaaaagatcaaatcagtgtaactggaatgtcctcaccttaaatatttgtcttttctttatgctagaaacattcaaattattctcctctagctattttgaaatgtacaatagattattgttaactatagtcaccctactgatctatcaaatactagatctatttcctctatcaaactgtatatttgtttccattaatcagcctctctgtgcttcctgaaacaaagacatctaaccagaccttggatggattcttgttctgggctgaaaagcttgaagaagggagagcagctgcaaggacagcagcattggagtgatttagtctttccgttctgcctctagctccttagctgaaagctttttctttgcctttagaggaacaaagacctctgggtccttaaggtccccagagaaccacttggtccccacagtgcaagtcatccagtgtagcatatggctaaaactaccaaaacatcagaagggtcaaaatgattctgaaaattgaggcaaatcgtc

SEQ ID NO: 284700 - DNA, 606 bp, Homo sapiens
ttttttccttttctttttactttaaaaaattggtatataataaatgtacataccttggggtacatgtgataatttaatacatttatgtaatttcaaaagatcaaatcagtgtaactggaatgtcctcaccttaaatatttgtcttttctttatgctagaaacattcaaattattctcctctagctattttgaaatgtacaatagattattgttaactatagtcaccctactgatctatcaaatactagatctatttcctctatcaaactgtatatttgtttccattaatcagcctctctgtgcttcctgaaacaaagacatctaaccagaccttggatggattcttgttctgggctgaaaagcttgaagaagggagagcagctgcaaggacagcagcattggagtgrtttagtctttccgttctgcctctagctccttagctgaaagctttttctttgcctttagaggaacaaagacctctgggtccttaaggtccccagagaaccacttggtccccacagtgcaagtcatccagtgtagcatatggctaaaactaccaaaacatcagaagggtcaaaatgattctgaaaattgaggcaaatcgtc

SEQ ID NO: 284701 - DNA, 580 bp, Homo sapiens
cggttatatcattaccagacataatgtgatgactagccagtagaatataggacacggaacaggtgggttctttcctattttaaatatgaaatataatttaggtgtagtaaattttacccttttagtgtacagtcttgcaagtgttgacaaacatgtgtagtcatgtaaccaccaccayagtcaagatatggagcagttttcatcacatcaaaacatttttacttatatcagggtaatatcagatattatccatatcccttctggttaaacccttccccaatccctagcaacaactgatctgttttctgttcccctagggttacctttttcaggcaatgtcatataaatagtctcatacaatatgtagcccttttaatctggtttttttcacgtagcataacatatttgaaatctatccatgttcttttgtgttttaacagtttcttcctttttttactgctgattattatgtcattgtagggatgcaccagaatttatttattcattccccagttaagggactgctatggaatgatttccgtcccccgcagattcacatgttgaaaccctaactcccaat

SEQ ID NO: 284702 - DNA, 520 bp, Homo sapiens
tgtttttgtagtattttgttgaggatttttgcatctatgttcatcttttgcctgatgtttttgtatgtgtctgtgtgtttctgccaggttttggtatcagtatgatgctggccccataggatgagttagggaaaagtcctttctccttatgttttggcaacagttttagaaggaatggtaccagctcttctttatatgtctggtagaatttgtccgtgattccgtctagtcttgggttttttatgttggtagcctttttgtttttactgattcaattttagaactcattattgtttggttcarggattcaatttcttcctggttcaatcttggcatatttccaggaattatcaatttcttctaggttttctagtttgtgtgcatagaggtgttcatagtagtctctcagaatttttttttgtatttctgttgggttagtggtaatgtcctctttgtcatttctcattgtttttatttggctcttctcttatgttttctttgttagtctagctagcaatct

SEQ ID NO: 284703 - DNA, 573 bp, Homo sapiens
tggtaccaggtccctgcctttgttctctggccctttgaaattaggaacctgctgcactggaggagccaaggtgttcttggtctactggccacaacactccaatgagtggtgacagccaaagtgcttcacagggggtgccagcagccatggcagcatggcatagtgcgtgtgcctacacatatttctatgcatgtctacaggtggatgaataaaagatagacaaatagatggctgctggcttgttgaagaacaggagtggagtacttytgtaaaagttgtcagaataaaaatagtcccttgtgtttaaaaaaaaaacaacaaaaactctgacaaatagagccaaggaaggccatggagagaagggttcacatgcataaatacttggtgacaaaaactgtcacaaaagactgcaaaaaccacaaccttgtacaaaggccatcaccaccttacacaaaaaatacttttgcgagaatatctacccccaactgcctgtccaaacttggactggtgtcacccttgttattgatccttgtaacccaaggaaaattatctcaaaacaattatgtaatcctc

SEQ ID NO: 284704 - DNA, 568 bp, Homo sapiens
taaacttaaaatactcatgttattgttttactctttctccctttgaagtactaataaattcaagacctcttccttgatgaccccaacttttccgccttagtagtcattatttaaaatggaaccactaatgacttagaaaaacttgcatggatctctgtattgttggccttatccagacaaagcttccattcaaagaaaaataatgttgtggctgtggtctgagagggacctggagcactaatctcactgtgtttgaacacrctattgagtacatgatatccagccatgacacaaaatcctctgtgcctaagccactatgaaatagttgcacataatttactcgagtgaaattcttttaacacttgttagggcaggaaactcaacaccccacaataatgacaacagaggtggtggtataacagctgggggtcacaggcttactgtggtgcaggtccagctctcaagttacaatctgttctgggtccagcagcaaaggcctagaacagtaaacacccgattcagtgtgaaactgtgaaacatccttcccccagtctagatagtattaata

SEQ ID NO: 284705 - DNA, 643 bp, Homo sapiens
cacaatgtattcattcacttatttatttattttaacaaataattattgctatgtrccggcatttcctgggtgctggggatgtggtagtgattatagctgcctttgtaaagtttacaatcccatgggggaagtgcacaattacacaagtcatgacaataaagtgtattaagtgttacaataagcaaagtaaaggaatgaaaagctgaaacaccaatcttgtctacttattcactttgtaaattgggaatgattaacaaaaacctactttgtggggctggcatgagaaccagctgaaatcatgtggttaaaatgctttgtaaagtgtagtgactcttagttgtacctcctagtcaaatgccttatctaaataatttaaatgttgcagagaaagactgagaagaacacccctcttattttgagagcccagactctgattccacagatatcagaggccacccagggaccaaccaccaagtgctgaacaaagacactgtactgtgaatgggttactccccatgaaagccctgccccactaggtatctgtgtttcagagcagaccataaggccacaggcaggagacagccaagtacaagagacagaaagggcaatgccctacaggtctcagctcaccatgaacctgcca

SEQ ID NO: 284706 - DNA, 1243 bp, Homo sapiens
tcaacagccctgcataacactaggagtagcctcctatgcctccaaatttcttgtgtctctaacmcataaaacaaagattgggaaccttagaggtcgttaaactaacaatcccctggaaaggtcagagtatagggctgtgattaaaagtgcagacaccagagcaggatttgaactatactcaggtaacttactaattttgtgctcttacacgagttgcttaacctctccaagttttagtttcctcaactgtaaaatgaggataataataaaatcaaccacctcagccagatagagtggctcccacctgtaatcccaatactttaggaggccaaggccagacgatggcttaaggccagaagtttgagaccatcctgggcaacatagccagaccctgtctctacaaaacataaaataaaataaaaattagccaggcatggtggtgtacacctgtagtcctaactactggggaggctgagataggaggattgcttgaggccaggagtttaagaccagcctggataacatagcaagatcccgtctctacaaaaaaaaatagaataaaataaaattatcttggcatggtagtgcacacttgtagtctcagctacttaggagtctgagwtcaacagccctgcataacactaggagtagcctcctatgcctccaaatttcttgtgtctctaacacatwaaacaaagattgggaaccttagaggtcgttaaactaacaatcccctggaaaggtcagagtatagggctgtgattaaaagtgcagacaccagagcaggatttgaactatactcaggtaacttactaattttgtgctcttacacgagttgcttaacctctccaagttttagtttcctcaactgtaaaatgaggataataataaaatcaaccacctcagccagatagagtggctcccacctgtaatcccaatactttaggaggccaaggccagacgatggcttaaggccagaagtttgagaccatcctgggcaacatagccagaccctgtctctacaaaacataaaataaaataaaaattagccaggcatggtggtgtacacctgtagtcctaactactggggaggctgagataggaggattgcttgaggccaggagtttaagaccagcctggataacatagcaagatcccgtctctacaaaaaaaaatagaataaaataaaattatcttggcatggtagtgcacacttgtagtctcagctacttaggagtctgag

SEQ ID NO: 284707 - DNA, 623 bp, Homo sapiens
atttgaactatactcaggtaacttactaattttgtgctcttacacgagttgcttaacctctccaagttttagtttcctcaactgtaaaatgaggataataataaaatcaaccacctcagccagatagagtggctcccacctgtaatcccaatactttaggaggccaaggccagacgatggcttaaggccagaagtttsagaccatcctgggcaacatagccagaccctgtctctacaaaacataaaataaaataaaaattagccaggcatggtggtgtacacctgtagtcctaactactggggaggctgagataggaggattgcttgaggccaggagtttaagaccagcctggataacatagcaagatcccgtctctacaaaaaaaaatagaataaaataaaattatcttggcatggtagtgcacacttgtagtctcagctacttaggagtctgaggcaggcgggccacttgagcccatgagttcaaggctgcagtgagctatgaccctgccactacacttgcctgggcaacagagtgagaccctgtctccaaagaaaagaagagaaaagaaaggaaagtaagaggaagcacttcaaagatttattataatgataaaataatt

SEQ ID NO: 284708 - DNA, 606 bp, Homo sapiens
ttcactgcctccacactaaacagtcgactccataagacagggaatacgttttgtttaccaatgaatacacagtgcatagcaccatacctggcatgagtgctctgtcactcagtgtttgttgatttaataagtgtggaagtttgtcagcatctaagtagttggtggtgtactatattggtttcacttggtttttaaaatgaaatgcaagtcacttcttatttatatgtctcctcagctagaatataagtaggaaggttggagagagagcagatgggatggagaagggtgggtgattgtgggrcagtgggcagggtttatattacatatgttgtagtatggagagaaggaaggcttcaagttaatgcaatccctattatatgtgctgtgaactatgttagatatgaaatcctcaccacagccctgctagataattatcctcacttttatacatgggcaaattcagagagattaagtcccttgcccaaggtctcacattaagggatagtgctgaccataaagcccatgcccttcccatctagagaaattggatttggagacaggcttactcagagatttgattctgtgtcattagcaggctttcattag

SEQ ID NO: 284709 - DNA, 422 bp, Homo sapiens
actgttctcaccagttctgagagatgagtaaattcctaaagcaggaagctttgagggaggctcaagcataggcttgctttaccttgaactgaaagagacaggttattgtctgactactagctaccaggctcatggtagtcctcatgtgcctgaacactaggcaatcctgaatatgaggagaccttccttttttttttttttccaaaaaagcgactaaaaaatgataggccaacttggaaacaatacacacttctaaggatatagtcaaaacagtcaaatgtctstttctaaaaactttgttataattaactattatttattaaaatcccatatcatataaaatgacatgtgcatttaagaatgttctagagtttttctgtctcacatattatgacctagttttacttaagttccttgcatgt

SEQ ID NO: 284710 - DNA, 561 bp, Homo sapiens
attatgacatttttggacatagacacaaataatgyaatataggatttaaaatttatttaacgtgaaatgattattatatatcccacattaaaaggtaactatggaaatttttaaaaagtataataaaacatacaatctttgccttcaaggagttcttataaactaagagaaaaaaaataaacctcaaggagatcactttataatcatggaatttcaacaaaacttagcaacagagccactcagataaaactatactcacaatttgttttagcgaaaaggcttagttgttttcaaattggggctataagtgaatttatttttacacttaatagaagcatatagcattaagagggtctgacatcattctcccccatagagtaaacaaaaatttttcccgggcctgggggagtcctcactccacatgggtactatcttgggcagatgtgtgtctgtaaacaagatggtagggacaaaggaagttgtgtcttcctacttgtgtgggtacactggctcctgcttgtgtagctgctctgagcaaataaacttctttatattttacca

SEQ ID NO: 284711 - DNA, 583 bp, Homo sapiens
gaactgctgtttcttggctaagttatgtatgcatcacaaattctactacttctcaagtcaaaagttttacaaatgaattcaattcaaagcagtatagtacccttccaaatcggtatgagaatcagctaacatgtatttctcttggtgttgccttcagggtcacagaaggtccctacgcctaattctttcycttagggaataagttacagggttcagatccaaaacggtggtacctgaagagtcctctgaattctagttttaaatattctcattataaacaaatatatgcgcactacagaacaaaatcatctctgatcttgatatccagaaacagaatactctgcaaaaacaaacttggatttatcttcatttgatttatggagagatatgccaacagagacacaggcagactttttgttttgtttgaagaaaactggaatcagtttgtacacgtaattttctaatttttatttaatattatattgtggctgggcatggtagtgcatgcctgtaataccagctatttaggaggctgagacaggagaattacttcaactgggaggtggtggttgcagtgaaccaa

SEQ ID NO: 284712 - DNA, 593 bp, Homo sapiens
atgtatttctcttggtgttgccttcagggtcacagaaggtccctacgcctaattctttcccttagggaataagttacagggttcagatccaaaacggtggtacctgaagagtcctctgaattctagttttaaatattctcattataaacaaatatatgcgcactacagaacaaaatcatctctgatcttgatatccagaaacagaatactctgcaaaaacaaacttggatttatcttcatttgatttatggagagatatgccaacagagacacaggcagactttttgttttgtttgaagaaaactggaatcagtttgtacacgtaattttctaatttttatttaatattatattgtggctgggcatggtagtgcatgcctgtaataccagctatttaggaggctgagacaggagaattacttcaactgggaggtggtggttgcagtgaaccaagatcaggtcactgcactcctgcctgggcaacagagtgaggctccatcttaaaacacacacacrtatatataaattataattatgtaactctgttacaaatgtccttcagaagcatttaattaattatatatttcaattat

SEQ ID NO: 284713 - DNA, 587 bp, Homo sapiens
gccagctcggtgaactggaactcatctgggtatcattgctgggtgttccaactgactcccttgagatcgtggtgcagcagggccctctctactccatgctcaggaagatctccatgcattttcagcagctgctcacctgggtcaacagcctgaaccaccccgtcctttctggacacagatcatggtgcaggggggcactatttgctctatgcccaggcagatcttcagacatttggaatatccattcacctggatcaccagcttgagcctccacacccttcctgaacacagactgtggtgcagcaggaccctctccactccatgcctaggcaggtctccaggtgttcaaaacaccggctcaccaggattggcagcctgagccatgccacctttcctgtgcatagatgrtgttgcattagagccctctccactccacattcaggcatatttccaagcatttggagtacctactcacctggaacagcttcctgagtcaccccatctcttttgtgaagagatcccggtgcaggggacccctctgcatggcatgtccaggtaggtctccaggcattcacagaacctatctg

SEQ ID NO: 284714 - DNA, 868 bp, Homo sapiens
gccagctcggtgaactggaactcatctgggtatcattgctgggtgttccaactgactcccttgagatcgtggtgcagcagggccctctctactccatgctcaggaagatctccatgcattttcagcagctgctcacctgggtcaacagcctgaaccaccccgtcctttctggacacagatcatggtgcaggggggcactatttgctctatgcccaggcagatcttcagacatttggaatatccattcacctggatcaccagcttgagcctccacacccttcctgaacacagactgtggtgcagcaggaccctctccactccatgcctaggcaggtctccaggtgttcaaaacaccggctcaccaggattggcagcctgagccatgccacctttcctgtgcatagatggtgttgcattagagccctctccactccacattcaggcatatttccaagcatttggagtacctactcacctggaacagcttcctgagtcaccccatctcttttgtgaagagatccyggtgcaggggacccctctgcatggcatgtccaggtaggtctccaggcattcacagaacctatctgwattaaagcagaaatataaaacttctatgaaataaatgaaaacacwgacacaacataccaaaatctctgggatgcaaaaacagcagcgttaaaaacaaagtttattacactaaatatctatcataaaaagttagaaaaaaacagaaacaatgtaacataccagatagaggaactagaataacaagaactagaaaacctagagggaatgcataaattcctggaaaacacataatatctcaaaattgaatcagagagaaatggaaaccctcaacagactaata

SEQ ID NO: 284715 - DNA, 1077 bp, Homo sapiens
ggagtcctgactacaagggtggcatctgaattgcctggtgcaattgaagggagcagatcatggggtctaggtggattgcacagccactgagaacttatagttctgcatattatgatttcttagttatatgcaagggatttgttgttggccacaaactgatgtaataagaacttcctttgagcagtaaacagagtttaaacattgctacaagatacttttttaagttacttattctttcaatgcctcaatttccttgtcaatatagtargaatcataaccctattcctcatagtgttactgttagaatttgaagaaattcttcatgtaaagcccttgtacaaggactaatacttggcacacagaaaacaagtaagaaacctcagctatcattacaattattctaagggaagctggaaatttaccagtcttctggaaagttaacaagattttgtatcacatattctaagtaaatgtaatcaaagaatgattgtcagtctatttggctctacaagtagaagactttgaaagtcttagtgttgtattcacaagagagtcaaattttataactacttwtttttaaaatgcagatcacaagactaaaaatcttctttttctttaggattaagttatcaatataatcttttttgtaagcagctgcttaaattaatatacaatatgcttaaatcgaatgtaaaattgtattagaactctgtctcttaatgaggtgggtgtacctattttctagtttttgactacacgcatttaaaaacwtgttcagatactgagtagatgggaatagaaaaggctttgttgtaacaatgttacttaatactttaaacttcttctgagttatattccaaaactacattatccacaataaaattattaatttatcagcaaaaaagattctcttttaatattaaaaagataaattgctaaaatcaagtcagttacagcttacatgagttagaatttttactttccaccatccacattaatatttatgattatccttttgtttggtgttttgactgttttcccctcttgggtgttgcatctctgtatggtaaaggatgg

SEQ ID NO: 284716 - DNA, 504 bp, Homo sapiens
tttttaaaatgcagatcacaagactaaaaatcttctttttctttaggattaagttatcaatataatcttttttgtaagcagctgcttaaattaatatacaatatgcttaaatcgaatgtaaaattgtattagaactctgtctcttaatgaggtgggtgtacctattttctagtttttgactacacgcatttaaaaacatgttcakatactgagtagatgggaatagaaaaggctttgttgtaacaatgttacttaatactttaaacttcttctgagttatattccaaaactacattatccacaataaaattattaatttatcagcaaaaaagattctcttttaatattaaaaagataaattgctaaaatcaagtcagttacagcttacatgagttagaatttttactttccaccatccacattaatatttatgattatccttttgtttggtgttttgactgttttcccctcttgggtgttgcatctctgtatggtaaaggatgg

SEQ ID NO: 284717 - DNA, 636 bp, Homo sapiens
tttgttatggcaatccttggaaactacacatattgtgatatatatgacacatgtataaaaagacgttattgccagaaagtttggcattagcacatgttgttttagtcaaatgtttctcaggaaaaaaaaaaaaaaccctctattgttttctatattacttctggctrtattaagttttagaattttttaaaagttatttctttttatataatacatggcttaaataattccaaatctcttatttaaaataactcattcttttataattggtattttaagcctcatttctttcttatataacaagaatatgcaagaaagagttagtgaaagtacatctataagatctgcaaaattgtaaagtttaaataacttgagaatgggtgacaaggctaaaatttacctaagcatctttgtaaatgttcaaagatcttaccacagcaagtctggcaatcattccattctttgagtgtgtatttaatgagacaactctgatttctagtgatcttagcagggaaaagtcacatcagcttactcattgtgcttcgatttgtgacaagatgcaatctacctttcctgaaacttcttcttactttaatagtctttggtatttatattggcaggaaaataacagaaaat

SEQ ID NO: 284718 - DNA, 636 bp, Homo sapiens
tttgttatggcaatccttggaaactacacatattgtgatatatatgacacatgtataaaaagacgttattgccagaaagtttggcattagcacatgttgttttagtcaaatgtttctcaggaaaaaaaaaaaaaaccctctattgttttctatattacttctggctatattaagttttagaattttttaaaagttatttctttttatataatacatggcttaaataattccaaatctcttatttaaaataactcattcttttataattggtattttaagcctcatttctttcttatataacaagaatatgcaagaaagagttagtgaaagtacatctataagatctgcaaaattgtaaagtttaaataacttgagaatgggtgacaaggctaaaatttacctaagcatctttgtaaatgttcaaagrtcttaccacagcaagtctggcaatcattccattctttgagtgtgtatttaatgagacaactctgatttctagtgatcttagcagggaaaagtcacatcagcttactcattgtgcttcgatttgtgacaagatgcaatctacctttcctgaaacttcttcttactttaatagtctttggtatttatattggcaggaaaataacagaaaat

SEQ ID NO: 284719 - DNA, 555 bp, Homo sapiens
tctacaagtaaaatgaattagtagttgaggtataagactataatcactgaaattctctttccaaactgtcaaagaaacatttcttatttagaggtaagatagatattaaatcttatgttaaaagcttcaaatcttttgtgatgaaaagacatgaaatatagagagaaaaacatctcaaggtatattaatttaatgtagatttacacataatatggagatttaattcctcaaaaatttaaaaagaaggtatttattcacatacaggctagctattataacagacacaagaatcagagtttatttttctctcatatatcaatccacagaygagccaacatttttaggctaagtggctatgctgtagttcacttttggttttaacttatacatgaatggtagatgggacagtttctgccatctcccaataagcagtaaggaggaagggagcaagaaagtcaacatcccattgtttcaagggaaaaaattagtagtagcattcatatccccgtggccaaagcatagttatgtggctacacttagctgtgaaggagactg

SEQ ID NO: 284720 - DNA, 586 bp, Homo sapiens
tttccaagtaatcttccataactactgttttctcttctgagcattttataaatcttagctagatgtgactttgagttctttttctctgacaagagtctgacgtatggcttttgtcaggtaattccctttagccttaatagagagtaaagctgaggttgacatgctcttacgaaaaatgagaaaagtaacagagcctgaatagaaagtcatcccactcctgttcagagttaagccaagaagtaccccagacagagcaaagatttttatgaaaaatataaagactcagcttacagagcaatttggggaagcaattctacttccgratatacaacttggagaaaccttcccatacaagtacgaggaaataaaacgcatcttcaccacaatatgtttaagagtaaaggttggaaacagatgtccatcagaaggggaatggatacgttgtattatttttatttaatggagaactaaaactgttaaagtgaatagaaagaaaatggatagacctcaaaatagagagtgaacatggtaagttatggagtattatatataatatgatatcacttatgtaaaacaatggaaaaat

SEQ ID NO: 284721 - DNA, 599 bp, Homo sapiens
aaaactgttaaagtgaatagaaagaaaatggatagacctcaaaatagagagtgaacatggtaagttatggagtattatatataatatgatatcacttatgtaaaacaatggaaaaatatatcctatttatggatacacataagtggtataattttaaaacatgaacttgagatagcaggttgactgcagtgcttaccactgcggacaaagggagaatgagagcaggaaataagtaccaggagagggtatatacattatctcaacttactgatactttatttcttgaaagaaaaaatctgaaataaatataactcctgtagtgactagacactaaaatgtctcacagtaattctcacttggcatttacaatgtaatctctcactttatctgttggctatggctattaacttgcytctggagaatagattataaataaagtaatgggatatgactcccaacaatgggttacaaaagccactggcttccatcttgtttgtcttttttgctttctggcttgctcatattaatggaagtcagctcgtgctgagagctgtcctattgacaggcccactgggagtggcctctggccaacagcccaa

SEQ ID NO: 284722 - DNA, 615 bp, Homo sapiens
ttcatatatgttgactgttatttctgttagaatattttacttacatttaactgtaggaaatttacaaatcagttggtcactggttaaatgcattgcggatatattttctcagaatgtaacttaactttttactttgtcagtagtaccttttgttaaacagaattttttgattttgtgtaatgagatatagcaatattttcctttgtagtctgtgcttttcatgtcctaaaaaaaaccctttttaccttaaatttttatttccttccaaatttaaattttgattttcatatttaggtgtttaaaccacatgaaattatttttgtatgtaatatgaagtaattacctgattttatttgttttccatttttggagtggtatgtattaaccaatgtcartgatctccactgatttgtgaaaccactcacttatatatgttaaaaatatactttaaatccttcagtaacatggtttaattttttggaaaacatttttcacatctttaagcttattcctagatctcatacagtttttgtctcctcgaaaataataatatagtaagaatagcatagtgtttgttaagttggtatatagagccctatcaatctgttactgttg

SEQ ID NO: 284723 - DNA, 545 bp, Homo sapiens
attggttctttttaagttttattatgtctaattgtcttctgtgtgtcctgaaatgttttcagcattataacagcaatagcctgaatccattatagaattccaaccatgtgggactaaattaaaaggtaaaatttaaaacaagactagactaaattgttagagtaaattccagaagaaacatgagcagcatatagtgataacacatatttttgttaggtctgttttggcccagaaacattttcatagagacaaagtgtatatctgtaataacttacacatagctttgtttscaatattttaacaaatatttttagaggcttattaacagattggctctaaaaagtagcttgaatggctcctttatacaattactttacctctctatagtataatgttaacagtaatcagaatgctttctgaatgtttgtgacgcaaatttttacgcagctctctcgactatttttctttgatcggtcaataacatatgtagaataggattactactgtgaacataaaacactatctgtacaagtttattaaacaga

SEQ ID NO: 284724 - DNA, 616 bp, Homo sapiens
gaatggataatgcaattgcaacaataatggcctaaccacctcttaaagtcccacctcttaatgctgttacaatatcaattaacttttaatataaattttaaagggaagcaccttgaaatcatagccgataccctatgctattttattaaatagaaagttaattatcaatgaatatgaaatagtttttgtttacacatgcataatcatggaagcttttatccaaatttaagtaagatacatggaaaactgaaagaacctttcatatattattttactacactcaagagaatttacattattaaaatcatgtatctttatcttcagtggtcatgttgatgatgtattttagtcacagatattaaatttgattatagtagttgtcttaaacaatgacaaatcccatctaaatgtgagcttttgtataaaatattcccatattcatggaatgtatctgtacttgctatattctatttccagcgagaattagaaaacatcatgtctgatttcactttattatttatcatagtagttagatcattttagcaacaaaagctattccatttagagcaaatttagtgattrtgttgtgatgtttaaaaagtgtgatttacaaaaa

SEQ ID NO: 284725 - DNA, 592 bp, Homo sapiens
aagaacatgtgcttttttagggtgttataagagtgtctkgatacatagttggggaagaaaatgacactgatattctttgttcatattggagatgccactgtaaaatttaaaagtggacctttttgatgtaaaggcattttcatgttctggaattttcctactaaatgaaaaattcctgtggagtggttaatttttatatttcagtgttgatctcagtcctcaatctttcctggaaacatttgctgagactcccagctgaaaagattctattcttcctccaaatagagcacttaatgctcatgcaatatatttaggagttatattgcttcatttcatgctcatggataggaagaatcaatatcgtgaaaatggccatactgcccaaacttatttatagattcaatgctgtccccatcaggctaccattgactttcttcacagaattagaaaaaactactttaaacttcatatggaaccaaaaaagagcccacatagccaaggcaatcctaagcaaaaagaacaaagctggaggcctcaaggctacctgactttaaactatactacaaggctacagtaacaaaaacagcatggt

SEQ ID NO: 284726 - DNA, 592 bp, Homo sapiens
aagaacatgtgcttttttagggtgttataagagtgtcttsatacatagttggggaagaaaatgacactgatattctttgttcatattggagatgccactgtaaaatttaaaagtggacctttttgatgtaaaggcattttcatgttctggaattttcctactaaatgaaaaattcctgtggagtggttaatttttatatttcagtgttgatctcagtcctcaatctttcctggaaacatttgctgagactcccagctgaaaagattctattcttcctccaaatagagcacttaatgctcatgcaatatatttaggagttatattgcttcatttcatgctcatggataggaagaatcaatatcgtgaaaatggccatactgcccaaacttatttatagattcaatgctgtccccatcaggctaccattgactttcttcacagaattagaaaaaactactttaaacttcatatggaaccaaaaaagagcccacatagccaaggcaatcctaagcaaaaagaacaaagctggaggcctcaaggctacctgactttaaactatactacaaggctacagtaacaaaaacagcatggt

SEQ ID NO: 284727 - DNA, 592 bp, Homo sapiens
aagaacatgtgcttttttagggtgttataagagtgtcttgatacatagttggggaagaaaatgacactgatattctttgttcatattggagatgccactgtaaaatttaaaagtggacctttttgatgtaaaggcattttcatgttctggaattttcctactaaatgaaaaattcctgtggagtggttaatttttatatttcagtgttgatctcagtcctcaatctttcctggaaacatttgctgagactcccagctgaaaagattctattcttcctccaaatagagcacttaatgctcatgcaatatatttaggagttatattgcttcatttcatgctcatggataggaagaatcaatatcgtgaaaatggccatactgcccaaacttatttatagattcaatgctgtccccatcaggctaccattgactttcttcacagaattagaaaaaactactttaaacttcatatggaaccaaaaaagagcccacatagccaaggcaatcctaagcaaaaagaacaaagctggaggcmtcaaggctacctgactttaaactatactacaaggctacagtaacaaaaacagcatggt

SEQ ID NO: 284728 - DNA, 591 bp, Homo sapiens
acaattgaaatcatgaagatagagagtacaaagatggttaccagatgctgggaatggaggtggggggaataaagaggacatgggaatggttaatgggcacaaaaaaagtagtcagaaagaatgaataagacttactatttgatagcacgacaggctaactatagcgaataataattgaattgcacattttaaaaataactaaaaatatataattggattgtttttaacacaaaagataaatgctaaaggggatggataacctcattttatatgatatgattattaggcattttatgtctgtatcagtatatctcatgtaccccataaacacatacacctactatgtacccacaaaaattaaattaaaaaaataaaaaatgagtgatttagagatctcttgttctcaaaattgtgttcagatttactcagaatgttttactgctggttcttgcttgaggctactgaatgtataactgacttcagcgtctacttttaaaccaaatctcttttattgggtgtttaytgctcaaagttcatttttagcaaaaatttttctttggaggggtgggtgcataggctggcagtgagtgt

SEQ ID NO: 284729 - DNA, 546 bp, Homo sapiens
aaaacaaaacaaaacaaaaacctctctactctctttttgtggttttgcttcagatcctaacaatttccacacttctgtcatggaaaggtgtcttctaagatagaccatttggtaaatcatactcaggattcagaaactgtttttattcatcaccccaagagctgtcacttaaagaaatagcagagtaggtttgatctaaattttaggctcagaattcagaggctcagtgaaatagaaatatygagtgatgctctgatggggtctggaccagactccttgtacacataatccctcgcattctttcagcaacctctaacattcttttttccaagttttctcattcaaccttcactgatattttttcaataactttttaatgaatgcctacgatgggttaggaacaggtgatatggccatgaataaaccacaaatgatacctgacttgtggaatttacaatctgggagtattggtggaggattttaccaattggtaaattggtaagattttaccagttggtaaaatattagtagaggaacattaaacaa

SEQ ID NO: 284730 - DNA, 546 bp, Homo sapiens
aaaacaaaacaaaacaaaaacctctctactctctttttgtggttttgcttcagatcctaacaatttccacacttctgtcatggaaaggtgtcttctaagatagaccatttggtaaatcatactcaggattcagaaactgtttttattcatcaccccaagagctgtcacttaaagaaatagcagagtaggtttgatctaaattttaggctcagaattcagaggctcagtgaaatagaaatattgagtgatkctctgatggggtctggaccagactccttgtacacataatccctcgcattctttcagcaacctctaacattcttttttccaagttttctcattcaaccttcactgatattttttcaataactttttaatgaatgcctacgatgggttaggaacaggtgatatggccatgaataaaccacaaatgatacctgacttgtggaatttacaatctgggagtattggtggaggattttaccaattggtaaattggtaagattttaccagttggtaaaatattagtagaggaacattaaacaa

SEQ ID NO: 284731 - DNA, 588 bp, Homo sapiens
ataagtaatttagattacaaaaaaaatcttggcaatagtctgtaaggaacttaacagaaatgacatttcactaagtaaatctctgatagtgtgagtgaaacaataaattttactrggaaaactagaggttattttgtcagttatgaaacctgaccattaatatttattgaactgggtatatggaatttatggatattatctaccagatataatgcattataaagccatcattgtgggattttttgtagaaaaaaaatttattcaaatgacatgctagtcacatttctggttttgagtaagaatgccatatatacatatatgcatttatatatttcatttatacatagagaggaagagagagagagactggaaatttttttaaaaaattaatttgtttcaaagaaacaggctatcagtaagctaacttttctacacttatgttatttttatgactatcacagaatgctagaataatttgtattataaaatagacttaaaatttcctctgattttgtagattcctgcctgtggaaactaaaattggcacttatattcaacagaacaagcttaccagaagattcatttatt

SEQ ID NO: 284732 - DNA, 556 bp, Homo sapiens
cctggactatgcaataatacaaaaaaaaaatgatttttttcagcatctataactggcacttttttcttactcttttgattttctttcaagagcagacttgagtgagcacaggtgggtatgggtgggtatragtgtgtgtgtgtgtgtgtgtgtgtgtttatattggttaaattcactttccaagtatattattctgttctgtgtttcaaattctagcagatttgagaagtgatttggaaattagatgtataacttttctggaaatctaccactaaaatgtttcatacactataatcattttacttttattccatattgtatatggttaaacatttctgaagattaaaactataagaaataatattgtattttacgataatttctacatataaagaaaataagctcctaatgtatttatatattttctgagaagataaattcctaagtatataaagtaaaattgaggtgtattaatcattcacaacacgttactcttttttttgaaaacttgagccagtgaaataaatattattagtattctgaaaaagtgacaaat

SEQ ID NO: 284733 - DNA, 556 bp, Homo sapiens
cctggactatgcaataatacaaaaaaaaaatgatttttttcagcatctataactggcacttttttcttactcttttgattttctttcaagagcagacttgagtgagcacaggtgggtatgggtgggtataagtgtgtgtgtgtgtgtgtgtgtgtgtttatattggttaaattcactttccaagtatattattctgttctgtgtttcaaattctagcagatttgagaagtgatttggaaattagatgtataacttttctggaaatctaccactaaaatgtttcatacactataatcattttacttttattccatattgtatatggttaaacatttctgaagattaaaactataagaaataatattrtattttacgataatttctacatataaagaaaataagctcctaatgtatttatatattttctgagaagataaattcctaagtatataaagtaaaattgaggtgtattaatcattcacaacacgttactcttttttttgaaaacttgagccagtgaaataaatattattagtattctgaaaaagtgacaaat

SEQ ID NO: 284734 - DNA, 556 bp, Homo sapiens
cctggactatgcaataatacaaaaaaaaaatgatttttttcagcatctataactggcacttttttcttactcttttgattttctttcaagagcagacttgagtgagcacaggtgggtatgggtgggtataagtgtgtgtgtgtgtgtgtgtgtgtgtttatattggttaaattcactttccaagtatattattctgttctgtgtttcaaattctagcagatttgagaagtgatttggaaattagatgtataacttttctggaaatctaccactaaaatgtttcatacactataatcattttacttttattccatattgtatatggttaaacatttctgaagattaaaactataagaaataatattgtattttaygataatttctacatataaagaaaataagctcctaatgtatttatatattttctgagaagataaattcctaagtatataaagtaaaattgaggtgtattaatcattcacaacacgttactcttttttttgaaaacttgagccagtgaaataaatattattagtattctgaaaaagtgacaaat

SEQ ID NO: 284735 - DNA, 619 bp, Homo sapiens
caattaaacatctttcctttttaaattacccagtctcgggtgtgtctttattagcggcatgagtacagactaatacagtaccttatagatattgttaataattttgatatgaacattgatatacatgtatttgttttagtccctgcttatgggtatatacagaaatgtggaatttctggatcatatagtaattctaattttagccttttgagcactgacaaactgtttttcatggtagctactccattttacatttttaccagcagtgcgtgagggctccaatttctcaatatctttgccaacacttgatatttcctattttttgataataaccctcttagtggatgttaatcttgagcttttgttaaaccaaatagatactttaagtaatcacatacaaaytttttatttactaattttatgtaaattgtcacaaagttgcaattttgaatgatcttaatttgaattgtcccattatttttatttgtttggataacttccttgactctgaataggaaagtttctttacttaaaaatgatgccaaaggcacatataaacgatgtttaaccctttgtgacagcttacatggaaaagcagtgttgtcttaatacataaaat

SEQ ID NO: 284736 - DNA, 501 bp, Homo sapiens
ctgctgtttataaaaacatcagaactcatgagagttattcactaccatgagaacagtatgggggaarctatccccatgattcaattatctccacctggccctgcccttgtcatgtggagattattacaattcaaggtaagatttgggtggtgacacagaaaaccatatcaacctataaaacaaaaatacaataaatttaaaaaacaaggtattcaggcagcaaatagcacaatgaattgaatagtacacatctcaatacaatgttgaatgtaagtggcctaaatgctccatgtaaagcatgcagaattgaataatggataagaattcatcagtcaaatatctgctgcctttaagagactcatctaacacataaggactcacatgaactgaaggtaaaggggtgaaaaaagatgttccatgctaatggacaccaaaagcgagcaggatcagtcattcttatatcagacaaaataaactttagagcaacagcagttaaaaaag

SEQ ID NO: 284737 - DNA, 328 bp, Homo sapiens
agtaactttacagtgaagaaataagacaaacaccacctcaaccaggtgactaaggtgaacttcaacagtgataactcatattgataacattaaaagataaactcaggcacattaaaatgtcaatgagtttatttgaacattcagtgattcacgaatcaggcagcaccagrccataggcagttctatgctccacttggaggagagggaagcaagagacagaaaaattttacaaggtataatcaagacaaagaaatttgattggttaaagtgggatgtccctagttagaagatagttggtagtttctgattggtaaaatttaagtttggt

SEQ ID NO: 284738 - DNA, 553 bp, Homo sapiens
gagtaactttacagtgaagaaataagacaaacaccacctcaaccaggtgactaaggtgaacttcaacagtgataactcatattgataacattaaaagataaactcaggcacattaaaatgtcaatgagtttatttgaacattcagtgattcacgaatcaggcagcaccagaccataggcagttctatgctccacttggaggagagggaagcaagagacagaaaaattttacaaggtataatcaagacaaagaaatttgattggttaaagtgggatgtccctagttagaagatagttggtagtttctgattggtaaaatttaagtttggttttactgtttacactgggcttacatttgcttacctaagaattcaaggtggtggagctggcctcccartgaaaactttttttaacaattgtacatactcttgatgtgatatgatgtaatgtaactgggactttacctttctgatctgcctcccaaaaacatatatcatcagcttaatcatgaaaaaaaaatcagaattctcaggtgagggacatgctacaaaata

SEQ ID NO: 284739 - DNA, 1171 bp, Homo sapiens
atacattaggcccaggaagtagtaaagtcttaaagaaatgacaaaatcttactaaagataaattacagtggaacattctgaatgaacaatgcatggaagtgcatttagactcatccaaggatgcctattaataagcagaaacttctaaaaaggtttcaatatttttacttaaagactttatgaaatgcaaaaaaaaccttaagcgactgatttaaaaaattaaatctgctatttttagcttagttactatcccaatccaaaggaagtagactgcagcaccaattggctgactttggataagtaatggggtacattttacctgagtaaagcataggattgggttagaggccctttcctcagtaaagttccttttggttagaaatggattaaagatgatgaggcccaacgggggcaagtttaargcttgctggtttgatatcaggtgccaggcagagtggctaatgtctatgttttgtcacacatattttgctctggccagaatggaaaatgttaatttggttaccccatgcaaawaaggtttaggagaatctcaccatatggtcaaactgattaaaattgaataaatttgtctatatggttttattatawatttaggttgacattaatagtattttaatgcaagggtgaaatttggttttctcttttgaacaagattttcatgtaatattaaaagataatgaaagattttttttttttgccttttgaataaactaccccaaaaaggaagggaaagataagagacagtttgtttggaaagctgactttcctctgtcaatgagtaaatgtttctgccttttttaaaaaattttgagtctttattttggctaaatgaatgacttattgtaacctggaattctgtttcataatatgaagttaaatatcaatatgttaaacctttaacatattcaataggcttaccaaaatcaaatttcagcttcaaaaccgtcttttctgacctcttaactttgagatgatacagagggccgctgaagcatccaaaaaagaagtaaacaggattatttgacatgttaggttacataggaagcattgtcaaaataaaataatgtttaatcttcttcaggttttattttagtgaatgataatatatattccaaaattatatgggatttctaaaattttaatatgtctg

SEQ ID NO: 284740 - DNA, 433 bp, Homo sapiens
acctgcagtccaagattctcaggaggctgaggtgggatgatcatctgagcctggggatgttgaggccatagtgagctataatcacaccactacactccagcctgggctacagaatgagaccctatctcaaaaaaaaaaaaaaaaaaaaagttgggggggacatgaagtcaggaaactaaatgcatatggaactaataatayagcttcaaaatatatgaaggaaaaatgtatagaattgaaaagagaaataaaaaactctcaattatagttggaaatttcaatacttctctctcagcaatcattaaaacaaatagaacaatcaacaaggatataacctacttgacctaatttacacttactcaaacattccacctcaacacagaagaaaacattatttcctagtgcacatatagcacccaacaagattgactat

SEQ ID NO: 284741 - DNA, 433 bp, Homo sapiens
acctgcagtccaagattctcaggaggctgaggtgggatgatcatctgagcctggggatgttgaggccatagtgagctataatcacaccactacactccagcctgggctacagaatgagaccctatctcaaaaaaaaaaaaaaaaaaaaagttgggggggacatgaagtcaggaaactaaatgcatatggaactaataatacagcttcaaaatatatgaaggaaaaatgtatagaattgaaaagagaaataaaaaactctcaattatagttggaaatttcaatacttctctctcagcaatcattaaaacaaatagaacaatcaacaaggatataacytacttgacctaatttacacttactcaaacattccacctcaacacagaagaaaacattatttcctagtgcacatatagcacccaacaagattgactat

SEQ ID NO: 284742 - DNA, 433 bp, Homo sapiens
acctgcagtccaagattctcaggaggctgaggtgggatgatcatctgagcctggggatgttgaggccatagtgagctataatcacaccactacactccagcctgggctacagaatgagaccctatctcaaaaaaaaaaaaaaaaaaaaagttgggggggacatgaagtcaggaaactaaatgcatatggaactaataatacagcttcaaaatatatgaaggaaaaatgtatagaattgaaaagagaaataaaaaactctcaattatagttggaaatttcaatacttctctctcagcaatcattaaaacaaatagaacaatcaacaaggatataacctacttgacytaatttacacttactcaaacattccacctcaacacagaagaaaacattatttcctagtgcacatatagcacccaacaagattgactat

SEQ ID NO: 284743 - DNA, 433 bp, Homo sapiens
acctgcagtccaagattctcaggaggctgaggtgggatgatcatctgagcctggggatgttgaggccatagtgagctataatcacaccactacactccagcctgggctacagaatgagaccctatctcaaaaaaaaaaaaaaaaaaaaagttgggggggacatgaagtcaggaaactaaatgcatatggaactaataatacagcttcaaaatatatgaaggaaaaatgtatagaattgaaaagagaaataaaaaactctcaattatagttggaaatttcaatacttctctctcagcaatcattaaaacaaatagaacaatcaacaaggatataacctacttgacctaatttacacttactcaaacattccacctcaacacagaagaaaacattatttcytagtgcacatatagcacccaacaagattgactat

SEQ ID NO: 284744 - DNA, 626 bp, Homo sapiens
aggtcaaatctaatttcttaattatatgaggatctactgctatttttcactcttactgacatttgtgttgttggtgcaaaggcagtggtgagtaaattgctagtgcattatcacaaatcgagccagtggcaccaaagtctactagcagtcaaactgtacttcactaacaatccaccaaaaaaaacgcaatttcacttaaggatgtccttgataaagtagcaaaaactaagatttgttctctcttgagaatacaactttttaatattctatatgatgatgtggsaagtatgcagaaagcatttctgttgcatactgacatatggtgcctgtctggaaggaacacattgtgcagttgctttagacaaaaactaaactatctactttttttcatgaaacatctatttacttgaatgaaaaacagacagaaaacaatagttattcagatttgaacatttggcagacattttcttaaaaataaataaaataagcctaacagttcatggaaagcaatttacagtatctgttgctgatgataaagtttttaagtgaaaattcaaattttggaaaacttgtatgtgcttgagaaattttcaatacctaagaacttttcatttgatattagaagt

SEQ ID NO: 284745 - DNA, 543 bp, Homo sapiens
ttgtggagtttacttggccgatgtaacaagtcatagagcgtatatcagttcctacagtctgttgcttttcctaagctctcttactggttggataccttccttatgttgtaaaatcctttccctagtcatamttttttggcgggctagatactatgagtttttgcaatcaccagagaacattgcaaaaattcaacatcactaaaattttgtctgtatataggtcagaccttgcctctgcatgcaggaagcttcttgtaccataaagcaaagagcttgtaacgatccatttttctctccttataatactagggccatcagctcttcccactctttcccttattccaaaaatttgtgtaagaaagattatgagagaatttgtaagtatagcatacatttgtttgaaatatatcagaaggagataagttttcataaaagaaaacctcagaaataatatgactttttaaaaaccaattgtatttgcaaagacttaggcttataagcaaaaaattaattgcacactttaaaagaggtatttattgtgga

SEQ ID NO: 284746 - DNA, 1111 bp, Homo sapiens
gacattataattttacatatcatatttctgccaagacaatgatggtaaaaggcattgtcatcagatgataacagacaataagaagaatcctgatgttagatttattaccgggtttagatttagaaagaagtaattcttgtcctgttccacttatcaaatgactgtaaattcagtgatgatgtaaaattctaaggcagagccacttatagatttgacaaagtgccagttataaactatttattgttctcagtggttctgccttacacacttaaatatttatcagaaacataagcccctctgataaatgttttggatctttgtggctratttttttttacatttagatttttcatcagaaacaaaatctgtatttttattgtgttaataacactgaattcataatttgaaaggataatatatgagttttaaaatttgactccttgtaacttctgactttaagtgtgaaacttttggaatagttctttatccatgggtgcatgcagtctttgcttggtagcatagccaatcggaccagggatcagcctgtgaggtaaawgacattataattttacatatcatatttctgccaagacaatgatggtaaaaggcattgtcatcagatgataacagacaataagaagaatcctgatgttagatttattaccgggtttagatttagaaagaagtaattcttgtcctgttccacttatcaaatgactgtaaattcagtgatgatgtaaaattctaaggcagagccacttatagatttgacaaagtgccagttataaactatttattgttctcagtggttctgccttacacacttaaatatttatcagaaacataagcccctctgataaatgttttggatctttgtggctgatttttttttacatttagatttttcatcagaaacaaaatctgtatttttattgtgttaataacactgaattcataatttgaaaggataatatatgagttttaaaatttgactccttgtaacttctgactttaagtgtgaaacttttggaatagttctttatccatgggwgcatgcagtctttgcttggtagcatagccaatcggaccagggatcagcctgtgaggtaaa

SEQ ID NO: 284747 - DNA, 583 bp, Homo sapiens
ttgttattttccccctttaagctcctttggcaatgaatgtgaccatgaggtccaaagctataaaggatgtgttcaccacttccctcttatgtctgtctctttatttaaccacaagttcactgtctttatccatgttaattccctgaggtattcacacagcatttgtgttgactgccttaattttgatcttctctaatcattccctgccagatggtagttaaagtttaatggcccctgtaaaaatagttccctttcttctttcatcagtcatgtgtctttacttagctaactgctggatgttcagaatgaacacaaagtgaccaccagcaaaaygaattcaacaaacacattggcttaatacttttcatggtagctaaagatgtctcctgccattatccactcagccattatccttaccttttatcatctttctttttctgctttgttagttttcttttgtttttatctcccttctcaggttgtctgatggaaagccacaagactgaggcctggtagtcatcagtacgcaacaattaaagtgtgcggacatgtccaatttccaacggcatttaagtgctagatg

SEQ ID NO: 284748 - DNA, 520 bp, Homo sapiens
tacagatgtaagaaagcatgtgscctcagactggagctgtttgcaaacagcaggattgcctggcccaagaaatggcgcttggtgtgtgatgaaagccacccttctaaaaccgtgtttggttagcacctatgccctgctgaaattggcatagcacattctctgtgggcatgctgccagcctaacagatgggcctgaatgtaaccctgccagagaatcagtgtgtgcaatgagttcacaactgtggttagactcctttccaaagatgttgcatctacttaggctgcccagcaaaaatttctgactttcatgtcttcaaatggcattaatgaataagtaaatagttctcgaaatcagtggttctcaaactgtggttccctggaccagcagcaccagcaccatgtaggaaatcactagaaacacaaattctcaggccctacctttaacctactgaatcagaaactcttggggtggggcccagcaacacgtggtttaacaagcccagctgctgattctaatgcag

SEQ ID NO: 284749 - DNA, 520 bp, Homo sapiens
tacagatgtaagaaagcatgtggcctcagactggagctgtttgcaaacagcaggattgcctggcccaagaaatggcgcttgstgtgtgatgaaagccacccttctaaaaccgtgtttggttagcacctatgccctgctgaaattggcatagcacattctctgtgggcatgctgccagcctaacagatgggcctgaatgtaaccctgccagagaatcagtgtgtgcaatgagttcacaactgtggttagactcctttccaaagatgttgcatctacttaggctgcccagcaaaaatttctgactttcatgtcttcaaatggcattaatgaataagtaaatagttctcgaaatcagtggttctcaaactgtggttccctggaccagcagcaccagcaccatgtaggaaatcactagaaacacaaattctcaggccctacctttaacctactgaatcagaaactcttggggtggggcccagcaacacgtggtttaacaagcccagctgctgattctaatgcag

SEQ ID NO: 284750 - DNA, 614 bp, Homo sapiens
ttatattctttttatacaatattattaataaaaataggatcactcctacctttcatagcttcccataactagtctatttgtcaacctgaggcccacgtaacaccaaagccatgtgatctgtatcctagaaatcaagggaggtctgtcagcatatggatcctcctgggtccttagactamcatcctgctcgtttcagttaccttcttaccttggatacagcctcataggtcaactatggccaatgaggtcaagcatcaacctaatgctctccttactcataaagcatctatattaattgagcatgaacattccaggcactgtttctggctctgaggtgacaactataaataagacaaagttttttcaggagactcttgtggttgggtgcaggggcagggggagacatgctacatatataaacaagataatttaaattgtggtaagtactatggagaaaataaagccggggtgtaataacatacaatattagaacttgctttttaaatacaactttagagaacttgaaagtaacagacactttagatagcactagagtggtcggagaattctgtgagttgtccttaagatacaactcttgagggaaaaatactgcg

SEQ ID NO: 284751 - DNA, 480 bp, Homo sapiens
tgaaaataaaatgctatctcatttcacaactgcaaagaaaagtatacaaaggtcttggcattaccatgtaaataccataatatagaaaaagtgttacaaaagatgattgcagagtttttcctaatctgaattcaagaatctactactgtcataaactgccccaaccctcctctgtccatcyccaaatgtattcaccaatatctgttacagacttgtcaagaatatggcttgcattgagtaagtgagcgagaagccaaatttatggctggaggtcagacgaagatttgggagataagtctcaagggatgtgtgtgtgtgtgtgtgtatgtgtgtaatacagatgcttctcaacctacgataggattatgtcccaataaacccatcgtaatttgaaaatgtcctaagttgaaaatatatttaatacatctaacctaccaaacaccctagcttagtgtagctcaccttaaacgcactaagaac

SEQ ID NO: 284752 - DNA, 515 bp, Homo sapiens
ctggcacatagtaattacttaatacgtgtgaattatttgctgagatctctgtacaatgtaaaaatgcataccttaaagatggctttctgccatgattctacataggttttttccttcaacattcttctttttttgccttaaaatgtttaattcccaccaactttcatcttacaacaggaggctcaaagtgacagatttaaagagagccttcaaagygaggaccatttcacttaaatgcccacctgcactgtgctaggcatggcagtggacccagaggtgccagacaccagacaggagcaagggttggcaaaacatgggtcatttcctaaggcattgtaatcattggtcttttacgtaaggtgtctttgactctgctcagtaccagacatcaagtactacaggcatagtccgtgtgtttaggctgtttcacaactgagtgaaattcaacagtggccatccccctgttgctcatcattgattgtaatgtgaccaaaatggaaactgctaacctatgt

SEQ ID NO: 284753 - DNA, 573 bp, Homo sapiens
tgcttaacctccatgagccatatttaaacacaggaaggaactgtgaatgcccccagtaaatgctttgacactgaagctctcttcagtgtttaagcttactgtgttacgaaggtacaggttgtgttccctggtaataactcttatcttttctgaacaagagtggggctttaggacatggagagtcggggagaagacagcgacgtcgaatgagagcggcacaggtcgaagggacagtagactaagtaactcatccagccccatcattttacagatgagtccacaggctcagagccctcaatggacatgcctgcagacacacagcattggtataagraactttttaaaggaataaaagagtcttggaagttatcaagtccagccaggggttgctaggcccctgagaaagtatctttgatgtcctacccctctgtttagcctgcctcattcttctctctcagcgacctgcccagtccaggcctctccagatggtcccctggcttctgcatccctctttcacctcctttttcctcaaccaagacaaaccactcctgtccagtctatcagggcctcccc

SEQ ID NO: 284754 - DNA, 615 bp, Homo sapiens
atgtcgtcccctgccctcacccccagcagaagcagcagttcctctgatcatatgtggctgtgtatcagcagtttctcctacacttcaagaagaatcatgatgcaacagtgagctgcaggcatggaggtgaggaaggctggacaaagccaaacccatgagaagggcattacctgggccctgacggaggggagaggagccctggggtggagtggggctgggggaggaaagtgtctggagccctgtgctcaccatgtggtcctgcagagcagccagggcatcacctggaagctcatcaatcatgcasaccctcaggtcccacccaggcctcctggatcaggttgtgcatcctccagatccctaggtgatttggttataaagtttgagaaacactgagtctgcaggactccatgatcattagatcaggggagagagtctctaggtcctttctttgaaccttcccacacagcaactgtgaataataaatgccaggcacaaagctcttcactgtgttaagtaagaaaatgcatgttttcttatttaattctggtaacatgcctgggaagtgggccttattactcccatttgacagatgaaggaaagaggcttgaagaggtt

SEQ ID NO: 284755 - DNA, 615 bp, Homo sapiens
atgtcgtcccctgccctcacccccagcagaagcagcagttcctctgatcatatgtggctgtgtatcagcagtttctcctacacttcaagaagaatcatgatgcaacagtgagctgcaggcatggaggtgaggaaggctggacaaagccaaacccatgagaagggcattacctgggccctgacggaggggagaggagccctggggtggagtggggctgggggaggaaagtgtctggagccctgtgctcaccatgtggtcctgcagagcagccagggcatcacctggaagctcatcaatcatgcagaccctcaggtcccacccaggcctcctggatcaggttgtgcatcctccagatccctaggtgrtttggttataaagtttgagaaacactgagtctgcaggactccatgatcattagatcaggggagagagtctctaggtcctttctttgaaccttcccacacagcaactgtgaataataaatgccaggcacaaagctcttcactgtgttaagtaagaaaatgcatgttttcttatttaattctggtaacatgcctgggaagtgggccttattactcccatttgacagatgaaggaaagaggcttgaagaggtt

SEQ ID NO: 284756 - DNA, 551 bp, Homo sapiens
actcctactcatttttcatattgtggtttgattatctgctcagagaagtattccctgacccttcatattagttagagtgtccattatctatgcttatagtatcccatatgttycctttatgtcacatatcaaatggaaaataaatacttatttgtggaataatctatttaaagcccatctcctcatctagactgaaagctcattgaagacaggaagtgtccatttatttgttcatcaaaatttgttcatttaatccttaggacctatcaggtggttaatatgtgtttgatgaatttaacacaagtacctcaatctcttcatttataaaatggaggtaaaaattcttgatcagcatcttgggtttttctcttgtggagcaggtaagtcaatatgcatatataaaaagtgctctggacagtataaagtacttcacacataaaatttgcatatgcagatgaacacatgtgtttgtctttctatgggtgcaaattctgtttcatgaaaggggcaactaataaaaatctgtgaatacaaacatttacctgcgcata

SEQ ID NO: 284757 - DNA, 562 bp, Homo sapiens
ctccaaacttagttatttgtagctgtcagatgagaagtatttsctaattacacccattcataaacactcattttatcacttcaaagagcaccagtgtattttttcaacaaaccagaaagtaagaaggtaggggcttatttcatgtaacagtgctattatgataaggcaccactaggtatatgaaaaagccaaagtatttccaaatcatgtgtttttgttactggtgtcttaaccattagacaggatggttagaaaaaagctgctaacattattaatgaaccacattatagcccctttcccaccattctgtgcttttagttttacttataacagaaatgaaaacaacaacgtagtacatgacctgttaaaacaaacatcttttcccaaccttccaagaaaataacctaaaaataaacaagaaacaaaaaatttatctgatatatttgcaaaagcctatccctgtagaagagtgtgaggagtgggagaaggcagggggacctactttctatggaatatattgaggcacataggttacaagtttctcaggcaaattcatggctag

SEQ ID NO: 284758 - DNA, 575 bp, Homo sapiens
caccccctccaccccctttctccagtttatttctccaggttaaatttttgtgggtaaaaatttcagatattttattgttacacattgccattagtccttgatttttttttttttttcccatgtgtcccactgctgattgtgaccttttggcaggttatttagtctctgagagttgtgaaacatatgagagcaggttgaaaaggtgctttrtgctcctttgtgtcccgttcttttttcccttaaattttcctcctgctttctaaactaggggttccccaaagtttagtcctctgctctcgtttttcttccagcatcagccagcatctctaggtgggtgactaccaaatctctctgtcctggagctccctgcccatcctggcatctctgtcccgcagatgtgtttgtcttgtggatgccctggaggacttcaagataaacatgtcccaaactgatttcttctctctcctaaaacaaagctagcatctgcccagtggcttacccttaagcctttgaagtcatcttacagtcctttttcatccatgtgttcagttatttcctaaatcctatctgctatg

SEQ ID NO: 284759 - DNA, 472 bp, Homo sapiens
tcatcaactttcccctctatttttgcagttacttttcaactggatcctgttttcagtctcttccttctcaatttatctttcgttgtttctatagttatctaagaaaaatccagatcagatcaggccactccttccaaaagtttcagaaggaagtyttagatattaacaagattttgtgttatttttccccccttttcccactaaataactcccctacagcctctgctgcagctgtacagtgtaacttttttttttcttttgagagggagtcttgctctgtggttcaggctggagtgcagtggcacgatcttggctcactgcaacctctgccttctggtttcaagcaactctcttgcctcagcctcccaagtagctgggactacaggtgcatgccaccacacttgactaatttttgtgttttgttttttttttttttttggtagagacggggtttcactgttggccaggctgg

SEQ ID NO: 284760 - DNA, 657 bp, Homo sapiens
ggctggtatcgaactcctgacctcaagtgatctggttgcctcggccttctaaaatgttggggttacaggcttgagccactgcaccttgcccagtgtgactttttatgtgcgtttttacttgcaaagctttgtgcctttatttagccatttttttgccttcttaaattccgctcattcttcacaacctgttttcagtgttcaaatgctgtattctctgtgccatgccctcactctttgctttttttgcttccttactactttgctaatgtttttagtatagtacttatctccttgtgttttgtattaaccttgtggcgtatatcttatttcctagtgtctgctttgttctttttttccaccaaacataaaccttgaatgtagtgagcaggttgtaactgttttgaatgatactaaagaaaattggtcagggatgtcacaggataactaattcctcagtagtgttttagttgagctttaccaggtttatttttcagatattatttaattaattaatttttttcttgagacaggttctggctctgtggtccaggctgcagtgcagtggtgcagtcatgattcactgcagcrttggccccccaggctcaagctgtcctcccgcctcagcctcccgagtagctgggaccacaagtgcacacc

SEQ ID NO: 284761 - DNA, 568 bp, Homo sapiens
tatttgacccttcttatttccctgagcctttccttctcccaggtatccctcctaggagttaacattagtctagtcactcatgtttcttctcttttcagtctatagctttcatgatagaactcatctactcttgyagcttcaagggtcatttctatctcgtgatactcaaaccaataggtactcctaaggccttatttctgagaaacaaatcaacatatctattcgatagcacattagctgcttaccttaaaatatgtgaaaattgaattcatattatcacaaacaccttttcttttgttttctcatttctgtgaattaaagggtatctacccagtttccccaaaagaaacctagaaatatatttgactcctttctcaccttctcacctatcttatcatttaactcgaaaaaccttgtcaaacccactgtgttagtccattttcatgctgctgataaagacatacctgtgactgtggcaatttacaaaagaaagcggtttcagagacttacagtgccacatgtctggggaggcctcacaatcatggcggaaggtgaaaggcacatctta

SEQ ID NO: 284762 - DNA, 568 bp, Homo sapiens
tatttgacccttcttatttccctgagcctttccttctcccaggtatccctcctaggagttaacattagtctagtcactcatgtttcttctcttttcagtctatagctttcatgatagaactcatctactcttgtagcttcaagggtcatttctatctcgtgatactcaaaccaayaggtactcctaaggccttatttctgagaaacaaatcaacatatctattcgatagcacattagctgcttaccttaaaatatgtgaaaattgaattcatattatcacaaacaccttttcttttgttttctcatttctgtgaattaaagggtatctacccagtttccccaaaagaaacctagaaatatatttgactcctttctcaccttctcacctatcttatcatttaactcgaaaaaccttgtcaaacccactgtgttagtccattttcatgctgctgataaagacatacctgtgactgtggcaatttacaaaagaaagcggtttcagagacttacagtgccacatgtctggggaggcctcacaatcatggcggaaggtgaaaggcacatctta

SEQ ID NO: 284763 - DNA, 1709 bp, Homo sapiens
ggggactctgtatgggggctccaaccccacatttcccttccacactgccctagcagaggttctccatgagcaccccacccctgcagcaaacttctttctggacatccaggtatttctgtacatcctctgaaatctaggcagaggttcccaaactccagttcttgacttctgtgtagtcacaggctcaacaccacatggaagctgccaagacttgggccttgcaccctctgaagccatggcctgagctctatgttggcccctttcagccacaactggagcagctgggacacagggcaccaagtccctaggckgcacacagcccagggaccctgggccccaccctgccatctcctaggcttctgggcctgtgatggcaggagttgctgtgaagacctctgacatgccctggagacattttcctcattgtcttggtgattagaatttgaatcctcattacttatgcaaatgtctgcagccgacttgaatttctcctcgaaaatgggattttcttttatgctttgctttccttataaaactgaatgcctttaacagcacccaagtcacctcttgaatgctttactgcttagwtaaactagtataagacatactgcatcctctataatctatgaatgcacattaacattttaaaggatttgaaattcatccagcatatataaacatgtgtgattttataaattcaccttctcccaaatgtatatgtgttttcggtgtgagtatgcatatgggtaaaccttaatgagtaacattattaactgttcttccataggatatgttttgagaaatgcttgtcacctagtttacaccaagtattatttcttagtttagacttaattccacaattgaacagatgggtttttctgaggaatgaggtagaaaaatggtaacagcaacaaactgagaatgtttagtacatagcatttcactaagcactttccatccatctcatttaatagttagaacaatatgaagtctaaataccatattatcctcaatctatagagaaaatwtaaatatccatcccaagttcaaatgggtagaaagaagtggaatttgaaccaaagcagtctagttgcaaagccwactctactggtaccaatttactctattagtccattttcacactggtgataaagagatccccaagactgagcaatttacaaaagaaaaaggtttaatagacttacagttccacatggctggggaggcctcacgatcatggcagaaggtgaaacgcatgtctcacatggcagcagataagagaagwgagcttgtgaagggaaacttcattttttagaaaacatcagatcttgtgagacttatcacaatcataagaacagcacaagaaagacccgccctcatgattcatttacctcccaccaggtccctcccacaacacatgggaattcaacatgagatttgcatggggacaaagtcaaaccatatgacccatcaatggacaggtgggagatattacaggaataataaaaacttaatccaatatacttttaagccatgtttaaaattcatcagtggaaacaaaatccattaggaaaaacaaaataatcaccctcatctaaaggagaaaaaggcaattcatatcaaagtaagaggtaatgctgttatattttaccatttagttcaatgccttttactggaaacttcaatctgtatgattttatttcattaat

SEQ ID NO: 284764 - DNA, 608 bp, Homo sapiens
actctactggtaccaatttactctattagtccattttcacactggtgataaagagatccccaagactgagcaatttacaaaagaaaaaggtttaatagacttacagttccacatggctggggaggcctcacgatcatggcagaaggtgaaacgcatgtctcacatggcagcagataagagaagtgagcttgtgaagggaaacttcattttttaraaaacatcagatcttgtgagacttatcacaatcataagaacagcacaagaaagacccgccctcatgattcatttacctcccaccaggtccctcccacaacacatgggaattcaacatgagatttgcatggggacaaagtcaaaccatatgacccatcaatggacaggtgggagatattacaggaataataaaaacttaatccaatatacttttaagccatgtttaaaattcatcagtggaaacaaaatccattaggaaaaacaaaataatcaccctcatctaaaggagaaaaaggcaattcatatcaaagtaagaggtaatgctgttatattttaccatttagttcaatgccttttactggaaacttcaatctgtatgattttatttcattaat

SEQ ID NO: 284765 - DNA, 542 bp, Homo sapiens
attaacttcaatctacctccttcttcacttggccttcttccctgtatggattaaatctccccgtttttttttttttcttataataatagcagtcattagatttaraacccactctaattccaggatgatttcaccttgaaaaaagaccctattttcagttaagggcattttcacaggaactgggagttaggattggacatgttttttggtgaaacaattcatgtcagaagattaaaaaaaaatcttgaaatttctgactaaagaaactgaatatgtttatttacctttgtctccagagaagatttatgccttcccaatgctttcatggaattacatgctttatttttctggaggatcttctaattgattttaaggaaaacaaaatgatttgtagctagaggtaaactatctaccaacctggaactattacctgatactttcccccctggaaaaaatgtggtaggaaatgtctaatgaatgtatatcactttctttctataggtgcaatagttcacttgtaattagccacatggaggtaccag

SEQ ID NO: 284766 - DNA, 542 bp, Homo sapiens
attaacttcaatctacctccttcttcacttggccttcttccctgtatggattaaatctccccgtttttttttttttcttataataatagcagtcattagatttaaaacccactctaattccaggatgatttcaccttgaraaaagaccctattttcagttaagggcattttcacaggaactgggagttaggattggacatgttttttggtgaaacaattcatgtcagaagattaaaaaaaaatcttgaaatttctgactaaagaaactgaatatgtttatttacctttgtctccagagaagatttatgccttcccaatgctttcatggaattacatgctttatttttctggaggatcttctaattgattttaaggaaaacaaaatgatttgtagctagaggtaaactatctaccaacctggaactattacctgatactttcccccctggaaaaaatgtggtaggaaatgtctaatgaatgtatatcactttctttctataggtgcaatagttcacttgtaattagccacatggaggtaccag

SEQ ID NO: 284767 - DNA, 572 bp, Homo sapiens
atagctgtgattacaggctgctgccaccacgcccagctattttttgtatttttagtagagacggggtttcaccatgttggccaggctggttttgaactcctgaccttaggtaatcctcccaccttggcctcccaaaatgctgggattacaggcatcgagccactgcacctggctgaaaaccaataattttataaatgctccatagaaaggctaatggattgtgcttggtggaatacaattacttatcacgctgtggatagaaaagtcttacatcttatgtaaatttatttcagcatcttttaatgcctagatrtatgtagttatttgagttctcctttgagctggttgtaacatcctaccaccctcctcattagtgagttgagtaaattgaaatacgattgttgaaaattgtatgagagtcacgattttagttttttattcaatcttttaacagtatcaatcaatggttctcgaattctagtgtgcgttataatcccctggagggcttgttaaggcttagatcaccagactccatttccagagtttccgattcagtatttgtgggtggggcc

SEQ ID NO: 284768 - DNA, 561 bp, Homo sapiens
gaatttatttatatattttattttgttggttttaaaaaagctccaatactgagacaaaaaaagaaattctacctatttcagagaaccagatattatcctatgtgctgtctcagttaaggttattttatttcaaacgatakaaacaaagcaacaggcatgttaaatatttacaactaaaatgtggtgcataactccaaaattggaaaaaaacaatggtgcctatccagcgcctgggaaatataggtgctgtgactgagcaggggatgtcagtattgcaaacttatggaccttcttttgaatgttccattaaataactcaatatgagaagctattgtctctggaaatgttttaaattcccataagagagaatctaattggcccatattgcatcaaacactaccaccttagtctaatcctcatgactcagttgatagcaggatccatgatattcaggttcatggtatcaatcttaaaggaagaaattgaggcaaaattaacataagtagagagtttatttgggataacttgaagattgtaacctgggagcatagatttaaattg

SEQ ID NO: 284769 - DNA, 561 bp, Homo sapiens
gaatttatttatatattttattttgttggttttaaaaaagctccaatactgagacaaaaaaagaaattctacctatttcagagaaccagatattatcctatgtgctgtctcagttaaggttattttatttcaaacgatataaacaaagcaacaggcatgttaaatatttacaactaaaatgtggtgcataactccaaaattggaaaaaaacaatggtgcctatccagcgcctgggaaatataggtgctgtgactgagcaggggatgtcagtattgcaaacttatggaccttcttttgaatgttccattaaataactcaatatgagaagctattgtctctggaaatgttttaaattcccataagagagaatctaattggcccatattgcatcaaacactaccaccttagtctaatcctcatgactcagttgatagcaggatccatgatattcaggttcatggtatcaatcttaaagraagaaattgaggcaaaattaacataagtagagagtttatttgggataacttgaagattgtaacctgggagcatagatttaaattg

SEQ ID NO: 284770 - DNA, 339 bp, Homo sapiens
cctggtcagtgtgattaggccacctgtgtttgctaattcctgcatattgaagttagactcctactctcccagtgaaacagaaaaacaggggccctatcttgataccatttcaaaggaatggctcccacgtccttgaaaaagacctttctgggttgtgggagattcacaactcaaaaggtccaggaaaggatttacarttacaagttttctaaagtaagtgctctaagaaaatggacagcaggggaattagttagaaggaagcctttctacagtgtagtcaactaagggaaactttaagggcatcttggttctaggcaaatattaatatcctagcaatcc

SEQ ID NO: 284771 - DNA, 548 bp, Homo sapiens
actttattctgttagtaggcagtattgatttgtaaaggcaggtgaagcagcccttgaggcatatgatggtgctatatgaagatcagattacaatgtaaataataacagtttgtgatcagcctgggaaacatggtgaaaatctgtcactacaaaaaatagaaaaatagctgagcatggtggcacctgcctgtggtcccagctactcggaagcctgagacaggaggtttgcttgagcccaggaggttgacactgcaatgagctgtgatcacaacactgtactccagcctgggtaacagagcaaaaccttgtctcaaaaacaaaaacaaaaagagaggagcctaaatrattaattaagtaaaacgtgtggttgctgtggtatatttttaactaatatgtgaatttgaaaattaaatttgtgtagcatttcttatctgaataaaaagagaattaaaacataaccatatttgaaagagaagagtaattgtgtccgtcgaagaagataatattcttttttgactacagaaaaggggtacagggtgcctggcaca

SEQ ID NO: 284772 - DNA, 548 bp, Homo sapiens
actttattctgttagtaggcagtattgatttgtaaaggcaggtgaagcagcccttgaggcatatgatggtgctatatgaagatcagattacaatgtaaataataacagtttgtgatcagcctgggaaacatggtgaaaatctgtcactacaaaaaatagaaaaatagctgagcatggtggcacctgcctgtggtcccagctactcggaagcctgagacaggaggtttgcttgagcccaggaggttgacactgcaatgagctgtgatcacaacactgtactccagcctgggtaacagagcaaaaccttgtctcaaaaacaaaaacaaaaagagaggagcctaaatgattaattaagtaaaacrtgtggttgctgtggtatatttttaactaatatgtgaatttgaaaattaaatttgtgtagcatttcttatctgaataaaaagagaattaaaacataaccatatttgaaagagaagagtaattgtgtccgtcgaagaagataatattcttttttgactacagaaaaggggtacagggtgcctggcaca

SEQ ID NO: 284773 - DNA, 1055 bp, Homo sapiens
tctgcttgctaaatttgactctgttaaaattcagatatctttggggagtttaccatttaagttactatgaattgttagcattttagtgaaagaaacacttgataataggatttgttttggggaaaggtgggaagtgatggtcaacgttagttttctgggttgataaggagctaagaggattaaatatatgaatgaaaagttataggaaactactttccttgccttgcatgctgaggtcataaatcctacctcctcgaagattttttcccccagcagtttctagagtggttttagagtattaatgaaattagtagtaaaaaatatgggaatctatcactggaagagtagggattaaagatatgtaataaaactggaaaccaaaatgaatcagtgaatataaaaacaagtagacagctggaatgaatccagatagcaatggtcagaagcacaggtcaaagattatataagaagccagtacccagcatttacascgaagttgaaggtcaccatgaaatcatgggtataaacaatataaggggtcagtaagcagacctgaagtactgggggcwattaacactgtgagaataaaacttaatttcccagtgttttcctattgcagtgatgcaccataagaaaaaatgaaatttcaatgtttacatagttatagagtcaacacaaawtttggcaggggtataaatgttggagccatagaggtgggaacaaaaaagtatgtgggcagtgttgaaacaaaagttgagggatgctaaattgcaaacacaaggaagatattttccttggctacattttgtagagcctgatttgctcttcagaattttatttattcaaactaataaaatgaaataaataattgtaacatatatctaacaatcattgtgtgttcagcaaatgccagatatgctaaaatatctacaggcattatcacacatgcacacacacacacacacacacacacacacacacacacacacagttagttgattttattatcttcattttaccgatgaggaaactaaaatatagatagattaggatac

SEQ ID NO: 284774 - DNA, 483 bp, Homo sapiens
cagtgccactccttcatattgtagtcttcaracattgtaattttatgttcacaaaataataattttaacttacgtatgctataggtggaaatattcaaactgtaggtgagctgactcttaaaaatcattctttgtcatacaagatagaaaaagatgtttatgtagtaaaacactcatgggaacaaaatgtccttggcatttaaaattgaatatacaatttccatgcatatttgatctacttattatcaataaaatatttcactttggatgtctgtaattgttgttcactgagtgtgcaaaacacatttttatatgacaggtgtcgtgatgttttgagactagctcagttttcgtggtatttccatttttaaacaaagaaggcatttggctaaactaacttgtcttcactatagaaatattattcagaataacagcatatacttgtgaatctttattaattgagtgaggaatattaattgctct

SEQ ID NO: 284775 - DNA, 581 bp, Homo sapiens
tgcacaccagtgccactccttcatattgtagtcttcagacattgtaattttatgttcacaaaataataattttaacttacgtatgctataggtggaaatattcaaactrtaggtgagctgactcttaaaaatcattctttgtcatacaagatagaaaaagatgtttatgtagtaaaacactcatgggaacaaaatgtccttggcatttaaaattgaatatacaatttccatgcatatttgatctacttattatcaataaaatatttcactttggatgtctgtaattgttgttcactgagtgtgcaaaacacatttttatatgacaggtgtcgtgatgttttgagactagctcagttttcgtggtatttccatttttaaacaaagaaggcatttggctaaactaacttgtcttcactatagaaatattattcagaataacagcatatacttgtgaatctttattaattgagtgaggaatattaattgctctctgagtgcaatcatccatcttatcatttcaagtaagtggtccatgtttaattgaatgtatttttctctaaaacaaaccattgcatagttgc

SEQ ID NO: 284776 - DNA, 581 bp, Homo sapiens
tgcacaccagtgccactccttcatattgtagtcttcagacattgtaattttatgttcacaaaataataattttaacttacgtatgctataggtggaaatattcaaactgtaggtgagctgactcttaaaaatcattctttgtcatacaagatagaaaaagatgtttatgtagtaaaacactcatgggaacaaaatgtccttggcatttaaaattgaatatacaatttccatgcatatttgatctacttattatcaataaaatatttcactttggatgtctgtaattgttgttcactgagtgtgcaaaacacatttttatatgacaggtgtcgtgatgttttgagactagctcagttttcgtggtatttccatttttaaacaargaaggcatttggctaaactaacttgtcttcactatagaaatattattcagaataacagcatatacttgtgaatctttattaattgagtgaggaatattaattgctctctgagtgcaatcatccatcttatcatttcaagtaagtggtccatgtttaattgaatgtatttttctctaaaacaaaccattgcatagttgc

SEQ ID NO: 284777 - DNA, 581 bp, Homo sapiens
tgcacaccagtgccactccttcatattgtagtcttcagacattgtaattttatgttcacaaaataataattttaacttacgtatgctataggtggaaatattcaaactgtaggtgagctgactcttaaaaatcattctttgtcatacaagatagaaaaagatgtttatgtagtaaaacactcatgggaacaaaatgtccttggcatttaaaattgaatatacaatttccatgcatatttgatctacttattatcaataaaatatttcactttggatgtctgtaattgttgttcactgagtgtgcaaaacacatttttatatgacaggtgtcgtgatgttttgagactagctcagttttcgtggtatttccatttttaaacaaagaaggcatttgsctaaactaacttgtcttcactatagaaatattattcagaataacagcatatacttgtgaatctttattaattgagtgaggaatattaattgctctctgagtgcaatcatccatcttatcatttcaagtaagtggtccatgtttaattgaatgtatttttctctaaaacaaaccattgcatagttgc

SEQ ID NO: 284778 - DNA, 1080 bp, Homo sapiens
ttaatatttttcattctgtttttcagagtgacatgtgcctagaaaaatcaatgtagggaattttgaaaaataattttttaaaggtaaaaaaagattacaggattagttttggttttaaacgtccatatttttctaaatccctgaaacaactttgaatattgtggctataatttaagtttctcaaattcctcagtgaactataagaaatttttctaagataaaatgttagaagttcaaagatgcagttgtgttttacccagggaaatcttaaaaattgtatggataactgagaaaataattagataaagcagaatataatattgaaattatctctaatgctttgtacttttgtgtgtttatctattgtcactaatgaagtcatctggaaaagccgcttaatgatgatttgttagtaatgtgtgcaaattagttgatcattagcaaaatccagctgctagaatayttctgtatatcaaattaaaggaaggtattattttgtagcttatcatgcctcatattttctagtttaacaataagtattaaaaatgccatctttcttggatttagaaacaaaaaggaccattwtcccattttaagtgttttgctaattgttaaaatgtttttccaaaaaaatattatttttatttaagaaacttctgaacaaatttgcctgttaataaagggatactactttggccaaagaaaagttaaaatagatattttctgaactgtctgctaataattcaaatttaaaaacaggatgagcaaattagttcatagatgattaccagacctcattttgacctctgaatcttgaataaatgttctttcccaaaatacwtagtgagcaatttctgcattgactatgcataccatctggaacagcatagagagtagcctctatatgctgcaatatgaaagagattctggaactgtaattattagttgactctcattgaaatgactcataaactgatagtgaaagggagagataatattgaattgtcccaaaatgtcagtgtaatggatactaagcccatgataactaaaatcatgtcttgtctattccaatgaagttgc

SEQ ID NO: 284779 - DNA, 495 bp, Homo sapiens
tcccattttaagtgttttgctaattgttaaaatgtttttccaaaaaaatattatttttatttaagaaacttctgaacaaatttgcctgttaataaagggatactactttggccaaagaaaagttaaaatagatattttctgaactgtctgctaataattcaaatttaaaaacaggatgagcaaattagttcatagatgattaccagacctcattttgacctctgaatcttgaataaatgttctttcccaaaatacttagtgagcaatttctgcattgactatgcataccatctggaacagcatagagagtagcctctatatgctgcaatatgaaagagattctggaactgtaattattagttgactctcattgaaatgactcataaactgatagtgaaagggagagataatattgaattgtcccaaaatgtcagtgtaatggatactragcccatgataactaaaatcatgtcttgtctattccaatgaagttgc

SEQ ID NO: 284780 - DNA, 490 bp, Homo sapiens
tctctcatgttagaccctctacaaagggaacttgaaggctctaaatatttgttacaaattctgagcttttgtctctgtgttacaaataataaaaaatagccagtaatcaaaatagaagagttaatataaatcacaattctcacagcttatgatcaaaatacttgttttggaactgcaagtcattttgtatactcactaatttggatatttatcttactaaagataaaatagactttggaattttgcagctgtgtgcaggtagatcctacatgaaayaatcaagggatgattctgcagcaccagtggcttcatccttacctagaatgtctccttggcaacatcatatttcttcttgtttctttatatcattttgacctttaggtgtgaaccatcatctcaccttttttgcatcataaaacactctgaattgtggacctaaactataaaacatcttagaaaaatgtacatatgcacctcacacaaaatttta

SEQ ID NO: 284781 - DNA, 587 bp, Homo sapiens
ccacactcagggtagtggcaattargttatagtaatttggctgcctgtataattggaattctcagtatgtagtttgggcagaagcacatctgctcctcgtaccccttattaggtgtatctaaaatgtttcgactgattgttgaatgtgctggatggctatccatttattcaaagctacatccagcatgcataaaaactgtcagtgttcctaattcaataacatcaaacgacaacaaaatgggaagacttttgggttctctggtcaacagcacattcatttttatgaatccgtttaaccaaaaaaagcttgctcaccttacttctttctctaatttgagcttatttttctagatagagtattacctaccaaacactgattttgctgctgtctttcactattttcattccagtcctatcctcactttgcagcaaagccatgcattgctgaaaacaacgtgcatgcctttgaaattctgactgctatgcccttgaactaaaggcaatttaggagaatggcatttaagcttctgaatattttccttagaaattagaataattaaaattgtgaagctcaaattttaaatcat

SEQ ID NO: 284782 - DNA, 587 bp, Homo sapiens
ccacactcagggtagtggcaattaggttatagtaatttggctgcctgtataattggaattctcagtatgtagtttgggcagaagcacatctgctcctcgtaccccttattaggtgtatctaaaatgtttcgacygattgttgaatgtgctggatggctatccatttattcaaagctacatccagcatgcataaaaactgtcagtgttcctaattcaataacatcaaacgacaacaaaatgggaagacttttgggttctctggtcaacagcacattcatttttatgaatccgtttaaccaaaaaaagcttgctcaccttacttctttctctaatttgagcttatttttctagatagagtattacctaccaaacactgattttgctgctgtctttcactattttcattccagtcctatcctcactttgcagcaaagccatgcattgctgaaaacaacgtgcatgcctttgaaattctgactgctatgcccttgaactaaaggcaatttaggagaatggcatttaagcttctgaatattttccttagaaattagaataattaaaattgtgaagctcaaattttaaatcat

SEQ ID NO: 284783 - DNA, 459 bp, Homo sapiens
ggagttttagttcataagctaagtgttctttatataaggaaaatgtttttcaggtggaaattaaagtgtgtttgaatacatagtagtaatctagcttacttgtgtaactttcaccattttaattgcaacttctattgtatatatgtaaacatacacagataatagagatttatataccttacattttggtcgagaaaactcatataggkcctttttcctcaaaactttattttgacatagcattcaaataattggctatagggacatggacaattgggatttttcagtctttacctgacaaataaattatggtctttctttgtattcattttctgttgattcaaattaaagttttaaattgtcacagtagaaataggatgatcacttttatttcataatttttgtagatgatttcaagtttttcaggaattcaattataattttgatgatttgaattta

SEQ ID NO: 284784 - DNA, 541 bp, Homo sapiens
ttgaggatcagttctgtgattttcaaaatggtgataatattagtatctccaatatgaggttgtggagtaactacataagatatcagaagtgtaagatacattataagtgcttaatcaatgttatctattgttattgttcactgagatagagaacacaaaatcaaattaatagaataaaggtaattggatattttcacaagttgaatcaaaggtgtctttgggatactgatgtaaaaatgtccaatttgggggctatatatttgggatttatcastaataggttattattcaagctatggctttgtattaggccatcatgagagatgttgtagaatgataagggcaaaatgttaaagatgaagtcctgagaagaaatttcatgagatatacatggtcaataattaagaaggaataaatagagttacaggaagaaaacaagagaaaagtagcatcatggaaatcaggagataagttgtaaaatggtactcatgttcagtagaaccaaatatgagatgtgacagataaaataaattcaagtctg

SEQ ID NO: 284785 - DNA, 538 bp, Homo sapiens
tgagactctgcgaggaggtattattatctcttattaacagctaagtattattatacttacgaaggattacaggcaaagaagggtaggtaatttggccaaggtcaccccattataatggtaaagctagagttcaaaccaaagtcttttttactctaaagaccatgctttttccattattcattactcatatccctatctcccaccccaacagcacaaacgagttagatgcagtgatgacctaataaatgtttaataactatctctctggatgaaaaagcccagattgtagcacttgccaatttttctggtgaaatactcccattatggtcaatttcaatctacccatgtgatgttactgracctgaagttgggaagagatggctcttgggattttgtgctagctgactccagcgccacactgaatcacaatttaaacttttccttctatatttctgatacaatcctgagttccttcgctctaggtcttccagttctggtaaaaaaataatggattcaacaggtctattgaaattaccaa

SEQ ID NO: 284786 - DNA, 628 bp, Homo sapiens
agccatcactacatatctagcagagtagctaaaataaaataaaataaaaaactgatcatgtcaattgtcagtgagtatatagtgtgtccagagttggttccttccagtgggttcgtgatcttgccgacttcaagaatggagccatggaccttcgcagtgagcgttatagctcttcaagatggcacgaacccraagagagagcagcaacaagatttattgtgaaggtcgaaagaacacagcttccacagcatggaaggggacatgagcgggttgccactgctggctggggtggccagcttttattaccttatttgtcccctcccatgttccatttttgtcctatcagagtgccctttttccaatcctccctgcaattgactacttttaggatcgtgcttattgttgcattttacagagcactgattggtgcattttacaatcctcttgctagctacatagcgctgattggggcgtttttacagagcactgattggtgcactttggaagatagttgtgtagttttctgcaaagctacatgaagtcttatcatacgatccaattatcactttctagttatttactaaactgatttgaaaatatatagccacataaaatgtttatagcagtt

SEQ ID NO: 284787 - DNA, 592 bp, Homo sapiens
gatcagctttgagaagccttcacacagttagatttctcctccatggggcagcactgaacacacccatctccaagcaatgggtaagccgtgttcatagagatctgctggaaagatgatacaactttctcactgggcagtttctgatttttctcacaatagagagagattgaaataatatcaggacattaggatgtcagagctttgctactaaattggaaatatggttaacatatctgtcctctaagtggaagagtgtgtgtgtgtgtgtgtctgtgcgtgtgtgtgtttatgaagactacagcagcaatgccagaaataccaaaccatacctcctaaaagactgagttgtaaaataaatgcagttactgattctatggaaatggacgtttaaagtgagatgcttagaggaccctattataattaaagtccagacatggaccatgctgacaaagtccttttacagggyggctgaagaatatgtgacttacttgtgtacatcacgtaggaagtttgaattctcagaaaagagagaatatgaatcaggatgccatcagatgcatgtaccacaaggcatttttaaaaatccatcaat

SEQ ID NO: 284788 - DNA, 621 bp, Homo sapiens
agtatccagtgttacacaaatatgtgactgtgtatgtatgtatattgtgtatgcacgtgtggaatcactaacttttttaaaactttagacattccagagtaacttttttttatatacactgaagtgtttgtatctacagcatactccagaaaaatataacgttacagatatttttctttgtaaatagaatacaagsttctcacacagaatcactgtaacattctctaagttaaaagctgagaaatcattatagatagctcaaaaatgtttttcctttgaaacacagcacttatgggcaaataggatcatttgaaacctatttcaaaaaaagaaggaaaaagttgagaaaattcatcaatgtgaatagacaaccaaagacaaccattttatttggcctaaaatgaagttacattttacaggactgaattttagtttcatgaaagttataataaaaacaaataagtgattcacttaatgctttctgtaatgtaaaaataaacttccccctccatctgagttacccttttctggttttatacccaaaagctctagctgagagtagactcaagtattttttaaaactttgatagatgggatatgccggggtgagtgggaacagaa

SEQ ID NO: 284789 - DNA, 502 bp, Homo sapiens
tgtaatgatagatcaatagatcaattgactgatatgtagacacataaaactatatgctgtatgtctgtaatttatatagctcataaattcatatatacaatattaaaaaacttaagtatctattaattcctatatttgtatgcttttgcttttatctagaataagagtttrgttttgtcaaaggcttttcaacgtttattgagataatcataagattttcctccttagaactttatatgacatattatattaattaatctcctaatttggaatctatctggcattcttggaatgaattccatttggccctagcacattatcttctaaatgtgttgttaaactcagttcactaatagtttgtttaggacttgtgtatcaatatcagtgatattgttctgtgactttttcttttgtactatttttatcaagggtaaatatcattattttatctttaaaaaaagaaatgtaaagtttttcattgatttctatcatttaaaacaac

SEQ ID NO: 284790 - DNA, 596 bp, Homo sapiens
ttaaaagtgtttggaaaaaaaaaagagtgggcaaggtgtgtgcctgcatgccacacacatgtgagtgttggcctttgctgtgctgtgcttatagttgctgagcaattagtacagtgagtggtgattggcttaggatgagaactcttccatgtgtgccagataatgccaacatgaccaggaggtagtctgttgttgagtgagctatttatatgaacactcaagccaaaactgagctttgtctatggaggcagactgatgtagagaggaattataggtaatgactragggcactgtgctgaagtcagactcactggattcatattctgattcacttacttacatccttgaccaagagaatgccatcagcagagcagggataataaaagcaccgaactagtaagatggctatgaggattgactgaggcgatacacatgaagccattagagtagtgcctggcagatagtaggtgcttaattaatgttagctaccatttggaatgaattgtgacacagtgctcttgacactatgtgtcagacaaattaattcatatggcttaaactctagtcttttcacatgtcagtagatgtctgtcctt

SEQ ID NO: 284791 - DNA, 596 bp, Homo sapiens
ttaaaagtgtttggaaaaaaaaaagagtgggcaaggtgtgtgcctgcatgccacacacatgtgagtgttggcctttgctgtgctgtgcttatagttgctgagcaattagtacagtgagtggtgattggcttaggatgagaactcttccatgtgtgccagataatgccaacatgaccaggaggtagtctgttgttgagtgagctatttatatgaacactcaagccaaaactgagctttgtctatggaggcagactgatgtagagaggaattataggtaatgactaagggcactgtgctgaagtcagactcactggattcatattctgattcacttacttacatccttgaccaagagaatgccatcagcagagcagggataataaaagcaccgaactagtaagatggctatgaggattgactgaggcgatacacatgaagccattagagtagtgcctggcagatagtaggtgcttaattaatgttagctaccatttggaatgaattgtgacacagtgctcttgacactrtgtgtcagacaaattaattcatatggcttaaactctagtcttttcacatgtcagtagatgtctgtcctt

SEQ ID NO: 284792 - DNA, 591 bp, Homo sapiens
aaactctttaaaatactgatacataccagtccttctctgtcaacatggttgtcctagataaaaaattataaaggacataacaatgaagatggggatcagggaggaaatggcatttcattagttcctcagtggttgataagcctgttcttataccttgtattgcactcattcatttaacaaagtggttgatcattctgactacagtataagagtttttagtgaggtttccagccatccctaaaactttaaaacataatactaaagatgtgtgaaataaaattatcagtcacatatctgatgagtttccatcagacaagtgagcaggccactcaaagcctcttcagcccccttgctttctcctcgattatccaagctttacaaagtcaaactgcatatggagtgctttaatctttgaacgtacrgctgcatcagacctttcccagctcttctcacacttttaatggatccaattcacctcctttccaaggagcatgtctaggtaagtgacagggtgacgataatgccttggccacacaggcctcagaaaagaatggtgactaacgattaaatgcttagcatgccagcccacat

SEQ ID NO: 284793 - DNA, 623 bp, Homo sapiens
gaagaactgcccttggaaacaacacagctggaattgaggagtagataagtaggcctgaagatgcctccacacaatatttatccatcttatctatatgcagcttcctgagacagcactaggagatgtagggcccactagcctgagataaataagtctcagcttcaggataaaccacagggctcttgttaacaaaaggaaggctttctctcctgcgtgattttaataagtaaatttgttcgtataccaaggtcacagaaagagaactatagtatatagttatgcagcatttaagaaatacataaacagcttatacgtatgaaaaaarttctggactattttcattttaaaaaatgtctataactagaatatagacccaaatacatgaactagagtttcaggctagatatccaactttgccactctattgtaatgggccaaaagtctattattttagggataattttgtcagatttgaaatggaaacaaaatatcacactgagcaatgtttgctgcattgtgtttggttgttatacaaagtaatagataattttggataatgttatgacacctgagtgagctgtttaagaaattaactattattcgtactcattctttaaacattt

SEQ ID NO: 284794 - DNA, 623 bp, Homo sapiens
gaagaactgcccttggaaacaacacagctggaattgaggagtagataagtaggcctgaagatgcctccacacaatatttatccatcttatctatatgcagcttcctgagacagcactaggagatgtagggcccactagcctgagataaataagtctcagcttcaggataaaccacagggctcttgttaacaaaaggaaggctttctctcctgcgtgattttaataagtaaatttgttcgtataccaaggtcacagaaagagaactatagtatatagttatgcagcatttaagaaatacataaacagcttatacgtatgaaaaaaattctggactattttcattttaaaaaatgtctataactagaatatagacccaaatacatgaactagagtttcaggctagatatccaactttgccactctattgtaatgggccaaaagtctattattttagggataattttgtcagatttgaaatggaaacaaaatatcacactgagcaatgtttgctgcattgtgtttkgttgttatacaaagtaatagataattttggataatgttatgacacctgagtgagctgtttaagaaattaactattattcgtactcattctttaaacattt

SEQ ID NO: 284795 - DNA, 616 bp, Homo sapiens
acagacatttgaattggaagggggaactgctcagagatcaggcagagtcaaagctcaagcctgtgcagaactgagaaggtttcatagtgtgcagagcccctgcaataaaacgcaaccataggagcccatcccccaaggctctctatcttggtctggtgtctgctgcccctgctactgccaggctgggagataacaaggctgcctgtcccacaggacyagggcacatctgatccatgcacccccttgtccactggcccctcaaccaagattgcctacctggtcactcctgcaggagtgcccacagcaaaatctccactgtcctggctgagtgtttgactagcaaatctgggagaaatttggccccccagcacagctggcactcaaccctgaggggccagaggacaaaaccacatgcccagtcccaacacctcaggattcgaacacacctcacaggggtctcaagctgagatgtgtggtctgaacttgagcagaggaggagtccccactctcagaacactgagaagaatgtgggtcaggttcatgtgctgacacaggagctgggcatccttcccttaacaagcctggtccaggaaaggtatagctggttagctagatg

SEQ ID NO: 284796 - DNA, 556 bp, Homo sapiens
agatttgtgcacttttctagatgtattctatatgtcagtaaaaactgacaaagaccatacaaataagyaggttaatcaaaaagtttcaaatcagaagaggattgaagagttagagttagtttagtgtgattttggcaccagaatgggcaaataaacctatgaaacagaatagagtgtccaatatcagaagcacacttgtagggtcatttgatttatgatactagtccatgacttggaaaacttcagagcccaaataaacagaagaaaagagataaaaatactaggcaaaataatcaaaacatacagagaaactgagggagtggatgcaaagcagagagaatggatactaactcaagaagaactctggtgaagctttcctaagaaaggctttctggaaagtctgcaagcggtgacacatgaaagcagcagacaatgattaagtacagagttacagagcgaaccttgttctctggggaaaagaccacttccctgacaatgggtcccagtgctcaaaagaatgtgaaatcaatgctgcattatcaacttgactgtattg

SEQ ID NO: 284797 - DNA, 556 bp, Homo sapiens
agatttgtgcacttttctagatgtattctatatgtcagtaaaaactgacaaagaccatacaaataagcaggttaatcaaaaagtttcaaatcagaagaggattgaagagttagagttagtttagtgtgattttggcaccasaatgggcaaataaacctatgaaacagaatagagtgtccaatatcagaagcacacttgtagggtcatttgatttatgatactagtccatgacttggaaaacttcagagcccaaataaacagaagaaaagagataaaaatactaggcaaaataatcaaaacatacagagaaactgagggagtggatgcaaagcagagagaatggatactaactcaagaagaactctggtgaagctttcctaagaaaggctttctggaaagtctgcaagcggtgacacatgaaagcagcagacaatgattaagtacagagttacagagcgaaccttgttctctggggaaaagaccacttccctgacaatgggtcccagtgctcaaaagaatgtgaaatcaatgctgcattatcaacttgactgtattg

SEQ ID NO: 284798 - DNA, 556 bp, Homo sapiens
agatttgtgcacttttctagatgtattctatatgtcagtaaaaactgacaaagaccatacaaataagcaggttaatcaaaaagtttcaaatcagaagaggattgaagagttagagttagtttagtgtgattttggcaccagaatgggcaaataaacctatgaaacagaatagagtgtccaatatcagaagcacacttgtagggtcatttgatttatgatactagtccatgacttggaaaacttcagagcccaaataaacagaagaaaagagataaaaatactaggcaaaataatcaaaacatacagagaaactgagggagtggatgcaaagcagagagaatggatactaactcaagaagaactctggtgaagctttcctaagaaaggctttctggaaagtctgcaagyggtgacacatgaaagcagcagacaatgattaagtacagagttacagagcgaaccttgttctctggggaaaagaccacttccctgacaatgggtcccagtgctcaaaagaatgtgaaatcaatgctgcattatcaacttgactgtattg

SEQ ID NO: 284799 - DNA, 533 bp, Homo sapiens
aataactgcaaggctgcctgggttcagctgcgactgttaatcaggataaccacccatggcttctccagaatggcagtctcagagtatctggactccttatatagcagctcaggattcccagtgttccagaagtragcattccaagagatccacacaaaagctgcaatacttcctatgatctagccttggaagtcttataacaccactattgccctttcttttggtccagcgagtcaactaagccagcccagatttaaggggagaagtatgaaataggctatcacttacagaggaaatagcattcatgtacagggcagaatggaagtgatgccagccttcttagagacatgcttcatactaagtcagtaacatcctttgcatcactagagaaattacaaagtttttaaagaacagaaaagtcagattttagcttttgcatgagaatggatatcaataactaaatcagccgatggaaggtgtgacaacagatgccagcacggacagttgatggttgaggagtagatgccctgccc

SEQ ID NO: 284800 - DNA, 1144 bp, Homo sapiens
tctgggtgacagcatgaggccttgtctcaaaaaaaaaaagtaatataaaactacagttaacaaaacagtgtgttgttgrcataagaataagcatattcttgtttatagatttatagacaattcatttcactttttaacaaatgttgcttgaacaagtggatatccatatgtcaaaaaatttaaaaatgaacttagacccttacctctcaccatgcacaaaaattaacacaaaatgggtcacatatttaaagagctaaaacattagaacttttagaagataacataggggaaaatacttgagatcttggattaggtaaagatttcttaaatactatacaccaccaaaagcatggttcataataaatttactaggttggatttcctcaaaattcaaaatataccattaaaaaaataaaaatgcaaaccacagaaaggaaggaaatacatgcaaaatgtatctgagtttttaagtatatccagaatatacaatttaacaatgacatataaacatttgaatwctctggaggcagaggtgggaagatcccctgagccaggaaggttatggctgcagtgagccccagtcttgccactgcactctagtctgggtgacagcatgaggccttgtctcaaaaaaaaaaagtaatataaaactacagttaacaaaacagtgtgttgttggcataagaataagcatattcttgtttatagatttatagacaattcatttcactttttaacaaatgttgcttgaacaagtggatatccatatgtcaaaaaatttaaaaatgaacttagacccttacctctcaccatgcacaaaaattaacacaaaatgggtcacatatttaaagagctaaaacawtagaacttttagaagataacataggggaaaatacttgagatcttggattaggtaaagatttcttaaatactatacaccaccaaaagcatggttcataataaatttactaggttggatttcctcaaaattcaaaatataccattaaaaaaataaaaatgcaaaccacagaaaggaaggaaatacatgcaaaatgtatctgagtttttaagtatatccagaatatacaatttaacaatgacatataaacatttgaatagccactaaacaaaaacatgaacaaca

SEQ ID NO: 284801 - DNA, 1055 bp, Homo sapiens
gaagcaagtttttttcttcagtattaaatcaaccagaagaaacaatgtcaaccaaaacaacttcactgtagctgaattctctcagtctctagctcatagccacatgaatggggyggtacataagctcattctggcaactccagtaagtgttgtaaaccagcgcttctcaaattttagtacacatatgaatcacctggtattttgttaaaatgtagattctgattcagtaagtctaaggtggagtctgaagttcagtaagtctagggtggggtcagcaagtctcagcatcacaactcccaagtgatactgaggctgctagctggtgggccaccgtgagtagcatagttgaggtcttgaataaggaaagcatacttgtaagtatggaaatattcagacaaaaaatgcttccattcttttaacatttgtctacaagtagtttcggaattcgaatatcatcaaagggtggaactttagaaaaaaagataggaagagtttataagactaaacattattattccccagtgcagagctttgaaactacaawctcatgcaggatattccaaatacaagaaatttacttctgtcttgttaagtcacagattttaattgtatttgttactgtagcctaatttaatctatattgataaagcattactatagaggcaatctgttagttaccttgcagaataaatgtaagtcaccagaggagggcagtgtgtgctggggaggaagctcatggtgggcataagagacattcagaagtgttaaatagaatggtacgtttaggaaacttcaggtcgtcaggctttactagagaatatgattctgaagaagacatgaaagaggaaagagaaacaatgtgagtctcaggcccctctggagtgaaggaaagaaatggagaaggagttaaagtccaggcatatcactcagggcwgcatatggaggaagataattatcagattgaactcaaagttaaatcaaagaagtaagcttctgcctaggaaatcggaaatcagaaaaagcactatgctagaaagaggagtcagccacaaata

SEQ ID NO: 284802 - DNA, 511 bp, Homo sapiens
ctcatgcaggatattccaaatacaagaaatttacttctgtcttgttaagtcacagattttaattgtatttgttactgtagcctaatttaatctatattgataaagcattactatagaggcaatctgttagttaccttgcagaataaatgtaagtcaccagaggagggcagtgtgtgctggggaggaagctcatggtgggcataagagacattcagaagtgttaaatagaatggtacgtttaggaaacttcaggtcgtcaggctttactagagaatatgattctgaagaagacatgaaagaggaaagagaaacaatgtgagtctcaggcccctctggagtgaaggaaagaaatggagaaggagttaaagtccaggcatatcactcagggctgcatayggaggaagataattatcagattgaactcaaagttaaatcaaagaagtaagcttctgcctaggaaatcggaaatcagaaaaagcactatgctagaaagaggagtcagccacaaata

SEQ ID NO: 284803 - DNA, 482 bp, Homo sapiens
cctgctaaatatcagctgcccaaagtttataaactatttgttcagcccaggagaaaactgctatgaaaattacagaagagcagatataaaattcatttatcatgtctaattgtaccaacttagtcagcatttttcatttttattgttatcttttagcaatgttgttccctgtcttcaaaaatttgtcaagaagaytgagatccactgctgtaagattacacagatgccctcctcatcgtctatgacaggctataataaatcttgccagacttaactttaactactctttatttacgattcagactataattcaccatatacccttatggaagaatcatctttccagaagcctagcaacaatcatgccactatcctcctcaaaatattcactaaatcttcattagctccacattcacaagtgaattaaatgcaactttcttagttcatcacacaaggctttgaacactatggcccccaaacta

SEQ ID NO: 284804 - DNA, 410 bp, Homo sapiens
acagatttattgttccctttcaataattcagatatgaaattgttctttgcagctagcatatgactggggagtaagagttgaggtggggttggatatctgaaattcctgccctgatcctgatatctagaccatttcacatctactatgattgtttcagaggataatttgactgaaatattcataagtacaaacaaggggggayaaaatatatattgaagggactgtaataggcgtttctaaactaatcattgtaaagagagaaattcaggtaggaaattcatggaattgcttaaggattgtggtagaaaaggacaatctggagttgaaaagagagagcaactaggaataataaacaatttgtctgcatctttactggggaaatgtttagggagcttcttattctcaaattg

SEQ ID NO: 284805 - DNA, 514 bp, Homo sapiens
aatgaaactgtactactacctttcaccatatacaaaaattaactcaagatagattagactgggtacagtggctcaygcctataatcctagcactttgataggccaaggtgagcagattggttgagcccagaatttcaagaccagcctgggcaacacagtgaaaccccatcactacaaaaaatacaaaaattatccatgtatggtggcatggacctgtggtcccagctactcaggaggctgaggcaagagaattgcttgagcccatgaggcagaagttgcagtgatctgagatcatggcactgcactttaacctgggcaacagagcgagaccttgtctcaaaaacaaacaaacaaacaaacaaaaacagattaaggacttaaatgtaagacctgaaaccataaaattcctactagagaaccaggaaacacccttctgggcataggccctggcaaagatttcatgacaaagatatcaaaagcaattggaacaaaagcaaaaattgacaaatgggat

SEQ ID NO: 284806 - DNA, 646 bp, Homo sapiens
aactgttgattttttcagtttgttcaaccttttacttgctgtcaggacagagtaaagatttctttctttcttttttttctttttttttgacggagtcttgcactgtcacccaagctggagtgccgtggcgtgatctcagctcactgcaagctccgcctccagggttcacaccattctcctgcctcagcctcccaagtagctgggactacaggcgcccgccaccacgcctggctaattttktgtgtgtgtgtgtttttagtagagacggggtttcacagtatggtctcaatctcctgacctcgtgatccacccgcctcggcctcccaaagtactggggttacaggcgtaagtcactgtgcccggccaggacagggtatagatttctaagcttcttctacatgcctgattataaattggatgtattcttgctgtctttttaaaaaagttaataagaaatgatatttataaagtctgtttaaaatgatttgaagctgggcatcagttttataaattccattctatttctggttagcaatcattcctagagtgtacccctccagtcaccctattgaaagccagagattttactggggctccttctccttggagaatgccataatttaattttttttcctagttctattac

SEQ ID NO: 284807 - DNA, 514 bp, Homo sapiens
atggtagaataacacggctgctgaaagcttcttagtatcagtttgacctgttttccagagaaaagactgaattcagttttccaaagaaagaaatatcatgggaaaagaaggcaacatgtatccagtcttgatctatggtactataacctttagatggggtcatgtagaatcatgtggataagtcatctttgaaatgaggcttctgagcagacaaaatatccaacatacacctaatgccttcccagcctgggcagaggggtactgcaaatatctgggacagatctcagttctgagttgactcaatatacttcctgtyttaggaatattttcattttacctatcaaggaattaaatgctatattccgtgagttaagaatttcgggcaatggagggtacatcatttggggattagaaacagggaaggaatctgcccaggaaattcatcatccttattcttaggatggtaaattcattgtggatgtgggagaaggagagtaatctgaagtgagataag

SEQ ID NO: 284808 - DNA, 576 bp, Homo sapiens
tgtaagagaagatttaacaccctgccctgatttcctgggtctgtaaattcggggagctccaatttcacacggaggcctcttaccatctcttgcttcatggtgaatacctctgcatgtgggaaaatttcttcctgctggaatcagcttaggttcrtattttctttttcttctttttttccctggtgatatttttgtggaccctgaacttcaaatatattttttttggttgttgtttatgaaaggtgtccagtaccatgtagatgaaaaatttgagtaacgttcatacaactagagtgttttgttgacagttctcattttgttaatatatatttattgaaatgtaagggttttcatggcctgaaaaaacaaaatatgcattacaactttcctgctgtgtgtgtttatttcagttctgaagctagcctgaaataacctctactttataaggaaattgatgctgagttgtcattatgcccaacatttctaatacatatacagctaatttgaatgttataagtatagaaaaaatatcaggtaagtctgtattcaaataggaatatcaaagtaaaataacca

SEQ ID NO: 284809 - DNA, 556 bp, Homo sapiens
cttaccatctcttgcttcatggtgaatacctctgcatgtgggaaaatttcttcctgctggaatcagcttaggttcatattttctttttcttctttttttccctggtgatatttttgtggaccctgaacttcaaatatattttttttggttgttgtttatgaaaggtgtccagtaccatgtagatgaaaaatttgagtaacgttcatacaactagagtgttttgttgacagttctcattttgttaatatatatttattgaaatgtaagggttttcatggcctgaaaaaacaaaatatgcattacaactttcctgctgtgtgtgtttatttcagttctgaagctagcctgaaataacctctactttataaggaaattgatgctgagttgtcattatgcccaacatttmtaatacatatacagctaatttgaatgttataagtatagaaaaaatatcaggtaagtctgtattcaaataggaatatcaaagtaaaataaccagtgattaaacattccagtggtagtacatgggaaccaagtgagaaaatatgtaagaaac

SEQ ID NO: 284810 - DNA, 556 bp, Homo sapiens
cttaccatctcttgcttcatggtgaatacctctgcatgtgggaaaatttcttcctgctggaatcagcttaggttcatattttctttttcttctttttttccctggtgatatttttgtggaccctgaacttcaaatatattttttttggttgttgtttatgaaaggtgtccagtaccatgtagatgaaaaatttgagtaacgttcatacaactagagtgttttgttgacagttctcattttgttaatatatatttattgaaatgtaagggttttcatggcctgaaaaaacaaaatatgcattacaactttcctgctgtgtgtgtttatttcagttctgaagctagcctgaaataacctctactttataaggaaattgatgctgagttgtcattatgcccaacatttctaatacatatacagctaatttgaatgttataagtatagaaaaartatcaggtaagtctgtattcaaataggaatatcaaagtaaaataaccagtgattaaacattccagtggtagtacatgggaaccaagtgagaaaatatgtaagaaac

SEQ ID NO: 284811 - DNA, 616 bp, Homo sapiens
cttgtacaaaagtagattaatgtccttcacctgtgactctacaacaccaattcattcactttggtttttcagccagacatctggccattttagtgatttattgacttaactgattmatttggtaggggaggttaatactattgtgccttcagatatagccttaagtttctgtcaccaagaggtgatggcaatctaacctgttggcctcaggatgtgctttgccttccctggattcctcagactcctatttttatatcagattctactttggttgctggcatgactttaagctggcagggcaaagggctttcttgaaggtgactgtctcctcaacctgtctgacttaaacggttgggtcaaggaaggaaaaaaatggtatgatgcagcaggaattgggttgttgaaaactgtattttatttgcatttcttgagtttgcacagaacttaagttaccagcctttgattagcaatataaatttaaagtttgtcttgggcaaacttactgaaaactcctttaggcactttcctcacatcaattaaaaaaaaaaaaaagagaggttaatagaacactagctactattttgtttcctttttaatgccacgtgatctgtatacc

SEQ ID NO: 284812 - DNA, 616 bp, Homo sapiens
cttgtacaaaagtagattaatgtccttcacctgtgactctacaacaccaattcattcactttggtttttcagccagacatctggccattttagtgatttattgacttaactgattcatttggtaggggaggttaatactattgtgccttcagatatagccttaagtttctgtcaccaagaggtgatggcaatctaacctgttggcctcaggatgtgctttgccttccctggattcctcagactcctatttttatatcagattctactttggttgctggcatgactttaagctggcagggcaaagggctttctygaaggtgactgtctcctcaacctgtctgacttaaacggttgggtcaaggaaggaaaaaaatggtatgatgcagcaggaattgggttgttgaaaactgtattttatttgcatttcttgagtttgcacagaacttaagttaccagcctttgattagcaatataaatttaaagtttgtcttgggcaaacttactgaaaactcctttaggcactttcctcacatcaattaaaaaaaaaaaaaagagaggttaatagaacactagctactattttgtttcctttttaatgccacgtgatctgtatacc

SEQ ID NO: 284813 - DNA, 548 bp, Homo sapiens
tcagttgaagctgatgaatgactctgcaagttatcttttggagggctgtacttattctgatacaaaatacgcagttatatacagcattaaccatttagcaattatcccatgtgagtcatgggaatgctttttcccactctttactaacggaaattctaattgatcattggctgccccacaagcacagcagagtcaggtatctgatgttggtcaactgcttactggctcttactctgcttctaactctctaggacctcctgcagcctttctcctgcctgttactttattctgctttctaaatgtcattccttagatccttaattaagctaccccaaacttgtttctcaccttgaacctctgccttactgttactcatccatttgctgctcttggatcacacatttttttttgaccttgccatttgtaaaatgtaattgaattgtgtgtgtgtgtggctayccttttcttttttaattctaggcactcatctttactattaattctgtaacaattgctatttttgactttagaacattgtcctaactttt

SEQ ID NO: 284814 - DNA, 591 bp, Homo sapiens
ttttgtctgggcttcctttttatgttgggaaaagaatacttagcaacaagtggatgcttatgttctcttaaactagtaataaaaataaaatggcacttcatattgtaaaggctagagggaaccttaggaagtggctagtttgagcttctcattttgcagagaagaaaatgagatagaggcaggtaagtaaggtgctcaaacacatgaagttaggtggactctaaacctctcagactatgatgcaggtctcctgactctcatggttttgttctcctggaatatggcatactccataactttcaactgtatgtgtgccttctaggaataatcagaaaaatgtgtgtcaagcttatgtgagctctaactatccacctgaccaccttactcccatagttagtgggctggctactttgctaagaagaaaatttgyattaagctttacacacatggttaaccctgtggcccttgtaggctctctgtcaggggaagggacagaaaaacaaaggaaggaggaaggtgcagaagagcactcaactggagagaaacaacactgaaaatataccaatagaatccacagcagctataaagaga

SEQ ID NO: 284815 - DNA, 618 bp, Homo sapiens
cttgctttctgtgccaataatgctcatgcaaacacggtgaayattcctaaaacctgtcagactgtaagaagtgtggcaagcaccaaccccacaaagtgacatagtacaagaagagcaaggattctctgtatgcccagggaaagcagcattatgacaggaagcagagtggctgtggtgggcagactaagccgattttccagaaaaagtctaaaactaccaagaagtttgtgctaaagcttgagtgtgttgagcccagtgaagatctaagagaatcctggctattaaaagatgccagcattttgaactgggaggagataagaagagaaagggccaagtgatccagttctaagtatcatcttttgttttattatgaagacaataaaatcgagtttatgttcacttcaaaaataaataaataaaagtaatgtcttactgttggcctgatccttattattagaccaaagctcagaaaggcagaatcattgacatgaccagtcctgtaaccaggaaggacacttaaaaaagagaaagcgattgtttatgattccagtcttctctttttatttcattcctagtaacaagttcactattttagaaaatgaaaatgtaccgcatttt

SEQ ID NO: 284816 - DNA, 618 bp, Homo sapiens
cttgctttctgtgccaataatgctcatgcaaacacggtgaacattcctaaaacctgtcagactgtaagaagtgtggcaagcaccaaccccacaaagtgacatagtacaagaagrgcaaggattctctgtatgcccagggaaagcagcattatgacaggaagcagagtggctgtggtgggcagactaagccgattttccagaaaaagtctaaaactaccaagaagtttgtgctaaagcttgagtgtgttgagcccagtgaagatctaagagaatcctggctattaaaagatgccagcattttgaactgggaggagataagaagagaaagggccaagtgatccagttctaagtatcatcttttgttttattatgaagacaataaaatcgagtttatgttcacttcaaaaataaataaataaaagtaatgtcttactgttggcctgatccttattattagaccaaagctcagaaaggcagaatcattgacatgaccagtcctgtaaccaggaaggacacttaaaaaagagaaagcgattgtttatgattccagtcttctctttttatttcattcctagtaacaagttcactattttagaaaatgaaaatgtaccgcatttt

SEQ ID NO: 284817 - DNA, 527 bp, Homo sapiens
gcacacctgttgtcccagctacttgggagcttgggaggctaaggcaggagggtcagttgagcccgggagtttgaggttgaagtgagctatgattatgccactgcactttagcccaggcaacagaatgagacactgtttctaaacaaaaatatatatatatccattctgtctggtttccttactaacagaagcctggatatttttaaagatgacaatgtatccagacaaaatactcagctttctagactcctttgcagctacatggccatgtgacatagttctgctaagtagaaatgttctagaaatttctgggacagcttttgctttcttttctttttctatttatttatttttgagacagggtctctctctctctctctcacctaggctggagtgmcgtggcacaaacacagctcactgtagccttgacctcttgggctcaagggatactcttgccacagactcccaggtagctgagaccacaggtgcatgccataatgcctggctatttttttattgtttgtaga

SEQ ID NO: 284818 - DNA, 524 bp, Homo sapiens
aatacatgaagcagaaattgacagaactgaagggagaaataaataattcaacaataatagctggagactttaatatgccactttgaataataaataaacaataaaacagaagctcaacaaggaaacagaagacttgaataataccataaatccactagacccaacacacatctatagaatgcttcacattcttctcaagcacacattaaacattctccaggatagaccaaatgttaagccacaaaataagtctcaagtttcaaaagactgaaatcatacaatgtatgttttacaacaatagaatgaaactagaataarcagagaagagaatttaggaaatacatatatgtggaaattaatgcgctccgaaataaccaatggatcaaagaagaaatcacaagggaaattagaaaatattttgagatgatgaaaacaaaaacaaatcatatcaaaatttataggatatgcctaaagcagtgctttattaaaaaagatctcaaatcaatagcttaaacttcacctta

SEQ ID NO: 284819 - DNA, 524 bp, Homo sapiens
aatacatgaagcagaaattgacagaactgaagggagaaataaataattcaacaataatagctggagactttaatatgccactttgaataataaataaacaataaaacagaagctcaacaaggaaacagaagacttgaataataccataaatccactagacccaacacacatctatagaatgcttcacattcttctcaagcacacattaaacattctccaggatagaccaaatgttaagccacaaaataagtctcaagtttcaaaagactgaaatcatacaatgtatgttttacaacaatagaatgaaactagaataagcagagaagagaatttaggaaatacatatatgtggaaattaatgcgctccgaaataaccaatggatcaaagaagaaatcacaagggaaattagaaaatattttgagatgatgaaaacaaaaacaaatcatatcaaaatttatargatatgcctaaagcagtgctttattaaaaaagatctcaaatcaatagcttaaacttcacctta

SEQ ID NO: 284820 - DNA, 609 bp, Homo sapiens
actgatttattctttttcttcaatctaagtgtttcattctttctgaagctttcccatgctttcccaggtggaactgatcattccttcatgtatgcctccactgctcagctcaacaagtaactcttaataacctaccacctgttatctctgggagagggacatatgtttgccaatttctatcttcaatgcttatcacaaattttcttatatttgaaataatctgattcaaatgagaactttaacctaaaactttaattggaaagacaatcttataaaaatcttataacatattctagaaatggtccaaatactatcacaaatggaagaagttcagcttgaggagcatccaatcatgtgaggtaaaagtcttctartagaaccagcatgatcttccagaaaattacaaagtaaccattatctaccccgtcatctccttcttgcctggcatccccagagctgaagaaagggaagaaaaaaaatggatttgttttttgccatgaaaaatcttaatgtaaagattaatgcatcttgctgcttaagagaaaggtgttactttcactcggggtaaattaaatactaggattgagactaatctgttcacagccaaat

SEQ ID NO: 284821 - DNA, 609 bp, Homo sapiens
actgatttattctttttcttcaatctaagtgtttcattctttctgaagctttcccatgctttcccaggtggaactgatcattccttcatgtatgcctccactgctcagctcaacaagtaactcttaataacctaccacctgttatctctgggagagggacatatgtttgccaatttctatcttcaatgcttatcacaaattttcttatatttgaaataatctgattcaaatgagaactttaacctaaaactttaattggaaagacaatcttataaaaatcttataacatattctagaaatggtccaaatactatcacaaatggaagaagttcagcttgaggagcatccaatcatgtgaggtaaaagtcttctaatagaaccagcatgatcttccagaaaattacaaagtaaccattatctaccccgtcatctccttcttgcctggcatccccagagctgaagaaagggaagaaaaaaaatggatttgttttttgccatgaaaaatcttaaygtaaagattaatgcatcttgctgcttaagagaaaggtgttactttcactcggggtaaattaaatactaggattgagactaatctgttcacagccaaat

SEQ ID NO: 284822 - DNA, 494 bp, Homo sapiens
ctagtaactccatatttccttccttcccacatgcacactcacttttccctctacgtggaaggccttaaaaaaaaaatcattcctttatctgcatgactaaatcttaccaatcgttcaaggtccatcctaagtcctctctctctagaagacttcttgcccttcccagcagggagttataatccctttgtgatatccctatggcattatatgtatattttctttgacttactatttttaaatcttgtattattttttatcaacttatatattttaaaygtcttaatagattgaagctgttcaaaggcttgatccatgacttacatatcttatcctgggcaatttaatagatttctttggccttaggatgtcctcatagataattgtaatgaatgatgataaatggagtattgatatttagctgtatgacaagacttggcaatatgtaacacaagaaataaactgtactaaatttttttaatgtcacaatttgtaga

SEQ ID NO: 284823 - DNA, 1727 bp, Homo sapiens
ctagtaactccatatttccttccttcccacatgcacactcacttttccctctacgtggaaggccttaaaaaaaaaatcattcctttatctgcatgactaaatcttaccaatcgttcaaggtccatcctaagtcctctctctctagaagacttcttgcccttcccagcagggagttataatccctttgtgatatccctatggcattatatgtatattttctttgacttactatttttaaatcttgtattattttttatcaacttatatattttaaacgycttaatagattgaagctgttcaaaggcttgatccatgacttacatatcttatcctgggcaatttaatagatttctttggccttaggatgtcctcatagataattgtaatgaatgatgataaatggagtattgatatttagctgtatgacaagacttggcaatatgtaacacaagaaataaactgtactaaatttttttaatgtcacaatttgtagawctcatcattacctcttccaaattctgactcagttttgaaattggcccagaaactttgagtgatcatctttattagtggtgaaactgaattggaaaaggtaatttggattgaaggccaaaatggggcttcctacaacaggcctctggaactgattgtgtccaaccagtcgcagatacagcagctagaggtgtgcaggcctccctggcagattggaccaggagggcctggtcctggtgagattatgacwtaatggccagagttacagggagagcatgcaacacttgctgcaggcttaagagagaaccaggctctaggcaaggcatgagcaatgaccttcatccagactcaccaatgaaataagaaaggaataaggtttagagagaagtatttcctgcttgagatgatcaggaagaaactcaggaagaaaaagagcagggttatctaacaaaagacacgctcataaacttaggtcataagaactaaactaaatcacttaatcacaagatataagaatacagaaggaaggacacacaatttttcaaatttcctgtgggtttgatgtcagatttttaagacataatacatatgctaagaaaaataggctttagattatgtttggagaatcgtawtgtcacaatttgtagaaaacctaaccactcatcattacctcttccaaattctgactcagttttgaaattggcccagaaactttgagtgatcatctttattagtggtgaaactgaattggaaaaggtaatttggattgaaggccaaaatggggcttcctacaacaggcctctggaactgattgtgtccaaccagtcgcagatacagcagctagaggtgtgcaggcctccctggcagattggaccaggagggcctggtcctggtgagattatgacttaatggccagagttacagggagagcatgcaacacttgctgcaggcttaagagagaaccaggctctaggcaaggcatgagcaatgaccttcatccagactcaccaatgaaataagaaaggaataaggtttagagagaagtawttcctgcttgagatgatcaggaagaaactcaggaagaaaaagagcagggttatctaacaaaagacacgctcataaacttaggtcataagaactaaactaaatcacttaatcacaagatataagaatacagaaggaaggacacacaatttttcaaatttcctgtgggtttgatgtcagatttttaagac

SEQ ID NO: 284824 - DNA, 541 bp, Homo sapiens
cactaagcatactgtttacttcaaatgacattttttttttcaatagcaagacttttttagtaaggaagcaatgtgtggattttcattttggagcgagctgtttatctcatcaaagaccagcactatggatagtgctgctataaattattgtggtatattgcctccctgaaatggtaatattcaataaggatttgataaattacttttcaagttattttcccccttaagcctgtattagatagtctttattctggcaatacacttctcatcaataatcaaaaattattataaagctgagttkaataaatggctcttaggtttggtttgagtgtttgattgtattgctctctccctgaccttcaggttactaggtgacattcctgattggaaaagctcagtgcccagctagacagcttgccccacactaggctattataaggtttgacaacttggtccagaatagtcattgcaatctacaagtaactggaggctgtgtggttcccatcctctcccactccccttagggacactgcagttgggg

SEQ ID NO: 284825 - DNA, 588 bp, Homo sapiens
ataagtcaccagttacaaaaattagcaactcatggacaatcttgctttaatccaaaaccaaatctgctttctttcccttattactggraagcaaatcccacacagcatcatccataaatatttcagtacgtttatctaaaagataaggactatttttaataaacataaatttcaagccattatcagacataaaatatcattgattatatcaatattattaaatatcatcaattgtatcataaatgttatgaatgtttctttttctattttatggttctttagtttgcatcagaatctaagtaaaatcaattcattgcaaccagttgatctatgacttcagtctcttttaatctctcctttcatttgcaatttatttgtcataaaagttgggttgttggacgggtacggtggctcacgcctgtaatcccagcactttgggaggctgaggcaggcagatgacttgatgtcaggagttcaagaccagcctggccaacatggtaaaaccctatctctactaaaaatacaaaaattagccaggtgtggtagtgtgtgcctgtagtcccagctacttggaagctgctgcaggat

SEQ ID NO: 284826 - DNA, 588 bp, Homo sapiens
ataagtcaccagttacaaaaattagcaactcatggacaatcttgctttaatccaaaaccaaatctgctttctttcccttattactggaaagcaaatcccacacagcatcatccataaatatttcagtacgtttatctaaaagataaggactatttttaataaacataaatttcaagccattatcagacataaaatatcattgattatatcaatattattaaatatcatcaattgtatcataaatgttatgaatgtttctttttctattttatggttctttagtttgcatcagaatctaagtaaaatcaattcattgcaaccagttgatctatgacttcagtstcttttaatctctcctttcatttgcaatttatttgtcataaaagttgggttgttggacgggtacggtggctcacgcctgtaatcccagcactttgggaggctgaggcaggcagatgacttgatgtcaggagttcaagaccagcctggccaacatggtaaaaccctatctctactaaaaatacaaaaattagccaggtgtggtagtgtgtgcctgtagtcccagctacttggaagctgctgcaggat

SEQ ID NO: 284827 - DNA, 549 bp, Homo sapiens
ttgtttcactttggcatttgtttagtatgactgtctctttaacatttgtttccctaataaaactgtaagctccatcatggtaaagacctagcacagttttgctcacttttccacagtgccaggttcttagaagggactcaaatattttttgagtgaataaacatattagtgcctgtggggtgtggttggagtggtagaagactgagagaaagaaaactaaacttttctacttcaaaaagcaagaactgaggagttaatacaagccaaacagcaaggaggccctggtgcccaggtaatggattaaaaaaatggtgggtgggcaacatggcagttggcatgggggtgtaatggaagccatggtgttagttgaagccacttatatgaaataaatagctaatgttcaatttgttggttatttgctagctatgaatgatgggaagccatttcatatcatggaaggaccagtaacatccactatcaacacagtcttgagtgagtagaacccagtgagaaaaaagaacacagagrcccaaacagaacggagaggaa

SEQ ID NO: 284828 - DNA, 1202 bp, Homo sapiens
tgcagtttgcatgtgtgggagtggagattttattctctgagcaagttttaatctcaggatggctctggtctcctcatggcaaacaaagccatccaaacagaaaagacaaaaataaactctaaaataaggaatatttacaaattattctggtcttgatttttttcattttatattttgtagactccactattaattcccaagccttgaatacaattgggtagaaagaaagaaaargaaagaagaaacggagggaggaagaaagagagggagagagaggggaaactacaaaactagtttaaaataactgaccatctaaaaagtttaggaaacatgactctgttgccccaacatgcatgagcaaagaaatattttaatttctgaaacatcacttaatattttaaggtagtagagattggctctcctttttcacttattatgttatccgaaacaaacttattctgagggtaaggtaaaaataatttagccttattttcttgcttaagtgaaaaggaagggagtgtttacaaacatgtttttaatcagacttcttttcttttctttgtttcttgccatggaccaaaaaatgtgacactcgagttaattccctctgctactwagccacaggagattataatgacttggcaggaagatattgggcaggcattttagaatcttcaggctgtatcctcaccctttccctgttgtatcaaactcctttatggtattatttcctgtttagctggaaggaatgacatatccccaaatgcgcaggtcctgggcattgaggagatgccagttatcctgcctgttaatatgaatgtgccctgaggatactgatgtttttcacatgacaaatgtctagctttggatgtcctagtcatactgtgggtcatttattttctttcttattttaaagtcttttctttggaaggccaaggcaggtggatgacttgaggccaggagttcaagaccagcctgggtaacatggtggcccagcwatttaggaggctgaagcaggagaatggcctgtacccaggaggtggaggttgcaatgagctgagatcacgccactgcactccagcctgggcaacagagtgacacgctgcctcaaataataataataataataataataataataaaagtcttatcttgacctcctcaggatgctgtgtccctgggccctctctgtttcctttctg

SEQ ID NO: 284829 - DNA, 579 bp, Homo sapiens
taggtatgaggaatttaaggttgactactgatcttagtccccatctcccctcagttcctaactccattttgaccagccccagcaatgctgaagtagtgttaagggagagtgtagaagaaaagacaggaaacaggagggcagagcaaggccacaggccctggagcagtaaccattcttctcccttcttttcaccctcatgttaacaatagcaaacaggaaccacagcattaatggtagttaacactttttgagcacttagtgcattcctgacaccacatgyagtatcttatttgatgctcacaagaaatactattgtttgttcaccacaggtcacattagattttttgcagccctgtctattatttattcgcagtgagtctcctctcagtctaaaccttgaagtctcttcacttcttatacttgtacagttagtgttaagcatgtcttctgtattgttatccaagtcgttgataaaacccatctctttctaaaacactttcagctcgtccttatcctagtaggtgagtccttttggatctccagtggagtttgggggacaaattctataatatattccca

SEQ ID NO: 284830 - DNA, 562 bp, Homo sapiens
aggcactgatgtaaattcctgtctagagctgaagggctgagaactaggagcatcaaaggcaggagaagataaatgtcgcaactcaagaagttaggcaaagttaattcaaacttcttccaccttcttgctctattcaggccttcaaagggttagatgatgcccactcaacatcggagagggccgtctgctttattagtccaccaattcaaatgtttatctcttctagaaacaccatcacagacacacccagatattttaacctggtatttggccccctggggcccagacaakttggcatataaaattaagtatcacagtgcggatagtatatttacttaaaaatgttgtgaatattagcttgttaattaaaaatctatggattttactttttaaaaatctggatttccattttcttttatacaggtaaaaatatcaagaaatactgaagcccatgtcccaaaacaacagtcctttaggtggatcacacattctccactacgccaagctctactcagtaagttttgcttctttgtacttaactgcccagcccctgttggtgacc

SEQ ID NO: 284831 - DNA, 352 bp, Homo sapiens
ttatcatctctctctcatcagaatttgacatcataagtacagaaactttattttgttttgtttgctgctatctccctggaggccaggagagtttctgtcatgtagtaggtaggcaataaagtaagttagttgttgagtgaaccatgagattgttgtggaaaagaygagaatatgtgtaaaatgttccacatggtacatggcacaaaggcccttggcacaaattagttatttttgttattgtcatcacttttccacagagactcttaagagtgatgactatgatctcatccagttcttcatggcttagtggatctctttaatccactccctaagttacaacagagattcccac

SEQ ID NO: 284832 - DNA, 575 bp, Homo sapiens
tgcaattttccttaaaatttcagaaagtatatactagtattttatcttttcctgacygtgtaagctcaaaaatatttcaattatttgtcctttagaatctatttttcaaaaatataaagggagaatatacaattcaaggtatacttttatgaacacaaaaattctctctccatataaacttgtggagattttctttcaggtcaaattcaattaatcttcattgtgtcttcatagaagagctgtttgtaattcagcagaaaacaaaacaaaggtataatgaaagtggtcagcttttttggctttatttttcaattacaaaacttgaggataaggcttcaagagtattctagttacaatccaaagtattgacttgtgctatgaaatattatcacatgcagaaataaattataaggagggaaagtcttgtttgtatcctaaccagtccctctgaattttattatatctgtttttatggtatcaaaaattagatgtccacagtacgttttcagaaatccctgcttcttgcactcttgtcagtaggattctctgccatcatcaacctaagttccaatctc

SEQ ID NO: 284833 - DNA, 646 bp, Homo sapiens
aatcgtgtatttgactcatgttcagtaaatcatcactttacataaagataaagtgaacctagagcagctcgctgtggagatatcttacctttcgtctgtaactatctgcttaggaacaaaaggaaaggcagtttcttgcaggactcagctttcagcttagttttttttttccttttggggttctgagattttcttttacaaggtccaccattcaactcactaaacagaatatgtttataataatttgtatgtgtgtgtgtttacaaattacttttatatacattgcctcatttaaaattttaattcttacaacattcttgcaaaggaggaatatgatgattacacgaacaccagtaatccaacaaacaatatgaaaactactatgagagatgkagaggaggaagaaggcacgagattgcttcctataaagggatgttaagcaaaagctttatgaaacaactaaaagcctacatgtaacaggacttgaagaatgagtagaattttgagccttagatttcttttttatttaaccggaatattaacattataggcttgccacgagcattaagccacagaactcatgtaaaacacttaatacatagctttgcatatagtgtttaatacttatttttcataagcactatta

SEQ ID NO: 284834 - DNA, 552 bp, Homo sapiens
attgatggacatttaggttgattgcatgcctttgctattgtaaatagcactgcaatyccggcactttctaagaagccaagaatttccttgttttatgaaaatggaagatgacttcaggattgtaagcatgaatgtaggatcacagacagagtgaaattttctgcataatcaaagtggatacatctacgatgtctgaagagaccaagagagaaaaaaatcagaactgggggagtggttaaagtgctgaggaggtggggtgggagaggtagagggaagaatttgaagatgatataaatacttgtttaagtaaaagaggtgtttacttaaaagcatgagcttctacactgcatggtataactagatttcttatagaaaccaacttgtgaactaagcacaactgatggagagattaagcagtcacctgctgagaacaagggttacagctcaaacctgggtgacatgctcattaacgaggtgagggagctgaggtttaacaggttaaataaattgccctgagttaagagctagctaatggtaaagctgatgcccagg

SEQ ID NO: 284835 - DNA, 599 bp, Homo sapiens
caaccttaattttgcttttgaactttttgctccaaactctgtagacagcacagtggatagaaatgaaaaattcaactgtaagtgaattaaagtaataaaatcagacatgttccttttcttaattaaaagtttaagagcattaaaataaactttaaaagttgtaagtagatgagaaaatttattagaaggttctctaaatattcagaggarccaaaaggaaaaagggagggtaaagagaatattttggaatttggaaatggtgtccctctctaaagaaattaatggcttttttaaatgttactttgcaatatggggcatgtgagtaatagcatgcattttcttccttgcctagagtaattacaggagaacatcgaaacattaaatctagaaaaagtttcaaagcttcatgtaggaactggtaactaataagatgcaaaaaagaaaacataaaagtgacaaaagattgtatatttttttaaaaataaaataattttggggataagcaaaaaattaatctccaaattcttgtggctattaaagggaagacacagacggaattaacttaggttctcatttgctgtgtttcatcatgttttaat

SEQ ID NO: 284836 - DNA, 403 bp, Homo sapiens
atgcttcaaaactggtgaaagacctcaactcaaagattycataagctcagtgaatcctataccggataaataaaaaccaccactctaggacttagtatcatcaaattgttgaaaacaaaaggacaagagaaaatcttaaaagcacccagagaaaaaaagacatggtgcttccaaaggataaataagaagactaataatagctgactttcaaatagaaacagtagaaactatctaagaaataaggaggaaaattggtataaacctattgctcagctatatttccaatttggcaacatttctgaagtttagatgctcatacctatcatctgagcaattccatctcctctcttatacacacctgtgagaacaaaatattggaagcctaaatgtctgttaatagatg

SEQ ID NO: 284837 - DNA, 554 bp, Homo sapiens
ccattaatcatgaagacctggaaagcccaaaatttatcaatgtcaattctgaattacatattttaaggaaatagctccttcaaaacacttgagatattttgatttgtgcagtagtcatgagtataatgtttcaaactttatggattatctatttacatttactcggcagatattattttaaattggtcaggataggctaacttctgtaacaaaaaacccatatctcaggaaataaatatttattgttctaaaataagtgaaaacagtgaacatggagaagagagtgggaagttttaaagaactgggcatgaactttgcccrctatctattgtccagagctaagtcaaatggccccacctaaatgaaaaggagactgagaaatacagtcttctgtgcccaggaggaaatggaaacggaatgtaggaaacacatggcattgcatctgccccaactacttaaacacttttgaaagtgaccttttcaataatctagaaaaagccatagaacttctccctaggaaaatgcatgcattcacatcattttatatataattt

SEQ ID NO: 284838 - DNA, 600 bp, Homo sapiens
tggtcatgaattgaagctggtgatgggtacgtgggaggggttcattattctcttctctctacttttttttttaatgtttcaaagtttccatggtaaaatgtttaaaaagtactccaccagattgamaggaagtccacattttaattatcattgctaatcaaattctgaaacttttatgatagtaaaatatatctaaaagttatgtctaatctttgatgttttttacttggatgacactcttaatatcctacccatgcaggaaatgaaaaaactccaatttcaccaaataccttacccgaactgcatgatgtttcacttacagtgtttccattttaggagcagagaaacaggctttaaaaaactcttgaaggaaaaaaagtattcacatgagctaggttttggatagtatatattagaattaataatactcttggtctcagcagaatcaggaacagggttactgaaaatataagaagtgttgaagcagttcaagcaacagatgtttttcacttcaattaaaccatgttcatgctgaccaaaggttaaagattacattagattagaaaactaggatgaaatggaaaaaaaaaaattaaagat

SEQ ID NO: 284839 - DNA, 622 bp, Homo sapiens
tgtagtctaaactagttctgttgcagctgtgcattttggacaagtaacttaaggtttctgggtctctgtgtcagtttctatggctgtgtaataaaccatcccaaaagtgagttgcaaaaagcatcaatattgctcrtgaatctgcattataggcaatgctaggcaggagcagctctctctgccctgaagtctctgctctgcttgaagtcatctgagatggaaagaatgctgggaaatgtagccatgtgaaggctctttcactcacctaggtgacaaaattcaaaacagctaggtctggaacagttaggattccttaggtactttgtttctatgcagcctctctgcatgatttctccagcatgcggattcaatgtagctgaactttttcacatgtcagttgaaggcttccaaggcatgagtcccgacagagggtcacttagaagccatatagctttttatggtgtagcctcaaaatgcacatagcacaccatagtcacagtgctgctcagattggagtggagagaacatagattccatctccctcaatggagaaatttcaatgtcaatttgcaaggaaaacatgtggtatgggagttatcggtgtagtcatttttggaaatac

SEQ ID NO: 284840 - DNA, 635 bp, Homo sapiens
aagaaggaaaaaaaaatcaaatgcgtactacttcctttcaaacagacttatgaaaaattaagaaaaaaaatctgaaaacacatcctaatgtattaaaaaaatatggtgaagtagaaaaagtattaaattcagaatcaaaatacatgtagtctaaactagttctgttgcagctgtgcattttggacaagtaacttaaggtttctgggtctctgtgtcagtttctatggctgtgtaataaaccatcccaaaagtgagttgcaaaaagcatcaatattgctcatgaatctgcattataggcaatgctaggcaggagcagctctctctgccctgaagtctctgctctgcttgaagtcatctgagatggaaagaatgctgggaaatgtagccatgtgaaggctctttcactcacctaggtgacaaaattcaaaacagctaggtctggaacagttaggattccttaggtactttgtttctatgcagmctctctgcatgatttctccagcatgcggattcaatgtagctgaactttttcacatgtcagttgaaggcttccaaggcatgagtcccgacagagggtcacttagaagccatatagctttttatggtgtagcctcaaaatgcacatagcacaccat

SEQ ID NO: 284841 - DNA, 432 bp, Homo sapiens
actcactttctgtcctggctacttggctataactatggttaaatcccagtctaacccaactggagaattactgggcctcaaaagggaggatagagattatataccaatgcagcagtgagaaatagctgcacaaccagaaaggaccagggaaaaaaaccctgcaattgaattttaagggtacttgatcaaagtgggctagaatataagactggataagcaaaagttcttggggcacattctcggtatatgggaattaacactctagcaagggctagcaaggctgtgaggcaacatctctgctagggtggctcttaaacacatggagaaactatgcctttcttcrtgtagaaatatctgatcttccctgatagatggtagaagaaggaataaagaggatgagggaaggaagtagagatgcagaaatagatatat

SEQ ID NO: 284842 - DNA, 598 bp, Homo sapiens
gtggtcggtgggtgggcagggaagaggcctacaggaactatggaggagctatttctcaaacctgtgcagagacagatctgtgtggcacatgggatggtctgtggcagccaataacatgcacttctcaaatttctgaatggggagagcgtaactaactgaatctaccatctcattcacactaaggcctcagctcccacattgtcccccgccaaagactgaatgtggtataaatactgaagcagatccattcctgaaaaatgcagaacccctttgaatggcaactttggcttaaggactccctaccagtcttgagaaaaatttcttagaattactctgctaaaatttccttccctttctcctccacaggtgtcagtgtgtatcacagtccatcagmtctcctaatctcatgtctctatcgccatctttactcacagacactctccccaaccaacctcatacatgtctaagatatgaatatttagaaatgtggatgagccaagtatagaagctcgtgactaattgcctacatcaaataactcgaagtggtcagaaaataattgtgctttatttagtctataattggatcttttgtaatagc

SEQ ID NO: 284843 - DNA, 568 bp, Homo sapiens
ctaataatatgacataatacgtaacaattggtaagaaaatttgcattgtgactcataattgtatttaaaaggcaaaacgggtgtctccagcattacyactgggggaatttgggcagtaaaataaacataaactaattaaaaataagacaaagatttttttttattagtgaacatttctattataaatttgaaatagatgaaataaattctaaaatgcaaacagtatttgccaaaataaccttgtatttccatatgcatttgatacttttaaactaatgaacaaattcctaatagttgattttggagtggactagaatttcatgaataacaaagtgtttcactatattaaatataatgtgcagctctctaaactacttagaaaataaccaaagcttgccaaactagatggctcatctttgtctgtggttctaaaggaaacaacataaaaatgcttggagtaaaaaatgcagattcatacatttgaccttcttaatataattgtgaaaagaaaggttagagattggaaaaacagagagattggaaaaacatactctagattcagaattgc

SEQ ID NO: 284844 - DNA, 542 bp, Homo sapiens
aacaaattcataagacatttgtgattattatgtgagttaacatttgtgaagtatttagaacagtgcctagcacaaaataagggttcaatatatgtcagcattgttgttattaycattacattgctctacacaaagctacagccaattatgcttaacaatgttgaagctctgttggataaattatcatccccatttttctacaggtagaatactagaaataataggaattacgtgagtgagtttctgaactgtaagagactacaatctagatttataaatataattctgtttttattataagaagttgtgctccagtttatttgttccttatgccttgtaataagctcagtcatttgaaccacttacactgtctttaaattttagtataacttgtaggatggcaatgtgaatattttctgatcttttaggtggagaagtggtgagactactcgaaaattaaaatgttagaaaatatcaaattttgatggtataatgtgaaagacagaaggatagagaaacagagggaagaaagtaaataaaag

SEQ ID NO: 284845 - DNA, 542 bp, Homo sapiens
aacaaattcataagacatttgtgattattatgtgagttaacatttgtgaagtatttagaacagtgcctagcacaaaataagggttcaatatatgtcagcattgttgttattacyattacattgctctacacaaagctacagccaattatgcttaacaatgttgaagctctgttggataaattatcatccccatttttctacaggtagaatactagaaataataggaattacgtgagtgagtttctgaactgtaagagactacaatctagatttataaatataattctgtttttattataagaagttgtgctccagtttatttgttccttatgccttgtaataagctcagtcatttgaaccacttacactgtctttaaattttagtataacttgtaggatggcaatgtgaatattttctgatcttttaggtggagaagtggtgagactactcgaaaattaaaatgttagaaaatatcaaattttgatggtataatgtgaaagacagaaggatagagaaacagagggaagaaagtaaataaaag

SEQ ID NO: 284846 - DNA, 340 bp, Homo sapiens
ttttatagaaatgagggctctatagaaatatctagggctaaaataaagtaatamtaggaaagagtcacaaatatcaaatctcccaaagaaaacagatggcacaagatgtaaaaaccaatttttaatggatttttatacatgaaaaatgcaacatatatgaaaaactccaaggttcttgagtgagattagaaagaattgtgtgatagaaaatggatagaattgaaaaattcaataatcctttaggcatacatttgagaaaataagttagaaacaaagatatgccttctgaaagagaaagaaaataatatctcttcatgccatgccagaacaagttagaaaa

SEQ ID NO: 284847 - DNA, 483 bp, Homo sapiens
tacaaacatcaaacaatgtagtggaagatatttcaaaagtaatyacagatacaggaatatcttcctgtatgcaaaggaaagcccagaattcatttacaaagattagcaaatttgagtacacaaaaatttaaagcttccatttaaaaaaaaaaaagagtaaataaggatcatccaaaggtaacatattgggaaaaatatatccaaaatattcaataaaagattaatatataaaatatataaagatctcccacaagtcaataagaaaactatgaaaaacacaatttttaaatgcaatatatgaatatcagtcttgacatggattctacctttaaactgttatggtgtggcttctgaagaacaaccatgttctgcaaagacaggaaacaaaatagaactagactgttctacagcctctcaagggctcaatgaatactatcactttttgacaagaagtgtaagaagtacttttagcctagagtatga

SEQ ID NO: 284848 - DNA, 483 bp, Homo sapiens
tacaaacatcaaacaatgtagtggaagatatttcaaaagtaatcacagatacaggaatatcttcctgtatgcaaaggaaagcccagaattcatttacaaagattagcaaatttgagtacacaaaaatttaaagcttccatttaaaaaaaaaaaagagtaaataaggatcatccaaaggtaacatattgggaaaaatatatccaaaatattcaataaaagattaatatataaaatatataaagatctcccacaagtcaataagaaaactatgaaaaacacartttttaaatgcaatatatgaatatcagtcttgacatggattctacctttaaactgttatggtgtggcttctgaagaacaaccatgttctgcaaagacaggaaacaaaatagaactagactgttctacagcctctcaagggctcaatgaatactatcactttttgacaagaagtgtaagaagtacttttagcctagagtatga

SEQ ID NO: 284849 - DNA, 617 bp, Homo sapiens
tgttggtgaggatgtaaattagttcagccactgtggaaagcagtttggagattttacaaggaacttaaaacagagctaccattcaaataatcccattactgggcatatacccaaaggaaaatgcatcattataccaaaaagacacatgcactcatatgtccatcaccctgcttttcacaattgcaaaaacgtaacataaacctaggtgcccgtccatagtagactgcaaaaagaaatgtacatctatactgtggaatactttgaaacaatgaaaacagcccttttgcagcaacatggctggagctggaggccataaacctaaatgaattgatgcaggaacagaaaagcaagcactgagtgttctcacttataagtgggagctaagcattgagcacacatgaacatgaacrtgggaacaagagacactgtggactacttggggattgggggaactacccattaggtactatgttgactatttaggtgccatataacttctaagaactagaaaaagatacaataatttttaaaaattaggaactatacacccagctgttgaatcaatgcttcccatattttttaaaactttattcactgctgatgtctgatagttggat

SEQ ID NO: 284850 - DNA, 648 bp, Homo sapiens
atgtgtatatatataaaatatatatataatatatattatatatgatatatcatgtatatgtagcagatgagaaaatgttatggaaatgatctaatatttttaatgtttttatgggacataattattcaagcatagtgttcagtgaggattatccacataatttagggaaacctttttcctgtcattcaagtttaacaaaaaccatcttcttmttcttcacacaacttctctcttcttgatgtctttgtgtgatttccatatatttcccattcttccagtttcactatgtggaaatcaattttttctttgctttctaaattgcaaaataatatataaatttgttgtagagtgttcaaataatatggatttgaatatgaaatccctgactcatctctgcaaccatcagtcctatttacttacccataactaacatgtgacatgccctagaattttaagtatgtgtgtgtaatttttaattataaaagtggaatgatactaaatatattattcagctaactgcttttttcatttactgtgtattgcaaagcttttattttattacatgaggcttcatcttacacttttgaaagcctctacctagttctatactaaaggtaagctagtttatttaatcgttttttaataaaa

SEQ ID NO: 284851 - DNA, 594 bp, Homo sapiens
tttgtcttaaattatttttagcatatgaattagagtagttagacaatcagaaataattacaataattatagatataaagtagtgcattaaggtctgactaaaacttaaaaaatataattagtctgtattgatagtttatacgaatctttctgaatatcctccctaccacaccccacctcctgccaagaagttgccctttgcttaaccattgcaatcctctctgaaagctttttaggtgaatgtatagtttaacttgccagaccaaaaaagaaaacagacaaaacaaatcaaaactaaaaccctcaaaacacccagttattggcacatataaataaatatargtaagatgtaaaatgtgtttccatctaggtattccattttattaaatctgaaaaactatatgttcttttgttatatctctaacttgttacccaaaattattttcatgtttttaagtattcatgttttaagtatttaactagattcatatttttaggtgttaaaaatatcagagagttctaaatttcactatcagattcagactttgatccttcatatagctgaatataagaaatggatgggataaaggctttc

SEQ ID NO: 284852 - DNA, 530 bp, Homo sapiens
attaaggtctgactaaaacttaaaaaatataattagtctgtattgatagtttatacgaatctttctgaatatcctccctaccacaccccacctcctgccaagaagttgccctttgcttaaccattgcaatcctctctgaaagctttttaggtgaatgtatagtttaacttgccagaccaaaaaagaaaacagacaaaacaaatcaaaactaaaaccctcaaaacacccagttattggcacatataaataaatataagtaagatgtaaaatgtgtttccatctaggtattccattttattaaatctgaaaaactatatgttcttttgttatatctctaacttgttacccaaaattattttcatgtttttaagtattcatgttttaagtatttaactagattcatatttttaggtgttaaaaatatcagagagttctaaatttcactrtcagattcagactttgatccttcatatagctgaatataagaaatggatgggataaaggctttcttctttaacttcccaattcac

SEQ ID NO: 284853 - DNA, 632 bp, Homo sapiens
tagctctgtatttctgtgactgtaaataatgtgctgaaaagtttttctttccatggcaaagactcaaattaacatgggatcttgctgtttcaaaaggtctttttgattatgtatatactttttcagtatgctcaacaatatataaaaggtcttggttgacagtttaacacctgttaagacaacaacagtgtagtgtagtttaataccatctcttagagtatattttgcatcttaaagcaagggaacacatatataaaggaaatggaataaatktgatttaccataggaataatgctggtaagataggttgcaagtcatggaacaaattaaaaacttctttataatattttgataattctaagtcagctcatgagctctagaagtataggctctgggcagctagatgttaaatatttggtaaattcatagttataggaaaatatcaaatatatattgaatgtacaaaagtacataaacatggactattcaagaaaattataaatgcaaacaagctaatattatatatatgtacatgtatatgttaagtgtttgtttaagtgagaggatgggcaatgaggcagggtgtaaacacatatataaaatgaaaaatgaactataacatggtgtaatat

SEQ ID NO: 284854 - DNA, 567 bp, Homo sapiens
tgtataggtgaaggaggctggggatactgaggttcctaattcttgaccagagttatttctgttgttaaaagaaaaacttcacccaagttaattttaagggagtttaattgagcaatgaacgattcacaaattgggcagcccccagaatcacagcagattcaaagagactccagtgcagccacgtggtggaagaacatttatagacaaaaaaagggaaatgacatgcagaaattggaagtgaggtacagaatagctggactggttacagattggcrtttgccttatttgaacacagtttgaacactcagcagtgtatggatgtttgaaatatggccactgggattggacaagactcagctattgttataggtgcatactcctaaattaggttttcaatcttctctacctatgaagttaggttgcagttcgtctacagggactcatatatagaatatgaagttcttctcaggccatatttagtttgctttaacactgtactgaatgccattttaaatttaattaaatatgttttattttaattcatagtctaggacttcaaagattaga

SEQ ID NO: 284855 - DNA, 632 bp, Homo sapiens
tagctctgtatttctgtgactgtaaataatgtgctgaaaagtttttctttccatggcaaagactcaaattaacatgggatcttgctgtttcaaaaggtctttttgattatgtatatactttttcagtatgctcaacaatatataaaaggtcttggttgacagtttaacacctgttaagacaacaacagtgtagtgtagtttaataccatctcttagagtatattttgcatcttaaagcaagggaacacatatataaaggaaatggaataaatttgatttaccataggaataatgctggtaagataggttgcaagtcatggaacaaattaaaaacttctttataatattttgataattctaagtcagctyatgagctctagaagtataggctctgggcagctagatgttaaatatttggtaaattcatagttataggaaaatatcaaatatatattgaatgtacaaaagtacataaacatggactattcaagaaaattataaatgcaaacaagctaatattatatatatgtacatgtatatgttaagtgtttgtttaagtgagaggatgggcaatgaggcagggtgtaaacacatatataaaatgaaaaatgaactataacatggtgtaatat

SEQ ID NO: 284856 - DNA, 562 bp, Homo sapiens
aaggaagaatcaggctcatattttctgaaatgtatatctgaagtaaacattctaaatcagatttattacgtatctactctgctaaacaattgcagtgtattggttggkccattctgtctcttgtctcaggttaaacattgagtgtactgtttccttgcttatatttcacttggttcacatgctatatacttcaggttcagtttagctctttctttcacctacaaggtgcacgcacacacacacacacacacacacgcaatactctcaagctagagaaaagtgtgtcttccagttcccacaaatgatttgcacctaaccttattacaatattgttatttttcttttatttttttattccctaatagcttctctgctgtataagcacagaaactgtgccttgctcatcagtatacctgcagcccagcccaaggcaagtgtccaggacactctgttgactattgttccaaatgcctttgggacagtctgaccctggccacagagttcctgggacttaataagtaatcaatgcatattcatcaaaggaaggaatcatatgctctct

SEQ ID NO: 284857 - DNA, 562 bp, Homo sapiens
aaggaagaatcaggctcatattttctgaaatgtatatctgaagtaaacattctaaatcagatttattacgtatctactctgctaaacaattgcagtgtattggttgggccattctgtctcttgtctcaggttaaacattgagtgtactgtttccttgcttatatttcacttggttcacatgctatatacttcaggttcagtttagctctttctttcacctacaaggtgcacrcacacacacacacacacacacacgcaatactctcaagctagagaaaagtgtgtcttccagttcccacaaatgatttgcacctaaccttattacaatattgttatttttcttttatttttttattccctaatagcttctctgctgtataagcacagaaactgtgccttgctcatcagtatacctgcagcccagcccaaggcaagtgtccaggacactctgttgactattgttccaaatgcctttgggacagtctgaccctggccacagagttcctgggacttaataagtaatcaatgcatattcatcaaaggaaggaatcatatgctctct

SEQ ID NO: 284858 - DNA, 477 bp, Homo sapiens
ggagttcaagaccagcctggccaccatggtgaaaccctgtctctacaaaaacatgaaaattagcagggcatgatggcaggtgcctgtaatcccagctactcaggaggctgaggcaggtgaatcgcttgaacatgggaggcggaggttgcagtgagccaagactatgccattgcactccagcccgggmgacagagagagactccattcccccccaaccaaaaaaaaaaaaaaaagggagattgaagcctcagaagaaatcacacttgccaacaccttggttttagatttgcagccttcagaactgtgaggaagtacattttttgttgcgtaagcaaccccatcgctggtattttgttatggctgccctaacaaactaatgcaatattcaaaggctgaaaccagtgaattatttttagaggaaaatatgtaggttgaattggtattaagttatatgtagaatacatccatttgcttact

SEQ ID NO: 284859 - DNA, 1073 bp, Homo sapiens
tgttataacttaatcaaatgtattttatagaggcaatgcttatttttaatttttagtcacattttagttgaattattcacttattctttttggcataaattaacttaaratgcatgtttggcaaatgggtgcaactttatttattagcaccctactgttaactctgtctaagtgtgctggtcagttttatatgtcaacttaactaggctttagtcagttcttcaataaaacactaacgtaaacagtgttgcaaaggtatttgtagatatgatcaagtcacagtcagatgattttaaataagggaaattgtcctggattagataatctggatgggctcaatgatattacaagtttcctataacaaggagacacatgagtcaaaaggcagtgagaaaaggtgatatgatgataaaagcagagattagaatgaagtggccacaagccaaataataccatcagcctctagaagctgtaagatacaaacagcagatcctctcccagagtctctagaaggaagcagctctgctgacatcttgwtgttataacttaatcaaatgtattttatagaggcaatgcttatttttaatttttagtcacattttagttgaattattcacttattctttttggcataaattaacttaaaatgcatgtttggcaaatgggtgcaactttatttattagcaccctactgttaactctgtctaagtgtgctggtcagttttatatgtcaacttaactaggctttagtcagttcttcaataaaacactaacgtaaacagtgttgcaaaggtatttgtagatatgatcaagtcacagtcagatgattttaaataagggaaattgtcctggattagataatctggatgggctcaatgatattacaagtttcctawaacaaggagacacatgagtcaaaaggcagtgagaaaaggtgatatgatgataaaagcagagattagaatgaagtggccacaagccaaataataccatcagcctctagaagctgtaagatacaaacagcagatcctctcccagagtctctagaaggaagcagctctgctgacatcttg

SEQ ID NO: 284860 - DNA, 595 bp, Homo sapiens
gatgacagcttccctgtcaaatgctccaggccgagtctggtccacagtgtgtctggtgatggatgaggtggtagagcttgtccagtacagtgtatcccaggctctgtgataggcaagtccttccacagaacccacatctagtgggggaagaaaaagaaaaaatatatacttttatttacaaaaaaatgacttctggacagaaaaagcatttaagayatacatgtatacctgttatttcatcaaccatttctccacaaaatctccaaaataaaaatgcagtcattgtgatacctacaattgacagcttattatacatatataatgggagcaatttttgcaaaaaatgtcattatagacttaatcttctcacaaataaaataaaattaaataattgcctttcattttggaaaatggtggctctctttcttgtatcttaatcaattttcaaaaatatccaacgtgcaacaacttagagatgttttggaaaaccttatgtcagcaatacgacttagatacaatcatcatgagttttctcttgatactatagatctggagatgtccaggaaaagcaaacacatcgaaaactacaacagta

SEQ ID NO: 284861 - DNA, 595 bp, Homo sapiens
gatgacagcttccctgtcaaatgctccaggccgagtctggtccacagtgtgtctggtgatggatgaggtggtagagcttgtccagtacagtgtatcccaggctctgtgataggcaagtccttccacagaacccacatctagtgggggaagaaaaagaaaaaatatatacttttatttacaaaaaaatgacttctggacagaaaaagcatttaagacatacatgtatacctgttatttcatcaaccatttctccacaaaatctccaaaataaaaatgcagtcattgtgatacctacaattgacagcttattatacatatataatgggagcaatttttgcaaaaaatgtcattatagacttaatcttctcacaaataaaataaaattaaataattgcctttcattttggaaaatggtggctctctttcttgtatcttaatcaattttcaaaaatatccaacktgcaacaacttagagatgttttggaaaaccttatgtcagcaatacgacttagatacaatcatcatgagttttctcttgatactatagatctggagatgtccaggaaaagcaaacacatcgaaaactacaacagta

SEQ ID NO: 284862 - DNA, 592 bp, Homo sapiens
tctcaatatccacatataatctgttttactttatttttgtaatagatgataaacagaaattacagttaataatgatctgttgctacattttaaaatattttagtcatgtacttctttctaaaaatgatgtttagatccttataaaattatattttaattaacaaaaagccaattaaaattattgaaatattttagttgagataagacatatttctcaattttgtgattatttatcgacagtgagagggcatgtggcatgtatatgtgtgtgtgtgcacacacatctgtgtttgaacattgagattcctaaaacagttgaacagccagaataggactttgaattactgattctggaaggcaattatgtagtttgaaaataaaataaaatgcctatctacccaaccagacttgaaatattgagcagartaaatcaatacagggctaaattcttggaactcaaggatgtagaataggcatatgaaatataatgcaaaccagtaaaaatcctgtctccttacctcatgcacttgccaagaaaaaaaaaaaaaagagttttcttccctcttacccacttttgagcagggaattgaga

SEQ ID NO: 284863 - DNA, 592 bp, Homo sapiens
tctcaatatccacatataatctgttttactttatttttgtaatagatgataaacagaaattacagttaataatgatctgttgctacattttaaaatattttagtcatgtacttctttctaaaaatgatgtttagatccttataaaattatattttaattaacaaaaagccaattaaaattattgaaatattttagttgagataagacatatttctcaattttgtgattatttatcgacagtgagagggcatgtggcatgtatatgtgtgtgtgtgcacacacatctgtgtttgaacattgagattcctaaaacagttgaacagccagaataggactttgaattactgattctggaaggcaattatgtagtttgaaaataaaataaaatgcctatctacccaaccagacttgaaatattgagcagagtaaatcaatacagggctaaattcttggaactcaaggatgtagaataggcatatgaaatrtaatgcaaaccagtaaaaatcctgtctccttacctcatgcacttgccaagaaaaaaaaaaaaaagagttttcttccctcttacccacttttgagcagggaattgaga

SEQ ID NO: 284864 - DNA, 614 bp, Homo sapiens
tgtgattaaaacaaaaaaaagattgaagaataaaaagcaatgacagataatcactgacccagaccacttgtcagaagaaaggactaaataacagaaattggtcagtgtgaaaatagttgtaaatctgaacccttttayagagctaaaagtgaggtcagatttaattcacttaattgaacatcatcttatatgtgaaaattcttaagactgagcaatgtaatgactcatggagcttgggagactgctcccaccactgtcctatgagaatacggtttgctgactcagctgcatttaccccaacacatcaccagaagaatctcaggacaataataaatgtcccacagtaggaataaaagagttgggcaaaggaatttgtaagtcagttttgaaataaaaataaagcagtcactcatgatattatatatgatgagttttaattagcaagtgttttatcctgtaattatttattacataggctaacatttacacttttcaccttgcatatggtgaactgtaaattaaaattaaacacataaaatatttcaatttgataattatttgtaaataaagtataataaaggcaatttatcatcatatatgtaaatgacaccttc

SEQ ID NO: 284865 - DNA, 1129 bp, Homo sapiens
catattataagactcatatatctatgtgtcacctgtgaatttggctagcccttacacagtaagcataggcaatttctagtaatttttagagcaaattatctgtgatggtagtaactgttaacagtaaacttaactttacctttctaaaaatatgggttgcctctgtgcatccaaatcaatgttaactttcagtttaaaaaatcacaggcgatgatcttgaaacatatagcagtgtctgaatatttttacagaattttctatttctgaatttatttctttggatgaggtaaattaaaattagattcttctctttttattttttattttgcaaagaaaataccaakgtattttctcttcagttttaaatgcataaagacaatattatgttaaaccaaattaaaacttcaaaggtgtatgaaatgactaaatttattagtatctacatatcttattttgttatatactttatattttaaagtttatgatagttgatatttattatgcttattaaatgctaggtatwaaaagagttcatgtaatcagagcatgtttatttaggggtcaagttagtcataaaaatccttttcattctaaagawaagtcataagatttaagatttcttcctgggaatatattccttaaacaatcttggattcagtttttaaaagaatgtcagtggtaagaaacatgagcaattccaatttctaggaacataaatatctcttttggaaaggtttgtatcatgcaggtagcacatactttccaagaaatgattaacacttacagggtaactgcagggagataggttataatcatgctgtcttagcccctgtcaacatgatttattgtttcagctactggaacaaacagagatgatgatagatacaaaacagaaaaaattaaaaagaaacattacagaattattttctggatttttttgccttaataactaaatttcccaaaaacattcagtttcctatcactgaataaagaatgcattcctcgatatttaggtagaaccaccacataagttaatgtgttattaaaatcagaaaaacccagccaatcatattatttttatcaatgcaagtcaaaattgaactgtgcggacttgtattttattgtgacc

SEQ ID NO: 284866 - DNA, 606 bp, Homo sapiens
aaaagagttcatgtaatcagagcatgtttatttaggggtcaagttagtcataaaaatccttttcattctaaagataagtcataagatttaagatttcttcctgggaatatattccttaaacaatcttggattcagtttttaaaagaatgtcagtggtaagaaacatgagcaattccaatttctaggaacataaatatctcttttggaaaggtttgtatcatgcaggtagcacatactttccaagaaatgattaacacttacagggtaactgcagggagataggttataatcatgctgtcttagcccctgtcaacatgatttattgtttcagctactggaacraacagagatgatgatagatacaaaacagaaaaaattaaaaagaaacattacagaattattttctggatttttttgccttaataactaaatttcccaaaaacattcagtttcctatcactgaataaagaatgcattcctcgatatttaggtagaaccaccacataagttaatgtgttattaaaatcagaaaaacccagccaatcatattatttttatcaatgcaagtcaaaattgaactgtgcggacttgtattttattgtgacc

SEQ ID NO: 284867 - DNA, 605 bp, Homo sapiens
tgagtaaatctacttggtttactacgtaaatcagcagaacttcaaattttactaggcatagtttcatattcagtaatgaattgaaatatttactgtgcaaagtgtttatgggtaacatattaaagatatgtgaggaagaaggagagaacaaatgtattgctaattgcaaggcatgaggaagtggtcatgttttgtacacttagttgggtcctttttaagtgttttcaaatttagcatgatggtttgcacaggcgctgaagtgagatyaccaggggtagaatcaccttcctgctacgtatgtggctaggtgttccggaacaagtactaaacttctttgtgcctcattttcttcatctgcaaatggggatcatcataataatgccttccacggggagggctataaaaacatgaaatataaagtgcttggcacagtatctagaacacaattagcaatcagtgatttagctagtagggcgattagtaaattgatacagtctgaagtcttaataaatctgcacaaagtctttaaaacagtccataaatagtccctaaattaacttttgcaaaataaagaatttttaaaatgtattgctcattttattaac

SEQ ID NO: 284868 - DNA, 605 bp, Homo sapiens
tgagtaaatctacttggtttactacgtaaatcagcagaacttcaaattttactaggcatagtttcatattcagtaatgaattgaaatatttactgtgcaaagtgtttatgggtaacatattaaagatatgtgaggaagaaggagagaacaaatgtattgctaattgcaaggcatgaggaagtggtcatgttttgtacacttagttgggtcctttttaagtgttttcaaatttagcatgatggtttgcacaggcgctgaagtgagattaccaggggtagaatcaccttcctgctacgtatgtggctaggtgttccsgaacaagtactaaacttctttgtgcctcattttcttcatctgcaaatggggatcatcataataatgccttccacggggagggctataaaaacatgaaatataaagtgcttggcacagtatctagaacacaattagcaatcagtgatttagctagtagggcgattagtaaattgatacagtctgaagtcttaataaatctgcacaaagtctttaaaacagtccataaatagtccctaaattaacttttgcaaaataaagaatttttaaaatgtattgctcattttattaac

SEQ ID NO: 284869 - DNA, 605 bp, Homo sapiens
tgagtaaatctacttggtttactacgtaaatcagcagaacttcaaattttactaggcatagtttcatattcagtaatgaattgaaatatttactgtgcaaagtgtttatgggtaacatattaaagatatgtgaggaagaaggagagaacaaatgtattgctaattgcaaggcatgaggaagtggtcatgttttgtacacttagttgggtcctttttaagtgttttcaaatttagcatgatggtttgcacaggcgctgaagtgagattaccaggggtagaatcaccttcctgctacgtatgtggctaggtgttccggaacaagtactaaacttctttgtgcctcattttcttcatctgcaaatggggatcatcataataatgccttccayggggagggctataaaaacatgaaatataaagtgcttggcacagtatctagaacacaattagcaatcagtgatttagctagtagggcgattagtaaattgatacagtctgaagtcttaataaatctgcacaaagtctttaaaacagtccataaatagtccctaaattaacttttgcaaaataaagaatttttaaaatgtattgctcattttattaac

SEQ ID NO: 284870 - DNA, 591 bp, Homo sapiens
gacaatgttttacctgtcttttcaaaagcattatatactaggtttatttagaatttctatgctgcattctgagtcatatacttttgcrttatatcttcataattgccctgaaagaaaatttgcatgtcagaaatctaaagtttataaaggctaaataatttgcctaaggtcaattcaatcttcaactgaattaaacagtgtgcttagccatagagaatttgttctatatgtatagaatttgctgatttgttgcctgtttctgtaaataaaactttatttgaatactgtcaggtctattcatttatatattctctatgtctgtgttagtgccgtgaaacactgtagttgtgatagatatcacatggtccatgaggcttcaaatatttactatctggccctttaagaaaaaaattgtgttacattccagaccttcttcagtgcagtggaggcatgaggagcctgaggatcattttgtccttcaggcctgtacagtggtagggacatgggtccagatttctctagtgctgtagccacccagatctaaccactgaggttcccagtcaccaaggcagctactcctcacaggacaag

SEQ ID NO: 284871 - DNA, 591 bp, Homo sapiens
gacaatgttttacctgtcttttcaaaagcattatatactaggtttatttagaatttctatgctgcattctgagtcatatacttttgcgttatatcttcataattgccctgaaagaaaatttgcatgtcagaaatctaaagtttataaaggctaaataatttgcctaaggtcaattcaatcttcaactgaattaaacagtgtgcttagccatagagaatttgttctatatgtatagaatttgctgatttgttgcctgtttctgtaaataaaactttatttgaatactgtcaggtctattcatttatatattctctatgtctgtgttagtgccgtgaaacactgtagttgtgatagakatcacatggtccatgaggcttcaaatatttactatctggccctttaagaaaaaaattgtgttacattccagaccttcttcagtgcagtggaggcatgaggagcctgaggatcattttgtccttcaggcctgtacagtggtagggacatgggtccagatttctctagtgctgtagccacccagatctaaccactgaggttcccagtcaccaaggcagctactcctcacaggacaag

SEQ ID NO: 284872 - DNA, 1144 bp, Homo sapiens
aacaacaactctttatgaaaatctagcatgcgttttaggatcctgttggccrcatgacatacacagttttcttgcttctcagggaatatgccatcatgtaaattcaacctacatgtaaagttgttttctcaggtttggccatatgtggctttgaaattgaaatatgttttcatttagttccccaaaaactctgcaataatgaacacatttctaatgtgctgaagaaaatgggcccaagtggccactgaaataggctatggaaaaaagggaaaataattaagacttaaatttaggaacatatttaattatttatcagaagaatgacttggtgggataacagtgttgtgaagttacaaatattatggttgtttacttattttcatagagtctatgttgtagaaaaatactggaccaggtataaattcaaatctgctttgcaatgtgaactctaaaactatttttctttgaaatagagttcctcctgaaatgattaaatatgagtgaacttttcagttaccacattttwcggtttgctgactcagctgcatttaccccaacacatcaccagaagaatctcaggacaataataaatgtcccacagtaggaataaaagagttgggcaaaggaatttgtaagtcagttttgaaataaaaataaagcagtcactcatgatattatatatgatgagttttaattagcaagtgttttatcctgtaattatttattacataggctaacatttacacttttcaccttgcatatggtgaactgtaaattaaaattaaacacataaaatatttcaatttgataattatttgtaaataaagtataawaaaggcaatttatcatcatatatgtaaatgacaccttcaaaccaccattgtatgttaatagattaacagatattttaaaatgaaatcctaaatcgcaaatcaaagttaggttctctaagtttaaaatttggctcagttactaattatttgtgaaaactttaattacttaagctctctgggccgttctgttttcttacctgtgaaatgaaggggggaaataaaaggaacactaacacctctaaaattctcttattataaagcctacaatctaggaaaatattgtaaataaattgtgagtttaatactttaca

SEQ ID NO: 284873 - DNA, 541 bp, Homo sapiens
atacttagtgtgtatcatatgtcatatgacatgattttgaaataaagacaacaaactgatttcaaacctaaaactttaataagtattgagtaattaccagaggacaattagtccagaactgtctacattgctcactcatgggatttaatccagtggacaattttgttgttgttttgagactggatcttgctctgttgcccaggctggagtgcagtggtgcaatcacagctcactgctgcctcaactgcccaggctcaagtgattctcctatctcaaccaccccagtagctgggactataggtgtgtgccaccacactgcgtttttttttttttttttaattatttgtagagatggggtctcatcattttgcccaggctggtcttgaactcctggacacaagtgatcctcctgtcttggcctccctaagtgctgggattatagrcatgagccatcatgcccagcccaatttttaaactaactttctctgtggacccatagtctcaaaatcctggtaatgtaattccattctctatagacctc

SEQ ID NO: 284874 - DNA, 1217 bp, Homo sapiens
cggtttgctgactcagctgcatttaccccaacacatcaccagaagaatctcaggacaataataaatgtcccacagtaggaataaaagagttgggcaaaggaatttgtaagtcagttttgaaataaaaataaagcagtcactcatgatattatatatgatgagttttaattagcaagtgttttatcctgtaattatttattacataggctaacatttacacttttcaccttgcatatggtgaactgtaaattaaaattaaacacataaaatatttcaatttgataattatttgtaaataaagtataataaaggcaatttatcatcatatatgtaaatgacaccttcaaaccaccattgtatgttaatagattaacagatattttaaaatgaaatsctaaatcgcaaatcaaagttaggttctctaagtttaaaatttggctcagttactaattatttgtgaaaactttaattacttaagctctctgggccgttctgttttcttacctgtgaaatgaaggggggaaataaaaggaacactaacacctctaaaattctcttattataaagcctacaatctaggaaaatattgtaaataaattgtgagtttaatactttacawcacacaccactgcacccagctaatttttggatttttttgtagagatggggattgccatgttgcccaggctggtctcaaactcctgagctcatatgatccacccacctcagcttcccaaagtcctgggattataggtgtgagccaccatgcctggcctccagtttttttttttttgtttgtttgtttttttatgcttagtttcttgtttacagcctaagaaatctctgcctaccccatgtcawgaagctattcttttgtttgccttgaggagctttatcatcttactatttatatttatttcggctgaggatctatttttaattagtttttgtgcatgacataagaatcaagttttatttttattttttcttaaaaacattcaggtgttccagcacatttttttccctaaataattgtattatcaccattgtaaacaatcagttgaccacatacttctgcaacatttattttcattttcattttaactagtttggaatgggtttctattttttggactgaaaagtcctggctaatttaaggtatcctttttatttggctttccactagggctgctagatttagcaaataaaatgtagga

SEQ ID NO: 284875 - DNA, 671 bp, Homo sapiens
ccctggggataagcacttatatagatccactttggggtaagtctcatgtctgcttatggaatttacattatcttgaggcaaatgagagagatactgtcatttatatttgttgcttgaacttagaagaatatattaatgcacttagtcctttttgaggtattttgaatgtctattttaaaagtcaaagatatttacttttctcctaaataatactactactcctaggaattaaaaaaggraagagttgaatacaaggcactgtgcttagagctttatacatcttttttctatccttctaaccttacaaaatggacatatttttgataaactacagatgaagacaatctcagagaggttaggttagcggcttaaagtcacacagcttacaagtattgcaaatgagacaaaagtcttgaactgccttgcttctaaacctctcatctttcaaccacagtgtctatcacattcaatgaaactgctttaggtttacctatatatccttagacttacattcaaaactaaactcctaggaattcataggtttttcaagaacatttccaggatactagtagttagaaaattaggaccagtcaaaatatattacattgttattcatgtaaaatttaatctatttttacaattgtttttgacttttgttagtttaacacagt

SEQ ID NO: 284876 - DNA, 671 bp, Homo sapiens
ccctggggataagcacttatatagatccactttggggtaagtctcatgtctgcttatggaatttacattatcttgaggcaaatgagagagatactgtcatttatatttgttgcttgaacttagaagaatatattaatgcacttagtcctttttgaggtattttgaatgtctattttaaaagtcaaagatatttacttttctcctaaataatactactactcctaggaattaaaaaaggaaagagttgaatacaaggcactgtgcttagagctttatacatcttttttctatccttctaaccttacaaaatggacatatttttsataaactacagatgaagacaatctcagagaggttaggttagcggcttaaagtcacacagcttacaagtattgcaaatgagacaaaagtcttgaactgccttgcttctaaacctctcatctttcaaccacagtgtctatcacattcaatgaaactgctttaggtttacctatatatccttagacttacattcaaaactaaactcctaggaattcataggtttttcaagaacatttccaggatactagtagttagaaaattaggaccagtcaaaatatattacattgttattcatgtaaaatttaatctatttttacaattgtttttgacttttgttagtttaacacagt

SEQ ID NO: 284877 - DNA, 671 bp, Homo sapiens
ccctggggataagcacttatatagatccactttggggtaagtctcatgtctgcttatggaatttacattatcttgaggcaaatgagagagatactgtcatttatatttgttgcttgaacttagaagaatatattaatgcacttagtcctttttgaggtattttgaatgtctattttaaaagtcaaagatatttacttttctcctaaataatactactactcctaggaattaaaaaaggaaagagttgaatacaaggcactgtgcttagagctttatacatcttttttctatccttctaaccttacaaaatggacatatttttgataaactacagatgaagacaatctcagagaggttaggttagcggcttaaagtcacacagcttacaagtattgcaaatgagacaaaagtcttgaactgccttgcttctaaacctctcatctttcaaccacagtgtctatcacattcaatgaaactgctttaggtttacctatatatccttagacttacattcaaaactaaactcctargaattcataggtttttcaagaacatttccaggatactagtagttagaaaattaggaccagtcaaaatatattacattgttattcatgtaaaatttaatctatttttacaattgtttttgacttttgttagtttaacacagt

SEQ ID NO: 284878 - DNA, 591 bp, Homo sapiens
acactgtgtaatttaaatttacattgtgtcatattacactggggttatgacacagccaagtgtattttgacattacactttgttttccccctaacggtgcttgcaggaagaagggttgccgcaggtgtggccagatyctctaggcaagaggtgtggattcaggtcctactagtcttactcctgatgaagctgggcaaatcagttggctctggagtaattagtagccccttcctcactgaccattgcaaggtaagtgtttttgcattctttctgttctggtgagagattacgtgtttatgaaatgctagttcggcgatttacatttatttctacagcaccccatgaactgggcgtcattattctcgtttcactgcaaggaaaatggtactactcagctttatgaagcaaattctctcaagaccatcctctcagagagtgggtgcaaggcccgaatgtgaatcctggtctctgagtctcctaagtactagtgtgcacccctacaccataggattaggtgatacattggaaaaccaaaagagttacattgttgtagggttgaggtgtgtttatatgtattatgcagatgtatct

SEQ ID NO: 284879 - DNA, 545 bp, Homo sapiens
tataaacatgatgtgcagattttcttttggatatacatttccaatttatttgcataaaaaaccagcagtgcaattgctggaaggtatggtaagcctacatatagctttgtaaaagacaccaaactgtctttgaaaatggctgtgttaatttactttyttactcttaaaagtttaactatatggctcaccaattatgaaagtgcctctttttttacagttccctcaatggaacctgttgccaaactttcagatttttgccattctgctaggtgagaaattgtattccagggtagttttcatttatggttctctttgtgtgagatcttggcatgtttcacgtgtttgagggttacttggttttctatttctgtgaactggcaattcatatctcatgctcatatttcaatcaggttcttagtgggttttttggcctctatttttaacaggtctatgtatactaagggtgtaaatcttccatccgtggtataaattagaaatattttcccaaatttgacatttgtctttttactttacttttttttttt

SEQ ID NO: 284880 - DNA, 545 bp, Homo sapiens
tataaacatgatgtgcagattttcttttggatatacatttccaatttatttgcataaaaaaccagcagtgcaattgctggaaggtatggtaagcctacatatagctttgtaaaagacaccaaactgtctttgaaaatggctgtgttaatttactttcttactcttaaaagtttaactatatggctcaccaattatgaaagtgcctctttttttacagttccctcaatggaacctgttgccaractttcagatttttgccattctgctaggtgagaaattgtattccagggtagttttcatttatggttctctttgtgtgagatcttggcatgtttcacgtgtttgagggttacttggttttctatttctgtgaactggcaattcatatctcatgctcatatttcaatcaggttcttagtgggttttttggcctctatttttaacaggtctatgtatactaagggtgtaaatcttccatccgtggtataaattagaaatattttcccaaatttgacatttgtctttttactttacttttttttttt

SEQ ID NO: 284881 - DNA, 510 bp, Homo sapiens
aattgtacaattcaaagtactttgataagtgtattcactgtgaagccactgctaccatcacaatgccaataatttccaaaaccagcgtacatttcctgttgcccctttgaagttcattctgctcctagtaaatgaaygatctgctttatgtcaatgtagattagtttgcattttgtagactttaaagtaaatggaaacatgccgtatttattcttttatatatcacttctttgactcagcataattatttccagagtcatattatgtgtcagtagtttattccttttgtgatcaagtagaatttcatattatatgagtaaactacactttatccattcacctgttcatggacatttggggggttccacttggctcttaaaaatgaaactgctataaacatttctgtacgatgctttgtgaacatatactttccaaccttaggtagatacttagaagtggaatgctgagtcatgtagtaggtgtctgttgaatttttttaaaactgcaaac

SEQ ID NO: 284882 - DNA, 510 bp, Homo sapiens
aattgtacaattcaaagtactttgataagtgtattcactgtgaagccactgctaccatcacaatgccaataatttccaaaaccagcgtacatttcctgttgcccctttgaagttcattctgctcctagtaaatgaacgatctgctttatgtcaatgtagattagtttgcattttgtagactttaaagtaaatggaaacatgccgtatttattcttttatatatcacttctttgactcagcataattatttycagagtcatattatgtgtcagtagtttattccttttgtgatcaagtagaatttcatattatatgagtaaactacactttatccattcacctgttcatggacatttggggggttccacttggctcttaaaaatgaaactgctataaacatttctgtacgatgctttgtgaacatatactttccaaccttaggtagatacttagaagtggaatgctgagtcatgtagtaggtgtctgttgaatttttttaaaactgcaaac

SEQ ID NO: 284883 - DNA, 579 bp, Homo sapiens
caattgagtccataaggactgcaactcttaggcaagacctagtggtgaactgggccgagacagtggactgagggtgcatacaacgtgttaagacaccagctgggacagccaaaggagtgtcggcatcacaccaccccctgacccaaacccaggctgcacagcttgaggcttcaaaggaaacctcttccttctgcttgaagagaggagagggagagtgcggaggaatttgtcttgcatctaagataccagctcagccacagtaggatagggcgccagtcagaatcgtgagtcccccattccatgccctagcttccagatggcatttctagacacaccctgggcaagaggagaacccactgccttgaagggaaggacctagtcctggcagcattcatcacctgctaactgaagggcccttgggccctaaataaccagcagcgatacccaggtyctacattgagggacttgggtgagcctctgagacttgctggcttcaggagagactcagcacattaccagctgtggtggctatggggccaaactccttttgcttgagaaaagcatatggaaaagtaaaag

SEQ ID NO: 284884 - DNA, 553 bp, Homo sapiens
gtctttttcttacatcttaggtaccagcacagccacagaggagtagagcaccaagcaggcttttggagtccctgattctaggacttgmctcttagatggcatccctggacctgccttgggccagaggggagtccactgcactgaagggtgagtcctgggccaggcagcattcagaagaatctgacttaagagaccttgggccttaagtgaacatcagcagtagtctgacagtacttcctgtggcctggggtggtggcagctacagagtgaggttcctctgcctttggagagaggagggaaaagtgccgagggctacatcttatgatttgagtgccatctcagccacaaggcaatagaacaccaggtagacttctaaggtctatgactgtagtccctgactcctggatagcacttctagagccacctggggcctgggtgacctcaccaccctgaaaggaaagacatgggcctggctgcctttgccacctgctgactgtagagtccccaggaccttaggtgaacacagagagtaaccaggtagtggttaaagcag

SEQ ID NO: 284885 - DNA, 603 bp, Homo sapiens
aggtagataaaaatatgcaaagaaaagactccagaaaaaaatacctcccaagtatcaatggtggtttttaaaaattttatagtagcattatagatgtttgaaaaaaatctttattcttttttgtatatatcttatcacgcatatatactactttcaatttttactactttttactaaaattcatgaatccatctccctttttatatttaaattattgcagttcaatttaatttggtcaataggtgtagtcctccctgaaaatatattccaggattctccccagatattctcattatgatgggttcgggaagtattcagttcagaatttactcaatatttatatcctatatctgagcaaacttttcttttctgtgctcacctcactcctttcataggcattttaccccttagtttattgtggaataaattttacaagtgataaaaacttgatagggctttagatatttatttgtttaaactaattcttgtatattccctcttccatttttatttttgrgtacattctcttatggttatttcagagaagttctataaattgtaaggtttctatgtcggaaagaaactttattatccccttcaatc

SEQ ID NO: 284886 - DNA, 618 bp, Homo sapiens
ttccctcttccatttttatttttgagtacattctcttatggttatttcagagaagttctataaattgtaaggtttctatgtcrgaaagaaactttattatccccttcaatctccaatgatagtttggctggtttgactgagtatagcatgctaggtttgaaatactctttctcagaattttgatgtcactttgctgggtttctttactccatactgctaaggagaaatctggtgtcagtctgacctccctttccttctagataatctttctttttcttctggcatctaagattacttctttcagtattagttttataaaacttgattttattgttgtctcaatgtgagtttttggttagcttgtgattaaattttgtccactcagtaccatgtactcattcaacttgaggacagatgatatttatttgtttatgaatatatttattatgcaacatttctgggatatttattgctactgtttttttcaatcttttcctctcttccactctcttgtcactcaatatacaaacggttttacatagacattgaaaatttggatctctctttaaaatatttagacctcattttacacatttatttctctttaactttttgtgc

SEQ ID NO: 284887 - DNA, 618 bp, Homo sapiens
ttccctcttccatttttatttttgagtacattctcttatggttatttcagagaagttctataaattgtaaggtttctatgtcggaaagaaactttattatccccttcaatctccaatgatagtttggctggtttgactgagtatagcatgctaggtttgaaatactctttctcagaattttgatgtcactttgctgggtttctttactccatactgctaaggagaaatctggtgtcagtctgacctccctttccttctagataatctttctttttcttctggcatctaagattacttctttcagtattagttttataaaacttgattttattrttgtctcaatgtgagtttttggttagcttgtgattaaattttgtccactcagtaccatgtactcattcaacttgaggacagatgatatttatttgtttatgaatatatttattatgcaacatttctgggatatttattgctactgtttttttcaatcttttcctctcttccactctcttgtcactcaatatacaaacggttttacatagacattgaaaatttggatctctctttaaaatatttagacctcattttacacatttatttctctttaactttttgtgc

SEQ ID NO: 284888 - DNA, 459 bp, Homo sapiens
tattacctttattatcctgggtataagttattcttaattttggattttctatttctctttcatgcgcatcacctctctcaaatatttggtaaatcttgattctatactcaacttctgtgattgattgacttctgcatatttcctggtctatggcaaatacccattctggggraaccttagcttatagctatggctggtcaactgtcttctccaggtgacggctcatggctttattttcattgtgactgccttttcttttttcaaatttgtgtattattggcgtgttttcctatccagtttattattagcaaatttcatatatctagtttatatcttttttactaatgttatgaatcgactcttagtatcttaaaaccttaaagagctggacatacccttggcgggaggtggtctcatcattggttgattgcttccagcatttgtttaggtacttctgga

SEQ ID NO: 284889 - DNA, 459 bp, Homo sapiens
tattacctttattatcctgggtataagttattcttaattttggattttctatttctctttcatgcgcatcacctctctcaaatatttggtaaatcttgattctatactcaacttctgtgattgattgacttctgcatatttcctggtctatggcaaatacccattctgggggaaccttagcttatagctatggctggtcaactgtcttctccaggtgacggctcatggctttattttcattgtgactgccttttcttttttcaaatttgtgtattattggcrtgttttcctatccagtttattattagcaaatttcatatatctagtttatatcttttttactaatgttatgaatcgactcttagtatcttaaaaccttaaagagctggacatacccttggcgggaggtggtctcatcattggttgattgcttccagcatttgtttaggtacttctgga

SEQ ID NO: 284890 - DNA, 263 bp, Homo sapiens
ccagaatttaatatataaggaacagmcattatgagtgctgggctgcttaaagaacaaaaagacagcaccaagttaaataacccaaagatcatacctggaggaataaaagggaagtggttgtggttatcagatcttgggagcaaagaggaggaacttcgtggtgcttgggctcagacctccaatgaggaaacatttctaggctgctactcaaacttctgaaaggacacaattaggctgttctgtgagtcgagaatgaacgaggg

SEQ ID NO: 284891 - DNA, 617 bp, Homo sapiens
gattttaagtcaatctaaaatttcccacatatttagcctattgagtcagatcttygaaataataatcattatccatcaaggaacagcaattatagctagtgaaatactttcacatgtacttgagcttcataccactctatagagtgagcaggcagaaattaggttattttataaatgaacaagttgatgttttgagctgatgaatgatttgtcctgtttcagacaggcagtgagtgacaggattgtgataaggtctccattttcttgatacctattatagtgatctatccatgttgtcttctatgatggtgacaataataacaaatatttatatagcaaattacagtttaacaggggtatgtcatgttatcacgtttgattttcagggcagccccatgagtcttctctatattgttctattttttcctaatatttgtataaaagcaaaatggacacattttgtaatgtacaataaaatgaaaaacagccattccttgacctttcaccctcgagatcctcatccctcgaaacaaaccattttcaactcttttatttattgcttctggtatttatccccatgtttataaataataactttgcattgctatttcccaatt

SEQ ID NO: 284892 - DNA, 617 bp, Homo sapiens
gattttaagtcaatctaaaatttcccacatatttagcctattgagtcagatctttgaaataataatcattatccatcaaggaacagcaattatagctagtgaaatactttcacatgtacttgagcttcataccactctatagagtgagcaggcagaaattaggttattttataaatgaacaagttgatgttttgagctgatgaatgatttgtcctgtttcasacaggcagtgagtgacaggattgtgataaggtctccattttcttgatacctattatagtgatctatccatgttgtcttctatgatggtgacaataataacaaatatttatatagcaaattacagtttaacaggggtatgtcatgttatcacgtttgattttcagggcagccccatgagtcttctctatattgttctattttttcctaatatttgtataaaagcaaaatggacacattttgtaatgtacaataaaatgaaaaacagccattccttgacctttcaccctcgagatcctcatccctcgaaacaaaccattttcaactcttttatttattgcttctggtatttatccccatgtttataaataataactttgcattgctatttcccaatt

SEQ ID NO: 284893 - DNA, 609 bp, Homo sapiens
acaaaccattttcaactcttttatttattgcttctggtatttatccccatgtttataaataataactttgcattgctatttcccaattgttcagttttagatattacctrttgacttctactgtggggctcttaaccccacccctcacacacacaaatacatactttcttagtcaatttctcactagagttataaaacaatagtcaatatttagtgtttacattaccatgaccacttaaatattgtttacagttacagcagaaagtactaaatttcctgtctgtatttcacggttttgttcaacttcttgtttttatttctcccctgaagttaataaatgtaatattttttcttagtttcctaggtacctgtcaagaatcttatcccaaactcctctcaatttgatcttatattttaggtaatggtatttaaaaaaaaaaacacacaaacatacattcttctaaatactcaggccgcctcttgtcccagattggacagttttgtctccaggcccagtgcacagctgtcatctaggcatgtcctgccctagtctggtggcacacatccctgctttctcttcactcccttgacttaatttccttatttaga

SEQ ID NO: 284894 - DNA, 590 bp, Homo sapiens
tttgggcccaaaaagtcaacagcacaaacccaagaaggagatgcggtgattttatgataccctatatagctgaccctaagttcatgcataagaaagcaaaatagtaatctggatgcaaaattcctgacttggacttcagctcttttaaagaagtataaagtctgtcataagtagtgagaaagccacttaggcctatggactatgtggatcatctctggaatttggaattaatttctgtaccaatagcttttagtcataaaacacatttatagastctggagtccaatatacaagaacttgagtactgactctttatttattatgatttttctttctctttgtttccttctctgtaaaacaggaataagacaacatcgctcatgctatctttgtgaatattataaatatgttaaatcacctaacacacagtaaacagccaattaatgttagcaaggatgtgactcaagagtaatattgttttttcaaatatttacacattgacataagatgggagcttagactggggctcccaaagagggatcctagtctgccttgaggtcaatgttaactcattggctgtgatcacactc

SEQ ID NO: 284895 - DNA, 612 bp, Homo sapiens
tcatgccattaacttagaagaactcaaaatctctggttgtagtggtcacgctccctagatttacatttatctaatttacattatctcatttcatgatctttaaccattctattgcctagaaagaaaaactcctgagatcaaataatttgactttgttacaattgttaagaacaaacaaacaacaaaagaattgtccctcacttgtctttgctgcaggcaatgggtataacacatgccttcttttccagcttttagaattccagccctaattaagtagcaggtgcttctcaaagcatcagacttacctggaaacccattagacacacacattctcagggccccaccttggatctactgggtaagaaactctgggaatgtttttgtgctgtaatgaggcctccagrtgattctgattgaccctcaaatctgagaactgctgtgatagcctgatgcttacgaaatgctatgatgattgaagactcacaaaaatgtatggacagcttttaaaataccacatctaggtaagcagactgcttatctacacttagctctcaaaatgaaataatattttttctcttttaattaccgatgagtccttctaagaagactggg

SEQ ID NO: 284896 - DNA, 598 bp, Homo sapiens
agtgattgtgggactttgcattggaattaagcactgctttgtcacagcagaaagcaatatagggcagaattcaacctgagcccatggagagagtgtttaaaccagccctagcaagaggcaaatcatccatcctaggttggaacctgagtttgaataagccctgactgacactgtgggttaaagtggtctggggtcataaacttgaaaggcartctaggctacaaggactttaattcctgggcaagttctggtgctgtgctgggctcagggccagtggacatggagtgcactgacctactgagagacacgagccagggcaacaaagggagggcttgtgtcacccctccgccaagcccaggcagtgcagctcgcaggtccaggagagactccttccttccacttgaagagaggagagggaagaataaaggggactttgtcttgcaacttggataccagctcagccacagtagaacaggttaccaggcagagtcctgaggcccccattcaaggccctagctgaacatttctaaacataccgtgggccagaagggaacctactgccttgaagagaagaacccaatccaggcagaatttatca

SEQ ID NO: 284897 - DNA, 598 bp, Homo sapiens
agtgattgtgggactttgcattggaattaagcactgctttgtcacagcagaaagcaatatagggcagaattcaacctgagcccatggagagagtgtttaaaccagccctagcaagaggcaaatcatccatcctaggttggaacctgagtttgaataagccctgactgacactgtgggttaaagtggtctggggtcataaacttgaaaggcaatctaggctacaaggactttaattcctgggcaagttctggtgctgtgctgggctcagggccagtggacatggagtgcactgacctactgagagacacgagccagggcaacaaagggagggcttgtgtcacccctccgccaagcccaggcagtgcagctcgcaggtccaggagagactccttccttccacttgaagagaggagagggaagaataaaggggactttgtcttgcaacttggataccmgctcagccacagtagaacaggttaccaggcagagtcctgaggcccccattcaaggccctagctgaacatttctaaacataccgtgggccagaagggaacctactgccttgaagagaagaacccaatccaggcagaatttatca

SEQ ID NO: 284898 - DNA, 558 bp, Homo sapiens
gctgaatgctgaatgtgtgggaagcacagaagggagtgggtagggaggatgttgagtgatggaactacagataatacagagcccagaaacagccctgggctaccgcaggagtaatagaagtaagtgggrtcagcaggtgatgtcatccacctgcacagctaggttcccgcccagactaatgatggggctgaggcagtgcgcattccatctgttacacaggtggacaattcctaagtcaacagatgataagaaaaagcacctataatacaattttcatttgataactgagaataagctacaaggtaaatttgaactgggaaaacccatgcatgtgttggtgggacaaactatttcttaaattggatttgaatatttgaagcagacataccatccctatttgtaacttttaccaaagttcatggtaatacagtagaaagatggacacagtgacagttactagtttatcaccttacaggaagttactagtctatcaccttacaggaacttctttaaattaaatatatttttacgtaaattaaatatgcaatgcacaggcaa

SEQ ID NO: 284899 - DNA, 589 bp, Homo sapiens
acctataatacaattttcatttgataactgagaataagctacaaggtaaatttgaactgggaaaacccatgcatgtgttggtgggacaaactatttcttaaattggatttgaatatttgaagcagacataccatccctatttgtaacttttacyaaagttcatggtaatacagtagaaagatggacacagtgacagttactagtttatcaccttacaggaagttactagtctatcaccttacaggaacttctttaaattaaatatatttttacgtaaattaaatatgcaatgcacaggcaatatatttctatctcttttcttcctgaactaggctgcattggtcagggaaactaaatttggaaactagaacactggcctgactggctccgaactgtctcagttccctatgcgtgatctggtggagcctccagaattggaagacttggactctctactcactctgcctcatcaagcgatgtggctttgggtgactcttggcccattcctgagattctacttatgctttgagaaatggaatggctgttgacaaaatcccatctccctacaagaataaatgctaacctgcta

SEQ ID NO: 284900 - DNA, 444 bp, Homo sapiens
caaggggaattttcaggagctgctgatggctgcattgctaatgtggctgagaagagtacctgcaaatgtcgagccacttatttctgttcattgatttcaatttgctgtgcagtcatctcctgggctcccattggcccaagcactcagagccctcttcaaggcactgctgagaggagctctggagttcctggggcaggccagtccttcatcgcagkgcacagcccagagctccacggaagcaacttcagtatgtgggccagcgccgagcaaatgggaaaacattttgaagccgcaggcttctcctgaattaaatatttactcatttcatgcctctccctctgtccatggagaatccagctcaaactaaataacaaaggaggtcaggcttgtgatctgcacaaaaatacttaccctgcaattatagcaatattgggccttacaatt

SEQ ID NO: 284901 - DNA, 609 bp, Homo sapiens
tagattgtttcattatctgaagttcttgagtgtctaatcctgctgtctcttgctcatagtgaaatcttttttcaastgttttatatttttgaattgtgagctcatcataaacacggctttatgtgtaggaattttgtgaggcctgattaatggggtctcctgtgaagtttcgtttttgtttttgccaagctgtccagaggtttcactatcatttttataataatttatggctgggcacggtggctcacacctgtaatcccagcactttgggaggccaaggcgggtggatcacgaggtcaggagttcaagaccagcctggccaagatggcgaaaccctgtctctactaaaaatacaaaaattagctgggcatggtggtgggtgcctgtaatcccagctactcgggaagctgaggcagagaattacttgaacctgggaggcagaggttgcagtgagccgagattgtgccactgcactccagcctgggcgacagagcaagactctgtctcaaaaataaataaataaataaaataaaatttctgagcttggggctccagcaccacataaggaatatatatttaattccaaaccctcataagatatagttcaaa

SEQ ID NO: 284902 - DNA, 588 bp, Homo sapiens
aaattcaaaccaagaagcgggaactatttggtgaggcagcaagaccggaccttgggtgaaggtgagttcatcatctcagaagagggtcatgaagagtgggctggtcagacttcaaaagtcttgaaacagtggttctcaggcttcagtgtggaagggtttatatacgtgaacaagggctgatacagattcccctgcagctctgcctccaagattgattgggtacttygggagtggggccaggaattttaggtgttcttaattcagggggttcccagaaggcattttgaggaatagtgctttagagcaaacagaggtaggaactcacggcttgagacattaaagagaccatccagaaggttggaagaactcaaaaataaaattccaagttggccaccacaaaggagcccaaggaggaagaaaagacgaacctgatgaagagctactgctacacagggggccctgatgaacacaattaaaaaaaaaatcatgcagaagagctggcagatagccaacaaagaacagaaaacagttgcaaagaacactaagagtagtgccaggaaggctcagtggtgaactgaaccttaaaca

SEQ ID NO: 284903 - DNA, 398 bp, Homo sapiens
taataaaagtatattttcaacaaaagtaagcaatggctgtgagttcatagagtccagatttatttaccataagcaatcctggacagatcatgaatagcctgctaaaagcattccaaataargaactctcccagtagtaaacatccttagtgttttgtcatatctattattagcatgtttatgaggagatctgaccgggttacttttcttttctgaccttctcccagatataagaaaaaacagtttgtaatctctttgctattcttgtccttcccactgggcatagaaattcataaaagtactcattttacttttttattaaaaaatatactgggaaaaataaacacattttcttcaaaatttctagaaagaaaagtaaatgtttgaacacatgaatta

SEQ ID NO: 284904 - DNA, 334 bp, Homo sapiens
ggactctcctctctccccaccttctctcttccagagttttgtaaaacactttataaaaatccaccacggaaamtgttgccatttgtcggggatgtagaaaggaaggaggagagtcactctcacctttgcaatgaaaaattggaccatacatgcaggactttttaaacattctttagagagttgaggtcagagcaaacaactgcctgaaaagccaaagatcaacagcgccttgagagaaagagaaaacataaacaggtatcacctggggtagacctgaagcggcagctacaactagagctccttacaattgctgacaatttgtgaagggtgagta

SEQ ID NO: 284905 - DNA, 960 bp, Homo sapiens
ggactctcctctctccccaccttctctcttccagagttttgtaaaacactttataaaaatccaccacggaaactgttgccatttgtcggggatgtagaaaggaaggaggagagtcactctcacctttgcaatgaaaaaktggaccatacatgcaggactttttaaacattctttagagagttgaggtcagagcaaacaactgcctgaaaagccaaagatcaacagcgccttgagagaaagagaaaacataaacaggtatcacctggggtagacctgaagcggcagctacaactagagctccttacaattgctgacaatttgtgaagggtgagtawgaacacccggggacgagacacatgtatagatgctatagaagtcatgtgggagctctgcttagcatgaactcatcaaaaggcacaggaattacccttttcwgacaatatctactctcaacatttgctttttgatcactcattaaacaccaaaaatcacagaaaataaatcttcttgatgtatataatgtagggaattgagaaggcaagaaagacacaagagacagggactagaagaaaatgcatcaatctgttaatgatgtaataacaggtatctctgggtggtagcttattttcttgcttttagtattttctaaatttgcagcaatccatatatattcattatgatcataaattcagcaaatagtttaataatagtaaactattggtattagtttgttagggttaccaaaacaaaataccacagactgggtggcttaaacaaccaaaatttattttttcacagttgcaaagactggaaatcccacatcaagatgtcagcaggtttgtttcttctttagcttctctccttggcttgtagatggtcatcttctcctctttatcatcacatgatcttccctctgtgcatgtctgtgtcctaagctcctcttcttctgaggacaccagt

SEQ ID NO: 284906 - DNA, 349 bp, Homo sapiens
tgatcataaattcagcaaatagtttaataatagtaaactattggtattagtttgttagggttaccaaaacaaaataccacagactgggtggcttaaacaaccaaamtttattttttcacagttgcaaagactggaaatcccacatcaagatgtcagcaggtttgtttcttctttagcttctctccttggcttgtagatggtcatcttctcctctttatcatcacatgatcttccctctgtgcatgtctgtgtcctaagctcctcttcttctgaggacaccagtcatattggcctaggacccacacatatgacctcatttaaccttaattctctctttaaaaagaatatc

SEQ ID NO: 284907 - DNA, 522 bp, Homo sapiens
atgagatgtcctctggtagtaaaacaatcacacctataaaatcaccctacctgtaacttacttaaccatctctgtaaaagtctaaggcgaaccattctgctgagacacagccatctgcagacctgaggtgccctccatactgtgatagcttgaataaaatcaactaaaaggtgtagtacatttttgtctttaacagaaatcatttcatcaaaatacaatttgtaattaaaaggacctgtatcaaaggccctgttaccgaattagtaacttttaaaaacaaagtagatggagtggtttaatrgttattcattgccaccttctgttggactttgagtctttgctctcagccttttgccctaaccacattagtgctattaatcattgtgttctacatggcaagaaaaaccagttttgaaaattctgcatacttaaatcaaatgcataatcagaaagccagaaatgttaacagtgagaactatctgtaacacattaaaaaacaaaacagaaaaaagcaaagcaaaa

SEQ ID NO: 284908 - DNA, 521 bp, Homo sapiens
aattttatccaataaatatcactgagtgctaaggtaagggcatttattggtaggtgctgaagtgaatacgcagattctygtagccatgttctcaaatttctttaatctacttcaagtagagaaatctcatacaagcagttgagtaaataaatcctcacagaaatgaacaaaatagatgatgataccagctctaatacttgaataaatcacgtaccatggggtcagaggggaaggagccaatatatgtcttgtgaatcagattaatctatgtatttgcacatttgcgcatttcaaaattaccttaaatactgcctactttttgctccacttttatttctctaaataaaaaactattcttaagatatgcataagatttctactaagatcataaacacaatcatatcattgatctttatatattacaggatggtaaacgtgaggattagtacttgatgagaaaaacagccacttggtctaaagacctcagaaactatcaagtctgtaatatgtggaggtgatat

SEQ ID NO: 284909 - DNA, 568 bp, Homo sapiens
tgcataagatttctactaagatcataaacacaatcatatcattgatctttatatattacaggatggtaaacgtgaggattagtacttgatgagaaaaacagccacttggtctaaagacctcagaaactatcaagtctgtaatatgtggaggtgatattgcctcttcttaaaacaaaccacagaagctaaagtgttgtatacgaagccaatattttcagactgtctgaggccattgatatattttagcccagagtcatgatgctatgtggtccctgtgacaaatatagcagaaaataaatgtcttagtatatttctgaaaaatcaaatatttgccaacaattcatctgagcctgaaaacgccacacaacgaagayggaataatagcagacaagtatttcataaattattgccaaatccaattgtaatgtgaaaaaaaagcttagcaaaagtttattttgtctgcctttggacatattttcctactcattctctcctcttattgtccctagacaatgccagactgttaaattaattccctctggtaagaaatgtgtaagcaagtataaca

SEQ ID NO: 284910 - DNA, 612 bp, Homo sapiens
agacaatgccagactgttaaattaattccctctggtaagaaatgtgtaagcaagtataacacaggaaactgagcatgaagtcccagtgctaattaaatgctattgttgcttttcattttcctcagtacattaaaaaaactaaatgtttttacctctaagtgttggaaacattgcaaaaacccatttaaattgaacattaagtttcaatcccttcgtttaattcttgctacactattaaacaatatgaaatgcatttatgagcagagcaaaaatgggttgsagcaggcacattcttttatttttctctatgtaacttcaatgttatcatttaaacaatattgccacaactatccacccattttaagtaatttgaacatatctgaaagtgaaaaattgaacattcctttaagtttttgttgaggcatttaaagttttctccaactattaaagagaatcatagttaagaacatattctaaatggccctgccaggcttccaattccatatacacatattatgtggaattcatgaatgtaactaagactaaacttgttgctaataccaacccagaaaccttcacatggctcatgccaagcacatttgttttgaaatg

SEQ ID NO: 284911 - DNA, 515 bp, Homo sapiens
aaaccctcagttaaggagtgtaattaaggtttttccccctttaaaatgtaaaatatcttggaaaaaagaaagcacttcctaatgattattatactaaaatatatttggtcctttataggtctcaaattgtggtccacaaacatcctgactcttaatcatcatgtgtgtgtttgtaggggatattctttgttaaaaataaaaatttctgggatccacataattcttatattcatttataattctgtcaatgtttgagaaaattcattagggaaaaaaacatccttctgcttacatacatttgagaacattgatttacactggtatttaatcttatctgcatatgaacgtctcaatgactttaaaacctcctcaggtaacataactcttcagccacaaataaaaactactratgtagaccttgcaacctgactcattttgatcatttgcattacacacttggtcctggaatatatttgacattgtaccctctcaacttagaacatgacctgtgctga

SEQ ID NO: 284912 - DNA, 575 bp, Homo sapiens
gagaaaattgaatgacttgaaactataaatataaatacataaataaacaacttcatgatttatagtgagtcttactttctacaagaaaagcaaacactttaagtcacttcaatcaatggcagaaaacaaaacttttcaagtattttctgttaggaaacatagttggtgatatttctttcaaaaaattccagaaagacaggccttaaagccaacatattctccmtaaagtcaaacatgaacaacctcacattgtcgtcctaaatatagactccttatagcttgccatccaatgcctccacaacatagcatcaatctctcttcccagaatcccatcccatcatgctccctgatgtatccaatattctaagctatattgagttcattctttctacgtcttaaatttcctggctctgcacatttgctcacactgacaatgatgtgcttatttttcaaaatacaaatcaaatgtgaaatcctacttggtgacttgatgactttgtatttctctcctcttggaaagaaatctaccagcctctgaaactgtggagcacttatttcgatttctttttaactgt

SEQ ID NO: 284913 - DNA, 582 bp, Homo sapiens
tgcttttcttgcacctcttgaaaaacaccacagcctccctaaggaaaggaggccagactgtcttcactgtgctgccccttctccctccctgaacctcctctgcttttcaccaggcagggccctctggcttgggcttcaccagtacagctgccaccacccagagctgatcatcctgattgcagcagctctgtgtttctctggcatggcgctctcagaggcaactgaggrcccctcagccactgccactgcagcagtacctgccattgctgcccacaagatagccattttaagaaacaacaaaacttatcttctagagctaaaaatctactacaggaatttcctactaaaatgagaactattaacagcagaatataccaagctgaggaaagaatctctgagcttgaatgctggttcttcaaatcaactcagtcaaacaaaaataaaagagagttttaaaaaatgaacaaaatttccaagagatataggattatataaaaataacaaatctgtgcctcagtagcgttacctgagagagaaggagagaaaataaacaacttggaatatatttgagaatatagctca

SEQ ID NO: 284914 - DNA, 477 bp, Homo sapiens
caaagagcttgagatacaaatccaaaaaatacagaaaaccccagtgaaatactgtacaagacaaccatccccaaggtacgtccgcgcgcgcgcacgcacgcacacacacacacacacacacacacatacacaaacaacaacaacaaaaaaaaatctctttttttttcttttgagactgagtctcactctcttggcaggctggagtgcagtggcacgatcttggctcactgcagcctctgcctcctggattcaagcaattctcctgcctcaggctcccaagtagctgggatgcatgccaccacccctgactaatttttgtatttttagtagagatggggtttcaccatgttggccaggatgatctcgatctcaacctcatgatccatccgcctcagcctcccaaaatgctgggattacaggcatgagmcactgaacccacccaaaaaaactcttaaaggcatctagagagaagggtca

SEQ ID NO: 284915 - DNA, 568 bp, Homo sapiens
tcttttgaggtctttttttatgctttacaaaaaaaggttcagagatgtgttactctaggggtagtttgttcctactacagaagtatgatgcatttgatgtctccatgaaatgctaaaggaatttttcaaatgctctctattctggctgatcagagcaagaatatctccccactatgagtaagctcttaagagttgtttagcccggctttgtgaagatgcactttatgtttgcagagcctcatacttacccgtggtaagagatcagagagacctcttcaaagctctgccccaaaattctcaaccgtttattcttcctaaactctggttgccttctcttcaagtcagaaagaccaccaacccctttgggttactcaacttgtgcgtgtgctgagaaaattgactccagacagaaagtttttggtaggtttttgtcccatttgtagttgttcacagcatgagggtaatctgackcttattattccactatgtccagaagcataaggccctcagtcataacatttttaatatctactctttcacgcacacacacactcacacacactcacac

SEQ ID NO: 284916 - DNA, 581 bp, Homo sapiens
tgtgaccttcttgccattacttgaaccctattgaaaatcaaattttcccagtttattcataccactaacattttattgataccaattagagaatatactctgatttttggctgaaaaatctgtgagaaaatactcaatgctaatatactactttcctacatttatatttaagtccacagtttccttattaaattgatgtttggataacttatccattgttgaaagtggggtattgaagtcccctaatatttttattttgctatttctcctttcagttctatttgatatttgcttaatatacttaggtgctccaatgktggatgcatatatgtttataattgttatatcttcttgatgaattgacccctttataactatataataactttgttccttgttatagtatttacttaagtctattttgtctgacgtaaatgtagctactctgtgtttgttgtggttttcattttcatgaggtttcttttttcttcccttaactttcagcctatgtgtatccttaagctaaaaagagtctcttttaaggacacattgttggttctttgtttttaattcattcagat

SEQ ID NO: 284917 - DNA, 630 bp, Homo sapiens
atgtttataattgttatatcttcttgatgaattgacccctttataactatataataactttgttccttgttatagtatttacttaagtctattttgtctgacgtaaatgtagctactctgtgtttgttgtggttttcattttcatgaggtttcttttttcttcccttmactttcagcctatgtgtatccttaagctaaaaagagtctcttttaaggacacattgttggttctttgtttttaattcattcagatactctatgtactttaattggataatttaattcatataatttaatgtaattgtcactatgaaaggacttactattgccactttgttaattgttttcccactgttctgtagctcctttctgtcttgttgtcttcctttgtgatttaataattttttgtagtggtatgctttgattttattacatttatcttttgtgtatctactagaggtttttctttatgattactgtcagactcacaaacataatcttatatcagtctaattacagctgataatgactgaacttcaactgcatacagaaacccgacacatttacttctctcctccacctcacattttccattattgatgtcccaatagcaacattttatattgtatg

SEQ ID NO: 284918 - DNA, 604 bp, Homo sapiens
cctttagcatttcttgtgagggaagtctaggttatttccctcagatatgtactttgagaaagtatatgtctccccttcattcattcttaaaggatggctttgccaggtatagtattcttggttagaagttatttatttatttttttaagcacaatgaatatatgattctactggccttcatagtttttgcaaatatagccttattgggggtgatggttctttgtatgtaagttgcttttctcttgttcctttcaaaattcttcctctgtctttgacatttgaaaatttgatttaaatgtgtctcggtgtaatcttctttgggttgaacttagttgaggactttagaacttcatgaagcttgatgttcatatccctctcaagatttgggaggaatatttcagattttttttttaattaagctttccatttctttcgctctcttcttctaggattcccatgatttgcatattgttttggttgatgrtgttttataaattttacaggcattattcactctttttttatttcgtttttttctcctttgactgactgattttaaaggatctgtctttgagttcacggtttcttctgtttgatcaagtgc

SEQ ID NO: 284919 - DNA, 602 bp, Homo sapiens
tctaggggcacctcagacattttatgtcaatgtaacccctgcattctgtttgctccttgttggcagtactaagtcttaagactgtatctttgstcttgatcccaaaaagccaagtcggattttaagagcattgagtttattttccctagggtagtgctttgacgtgctcaaggttaagcaccttctcccaatccaacagtgttgagctccctgtccttgtgacctcatgtacaatctgcaaagttttacagtgccattagtggaggcacaagtggagcacaggccacagggaagggagggatgtgcatcatgttgggagcatgcatgggctaagtagtgggcatctacaagttatgcatcctactcagatcaggcatggacctcttggtggagtctgacaagcagttagtagaaactgtggaattttgttgagttccatatccctgttgctatgagctcctgtcctgttttcctgctcctacctgcctgtacactatccagccacacagatctcctcagtgttctgcatggggtgggaaagtaatgggactcttaggcagtgtcctaactgctggggagacaagtgcccactacactctcac

SEQ ID NO: 284920 - DNA, 602 bp, Homo sapiens
tctaggggcacctcagacattttatgtcaatgtaacccctgcattctgtttgctccttgttggcagtactaagtcttaagactgtatctttgctcttgatcccaaaaagccaagtcggattttaagagcattgagtttattttccctagggtagtgcyttgacgtgctcaaggttaagcaccttctcccaatccaacagtgttgagctccctgtccttgtgacctcatgtacaatctgcaaagttttacagtgccattagtggaggcacaagtggagcacaggccacagggaagggagggatgtgcatcatgttgggagcatgcatgggctaagtagtgggcatctacaagttatgcatcctactcagatcaggcatggacctcttggtggagtctgacaagcagttagtagaaactgtggaattttgttgagttccatatccctgttgctatgagctcctgtcctgttttcctgctcctacctgcctgtacactatccagccacacagatctcctcagtgttctgcatggggtgggaaagtaatgggactcttaggcagtgtcctaactgctggggagacaagtgcccactacactctcac

SEQ ID NO: 284921 - DNA, 490 bp, Homo sapiens
gcattgttattgcttggaaccatcaatgtccagtagaattttctgcaatgatggaaatgcactgcccaatgcaactgatactaatcacatgtaactattttgtacataaaatgtgtatactgtcagtaaggaactaaattttaattttaattaatttaactgtaaatagtcacatgtagctggggactctttattggagagtttaattctaaagcagcaacctgcctttcggcagcaggaggggtactcatccccrtatatttgctagcttagctccttcaggtctctgtttaaataccacattattagagatgtcttctttgaccagcctagagaaaatagcagtaacatgtttaaagattcactccatatttttcttacataatttagactgcctatcattaattccatgtgacaaaactgtgacttttttgttttatctttctttacaatctagggtaacacttccatgaggataggaattttgtgt

SEQ ID NO: 284922 - DNA, 574 bp, Homo sapiens
agtaaatagatctcatttgctattattattgtggcactcctttttctcaaaatctttctccttccagctctagctacaggtttataatctaatgtttgtaaactcatggctcacaagttgtatccagaagcagatgtactgtttacaaacatcacaacggtgataatcaacaactgaccttataaaatgaggaaataaggctgytgtgatggctagaaaatgaaaattttagggcaagggtgacaggtggcctgtagagtcaggacagtgggcctgtgaaaaatctgagagtcaattagaagacagcccggagcaagggtggtgggatgaggggcattgaggtcagaaaaaaataggcaagagcaaaattgcagaggcagaaggacatgacaaactggtgctatcagtgaaaaaaagaaaaattagtagggaattggggactgaatttaagaggcaattatgtctttcataagcttgaggcagtagctaattgtctaattgaggggacgagtgggctaacaggacactgaaggaaaaggtctcaagtattcttgtagctcttttgttgtggaat

SEQ ID NO: 284923 - DNA, 466 bp, Homo sapiens
agatgatgctcaaaggaggttcaagaggaggatggagactgtgtaagtatcattcagtttgagtgacaacaagtttctgttaagttcaggactacaaagcaggttcytaagaatttgattaagagtaaacagaggctgggcacattgactcatgcccttaaatcctagcattttgggaggccgatgtgggtggatcatgaggtcaggagtttgagaccagcctgaacaatatggtgaaaccccgtctctactaaaaaaatacaaaaagtagctgagtgtggtgtaatcccagctactcaggaggctgaggcaggagtatcgcttgaacccaggaggtggaggttgcagtgagctgagatcgggccattgccctccaacctgggtaacagagtgagactctgtctcaaaaaaaaaaaaaaaaaaaaaaaaaaaagtaaacagtgaggaaatagaaggaatttatgta

SEQ ID NO: 284924 - DNA, 466 bp, Homo sapiens
agatgatgctcaaaggaggttcaagaggaggatggagactgtgtaagtatcattcagtttgagtgacaacaagtttctgttaagttcaggactacaaagcaggttcctaagaatttgattaagagtaaacagaggctgggcacaktgactcatgcccttaaatcctagcattttgggaggccgatgtgggtggatcatgaggtcaggagtttgagaccagcctgaacaatatggtgaaaccccgtctctactaaaaaaatacaaaaagtagctgagtgtggtgtaatcccagctactcaggaggctgaggcaggagtatcgcttgaacccaggaggtggaggttgcagtgagctgagatcgggccattgccctccaacctgggtaacagagtgagactctgtctcaaaaaaaaaaaaaaaaaaaaaaaaaaaagtaaacagtgaggaaatagaaggaatttatgta

SEQ ID NO: 284925 - DNA, 657 bp, Homo sapiens
atggcacaattctggttgtttgtagggcattagagaagctaatgccgagactgctgagggaagttaaaaccagccaagtctcaaaactgggctttggactctaagagcaccaaaaagatcctagaagaattctagtttccatcacagtgttttataaaagaaggatttatttttgattacatatgagacagctcatgtgtgtaggcatgggatgaggaagcaccaggtgctttggcaagtggagaggggtcagggagatttgagaaactgcagacatgaagttcttctttggacccactagctggttatacctgaagaaayagaattctcatacatgtatcaacttcaattaatctcccacattcccaaatgaaatccactatttcctggatttcatatacttttaaagtacctgcacagaaattacctcatttaatattcacaaccactctagcaaagcaagattctttttcactgatgttttaaaaataaagaaacagaaggaagattcaagattccacatgatttttccaaggttacacggctagcatgtggtaaaatccaatcataataatatatgtgcttatatctcctgattctatctctgattaaatcccttggtcctctattatcaatgccttatgtacacccacaagt

SEQ ID NO: 284926 - DNA, 525 bp, Homo sapiens
tagctgaattaccttctgtatgttagatgaagacttgaaatggatgcaagctgygatgacccgcactggcactcacatacaaatgcatgctgttgaaaaagaagatcactggattaggagaggacctgtcaagttttggcctgcagtacaaataggcctgccacctgtttttgaaaataaagttttcttagaatacagccacatccatttactcccattaatgtcttgagctgatttctcttcacaatggcagagttgaacagctgtgacagagactggatggcctttcaagtataagatacctactacctggccctttatgaaaaacaaaatttgacacaccatggactaggagatagacaggtgcaagttcttgtctctgctttgcaagttattagctcttactttgaacaagaaaaatcctctttttgcatatttctttcctttaaaataatgggtttagtcttttcagactatgataggcaacatggtaggcagaattctaaaatggtctctatgatcacc

SEQ ID NO: 284927 - DNA, 593 bp, Homo sapiens
caacacagttgcaacaagcacacccagtacccagatactggtttctaaatgctattttttcaacaaaaggagccagatgactttgagaaaaggccaattcagagtagggggaatatacaagctgtgcatgggccctcttgtaatgtcaaaaggtaaggaagtgcttacaaaatyatgagtcatgttttataagaaactattcttaatgacttgcttttaaaatttggtagaaagaaaaaagtttaactttacagtagaaaagcatgacaagcactagctcacccaggtgatcaagattaacatcactaatgacaagtcatgttgatagcacaaacctttgatatgatatgatgagactggctattcacctctgtggtcttcctcctaaaaccatctaaccctgatctaatcatgaagaaatacatcagacaaattgcaactgaggggcatatagtagatatgaaatgtttccatcatggcaaaaaactccttaaggtgttgttgaagtcagattcccattcttagctccagacaataacttatctgccgtaactatagaatgatcataatttccctagaaaattatataaatg

SEQ ID NO: 284928 - DNA, 559 bp, Homo sapiens
aggtaaggaagtgcttacaaaatcatgagtcatgttttataagaaactattcttaatgacttgcttttaaaatttggtagaaagaaaaaagtttaactttacagtagaaaagcatgacaagcactagctcacccaggtgatcaagattaacatcactaatgacaagtcatgttgatagcacaaacctttgatatgatatgatgagactggctattcacctctgtggtcttcctcctaaaaccatctaaccctgatctaatcatgaagaaatacatcagacaaattgcaactgaggggcatatagtagatatgaaatgtttccatcatggcaaaaaactccttaaggtgttgttgaagtcagattcccattcttagctccagacaataacttatctgccgtaactatagaatgatcataatttccctagaaaattatataaatggaatctatatgtatatatgacatatatatgtgtatayatagggtctctctctacatatagctcagcaaaatgtttttgacattcatctgcacaattgtatatatcagtagtacata

SEQ ID NO: 284929 - DNA, 624 bp, Homo sapiens
ttggaaactggagtaaaggccatacttgttatgcagttacaaagaacctggtggaattgtttctatgttcttggattgtgtggggcagaaattaggaatgattaagtcagatatctggcagaacaaatatctaagcagcaaaacattcaaggtgctgcatggcttcttttggctgcttgcagcaaaataagagaagacaaaaattatttaaagacagaatttataactaaaagtgaagcagaatgaaaaacttggaaaaactcttagcatggccatataaagaataaagaaagcatgtttaataaacaatgctaatggtttggccaagcaaccatttgctaaagagactgatagtaatagaataaagctgggttctattgataaagacaataagaaaatgaacctgaggcatttcagaggtcttccaggcmagccaaggaccttaagggaaagctttccagacagggccgtgctttccatacactgacacagcatgccttaactggccccctgtggcttgattgggtccaggtgcagctcaacccactgctcctgaaggtgcagactgtaaaggggtggcattcacagttttgtaggcacacagaatgcaagagctgtggaagc

SEQ ID NO: 284930 - DNA, 615 bp, Homo sapiens
taattgtggtttgctctaatttgaaccacagagcacatatccagaaatatcactgtggctgcactacatcaaacactctggaaagtttgccttcatacaaaagtttctccttactatggtatttttcagaaagaagcatttgtgccagtagatgttacaaaccaggtgaatagttttcacaattttttttyggactaaatgactactttccttattagatagctcttttatacaatatctgatctaagaacatgggataatgtgaaatattttcttaccataaaatgtgtggagctctaaagaaatattggggccaatttgttaattttgaagaaaataaagagaagctatgctaacagaggaggtcaccaaatcaataatatacaaatatagatagccataattatgtcaccttccccagaaaattattagctcttgcctctgtgatccccatactatttggtttacacatatattttagtctgtttcacaaactaatctgcatttctattacttgcataaagtttattttatataatagattttaagcaatttgaggaaaaggacaataagaaaatctttatattaagcacctctccaaatacatgttagcag

SEQ ID NO: 284931 - DNA, 509 bp, Homo sapiens
caaagttattatatgtgtattcagaggcacttgtgctcaaactatgcatagtctaaccactatttacattagaataacacagattaaatattgtaaaagggagcatattaggattgaagggaaggaaatcatatctatttggaaaaataaaaaaaatagaatgtgtaattgtttgaatatttctttaaggatagaatagatagaaatttgaatgattacggcaaagatggggaaggacatttcgagaaaagattacatgaacaatgacagggmagtgggagtcattgatgcaatgcaggaacaggaagtcggccagtttagttaatttacagggtaggagcaaggtaatcatggatgataatgctacaaaagtaggtaggtgtttgagttacagcatttgtacttcagctgactaatgcatgagagcctttgagaagttttaaaacagatgtgtgctgttatttggcctctgtcagcatgatgtagcaggggtgcgctgactgagaaaa

SEQ ID NO: 284932 - DNA, 509 bp, Homo sapiens
caaagttattatatgtgtattcagaggcacttgtgctcaaactatgcatagtctaaccactatttacattagaataacacagattaaatattgtaaaagggagcatattaggattgaagggaaggaaatcatatctatttggaaaaataaaaaaaatagaatgtgtaattgtttgaatatttctttaaggatagaatagatagaaatttgaatgattacggcaaagatggggaaggacatttcgagaaaagattacatgaacaatgacagggaagtgggagtcattgatgcaatgcaggaacaggaagtcrgccagtttagttaatttacagggtaggagcaaggtaatcatggatgataatgctacaaaagtaggtaggtgtttgagttacagcatttgtacttcagctgactaatgcatgagagcctttgagaagttttaaaacagatgtgtgctgttatttggcctctgtcagcatgatgtagcaggggtgcgctgactgagaaaa

SEQ ID NO: 284933 - DNA, 509 bp, Homo sapiens
caaagttattatatgtgtattcagaggcacttgtgctcaaactatgcatagtctaaccactatttacattagaataacacagattaaatattgtaaaagggagcatattaggattgaagggaaggaaatcatatctatttggaaaaataaaaaaaatagaatgtgtaattgtttgaatatttctttaaggatagaatagatagaaatttgaatgattacggcaaagatggggaaggacatttcgagaaaagattacatgaacaatgacagggaagtgggagtcattgatgcaatgcaggaacaggaagtcggccagtttagttaatttacagggtaggagcaaggtaatcatggatgataatgctacaaaagtaggtaggtgtttgagttacagcatttgtacttcagctgactaatgcatgagagcctttgagaagttttaaaacagatgtgtgctgytatttggcctctgtcagcatgatgtagcaggggtgcgctgactgagaaaa

SEQ ID NO: 284934 - DNA, 493 bp, Homo sapiens
ttagcatgtttgtggtttaatgatggttgtgatgaaatgctatgcccgtagctttttgctgtcttgccagaaacagcctgtcacccagcaagagtttgatgactgactccttgattttgaagtcagaaaataatacccaaattgtttctgcatttaactaattgggtcattaacattttgtacaaaattaattgcgatttggtggttttgctytttggattccttctgtgttaaattcccaaccaaatgtttttagaggtatatgctttctgatttttcacttcaaaatttattttgtgatcatctgcctagatcttcaatgattgtggttgttttctctacaattatttagtaataattatttatatttgttggctatgttgaggcttttctaaaataaaattatatataactaacctttcaagagttccacaattttttttaatctccaatacataaagcatcaatgcaaagcaaaaatttaagagcctag

SEQ ID NO: 284935 - DNA, 617 bp, Homo sapiens
gtaagttaaagaatgaaattacgtcccattaacaggtaagggagcaattttagagtatttggttgttgttgaataatgataaaactaaataaatattcccaacttatctctataaattatatttattatataaccatagtataatagcattaaagaaaattgaaaaataaaactatctttctgacaataatttttttcatccctaagtcttttccacattcatrtaaattcatattttcatagttaaccaatcatgccatttaatattttgtttttaaatgcgtttcaggttgtcacatagacttctcattcatgtgtttttagtgtctgaatagcaatctcttgagtgcacttgaaaacatttatatacttcattcagctgtgatgggaggtttagtctattttaaattgtgtttattttacttaatgttgtaatgatgatcactcttggtaccagcctctctagacaacttgtatcactgacctagacacatgactctggtatgccagaaacttctacagggaagacattttgcctttttcattattgtacctgctaaatatagtgcatatttgagcccaataatgttttaatgaattgctttttttttttcttt

SEQ ID NO: 284936 - DNA, 600 bp, Homo sapiens
ttgacatgaaaacattataaaattgaaaaacaaaagaaaatgaaaaaaattgtccttgtttaattgacaaaaaaaatagcaagacaaaaatggagaattgaactaaatatcaattgtaagtgaactagagattattttacattacatgtcattattctaagaaaaattgcttggttggtctagtgcaaaacggatgaactttgggaagggtaagacctgtgttaaactgccagctcaactaatatctactctagttacctagcctctgttcatttttctttcctaatttatactctgggactggtagcatttatagacagggtttaagactaatagagatgggtatagagtacataatgtattttaaaatattctaactaaaatataaaatattttttaaatgtatatatttttactgtttaaaaatattttgtactttaaaacaaggaaaaattatgatcagatatatatgatcagatatataacacttcttttcrcagtaactcctagcagtgaaaatgcatgatgtctgcgtatagcattcagaaaaaaactactgccatctggcttttagcaaagtgtttgcactgctgagcagag

SEQ ID NO: 284937 - DNA, 438 bp, Homo sapiens
gtgctatgaaactattagtgtagcatcactaaacagtgtaataataatttgtcaaaagtggtttctaatacatttttaaacttgaatcttatagaggaaaaatcttatagtatgagagctttaggaaatagatctgggctatcttatgccaaagtgagtttctgaaatttagaactgatgattttactctccttttcgctgkttccctcctgcttcctctctgaaaataccgaaaactctgagaatacttaatctgtacaacagtgttttactttaagcaagctcaaacaattttttcataatacattttcagttaatgaaaaataatggatgagcactataggattggtcattagtaaaatgcaattcatgaaactgagtcaaaaagaggagcaaagtttcagcttaattcattcaggtaattttgagtgaagcagc

SEQ ID NO: 284938 - DNA, 627 bp, Homo sapiens
tgtgagcctcattggaaaaagaggggcgtgaactaaatgtctctttagcatctttttatctcttttcagttatttacatccactattctgaaaagatttaatataaaatatccagccatatttttaatatcatttttctgctaaggaaaataaaattgcattatgcttatagttttattgccatcattttctccaggttgtttctaggccatgatgatttttaccattcctagtctgattttgaaaataccatttatcccaacaaatatgtttttgaaaaatctagatgtatacctttttttggtaaaactagtaatactctaggccattgggaaaatagaaaatgcttctttccctacaattcttttcatcycctattccatcccctccctcagttatctattgaccctcaactaactttttgagaaggggggggtgtgctgtactctagctgtgtggtagaccacaggaggagacgtaggtagtgtaataaaagcaggtgagacaggagctgttctctcctgttcaagaaaatagaaatgatatcctggtaaacattcagaaatgtactctcaaattcaagctaagttatcaatgtgtgcgaggtatgttaacaaacaaatccat

SEQ ID NO: 284939 - DNA, 578 bp, Homo sapiens
agagcctcccctgcttcccccacccccatcctgcctttctggaccaaacattttacatatgttgattgatgtcataaatccaggctgtagcctgaccaccttgggcacatgttgtcaggacattctgaggttgtgccatgggcatgtctgtaactttggcaaaataagcttctaaattgaytggcacttgtctcagattctttttggtttacaagcccaaccaaacaattaagttcatctgctcatttgctggtagtaatagtatatcagtggaacctatctctctattttacaccaatattaggggtgttgacacttctgagatttaacaatgatgctataatacattaaatacattatagttgatgagttcatttggaaccacaaactctttgagggaaaaatgtcttcattattttagtgccttcagtgtttatcaggaaacagagtacaaaatgataaatatatgatgagcaaaaaaataaaaactaattaaaaagctaagtgaatgaaggaggaaatggttctaccatggtccacttctgtgtacacataaatgactttatatttttcaatga

SEQ ID NO: 284940 - DNA, 1147 bp, Homo sapiens
cacatataattttcacagattgcagtattataatatattcatacagttttctgtaagaaaatttccctctctttatatctttttgtatgcacaattgccttctgaaaatctacttcattacagaagttgtatatcaatagattcttttgttacttattgaattgtttcacatttcacagttgaaaaagcacatttacagaatgtgactgaactgtctgtctaaaatattgcattatgtttaagttagttaaatttctttttactcaaacaacttaatatcaagaaaacaacccaattaaaaagtaacaaagggcctgaatagacatttctctccaaagaatacatacaaatggcaaataggtaaatgaaaaggtgctcaacatcattaatcatcagagaaatgcaaattaaaaccacagtgagataccacctcacatctgttagaatggttattatcaaaaagtcaaaaagacaaaaatataacaaatgttgaagaggatattgagaaaaggaaaccttttttcattgtcastgggaatgtagattagtacagccattatgggaaacagawtatccaatacagtattataaattgctagacattttccaggtttgtaatttgtatagcaaaggctaggaaatgggagtttagtagggagattatatcaggcattgattaaatcaaggtttgcatattttagtgatgattccccagttggaatattttattattggtgaactgagaagagtagaaaaatacctggaaattctggaactttttgactcatagawtaacttaaaaaaattcatgtaattgtgaaataacaaaaataaagatggagagtttcatctataactattcagtttcttacaatatatttactcaataggttcattctgtaaactgtattctaaagaatgtcttcagtaagattacttgcagtcatcacatgaattgaggctggaaattttattcctggggagcattttaaatattacgaagattctacatccttttcagttaactataaaagagatcaagcctttgcagatgtgaattaaatacgcccttttctttgcttgccacaacctctaacagtgtcttttttatcttatctgctcagtgtattaaggattcataatattt

SEQ ID NO: 284941 - DNA, 588 bp, Homo sapiens
ctgtattctaaagaatgtcttcagtaagattacttgcagtcatcacatgaattgaggctggaaattttattcctggggagcattttaaatattacgaagattctacatccttttcagttaactataaaagagatcaagcctttgcagatgtgaattaaatacgcccttttctttgcttgccacaacctctaacagtgtcttttttatcttatctgctcagtgtattaaggattcataatatttagtctgtaagattatttttaagattcttaaaatacaaataccacctatggaatgtttcaattttaaacaaggtgaaatcaatttttttcatatttataatttctatttccattttgttcaaagaaaggtatgaataaggcaaaacatcactaaagtcagtatttccaggtaatcataagttgtataacggatcttagtatgagtattataagagggaacataatcataggaaatatgtataaataggtcarttgaagaaaaattataaaaacagtatgctgtctcctttaaacaatagaaatacatgaagatacatatttttaagaaagattattcttgtatact

SEQ ID NO: 284942 - DNA, 588 bp, Homo sapiens
ctgtattctaaagaatgtcttcagtaagattacttgcagtcatcacatgaattgaggctggaaattttattcctggggagcattttaaatattacgaagattctacatccttttcagttaactataaaagagatcaagcctttgcagatgtgaattaaatacgcccttttctttgcttgccacaacctctaacagtgtcttttttatcttatctgctcagtgtattaaggattcataatatttagtctgtaagattatttttaagattcttaaaatacaaataccacctatggaatgtttcaattttaaacaaggtgaaatcaatttttttcatatttataatttctatttccattttgttcaaagaaaggtatgaataaggcaaaacatcactaaagtcagtatttccaggtaatcataagttgtataacggatcttagtatgagtattataagagggaacataatcataggaaatatgtataaataggtcaattgaagaaarattataaaaacagtatgctgtctcctttaaacaatagaaatacatgaagatacatatttttaagaaagattattcttgtatact

SEQ ID NO: 284943 - DNA, 545 bp, Homo sapiens
agagtgagactccatctcacaaaaaataaataaataataagagaaatccrtctgtgcagttcatgctatggaactataccataacaatctggaaatggagagaaaagctataattgatataaagtgaaggggatgatagtatcacttttaaaatgaaaaagaaaaaaataagcataattagcacctgtcttttataataattaaattgtcacatgatataaaacatgccaaatattgtaatgattgaattgtaaaaccagttgtcttttttttttttttttttttttacttttattttaggtacatatgcaggtttgttacgtaggtatatgtgcaggtttgttatagaggtaaactcacgatactggggtttatggtacagattatttgtcacctaggtactaagtctggtatccggtaggtagtttttctgctcctctcaatcctcctaccctctaccctgaagtaagccccagggtctgttgctaccttctttatgtccaagagttctcgtcatttagctcccaattttaagtgagaatatg

SEQ ID NO: 284944 - DNA, 621 bp, Homo sapiens
acaatttgacaatttttaagttcagtaattataatgtgagaattatcatgggtaatgtatttgggtaaggagtggtgtttcaagtctacttactgatatattttgatttggaaagtatttattatttttattgctaaattttatgcccaaatcattattaaaaggtgtatagcaaagaaaaatcgttagtggtcctggggtgaacattagttacattttcttcagtgatttatattttctacttttccaggcatgagccaaacttcctcatgattgcataatgttttatttgtcatatttatatattcaaatataatagataacaaaagggtactactgttctgttagacaccctcctcattcaaatgacattagatgccaaaactctaactccttatatgttgatttttaagcaatctgttactttgtctcttacaagcatttcaatctgacaatatcytgagaaaaattccaacatttgacaacagaaacagaaggatcttcactttaagtgtctgactctcctcccaactatagtgccctagatatttctagaaatatagacagataatacacatacacacatacatgtatatgaatatatatgtgtatatatgtatg

SEQ ID NO: 284945 - DNA, 586 bp, Homo sapiens
gctcatggttctggagggtgagaagtctaaaagcatggtgctggcatctggcaaggcccttcttgctgtgtcctaacatggtgaaaggcaagagtgcacatgagagagagaggcaccaggggctggacttgctttttaacaacccactctcatgctaacctactcccatcataatggcattagtccatttatgaagtttctgtcgtattgacccaatgagctcttattagtccayatcttccaacactgtcacattggagattaagtttccaacacacgaaatttcgggaaacacatttaaacaatagcaataacaaactttttcctggggactcacttttatttaataccacaagaaaaaaataaataatctcacatacatagttcttaaataataaagaatctaataaacttagattctttaggtataaaagaaagaaatttctaaccagttcagtcatgttggagtaaattctcagtaaattcagattccaaactccttttcagggttcttttctattatcttaagagtttctttgcccccttttctttaccaaagttttaacataagcacagtggattatgt

SEQ ID NO: 284946 - DNA, 586 bp, Homo sapiens
gctcatggttctggagggtgagaagtctaaaagcatggtgctggcatctggcaaggcccttcttgctgtgtcctaacatggtgaaaggcaagagtgcacatgagagagagaggcaccaggggctggacttgctttttaacaacccactctcatgctaacctactcccatcataatggcattagtccatttatgaagtttctgtcgtattgacccaatgagctcttattagtccatatcttccaacactgtcacattggagattaagtttccaacacacgaaatttcgggaaacacatttaaacaatagcaataacaaactttttcctggggactcacttttatttaataccacaagaaaaaaataaataatctcacatacatagttcttaaataataaagaatctaataaacttagattctttaggtataaaagaaagaaatttctaaccagttcagtcatgttggagtaaattctcagtaaattcagattccaaactccttttcagggttcttttctattatcttaagagtttctttgcccccttttctttaccaaagttttaayataagcacagtggattatgt

SEQ ID NO: 284947 - DNA, 547 bp, Homo sapiens
atgttcctgtcattaggtcctgaaatgcttgagtcctgtggcctctttcactacacagctgtaccaagttaagtcttttcagcacctccatatctcttcatccgtaagtcatcacaatttttttttgcatactrtgaatagattatactttcatttttcaagacacggtcttttaaatttgcagatctatgaacattgaacacagtgggtaattgtgtctaattgacacaatttaaaattccctaatttaaaattctcgtctaattgacgtcccctttcataaaaacataaagatggtagaaaagtttctcttcaatgttccccagaaacaccttgtatcattctctactttcactgctccactgatcattaaattccttgtacatatcctctgtttccatacaatgacttaacaagctgtccactctgcttttttcatctcctctccatcattcacaactcattgagccttgcattagatactctcttagcacattgtatttcttctctataccaattatcatattttgaattatatatttacaca

SEQ ID NO: 284948 - DNA, 619 bp, Homo sapiens
tgttagtaatattttgaaattagaaaaatattgacaataaaaccaggggccctaaatcatttcctcaagctcacaccttgagctagtatcagaagcaaatagaaaccttgtcttttaacttccaatgactgtaccatatatttacatatcataatttgtgcaaagctttttaaatacattttcctctcaattagtacttaaaattataactctatgaatttaatttttaaaattctcaacttgttcaatattttggggctgcctttcctttaaaattttcaaaaaaatacgccagtatatcccaaactcctttacctacmataggaagatcagttagaataaatccaaaagcttaataaaaacgggacactgaagggagaattttttatgggattcattttaaacgtttatgtaactctttgagaagtcgtaagctttccttttattttagattatgttactggattataatttgtcttcaatattttataaaagacctatacacacaccacactcacacgcacatacacacatgcacacacaggtttgggtttgaagagcaatgaactaaaatttaatttcctgggttaatagggtaagaagtttgaaaagctttccc

SEQ ID NO: 284949 - DNA, 544 bp, Homo sapiens
ctgaaccttcctggggtgggtggcggggttctatgtgtttctgagtgtgtgtggccagatcagggtgggtggatgcctttggggatggttataggagacggagtaaaccctggggttatttaattgytcagaaatggaattctgtagctctttgttttaatgtttcctttctgagattgtaaaaggttattggcaaaataacgataattggttattgataaatacagataaaaatgttattggcaaaatgctgaaaattatatgccacctcttggtttatgtaaatgatgtcatctaaggtagagtaaagcctgtgaattggatgctgttatctctgttttataaacaaggaagctgaggttaagggggtttgctggcctgcctgagatctaggcgttggtaagtggcagagcagtgaccccaccttggcctgcatgagtgcacagcctgggcccggctcatcttgccagcctgtctaagctgtcctcggcatagcctgagggctccatggacttgtctcgggcacagctgacctcactggcat

SEQ ID NO: 284950 - DNA, 1089 bp, Homo sapiens
ctgaaccttcctggggtgggtggcggggttctatgtgtttctgagtgtgtgtggccagatcagggtgggtggatgcctttggggatggttataggagacggagtaaaccctggggttatttaattgctcagaaatggaattctgtagctctttgttttaatgtttcctttctgagattgtaaaaggttattggcaaaataacrataattggttattgataaatacagataaaaatgttattggcaaaatgctgaaaattatatgccacctcttggtttatgtaaatgatgtcatctaaggtagagtaaagcctgtgaattggatgctgttatctctgttttataaacaaggaagctgaggttaagggggtttgctggcctgcctgagatctaggcgttggtaagtggcagagcagtgaccccaccttggcctgcatgagtgcacagcctgggcccggctcatcttgccagcctgtctaagctgtcctcggcatagcctgagggctccatggacttgtctcgggcacagctgacctcactggcatwctgaaccttcctggggtgggtggcggggttctatgtgtttctgagtgtgtgtggccagatcagggtgggtggatgcctttggggatggttataggagacggagtaaaccctggggttatttaattgctcagaaatggaattctgtagctctttgttttaatgtttcctttctgagattgtaaaaggttattggcaaaataacgataattggttattgataaatacagataaaaatgttattggcaaaatgctgawaattatatgccacctcttggtttatgtaaatgatgtcatctaaggtagagtaaagcctgtgaattggatgctgttatctctgttttataaacaaggaagctgaggttaagggggtttgctggcctgcctgagatctaggcgttggtaagtggcagagcagtgaccccaccttggcctgcatgagtgcacagcctgggcccggctcatcttgccagcctgtctaagctgtcctcggcatagcctgagggctccatggacttgtctcgggcacagctgacctcactggcat

SEQ ID NO: 284951 - DNA, 555 bp, Homo sapiens
gaattaattcaaaagaaaaagagccacctagccaaagatgtttacaatgacataattttattatagaggaaaaatgtgaacaaactatatgtcagcccaataatgtgaggtaaattatagcctttaatgtgatacagtttgactgcaatcattaaagtgataaatatgaccctgtagaaagaatgttaaacataattttaaataaagcagtagatcataaaattatatgcatgcttttgattatagctattaaatatttgtttataaatggataaagactggacataagcccccaaataaaaactatatcagggtcgyaggcgttcaaaatgaaacaacatttaatttttctgattgcaaaaatgctgtaggttcattctaaacatcttttaatatatacaagcataaaaaaggtagttccaaatatggataaacatttaagtccatttataacatttatatagatgtttggtgttaattaaattgatatttaagtgagtaaaatatttgacttactaaaggtaatgatgctaagatgaaaaataataaaatcat

SEQ ID NO: 284952 - DNA, 555 bp, Homo sapiens
gtttggaaaatttgcaacctgrccctgtggtaaagaaagaatctaagcagtctgtagagcaaccacttgctagagagattagcattactgaaagggagccaagtgctaacatccaagacaatggaaaaaaggccttgacggcatttcagcaatctttgcagcagcctctcgcatcataggcccagaggcccaggaggaaagaatgatttcaggaccaggcctggggcactgcagtcctgtgcagcctcagaacatcgctccctgcatcctggctgctccagctgcaaccacagctcaaagggctccagatacagcttgggctgctgctctggagagtgtaagctgccataagccttagcagctttcatgcgatattaagcctgtgggtgcacagcatgcaagtatgaagaaggcttggcaatttctccatagatttcagaggatgatgtggagtggcaatgtggggttggaacccccacacagagtcccaccagtgaagtgcctggtggagctgtgggaagggggctgccaccctccagactccaaaatggtaga

SEQ ID NO: 284953 - DNA, 602 bp, Homo sapiens
ccataagtcagtgctcagagtgacacaggtaggattcaacgttcttataaggaatgaggtttgtgagaaatcctgcaatgtcctgtttcatcgcagcatcctaggatgaatgggcttccagctatcaagtgcctgagactctgtgtccacataaagtgttctagatgcttggatgttttgatcccttacccctccctaaatccaatatgagatgaagcaattttagggagaaggtgggtctacattcttcacaggttacctgtcccaggagcaacaagttccacagcattagaagtctttggagacttcctcactgaacctgaccttgcatctgaactgctaatgtcacgacagatctcaagtacagtccatttctgagcagcaaaggcaagtcaagatgacacrgcagttgaggctttgctccctgtctttttcccaaaccagagattaattgagaataaatgttcactgcctgctgatgtggaagaaccttcatggagatgtttccttaattcaatttgcaatggtagcaggtaaaatgaaacaaatgactcattgagtatgctttgaaagttcacttgagtcaacagtggtgagacaga

SEQ ID NO: 284954 - DNA, 410 bp, Homo sapiens
catgtgcaaaacattatgctcacactttacatcttcagtaaacagaaaagaacatgtaccgtgttcccctgggttagccccattctcccttccaaacaaaggcacaacaaatgcaataccagtgacrtaggaaaaaggaggtgggatgaaagtgggtggatcaaagtacatatcaaatacttattggcactgggcactctgcttgatgctgtgcctatgtgctaatcctcacaacaactccttcgtttagtgtcactgtccctttttcatggatgaggaagcaatgctcagaggagttaggcaacttgtttcagggcatacagttatgaagtgatggagcctaccctataaagaaagatagtgtacatgggaaaatatcctcaaagccatgggacctgatagcaaagtag

SEQ ID NO: 284955 - DNA, 644 bp, Homo sapiens
cagttcatctggcttgccaaaagcagttaccttcataagaagccttgaatcccagggaactgccactgccatcagtctggaagaggagccacatttgatgattggtgctgacaatgagatccgggaccgatgtacctgtcaggctggcaggagagagatatttagaggtgtgctctccaccatgacacccgaatagaatgattgcctgaccgatgacatttaaaggactatccaggatccaggcccgctcgggcaaattctgggccccactgtgtttctgactctggagcccagcagcatgctctccctgtgctgggaagactcatcctgtcttccccttggctgtgggtagaatctcatgggttgaatcacaactttgactctctagccctgacccttgggctcacaagggagatctgtgtccttacttgctcaggggacagggatagttggagccaaatccaatcaagagggtgtctacattcttgcaacttttgatctcttgtgtgacctgtattgcagaaaagaccrccgccacccccacctccttgctgtctttatgtgggtttcccctcacagaaacccatttctccagttggaacccaggccattctttcaatgagacatctccttccattccagga

SEQ ID NO: 284956 - DNA, 644 bp, Homo sapiens
cagttcatctggcttgccaaaagcagttaccttcataagaagccttgaatcccagggaactgccactgccatcagtctggaagaggagccacatttgatgattggtgctgacaatgagatccgggaccgatgtacctgtcaggctggcaggagagagatatttagaggtgtgctctccaccatgacacccgaatagaatgattgcctgaccgatgacatttaaaggactatccaggatccaggcccgctcgggcaaattctgggccccactgtgtttctgactctggagcccagcagcatgctctccctgtgctgggaagactcatcctgtcttccccttggctgtgggtagaatctcatgggttgaatcacaactttgactctctagccctgacccttgggctcacaagggagatctgtgtccttacttgctcaggggacagggatagttggagccaaatccaatcaagagggtgtctacattcttgcaacttttgatctcttgtgtgacctgtattgcagaaaagaccaccgccacccccacctccttgctgtctttatgtgggtttcccctcacagaaacccatttctccagttggaacccargccattctttcaatgagacatctccttccattccagga

SEQ ID NO: 284957 - DNA, 566 bp, Homo sapiens
cattcaacctactacaatgtttttgtaagttcctcaggaagccgatgagagccaattttatgtggcttttgtgcatatctgaggataatatgttacctttgtaagtgaatcatatttcctggctgaatcaacaattcttgaggccaatagcaccactgactttggactttggtattatggaaaagaaaaggagtcttaggagggttggattagttgkggtggttttgtaaatgaatattttatagaatgagggatgactatgtacttgcctgtgtgagtcggttttgccaaatgcttgtagggattttttataattcatcctgagctcctatacccttggtctgctctagaggttgcctctgcctccccctttcccttctacctcacccaaggtctagagccccgaattactttgtggagtaagcactcccaccccttggaacgatttcatttttcatcacgttgtatctaatttattttttccctggaaattcaacgactcctttcacttcactgagcacattttagccttggtcaacccactccccacctttttccccagggga

SEQ ID NO: 284958 - DNA, 607 bp, Homo sapiens
ttccaacgcactgtgaggcctccaggctcctgcgagcctgattctgcctcctgccacttctggctccacgccctgcactgaggccttacagagccacctcatttctctgccagtatggggagggagggccctaggtggggagtgctggtgtaaggcagggacctaaacccagggcctatcagagcacctggaggcagatccaggtgcctggcctggaggacaagaaatgtggaaggtttggctggagagaaactttggtgacacccccagggaaggcaccatctctatgccaggcaatgtgcaaggagctttgagatctcatttcactctcctaacaaygctctcagattggcatcattatttccattgtacaagtcggggaactgaggctcagagagaccacaagactcaagcttacacagctgggaccacactgggatttactaggtctggtgcaatttcagagtctgtgctattttctagaatccactgcctctgtgcacagaacctgacgtagtccctgtgggtttgccatgtctctaaacacccagactgtccttcctaatttgtcacggctccaaggagaagtcctgctgacacctagtcc

SEQ ID NO: 284959 - DNA, 615 bp, Homo sapiens
atgaaataaattaaccatgattcttcaaaaaaatatgatattattcagaactaaaaggaaatgagctatcaagcatgttactaagtgaaaaaaagccaatctgaaagggctacatcctgtgtgattccatcagtatgacattctcaaaaaggcaaaagagaaaaatataaatggttgtcaggaattggaagcgagaagaaaaaggaatagttgaaatgcagaggaktttaagggcagtgaaaaatactctgtattatcctacaatgttggatacatgtcattacagcaagagtgaaccctaaggtaaactatagactttggatgattatgatgtgttaatgcaggttcatcaagtgtaacaaatgttccactctggtaggggatgctgataatgggagaagctctgcatgtgtgagagcatacatagcttccttcatggaatctctgtaactttcacttaattttatatgaaaccaaaattgctctaaaataaaattgcataagatcaggaaaaggaaaagatgtcctgtattcaacatattctagaggttgtagtagtgaaataggatgagaaaaagaaacaaaatcatatggatttgggtgggaaatgaagca

SEQ ID NO: 284960 - DNA, 601 bp, Homo sapiens
ggcacccatggccttaacttttacaaatttcctctcctggtgccacgggccctccaagccccctcttcctttttctttctgcaacttgaacaccacttataggagcaaagtggagattcagctttgagtgaggtagagaaggcacagaataattcctggtccaggggtcttccagccaaattcctggctaacagctacctgagaaaagttctctgaccaagtgggagtgtcagaaatgtcaaaggagtaatacttatctggctttycacgtgtgcatgtgtgtgtgttatgtgtggctgtaggcttctgcaagtatgtgtgcgcgtgtgggtatgagaatgtgtgtgtgcattgtgagtgtgtgtgtagatgtgtgtatgggtgtgcatgcatgtgggaggatgaatgcaggcataggtgtgtgcacttgtgtgtaattgtgtgtgcacatatgtatatgtgtgtggaggtgggtgtggaatgtgtgtgcgtgtgggagggttatgcaggcataggtatgtgcactgaggtttaagtgtgtgtgcacacgtgtatgtgtgtgtagatgggcgtacaggtgtgtgtgtgtgcatttgggtgt

SEQ ID NO: 284961 - DNA, 601 bp, Homo sapiens
ggcacccatggccttaacttttacaaatttcctctcctggtgccacgggccctccaagccccctcttcctttttctttctgcaacttgaacaccacttataggagcaaagtggagattcagctttgagtgaggtagagaaggcacagaataattcctggtccaggggtcttccagccaaattcctggctaacagctacctgagaaaagttctctgaccaagtgggagtgtcagaaatgtcaaaggagtaatacttatctggcttttcacgtgtgcatgtgtgtgtgttatgtgtggctgtaggcttctgcaagtatgtgtgcgcgtgtgggtatgagaatgtgtgtgtgcattgtgagtgtgtgtgtagatgtgtgtatgggtgtgcatgcatgtgggaggatgaatgcaggcataggtgtgtgcacttgygtgtaattgtgtgtgcacatatgtatatgtgtgtggaggtgggtgtggaatgtgtgtgcgtgtgggagggttatgcaggcataggtatgtgcactgaggtttaagtgtgtgtgcacacgtgtatgtgtgtgtagatgggcgtacaggtgtgtgtgtgtgcatttgggtgt

SEQ ID NO: 284962 - DNA, 523 bp, Homo sapiens
cacttttccagtcctgggaagcatgcggagagggatgggacccacagcctcaactgctccagggcaagggcaatgcggaaagacatggcagggtacatcrccataactcacaaagggtaaagaccatgaggctagttgaggactgtaccacatctgcctctcactgaagcaagaggaagatcatctcttttcctttttctcacttagaggggagtgcactcccaaatctgcaattctttggctgctattggttgttgttgctgctgcttgcattctctggattaaaatgaaacacatgttccaaaccgtgaaaggtcagcaagaaagagagaagtgtccacaagctgcagtctgaggatttgatgagctggttcttgaacttttgtaggaaaatctgagaagggaaagccggttaaagggccagggttcagcaagcctggcttcttggggcagcatctctccacttgcagggtgccctgttctggacagcagaggaataggattgccctcccaaatgcccagg

SEQ ID NO: 284963 - DNA, 1068 bp, Homo sapiens
cacttttccagtcctgggaagcatgcggagagggatgggacccacagcctcaactgctccagggcaagggcaatgcggaaagacatggcagggtacatcaccataactcacaaagggtaaagaccatgaggctagttgaggactgtaccacatctgcctctcactgaagcaagaggaagatcatctcttttcctttttctcacttagaggggagtgcactcccaaatctgcaattctttggctgctattggttgttgttgctgctgcttgcattctctggattaaaatgaaacacaygttccaaaccgtgaaaggtcagcaagaaagagagaagtgtccacaagctgcagtctgaggatttgatgagctggttcttgaacttttgtaggaaaatctgagaagggaaagccggttaaagggccagggttcagcaagcctggcttcttggggcagcatctctccacttgcagggtgccctgttctggacagcagaggaataggattgccctcccaaatgcccaggwtttattttaaaaaactaaaaattcttaagaaattaaactcaaaactcaccwgcacttgtaattgcttaacgctggggtcatggccattaggggcagccctgtgaagggccagacatgaattctgcatgcaaatcatactattggggaaggaaaacgcgtgatcgatattcaatccaaacaagggacaagaaagtcaccaagcagtcttgctggggccagcatgtgaactacactggaactgcagtgagggtaaaaaacaggaaggggatgcttacaggttcaggaaactgcggggaaaagcgagaactagaaccaggagaagcccgggggctcagctcgtccacagcatgattcatgcaaaggacacaggaaggtggggagggttggggtggggaccatcactaaggctgaggcctgtgtctcaagaggaaagggaaggtctctgagccatggggttggtgaccagggttccactggaggaatttgaatgccgtgttgtgaagaggcaagagggatctcacatgagcgcccaccatttgttaaa

SEQ ID NO: 284964 - DNA, 544 bp, Homo sapiens
tttattttaaaaaactaaaaattcttaagaaattaaactcaaaactcaccagcacttgtaattgcttaacgctggggtcatggccattaggggcagccctgtgaagggccagacatgaattctgcatgcaaatcatactattggggaaggaaaacgcgtgatcgatattcaatccaaacaagggacaagaaagtcaccaagcagtcttgctggggccagcatgtgaactacactggaactgcagtgagggtaaaaaasaggaaggggatgcttacaggttcaggaaactgcggggaaaagcgagaactagaaccaggagaagcccgggggctcagctcgtccacagcatgattcatgcaaaggacacaggaaggtggggagggttggggtggggaccatcactaaggctgaggcctgtgtctcaagaggaaagggaaggtctctgagccatggggttggtgaccagggttccactggaggaatttgaatgccgtgttgtgaagaggcaagagggatctcacatgagcgcccaccatttgttaaa

SEQ ID NO: 284965 - DNA, 401 bp, Homo sapiens
gccagctgtggcttccacacgtgctagtgacacgtgcgcctccgtttcctcttctagcacatrggcatcaccgcgtttccctcacagcttcgcacgtgagatcacaatcgacaatgcagtgaagcgcccgcaatggactgcagatattaagcagtgaagacagtgagttactcagctgatttgttccgtggagagtcaggctacctggtcatcctactcaatatccaggcctgcccgaacctcaagactgggtgggcaccgttcagaggcccccagcccctgcccttctcctgcgagggccgagctcaccatcaggtccctggggcttggaactaagtagccatttcataaacacatggattttggggtgccccggcccccataaagagatcaaattatgt

SEQ ID NO: 284966 - DNA, 401 bp, Homo sapiens
gccagctgtggcttccacacgtgctagtgacacgtgcgcctccgtttcctcttctagcacatgggcatcaccrcgtttccctcacagcttcgcacgtgagatcacaatcgacaatgcagtgaagcgcccgcaatggactgcagatattaagcagtgaagacagtgagttactcagctgatttgttccgtggagagtcaggctacctggtcatcctactcaatatccaggcctgcccgaacctcaagactgggtgggcaccgttcagaggcccccagcccctgcccttctcctgcgagggccgagctcaccatcaggtccctggggcttggaactaagtagccatttcataaacacatggattttggggtgccccggcccccataaagagatcaaattatgt

SEQ ID NO: 284967 - DNA, 534 bp, Homo sapiens
accatttatcaacttcagccctactgacatctggggtcaggaaacttttttgttgggggctgccctgtgctttgttgggcacttaacagcacccctggcctctccccactagctggcacgcttccctccccgggtgttaggaccgacactgtgtccgggcattgtcaaatgtcacaggcggcagagtcattcccagctgaaggccactgatgtaggaggacgtgggtcccatgatctggcttcgtcactcatctgtccagctggctggggggagacggggcctttctcggggagtttggagacagccaagctctcctgaggggccccctaacagcctgatgcagttaggctaatgcagtgaggcaccactgcygagctccgtgttgaaagtagaacaggtgccctttgcccattttgttaaactaaaggacagaaaacatttgtctaattttgcctttctcacgtctttctaccaggaaatattaaactcactcgctcaatgcatctttggactgattgttacaggataggagc

SEQ ID NO: 284968 - DNA, 534 bp, Homo sapiens
accatttatcaacttcagccctactgacatctggggtcaggaaacttttttgttgggggctgccctgtgctttgttgggcacttaacagcacccctggcctctccccactagctggcacgcttccctccccgggtgttaggaccgacactgtgtccgggcattgtcaaatgtcacaggcggcagagtcattcccagctgaaggccactgatgtaggaggacgtgggtcccatgatctggcttcgtcactcatctgtccagctggctggggggagacggggcctttctcggggagtttggagacagccaagctctcctgaggggccccctaacagcctgatgcagttaggctaatgcagtgaggcaccactgccgagctccgtgttgaaagtagaacaggtgccctttgcccattttgttaaactaaaggacagaaaacatttgtctaattttgcctttctcaygtctttctaccaggaaatattaaactcactcgctcaatgcatctttggactgattgttacaggataggagc

SEQ ID NO: 284969 - DNA, 578 bp, Homo sapiens
tcaaataccagtctgagaacaaggttgtgcttttactggggactggtaacatttaacctttcctggagttttgactctagctttattttgctggtggtggagttttttggctgtttagcttggtgccgttttattttgtttgtaaacaggaggtgcaagaaagcgcattccaaggggaagggacgccggcaaaggaaccccctgagctggggaccattgtccccgctgcctggcgctggggcactgtgtgtcgcccacgtgggatgcagccatgacacagccgagactatggcagagagaaaccgcgctgccatggatctggggccgagcgagggaggaaggggctgagaaagggctgaacaaaacatgcgaccttttcgcctcgcaaatcaaattaactgtttcctggccatcctcggctgaaagtraacattgtcaccagaggcacaaagccccctcgcgaatccccagggcacggccaggccccgtcacctgtgtctgttgcttcctggaaggcattagctgtgcccacaccctcagaagatgcttctgggtggatgtggtctactgaaagaggt

SEQ ID NO: 284970 - DNA, 556 bp, Homo sapiens
gcaccaacctcccagggacccagagaacactgttggagcccctgcccctcccctcactcctcgctttggctgggctgggcagatggtgctgtgggctctgccctgtttattctatcagggatgtggaagcacattttaaactgcacaacctcatggcttatcagtgagctaagagcacacagcacgcacagctcaaccagaggaaccaaacttctgtaaacagccagagtggttgtgcaaatgccattttcttgacataaataacagacacatatggcccgagacaggaagtggaggctacctggacagattgatgtcctgcttgacaagtgactctatttatgacttgattccgcccgacagcatgagaggatgggaggctgatgactttctcatgaactccccgacaatgcamgtcggccacgggaaacagtgctcctgttgtaaacatggccagtgaggatgaagaagaaacgtcttctaaaggcaaagaaacaccacctttgttccactgggaatgggtgggtctgtcccacagcaacaatgaagtacagca

SEQ ID NO: 284971 - DNA, 582 bp, Homo sapiens
tgtgcacaaatcaatagaaartagacactgaggtgtgtatatatcgagatggcagaggtgtcggagttctctgatgaagatttttatagaaaatagacactgaggcgtgtatatatcgagatggcagagatgtcggagttctctgatgaagatttttaaaccgtcatcataaaattgctccatcaatcaactacaaacatttgtgaaacaaatggaaacaaacaaatgggaaaaataaaaagtctcagcaagtaaaatcatatacatagagaagaaccatttggaaatttcagaatggaaaaaaatacagtgagtgtaattttaaaaataacaatagataggctaaacgtcagaatagagaagataggagaattaatacatgaactcaaaggtttaaaaatgcaaaatacccaatctgaaaagcagaaagcaaacagactaaaaaataaatataaaaagcccctcagacatgttggactatgtcaaactacctaagttttctgtcagtggagtgcaggaaggagaggagaaagagagcaggggcaaaaacataacctaaaaaaaaaaaaaaatgactgaaaa

SEQ ID NO: 284972 - DNA, 582 bp, Homo sapiens
tgtgcacaaatcaatagaaagtagacactgaggtgtgtatatatcgagatggcagaggtgtcggagttctctgatgaagatttttatagaaaatagacactgaggcgtgtrtatatcgagatggcagagatgtcggagttctctgatgaagatttttaaaccgtcatcataaaattgctccatcaatcaactacaaacatttgtgaaacaaatggaaacaaacaaatgggaaaaataaaaagtctcagcaagtaaaatcatatacatagagaagaaccatttggaaatttcagaatggaaaaaaatacagtgagtgtaattttaaaaataacaatagataggctaaacgtcagaatagagaagataggagaattaatacatgaactcaaaggtttaaaaatgcaaaatacccaatctgaaaagcagaaagcaaacagactaaaaaataaatataaaaagcccctcagacatgttggactatgtcaaactacctaagttttctgtcagtggagtgcaggaaggagaggagaaagagagcaggggcaaaaacataacctaaaaaaaaaaaaaaatgactgaaaa

SEQ ID NO: 284973 - DNA, 614 bp, Homo sapiens
ttctgctgtgatgtactttgcaggggagaacttatgctaattagttggtatatacctttggtattctgttgcttccttgatggtcttaacatgtcatttgcatttttcaactatacttaactgcctcttaygaagggaattatattacatactgatatttgcgaatctgggaattcacaaaggttttagaatctatctgttgcaaatataaagagtgtgctatgtctgaaaagctattgtctgaggacagaaccaaaagaaacagagcacagcagagctcggattgaaaacaaagaggaagtgttactacaaatcagagagagagcttctggagggtactaattgccaggcatagctacaaagaagatgcatattttatttcactggaaggcttaaaagtgagaggaatctgacttgatttgtcttaggagacctgtaagcaggacctgagtggtagacttcacatggatcttggcaaggtcattgcttctgaggctggaaaacagaggtgggctggggctgtaaagggaagggccatttgtttcacccattcctagagttaccatgatacatttttcaaggttatgaatattgcataacatcaaagaagaatt

SEQ ID NO: 284974 - DNA, 614 bp, Homo sapiens
ttctgctgtgatgtactttgcaggggagaacttatgctaattagttggtatatacctttggtattctgttgcttccttgatggtcttaacatgtcatttgcatttttcaactatacttaactgcctcttatgaagggaattatattacatactgatatttgcgaatctgggaattcacaaaggttttagaatctatctgttgcaaatayaaagagtgtgctatgtctgaaaagctattgtctgaggacagaaccaaaagaaacagagcacagcagagctcggattgaaaacaaagaggaagtgttactacaaatcagagagagagcttctggagggtactaattgccaggcatagctacaaagaagatgcatattttatttcactggaaggcttaaaagtgagaggaatctgacttgatttgtcttaggagacctgtaagcaggacctgagtggtagacttcacatggatcttggcaaggtcattgcttctgaggctggaaaacagaggtgggctggggctgtaaagggaagggccatttgtttcacccattcctagagttaccatgatacatttttcaaggttatgaatattgcataacatcaaagaagaatt

SEQ ID NO: 284975 - DNA, 1057 bp, Homo sapiens
ctataggaagggatggagccccacctctgccccagttttaccaatgtagagacacacgtggttaaaactggtccagtaatgttctgctgtgatgtactttgcaggggagaacttatgctaattagttggtatatacctttggtattctgttgcttccttgatggtcttaacatgtcatttgcatttttcaactatacttaactgcctcttatgaagggaattatattacatactgatatttgcgaatctgggaattcacaaaggttttagaatctatctgttgcaaatataaagagtgtgctatgtctgaaaagctattgtctgaggacagaaccaaaagaaacagagcacagcagagctcggattgaaaacaaagaggaagtgttactacaaatcagagagagagcttctggagggtactaattgccaggcatagctacaaagaaratgcatattttatttcactggaaggcttaaaagtgagaggwggactttcagcttctccgtgcctgcttctgctctagggccagcccttccagagcctgtctgcaaaccccgcttgcaccaacttacacagcaaatgcattgacacacttcccacagaggccaaacatactccacatcttgaaactgtcaattgcaaatataggtggctttttagcattgtcatattggatataatttttgccctaggaactggaaaacattccttcacaggatcaaaggatagttatgtcattttgcaagctctccattagctttcccattaaaaatgaatgctgctaataatttcatttatatgcattagtattttggaaaaaaaaaaaaccttcactgaatttgccttgaaattcaaaatgctatcagaaagcaccatgacaagtcatcatatcatggtattttcctgatttatctctatttcttgattgtaatatgttgttattatgtgtcaaagaattgccctaggaaaagtatcatttttttaagttgagctcatctgtttcttttagttttaagcttaaacccwtgggcatttttatgtctaccttacaatgcc

SEQ ID NO: 284976 - DNA, 590 bp, Homo sapiens
aataagcaatactggttgtgatgtgctggttttcttcctgttatcagcccagcaatgtatgtaaacaatgcgtaggctctgaatgcatatggcaatcccacctgctaccctttgcccatcatatcatgcccctaaaggcattgtgggccaacagcaattcaatccccccatgcatgcataatctgacaagctttgcataaataataataaataattggtatgtataaataatttatcatttatttttgcaggagaagaagaattcgtagacatattttaaacaaagggaacagyaaacatgatctcaatcagaaaaggggttaagtctctttaaaacacaactttcaaagctcatatgcattcagtgtatatttgtgatttctactgagagggtgtgtgatatcaccaaaatctgtgaagcacggcaggatacctatgtcagtgtcaggaaatgattcaaaataaattctaacttggagaattattttcaaaacaagccaaataatatttcttattaagaaaatgatttcttttttcctgagagtgaatcaagtctaaacctttccagttaaatatattattatatgtga

SEQ ID NO: 284977 - DNA, 549 bp, Homo sapiens
aacacacagaagagacacacaaagaagagacacacagagggagtgtggccaggtgaagaaaagacaggattggagagatgcagacacaagccgaggagcacccacrgtcctagaagtgaggagaaacacaagaagcagactcttccctggagccttcagagcaagcaccacactccagcaccttgattccagacttctggcctccagcactgtgagataataaagttctgtaattttaagccaccaactgtgtggcaatttgtcatggcagccctaagaaatggatgccatgtgcatttctcagaatgggaaagggacgctgttgtactaatgctttggcattaaccagactgccccgacctcactttgagctgggatttcagtttacaacaccacaggcttctgcctctggatttgttcatgcgtataatctctcatcattttgttaagacaccttgattttttcttttaatggaagatgttgttcattgatcaaatgttggccagtgtgtgttttagcttcctggaatgagatgctccctgcaacca

SEQ ID NO: 284978 - DNA, 549 bp, Homo sapiens
aacacacagaagagacacacaaagaagagacacacagagggagtgtggccaggtgaagaaaagacaggattggagagatgcagacacaagccgaggagcacccacagtcctagaagtgaggagaaacacaagaagcagactcttccctggagccttcagagcaagcaccacactccagcaccttgattccagacttctggcctccagcactgtgagataataaagttctgtaattktaagccaccaactgtgtggcaatttgtcatggcagccctaagaaatggatgccatgtgcatttctcagaatgggaaagggacgctgttgtactaatgctttggcattaaccagactgccccgacctcactttgagctgggatttcagtttacaacaccacaggcttctgcctctggatttgttcatgcgtataatctctcatcattttgttaagacaccttgattttttcttttaatggaagatgttgttcattgatcaaatgttggccagtgtgtgttttagcttcctggaatgagatgctccctgcaacca

SEQ ID NO: 284979 - DNA, 590 bp, Homo sapiens
tgctagagagtcagatgggctttctgtggttttcctcagtttcctgaacttgaagaacatccttctaaaaccatatcgtgtttgaccttgaaagggattatgagtccattggtcgaatctccaccaatgcaggtgacacacagacttcaataaattttctagtgacccacagctgttcaaactccctaatccatgctagtggttctcccactgtgccaccatggaatggaaggaataaaccacccatcatttccaacttaggtggcctctcccaagtcaaccaatttctctatttaacaggatttgggaaatggtcaaggtgagtaaaacagaaatttcccagccccttccaatcacatccatgracagtactgacaaacacacgtgtttttcctagatggaaacctatctgtggactccaagccaagttgcctgtaagaagttgtcaagtcccaaaactctattgttgctaatgccctaatagaaaggatactagcagtgtgtcttctgagcagagaagtggaggaggaacagaggacttagcctctgtggggattgtgacaaaacagagggtggggagatggtgatat

SEQ ID NO: 284980 - DNA, 574 bp, Homo sapiens
aataaaccacccatcatttccaacttaggtggcctctcccaagtcaaccaatttctctatttaacaggatttgggaaatggtcaaggtgagtaaaacagaaatttcccagccccttccaatcacatccatggacagtactgacaaacacacgtgtttttcctagatggaaacctatctgtggactccaagccaagttgcctgtaagaagttgtcaagtcccaaarctctattgttgctaatgccctaatagaaaggatactagcagtgtgtcttctgagcagagaagtggaggaggaacagaggacttagcctctgtggggattgtgacaaaacagagggtggggagatggtgatatggaagcctttgaatctttaccaaataattgtttgagggtagaaaccattttttaggttgcctgctatggcctcttgtccctcctgtctcagtttaggaaaccctatcaagccccatcattagaccccaggtattctatagtgcctcatgtccccagattacttctctcatctgacctcagtttgtaccaacaggcccctctcttccgtgtcctgacc

SEQ ID NO: 284981 - DNA, 1188 bp, Homo sapiens
cttggcaaaataaacctctaaatagattgaaatctgtctcagacattttctggtttatcaatgtaattcataatataagttaactttaaaaatgtcgactcatctaaactttcctttatcagttctgcatgtaagaagcttggaaatacaactccatcctcaccacaggtgaaaagctgaacagactgaaaacttaaaccccttcttggatccataaaraggtgaagacaaagggcaaactgctaagctctagactgaagagacaggcaaatacagggagtcacgtactgcaggagcagaaacacaggagcagaaaccaccaccacgggagccagggccatggtagtagaacctaagttgtaatgagcaaactgctggaggctaagaaaagacaagcctgagaacaccaaactccaggaagacccaattatgcagtgcactcatgtgcccacacttcatgagtttcacctccaggagctagaccaggttctcacagtaaacattggacaaaaatctcctcttgctcctagcaggggtaggtcaaaacatatcagtttaaaatagttcagaacactcwccttgctccacttcaccactccatagtcatagcatctattaagtgtgctagattctatccttagcactacacagatgatatacttttaaatgtttacaataaacctttaagatatccattaagtatccataatttacagactggtcactgaagtgcacaaaggtaaattattgacttgcccatgcctttgtaacacctaagtgacataatcaggattcacccccagggctttctcaacctaaatatcatgttctttcttctctacacatctttctctccctggaaactctaggtactttgactcataatagttcacttgctcttttcccggctattgtcaggtttacattttgttaacccattctagatggagwcagaacaaccatattattaatttgttttatattttgcatttccttgcttaataactttcctgcagttagcatactatcactctagaacaactggaggaaatacagcttccaatcaaatagcctttgtgcctgtttctctgtcaaaaagcaataattaggtttatggccactgaaagtagcttacccccatcctgctcaggatcctgttaccccaacacagatttataaatagcacga

SEQ ID NO: 284982 - DNA, 589 bp, Homo sapiens
agcctctaaaaattaactgtgcatggagtggctccagaaccaattctaaatatttcaggttatctatagtcagcttgttcagtgataaagctacttaataaatccccaaatctcagaggcttaaaacaataaacatttgtttctcactcacrggatgcaagctgcataaagaggttatgctccaagctgacaaacaacagcgtttttgttcagttcataaaaaaaaaaaaacaacttacattttgcgcttcaaaaatgccctctgttaggtgacattaaaggacatttgagagggtggtaattgtcatggtagaaaagcaatatcaacttttgttatagttttctccccctttgctgtatgaaatgcaatcacatcacactaccacaatatagaacttatatttgtattcatatcttgccttggttttgtgactgcatagttctacctggaagaaaggtaagctgtgttgggactcatggatgaagggaaaaaaacaacattcactttcaactggctctaaagggatttacgctcctatggttctctttagtgatacattttattggcaccaaagtggtcattatatct

SEQ ID NO: 284983 - DNA, 589 bp, Homo sapiens
agcctctaaaaattaactgtgcatggagtggctccagaaccaattctaaatatttcaggttatctatagtcagcttgttcagtgataaagctacttaataaatccccaaatctcagaggcttaaaacaataaacatttgtttctcactcacgggatgcaagctgcataaagaggttatgctccaagctgacaaacaacagcgtttttgttcagttcataaaaaaaaaaaaacaacttacattttgcgcttcaaaaatgccctctgttaggtgacattaaaggacatttgagagggtggtaattgtcatggtagaaaagcaatatcaacttttgttatmgttttctccccctttgctgtatgaaatgcaatcacatcacactaccacaatatagaacttatatttgtattcatatcttgccttggttttgtgactgcatagttctacctggaagaaaggtaagctgtgttgggactcatggatgaagggaaaaaaacaacattcactttcaactggctctaaagggatttacgctcctatggttctctttagtgatacattttattggcaccaaagtggtcattatatct

SEQ ID NO: 284984 - DNA, 1179 bp, Homo sapiens
agcctctaaaaattaactgtgcatggagtggctccagaaccaattctaaatatttcaggttatctatagtcagcttgttcagtgataaagctacttaataaatccccaaatctcagaggcttaaaacaataaacatttgtttctcactcacgggatgcaagctgcataaagaggttatgctccaagctgacaaacaacagcgtttttgttcagttcataaaaaaaaaaaaacaacttacattttgcgcttcaaaaatgccctctgttaggtgacattaaaggacatttgagagggtggtaattgtcatggtagaaaagcaatatcaacttttgttatagttttctccccctttgctgtatgaaatgcaatcacatcacactaccacaatatagaacttatatttgtattcatatcttgccttggttttgtgactgcatagttctacctggaagaaaggtargctgtgttgggactcatggatgaagggaaaaaaacaacattcactttcaactggctctaaagggatttacgctcctatggttctctttagtgatacattttattggcaccaaagtggtcattatatctwagcctctaaaaattaactgtgcatggagtggctccagaaccaattctaaatatttcaggttatctatagtcagcttgttcagtgataaagctacttaataaatccccaaatctcagaggcttaaaacaataaacatttgtttctcactcacgggatgcaagctgcataaagaggttatgctccaagctgacaaacaacagcgtttttgttcagttcataaaaaaaaaaaaacaacttacattttgcgcttcaaaaatgccctctgttaggtgacattaaaggacatttgagagggtggtaattgtcatggtagaaaagcaatatcaacttttgttatagttttctccccctttgctgtatgaaatgcaatcacatcacactaccacaatatagaacttatatttgtattcatatcttgccttggttttgtgactgcatagttctacctggaagaaaggtaagctgtgttgggactcatggatgaagggaaaaaaacaacattcactttcaactggctctaaagggwtttacgctcctatggttctctttagtgatacattttattggcaccaaagtggtcattatatct

SEQ ID NO: 284985 - DNA, 549 bp, Homo sapiens
tttgcattatctctctctgtctctctctctctccctcttacacacacacacacacacacacacacacacacayacacaccctaagttcttaaattgacagcaactctttctcaatcacctttgaatttctagccattgcaaaactctgggcctttattagtagccttataaatatatgttgtcttatttttactcatgagggaacggacccaaatgggttaagtaatttattcagtagcagagtaaactagtgacagctttaggataagaatccaaatacattacactcaatccagtgttatttcttatgtaatacataaataaatgtataaatacaaattagaaccttgtaaaatcacactgtatttctgagttcttaaaactaaattgctaaaaattgtgttatcttttctaagttaactatatgtagtactgtttttagagttgaactaataatgtctaaaaacaatgggtacagtagtattaattttatatcatccagggccttttttaaaaaaatcagttataaatataccttttataacatga

SEQ ID NO: 284986 - DNA, 549 bp, Homo sapiens
tttgcattatctctctctgtctctctctctctccctcttacacacacacacacacacacacacacacacacacacacamcctaagttcttaaattgacagcaactctttctcaatcacctttgaatttctagccattgcaaaactctgggcctttattagtagccttataaatatatgttgtcttatttttactcatgagggaacggacccaaatgggttaagtaatttattcagtagcagagtaaactagtgacagctttaggataagaatccaaatacattacactcaatccagtgttatttcttatgtaatacataaataaatgtataaatacaaattagaaccttgtaaaatcacactgtatttctgagttcttaaaactaaattgctaaaaattgtgttatcttttctaagttaactatatgtagtactgtttttagagttgaactaataatgtctaaaaacaatgggtacagtagtattaattttatatcatccagggccttttttaaaaaaatcagttataaatataccttttataacatga

SEQ ID NO: 284987 - DNA, 578 bp, Homo sapiens
ctttgcctttaacttcaggatgtccctgcagtgagcagggcatattggattaccacaaatggaaggtcaatgtgaggagacaaggcttttgctgcctttcctgaaccttcaaaatgtttcacctgagtcaatgctttggggattgctgctttattagctctagcgcttccactgagaatgttttgtctctgttattttaacagctgagcagtcaatggtaggcataaagatgatcagaggtggtttacrtatgtagggcaatttattcactcagaattgcttttaaaattgaacaagtataaaaatatatatgcctgtacatatttttaaaacatgcatattttaatacatgtatatcatatgtatactatatataatatatatagtaaaaatagtttgtgaaagccacatatttacaaattgtgactatgttctgaattcagatagcatctcctaatttactttttcttagcttatacatgtataggagtttaatacaaatactttgggggaaacaactttctcaaaaacataatcaattaccctagagcctacaagttagatatttcatgcatgtt

SEQ ID NO: 284988 - DNA, 1157 bp, Homo sapiens
ctttgcctttaacttcaggatgtccctgcagtgagcagggcatattggattaccacaaatggaaggtcaatgtgaggagacaaggcttttgctgcctttcctgaaccttcaaaatgtttcacctgagtcaatgctttggggattgctgctttattagctctagcgcttccactgagaatgttttgtctctgttattttaacagctgagcagtcaatggtaggcataaagatgatcagaggtggtttacgtatgtagggcaatttattcactcagaattgcttttaaaattgaacaagtataaaaatatatatgcctgtacatatttttaaaacatgcatattttaatacatrtatatcatatgtatactatatataatatatatagtaaaaatagtttgtgaaagccacatatttacaaattgtgactatgttctgaattcagatagcatctcctaatttactttttcttagcttatacatgtataggagtttaatacaaatactttgggggaaacaactttctcaaaaacataatcaattaccctagagcctacaagttagatatttcatgcatgttwctttgcctttaacttcaggatgtccctgcagtgagcagggcatattggattaccacaaatggaaggtcaatgtgaggagacaaggcttttgctgcctttcctgaaccttcaaaatgtttcacctgagtcaatgctttggggattgctgctttattagctctagcgcttccactgagaatgttttgtctctgttattttaacagctgagcagtcaatggtaggcataaagatgatcagaggtggtttacgtatgtagggcaatttattcactcagaattgcttttaaaattgaacaagtataaaaatatatatgcctgtacatatttttaaaacatgcatattttaatacatgtatatcatatgtatactatatatwatatatatagtaaaaatagtttgtgaaagccacatatttacaaattgtgactatgttctgaattcagatagcatctcctaatttactttttcttagcttatacatgtataggagtttaatacaaatactttgggggaaacaactttctcaaaaacataatcaattaccctagagcctacaagttagatatttcatgcatgtt

SEQ ID NO: 284989 - DNA, 578 bp, Homo sapiens
ctttgcctttaacttcaggatgtccctgcagtgagcagggcatattggattaccacaaatggaaggtcaatgtgaggagacaaggcttttgctgcctttcctgaaccttcaaaatgtttcacctgagtcaatgctttggggattgctgctttattagctctagcgcttccactgagaatgttttgtctctgttattttaacagctgagcagtcaatggtaggcataaagatgatcagaggtggtttacgtatgtagggcaatttattcactcagaattgcttttaaaattgaacaagtataaaaatatatatgcctgtacatatttttaaaacatgcatattttaatacatgtatatcatatgtatactatatataatatatatagtaaaaatagtttgtgaaagccacatatttacaaattgtgactatgttctgaattcagatagcatctcctartttactttttcttagcttatacatgtataggagtttaatacaaatactttgggggaaacaactttctcaaaaacataatcaattaccctagagcctacaagttagatatttcatgcatgtt

SEQ ID NO: 284990 - DNA, 531 bp, Homo sapiens
gtgaaaattggatataagaaatggaattaaaggatttcacagagcattttttactatcataggatatcttaatgttcctatatacctgctgtattatattatagttttaattgctgatcatctcttcttacatttttttcaaggcaccatgtagcttcaatgtgaataaacaaccactagatggcaaattttccattttttaggacacctatagatggtatatctaattttgagatggattacatgctttrtacttagtcaatatttaataaatttactttttttgtaacttttagcttcttactcaaaaaataatagcaataaagttcagtgtaacatgtcaagaacacagaaaacggtcttataattttctggtaataaatattaaaaatatggaattttacttacactattctctctgatataaacacatatgagaagttttttaagttttacaatttaataatacaaatttttgtaaattgcactatacagtgaacactactattattcaagacgttctatataagt

SEQ ID NO: 284991 - DNA, 549 bp, Homo sapiens
gctcattattaaatatgacatcattgtttggtgatatgataatgacctaagtgataaaaattgtcatacagcattcatatagtttatgtagtcactgatcatcataaacaccatgtagcttttctggatgtgctgtcacagaaaaaaattaaatccacattactcatgattttgcatacatttctaaagcataataaaatttccattcagtattttactttggaaatgctgtcttttctgggcagtgactcctacttttactgcatattaaaatattatatactgataatgattaattgctagttttactagtgtggttttcaatcaatcatgagcagagaaccaattctctatgaaaatttaagaacatataaatccatcaaatacatasagtgctagctgatttgtctagtaagaaactagactaaaaataaaattggacctgattttcaatagtttacacatgcctaatctcataagataatttgattccaacaataaagatgattttggttggtagatgggttaatttaggaattcttatcactc

SEQ ID NO: 284992 - DNA, 660 bp, Homo sapiens
ctgggttttctgattttctagaaggtactgataagaaacaataaaataaatacgtgatttcaaatataagagccaaactacatatgtaaatagatttatgagccaaggttgttttcccaaataaaaaatacgtaaatagccctgataagtttttttttctttttctgatgagttttaagggaaaaatgttctttttcatatgtacatgaatataaaagtataaatgagaaaaatgtctaatatgtttaaaattttaatatagtttaatgcaaaatgcaaaagctcatttcaaattgttttttattttattttatttatttgtttgtttatgagacagggtcttgctctgttaccccaggctggagtgcagtggcgtgattgtagctgactataacgtccaactcctgggctcaagtgatcctcttgcctcagcatcctaaatagctggagatataggcatacaccaacatgcccagctagtttcacaagtttattttatagagttgaagtcttgttgcattgtgcaggttggtcttgaactcctgacctcaagtgaccctccatcctycatctccccaagtgttgaaattacaggtgtaagccaccacacctggcctttttttttatatttgtatatattttggataaaatgaattatca

SEQ ID NO: 284993 - DNA, 594 bp, Homo sapiens
gtcgccttttaaggataaagaaagttttattgtaatatagcagcattcatttgattatgcattatttatttttggtttcttttgacaacaacaaagtcaagtaattatgacagagaccatataccccacactcccaagcctacactattatttactatctggtattttacccagaaaaagtttggtggttcctgttatgattccaagggtagagtgttgatttacgtgtgtatatacaactccagaggtaaaaaaaattgatcatgaggtatgaatgtatgaaagtatcatgtatgaaacagctgaacagtccactgagttattacttggtctatttaattagaaaatgttagatcttttgtgtagaaatctgcattgagtcatcatgtattattatgctctctctccaagttattttatttaaattagttcagaaattcagaagmttcactgattataaggctggattctttaagaaagaatgctgtaaaattgctgcaaatctataatggaaatatttatccatgcttttcacaagcattagatattggaaaatgaaaaataccaaaagcattccaggagttattaaatgtg

SEQ ID NO: 284994 - DNA, 593 bp, Homo sapiens
ttatcttaatagagagagtgtctctctccatttgtagattggaagaaatgagctgccaagttttaagaagaacaacggagagatctccatggcatggatctgttgatgacctccaggaatcgagagcagcctctggctgacaaccaacagcaaaatgaggacctcagtcctgcagcagcaaggaaatgaattttgtgatgcactggaataagttactaagtatattctccaattgagcctatagatgaaaaagcagtggacccaaaatcttgattgcagcagtgtaattccctaagtagaggactcacagctaagacatgcccagacttctggcttaaaaaaacccgagatataataaatatgtgtacggttttaagttgttaaatttgtagtaaggcactatacaacagtagaaagttaatragccagtggtaccagttacctagagttgaagcagttcccaagacatggggctttcagttttaacatttggacagtcttgaacaaactgggacaaattggtcatcttaaaatcctcctacttccttgttaaatcaaatgtgtgttttaaaggacatggcataatttttccc

SEQ ID NO: 284995 - DNA, 591 bp, Homo sapiens
ctgctcattgcaacctgcgcctcccaggctcaagcgattcgcgtgcttcagcttccctagtagctgggattacaggagtgcaccaccatacctggctaattttaacttttttgttgttgttgttttgttctgttttttaatagagacggggtttcaccatgttggccaggctggtctcaaactcctggcctcaagtgatccgcccgcctcggccttccaaagtgctggaattaaasgcccttacacccggcctctagcttatgtgtttataccttaccccaccaagtaccgaagctgcaatcaggaccctcttcctctctccaaagcattaaggaaattgttttgctcgagattattgtatttgatcctcctttcacagtaacaaacataggttacatggactgcttttaataaacttattctgcaaatacttatcttgtactagaagtgttgaatagtgtgctcaatacaatgcttatccttgtattgagataatacaaccaaaccaaccaaaccttgcaaccaaacccaacagtgaacacaatagcattaatgtggactgaccactgcagaatacaggaacaggcttag

SEQ ID NO: 284996 - DNA, 591 bp, Homo sapiens
ctgctcattgcaacctgcgcctcccaggctcaagcgattcgcgtgcttcagcttccctagtagctgggattacaggagtgcaccaccatacctggctaattttaacttttttgttgttgttgttttgttctgttttttaatagagacggggtttcaccatgttggccaggctggtctcaaactcctggcctcaagtgatccgcccgcctcggccttccaaagtgctggaattaaaggcccttacacccggcctctagcttatgtgtttataccttaccccaccaagtaccgaagctgcaatcaggaccctcttcctctctccaaagcattaaggaaattgttttgctcgagattattgtatttgatcctcctytcacagtaacaaacataggttacatggactgcttttaataaacttattctgcaaatacttatcttgtactagaagtgttgaatagtgtgctcaatacaatgcttatccttgtattgagataatacaaccaaaccaaccaaaccttgcaaccaaacccaacagtgaacacaatagcattaatgtggactgaccactgcagaatacaggaacaggcttag

SEQ ID NO: 284997 - DNA, 347 bp, Homo sapiens
aacactacatataaagggggaagtgcagtcttggtgcttttaggtgctcagttttaaaatcttggatatgacatttagtatctctgagcctgagtcccttagaacaagacagaactatttaaataagtcattgatgagatattttttcaaagcctaagatatgttttcattactttttctgtgcgtaagggggtgggactttagctcttaatcactagcataggtcactccaaaatttgacatgctgtctgaaggaaaatcttaaaaaatgatattattgcacaagttacatttttrgcaacttatctcaaatatactttccctagattttcaaaaagtctgatagt

SEQ ID NO: 284998 - DNA, 457 bp, Homo sapiens
tttgaatagctaattttatgtgcccatatttattaactattaaaataaatttttaaaaataacctctttatttccccttaaaagagaaaacaaatctaactcagatttttttgttccctctaaaacaggctctccttctctctctctcacatgcacatacataggccttaggttaatttcaacataattaggggtaggaaacacagcaacaagtgcaaaggmctgttgttgaatacggagaatataagaagataaattagacattttgaatattatcttctaaataatttattattttattccttacattgatatctacaaatctattgtgatattcacaatttccatgatatggactcatgaaaaaattcttgagtgggaaaaaacagataagtacacaattgccagacatccaaacaaggcagaaagtaattgctgcaataaatctaccagacaa

SEQ ID NO: 284999 - DNA, 395 bp, Homo sapiens
atgcaagagacggacagctctgtgaggaagtgaaaataatatatgtgatttagaaacaactcaagagacttcctgtcaataaaatattttagcagaaaaagtttgttaaagacagagaaataaggaaattaattataatactcttatggaagtctatgtaaaacaattgatcaaagaagaatttttaaaaaacagtggtaagacatttctgtgataaaaggaattaatcatgaatttagtatgagagtaaaagaaggagactcaataaattatcttccaaggttttgtaccaaatatgtttttagactgtgtattggctacttgatttctattgttgtaaacctctacataaaatyactgaataaaatgaccagactaattgcctacacttgttt

SEQ ID NO: 285000 - DNA, 540 bp, Homo sapiens
tcacaggtctacttgtaaaaggcaaaacttgaaatctcctagaagaaaaaaggagaaaaatcaaagtgactttgggtttggcaatgtctgtatctataacaccaaaggaatgatctctgaaaaaattgataaatgagacttcattaaaataaagtttctgctctgcaacagagaagggaatgaaaagacaagccacagactgggataaactacttgccaaagacatattmgataaaggacagtttttaaaatatacaaagaacccttaaagctcaacaatataaaacaaaacaaaacaaaaaccaatttcttaaaaatgggccaaagaccttaaaaaatacctcaccaaaaaagatatacagatgaaaaccaaccaaatgaaaaggtgcttcacttgatgtgaagagtctttggggcttcacttgaggcacctattaggatgccccaaatccagaactctaatgctggcaaggacgtggaagaagaagaattctcattcattgctgatgggaatacaaaatagcacagctactttgggag

SEQ ID NO: 285001 - DNA, 540 bp, Homo sapiens
tcacaggtctacttgtaaaaggcaaaacttgaaatctcctagaagaaaaaaggagaaaaatcaaagtgactttgggtttggcaatgtctgtatctataacaccaaaggaatgatctctgaaaaaattgataaatgagacttcattaaaataaagtttctgctctgcaacagagaagggaatgaaaagacaagccacagactgggataaactacttgccaaagacatattagataaaggacagtttttaaaatatacaaagaacccttaaagctcaacaatataaaacaaaacaaaacaaaaaccratttcttaaaaatgggccaaagaccttaaaaaatacctcaccaaaaaagatatacagatgaaaaccaaccaaatgaaaaggtgcttcacttgatgtgaagagtctttggggcttcacttgaggcacctattaggatgccccaaatccagaactctaatgctggcaaggacgtggaagaagaagaattctcattcattgctgatgggaatacaaaatagcacagctactttgggag

SEQ ID NO: 285002 - DNA, 620 bp, Homo sapiens
acttgcaaacacttctgctgcctcataacacagagacaacctttcctgaattagatgcttctctctgcctagccctcaaggcaatttacggtttaagagccttgaaagaatgatctacactcaagtatcatcatttcttggactctgacrtcaagtcaggatattctgttgaaataattgacattaaatgatcaacaacataaaaaatacagtgagtatttaatttgaaatgttacgtggacttactatagcacttgattagcagatatctccattatttttgaaatgatctcattaagttgcttcagtgacattaatctcttctgtttcctcctgtccttttgacttcaataacgtttcatttcctatatgttttcctatactttacatttcctatatttttctcacttgagaagtaactttgttctaaccattgattcaacttctaactgtatactattgagccccaattatctactttaaggaaaaatctagacctctctgtaaatctttaaaccctttatttgccttttggaaacatctctttggattattcacatgtgcctttaactccacgttttaacaactgcactaagtgtatttttccaatctgtttcttt

SEQ ID NO: 285003 - DNA, 620 bp, Homo sapiens
acttgcaaacacttctgctgcctcataacacagagacaacctttcctgaattagatgcttctctctgcctagccctcaaggcaatttacggtttaagagccttgaaagaatgatctacactcaagtatcatcatttcttggactctgacgtcaagtcaggatattctgttgaaataattgacattaaatgatcaacaacataaaaaatacagtgagtatttaatttgaaatgttacrtggacttactatagcacttgattagcagatatctccattatttttgaaatgatctcattaagttgcttcagtgacattaatctcttctgtttcctcctgtccttttgacttcaataacgtttcatttcctatatgttttcctatactttacatttcctatatttttctcacttgagaagtaactttgttctaaccattgattcaacttctaactgtatactattgagccccaattatctactttaaggaaaaatctagacctctctgtaaatctttaaaccctttatttgccttttggaaacatctctttggattattcacatgtgcctttaactccacgttttaacaactgcactaagtgtatttttccaatctgtttcttt

SEQ ID NO: 285004 - DNA, 620 bp, Homo sapiens
acttgcaaacacttctgctgcctcataacacagagacaacctttcctgaattagatgcttctctctgcctagccctcaaggcaatttacggtttaagagccttgaaagaatgatctacactcaagtatcatcatttcttggactctgacgtcaagtcaggatattctgttgaaataattgacattaaatgatcaacaacataaaaaatacagtgagtatttaatttgaaatgttacgyggacttactatagcacttgattagcagatatctccattatttttgaaatgatctcattaagttgcttcagtgacattaatctcttctgtttcctcctgtccttttgacttcaataacgtttcatttcctatatgttttcctatactttacatttcctatatttttctcacttgagaagtaactttgttctaaccattgattcaacttctaactgtatactattgagccccaattatctactttaaggaaaaatctagacctctctgtaaatctttaaaccctttatttgccttttggaaacatctctttggattattcacatgtgcctttaactccacgttttaacaactgcactaagtgtatttttccaatctgtttcttt

SEQ ID NO: 285005 - DNA, 620 bp, Homo sapiens
acttgcaaacacttctgctgcctcataacacagagacaacctttcctgaattagatgcttctctctgcctagccctcaaggcaatttacggtttaagagccttgaaagaatgatctacactcaagtatcatcatttcttggactctgacgtcaagtcaggatattctgttgaaataattgacattaaatgatcaacaacataaaaaatacagtgagtatttaatttgaaatgttacgtggacttactatagcacttgattagcagatatctccattatttttgaaatgatctcattaagttgcttcagtgacattaatctcttctgtttcctcctgtccttttgrcttcaataacgtttcatttcctatatgttttcctatactttacatttcctatatttttctcacttgagaagtaactttgttctaaccattgattcaacttctaactgtatactattgagccccaattatctactttaaggaaaaatctagacctctctgtaaatctttaaaccctttatttgccttttggaaacatctctttggattattcacatgtgcctttaactccacgttttaacaactgcactaagtgtatttttccaatctgtttcttt

SEQ ID NO: 285006 - DNA, 605 bp, Homo sapiens
cataagttgaaaattcatttaatacacctaacctatcaaacctcacagcttaggctagcctaccttaaaggtgctcagaacaattacatcaccctacagttgggcaaaatcatccagcataaagccttttttataataaaatattcaacatctcatgtaatttattgaatactataataaaaatgaaaaacggaagagtcatatgtatattcaaagtatggtttatgctaaatatgcattgcttttgcactgtcaaaaaattgaaaaattttaactcaaaccatcttaaatcatgggccatttttatgtgcatgcacagttacgtgctgcataacaatgttttggtcaatgacagacctcataggtgatggyggtcacataagactataatacatatgtttaccatttttatgtttagatacacaaatacttacctttatattaaaattgcccacagtattcagtatagtaacatactgtacaggtttgtaccctaggaggagtaggttatatcatatgtctaggtgtgcagtaggctatacacaataggtttgcataagtccactctatgatgttcacaagtggatgaaattgcctaaaaacat

SEQ ID NO: 285007 - DNA, 605 bp, Homo sapiens
cataagttgaaaattcatttaatacacctaacctatcaaacctcacagcttaggctagcctaccttaaaggtgctcagaacaattacatcaccctacagttgggcaaaatcatccagcataaagccttttttataataaaatattcaacatctcatgtaatttattgaatactataataaaaatgaaaaacggaagagtcatatgtatattcaaagtatggtttatgctaaatatgcattgcttttgcactgtcaaaaaattgaaaaattttaactcaaaccatcttaaatcatgggccatttttatgtgcatgcacagttacgtgctgcataacaatgttttggtcaatgacagacctcataggtgatggcggtcacataagactataayacatatgtttaccatttttatgtttagatacacaaatacttacctttatattaaaattgcccacagtattcagtatagtaacatactgtacaggtttgtaccctaggaggagtaggttatatcatatgtctaggtgtgcagtaggctatacacaataggtttgcataagtccactctatgatgttcacaagtggatgaaattgcctaaaaacat

SEQ ID NO: 285008 - DNA, 588 bp, Homo sapiens
caagcgtctgtttatctgtttaagtctactatgtttcatccctagaagctcactcaaaatttataagccactaacattatctcatcattcatatactacattattataagtgcaattctttaagtacattgatattacataaagatcctacagcaattggaataacattttgaatcttggagattttcattatatatgcatggatgataatatgaaaagtatgaaaaacacacagactttattttgcactttcttatcattttcaatagcttcaatttgacagactcagtgatgattttcttaactgtcatttctatattctttcccctctacttttgatcatctgayaaatgctattggaatacttattatggactgcaccaaaagtattctgacattctttaaacaaacaacagtgaattgtatagccacataaatgtattgatttttgacaaagttgtacattcattttagcttcagtgtttactctcttttttccctgcagagatcattatttgcttttcttactgtgaaatgcttctttcctattatttaaacagaaaattaatataagcactagaaataaca

SEQ ID NO: 285009 - DNA, 588 bp, Homo sapiens
caagcgtctgtttatctgtttaagtctactatgtttcatccctagaagctcactcaaaatttataagccactaacattatctcatcattcatatactacattattataagtgcaattctttaagtacattgatattacataaagatcctacagcaattggaataacattttgaatcttggagattttcattatatatgcatggatgataatatgaaaagtatgaaaaacacacagactttattttgcactttcttatcattttcaatagcttcaatttgacagactcagtgatgattttcttaactgtcatttctatattctttcccctctacttttgatcatctgacaaatgctattggaatacttattatggactgcaccaaaagtattctgacattctttaaacaaacaacagtgaattgtatagccacataaatgtattgatttttgacaaagttgtacattcattttagcttcagtgtttactctcttttttccctgcagagatcattattygcttttcttactgtgaaatgcttctttcctattatttaaacagaaaattaatataagcactagaaataaca

SEQ ID NO: 285010 - DNA, 623 bp, Homo sapiens
acctcgggtttgacaatgtgacaatgagtttttagacacaacaccaaaagcccaatccatgaaagaaaacaaaamaaaacaaaacaaaattttgtaagttggacttaattaaaattaaaactttctctctgtaaaagaatcagcagaatgtaaagccacagaccaggagaaaatttttataaaatatatttctgataaaggaactgtatctaaaatacacaaagaactccaaaacacaacaatgagaaaaagaaacaactcagttaaaaagttaacaaaagatttgaaccaacacttcagcaagtagggtatacacataggaaaatagattcaatattatgttattagggaactgtaaattaatactacaatgatataccactatatatttattacaattgccaagatgctaaatacttagaaaaccaaattctagtaatggtgtggagaaactggaactgtcattcatcgctggtggaaatgcaaaatggtaaagccaccttggaagcacatttggaagttccttaaaaagcttgacataattctaccaaatgaaactgcaattgagcttttagatatttactcaaacgagttgaaaacatggattcatgcacatttttgca

SEQ ID NO: 285011 - DNA, 1025 bp, Homo sapiens
gaatctaataacaggatatattatctacatgtattatgtaatgtaacatatgtattatgtagcatatgtatatgtattatgtattatgtacatgtattatataatgtaacataatcacaggattgtcactgtaacatctttgtcatgttatatgggttagaatcatgtctcaggtcctgcccatacttaagcagagggcttaaatgagagcatgattaccggaaggcgaagatcatcggtggtcacctaagtctatggcttcatgagaagatcccaatgacttgttgaaaggtaaaatcatagatctgctttatgcatgggcctggcatcagcattccytctcattattatgataatacatacattttttgcttaaaattataaaaactttgagcttgaaaggtttgacagacctaatttcaagtataaactttcccttctgcattttgggctccccaagccactgaatcaataggtaagtaagawttatcaaaacaagaataaatacatcgttttatttgtaccaaaatatactctcaagctgttcccattaaatcaataaagtattgtcatatawtagtaaaaataagaaaaatcactgttgtaagaactcttatcatgagatctactctctttagcaaattctgaagtgctcattattgtattaactatcggactatgttgtactgcagatctctagaccattttcatcttgcattcctaaaactttacttctatttagcaacgatgctccatttttcttctttccctcagccgctggcaaccaccatttcattcttcgctattatgagtttgactattttagattcatcatataaatgattttatgtagtatttgtccctctttgtcttgcttatttcacttagaataatgtcctgcaggttcatctatattgttgcaaatgacaagaatttccatctttatttttaaggccgaataatattctgttgtatgcatatacgacattttctttatctatttgcttatagatggacatttgggt

SEQ ID NO: 285012 - DNA, 539 bp, Homo sapiens
ttatcaaaacaagaataaatacatcgttttatttgtaccaaaatatactctcaagctgttcccattaaatcaataaagtattgtcatataatagtaaaaataagaaaaatcactgttgtaagaactcttatcatgagatctactctctttagcaaattctgaagtgctcattattgtattaactatcggactatgttgtactgcagatctctagaccattttcatcttgcattcctaaaactttacttctatttagcaacgatgctccatttttcttctttccctcagccrctggcaaccaccatttcattcttcgctattatgagtttgactattttagattcatcatataaatgattttatgtagtatttgtccctctttgtcttgcttatttcacttagaataatgtcctgcaggttcatctatattgttgcaaatgacaagaatttccatctttatttttaaggccgaataatattctgttgtatgcatatacgacattttctttatctatttgcttatagatggacatttgggt

SEQ ID NO: 285013 - DNA, 579 bp, Homo sapiens
tattccccctcaagtttttttttttttttttcaaagagtttgagaaggatttgtattagttatttgttaaaagtttggtagactccaccagtgaagccatttgtcctggggctttcattgttaagtggcttttgttcatcaggtattttataagatgccccttactggaaattggttgaatstttccctcatggacatgtcggggttattaccagttttagggagaaagatcccaaaggcaaagtcacatggcaaaggtacatgctgacagcactagattactattgacatatatatgctagaagaataatagctttcaagctcaaaatctagaactctaagtaaaaattaattgcaaagaatatatgttttcttaattagaaaactataaataatcacacaatgtttttaagttactcttgcatatgtacaaattatttttcattttgtttttatatcaaaatacattagtattacatttgattatagttaataaaagttgataatattattgatgatagccataagagctatggtgctattgttggtgttcagagaaaacaaccggattgaaattat

SEQ ID NO: 285014 - DNA, 579 bp, Homo sapiens
tattccccctcaagtttttttttttttttttcaaagagtttgagaaggatttgtattagttatttgttaaaagtttggtagactccaccagtgaagccatttgtcctggggctttcattgttaagtggcttttgttcatcaggtattttataagatgccccttactggaaattggttgaatctttcyctcatggacatgtcggggttattaccagttttagggagaaagatcccaaaggcaaagtcacatggcaaaggtacatgctgacagcactagattactattgacatatatatgctagaagaataatagctttcaagctcaaaatctagaactctaagtaaaaattaattgcaaagaatatatgttttcttaattagaaaactataaataatcacacaatgtttttaagttactcttgcatatgtacaaattatttttcattttgtttttatatcaaaatacattagtattacatttgattatagttaataaaagttgataatattattgatgatagccataagagctatggtgctattgttggtgttcagagaaaacaaccggattgaaattat

SEQ ID NO: 285015 - DNA, 579 bp, Homo sapiens
tattccccctcaagtttttttttttttttttcaaagagtttgagaaggatttgtattagttatttgttaaaagtttggtagactccaccagtgaagccatttgtcctggggctttcattgttaagtggcttttgttcatcaggtattttataagatgccccttactggaaattggttgaatctttccctcatggacatgtcggggttattaccagttttagggagaaagatcccaaaggcaaagtcacatggcaaaggtacatgctgacagcactagattactattgacatatatatgctagaagaataatagctttcaagctcaaaatctagaactctaagtaaaaattaattgcaaagaatatatgttttcttaattagaaaactataaataatcayacaatgtttttaagttactcttgcatatgtacaaattatttttcattttgtttttatatcaaaatacattagtattacatttgattatagttaataaaagttgataatattattgatgatagccataagagctatggtgctattgttggtgttcagagaaaacaaccggattgaaattat

SEQ ID NO: 285016 - DNA, 604 bp, Homo sapiens
gcatgtttttaaccatttgatatatacattaaaaagctattaggacagtaatattggtcatttatcttagtatctctcctatatttcctatagttttcccatccataatagtgtggttttcatttacaacccamaattattctcctcacatctttttcctcttttctctcactcaaatgttgaaaacaattgatcatttatatttttgtagagacttgaagacaaaactctattaattatttgaattgcactgaatatatatgccaaaacaaagatagcaatttaattattcaccagtatgaatctgccaacttgatgtgatcaaattaattaattttcattgatttagaaagttgtacacttgtaatagaaagcaacctcaaaaatggatcaatattattataattcttgtcacaatacaatgcacttctctctccttctggattttatatttgtcattaaatttgtcattaatgttcatgcttatatgatgcttcaataaaagtaaagatgagattataacattcactactttttaaacatttagaataattggggggttttgaaaaaccttatgtatttataccataagcattgaattatt

SEQ ID NO: 285017 - DNA, 604 bp, Homo sapiens
gcatgtttttaaccatttgatatatacattaaaaagctattaggacagtaatattggtcatttatcttagtatctctcctatatttcctatagttttcccatccataatagtgtggttttcatttacaacccaaaattattctcctcacatctttttcctcttttctctcactcaaatgytgaaaacaattgatcatttatatttttgtagagacttgaagacaaaactctattaattatttgaattgcactgaatatatatgccaaaacaaagatagcaatttaattattcaccagtatgaatctgccaacttgatgtgatcaaattaattaattttcattgatttagaaagttgtacacttgtaatagaaagcaacctcaaaaatggatcaatattattataattcttgtcacaatacaatgcacttctctctccttctggattttatatttgtcattaaatttgtcattaatgttcatgcttatatgatgcttcaataaaagtaaagatgagattataacattcactactttttaaacatttagaataattggggggttttgaaaaaccttatgtatttataccataagcattgaattatt

SEQ ID NO: 285018 - DNA, 544 bp, Homo sapiens
actcatgtgcgtcattggctatgcacccaaatatgcatgtttttaaccatttgatatatacattaaaaagctattaggacagtaatattggtcatttatcttagtatctctcctatatttcctatagttttcccatccataatagtgtggttttcatttacaacccaaaattattctcctcacatctttttcctcttttctctcactcaaatgttgaaaacaattgatcatttatatttttgtagagacttgaagacaaaactctattaattatttgaattgcactgaatatatatgccaaaacaaagatagcaatttaattattcaccagtatgaatctgccaacttgatgtgatcaaattaattaattttcattgatttagaaagttgtacacttgtaatagaaagcaacctcaaaaatrgatcaatattattataattcttgtcacaatacaatgcacttctctctccttctggattttatatttgtcattaaatttgtcattaatgttcatgcttatatgatgcttcaataaaagtaaag

SEQ ID NO: 285019 - DNA, 555 bp, Homo sapiens
agccattctttcatgtaacttcatcttttattaacactggaaaagacatcttgcagcagcaattaccatttaamacaaaattttaaggacagcagaaaattttagggtacaaaagatttccctttggattttattcttttagtatatgtgcttggagacaacaaactgtaaagaggagtaatgtaaatctgtccaaaccagaacatttgcagttttactttaatgccaaaaacagtgcctttgttcaatgacacctgaacatcagtttatgtaaaggcttagcaggtggattagcagatggtagtcagaattcccaagtttaccactaatattcattacttcatcaaaaccaagatgaaaaaaaaaaactatttaaaagacaaggctaagcatatatcaagtcctattatgtagactagtgagctaaattttgcattctacagtgattatctgggggaaattaaggcattaactaaagacattgataaatatttctatcaatttgctcagacaaaaatgttttttaaactacagactatagcataattattcaaa

SEQ ID NO: 285020 - DNA, 599 bp, Homo sapiens
aaaaaaaactatttaaaagacaaggctaagcatatatcaagtcctattatgtagactagtgagctaaattttgcattctacagtgattatctgggggaaattaaggcattaactaaagacattgataaatatttctatcaatttgctcagacaaaaatgttttttaaactacagactatagcataattattcaaaataaacagtaattaactgaactaaatcaagcaacacaagggtttgcaaatttgccctgtggtttaccagctgtgctttttactgtctgcactgtgaatttacactcatgcttcragttctcaagaggtggtagaaaattgaagtgtgttttagaagcatattaagcaagggtaaaattactaatttagtctgtctaagtcatctagcaatgagagatttacttttttaaaaatcagtatgaagcaagtttaacgagcctttattgaatacctactatacactgagagctatgtgaaacctagagataagaacttaagtaagacatgtagagtgcaaatagaataaaaatggagatagaataaaaattttgatgcgtgatttatatacaggtcaatgagttatga

SEQ ID NO: 285021 - DNA, 599 bp, Homo sapiens
aaaaaaaactatttaaaagacaaggctaagcatatatcaagtcctattatgtagactagtgagctaaattttgcattctacagtgattatctgggggaaattaaggcattaactaaagacattgataaatatttctatcaatttgctcagacaaaaatgttttttaaactacagactatagcataattattcaaaataaacagtaattaactgaactaaatcaagcaacacaagggtttgcaaatttgccctgtggtttaccagctgtgctttttactgtctgcactgtgaatttacactcatgcttcaagttctcaagaggtggtagaaaattgaagtgtgttttagaagcatattaagcaagggtaaarttactaatttagtctgtctaagtcatctagcaatgagagatttacttttttaaaaatcagtatgaagcaagtttaacgagcctttattgaatacctactatacactgagagctatgtgaaacctagagataagaacttaagtaagacatgtagagtgcaaatagaataaaaatggagatagaataaaaattttgatgcgtgatttatatacaggtcaatgagttatga

SEQ ID NO: 285022 - DNA, 599 bp, Homo sapiens
aaaaaaaactatttaaaagacaaggctaagcatatatcaagtcctattatgtagactagtgagctaaattttgcattctacagtgattatctgggggaaattaaggcattaactaaagacattgataaatatttctatcaatttgctcagacaaaaatgttttttaaactacagactatagcataattattcaaaataaacagtaattaactgaactaaatcaagcaacacaagggtttgcaaatttgccctgtggtttaccagctgtgctttttactgtctgcactgtgaatttacactcatgcttcaagttctcaagaggtggtagaaaattgaagtgtgttttagaagcatattaagcaagggtaaaattactaatttagtctgtctaagtcatctagcaatgagagatttacttttttaaaaatcagtatgaagcaagtttaacgagcctttattgaatacctactatacrctgagagctatgtgaaacctagagataagaacttaagtaagacatgtagagtgcaaatagaataaaaatggagatagaataaaaattttgatgcgtgatttatatacaggtcaatgagttatga

SEQ ID NO: 285023 - DNA, 523 bp, Homo sapiens
gtagtaagagaagagataagaaaagaaggaagctaggtaacatagggctctatggatcataataacaaattatgatgttattctaagtaccatgggaaaccattgaaaagtgttgaaaataggacaacgggaatttactttttataggatttctactgctatggaacaaaaatgttgtgagcatgagtaagaattgcagtgaagacaccagtagggaacaattgcagaagtgtgattgagagatgatgagtcagattagaagtggtggagttgctgacaatggtcagattcttgaagtacagtcatgtgctgtttaacaatgggcatagattytgagaaatgcatctttgggcaatgttgcccttgtgcaacatcagagagtataattatataaactgagatggtacagcctcctacacatgtaggctacatggtatagtctgttgcttctaggccacaaacctgtatagctagttactttacagaatattgtaggcaattgtaacacaatgttatttgtgta

SEQ ID NO: 285024 - DNA, 523 bp, Homo sapiens
gtagtaagagaagagataagaaaagaaggaagctaggtaacatagggctctatggatcataataacaaattatgatgttattctaagtaccatgggaaaccattgaaaagtgttgaaaataggacaacgggaatttactttttataggatttctactgctatggaacaaaaatgttgtgagcatgagtaagaattgcagtgaagacaccagtagggaacaattgcagaagtgtgattgagagatgatgagtcagattagaagtggtggagttgctgacaatggtcagattcttgaagtacagtcatgtgctgtttaacaatgggcatagattctgagaaatgcatctttgggcaatgttgcccttgtgcaacatcagagagtataattatataaactgagatggtacagcctcctacacatgtaggcyacatggtatagtctgttgcttctaggccacaaacctgtatagctagttactttacagaatattgtaggcaattgtaacacaatgttatttgtgta

SEQ ID NO: 285025 - DNA, 562 bp, Homo sapiens
tactaagtaaaattggcattacaacaatcaacagtgattaatatgtagtgaaaataccctaaggttatactcaaattttaaaccagactagaatataaaccaggagagagtgactagaatgagacaattctaaggtttttctctggtctgggaaatggattattatctcgattaactttataatttgttaacataattacaaacattaattttggggtaacactaaagaacagaaatcgaatgcttagctttaaaaactgaggcagaaaaaaaaaaaaaaaaaaaaaaagaccatgrcattaaaatcaaacccaagttgggctagaaagaaaaacgtaaaaggaaacaagaaaagtgggatgaataaaagtttcaaagtctaatgagagaaatgaacacaaatttaaacaaggaaatttaaataagggaatatcctacttcattgaaaatgaacaatctactgctacacatacatcaacattcattaaactcaaaaatcacattgagtaaaaaagcaagttgaaggtaaatacgtattatatgatactgtttgtgttacaat

SEQ ID NO: 285026 - DNA, 456 bp, Homo sapiens
ttggaaggatgtattgaaaaatcaattctttattcataaattcttaagtaagagataagcagtatgaggaagtatggaaaaatatataacaattataacatcaaatagtaaaataagataatatatttttaaaaaatgcagcagcagcagcagcagcagcagcagcagyagtagtagtagtagtagtagtagtagtaaagccaggttttctaacatgaaggacccagggtctagccaaggaattgggaatagggcttcagccaacagagttaatctctccgtggaagctgggagtcagaaaaggcaatctgaatgcaaggacaaatgaggaaatagtagagaatatcagacacagactatagaatgtctcagaagtaaaaactagaatgacaggtcaagatggttagtctggagccaagaactaggaaaaacctaaaggtattatttaccaaaata

SEQ ID NO: 285027 - DNA, 1043 bp, Homo sapiens
tttaagcacattggcttcagattttctcttctttatactgaaggaagaacacttctcctatccaagcttttggacttcggggattttgtgttttgcgcattgtcacaacaattactagtatctcccatcaagtctttttacgtccttgctccacttcaccactccatagtcatagcatctattaagtgtgctagattctatccttagcactacacagatgatatacttttaaatgtttacaataaacctttaagatatccattaagtatccataatttrcagactggtcactgaagtgcacaaaggtaaattattgacttgcccatgcctttgtaacacctaagtgacataatcaggattcacccccagggctttctcaacctaaatatcatgttctttcttctctacacatctttctctccctggaaactctaggtactttwtagagcctgactgcatcaggggacatgtgaatgatcagatccagtcaaggaacaagcaagaggagtgaaggagttatccttaactctttggaagtaggcagtttcatcactgatttcagctgatgtttcctatcaggtgacatacgggtagagtacacatgacaaaatacaatttagagaaggctataaatgcctcggaaaatccacagtggccagttctgaatgagggtggggggtggaaggagggaagcttctgatctctctgaggctgaaaattcaattcaagggagagaaaagccagttatatccttggtattgagcaagcaatttaatagctctttgctcatggtagggactcaagtatttattaataaaatwataatattctctcccatactatccataaatagtttcctttaaaatatatagattagctatagtttagtcatccaatttggaataatttggagttttacaaataaaaggaactgtgtagcaaaccatggtccctgccataacaatgtgctccttgtgtcaattttccagataactgaagctaatactttaagattttctgtattttaaaaaatttttttaaat

SEQ ID NO: 285028 - DNA, 607 bp, Homo sapiens
tctatgctgtgagtcctggaggtccactggactgttaaaggttatggctggggaataactctgtgagatactcagcagctggaggggatagttcatgttgctggtgtttgtgggggaaaataaaataaaatttatcaccattaaaaaacctctagggcagggctgtccaatcttttggctttcctgggccacattgcaagaagaacaattgtctggggccacacataaaatacagtaatactaattatagctgatgagctaaaaaaaattgcaaaaaaatatctcataatgttttaagaaagtttgtgaatttgtgatgggctgcattcaaagcccccatgggctgcaggttagacaaacttgctctagggtatttaatgtacgcaatctttacaatcagcctcattaacccatgggagaactatcgtctataaaacagactccccttcacatyttctcctcaagccacatgttgactttccatgatgtcttttccctaaagtcttcccatgatactcactttattataatttcacttagataaaatgtaaaactggcccccaaatacatataacccagagactttagtgaaatcatataagccaaa

SEQ ID NO: 285029 - DNA, 591 bp, Homo sapiens
ggtctgctggtcataagggtggatcacttgaggtcagcagttcaagatcagcctggccaatatggcaaaaccctgtctctactaaaaatacaaaaattagctcggtatggtagcacatgccttgtaatcctagctacttagaaggctgaggtaggagaatcacctgaatccaggaagcagaggttgtagtgagccaagatggtgccactgcactccagcctgggtgacagagttagacactgtctcaaaaaaaaataagaagctctaatgtttgtttcattgagagatcccttcctaagggacccaacaagcagcttcaatgatggtcagtaaagtatgaaccttataaccatagtttccacgtttccacctttgcctcctactgaggyggcagcagagctgggtcctgactgtgatgcggtattcccataacacagctccacatccagaggtagtttcacccggaatcaatgaaactcagctttcagggctcttcatctgcatgggtcctttgtaagggaccagtgttgatattcaaaagtgtgcattctttttattaagaatagcctccaaaattaggtaaccttcaga

SEQ ID NO: 285030 - DNA, 464 bp, Homo sapiens
tttgaaaaatagttcctgtgtgcagagtcagcctctgggtggggaccacaggatcagttgagtcatgagtcatgagtccaggtggagttagtaggtcatcgtcatcagaatgcaaaagtctgaaaaacatctcaaaagacccatgttaggttctacaatagtgatattatctataggagaaattggagaagttgcaaatcttgtgacctccagaacaacggctggttattatctaggtttgcytacattttagcagaattcaggcctctcccataatcctaatctttcattagttttacaaaggcagttttgtctctgagcaaggagatttgttttacagaggcactattatcatttttgcttcaacgttaaactataacctaattcctcccatggttagcttggcctacacccagaaatgaccaagggcagccaatgtatgagtctaaaagcaagaagaaatc

SEQ ID NO: 285031 - DNA, 602 bp, Homo sapiens
aaggtgtctatggtgttgactattatttgtgctgttagtcattggccctcttcaaatagggcacaaacaaggtgaagtttttccttycaaattgatatggatggtctgctgctgccgggcttcatcttcaacgtcatcttgtcctttcttaaaatgagttattcatttgtaaatctctgatttctttggacattatccacataacgttcttgtaaatcatcaacaatttcaccattcttccacccaagcaaggggctcttgctttaattttagcagggtttacattgctctgatagaggctgcattcaaactgatgtcttatctttcttagtgcctcaaactacatgctgttcagacctgttataacaagttagaatgaattcatttcagtgccctcaaaatagaattccatgcatattttttcataatatgcattttctatgaagtttttgaaggcccgtcatattacaaattcaagaaagttgtagcacacaaaattaagaggcaataatcacactagcaatgaacaatacagatctaaacactggcaacgaacaatacagaaataaaattatggaagcaattccatttataatagcata

SEQ ID NO: 285032 - DNA, 605 bp, Homo sapiens
tttctttagagatacttctatttgttatttatgttgtaggtactgtgatttctcattcacaaataatagctcatatctgggattggcarttatggccagtggattaaattcagctagccatctatgtttataagttttattggagcatgggtacattcatttagatattgacagttcatatgctacattggcagaattgagtacaggcatacctcagatatattctgagtttggttccagaccaccaaaataaagtgagttacacaaatttcttacaattttacggtgcacatatgtattgactacgctgcagattattaagtgtgtaatagcattatgtctaaaaagatattaattttaatttaaaaatgctgtactttgttgctaaaaatacaaaagatcatctgaaccttcagcagtcataatgtttgcaggtggaagttcttgtctcagtaatgatggctgctgattgattagagtggtggttgctgaaggttggggtggctgtggaaatttcttgaattagacaataatgaaatttactgtattgattgactcttcctttcatgaaagatttctctgtaccatgtgatgctgtttgacag

SEQ ID NO: 285033 - DNA, 605 bp, Homo sapiens
tttctttagagatacttctatttgttatttatgttgtaggtactgtgatttctcattcacaaataatagctcatatctgggattggcaattatggccagtggattaaattcagctagscatctatgtttataagttttattggagcatgggtacattcatttagatattgacagttcatatgctacattggcagaattgagtacaggcatacctcagatatattctgagtttggttccagaccaccaaaataaagtgagttacacaaatttcttacaattttacggtgcacatatgtattgactacgctgcagattattaagtgtgtaatagcattatgtctaaaaagatattaattttaatttaaaaatgctgtactttgttgctaaaaatacaaaagatcatctgaaccttcagcagtcataatgtttgcaggtggaagttcttgtctcagtaatgatggctgctgattgattagagtggtggttgctgaaggttggggtggctgtggaaatttcttgaattagacaataatgaaatttactgtattgattgactcttcctttcatgaaagatttctctgtaccatgtgatgctgtttgacag

SEQ ID NO: 285034 - DNA, 605 bp, Homo sapiens
tttctttagagatacttctatttgttatttatgttgtaggtactgtgatttctcattcacaaataatagctcatatctgggattggcaattatggccagtggattaaattcagctagccatctatgtttataagttttattggagcatgggtacattcatttagatattgacagttcatatgctacattggcagaattgagtacaggcatacctcagatatattctgaktttggttccagaccaccaaaataaagtgagttacacaaatttcttacaattttacggtgcacatatgtattgactacgctgcagattattaagtgtgtaatagcattatgtctaaaaagatattaattttaatttaaaaatgctgtactttgttgctaaaaatacaaaagatcatctgaaccttcagcagtcataatgtttgcaggtggaagttcttgtctcagtaatgatggctgctgattgattagagtggtggttgctgaaggttggggtggctgtggaaatttcttgaattagacaataatgaaatttactgtattgattgactcttcctttcatgaaagatttctctgtaccatgtgatgctgtttgacag

SEQ ID NO: 285035 - DNA, 614 bp, Homo sapiens
atgctacattggcagaattgagtacaggcatacctcagatatattctgagtttggttccagaccaccaaaataaagtgagttacacaaatttcttacaattttacggtgcacatatgtattgactacgctgcagattattaagtgtgtaatagcattatgtctaaaaagatattaattttaatttaaaaatgctgtactttgttgctaaaaatacaaaagatcatctgaaccttcagcagtcataatgtttgcaggtggaagttcttgtctcagtaatgatggctgctgattgattagagtggtggttgctgaaggttggggtggctgtggaaatttcttgaattagacaataatgaaatktactgtattgattgactcttcctttcatgaaagatttctctgtaccatgtgatgctgtttgacagtattttacccaaagtagagctttcaaaattggagtcaatcctttcacatcctgccactgcttgatcaactaagtttatggaatattctaaatcctttgtcatttcaacagtgtttatgacatcttcattaggagtggatttcctctaaagaaaacactttttttttctcatccataagaagcaacttc

SEQ ID NO: 285036 - DNA, 391 bp, Homo sapiens
ggagttttgggaagggtaaatgtgctttggtttcaacttaaaattaccagctgcattagcccctaacagtcagcctgtcctttgcagctttgaaggcaggcattgacttctcaatagctgtggaagtccaaatgacatcttcttccaatataagggtttttcatctgcgttgaaaatctatttagtgtagccaccttcatcagtaatcttagctacattttctggataacttgctgcagcttctcaattagcacttgcaacttcacyttgtgcttttatggagatgacttcttccttaaagctcatgaaccaacctctgctagcttcaagcttcacttctgcagctttctcacctctcggtctttatagagttgagaagagttagagcctt

SEQ ID NO: 285037 - DNA, 573 bp, Homo sapiens
attttgttagtgaactttccttttcccgggcattctttgtttgtacctaccacttccaacctgcccagtcccaasgctatcataggaactattgatttcttctgtgaacataccaccactctgcagttgttggtcccagggataagaatggcccaagagattcaaaatgattttttcttccaaaatgttcaaactaaaacagagtcagtttctgatttacccagagttataacaatgaagacttgctaatgaccaccattttctcctcgtttttaagaacacttctgcaatgagagaataatgtagaagagcctatagatgcagaggtcaggtaacttggcccattcttggctcagttatttatgtggcccaattacgtatctgttggaattttaaatatagtctactttttgaataatcggagctatataaaagcataagtaaatgattatatttctttttcaataactcagatcagctctgttctgtaaagtcttcccttcccataccattacaacatcttttgcctttttctcctatgataaattaagctcaatgaaaacctcaatttca

SEQ ID NO: 285038 - DNA, 573 bp, Homo sapiens
attttgttagtgaactttccttttcccgggcattctttgtttgtacctaccacttccaacctgcccagtcccaaggctatcataggaactattgatttcttctgtgaacataccaccactctgcagttgttggtcccagggataagaatggcccaagagattcaaartgattttttcttccaaaatgttcaaactaaaacagagtcagtttctgatttacccagagttataacaatgaagacttgctaatgaccaccattttctcctcgtttttaagaacacttctgcaatgagagaataatgtagaagagcctatagatgcagaggtcaggtaacttggcccattcttggctcagttatttatgtggcccaattacgtatctgttggaattttaaatatagtctactttttgaataatcggagctatataaaagcataagtaaatgattatatttctttttcaataactcagatcagctctgttctgtaaagtcttcccttcccataccattacaacatcttttgcctttttctcctatgataaattaagctcaatgaaaacctcaatttca

SEQ ID NO: 285039 - DNA, 585 bp, Homo sapiens
ggacacctgtctcatagttttcatactgcgtgagacctggaagccaggaagattccaaggtggagggggaagcaaaacaccagctaagtgtcgagtgactttttttccaccttgcaaataggataaagattgaattctctcatgagaaagtagatgaaagttacagtccagaaatatatctcaagtgtggctccctcttgggtaatagagtaaataaatacattcccctagtgctagtcattcagctctactttcctgcctctatttyttgtttattttctacttcaccccctctccctttctaacaaaatactgactagaggattcattgacatactgtggaatatctctaaccctgaatataagaacacggtttttaatctcaatttatatgaaattattttttattttccttctctggggattaaatcactagaacatcataagtgattcatttctaccagattgaggacaatttattttagctgtttgagtttcagtaattctttctgtaaatgaatgtcctatattttaaaagttacatattccctactcgtctttcaacccaaatattcctgagttaga

SEQ ID NO: 285040 - DNA, 561 bp, Homo sapiens
tttttgtatgtttcatcctgttttctatttatttatccttctggttagtatttcactcacctatattcaaygcatcttattctgcctgtttcactggcttcttacttgcttatgtcacttctaatgagttttgaccactttgttttcttgcttttagagataaatattctcaaatcacacagtaaatctacactataaaaggttattaacttgtacaggtttatctgtaaacttggatgctaaaggtctacagaataatagcaattgtgatcaaatttattttaatctttccccccatattcaggctaactagatttcatttgtgagaagaaaaagatttaaatgtatagtcttaaagtattattcatcttagatatcctgatggtataaagatatcaaaaaatcaaataaggattacaataaataatacagatccccttctaaagaattattagactatgtgctccaaaagaaaaaatgtaaatgcaaataaagttagagagctaagatattggcaaaattcattctttggcataaatttagtactggaatgtaaaatct

SEQ ID NO: 285041 - DNA, 602 bp, Homo sapiens
agattgtgtattagctttgtttttctcacaacgaatttccacaaatttattggcttcaaacaacattcgtttattgcctcatagttttctggggttggagtccaggcaccaagtggctcatttagattctctggagtctcacaagagtgaatcaagttgtcagcagggctcttgggtaatttaagttggcagaattcagttccttgtaattggagaactgaaattcctattttcttgctggtcatcggctgggggtagttctcagcttttagagaactcacatgtcttcccatatggatccttctaaagcagcaatgacaggacgagtttctcacacacttcgatttctctgacagatccttttctgaggcagtctccctggctggaagcagtccttactgttaaggactcactcaattaaattgggtttctcagacaatctgggataatctctctattttaaagcccttaatcttaattatacctgcaaagtacctagattaatgcttcmttgaataagtcagggataggaatctggaggaaatagctttagaattctgcctaccacatactaattaactccagatgatcatagaaaaatg

SEQ ID NO: 285042 - DNA, 558 bp, Homo sapiens
aaaagtaaaataaaatttgtagtaattattcacctaattataagaacataaactaaaactgtattaatgtatagttttaccagaatagaaatggtgatgctgaaacaggttttagaaattgacctrtacataggtgtatgattaatttatgatgaaagaaagtgtggattagttcataaggcatgtggactacacttttaggtacatctctacactctgcacaaaaattataatgactttaagaggtaaaaatattttgaaaatcagaatatttataaaataaatgacaaattatatatagtatatatttacaacataaatatttataacattataaagtaaactggtatagatgatattttccaagcaagagtcaatatccaggaatcattaagaaaatatatctttatagttttataacaaaaattttgaagataaatgacagaaaactatcactaagtataattttaaaagcttaatatccagattataaaaattatacctatataaaagaataaacatttaatataaaaataataaaatgatataaatgatcca

SEQ ID NO: 285043 - DNA, 558 bp, Homo sapiens
aaaagtaaaataaaatttgtagtaattattcacctaattataagaacataaactaaaactgtattaatgtatagttttaccagaatagaaatggtgatgctgaaacaggttttagaaattgacctgtacataggtgtatgattaatttatgatgaaagaaagtgtggattagttcataaggcatgtggactacacttttaggtacatytctacactctgcacaaaaattataatgactttaagaggtaaaaatattttgaaaatcagaatatttataaaataaatgacaaattatatatagtatatatttacaacataaatatttataacattataaagtaaactggtatagatgatattttccaagcaagagtcaatatccaggaatcattaagaaaatatatctttatagttttataacaaaaattttgaagataaatgacagaaaactatcactaagtataattttaaaagcttaatatccagattataaaaattatacctatataaaagaataaacatttaatataaaaataataaaatgatataaatgatcca

SEQ ID NO: 285044 - DNA, 533 bp, Homo sapiens
atctttatagttttataacaaaaattttgaagataaatgacagaaaactatcactaagtataattttaaaagcttaatatccagattataaaaattatacctatataaaagaataaacatttaatataaaaataataaaatgatataaatgatccacataggtgagtagtaaccatttaaaaaactcagtcttrttagaaatcaaacaactcaataacaagaaaaataaccagtcaaaaaatggggaaaatacctgaatagacatttctcaaaagaaaacatacaaatggccaaaaggaatatgaaaaaaataacattactaaacatcagagaaatgcacattaaaatcacaatgagatgttagaatggctattataaaaaagatgaaaattcacaaatcctggcaagaatgtggagaaaagggaacccttacattcctattggttggaatgtaagttaggacagccattataaaaaacactatggaggttccccaaaaaactaaaaactgaattaccatgtgattcagccat

SEQ ID NO: 285045 - DNA, 533 bp, Homo sapiens
atctttatagttttataacaaaaattttgaagataaatgacagaaaactatcactaagtataattttaaaagcttaatatccagattataaaaattatacctatataaaagaataaacatttaatataaaaataataaaatgatataaatgatccacataggtgagtagtaaccatttaaaaaactcagtcttattagaaatcaaacaactcaataacaagaaaaataaccagtcaaaaaatggggaaaakacctgaatagacatttctcaaaagaaaacatacaaatggccaaaaggaatatgaaaaaaataacattactaaacatcagagaaatgcacattaaaatcacaatgagatgttagaatggctattataaaaaagatgaaaattcacaaatcctggcaagaatgtggagaaaagggaacccttacattcctattggttggaatgtaagttaggacagccattataaaaaacactatggaggttccccaaaaaactaaaaactgaattaccatgtgattcagccat

SEQ ID NO: 285046 - DNA, 533 bp, Homo sapiens
atctttatagttttataacaaaaattttgaagataaatgacagaaaactatcactaagtataattttaaaagcttaatatccagattataaaaattatacctatataaaagaataaacatttaatataaaaataataaaatgatataaatgatccacataggtgagtagtaaccatttaaaaaactcagtcttattagaaatcaaacaactcaataacaagaaaaataaccagtcaaaaaatggggaaaatacctgaatagacatttctcaaaagaaaacatacaaatggccaaaaggaatatgaaaaaaataacattactaaacatcagagaaatgcacattaaaatcacaatgagatgttagaatggctattataaaaaagatgaaaattcacaaatcctggcaagaatgtggagaaaagggaacccttacattcctattggttggaatrtaagttaggacagccattataaaaaacactatggaggttccccaaaaaactaaaaactgaattaccatgtgattcagccat

SEQ ID NO: 285047 - DNA, 582 bp, Homo sapiens
agcactttggttttagttttgacttggtttgaattgcttgacaggactggtcttaggaacttgcccactccatttgagtagaagcatggcctgatcacccgcggtgtgcttgtactggcacttcagtttctgtttttgacttgacttggattgcttgatactttggttttagttttgacctggcttggatttctggatactctaattttagttttgattttggtttagtgcaaactgcaaaagtgtgtgtatgccctttttacccgttctttgttttgtggtgtgcatgtggtgtgagcgcagtgttttgtctggaagaagcatagttcaggcacaaataagaccaccctactaggaactatgttgaaaactttcaaaaaggattttaaaggagactatagagtactatgacactaggaaaacttgaaactttgtgtgagatagactggccagcagtagaggtaggtgggccattagaaagaagcctggacaggtcccttatttcaaaggtatggcacaaggaaaccasaccagttcccgtacagagacacttagttacagctagttttagaccccctgccc

SEQ ID NO: 285048 - DNA, 601 bp, Homo sapiens
aatgagtttcttgttttcaatgtgtcctttttaaccccatcttccaaacataggtaaaatttggggtactcgataaagttacttattaatgtcacctgtgagcccaatattttcttattcttattttctatagagtgcttctcagaattaaatgtgtatacgaataaggctgggtgtggtrgctcatgtctgtaatcccagcactttgggaaaccaaggcgggggaatcaccggaggtcatgagttcaagaccagcctgaccaaaatggtgaaaccctgtctctactaaaaatacaaaaattagccagccactgtggcatgcacctgtagtcccagctactagggaggctgagacaggagaatcacttgaacccgggaggcagaggttgcagtgagccaagatcatgccattgcactccagcctgggcgacaagagtgagactccatctaaaaaaaaaaaaaaaaaaagtgtatatgaatcatatgagggtcttgctaaaatgcagattcttattcattaggtcctggatggagcatgaaattcttcatttacatgaggcttccaggagatgctaaccctgacaatgcaggggttactctt

SEQ ID NO: 285049 - DNA, 601 bp, Homo sapiens
aatgagtttcttgttttcaatgtgtcctttttaaccccatcttccaaacataggtaaaatttggggtactcgataaagttacttattaatgtcacctgtgagcccaatattttcttattcttattttctatagagtgcttctcagaattaaatgtgtatacgaataaggctgggtgtggtagctcatgtctgtaatcccagcactttgggaaaccaaggcgggggaatcaccggaggtcatgagttcaagaccagcctgaccaaaatggtgaaaccctgtctctactaaaaatacaaaaattagccagccactgtggcatgcacctgtagtcccagctactagggaggctgagacaggagaatcacttgaacccgggaggcagaggttgcagtgagccaagatcaygccattgcactccagcctgggcgacaagagtgagactccatctaaaaaaaaaaaaaaaaaaagtgtatatgaatcatatgagggtcttgctaaaatgcagattcttattcattaggtcctggatggagcatgaaattcttcatttacatgaggcttccaggagatgctaaccctgacaatgcaggggttactctt

SEQ ID NO: 285050 - DNA, 1172 bp, Homo sapiens
gcagaagacatgatccaatacttcaatgccaatacaaaattgtctctatatactaataataatcttaatattaaatattatacaatttacagaggcatcaaaaatataaaataggtataaatctaatgacagatgtatatgacggttaatattgagtgtcaacttgattggattgaaggatgcaaagtatttttcctgggtgtgtctgtgagggggttgccaaaagagattaacaatttagtcagtggactgggagaggcagactcaccctcaatctgggtgggcaccatctaatcagctgccagttcagctagaataaagcaggtggaggaacgtggaaagactagactggctaagtcttctggcctccatcttactcttttgttggatacttcctgccctcgaacatcagactccaagttcttcagtttttggattcttagacttaacactagtgatttgccaggggctcgcaggccttcggccaaagactgaaatcgcattatcagcttcccyacttctgagattttgggacccggactggcttcctggctcctcagcttgcaggctgcccttgtgatcatgtaagtcaattctcwtttcttcacagtattattcacttcctaaaattatatttatgatatatgtataactgtatctatgcwctgtgtatacatgtatgaatgcatttagttttaaacgtgcttattttctgatttgcctactttaagggcagggaacttcttgttcaagtttgtgtcttccagagtgaaaatgagccctaggaaggagcccttcataaataatttgtgaattgatgaatgaaatcaatagtaatctcctcattgcttctgggctatatctttgtggattttattttaaaagagagatgtgattattacctttgtcaggtaattagaatagcaataagtgtgtgtgtgtgtgtgtgtgtgtgtctgtgtgtgtgtatgtgtgtgtctctatcttcccctccctactacccatccaagcctctaataaccaaaacgctactctcttcttctaggaactcaatgtttttttgggtacattctcatccctaggcactcttctaaatagtttacatttattaactcagtgacttctcacagggactttatgagataggttctattatacacattttacagaag

SEQ ID NO: 285051 - DNA, 573 bp, Homo sapiens
tttcttcacagtattattcacttcctaaaattatatttatgatatatgtataactgtatctatgcaytgtgtatacatgtatgaatgcatttagttttaaacgtgcttattttctgatttgcctactttaagggcagggaacttcttgttcaagtttgtgtcttccagagtgaaaatgagccctaggaaggagcccttcataaataatttgtgaattgatgaatgaaatcaatagtaatctcctcattgcttctgggctatatctttgtggattttattttaaaagagagatgtgattattacctttgtcaggtaattagaatagcaataagtgtgtgtgtgtgtgtgtgtgtgtgtctgtgtgtgtgtatgtgtgtgtctctatcttcccctccctactacccatccaagcctctaataaccaaaacgctactctcttcttctaggaactcaatgtttttttgggtacattctcatccctaggcactcttctaaatagtttacatttattaactcagtgacttctcacagggactttatgagataggttctattatacacattttacagaag

SEQ ID NO: 285052 - DNA, 611 bp, Homo sapiens
aagcaccatcagtctaataatttagcagacaatggagtcttcttagcttttacacactatcaggtatggttcacagcagttagaatgcagcctgttgtatttccaagaccatctgctgcagcgaatcatgtaaacagtttccaaaagacggaaagagagagaaagatgatagatattaaagtcagagatggatctggagatttagagactaacacayactcactcacatacaacagcacttcagttttgggtctatgtgtgaaaccaagcatgccttaaacaaggaagacaagcttttcaaaggtgcaattggataacttctgccatagaaatggctgaattgggacacaagtggggacaattccagaagaagggcacatctctttcttttctgcagttctttctcaccttctcaactcctactaaaatgtctcattttcaggttctgtaaatcctgctagtctcaggcaaaattatgctccaggagtctcaaattttcttatttcatattagtctttatttagtagacttctcaatttttctattcatcacaagtaaaagcctgttgatcttaatcagccaagaaacttatctgtctggcaaatgactta

SEQ ID NO: 285053 - DNA, 611 bp, Homo sapiens
aagcaccatcagtctaataatttagcagacaatggagtcttcttagcttttacacactatcaggtatggttcacagcagttagaatgcagcctgttgtatttccaagaccatctgctgcagcgaatcatgtaaacagtttccaaaagacggaaagagagagaaagatgatagatattaaagtcagagatggatctggagatttagagactaacacacactcactcacatacaacagcacttcagttttgggtctatgtgtgaaaccaagcatgccttaaacaaggaagacaagcttttcaaaggtgcaattggataacttctgccatagaaatggctgaattgggacacaagtggggacaattccagaagaagggcacatctctttcttttctgcagttctttctcaccttctcaactcctactaaaatgtctcattttcaggttctgtaaatcctgctagtctcaggcaaaattatgctccaggagtctcaaattttcttatttcatattagtctttatttagtagacttctyaatttttctattcatcacaagtaaaagcctgttgatcttaatcagccaagaaacttatctgtctggcaaatgactta

SEQ ID NO: 285054 - DNA, 603 bp, Homo sapiens
cgtgtactcaaggtctggctcctacttataggtgagaatatgcggtattaggttttctgttcstgcattatttcacttatgattatggcctccagctccatccatgttgttgcaaaggacatgcctcatttttatggctgtgtagagttccatggtgtatatgcaccatattatctgtacccagtctactattgatgagcatttagattgattccatggctttgctcttgtgaatagtgctgggacaaacatgtgtctttatggtagaatgatttatattcctttgggtatataaccaataatgggatttctgggtcgaatgatagccctaagtttttggaggaattgccaccctgctttccacaatgctgagctaatttacattcccaccagcagtaggtaattgttcccttttctctgcaacctggcaagcatctgtaatttttttaacttttttataagagcccaaaaatatcttttaattgggatttatatttccaggagtagtcaaaaatctactagggtttatcgaaatgaaagattaggccaagtgtcctcacccctgtaatcccagtactttgggaggccgaggtgggtggatca

SEQ ID NO: 285055 - DNA, 603 bp, Homo sapiens
cgtgtactcaaggtctggctcctacttataggtgagaatatgcggtattaggttttctgttcctgcattatttcacttaygattatggcctccagctccatccatgttgttgcaaaggacatgcctcatttttatggctgtgtagagttccatggtgtatatgcaccatattatctgtacccagtctactattgatgagcatttagattgattccatggctttgctcttgtgaatagtgctgggacaaacatgtgtctttatggtagaatgatttatattcctttgggtatataaccaataatgggatttctgggtcgaatgatagccctaagtttttggaggaattgccaccctgctttccacaatgctgagctaatttacattcccaccagcagtaggtaattgttcccttttctctgcaacctggcaagcatctgtaatttttttaacttttttataagagcccaaaaatatcttttaattgggatttatatttccaggagtagtcaaaaatctactagggtttatcgaaatgaaagattaggccaagtgtcctcacccctgtaatcccagtactttgggaggccgaggtgggtggatca

SEQ ID NO: 285056 - DNA, 606 bp, Homo sapiens
tgttatatcctgtttattatgttttggttggtaaatttctaatattttacaactatcattattttactcttttacctgagggtactttacaatgactaatttttcacacgactcaaaaaagtttataattctgacactcctgacctatgaccacagacaatgggcatgagatttaaaattatattatataacaaaaatgtgtcattttgatttgatagtaaatgtttaatttaaccttttcacccttaaaccctattttattttgctctattgtattgctcactccaaagaaagcggttgccatgttgtgtggatttgcaacctaccaacagtaaaatgagagggcttggaagcagattcccctgcarctgagcttgagatgactccagacctggccagtacctcgattacaaccttgtcagtgaccctgagacagaaccattcagctaaaccaccccaggtggttatagtctgtgagaaaaacaaatgtttgttgcttcaagccactaagttttggagtaatgtattacacaagaaagagataactagtatacatctcatttcttttctaccaatattaaataattaataaaatttcaagtgaca

SEQ ID NO: 285057 - DNA, 606 bp, Homo sapiens
tgttatatcctgtttattatgttttggttggtaaatttctaatattttacaactatcattattttactcttttacctgagggtactttacaatgactaatttttcacacgactcaaaaaagtttataattctgacactcctgacctatgaccacagacaatgggcatgagatttaaaattatattatataacaaaaatgtgtcattttgatttgatagtaaatgtttaatttaaccttttcacccttaaaccctattttattttgctctattgtattgctcactccaaagaaagcggttgccatgttgtgtggatttgcaacctaccaacagtaaaatgagagggcttggaagcagattcccctgcaactgagcttgagatgactccagacctggccagtacctcgattacaaccttgtcagtgaccctgagacagaaccattcagctaaaccaccccaggtggttatagtctgtgagaaaaacaaatgtttgttgcttcaagccactaagttttggagtaatgtrttacacaagaaagagataactagtatacatctcatttcttttctaccaatattaaataattaataaaatttcaagtgaca

SEQ ID NO: 285058 - DNA, 600 bp, Homo sapiens
ctcatgttatttccactacaccaaaatgttgactgcagacatttccacagaatcttgcaaacagcacyaaagaattcatttgcaactatttgtacaatgcaaaatatttcaagaatttgaaatcgaaagacctcttacagaagtttattgaagattgttactttttgataaagcaaaatattttgcctaaactagatatacacctgcatttgaatctatttcattgtcctaccagacaataaatggcctttgaaggtaaaaatggatttactacttaaaatcattcaagcatatgcagtcagaactgtggaaagcagtaagtgcagttatcaagtaaaattcccaaagtgtataaccttctctcatccagcatgttaagccttttggcaaagtttattagcattttaaaaacactaaaatgaaaaataaagtctccctacttttagaataaactaaaatatactgaataccaatgcttcaggaactttaagaaacactttcaaagggggaggacacagccacgtggaacagctcccacacagggcctgagacagttggcgtgcttttaacagatcttcagagggacggtattgagaatgg

SEQ ID NO: 285059 - DNA, 617 bp, Homo sapiens
tcttggcacaacagagtgaaataaatatataagttatgaccatttataatcttcttggagtgtgattctctggttccaactaaaagactataattattgctccttccaaagtaatctggaaatctactaaatccttgggctagttctgagagatatattgctattaatatggtgactgatacgtgtcattggaagggtcctggaaggtcatctagatctctacctcatttgaataaacataagttgctttggtttggggacagggagacagggacaggacaaatagctaattgtgcaaaaatgcttggaaatgactcaaccacttaatacctgtgttaatctgggaaaatygcagaagcacaatgggcttaagttctgtcatctaaaaataaaataaaataaataaatggaaaagaaaaacctcatccgaattccaattcccacccagggctacagggaggatctccttcagaaatgtgtctgaaaatgctatgcaaattatatcgcactcagacatgagaagcatattcttatttttattactgtgtcttatctgtcagaaaaggtcagatggtcacatgagcattccaattctggtcagctagaggcaacagctc

SEQ ID NO: 285060 - DNA, 520 bp, Homo sapiens
tgtcttctttgatcaatggttcaaggataagacttcagtctgatatttttgttctgtttagctttgttttacccggcttttgattaatgcttgagtagactctttgcaccaggaaatcgtggatgaccagtttactaatagctaggtttcttttctctaagagtctagatgagacagacagaggtgtagccagattattagacaaacagatcaaacaatgaaatgtctaaaggctggaggcaaaaaacaaaaacaaaagctaaaacaaactaaaaaacaactgaaaaacagatgatggccaaggacatgggtatacaatcagattrtttgtgctctctatccatcttgcaacttgtccttgggaaaattatttaaacaaactagcctcatagttctcatacataaaataaaaataactgaactacctgcctcttggagttgttgtgaatggtactaagatatgctatggctaggacagtgccttacacacagtgaatattcagccaaagatggtgaggct

SEQ ID NO: 285061 - DNA, 520 bp, Homo sapiens
tgtcttctttgatcaatggttcaaggataagacttcagtctgatatttttgttctgtttagctttgttttacccggcttttgattaatgcttgagtagactctttgcaccaggaaatcgtggatgaccagtttactaatagctaggtttcttttctctaagagtctagatgagacagacagaggtgtagccagattattagacaaacagatcaaacaatgaaatgtctaaaggctggaggcaaaaaacaaaaacaaaagctaaaacaaactaaaaaacaactgaaaaacagatgatggccaaggacatgggtatacaatcagattatttgtgctctctatccatcttgcaacttgtccttgggaaaattatttaaacaaactagcctcatagttctcatacataaaataaaaataactgaactacctgcctcttggagttkttgtgaatggtactaagatatgctatggctaggacagtgccttacacacagtgaatattcagccaaagatggtgaggct

SEQ ID NO: 285062 - DNA, 1207 bp, Homo sapiens
ttttgtaaagataattgtaaaatgtgtacatctagtgaggaggttagtcctatctacaacccaaactccttttcctgcaaccaaaaggatccatgttagaggaagacctgtgtgcctaaacttatattagatcctaccagtastcttcaagataagacaagacacagactatgcctgggaggagatggcaatctagtgagataagtaagttataaatgcacacatgacacagacacaaaaattgaaaaaaaagagaagagtatgcagacaaatatttgttcagatttaaaagaggtttctggaatgattaggaatgcagataactaataggctggagaaacagtccacattgtgcaccactttgaccctgctccttggctgttttccaccacaattagttgtctggcaaccttgcaagatcttaataaaaataactcataagatttagtcacatcagaaaaatcatcaaaatgtgtgattgcaaatgttttgaaagggtcatgagctaaataagcatctaggatatacatttaaaaaattgccttatctctttcatctccaaagaaaacaccagaaggatactgtcatatcttcggcactctcwttttgtaaagataattgtaaaatgtgtacatctagtgaggaggttagtcctatctacaacccaaactccttttcctgcaaccaaaaggatccatgttagaggaagacctgtgtgcctaaacttatattagatcctaccagtactcttcaagataagacaagacacagactatgcctgggaggagatggcaatctagtgagataagtaagttataaatgcacacatgacacagacacaaaaattgaaaaaaaagagaagagtatgcagacaaatatttgttcagatttaaaagaggtttctggaatgattaggaatgcagataactaataggctggagaaacagtccacattgtgcaccactttgaccctgctccttggctgttttccaccacaattagttgtctggcaaccttgcaagatcttaataaaaataactcataagatttagtcacatcagaaaaatcatcaaaatgwgtgattgcaaatgttttgaaagggtcatgagctaaataagcatctaggatatacatttaaaaaattgccttatctctttcatctccaaagaaaacaccagaaggatactgtcatatcttcggcactctc

SEQ ID NO: 285063 - DNA, 561 bp, Homo sapiens
cgtgggatgcacaattgagagaaagagggagagaggcagctgatcttccctagtgcccctagcatagtagtcgggaggtcaggcaatttcctaaactcaatgtactatcatagcaataactcaatccataactccttccttattattctatatttcgcactagaaaaaaartggcacttctctggactggctatattgtttacaggaactaataccctgttcttagggtcttcccaatgcaaaattggaaaaagtatagaaaaacattctcctggtattttattactaaatctttagatatacatcttaatttttggatgcttctatttctctcacagccccagaaatccagcgtttcttaggactttcgctatcctgagcaatctaccaaaaccaccttctctaagaagaaccctatgtacttccctgttttggtcatcttttccatagaaagaggaaaataaatgagttcatactaagacattaatgatagtaatttgataaatggacttctctgttaatggcaaagctatttcttttatgagtctcttattggttcat

SEQ ID NO: 285064 - DNA, 509 bp, Homo sapiens
tttcaactatataaaaatgtgaaaactattcttagcttgtggactgtacacagatagcatgtgtacatggcctatgggctgtagtttagcaacccctgatgtataccacaaacaaaataaaacattagcatgatcactgctagtaatagatcttctgggttttatgggagcatatggagctcttgagtgtccgggtattgcttaaggaaatgatggcttctatgctggaaccacaaaaagagaaaggataatcctgttaaagccaaagagaagagtatgtacaagagcccagaggcaggagaataaagtatgaccagagtgtaagatgggaaatagtgagaaacgtgcagtctatagaggtaagcaggggccatattatgaatagccttgtatgtcgtataaaggattttggagccgtaggaagcctttggaaggttttaagtataagattaaatttgcagtttaaartatccctatggatgcacatggaaagtggaatagacatagct

SEQ ID NO: 285065 - DNA, 611 bp, Homo sapiens
gacaccctttttacagccaaggtaagaatctagttctcttgttgtaatctagttctcttgttgtagcaagtctatttgtcactcatgggaattccatggaattaggacaaatgccaattatttctactgggcagtaataaatatttgagttcactaatcagtgaactattcactactttaaaattttatcctttttttactcatttcctcaagtgattattgtttgaggtccccacaaaatgttgacattcatgaagaactattttgacctcatcatttgaacagccctcaaagcttccaaaaatcgaactgtggatgattctgccttttcctgtgcctggggtgagtctaatggcttcacccaggctcaagtttctctagatcacattaatatactgcttacagcaaatcagaaagactcctaacttgcttagtttaatgggcaaggacatctctgctgtgttatatcttggggacaaaccamtaaaattgaaaaatgggaagtaggaataagaggacaaattggttagacataggaagcatcccttttttctctgactgcttagggacagatggtgagccaatgaaaagtaagcagagttgggatgtca

SEQ ID NO: 285066 - DNA, 579 bp, Homo sapiens
tgggaatgatatgatttcagggtattgtcattaatgcttggataaaactcatctaagtattaattgtgtagctaaaagcagagcttctgagtgtacataataataagccttgtgatgtaagaagcaggatgatggacaaagaagacatctgtactgtgttaccaagaaacaagtgtcttcttataaagaaagtcgtatctggtaagacatttcattggaaagtatgtgagtgagggggagactttttggcctgttttaatacattttctgttgctataacagagtactgcagactaggtaattcataaagaataaaaatttatttggcttatggttctggaggctggaaagttcaagagcatagtgttagcatatggtgagtatcactgaatggaagaaggacaaaaggcagaagaaagcatgtgaggcrgagacaaaaagggggctgaacccctgcggtaattaacccactccagtgataatggaattaatccattaagaagggtagagcccctcatgactgagtcacctcttaaagttcccacttttcaatactgttgcattgaggattaagtttcc

SEQ ID NO: 285067 - DNA, 563 bp, Homo sapiens
cctatggggaaagcttgattaattgagtaccagttagttaagtttggatgcatggatkcatcaccttaaatgtatccaagcttaactaactggtattcaattcatccgaaccctagttttaaactagggttaaactaatctccatattacacctcagcagctaacacagctccccctttcaaaataaatcggttatcatgtactagtctgtgaagacaacatagatattgtgaggaaagtctgtttgtcaacttcccaatggtaagtgagaatgtgcactgggagtgtggcctttcagggagtgctccctgccctatatgaattggggtaatctgcaaatgtggtagtcatgctcctggataattatcttggaagcattaaaataatcaagtgaccctccaggtgcattttaagaagtgattaatttaacctttgaataatgacacaatatgactatttcatacactgtcatacgagagagaagtatctgtgcatatagcagtctttgattgccctcaaataatgctttgtttttttcattacatttattacattttttcact

SEQ ID NO: 285068 - DNA, 484 bp, Homo sapiens
agcaagctattcacattgaaaaacataagttacaattccatttgctcagtgccaaataaaatgtacaattttcccatgatattagaaatgtaaagcatacaaaacctggagttctacaccttcatacccaagtaaattgtttcctcccaggccttttaccccacttatgcatgtaaaaataggaggtaaaccacttagaagacccttcataccagttgtcctgtgagtaacagaggattgtgtggtcacagggagactagtgagtatgcatttgaaaaaaaaaatctgraccctagaatctgctttagattttcctaaggtagatccacacttctttttccaaattagtgaagtcaacaactctgcaatcctacaaagatctctaaattatgcttatgtgaaatacatgaaaggtgactatttccttaggcataataaagtcatttcaatactagtttgatcttcttagagagaaacataggcg

SEQ ID NO: 285069 - DNA, 617 bp, Homo sapiens
atgctcaccctgatacaggtttaagctgttaaagctaatgaaaatattgttcaactttgctaactttccaaagttgtaaagttattttttaggcataagatacagctacaggtattttaaatctcatataaacctctatgtggaccaatttgttcttcttctcttgaaaaaatttaaaatacattcactgtagacttgaacagataattttcagagggcccaattattcttagacccacactctctctgagtgtcaggagccaaggaaggatattaactctttcgcttggctgaagaacattttaatgagttactattataagcagtttttctctcaaagcctaaggcagaactgttacacggcataacatggtaccttagtggccaacagatgactatgtctttatgaacaatcaacttttaaccaagcagtgacaggcactcaggggattctaccttgttaacatatagtctttttctacacacaataagggaaacataytggagcttatgtggctaaatgcatttatgttctttcctttttaatcattttttttaaaatcacatgggtttgtcctactttaaccatgcccagaaaacctctgcccattgtgcta

SEQ ID NO: 285070 - DNA, 574 bp, Homo sapiens
ttgtgctttaaccacatactattttcttagaagcaccaacttgcttctgccagagggcttttgtacatrtatatccagacaccaccaccccaaaacacacatatatacaaacgacttcaccagggaagcctaatctgattctccaaactgcctcaaatcctcctaataaaggcttttattaaactgtaccacttccagccagcaatgtctgtcctctccactaaactggaagtttcatgagagccgacataatggcaatttttgcttttgattttttacctttagccagtacatgaaacactatgtagtaagtacaaaataggggactcagtgaatatttatggaatgaatgaatgacttctaagtgaaagcatttctattatacagggttattggtcaggtttttcaaaggaaatagagtgcaatatttttctcagcttctgatgctgaattgctgtatcatcttgagtcaattgcgtcttattatgctgttagttacctgatccataaaatggggacatgacacatttttcctgtgtcaacactcattataaataactctaaatacatcctg

SEQ ID NO: 285071 - DNA, 622 bp, Homo sapiens
aaatgcacttccaaaatgggtatgttgatactgaatatgattcttcctaataggatggaagtatgccccagtggcattgatttagctctccatttttggcctcccccctccttttaaactcccagttaagtagcrcagtggcttttcacctctccgcctggttcatctggcccagtagggctccttctcccaatttgcccacactgagccatgagcactaaatgaagcgaataatttggtgcattgttggggggggtggcaatggcggtgggaaggggaggggacagctgacagtgaatggtgtcagctgcagaggcagcagaaaaagccgacatcttaataaaacagcctcaggcaaaatcccattaaagccttcagaagcttgtttccctgcagttgagcaggtaggcgttgagcactacgaggcagccctgagtgctctcagggagcccagttcaaaaaaaattttttttgagtgcttttttttcttaatataaatcatctaccagcatagctcctcagagtcatttgcaaggcagagaaagagagagccagcacaggagagagaaaaggagggaggaagggaaagagctagggagagacagatataaagggatgaagt

SEQ ID NO: 285072 - DNA, 489 bp, Homo sapiens
ctcttttctttttaacacaccttagcaatttttttttctgattgacagaagtccctctttagagtgtcagatgaagacccctataaaataggcttgcagtagatggctaggtttaatgctctagtctgggccttaggtaaacatctttctttccccctttatttcccttgggtttgttttctactatatcagaatgtaaaacatataaggcagagaatggkgttaacatcatagattacggcacaaggagctaaggtggtcactcagtatgctgttactctagatatgtgatttcccggcaaaaggagtctttgtgacttcattgggtccaaccagccttagtgactcttttttggatttagtagaagcagattaatagagttggtggtggtggctcatttgttgttattgtttgtgaagtttcctttttgtgtgtctatcatggaatgtgtcatgactccagcaagaaggtcaaggattttaggtttc

SEQ ID NO: 285073 - DNA, 566 bp, Homo sapiens
cacagagaatagaccagagtaaattcagcctaaaacacttagagtttcccagtccttagaacgttactgcctggaattggtaggtagtatgctcctcaacaccctgggttgtgttttctctttaatcaatttttcagccacattgaattattatgactgtgtctttctaggacccaaaatgtaaatttacctacagtgacactatggaattcataacctaccayctttttgactgttagagagaaaggaattttccctttctttccacagtgaaagttcccaggtaagaactgggaaatgaaattccatacaaaatggttcacattgtatcacatgcagatcagacgaggctcagtattagaagaagcagttctatcctcagcccaaggaaagtcagggtcttctctgtgcaggagttagtggagagtatggaatgtaatggttcacagctcctctggaactacatggttggaatgggagagtatcaatttccaaacagaagaagaatattatccaaagatgttatgataacaaatgttcactccaacctctttctccactccccc

SEQ ID NO: 285074 - DNA, 566 bp, Homo sapiens
cacagagaatagaccagagtaaattcagcctaaaacacttagagtttcccagtccttagaacgttactgcctggaattggtaggtagtatgctcctcaacaccctgggttgtgttttctctttaatcaatttttcagccacattgaattattatgactgtgtctttctaggacccaaaatgtaaatttacctacagtgacactatggaattcataacctaccatctttttgactgttagagagaaaggaattttccctttctttccacagtgaaagttcccaggtaagaactgggaaatgaaattccatacaaaatggttcacattgtatcacatgcagatcagacgaggctcagtattagaagaagcagttctatcctcagcccaaggaaagtcagggycttctctgtgcaggagttagtggagagtatggaatgtaatggttcacagctcctctggaactacatggttggaatgggagagtatcaatttccaaacagaagaagaatattatccaaagatgttatgataacaaatgttcactccaacctctttctccactccccc

SEQ ID NO: 285075 - DNA, 607 bp, Homo sapiens
tcagtattagaagaagcagttctatcctcagcccaaggaaagtcagggtcttctctgtgcaggagttagtggagagtatggaatgtaatggttcacagctcctctggaactacatggttggaatgggagagtatcaattyccaaacagaagaagaatattatccaaagatgttatgataacaaatgttcactccaacctctttctccactcccccaatttctctataggctcatcttttccttttatggagacattacatttcatatgaggttgcctacttgcttaatagtaatagccaacacttatacagcctgactataaaccaattcttttcataatgtctctctcatctctctctctctgtgtgtctctctctgtctccgggcgaccacaatcttatgagatagatgtaatgtgccgcccagatctcctttctaggaaggacttgttgcccatggtaaaagaaatgtagcagtaggcagaagtcttcggctgtcagctcctacagtaactgattcagctgcagacagttgcctcatccaaggccatgtcttttcccaagataactctcgtctgataactgtttaatgccggcattaaaagttc

SEQ ID NO: 285076 - DNA, 607 bp, Homo sapiens
tcagtattagaagaagcagttctatcctcagcccaaggaaagtcagggtcttctctgtgcaggagttagtggagagtatggaatgtaatggttcacagctcctctggaactacatggttggaatgggagagtatcaatttccaaacagaagaagaatattatccaaagatgttatgataacaaatgttcactccaacctctttctccactcccccaatttctctataggctcatcttttccttttatggagacattacatttcatatgaggttgcctacttgcttaatagtaatagccaacacttatacagcctgactataaaccaattcttttcataatgtctctctcatctctctctctctgtgtgtctctctctgtctccgggcgaccacaatcttatgagatagatgtaatgtgccrcccagatctcctttctaggaaggacttgttgcccatggtaaaagaaatgtagcagtaggcagaagtcttcggctgtcagctcctacagtaactgattcagctgcagacagttgcctcatccaaggccatgtcttttcccaagataactctcgtctgataactgtttaatgccggcattaaaagttc

SEQ ID NO: 285077 - DNA, 547 bp, Homo sapiens
tatgtctgcgtgtcagttacagcctcaaatttatcagcaaatcatcttgactcttcttttggaatatatccataatagagctgtgtcttaccatccctatttaatactcttcttcaatcgataaaaaaaaattaaaaaacctttagctatataagaaaaaaacatcctaaagagtatctgaaaacctacctctcatcactcaaacagagcaggcaagagccagaaaatgagcttaaaagcattttagagatggtaggtggtacagacctctacagctgtcctgccaccatccaggagtgccctgtrtgtaagtcctaataaactcatctactcatcaaactggacttttctagtaatatttttggtctctcagtttcctttcagtttgggagagacaatacagtcctgagtttttctcataccactgggtgtgggcttgtgctgctgcagtgagccaagcaacagtattgtggtgcctttagggaagcaaggatgtggctcgactgtctgtcgggctggttgtggatgcactgagctgaatgactgt

SEQ ID NO: 285078 - DNA, 655 bp, Homo sapiens
ggggcactaactagtggagctgtgagaaaaagaccactgtcctccagaccctggaatsgtagatccaccaacagcttgagcctggaaaagctgcagatactcaacaccagcctgtgaaagcatccaggaatgaggctataccctgcaaagccacaggggcagagctgcccaagaccatagggatccacctcttgcatcagtgtgacctggatgtaagacatcgagttaaaggatgtcattttggagcttctttaagatttgagtgccccgctggatttctgtcttgcatggggcctttagacacttcattttggccaatttctcccactgaaatgggtgtatttatccaatacctgtacccccactgtgtccaggaagtaataacttgcttttgattttacaggcttataggaagaagggacttgccctgtctcggatgagactgtggaccatggacatttgagttaatgctgaaatgagttaagcctatggagaactattggaaaggcatgattggctttgaaatgtgaagacatgagatttgggaggggccatgggcagaatgatatggttttgctttgttcccacccaaatgtcatcttgaattgtaactcccataattcccatgtgttgtgggagggacccactaaaagat

SEQ ID NO: 285079 - DNA, 579 bp, Homo sapiens
ataagagactcttccatagcaaggacagctggtattggcatctgtggtggcaatggggacccccagtgttctccaacttaccttttctctataagaatatgtcctgggtgctgggcaagatgccaagctagacacagccagatggaacagctgctaccaagagaccaaaatgactggcacactcctaacagatcttcagagggaaggcactgagagtagacagagggaaaacatacaatataagcggaaggggaagyaagctgggaaccctgcaacataccaggactgtttcctggcccccagtgattctgaggtaatgggtgagttgaaatggtaaggagcaatctcttctggccatgggcctatgaatgtgggcacgaagatacccctcaaccaccacaaacactcaagatgacagggagagctgcttagtgaagtggtaggggcagcacaccagctgatgtgaagaccagagggtttgatgtgacagcatcgttagtgaagtctgaccagggatgtccatctacctaggttcagcttactcccataggagactttagccctaggagaaatgttgga

SEQ ID NO: 285080 - DNA, 579 bp, Homo sapiens
attgtgttacaagtaattcttaattacttaataaaaagttaaagcttatagctctcaaatgtaaaggcaacgaatgcatcttatttatgatgctataaactgaatttagacatcaaggttatctttgcaatgaaaggatgtgattgggttttaggcatacatttttaaaagactgatgactgttttttgcataaatatgctcaatgtgcttggataccctaagtcctaaatacctcactccctaaaataactacttgaatgccctctacttttctggttaccctggagaaagtcaggaggatcaataaccaacactctaggataacttgaggtcactagacacagcyatgctattattataatagcttccacaatataataatggaaaagtcatctccctccggcctgagaaagaatggctttcaggaaaatgtttataatatcccttaccagcaccattgaggataccccactttcctgatttctagcctttaactccaactaaaattgggatcttctcttttcctgtccactaagtcagggaggtgaatgccaaaacacacttgcttaggccttatg

SEQ ID NO: 285081 - DNA, 560 bp, Homo sapiens
gataggcagaacctatgagaagaaaaatctagaactgtgagctgtgccctgagccacactgacctatggttgtyatcagctcatccacagagaacataaaaattaaagcactagaaaatagggttaagaactggaccccgactctccatagtgttcaggctacctgaatcatccttccttagtggaagccctggcactgatctttcagcaacaggctgcacaatctgagttcaggacttgatgacatgactgcaattcctgttgcatgtcaaagtgtcttcacttctgtattagtctgttctcacattgctataaagaactacgtgggactgtgtaatttacaaagaaaagaagtttaattgactcaccgttctgcagactgtacaagaagcatgactggggaggcttcagaaaagttacaatcatggcagaaggagcaggagagagaaagcgaagtgctacacacttttatacgagaattcactctctatcggagaacagcaagggggaggtccgcccccatgatccaatcacttcccaccaggcccctcctccaacat

SEQ ID NO: 285082 - DNA, 542 bp, Homo sapiens
gttgacaaacccatgctgaatttcctgtagagattcccacaatccggattgatcatatactcatcatgcagtttaacatgttcctgtctstgtatttttcccaatttggtagtgagatcttgaaagtgtttcagactcaggtttaatcttttgggcccaactataagtgacagttggcaaaaatacgatagtgaaaaggggtctggttttctttttttatgatgttagcaaccattaatgtttatatctattcattggggattaaaaatggtgatattctaattctgtcatttatttgtctttcatcagtgagaatccttttacaaaagcatacttgtcataagctactctttggttaccgtgtgtgatggtttaaactggggaggcaaaatttacaattaattattttccagacttcaaggaaataaatgggctccctgtcattctccaaagatggccatttttaaaaaatattgttgtaagtatggatttaaacatttcgattgattccaatccactgcagtttttatcattactgaagt

SEQ ID NO: 285083 - DNA, 1121 bp, Homo sapiens
gttgacaaacccatgctgaatttcctgtagagattcccacaatccggattgatcatatactcatcatgcagtttaacatgttcctgtctgtgtatttttcccaatttggtagtgagatcttgaaagtgtttcagactcaggtttaatcttttgggcccaactataagtgacagttggcaaaaatacgatagtgaaaaggggtctggttttctttttttatgatgttagcaaccattaatgtttatatctattcattggggattaaaaatggtgatattctaattctgtcatttatttgtctttcatcagtgagaatccttttacaaaagcatacttgtcmtaagctactctttggttaccgtgtgtgatggtttaaactggggaggcaaaatttacaattaattattttccagacttcaaggaaataaatgggctccctgtcattctccaaagatggccatttttaaaaaatattgttgtaagtatggatttaaacatttcgattgattccaatccactgcagtttttatcattactgaagtwtcttccacagtaatgatcttagttttcaagtatagagaaatgataggatcagaatattccataattactcattgttctacctcatattgcatacgcaagtatctcagaataataaatataatactactgccaatatggcagtagtgttattcccattcttccctgtatttttcagttttactacatctgactgtcatagctatagtcattccatactatactcttacctcttagctcttatgtagctgtagctctatgtttacaggtgactatatatttaatgttcatggctagttctatgttwacatctctctaattgtttggtttcctgaagaattttctctggtatcagggatgatgtgagttccctgagttcttacatcccaatagcagtttgtctgagccacctttacacttaaaaatttattttactgattataaaatcctttttccatacatcattttcttgaatatttaaatgtttatctattttttctgagataaaatgttaaaaattcttgtgataatataattttcttttccttatatattaggtattattttacaaagaaaataaa

SEQ ID NO: 285084 - DNA, 563 bp, Homo sapiens
tgaccactctttgaggcaatagatggcaaatgttttcctactcagaaggcaaatgtttcctattcagaactttaaaaggtaccagactctctagaaaaaaacaagggaaggagattctctacagaatgcaaatttcccccacaagagaccactttccaaaatatgycaaataagcatattttatggtaaaatactttgaattttttcaggacctgctatctgtcatgtgatcctatgctggagccaggttggaattgtgtatcttattgctacaaataatctgctttgttagtcttaagatctctgtttcaaagttaatgcttgtcagctgtgcctgaactgcaaagggaggagggtataatgaggtacgtctaaccctactccttgtcatggtctgaacttttttttcaggtttctttggaatccccttggctgagggggtccattcagtcaattggggggcttagaattttatttttggtttacagttagttttagtctttcaggctcaaggcttttcttggtttgccgttctattttaagaagtcaccaagacattgatt

SEQ ID NO: 285085 - DNA, 563 bp, Homo sapiens
tgaccactctttgaggcaatagatggcaaatgttttcctactcagaaggcaaatgtttcctattcagaactttaaaaggtaccagactctctagaaaaaaacaagggaaggagattctctacagaatgcaaatttcccccacaagagaccactttccaaaatatgccaaataarcatattttatggtaaaatactttgaattttttcaggacctgctatctgtcatgtgatcctatgctggagccaggttggaattgtgtatcttattgctacaaataatctgctttgttagtcttaagatctctgtttcaaagttaatgcttgtcagctgtgcctgaactgcaaagggaggagggtataatgaggtacgtctaaccctactccttgtcatggtctgaacttttttttcaggtttctttggaatccccttggctgagggggtccattcagtcaattggggggcttagaattttatttttggtttacagttagttttagtctttcaggctcaaggcttttcttggtttgccgttctattttaagaagtcaccaagacattgatt

SEQ ID NO: 285086 - DNA, 593 bp, Homo sapiens
tagtcttaagatctctgtttcaaagttaatgcttgtcagctgtgcctgaactgcaaagggaggagggtataatgaggtacgtctaaccctactccttgtcatggtctgaacttttttttcaggtttctttggaatccccttggctgagggggtccattcagtcaattggggggcttagaattttatttttggtttacagttagttttagtctttcaggctcaaggcttttcttggtttgccgttctattttaagaagtcaccaagacattgattggtagtattgtgtgctcagagggggctcactggcaggcaggactcagccactctgcaggagattccaccaaatacccacctctacaagtctcttcccttggtctgggacataccccagagggtactcctcctttccatggtgggsccctgcacactgagtgagtatcaaatgggtgaaatgtgaaggggttctcatgttgctttcttctgtagcttttagggcagtttccgccattgttcccagctgtgttcagttcagaggctctcccatgtaaggtcttcaaggaaggggaatggcagttacctggctaaggggaaa

SEQ ID NO: 285087 - DNA, 561 bp, Homo sapiens
tttgaggacagctgtaagaacaagagttctgggaggctttcaaagtgggagaacagaagaaaccacatttgaacttctcttaacttaaaaaaaaaaaatagcctacccaattaactaactgaattctaaggagataagcaaaattattgttaatttattttatttattagagacaggatctcacactatcactcaggctggagtacagtggtgtgatctcagctcactgcagcctcgacctcctgggctcaagcaatcctctagcctcaggctcccaagtagctggtactacaggcacgcaccaccatgcccagctaatttttttgctttttggtggaggtgaggtcttactatgtttcacaggctggtttcaaactcctgggctcaagcaatcctcccaccttggccttgaaaagcgcgggattacaggcatgagcacagtgcctagccttaattaatgttaaattagtttaaaatgtattacacctaargtatttgtggggcaggtgatggagggaggtggtagtggctggagtggggactgtccttggcagatggcgt

SEQ ID NO: 285088 - DNA, 607 bp, Homo sapiens
ttctgggttataaagtcttatctgctcttcataggatccatggggaaggtaatgtgtgcacagttcacacacattcagctcactctccaccataagtgttaagatttcaagggaggtgtggccattcccagttcacactgaggcccagaagactgaatggctcctgtagtttakaactaatcagagtgactctttggtttctgccaatgaagacccaacccaagtagctccagcaaaggggcaggtgtttcctgtgacccccctcagggaggaaagcccagctggccttggcaatggtggaatttgggctctgtccttcttcctagtcagtgcccctcggagtgggctgctctctctcctcccagccccacagggcaggagacctggctgctcacatcagcccatcttggccactcgagaagaactgactggcttcccttgattcctggtagaaaatcctgggaaaagatggcttgaatcatggtgtgtaggttcttacatttggatcagtcacctgtgagcagagattggagccctgtgatcagccaggtgggcatttcagccctagaccaccactgtggccagggagtcaggttctggaggaaga

SEQ ID NO: 285089 - DNA, 556 bp, Homo sapiens
gaggaggctgggtgggaagcaggtgggttyagctgtaaaataaaccttattcagttgatgaccatgcattctgaagtccctgcacactttgaaatctctgagaagaggtcctgccgagtccttctgcagctgctctcaagctaggaacggcggggctgctcctgaccgctgcttctcccccagccctgggtggggggctgtgaatacccttcgggtcctcttcaggcttctcaggagcagggaaggaaggccagcacaactgcggatgccctggaaaagccagcccacagccggggtccctatgagacagcaggaatctgtcagtgtccctgaggaattggggatcccagagtggggacagggaggcccaggggaggggctggggaagggacagcttcttgtagccacatccaccaggagccaagccccaggccctgaatttcatccagatagacactcaggagattgggaatttatctttgtgtcaaaggtgcttaccggattcacctgccaaatgttgactttatgccgatttacatatcctatgttaattagc

SEQ ID NO: 285090 - DNA, 556 bp, Homo sapiens
gaggaggctgggtgggaagcaggtgggttcagctgtaaaataaaccttattcagttgatgaccatgcattctgaagtccctgcacactttgaaatctctgagaagaggtcctgccgagtccttctgcagctgctctcaagctaggaacggcggggctgctcctgaccgctgcttctcccccagccctgggtggggggctgtgaatacccttcrggtcctcttcaggcttctcaggagcagggaaggaaggccagcacaactgcggatgccctggaaaagccagcccacagccggggtccctatgagacagcaggaatctgtcagtgtccctgaggaattggggatcccagagtggggacagggaggcccaggggaggggctggggaagggacagcttcttgtagccacatccaccaggagccaagccccaggccctgaatttcatccagatagacactcaggagattgggaatttatctttgtgtcaaaggtgcttaccggattcacctgccaaatgttgactttatgccgatttacatatcctatgttaattagc

SEQ ID NO: 285091 - DNA, 556 bp, Homo sapiens
gaggaggctgggtgggaagcaggtgggttcagctgtaaaataaaccttattcagttgatgaccatgcattctgaagtccctgcacactttgaaatctctgagaagaggtcctgccgagtccttctgcagctgctctcaagctaggaacggcggggctgctcctgaccgctgcttctcccccagccctgggtggggggctgtgaatacccttcgggtcctcttcaggcttctcaggagcagggaaggaaggccagcacaactgcggatgccctggaaaagccagcccacagccggggtccctatgagacagcaggaatctgtcagtgtccctgaggaattggggatcccagagtggggacagggaggcccaggggaggggctggggaagggacagcttcttgtagccacatccaccaggagccaagccccaggccctgaatttcatccagayagacactcaggagattgggaatttatctttgtgtcaaaggtgcttaccggattcacctgccaaatgttgactttatgccgatttacatatcctatgttaattagc

SEQ ID NO: 285092 - DNA, 553 bp, Homo sapiens
cagcctgccacactctttcttgacctggctgtggtgttctgtgctgggggaagatgagagggaggacaaggactttcccaggactccagagatcaccattrgtgccctgcactctggagaacacagagtgttggctgtgtgttggtggacactcttcaagcctgggcacctgagcaatgtcggctcactctcgtgagctttgagcagagacactgtgctttggagcatgtcacccgcagaatccagtaatctggccactgccagaggttcacttaatttattgtagaagtgggttagttattgtggaagttgccttctgataaaaaggttgaagttcagctcctgtgttctctctgtccctcatgcttccttgcccttccacattctgccatgggatgacagattaagaaggccctcaccagaagcaaagcaaaagccagcaccaaggtcttggacttcccagcctccagaaccataagataaataaattacttttctttataaattacctagtctgtgatattttattatagcagcagaaaatgaactaaaa

SEQ ID NO: 285093 - DNA, 553 bp, Homo sapiens
cagcctgccacactctttcttgacctggctgtggtgttctgtgctgggggaagatgagagggaggacaaggactttcccaggactccagagatcaccattggtgccctgcactctggagaacacagagtgttggctgtgtgttggtggacactcttcaagcctgggcacctgagcaatgtcggctcactctcgtgagctttgagcagagacactgtgctttggagcatgtcaccygcagaatccagtaatctggccactgccagaggttcacttaatttattgtagaagtgggttagttattgtggaagttgccttctgataaaaaggttgaagttcagctcctgtgttctctctgtccctcatgcttccttgcccttccacattctgccatgggatgacagattaagaaggccctcaccagaagcaaagcaaaagccagcaccaaggtcttggacttcccagcctccagaaccataagataaataaattacttttctttataaattacctagtctgtgatattttattatagcagcagaaaatgaactaaaa

SEQ ID NO: 285094 - DNA, 579 bp, Homo sapiens
ggtctgaaaggaggtaatcattactccaaggagttctgcctctacatggcacatttcaaatcttccataacaaaaaacccagaggtcagatgttccagaattgagtggttgcaggctcaggacagacatcaagttcttgcctctccctgcctcggggctgtgcctccctcagctgctggcttggagctcaggcctgtcccctagggtcatagaacagctgtaatggctgccctggcatgaccttctcctaccgtcctgmagagcagcagaaaagctactgctccttcctggtcctctctctctcactcaccattgtgatataatacacatgatacaaaatccccgattttaaccattttaaagatactattcaatagcatgtaacacatttacaacattgtacaaccatcactactctctagttccaggaaattttcatgaccccaagaggacatctttactcattaagcagtctctcccattctcccagctccaagcccccagaaaccacgagtttgccttctgtctgtctagatttgacatttctggacattgcatagaaatggaatcatacagcac

SEQ ID NO: 285095 - DNA, 599 bp, Homo sapiens
ctgtggtataggctggactgcagtggtgcaatctcggctcactgcagcctctgcctcctggattcaagtgattctcctgcctcagcctcccgagtagctgggattactgacacccaccaccatgcctggctagtttttgtatttttagtagagacggggtttcaccatgttggccaggctggtctcgaactcctgacctcaagtgatccacctatctcagcctcccaaagtgctgggattacaggtgtaagccaccagccctgctccaaagaattctgcacaggctggtcttttcctggcattctttctctttgaaacattctgaccagccgaagatactgtgtcctgtaagtggccctggctgggaactactggtcaaccctccctgcaatagtaatatttcactaatatgtctggatattgagcatctaatagaattttggtatttttccccaccaagtgtctctttttgctgttgtaacttaggttggagcatgaatgaataagttgagcaagatcttggaagtcacttctgtaattctttmttgtttccaatgagaagtgaggctgagacaggcttcatggtttttccttgctca

SEQ ID NO: 285096 - DNA, 557 bp, Homo sapiens
cccccaggactgctgggaaaattaccaagatggtaattttcttggaagcatctttktcacttttactatgcctaaatgtgttgggatgtacactctttgctgaggctccagaaatattatgttggcagaattaaattcctgattgtctaagaattaccatgatttgaaaccattcttttgattcagggcagaatcttggatttttctggaggtcattttaagacaatatatttctgagatcatctccatcttcactcattaatccaagtaatgtttattgagcacctcctgcgtcccaagacttggctatgtactaggatatgtacgcagcaaagaatggaaccgagtctttgccattattaagtttacagcatagtggggaatacagacatcagagcaaattaatacaaaggtaatgaaaattacgacagagaaaatgaaaaccacaacatcaattgttccctttaatgaacatgatgtcttctctctctaagtaaattttgaagtgttcatctaggacgttgacatacctcatgaagattgtcctgtgtatttca

SEQ ID NO: 285097 - DNA, 557 bp, Homo sapiens
cccccaggactgctgggaaaattaccaagatggtaattttcttggaagcatctttgtcacttttactatgcctaaatgtgttgggatgtacactctttgctgaggctccagaaatattatgttggcagaattaaattcctgattgtctaagaattaccatgatttgaaaccattcttttgattcagggcagaatcttggatttttctggaggtcattttaagacaatatatttctgagatcatctccatcttcactcattaatccaagtaatgtttattgagcacctcctgcgtcccaagacttggctatgtactaggatatgtacscagcaaagaatggaaccgagtctttgccattattaagtttacagcatagtggggaatacagacatcagagcaaattaatacaaaggtaatgaaaattacgacagagaaaatgaaaaccacaacatcaattgttccctttaatgaacatgatgtcttctctctctaagtaaattttgaagtgttcatctaggacgttgacatacctcatgaagattgtcctgtgtatttca

SEQ ID NO: 285098 - DNA, 557 bp, Homo sapiens
cccccaggactgctgggaaaattaccaagatggtaattttcttggaagcatctttgtcacttttactatgcctaaatgtgttgggatgtacactctttgctgaggctccagaaatattatgttggcagaattaaattcctgattgtctaagaattaccatgatttgaaaccattcttttgattcagggcagaatcttggatttttctggaggtcattttaagacaatatatttctgagatcatctccatcttcactcattaatccaagtaatgtttattgagcacctcctgcgtcccaagacttggctatgtactaggatatgtacgcagcaaagaatggaaccgagtctttgccattattaagtttacagcatagtggggaatacagacatcagagcaaattaatacaaaggtaatgaaaattacgacagagaaaatgaaaaccacaacatcaattgttccctttaatgaacatgatgtcttctctctctaagtaaaktttgaagtgttcatctaggacgttgacatacctcatgaagattgtcctgtgtatttca

SEQ ID NO: 285099 - DNA, 542 bp, Homo sapiens
ctgtaaaacaaagctattgatttttatagatttattttgtaactaggcaccttattaaactcttttattgtgttttaaaatttggtaatagcttttctactgaaagcaattttcgctgacctcaggatgatgttctctctctagaactgccttgtctctctcatcatgttgaaagtaaaactgtgtatgaaaaaaacgctttggaaataattctttccttctccttggagcaagtccacttcttaggggacattggttctagttcaccataatcgtgcccttctcttgaactccttcatcttttatacatccttcacctttttatacattttttgtacttcaacctcaccctccacccgcccccacctgcccatcattcttagccaggaagggtgatgtttgctcagaatgtgaacttgaggacatttctttcagagatgaygtgggcaaatctttagtctcaggtgaaatagaagtcaggaagcttgggtttggatggatagggaggttagtcccgtaaattcactgttgcatccatttgc

SEQ ID NO: 285100 - DNA, 577 bp, Homo sapiens
agaatgtctgccattataaacaagtgtactgtggccaggtgtgatggctcatgcctgtgatcccagcactatgggaggttggggtgggaggatcccatgaggctaggagttcaagatcagcctggccaacatggtgaaaccccgtctgtacttaaaaaaaaaaaaaaattagttgggtgtagtggcatatgtctgtaatcccacctactcaggaggctgaggcatgagaattgcttgaacctgggaggtggaggttgcagtgagccaagaccataccactgygctccgacctgggtgacagagtgagactctgtctcaaaaacaaacaaacacacaaaaaataagtgtactgtgagagggacacctggtcacaggtcagacatgtaggcattaggccgaccaccaagataaagaagtaaccagtgaaaattacactttaaacatctacaactaaatcccctagaaaactcaagaccaagttagaaaacatcaacaacaatccatgtcatctctattaattgtctttcctcatttaatttcaggaatgtctttctcattcagtcaatttttttttttt

SEQ ID NO: 285101 - DNA, 618 bp, Homo sapiens
gttggtggagagtagatggacttatggacaggtgcatggatggatgattggcaagtgtgctgaattccttcagccctaagggtgttccctaagggtgttcttctctaagcccatgatctgggcaggactcagcatttctacctctttctaattttcctgcagagacacttcctcagcccaatgtcacagccagtaacttagccccagtggagcatgtggattccatcagtctgcattgccttcctccaaggagcactgtggccatccgcygggatgtcaatggccagaagctcttcattggtggccacagggagctgtccctggactgcagaacactgactctgtcgaacatcaccaggaatgacacgggggtctaccagtgtgagagctggaactcagccaccagcagcatcagcaaccccactctcatcaaagttacatgtgagtccaggacctgataaaggatgggtggagatgtgcataggagtgtggttgaggggtgaaggagcggctgaagtttagctggttctgttggcaaagctggaagtgtctgtcctggacaaagtgagagagggcaccaaggggagattttgtggaagggagactgcaaatgccaag

SEQ ID NO: 285102 - DNA, 547 bp, Homo sapiens
aggtttctggggtttctacccagccagtactctcttgtatccaggtaacagcacctggagttctcttttggaaaccagcctcctcatggctccagggaggtgaggggcccaggactggccaatcagagcacttcatcccctgacaacagtgatttttggagacctgggcgtggcactcagaacaggccaaggagaagcaatctcttacggattttattggaactctggggaataaagcaatttttcttttttctgtttttaaatttttatttatttatttaaagacagagtcttgctgtgttgctcaagctggagtgcagtggtgtgatctctgctcgctgcaacttccacctctggggtttaagagattctcatgcctcagcctccggattagctgggattacaggcatgtgccaccatgcccagctaattttttcatatttttrgtagagacagtctttcactatgttgcccaggctggtcttgaactcctggcctccagtgacccacctgcctcggcctcccaaagtggtgggattataggcgt

SEQ ID NO: 285103 - DNA, 527 bp, Homo sapiens
ggatcattggttcttgcaacttctctctagtaaaggaattgcagtagacttgcatcatacacacatttaatttatgaaattttaactatagaaacaggtggaaatacagctctaatttgaggcagcagctccatctatggctcaatggtgaagctgtattttgcagatttgtcctgttgggtactgagcatctctgtacacactgtaagtatgcatacagctactgctgtacaacattttatgtataaaaccacattcactgcatgcataggggatttaagacatattcaaggtgaaaccgagctaacctcaatgttcaccttcactcctaaacctaaagaatgctttcacttgattcagaattctgggttgacagttgttttcctttcagcacttaaaaaatgtgcmaccaagatacaggtcataaagactttgctgatgaaacaggatgtggtaaagaagccagccaaacccaccaaaaccaagatggcgacaaaagtgacctctggtcatgctcattgctcctt

SEQ ID NO: 285104 - DNA, 611 bp, Homo sapiens
acttccctgtcatttcagatatgtgatcaaagtggagtgttggatgattaggtgagtaccttttggtcaaggctagtaaatacatttttaaaatttaattttaatttcaaagattaaagatttcttgtaaactgttaagcctttaaatatgctgctttagagataattttaagatcattattttatagaaaaaatagtattaataaagtatcttcatcttcttaaaggcacaaaaactattcactgtaattttttaagaaaataagagagggagggcaagaatcttcacatggtaatggtattgatgcaatagaaatctcaaagtttatgccagatccaagggcagatggttactgaaagttaggttagttgcatttgtttatctccatatrtcttactacaaatatatatttacatatataagtattcaattttccttcagatactaagatttggaatatctattatttttaaaaatgtgtaacttacatataactataactcatgttgagatagctgggtccatgttatttaaagctctttacttaagaaatagcattctaaactaggaaaacaaaacacattagacattatacatgagaagatatcat

SEQ ID NO: 285105 - DNA, 1158 bp, Homo sapiens
gggccttacttcattggaaggggccttacttcattattactcaaaatattgaggaataaatgaattacctaatggaaaatttttttaccagcatacatacctaccacataataactcaataaatgctagttactactactgctgctgttgctgctgctactactactactactaccactactgctactagtactactactactactactattaccaattattgttatatttgcatcaagacaatgtgrccttaggtggaaattcagccatagctttccaattatttcctttttggcccaagaggagcagcacttttccctttaaaatatatgaacagattgttctttttgctgatttgattttttttcacctttaagtggttatttgaatattctactgtgaagagcaaaataataatattcagccaattctgcatggtcctttcttggtaaataaattggtttctgcatttgtccattttcatgctgctgacagatatacctgagactgggcaattaacaaaagaaagaagtwtgggcacaaaagatgattgtggtggatctgaaatgacagctcttgtctcttctactgtgtggactttgctttctgtacacaataaaaagaggcactattcatacctgtatcttggtaagtaaaaacctatgcaaatccagcctctaaatgggcaatcaacatctgactgaaaatgagacagctcccagtgtcctttttggattttgtctgtaacttcatcacttcctaaactatacatgacaggaggcatcagagtcacagtatttctgatttttttttwaaatttttaatctggtgaaacagttaaagaactgtttctatgtaaacatttctttgtaatgaagactgatatccctgggatgtgggggaggtattctaaatgcaactacaggtgaaagaaaagtagcagctggctttcaggccagtcctcaaggtctcagccccaaagctggcactgcttgcatctccctggacttgagttgctactgtggcctctagcagaacagtcattcaatctagcgttcagtctgcttattggtgttgatttttcttttgtcaataaaaaacagaaataatgctacaaggaagaatgttcgtaacatgcaaaaacaagttagaaagatt

SEQ ID NO: 285106 - DNA, 628 bp, Homo sapiens
tctcttcctctctaggttgcaatgagacctaaaatttcctgccatcatgccttaatgtcctcaaaaaacccctctcaaaatgaacaaattacctgggaagaataacacatcaacctgttagctggatgaacactttagcagagattacttttatcagattacttagcttctggaagttggaccctgaaaccagcagatgaaggatggctaaatgatgctgggagggaaataagagggaaagagcattgggaagcagcctaagggctactgggtactaaagctgggcaaagccaggggctgcacrgtcttctggatggagcatagagcttcctcagccctactgtcttccctactccctttgtcctgtattgtttttcatttccctattttcatgtgtatcatacaccacctaacacagggccagaaacacaatcaacagatatgtattaagtacctactgagtgaataagtgcctacagagacagatgcctccacatccctccccaagacaggacagggatgtcctgtgtggaacacagctaggtctggctcagtaactactgactagaaggggctataatttagaggttggcccgctccatagggtgaggtaggcacctgtggctgg

SEQ ID NO: 285107 - DNA, 596 bp, Homo sapiens
agtaaatgtgtaaaccgcttcttccctttattaacaaattcaaatttaaaataaaccagtttaacatctgtatgtacattggggaaaataatggtatctacctcaaaaggtagttatgaagatgaatgaatttagaacttttataagttttagaacagtgtaacactatatgttttccaaataaatgaataaagcctaagaagaaaaaagtctattaacattattataatctttcattttgtgtagctaacattcccatttaaatgacagcatgtaaaaattttgtagtacaatattcctttgcatattttacacatagcacacatttactttctgattgtaatgggacccaaaagaagttaaatcctagcttgagagtcagtatcattgcctctagcattaccaatttattgcatattcttagataactcatccatcatcttactccctctgatatacatatcttaactcaaaaagggttataggcctctatcacaaatatacttaaaatgatcaaggaaagaggtgagatcataattcctyacccttgtctttactgttaacaaataataataaagacagattgccagatttgg

SEQ ID NO: 285108 - DNA, 561 bp, Homo sapiens
cctcgccagcatctgctattttttgtctttttgataatggccattttaactgaagtgaaatgytatctcattgtggtattgattagcatttcactgatgattagtggtgttgagcatttttcatatacctgttgaccttttctatttcttcttttgagaaatgtctgttcacatcatttgcccattttaaaattggattattttttctttttgctgttgaattgcttgagttccttatatattgtggttattaatcccttgttaggtagcctgaaaatattttttcccattctgtgggttgtctcttcaatttgttgtttccatggctgtgcaaaagtgttttagcttgatgtgttcccatttgtccatttctgtttctgttgcctctgcttttaaagtcttacacccaaaatctttgcctacaccaatgtcctgaaaaattttccaatgttttcttttagtttcatagtttcaggtcttacattggtctttaatccactttgatttgatttttatatatggtaagagataggaatctagtttcattcttctatgtatgga

SEQ ID NO: 285109 - DNA, 1103 bp, Homo sapiens
cagagagagtacatttaggttaatggaggaaggctactccaggaggtaacatttaaatggagacatgaaggatgagaagaagctggccatgcaaaaaggcatgctgtcacaggagaggaagaatgttttagatacccaatacagtagtggccccttatccatgaggtacatgttctcagactccctgtggatgcatgaaamcatggatagtaccaaaccctgtatatactatgttttttccatctgataactgagatggctactaaagtgactaatgggcaggtagtgtctacagcatggatccactgcacaaaaggatgcatcatatcttaggcaggatggggcaggaaggcatgagatttcatcacactcctcaaagcagtgtgcaatctaaaacttatgagttgtttatttctagaattttccacttaatagtttcagactgcagttggtcacagtaactgaaaccatggaaaaggaaaccacaaataaagtgggactactataccatgtttwcacggacacctctgtaggccctaaaccactcctgtatcatgtcaaccatatttaaatatgcccatagccttcatttagagacacataggcagaagaagagagttacagagttctatacatacttatctatattatatattattctacattgttttgctataaattttttgaaaggatgttcaattttcatacawttgagtttgtgaagaataaattattttatttttatgatccaagcatttcatatttacctatagctatatgagacctatacataatccattattacatgaatggcctaatgttacattttgaaaacacctaattattcatttattaattttggctttgaaattttctttatgtattaatagttaataaatatttttacaatacctgaaaaatttataggcatctgatatgttgacctacgaataaacaactctgttcttctccctctactcccagcattacctcagtcaatcccaaattccctttgtaatggatcccaaaaacttcctgctcccatatccttgcaactagctagatattgctcctgggttcctatttctgttgcactgggttca

SEQ ID NO: 285110 - DNA, 599 bp, Homo sapiens
gtttgaaagcactgaaagtttaaattcaagtctgttattttagtgcatatactggctactgtggttctgtgtgaaggatgcattcacaggcragcagctgtgggaaatccatttctccttttataaacacatcttgaacagtctggggtatgcaatttaattgccatggaatatattatagatattccctgatcataataattatggggtgagggaagaatgttatggtcttaacatattccttgcaagaaaacttagtccctctagaatccttaaaatactaaaaatacatttaaaatttaattaaaattattattattttcagcaacattagcaaatgaaaaacacatacacattattaccaaaacaattagaaaatcaattcatgggatttgcagacacttaatctctcttttcaagggggcagtttaatccctactgtattaaatcttattgaaaattagactcaaaagcagttcattagcagcttcctaacacatagctccctagaagagaaagcaactcaactcataagagggggaaaaaatgaaaggaaaacaaaggacaggacaggaccagaaagtaaaaacaaaaaaaat

SEQ ID NO: 285111 - DNA, 559 bp, Homo sapiens
gccacttgcatatcctagactttgtacaatcagattgacaagggaaaaaaaacactttgggraaaatcttattgaggaaatgaagactgtcttaacttctagcttgtctcctatttgggcaagatgagagttctcttcagtcacttggtcaaccaacaagaatgtgttgagtgcctacctgagtattatgggggctactaaagggaaaacagaggtctccctgtccaagagtttgccctcttgctggggagacaggacacagtgatgggaaaggatcagagaacaggacacagtgtggggtggggagggggaatcccctgtagaactggcatgacccatttgtgaaagcacattctccaaatgcaggtccactgtgtcttgaacgtggaagcaccccatgtccttagatacttgtcaacaggggctacagcccaggcaaaaggagaaaattaaccctgaagtgtcctctattaccaatgtggcccccaaagacatggagaaggttcatgcaggggccctcgataagccaatgtgtggcagacaaggcaaggaatcacag

SEQ ID NO: 285112 - DNA, 608 bp, Homo sapiens
ttatttacagcttgaattttgcttggttgtttcttgctgcttgaacacataaatcatgtgataaagacatcctctattacaaaggcttttagttcattacatgttttgcttctgaaactattcttgtggtatcagtttattatgctttctgagctatttttaagtgataacacttccatcattattttttattccagtgaaacraatggagtcatcgaacgcaatacttgcttggttgctctaaacaattttttttctttgattttgttctctactaaaatacctcagatgtttttggcaaacgtttttgtttcagttgctagtgttgatggttttaaggtgttttaatttttgtattaatagacacatttttggaaacactaagttctttgtttatcttcaacactgactgtggcagaagtttagctcgaataaggaatacatagaattatggcaacctctgtgtttggtaaacatatattaatgatatgaaaacttaaagcccttactagttgttacatttttacagataatttagagggctgagatgaatttaatataaataagaaattcaaccccacaaatcaaatagaaacctttagattggg

SEQ ID NO: 285113 - DNA, 328 bp, Homo sapiens
tagttcaagtgctacataacaatgagatgtattggcatctagatggcatataaaattacaggactgaatgatatatctgcagagaaaaagaacacatttcaaaaacataaatttatcttgcatatgtagaaatattattcagacactgctatttcttgttagtaatttcaaggaaaaaagttctcattttctctaggacaaagaatgagctactactgttatacacacagacacacatacacacaggcacacagacacctgttctctagaatgactstcataagattgaaatattatgatgttttaaggctcttttttctccttaata

SEQ ID NO: 285114 - DNA, 629 bp, Homo sapiens
tctgattcccaaaacatcaaaaaagtgaaataagaaaaaaaatgagaatgactatgtgattaaaatccactacctattgtaggatcccatggtctcaaccgaagaaatgctgataccgtatttcttatggccagagtcatgggctactcattgaactgatgcaagcagtgacaaagacaacaaaattaaagaggtgggataaaatttgtatcaagtataagaaataacttatggattaacaaggagaaattaaaaaatgatgcagtgtacttaraactatggttaagaacctgagctttggaatctcaaactcctgtgttgtaagcctgatgcgttactctaagttatgcaatttctctgagttttaacttctttaccagttcattcgttaaatgagcattataaggcagtcgcaaagactagcatataagagctactttgggagtgctagcgaattgacatttttaaacttcacttgtccttttcatcagtaaccaggtaaataaatgcctttaagcttgagccatgctgaatgagcaggttgaaactaaactgtttatacttctcaggtgtatcatttctccctggaattttatcacttgtagtaaggtttagttacattctaagat

SEQ ID NO: 285115 - DNA, 540 bp, Homo sapiens
tatatgagtgcataatactgtattagaacaactgattcataagagtttaaaaatacagttcattttattgagttggctttcttttccctgccaggatattcattaaaacacaaataataacataagggactatgttcaaaagtacacagtcattagtttaaaaatagagctggctgggtgcagtggctcactcctataatcccggcactttgggaggccgaggcaggcagatcacaaagtcagcagtttgagactagcctggccaatatggtgaaatcccgtctctactaaaaatacaaaaattagccaggcatggtggtgtgtgcctgcagtcccggctacttgggaggctgaggcaggagaatcacttgactccaggaggcagaggttgcagtgagccgagattgtgccactgcactccagcctgggtgatggagtgagactccgtctcaaaaaaaaaaagaaaaaaaaatgatagcgctacaaagtaaatatgccaccttctcttggggtcarttttactatgagactacctcatgg

SEQ ID NO: 285116 - DNA, 571 bp, Homo sapiens
acatttagggtaaattagaaacattttgtgtctaaagcagtactcttgaagctgtcaccccagacagacacagaaccatgggctcctttccatccagtcctacccccagaggttggcattataaacctttgaaattcagggtactttgtagcaaagtttgacaaatcagtctattaagtgctacaggagttctgtagtgagtgcatttattatggatcagtgtactcacacgaggaacactttcccaagaagttgagggactgcatggattttacayggggaacaaggagagttcaagccttcataaagatgtctctcagtttttccataaagatttgttgattggagcactgagaataaacacccttaatctattaaacttcctcatcagtgtacatggattgtattaggcttaaatgacattgagagacaaaacttgaaagtcaccaccctgtacaatacaacttggaaagggcattttaaagacatacacagagcaagactcaataagcagaaaaaattaagaaacaacacaggccaattggaaaggaaaaatgtgttttaaaagatg

SEQ ID NO: 285117 - DNA, 571 bp, Homo sapiens
acatttagggtaaattagaaacattttgtgtctaaagcagtactcttgaagctgtcaccccagacagacacagaaccatgggctcctttccatccagtcctacccccagaggttggcattataaacctttgaaattcagggtactttgtagcaaagtttgacaaatcagtctattaagtgctacaggagttctgtagtgagtgcatttattatggatcagtgtactcacacgaggaacactttcccaagaagttgagggactgcatggattttacatggggaacaaggagagttcaagccttcataaakatgtctctcagtttttccataaagatttgttgattggagcactgagaataaacacccttaatctattaaacttcctcatcagtgtacatggattgtattaggcttaaatgacattgagagacaaaacttgaaagtcaccaccctgtacaatacaacttggaaagggcattttaaagacatacacagagcaagactcaataagcagaaaaaattaagaaacaacacaggccaattggaaaggaaaaatgtgttttaaaagatg

SEQ ID NO: 285118 - DNA, 571 bp, Homo sapiens
acatttagggtaaattagaaacattttgtgtctaaagcagtactcttgaagctgtcaccccagacagacacagaaccatgggctcctttccatccagtcctacccccagaggttggcattataaacctttgaaattcagggtactttgtagcaaagtttgacaaatcagtctattaagtgctacaggagttctgtagtgagtgcatttattatggatcagtgtactcacacgaggaacactttcccaagaagttgagggactgcatggattttacatggggaacaaggagagttcaagccttcataaagatgtctctcagtttttccataaagatttgttgattggagcactgagaataaacacccttaatctattaaacttcctcatcagtgtacatggattgtattaggcttaaatgacattgagagacaaaacttgaaagtcaccaccctgtacaatacaacttggaaagggcattttamagacatacacagagcaagactcaataagcagaaaaaattaagaaacaacacaggccaattggaaaggaaaaatgtgttttaaaagatg

SEQ ID NO: 285119 - DNA, 639 bp, Homo sapiens
gaaaagtctgaacaaacatgttcagaatataaaatagaaaatacaaacatccgttaataaagttttgattaacaggctaaagggaaaacttgccaggaaaagaggtgaaaacagaaatgggcatctggaaatccctaaaatagcataatataaaaggattgcagttacaaaaaaagacaatctgcctatattgaggaacataccgataggaatacctgaaataatgtaaattaagttgttagtaataaaaatatttggaacagcaagtattgtaacagcttagcatcccaacattctgggaaagtataaataaatattaactagtgtcatcctcttccyccaaaaagcatgcttatccatattctctctgtgttggagacaacgacaactcttttcaagtcttatattaaatctgcttatttctgtgaacattttatttcaccagttttgcaagcagaaattagaatgccaaagacatgtgcactgcaataaagaagataagtggccgagttgaacatacagaaccaagaacgagctcacaaataagactttgacattcaacagtggcaatgaattatcaattagtctactcttctacctttgctaagcataaagatatcttcatttgagcaaatgaag

SEQ ID NO: 285120 - DNA, 639 bp, Homo sapiens
gaaaagtctgaacaaacatgttcagaatataaaatagaaaatacaaacatccgttaataaagttttgattaacaggctaaagggaaaacttgccaggaaaagaggtgaaaacagaaatgggcatctggaaatccctaaaatagcataatataaaaggattgcagttacaaaaaaagacaatctgcctatattgaggaacataccgataggaatacctgaaataatgtaaattaagttgttagtaataaaaatatttggaacagcaagtattgtaacagcttagcatcccaacattctgggaaagtataaataaatattaactagtgtcatcctcttcccccaaaaagcatgcttatccatattctctctgtgytggagacaacgacaactcttttcaagtcttatattaaatctgcttatttctgtgaacattttatttcaccagttttgcaagcagaaattagaatgccaaagacatgtgcactgcaataaagaagataagtggccgagttgaacatacagaaccaagaacgagctcacaaataagactttgacattcaacagtggcaatgaattatcaattagtctactcttctacctttgctaagcataaagatatcttcatttgagcaaatgaag

SEQ ID NO: 285121 - DNA, 641 bp, Homo sapiens
aatagggctgagtcaaggaggtgacaacaagatatcacaggagtttttgtttttgaaactcttaagtttttgtcagagggagagactttccacaagaaaaagatttatctgccaagtaaagaaaaatccatcttaaaatattttgctatactatggattttagtatatatgtttttcttctagtttctataaccaattatggtcctatatgaataataatggttttcatatttataacaaaatctaaaattagttatatttatcctactggcggtgcactgagaaaattctactacatttgagcttaaaaaataaataagccttaatgcctcaaatgtatataaactgactcataatttgatattcagcctttgaaagtggttttgggggtacacatttaaagaygtatgtaggccgggcatggtggctcacacctgtaatcccagcactttgggaggccgaggcgggtggatcacaaggtcaggagattgagaccatcctggctaacacagtgaaaccccatctctactaaaaatacaaaaaattagccaggtgtggtggcgggcgcctgtagtcccagctacttgggaggctgaggcaggaggatggcatgaacccgggaggtggagcttgaagtgagc

SEQ ID NO: 285122 - DNA, 641 bp, Homo sapiens
aatagggctgagtcaaggaggtgacaacaagatatcacaggagtttttgtttttgaaactcttaagtttttgtcagagggagagactttccacaagaaaaagatttatctgccaagtaaagaaaaatccatcttaaaatattttgctatactatggattttagtatatatgtttttcttctagtttctataaccaattatggtcctatatgaataataatggttttcatatttataacaaaatctaaaattagttatatttatcctactggcggtgcactgagaaaattctactacatttgagcttaaaaaataaataagccttaatgcctcaaatgtatataaactgactcataatttgatattcagcctttgaaagtggttttgggggtacacatttaaagatgtatgtaggccgggcatggtggctcacacctgtaatcccagcactttgggaggccraggcgggtggatcacaaggtcaggagattgagaccatcctggctaacacagtgaaaccccatctctactaaaaatacaaaaaattagccaggtgtggtggcgggcgcctgtagtcccagctacttgggaggctgaggcaggaggatggcatgaacccgggaggtggagcttgaagtgagc

SEQ ID NO: 285123 - DNA, 641 bp, Homo sapiens
aatagggctgagtcaaggaggtgacaacaagatatcacaggagtttttgtttttgaaactcttaagtttttgtcagagggagagactttccacaagaaaaagatttatctgccaagtaaagaaaaatccatcttaaaatattttgctatactatggattttagtatatatgtttttcttctagtttctataaccaattatggtcctatatgaataataatggttttcatatttataacaaaatctaaaattagttatatttatcctactggcggtgcactgagaaaattctactacatttgagcttaaaaaataaataagccttaatgcctcaaatgtatataaactgactcataatttgatattcagcctttgaaagtggttttgggggtacacatttaaagatgtatgtaggccgggcatggtggctcacacctgtaatcccagcactttgggaggccgaggygggtggatcacaaggtcaggagattgagaccatcctggctaacacagtgaaaccccatctctactaaaaatacaaaaaattagccaggtgtggtggcgggcgcctgtagtcccagctacttgggaggctgaggcaggaggatggcatgaacccgggaggtggagcttgaagtgagc

SEQ ID NO: 285124 - DNA, 641 bp, Homo sapiens
aatagggctgagtcaaggaggtgacaacaagatatcacaggagtttttgtttttgaaactcttaagtttttgtcagagggagagactttccacaagaaaaagatttatctgccaagtaaagaaaaatccatcttaaaatattttgctatactatggattttagtatatatgtttttcttctagtttctataaccaattatggtcctatatgaataataatggttttcatatttataacaaaatctaaaattagttatatttatcctactggcggtgcactgagaaaattctactacatttgagcttaaaaaataaataagccttaatgcctcaaatgtatataaactgactcataatttgatattcagcctttgaaagtggttttgggggtacacatttaaagatgtatgtaggccgggcatggtggctcacacctgtaatcccagcactttgggaggccgaggcgggtggatcacaaggtcaggagattgagaccatcctggctaacacagtgaaaccccatctctactaaaaatacaaaaaattagccaggygtggtggcgggcgcctgtagtcccagctacttgggaggctgaggcaggaggatggcatgaacccgggaggtggagcttgaagtgagc

SEQ ID NO: 285125 - DNA, 1085 bp, Homo sapiens
attcttggggatattttgtgttataaactccttgtctcccactctgacccaaaaaagattttgacttgattattttgtttatgtcgtatatgtatatgtatgttattcttggctatttgatttcatattattcctaaagccatttttaagtcattgaggttaaaatgactaaaagattcattccgctattttcaaagaaatcctaactagcttgagttctacgtcactattactctatgacatatttaaatactttgcctttargaaatatgagttatttttgtgattatcttataagaagcttttaaggaaataattatgccacacaaacaatgacctctgaagttaaaatatatatttatctttttacaagacaaaaaaattttataagttataatggagacttgagagcaagagcttataggaatagtatattaaaaaatatatatatatatatatatatatatatatatatatatatatatgtataattggataccaggcttagaggaactaaattataaacaaaaatgccagtgcccwattcttggggatattttgtgttataaactccttgtctcccactctgacccaaaaaagattttgacttgattattttgtttatgtcgtatatgtatatgtatgttattcttggctatttgatttcatattattcctaaagccatttttaagtcattgaggttaaaatgactaaaagattcattccgctattttcaaagaaatcctaactagcttgagttctacgtcactattactctatgacatatttaaatactttgcctttaggaaatatgagttatttttgtgattatcttataagaagcttttaaggaaataattatgccacacaaacaatgacctctgaagttaaaatatatatttatctttttacaagacaaaaaaattttataagttataatggagacttgagagcaagagcttataggaatagtatattaaaawatatatatatatatatatatatatatatatatatatatatatatgtataattggataccaggcttagaggaactaaattataaacaaaaatgccagtgccc

SEQ ID NO: 285126 - DNA, 535 bp, Homo sapiens
atctcgtgagaactctgtcatgagacagcactagggagatggtgctaaacctttagaaaccaccctcagaatccaatcacctcccaccaagccccacyttcaacatgtggggattacaatttgatgtgagatttgggttgggacacagagccaaaccatatcaaagactatatcaaaatgtgaatatgcacatgacttattaggtacatttagggaaagggttagcctgagagtaacaacctaatatccaaatgatttaagaaatatgcataacaccttgaaattaatataaatagtatactaactcagtattattaggacactaatgttctaatggtgatgatctccaggttgaagctataaaaatcattgttaaaaacagatttttgttttcattttatagtctccaattcagaatccccagaggataagcctgggagtagatactttacaagcatgctggtgattcatttcatgtgggcaacttgaaaataattgctcgacgtttattagaaccagctggagtatatgatga

SEQ ID NO: 285127 - DNA, 535 bp, Homo sapiens
atctcgtgagaactctgtcatgagacagcactagggagatggtgctaaacctttagaaaccaccctcagaatccaatcacctcccaccaagccccaccttcaacatgtggggattacaatttgatgtgagatttgggttgggacacagagccaaaccatatcaaagactatatcaaaatgtgaatatgcacatgacttattaggtacatttagggaaagggttagcytgagagtaacaacctaatatccaaatgatttaagaaatatgcataacaccttgaaattaatataaatagtatactaactcagtattattaggacactaatgttctaatggtgatgatctccaggttgaagctataaaaatcattgttaaaaacagatttttgttttcattttatagtctccaattcagaatccccagaggataagcctgggagtagatactttacaagcatgctggtgattcatttcatgtgggcaacttgaaaataattgctcgacgtttattagaaccagctggagtatatgatga

SEQ ID NO: 285128 - DNA, 560 bp, Homo sapiens
ctccaaaagtgatagtaaagaaacaaacttcatgtattttacttctgaattaaaacattttttattcattggtaattaggaaatgtaaaaaaaaaattttaataagtgcaaaatgtatttttttcattaataattatcyagaccaggatctagatcagattagaagtgaaaggtttaatttgagcacagatattttaatggtctgtaacatgctaatctggtcacatataaactgcaaatgatatttccacatataatttaagtatatattaggtacagaaaaataaatgtgctaatctggtcacatataaactgcaaatgatatttccacatatactttaagtatatattaggtatagaaaaataaatgcgctaatctggtcacatataaactgcaaatgatatttccacatataatttaagtatatattaggtacagaaaaataaatgtttacaggaagtccaaaatgtaatactttcatctagttggatttgaaatcatttgagattctgctgctgtccctcagtatggcttagtatcatattttttattaagctgt

SEQ ID NO: 285129 - DNA, 606 bp, Homo sapiens
tataatctacgcaggcaaagtttctaaaacagtgtgaatacatataaattcaaaacacagcaaatacaaagcaatagatagaatttttaaggtgaccctaatattcaaaaagtgcttactacttgcaagtagcaatattaagtgctttaataaattaatctcatcaactcttcactaagaccctgtaaaacaggtatttataatcctattttaaaacagggaactaagacctagagaggttaacttgtccaagatcacatagttaattaagtggcaaaactagggactctgctccaagtactgagtgacaccaaatacatgctttaatcctttcatggagctactctcatgaccatggaaatctttaagacacacacatggaacattcagagaaaatccttataaccatctttaatatttattccctaaatttaagtaaaaaataaaaataaaaaatcaaacatccatctgtaaaacatattcttttgtgagagaataaaccaaataatacamcccacactataagccaggacttattctcttatttacacagttaagtagtaagagagcaagcaggaattaattcttatgttatcgattcacaac

SEQ ID NO: 285130 - DNA, 616 bp, Homo sapiens
atgaggtatttagtaaacttgtaattgatatgtctggaaggcccttggggaggtgatcaatgaaggacctatacttatcaaaaaatcttctttttgccaatcttatgtgtcaatgttattatctttcaagaatatcttccaaatctgtaatttaagtatatacttctgattcttttatcaaaagtcacgaacaactgttattctatgttgtaatctaatgccatagcattagctatgtgttttgaaatgttatacaagcctgtgttttgaaatgttaacttgcataattgtttaagaggtatattttctcaactcaattcacttccaaaatgtgatggcaactagatcatctgacattaagaggaactgatttgactattatgctggttccaaagaatgatgaaatgagggtaaagttaaatgacatmaattacaatgtaagaaagtaaagtatcttcatttatcatcttacctgatttttcaggaatttaacctttcatttttttttattttttgcctcatgagaatatctacatcttagaattctgctaagaaatcaaacatctcattgaataaactaatgatgataaatcacaaagctatgacaaattttaag

SEQ ID NO: 285131 - DNA, 579 bp, Homo sapiens
tagttgacaatgattttaattgagattcatatggaatctcaagtaaaatttaaatcatttaaaaatttaaattatttaaaaattttaaattattccatatgaagctcaagtaaaatcaytatatcaactaatatttaggggtttaacttaaatttctacctagatacattatataaacataacactgtccaatgtcccaatctctcactcttgaattcttttatctcaaatagaaagttccctcttggcaggacttagttacagagtttctgtaacatagcatggtatcagtagttgatgaccatataattgcaattattgtcataagaacttctttataatcaccacaaaataatatgcattcgatcccaataagtatgcatttatctcatgtcactactgtaattaagaaataagacggtgtaagtagcatgcttcaggataattatggttttccaggactgaaaatagtatgaaaaaccaggctgcaggctaaatgcctgaagaaagataataatgtcctagaaatctaccactctgccttcttagcgttgttattttaagaaggaattgtaaatt

SEQ ID NO: 285132 - DNA, 540 bp, Homo sapiens
ttcatccttttcaggactaactgggcaaaagttcccagggtttttcctaaatttytaataggagaaaaagtggaaaatagtttagctttttctaccacaaaattaagtttgttacagcttaattttcaggtgaacacacaggagtttagctgtatttacaggattgactatttttcaacattcatgataggagaatttttcctctaattttaacaagaactggattctttaattttaaattgcttacattgaatttaattattaaaattgaatttcttaaacattttaatttcttattaattctataaatatttatgggatacctattatgtgattgtcactatactgcctacaaagaagaataattcatcactctttctattcattgtttgctaaatatttttgagtgttcacttttttccaggcactggtgatacaatagagaacaatacacacaaatggcccctctttcatgcttacattaaacagaggagacagtctatagacctaataaacacattacataatatcatagagatt

SEQ ID NO: 285133 - DNA, 540 bp, Homo sapiens
ttcatccttttcaggactaactgggcaaaagttcccagggtttttcctaaatttctaataggagaaaaagtggaaaatagtttagctttttctaccacaaaattaagtttgttacagcttaattttcaggtgaacacacaggagtttagctgtatttacaggattgactatttttcaacattcatgataggagaatttttcctctaattttaacaagaactggattctttaattttaaattgcttacattgaatttaattattaaaattgaatttcttaaacattttaatttcttattaattctataaayatttatgggatacctattatgtgattgtcactatactgcctacaaagaagaataattcatcactctttctattcattgtttgctaaatatttttgagtgttcacttttttccaggcactggtgatacaatagagaacaatacacacaaatggcccctctttcatgcttacattaaacagaggagacagtctatagacctaataaacacattacataatatcatagagatt

SEQ ID NO: 285134 - DNA, 587 bp, Homo sapiens
ggaatagtcaagctgagacacccagaagtggtatatataaattgtacataaggagaggattctggagttgtcatgtgtctggtgaagttgaaaccatgggtttggataaagtttacagagacatatgtagaattagtatagtagaaagccaactacagcaccttgggaacacttaatggttatggtgtgaatggagaaaggcagccagcaagaagactactaagaaacagccagaaaaattgcgataataataataataacaacaacagtaataataatagatgtgatcaagacttacaattgtgagaattataaaatggctaggttttattgcatatttactctatgtactttacattggttaaarcattcagcctcagggcttaattcccgtataaaatgaactattgtaattctccattttatatctcaggaaatggagatactgatagttaaattaaacttgttgagccagacactgctaataacactacatgtaaataatttaactctcactaccatactatcacctccttttacatacatgataattgaggcacagactatggaaccagtaaacatgcagc

SEQ ID NO: 285135 - DNA, 612 bp, Homo sapiens
aatacaacatgatagctaatgtgcctaagactttgtaaaaaatgaaagtcagccaaagtaattaaagaggctttactcctaaccaaaagggccttgtggatcaataccactgcaggagcaagactcctcttttgcatgacgaatgagttatggggtgaagagaacaaatgccacattaactgagccaagaaaaactattctcaaatattttaccactgaaagtaaagcaaaggcaaataaatattttgaagaactattttttaataacataaagggtatgtggacacagcatgtgatataggaatacacattgtatattcagaaaaacctggctgctaaaatgtgacatkcctggaaatatcagttgttattcacatttgcaggcaatgcatacctctagccacaagagaaaagcgaaatctcaataatatcaaaacagataatatgaacaacttgttacttatataaaatttaatacaaatgaaattaacagacttaggcacaaaattaaatggagtatttatacttaacaaataatgtgcttatattacaaaccaaaaattttcatggtgctctgatgacatacacattctacatatggattatttgaat

SEQ ID NO: 285136 - DNA, 503 bp, Homo sapiens
tttagaattttttaaaagaatctattatatctggaattttttgaaacagtatttttaagtcataaaacaggataggcaaaaaaattaagtttaaaaaaaccaaataataacataaaatattactagcatttccctggaagacagagcagtgaaaatttgctaaatgtttagaaaatggagtatgtgaatgatcttgaatatagttaattctctttattggaaatttgtgatcagtaaaatagtcttagggtggaagaaaataaaatcacagtgggaaaaattacagagcatcagctagtaagcttgaagctcatttatatgagtggctaaataattttgttactgcatatagaacacttatttatggatggcattttatagcagtttaaaagtattcttttatatccatgtagttaatagaaatatctgttcatcattatgtctgttaattagttttgctgttgatrttaagtatgcatacatttcttatattattcagtata

SEQ ID NO: 285137 - DNA, 554 bp, Homo sapiens
tactttgtacataggaagtagactgcttagtaacagggaatttacatccttatttttactttctcgtttcaggctacagatgtcttaaatcctgggacrtcacttctaaatgtatactcaatgccaatgtttactttcttgcttactcaataaagccaaagtttgcttgtggagccaaactgtccagttaaaagaataaatttctcagcttttattttaggtagtgggcattgaacattgttctggccaatcagatgaaagcacaacttatagtatggggcttccaggaaagcttcataaaaggaggctagatattgctggggctctgcccttctgcccttagcttttatttctttctctaacctgctgtatggtcccattggctggaactaaagtatccatcataaaactatggagcaaatgccaagagaatctgaggcctcacttttggcaatcttaaactgctgaaccaatactagcaaccactactctacaggttccccattacacgagagaaaaaaataaaaataaaattcctatgtttttcagtttac

SEQ ID NO: 285138 - DNA, 576 bp, Homo sapiens
caccatgaataaaatgaattaataagccatgtgttggacatgttgattgtcaataaagtaagacttcagaaccaaaatttagcaaagcacgtgccaaatcaacagaaatggcacattttatacaatgtgaatgaaaacttgctggtttttccattagtcccctttaagcagcaaagtagaccttcagcagggtcaagaatattaaaaggatrtgtctcaattgcccaaaatagctctacttaggatcggaaagttcaagactgtagaggtaatgccatttctgttctatttcttttgtcaaaagaaaaatccatttgtaacacagagccctccagagatttgtcaccatttgctaggcttcagtccaaaaagtgtcaagactcacccagccaatttccagggtcacatagtcattacttttatcacttatgaaaacagaagaagacaatttcagtcccctaaacacagtggaaaatcaatgattctaggatcattttcaaagttgacaatatgaatccaagtccttactaaaaggagaaatagataatgagatctattctctgtagcgccagtgtc

SEQ ID NO: 285139 - DNA, 538 bp, Homo sapiens
aatgattctaggatcattttcaaagttgacaatatgaatccaagtccttactaaaaggagaaatagataatgagatctattctctgtagcgccagtgtcactccctagaagttgtgcatttaggagaagaaaccagcactttaagttcaacaaggtactgcttaatgcattatctctttacaacaagtgcattactttatgcagtcattattttattgttttctcttcacactaatttattaaacacctatgatgtgtttctttaatatgtttatttcctttaaaattatttatcaaataccaacaatgtaccaagcactctgctaaggactggggatatattatctcaaatatattgtgggctggttttacaagccatagttcctggagtgcaaacatagggtcataaaaatagagaaaataccatttgctggttcttacccctctttatattgacaccttcatccacttttcaagtttytgcccagcgatttgtgtaaaatcctggcaatgactcctgtatgtttatgagccaaat

SEQ ID NO: 285140 - DNA, 569 bp, Homo sapiens
tctgtgcaggtgtctctggggctgctggtctcacctgtggtctgcagtagacacaattggctgagcaggatatgtgatactgtgtggttggtgtggagttttgaagaaggggctgtgtttgggccacgtaggctctactcagagacctgaaaccacttcagaatggtgcatatgtcgaaagagctggctgggggccttgcccaaaccaactgaggtcttaaagtccrgggaaaaaaagtctgggttccaactagaattctagaaatatttctagaacacacagagagggaataagtccctctatcacccttattaccaagccttgtggttccctgtgattttagataatgtctgatatttttctggctatttgcctagtaggatttaaaaaatattttcaaagtgaagctgagagagaatcttggaaacacacatacctgttgatcatgggccctgcagaattggcccttgggggctttatttggttacgtgtgcctgggtggtctttaccagcttagactctatcatgggcccccatgaagctccattctcaatactgaataattatt

SEQ ID NO: 285141 - DNA, 569 bp, Homo sapiens
tctgtgcaggtgtctctggggctgctggtctcacctgtggtctgcagtagacacaattggctgagcaggatatgtgatactgtgtggttggtgtggagttttgaagaaggggctgtgtttgggccacgtaggctctactcagagacctgaaaccacttcagaatggtgcatatgtcgaaagagctggctgggggccttgcccaaaccaactgaggtcttaaagtccggggaaaaaaagtctgggttccaactagaattctagaaatatttctagaacacacagagagggaataagtccctctatcacccttattaccaagccttgtggttccctgtgattttagataatgtctgatatttttctggctatttgcctagtaggatttaaaaaatattttcaaagtgaagctgagagagaatcttggaaacacacatacctgttgatcatgggccctgcagaattggcccttgggggctttatttggttacrtgtgcctgggtggtctttaccagcttagactctatcatgggcccccatgaagctccattctcaatactgaataattatt

SEQ ID NO: 285142 - DNA, 581 bp, Homo sapiens
ctgactctccttctgtcatcatgtctcctctgcccctcctgccttcctcttttactgataaggacccttgtgattccattggatccactaggatcatccagaataatctccctatctcaaggtccttaccttaatcacatctgcaaaatcccctttgtcatgtaaggtaacacataaacaggactgggaattaggacatggactgtttgggggacttcattctgcttaccacagcagtcttgctrtcgagtcctcggacccgccatgcatccacagttgcaagcctctgagcagaagacctgggacttgaatcctgcagtccagacccctggagaatgaatattcctttccatacagctctttgatggccatgtcgagtttgccttctttgtcttccctgttcaccaaggcagggttttaaaattctccctttgtaggtcacagccctttctcactgcttcccttctgctcatctgtgctgggcaggtgtggaatcgctttacagacccagcacctttctggggaatggccaagagctgggacagtgcaagggactacaatttgaggcagcagatagaatt

SEQ ID NO: 285143 - DNA, 581 bp, Homo sapiens
ctgactctccttctgtcatcatgtctcctctgcccctcctgccttcctcttttactgataaggacccttgtgattccattggatccactaggatcatccagaataatctccctatctcaaggtccttaccttaatcacatctgcaaaatcccctttgtcatgtaaggtaacacataaacaggactgggaattaggacatggactgtttgggggacttcattctgcttaccacagcagtcttgctatcgagtcctcggacccgccatgcatccacagttgcaagcctctgagcagaagacctgggacttgaatcctgcagtccagacccctggagaatgaatattcctttccatacagctctttgatggccatgtcsagtttgccttctttgtcttccctgttcaccaaggcagggttttaaaattctccctttgtaggtcacagccctttctcactgcttcccttctgctcatctgtgctgggcaggtgtggaatcgctttacagacccagcacctttctggggaatggccaagagctgggacagtgcaagggactacaatttgaggcagcagatagaatt

SEQ ID NO: 285144 - DNA, 1242 bp, Homo sapiens
tttaaaaaaaaaaggaaataaaaggctacttttgtgtggatatagatatccaaactggctctttgcaaattaatggtctgtcaccgggaaacagcactttctgttggtgggatgcccacaggacaggcagagaggaggcgtggagggtcccgaagtgcrggaggggtcaaggtaaaaatagcccacaccatcaacagctgtttattccatttatttaagcaggcttccggcccaaagttctctgggcacctgtacaaaatctaaattcaacatataaaattaattctccttttcaggaaaaagcacaaacaatcccctcaaaaacccatagatgttctcaggggaagaacccctttagcggggagactgggaattttgtcagatccctggaagctttgctgagaagaccttgtctgcattactttcttctcccatgactccagagtcaaagcacctcagtgccactgtctgtcggcttggtgggccagagcaaacctcttttcctccctgagcctctgcatctgttctcagaggttcacttctctgggcaccacagcttctgctaacaatctcagtatcaaacccaactgacatcccctgaggaatctgagaatggaaataatgacatgttttatttggatggcawatgacatgttttatttggatggcatttggcttgcatcatttcatgggctccttacaaaagccacgagggaagggattgtcttacccattttacaggagagaaagctgaggtccacagttgtagattagttaactagaaccatgtcttcatgcccaatatttttactttgtcatctgcctttaaaaaaatttattgctcatwaaaaataatagtttcacaaaatgagttctttgcagaagattcaaacgatataaataatgcaaaaagctctcgacctcccaccagttctgttcccagaggtaatggctattatttggtgttctggataatgatgtccaactattagattttttttctatgagttcacatacatagatgtatcaacataattttgtttcatgttttaacaacatttatttgaatatagtatactgtcaatattatttctaaaacttagtttttaaaagaaacgctttgtcttagagatacttctatgtcagtacatacagatctacttcattggtttactctattgtaggttatgacagagtatggctgtaccacagttaatcgaaccctgtttttactgaggagca

SEQ ID NO: 285145 - DNA, 647 bp, Homo sapiens
gtcactgtgtttcacaactccgggggcatcaatgcacaagagaacagagttctccggccgctctgaactgatggcatgacctggtgaattcaaggtcacccayctgtgaggttctttttgttagccaatctgtccaggtgaaaacttaagagtcataaacctaaaatgtctaccctagtgaggcagatctcctaaataagtgaggcacagcttgagtggtgagtttgccaagaaactatgaacgataagactgtggagcgtagagcacaagtcaagccttaaatgctttcaaatacagatattttaagatattctgtcaggcaaaaacaacagtataggcagattttaggcctgaagcccaccagtttgcaaaccctgcagcaccctttcattcaaaccttaaaatattttaacttaggataatgtacatcctgtgacctatttttaacctttatttttctttactgctctgtgactatcccttcttttctcctcccttggtttacaaaaacttctgtgctcttctccatacctcttgacacacataccttgagtggtatcattcatttcaactaacatttcaatcagctaaaaattccagatatttatatccaactctatcaatgctaagaaatacctcatgaatg

SEQ ID NO: 285146 - DNA, 215 bp, Homo sapiens
cttcgcctcctcagcaccttcaagcccccagcctacgaggatgtggttcaccgcccaggcaccaccccccgccccccgcctccgygccttatactgtcgccccaggccgccccttgactgcttccagtgaacaaacctgctgttcctcctcatccagctgccctgcccattttgaaggaacaaatgtggaaggtgtttcctcccaccagagtgcc

SEQ ID NO: 285147 - DNA, 617 bp, Homo sapiens
attacatgatgttctaaatgacttaacatgcctattaaccaaagctttataactttatttctgatgtcgttcagtttctaaaatgtttcacatgctctctgccttaaaagggttaagagttrataccacataatttacaccactctttttttggtaagcggaaacagggtcttcctctgtccccaggctggagtgcagtggtgcaatatagctcactgtcacctccagctcctgggctcaagtggtccaccagctcaagcttcccaagtagcaaggactacagatgcatgccagcatgcctggctgattttatttttctttctgtagagaccgagtctcactatgttgtccaagctggtctcaaactcctggcctcaagcaatcccctcacctcagccttccaaagggaggggattacaagcacgagcccaccacacctggccttataccattctcagtggctccacatcaattatagcactacactgtcatacaatgatcccctcagagtggccagggctaccactgtgaagagacccaaatctgcttttagtagtaaataatcccaaactgcaatgtttgtgtactcacatatcctctcttccaggattcttttt

SEQ ID NO: 285148 - DNA, 617 bp, Homo sapiens
attacatgatgttctaaatgacttaacatgcctattaaccaaagctttataactttatttctgatgtcgttcagtttctaaaatgtttcacatgctctctgccttaaaagggttaagagttaataccacataatttacaccaytctttttttggtaagcggaaacagggtcttcctctgtccccaggctggagtgcagtggtgcaatatagctcactgtcacctccagctcctgggctcaagtggtccaccagctcaagcttcccaagtagcaaggactacagatgcatgccagcatgcctggctgattttatttttctttctgtagagaccgagtctcactatgttgtccaagctggtctcaaactcctggcctcaagcaatcccctcacctcagccttccaaagggaggggattacaagcacgagcccaccacacctggccttataccattctcagtggctccacatcaattatagcactacactgtcatacaatgatcccctcagagtggccagggctaccactgtgaagagacccaaatctgcttttagtagtaaataatcccaaactgcaatgtttgtgtactcacatatcctctcttccaggattcttttt

SEQ ID NO: 285149 - DNA, 617 bp, Homo sapiens
attacatgatgttctaaatgacttaacatgcctattaaccaaagctttataactttatttctgatgtcgttcagtttctaaaatgtttcacatgctctctgccttaaaagggttaagagttaataccacataatttacaccactctttttttggtaagyggaaacagggtcttcctctgtccccaggctggagtgcagtggtgcaatatagctcactgtcacctccagctcctgggctcaagtggtccaccagctcaagcttcccaagtagcaaggactacagatgcatgccagcatgcctggctgattttatttttctttctgtagagaccgagtctcactatgttgtccaagctggtctcaaactcctggcctcaagcaatcccctcacctcagccttccaaagggaggggattacaagcacgagcccaccacacctggccttataccattctcagtggctccacatcaattatagcactacactgtcatacaatgatcccctcagagtggccagggctaccactgtgaagagacccaaatctgcttttagtagtaaataatcccaaactgcaatgtttgtgtactcacatatcctctcttccaggattcttttt

SEQ ID NO: 285150 - DNA, 1185 bp, Homo sapiens
aatgctgcatgagtgtgtgagaaccctttgcaggtaaagtacataaacttatgtgcataaactatggggcttctatttggctataaaggggtaagattttttgtttttatttatttaatttcttccattattatttgtttttatatattttgcttaggcttatmatacttctaggtacctggccttgtgattacgaaataccttttagaaggcaaggaatctctatagcaacttggaataccatttaccagcagtgaagattcctaaaatgaaaaagtcattcttgtctacaatctgccaatgtcctgctttggcagttagattggaaaccaagatatgtcatgaacttccttatatcatacaggcattcttttcttaacctacgtttgttggcaaatcccttcaattctaacattttgtttactatgatatgttcagaaatattctcctctagcatttttgaaattgcatctcaggaataattcaagcagaatccaatatttattaagataattctgattgtattttgacaataatattaagttttattcaattaaggcaattaggttactttcacaatttatctgaaaatwaatgctgcatgagtgtgtgagaaccctttgcaggtaaagtacataaacttatgtgcataaactatggggcttctatttggctataaaggggtaagattttttgtttttatttatttaatttcttccattattatttgtttttatatattttgcttaggcttataatacttctaggtacctggccttgtgattacgaaataccttttagaaggcaaggaatctctatagcaacttggaataccatttaccagcagtgaagattcctaaaatgaaaaagtcattcttgtctacaatctgccaatgtcctgctttggcagttagattggaaaccaagatatgtcatgaacttccttatatcatacaggcattcttttcttaacctacgtttgttggcaaatcccttcaattctaacattttgtttactawgatatgttcagaaatattctcctctagcatttttgaaattgcatctcaggaataattcaagcagaatccaatatttattaagataattctgattgtattttgacaataatattaagttttattcaattaaggcaattaggttactttcacaatttatctgaaaat

SEQ ID NO: 285151 - DNA, 592 bp, Homo sapiens
aatgctgcatgagtgtgtgagaaccctttgcaggtaaagtacataaacttatgtgcataaactatggggcttctatttggctataaaggggtaagattttttgtttttatttatttaatttcttccattattatttgtttttatatattttgcttaggcttataatacttctaggtacctggccttgtgattacgaaataccttttagaaggcaaggaatctctatagcaacttggaataccatttaccagcagtgaagattcctaaaatgaaaaagtcattcttgtctacaatctgccaatgtcctgctttggcagttagattggaaaccaagatatgtcatgaacttccttatatcatacaggcattcttttcttaacctacgtttgttggcaaatcccttcaattctaacattttgtttactatgmtatgttcagaaatattctcctctagcatttttgaaattgcatctcaggaataattcaagcagaatccaatatttattaagataattctgattgtattttgacaataatattaagttttattcaattaaggcaattaggttactttcacaatttatctgaaaat

SEQ ID NO: 285152 - DNA, 582 bp, Homo sapiens
aaaaccaatcagctgacaaactcatttccacctctcaaggcctctcatattaatccctcctttccacacatatactgccctagctcagaccctcttcatacttcttaaactgacacagacaacctcacttggaggctaactggtctccttatcttgaatcccaaaatacacctatttacaacacagatccaaaacctcrtaactcctttctcaaaatcctgtaatgccctgtcaattgcattcagaagaaaaccaccttttcatcctttctccctttaagagcacattagtaagagtgtaaatcccagttctaccacttagtaggtttatttcatttgtaacctctatctcatttgtaaaaaaaagaatcatagtactatcttctcaataaagctgttctaaggaaataattattactaataaagcactgagaacaatgcctagcacatagaaaatgctcaaaaaaggttattattgttatccaaaccctatcctgcctcaccctacagactacttgtacttttataagtatttattctacagatttattcagtccttatgactaggagatgaagatacaaa

SEQ ID NO: 285153 - DNA, 502 bp, Homo sapiens
actcatttccacctctcaaggcctctcatattaatccctcctttccacacatatactgccctagctcagaccctcttcatacttcttaaactgacacagacaacctcacttggaggctaactggtctccttatcttgaatcccaaaatacacctatttacaacacagatccaaaacctcgtaactcctttctcaaaatcctgtaatgccctgtcaattgcattcaraagaaaaccaccttttcatcctttctccctttaagagcacattagtaagagtgtaaatcccagttctaccacttagtaggtttatttcatttgtaacctctatctcatttgtaaaaaaaagaatcatagtactatcttctcaataaagctgttctaaggaaataattattactaataaagcactgagaacaatgcctagcacatagaaaatgctcaaaaaaggttattattgttatccaaaccctatcctgcctcaccctacagactacttgtact

SEQ ID NO: 285154 - DNA, 502 bp, Homo sapiens
actcatttccacctctcaaggcctctcatattaatccctcctttccacacatatactgccctagctcagaccctcttcatacttcttaaactgacacagacaacctcacttggaggctaactggtctccttatcttgaatcccaaaatacacctatttacaacacagatccaaaacctcgtaactcctttctcaaaatcctgtaatgccctgtcaattgcattcagaaraaaaccaccttttcatcctttctccctttaagagcacattagtaagagtgtaaatcccagttctaccacttagtaggtttatttcatttgtaacctctatctcatttgtaaaaaaaagaatcatagtactatcttctcaataaagctgttctaaggaaataattattactaataaagcactgagaacaatgcctagcacatagaaaatgctcaaaaaaggttattattgttatccaaaccctatcctgcctcaccctacagactacttgtact

SEQ ID NO: 285155 - DNA, 582 bp, Homo sapiens
aaaaccaatcagctgacaaactcatttccacctctcaaggcctctcatattaatccctcctttccacacatatactgccctagctcagaccctcttcatacttcttaaactgacacagacaacctcacttggaggctaactggtctccttatcttgaatcccaaaatacacctatttacaacacagatccaaaacctcgtaactcctttctcaaaatcctgtaatgccctgtcaattgcattcagaagaaaaccacmttttcatcctttctccctttaagagcacattagtaagagtgtaaatcccagttctaccacttagtaggtttatttcatttgtaacctctatctcatttgtaaaaaaaagaatcatagtactatcttctcaataaagctgttctaaggaaataattattactaataaagcactgagaacaatgcctagcacatagaaaatgctcaaaaaaggttattattgttatccaaaccctatcctgcctcaccctacagactacttgtacttttataagtatttattctacagatttattcagtccttatgactaggagatgaagatacaaa

SEQ ID NO: 285156 - DNA, 1085 bp, Homo sapiens
actcatttccacctctcaaggcctctcatattaatccctcctttccacacatatactgccctagctcagaccctcttcatacttcttaaactgacacagacaacctcacttggaggctaactggtctccttatcttgaatcccaaaatacacctatttacaacacagatccaaaacctcgtaactcctttctcaaaatcctgtaatgccctgtcaattgcattcagaagaaaaccaccttttcatcctttctccctttaagagcacattagtaagagtgtaaatcccagttctaccacttagtaggtttatttcatttgtaacctctatctcatttgtaaaaaaaagaatcatagtactatcttctcaataaagctgttctaaggaaataattattacyaataaagcactgagaacaatgcctagcacatagaaaatgctcaaaaaaggttattattgttatccaaaccctatcctgcctcaccctacagactacttgtactwaaaaccaatcagctgacaaactcatttccacctctcaaggcctctcatattaatccctcctttccacacatatactgccctagctcagaccctcttcatacttcttaaactgacacagacaacctcacttggaggctaactggtctccttatcttgaatcccaaaatacacctatttacaacacagatccaaaacctcgtaactcctttctcaaaatcctgtaatgccctgtcaattgcattcagaagaaaaccaccttttcatcctttctccctttaagagcacattagtaagagtgtaaatcccagttctaccacttagtaggtttatttcatttgtaacctctatctcatttgtaaaaaaaagaatcatagtactatcttctcaataaagctgttctaaggaaataattattactaataaagcactgagaacaatgcctagcacatagaaaatgctcaaaaaaggttattattgttatccaawccctatcctgcctcaccctacagactacttgtacttttataagtatttattctacagatttattcagtccttatgactaggagatgaagatacaaa

SEQ ID NO: 285157 - DNA, 561 bp, Homo sapiens
agattttggcaattctgttcaagtttggcaattctgttcaggtttaatcataagatcttggcaatttagtcacatcttcagtctctacttctaattctaattctcttgctatttccaccacatctgcagtgacttcctccactaaagttttgagcccctcaaagtcacccatgagggttggaatcaacttcttccaaattcctgtttatgttgatattttgtcctgatttcccaggtagatgtcctcaaacttcgtgcttaaataagcccttcaaagttctattctaatccctttgattatttcaggttgayggactagaggttgctgtgtgtgtatgtgtatcactatgttgtcacctgacaaatgacaaggttcataagtttagaaaagagagctttatttctcataaagggttgcagcctgcaggtggccattctgacaggtcaggaagcatggactgtagccagcagcccttcaagggaggggttaaggaaacagcaatttactctgagtgggttggccatgtatatatattcaacaggttataagaggagctatga

SEQ ID NO: 285158 - DNA, 474 bp, Homo sapiens
gttggccccaacaggagtggtgtgtgaaagaggtggaggagtagatgaggataaagcaggtcagagctctgtgtgggagcagatagcagtctccgtggtcagcctgctttgtggccctgaaagacagagtcactgcagagactagctatcaaattagaaaaactttctgagaacaaagtgtactcttaaaaaataaaactcctcattttatagaatcaaatgaaatggagttgcaagtagccttagaaatctaacggagtgagtctctgtgctggctggtcattaagatggttaagcacctacatatttctgaactcagtcacsggcctgctgaatcagtacctttcacaatggggcccaggagcgtaatttaaaaaaaaaaaattccaagtttgataggttaagtgaccctctatctgctttcttgccatgacttcactgtgccaccctttgactttgagacagtccatgtga

SEQ ID NO: 285159 - DNA, 595 bp, Homo sapiens
tctgtacctgctatcatggaaggcttaatgagtaggatgatagaaaagaaaaggcaggatttcagaattagactagtgtggcggtttctaatattatggaaagttacttagtcttccagagctttcattttcacctgtaaaatcagctatgtcaaagtcatatggtacakgtatataaagtttcagtttcgggtatacaatagataaaccaataaaagaaaaccagttaatgtagtgatgaactcttaggtaaatataaaaatttttaaaccaaacttacttttgctgtttatttcatcatcctgctttttggttaaaactctagaaatggcaagattttttctgtctttaaagttcttatctttgtattctaaggagattttcacactaccgtctttcatatgttttgatttaagatgacaatattctattcagaattgtaaagaatagtctttaaatgaaaacataattctatgtgtctgtcatattaaataaataggacctcaaaaaatgtcactctacctaaagccaggaaaacctgtgagtcctcatgtttggtagctaattttcttgcaatgaaataccctatggttga

SEQ ID NO: 285160 - DNA, 511 bp, Homo sapiens
ttatggctatgcctctttgcagagggatatgagcagcagacaacagtcccttcagcctataagcatgtaaaataaaaaacaagttagttacttccaagatacaatgggggcacaggcattgtgtaaaaagttcctgttacaaatgggagaaattgaccaaaacaaaggggccacagaccccatgaatatctgaaacccagccagtcattcattaaatcttaaagctccaatatcttctttgattccatgtctcasatccaggccatgctaatggaagaggtgggctcccaaggccttggggagctccacccctgtggttctgcagggtacagccccacagctgctttcatgggctggcattgagtgcctgcagcctttccgggcacacagtgcaagctgtcagtggatccgaggtctgaagcatggtggtcctcttcacacagctccattaggcagtgcccaagtgcggactctgtgtgggggctccaacctaacatttcccttccacatt

SEQ ID NO: 285161 - DNA, 511 bp, Homo sapiens
ttatggctatgcctctttgcagagggatatgagcagcagacaacagtcccttcagcctataagcatgtaaaataaaaaacaagttagttacttccaagatacaatgggggcacaggcattgtgtaaaaagttcctgttacaaatgggagaaattgaccaaaacaaaggggccacagaccccatgaatatctgaaacccagccagtcattcattaaatcttaaagctccaatatcttctttgattccatgtctcacatccaggccatgctaatggaagaggtgggctcccaaggccttggggagctccacccctgtggttctgcagggtacagccccacagctgctttcatgggctggcattgagtgcctgcagcctttccgggcacacagtgcaagctgtcagtggatccgagstctgaagcatggtggtcctcttcacacagctccattaggcagtgcccaagtgcggactctgtgtgggggctccaacctaacatttcccttccacatt

SEQ ID NO: 285162 - DNA, 352 bp, Homo sapiens
tcatataatgagttagggaggagcctttcctctttgctttttgttgttgttgttgttgttgtttgaataattttggtaagaattgtaccatttcctctttgttatatctgattgaattcagctgggaatccaggtgttccagggctttatttgcttcatgggtttttattactgatttaatttggaacttgttattggtctgttcaggttttcactttcttttagttaatttttgagaggttgtgtgtttccaggaayttatccaattcctttagattttctcattcgtggacaaagaggtgttcatattagtctttgaggatattttgcatttctgtgagattggttatac

SEQ ID NO: 285163 - DNA, 583 bp, Homo sapiens
atactatacagctatagtaaccaaaatagcacagcatggtactgatataaaaatagaaacataaatcgatgaacagaatggaatactcacaaataaagctacatatctaactgatctttgagaaagttgacaaaaacatacactggagaaaaagaaaaccttttcaataaatgatactataaaaacgggattgccatatggagaagaatgaaattagacccctatctctcatcatataaaaaaagaactcaaaatggattaaagacttaagtgaaagaggtgaaattataaaaatactagaagaaaacctagagaaaattcttctggacattggtcttggctaagaatttatcactaagacctcaaaagtacaggcaacasaaacaaaaatagacaaataggactcaattaaactaaaaagcttctgcacagcaaaagaaagaatcagcaaagtgaacagacaaccagcctgcaaaatggaaaaaaatatttgcaaactatgcaaccaaccaacggggaactagtatgtagaatttatagggaactcaaacaactcaacaacaacaacaatgaaaaaaacacc

SEQ ID NO: 285164 - DNA, 576 bp, Homo sapiens
cttacttgtagactttaagaaagtataaatcagaaacagtgaatagaatggtggttaacagaggctgggaataggaagattgggaaaatgttggtcaaaagatgaaatttcagttagatggaaggaataagttcaaaagatctactgtaggtcacagtgaccattagttaatcacagtatattgtatacttgaaaattgttaagagagtagatttcacatgttctcaccacaaaaaaaaaaaagtgtgtgaggtaataagtatgttagggacttgatttagccattctataatgtatacatacatcaaaacatcatgttgtatattacaaatatataycattttatctgtcaatttaaaaacattaaaaataatgaaaagaatcgtgttccaccaaaagacatgtgaatgtgatcttatttggaaatcagatctttaaaaatgtaattaagatgaggtcatactagattagggtggactcatgtctttatgaagaaaaaaaaaaagaaaggaaataaagctcaccccaagggtagtttgtagcgtccaagtaatctttgtggatttatctttcttt

SEQ ID NO: 285165 - DNA, 606 bp, Homo sapiens
tgagccagaaactgctgtaaaaacagcagtttatacacatttgtttccttcccatggttgtttccttctcagcgtaggcacagagcctttgagaagggcagcctctgaacaagggagccaggaacgcaggtaggacatgtcttttgcaggcatgttcagccctagcaggatgcaatccttcaagctggaattccactgggtatttgagagggaccaaggtaatgggtagagaggaagccttcaacaggactcacatcttggtccaggcctcctctctcactatccaagtccatccaagttttaggaccctggggggcaacaatcaggcccacccacttcaacagggacagattcytcaatctgtgcccagttcacacacacctgcttccgctggtcgcacagttaaagagaattagccttatggtaagagacagaccactttctctctgcccctcactggcacctctcttcagcatcttcacaggaaccgctgggaagatggaggcctgccttctcagaataggtacttttaaaagaagacataaaaaggaccaacaaaatatcaaaaacagttaaacatcacttatcatcagaaaaatgcgcatt

SEQ ID NO: 285166 - DNA, 531 bp, Homo sapiens
aagatggctgactagcatttcatgcttgcctcctccattgagaagaaccaaaatggtatacagacaatcacacttcaaatacatcatccaagagaacactggtatgcaacagaaaagtgacagaaaacaccaaatgcaagaaaggagaaggaagagaagtagcctacttagccaggattggctgggagccgagaatgacttcccaacacagggaaagggtaagcatgagacttccagcagcccacattgccatccaatcctggccacgagagggcccctcgaccatcccaagtcctgaaatgaacacaggagctgctggaagactgtgagacagaactastccagcggggagctcatgcagggtcccacaccctctctgagacctaagtggctacagcaaggttctatttttaaacctagcctttaacagacactatacagtcttgggccccagtcaggactgaaggataagggaacctcgggttgtcactgctgagactgggtcacaagctaggaataggctaccgcagc

SEQ ID NO: 285167 - DNA, 559 bp, Homo sapiens
actaacagcacagatatattttcaggaaaaagtcctttcctatgaaagtaagttaaaaataagaagtaaaaaggaagaagtaactgttataccagatgtacaaatatcaactcaaagacacaggaaacataaaaaagcaagtaaatatgacacctccaaaggaacataatagtactaacgatagattttaattgaaaacaaattcttgaaataccagataaagaattcaaaatattttttttattttactttaatttcagggatccatgtgttgaatgtgcaggtttactacataggtataaatgtgccatggtggtttgctgcacctatcaacccatcatctgggttttaagccccaaatgcattaggtatttggcctaatgctctctaaaaattgattttaaagaagttaattgaaatacaagagaattctgaaaaacaatacaaagaaatctgaaaacttcakattcagaatgtttcattcaggacttaaataaaacatttaccagtgattgatttttttaaaggaccacacaaaaattctagaaaggaaaaattc

SEQ ID NO: 285168 - DNA, 263 bp, Homo sapiens
caaaaataaaataaaataaaaataaacagaatgttgatgaaaatagtaaaaaatagcactagcacaaaattatactactacttagggaaaataaaaatatatgctaaataatacaacatatttctcaagaatgtatatatgtcctagtacatgcatcaaatacattagactaggtgcctatacacaggaacaagagtgtgaataaataagatacaytgaaaagacaaattgtaatagtgtactatcaaatatgagatgtgact

SEQ ID NO: 285169 - DNA, 606 bp, Homo sapiens
tttcctaaaagaacacacatagattatattcattgtgagcagaacagtctcatgtagttaaatggggcattaaagactgcttgtctctgtctgtactagggagtatcattctttgaccatcatccatggtaatgatagacttatttgtactgaaccatatttttcacagctacatcactgttaagaaaaaaaatcaagattacattcatctacaaaatattatttctgtaaatttacattttcctggagcaaatttatatgttattgaatctttagtaaaacaattgtgatcaattgaaaaacaataccagccactgtttccattttgtgtatacatgtttatgtgggtgtgtatatgtgtgtgtgtgtgtgtgtgtgtgtgtgtgtgtatggtttattcacatccatctgggacaatactttttgatgaagccaactatctaaattgagtgcctatattttccctgaaaggaatgtttattgctgctgtcgkttcttttatgttggagagagcaaacttgcaatttacaaggacactctctgaggttgagagcacagaaacaatcttgaatatctacttaataatttgctcttaaataaatagct

SEQ ID NO: 285170 - DNA, 559 bp, Homo sapiens
ctctcctgggatatttttgctcacagatcaatacttgattgcatattttgtccttttctcctgtttacttggtaaacaactttttcccaataatttgagagggaacagctttttcttcttgatagaaaactatcttcactcctcttttgggactgcttccaaatgttcctttttgtctaccacaagcaaaattctgtgccattatcacaacatckttagaacctaattttttgacaattgcgtcagcttcatctggtgactttgccacatatcctttggaagggagacaccagcttcttgcaacaatttcatattcatatattcatgtagtgagagattcttttgctgttactgctgtacttggagttattggttattaaacagctcagaaattcccagaacctgggcagtagactgtactatggtctggtctgggactgatggctgtgaaaagtggcagctaattgtcagctatagaacatgaaggccaccattcctaagtctgaccctgtcccctcctgctgtgtgcctccagctgctttgtaatagagaatttcca

SEQ ID NO: 285171 - DNA, 567 bp, Homo sapiens
caaacagcctggccaacatggcaaaaacctgtctctactaaagacacaaaaattagctgagcgtggtggtgtgcacctgtagtcccagctactcaggaggctaaggcctgagaatcactggcaccctggagacgttgcagtgagccaacactgcaacactgcactgcagcttgggtgacagagagactctatctccaaaataagaaaagaaaaggtatatgcacaggcatgttaattgttacatcatttttagtattaaaaaactaacagtaacctttagttcattaatgagaatgatgaaatagttattttatattatagaatatgtcatgtgaccaaaaaaatcaattttttaaaaacatattactaaccaaaaatgtcacagaatagttgtgtagatttatctcatttaagcaaggcacataaacatgtaagtgattagatagagaactgatggagtattttttgagagcagtccaaaaatgtaagataaarggagatctttcacattttggtttatttacttttggcagaattgaagactatattataaaatgattttaagtt

SEQ ID NO: 285172 - DNA, 608 bp, Homo sapiens
gggggggaatcttaaaagcaacctaatggattctaaaggctttccttggtctgcacctctgccatacttggaatgacatttaaaagcacctttcaaccacattctgcctgaatggaaaaagcaaagcatctcatactgkatgaccatcttcagtccaagtgctcaagaaattctgcctgtctagcagccattttccaaatacaactcaagagttatttttgttttgcttgtagcccttacttcttctcttttctattaaagagcaaaatctatttttttttcttttttgaggtttgacttcaaaccctagttctgcttgtgctacattttcccatgtgccaagtgggaagtaatgatgatgcattaacttagaaaaatgatcatattaatgcatagcaaaagagcttgcattttcaaagcctagtatgttttggataatacatcctgcttactagcagaagcaacaattaagagcagaaaggatacaaatggaaagcaagtgacatcagttgcttcaaagcctttagtcactgaccatctaaaaactcaccttcatctgtgatcataatataggaagaacactgaattggtggcaccatcggtaattg

SEQ ID NO: 285173 - DNA, 1709 bp, Homo sapiens
gggggggaatcttaaaagcaacctaatggattctaaaggctttccttggtctgcacctctgccatacttggaatgacatttaaaagcacctttcaaccacattctgcctgaatggaaaaagcaaagcatctcatactggatgaccatcttcagtccaagtgctcaagaaattctgcctgtctagcagccattttccaaatacaactcaagagttatttttgttttgcttgyagcccttacttcttctcttttctattaaagagcaaaatctatttttttttcttttttgaggtttgacttcaaaccctagttctgcttgtgctacattttcccatgtgccaagtgggaagtaatgatgatgcattaacttagaaaaatgatcatattaatgcatagcaaaagagcttgcattttcaaagcctagtatgttttggataatacatcctgcttactagcagaagcaacaattaagagcagaaaggatacaaatggaaagcaagtgacatcagttgcttcaaagcctttagtcactgaccatctaaaaactcaccttcatctgtgatcataatataggaagaacactgaattggtggcaccatcggtaattgwgtaaaacatcagaaactttcctattcacatcacagtatattaatcctcccaaggagcatgtatattttaacaaggatcaaagtcataagtttaagtgcttagaataaaattttgwacatcagtggacttacagctgggaaaagtgcctacctattcaaaagagtaacccatttttttctaataaaatattccagagagccttatgcatcaattcatttttcaatgaccttgtagtgctcttctgagataaaatttaagcttaattttgggagagattaacattgtatagggtgtcttgcaatattcggaattggagttgtaccaagtcaaggtaaaatacatagaagcattgtcctatgttttttctcatagaacttgtttcgttgcccacttatatccaaagcatgtctaaatgtattcatttatttatcttcttttcacataaattggcttcacacaagttaggatttaagagataattttaggaaaattaggatattaaataaaaataaatatatatatttatttaagccattccttaggaattcttaatgaaggtaatagtaaaaggtaattagaaawcagctgggaaaagtgcctacctattcaaaagagtaacccatttttttctaataaaatattccagagagccttatgcatcaattcatttttcaatgaccttgtagtgctcttctgagataaaatttaagcttaattttgggagagattaacattgtatagggtgtcttgcaatattcggaattggagttgtaccaagtcaaggtaaaatacwtagaagcattgtcctatgttttttctcatagaacttgtttcgttgcccacttatatccaaagcatgtctaaatgtattcatttatttatcttcttttcacataaattggcttcacacaagttaggatttaagagataattttaggaaaattaggatattaaataaaaataaatatatatatttatttaagccattccttaggaattcttaatgaaggtaatagtaaaaggtaattagaaaatgttatctttcagataactatctacgtaaaagtattgatgattcataaaatgattcagtgtgctta

SEQ ID NO: 285174 - DNA, 540 bp, Homo sapiens
gaattctctttttgccagttacattttctagaaataacttctacaattgcttaaataatattttcatttaacttttaaatgtaaatttattaattccccatagttccaccaaacactgtaaatttttaatatatattcttttacacaccatgtgtcttatgtgtgtgcacatatatacatatagataaagtattacttatgttactttgtgtatgtagaaacaattcttcacaaacaattcttcaaagaaaagctttgtagtggaattattccatatataaacttaactattttcttaaggcaaatacccagaaggtgacttgctagaataggtatttaaatttaaaaaaaagaagtattgccaaatggattgcaccaattaaccctctccccaacagataagaaagccctcttccctctgctgatgattatgctattacttttaaaaattgcaaattttataaataaatatagtacctcattcaaaktttggcttctctaatttttcaaaaacttaaaaataaaactaccattatgacc

SEQ ID NO: 285175 - DNA, 608 bp, Homo sapiens
acatgcagtatttggttttctgttcccatgttaattcgcttaggatagataatgtgcrgtatttggttttctgttcccatgttaattcgcttaggatagataatgccctccaactccacttgtgttgctgcagagggcatgatttcattattttcatggctgtgtactattccattgtgtatatgcatcacattttctttattcagtccactgctaatgggcatctaggttgatttcatgtctttgctattgtaaatagtgccgcaatgaacatatgtgtgcatgtgtctttactgtagaataatttatattcctttgcatatatacccagaagtgggatagctaggtcgaatggtagttccattttaagttctttgagaaatctccaaattgctttccacaatgtctgaactaatttacattccaactgacaatgtataagcgttcccccttctccacaaccttaccagcatgtggtatttctgactttttactaatggccaatcttgcccggtcagtcccacaggccctagctgagtgacggatgaaaggagtactcagacacaggtatgcagtgtaagagcagctgggggcttctgggctctagt

SEQ ID NO: 285176 - DNA, 553 bp, Homo sapiens
ctgaactaatttacattccaactgacaatgtataagcgttcccccttctccacaaccttaccagcatgtggtatttctgactttttactaatggccaatcttgcccggtcagtcccacaggccctagctgagtgayggatgaaaggagtactcagacacaggtatgcagtgtaagagcagctgggggcttctgggctctagtggccaaggtgcagcagcaaccccaagaagctgaagctgcttgcttttattcagagcagacagaatgccaaaagcctggagcaaacacaatctgtgggtaattaacatttatagttcccctttcagggaacctcatgtgcatggatgatcaaagattgggttcccagtcaacataagtaaacaagcctgtttaagataaattcccctacacttccttgtacctactccttgccctctgccttagggtcagagaacagcagccttcagctattctcccctggagctttgcaaagccttccagccttttgggaaggcctgctcctttccctgtcatttctcccaccactctggc

SEQ ID NO: 285177 - DNA, 553 bp, Homo sapiens
ctgaactaatttacattccaactgacaatgtataagcgttcccccttctccacaaccttaccagcatgtggtatttctgactttttactaatggccaatcttgcccggtcagtcccacaggccctagctgagtgacggatgaaaggagtactcagacacaggtatgcagtgtaagagcagctgggggcttctgggctctagtggccaaggtgcagcagcaaccccaagaagctgaagctgcttgcttttattcagagcagacagaatgccaaaagcctggagcaaacacaatctgtgggtaattaacatttatagttcccctttcagggaacctcaygtgcatggatgatcaaagattgggttcccagtcaacataagtaaacaagcctgtttaagataaattcccctacacttccttgtacctactccttgccctctgccttagggtcagagaacagcagccttcagctattctcccctggagctttgcaaagccttccagccttttgggaaggcctgctcctttccctgtcatttctcccaccactctggc

SEQ ID NO: 285178 - DNA, 1104 bp, Homo sapiens
taacatgttatttaaattctacctcataacaacactgtcatttttaaaaatatatgagtgtgtgtatgtatatatgttatatgtgtatatatatatttagagtttctatgtgtgtgtgagtgtgtgtatatatggtgtagataaaatacaygcaatttttttccacatagatggtgtgagaatgagtacatgtaaagaaaactttatccaaaaacatcaatattgaatcaaattttaatttgcaaattttaattcatatataaaatatttcctaaatctaaaaatgttatgtttttctatttttacattaatatttatttcaaaattaaatacatggaagaattatgaatattactgattaatgaataatttatactaaaatagcttgtgtgtttaaagaaggtgggttttgaaaagcaatttctttggatwtgaggatgaaaggttttgtggaaaaacttaaattttcaaagagaggaaaacaatctatataatctatacaaagaaaatgatatagctatttattgataagtaattgaataaaaaataattttaattaaaaatttaagatgttaattaaaaataaagtaagttaataataataataggataatgattcagcaatttaaacttaggtataaacaaaggtatagactacaaaaggagaactgtaaatgtcaattaccaaataactccaaaaggcacccatttagcaatgataaaccaggaaagttttctatgcctacaaagtaaagttttaagactgatattattcttgccaactattttggcaacagttgatctatctttatttacatcgctcttctcaataaaatatcttaagtcaaattgtttatattctaattaaattctwccaattttacattttataattattgtgtcagtgaagaagttttattgttgctcttctctactataaatattcaagtggtggttttcctcttctttttacctttttaaaattattattatactttaagttctggagtatatgtgcagaacatgcaggtttgttacatagttatacacgtgacatggtggtctattgcacccatcaacccatcatctacatgagctatttct

SEQ ID NO: 285179 - DNA, 672 bp, Homo sapiens
tgaggatgaaaggttttgtggaaaaacttaaattttcaaagagaggaaaacaatctatataatctatacaaagaaaatgatatagctatttattgataagtaattgaataaaaaataattttaattaaaaatttaagatgttaattaaaaataaagtaagttaataataataataggataatgattcagcaatttaaacttaggtataaacaaaggtatagactacaaaaggagaactgtaaatgtcaattaccaaataactccaaaaggcacccatttagcaatgataaaccaggaaagttttctatgcctacaaagtaaagttttaagactgatattattcttgccaactattttggcaacagttgatctatctttatttacatcgctcttctcaataaaatatcttaagtcaaattgtttatattctaattaaattcttccaattttacattttataattattgtgtcagtgaagaagttttattgttgctcttctctactataaatattcaagtggtggttttcctcttctttttacctttttaaaattattattatactttaagttctggagtatatgtgcagaacatgcagrtttgttacatagttatacacgtgacatggtggtctattgcacccatcaacccatcatctacatgagctatttct

SEQ ID NO: 285180 - DNA, 521 bp, Homo sapiens
gaacttgtaatactatgttgaataggagtggtgagagagggcatccttgtcttgtgcctgttttccgagggaatgcttccagtttttccccattaagtatgatattggctgtgggtttgtctttttacctttctaaataatgttactcatctttgttggtctctattaagttctaacttttctattttttttgcactgaaccctgtatctcatatcaatctgcacactaatctgaagttttgtaacatttactgtccattcagtcatttggcatatcatctacctctcacgttgaatgataacaaatgtttgatttttttttcttttagttataaatacttctcttccagctgatttttaaaggacctaaaccttaatctgaattaggttaagrtggaccttaacttaattagtctgatttttaatttagagcattaagttcatagattgagctagaaaacttgctcatttacattcttgttagagaatattcactcatgaatttaacttattttaaaaaa

SEQ ID NO: 285181 - DNA, 386 bp, Homo sapiens
tcttttataaattacccagcctcagatatttcttaataacagtgattgatccagactaatacactgctcaagggtccactcagttgactaacagattgctttatcttaaaaggatatttaagagcttaatattttgggaagttgaaaaatatagggctacataactctacatactcactcagtgaaaagagtgagctgaagtgacaatatctactgtttccaaaggaactagataccccatcaacacattgtctttgkgcaaacctatcaataaaaaccagcagaagagatgaaaacagggtgatccagagactaaccaaacatattgcaaacactgacaggtaacacatttgactacttaagacacaaaacaaatacagtaagat

SEQ ID NO: 285182 - DNA, 517 bp, Homo sapiens
caaaacagtaaaaatattcaaagactaaattaaaagagacagaaaaccttttcaacacaataaaaatgaaatcatagtaagaagtagtcactttgcttgtatcactttggcatccatagtgacaggtgtctttattcctaaaagagtttattactctcataatgtaatggtttctgttagaaaaaaaaaaaatccatgcctcattactttcaatctcatttgttgctccatgtcatgcatttaagaaaatgaaagcacattaaaatgctcatatatcaacataaccagttatagaatttctagatggattgtacctaaggtattgcaatttattaaatcagttggsaaaagcaaatttattttgtaatgcaatgaaaaatattaagcatattttctgcacttatatcttatgttaccttacaatgcacacaggtgcttaatggaattatttttgacaaacaatataaataatgtaaagtaaaataataaagagcacattattaacaaaattatctaa

SEQ ID NO: 285183 - DNA, 504 bp, Homo sapiens
acatttgtgagcctgacaggtgttttaagaagagaggtacagatgaacatccaaggaaacagtgggaaaaaataatgttaraagagatataaagatttttggaaaaggctgaaaaatgaggagagattatatatatttttaaatcctaagcgttgcttagatttttttttttttagtaaatagaagtaaaccaaaactatattttttacagctctccaagcatgctttgcttagaaatggagccataccacagcatttaaaaacatttcatggtctgtaattaaatgtgccatctttctcagaaatggacctatcttttatttatgggtgacatagagttttaatcaacatagatcaatatattttaagatagattaggtttccagataaatatttacaagtttttgtggaaaaggcattgccagttgaaaataattcctaacaaatagttattaatcgggaaaaataaaaactatttgaggatatactgaaaatcataatata

SEQ ID NO: 285184 - DNA, 504 bp, Homo sapiens
acatttgtgagcctgacaggtgttttaagaagagaggtacagatgaacatccaaggaaacagtgggaaaaaataatgttagaagagatataaagatttttggaaaaggctgaaaaatgaggagagattatatatatttttaaatcctaagcrttgcttagatttttttttttttagtaaatagaagtaaaccaaaactatattttttacagctctccaagcatgctttgcttagaaatggagccataccacagcatttaaaaacatttcatggtctgtaattaaatgtgccatctttctcagaaatggacctatcttttatttatgggtgacatagagttttaatcaacatagatcaatatattttaagatagattaggtttccagataaatatttacaagtttttgtggaaaaggcattgccagttgaaaataattcctaacaaatagttattaatcgggaaaaataaaaactatttgaggatatactgaaaatcataatata

SEQ ID NO: 285185 - DNA, 604 bp, Homo sapiens
gatgggggccgcaaaccaacatggcacacgtatacctgtataacaagcctacgcattgtacgcatgtaacccagaacttaaagtataataatcataccaaaaaaaatcaactgatatcttttaaagccctgaagtgtacaggaaaattaattcctaattataaacatggaaacttatgacagttaattcatcttacacatttacttgtcatgtttagccatgaaaatccactcataactaagaaaactaaataaatattacatttctctcttaaatgttaaaaaaaaattaaacattaagtgaataagtaaataaagccaaatatctgtttaagcaggtgttgaaagcctggccccagaaaaactgctcacactgcagaagccagatgtcagaggarctatgtgcattgcagaagtgggaaatctgagtagactgaaaaaagtaagagaaacccctcgcaatgtctctctagtgctttctactacaaagagtaacatcctgctagctggcaaaggacgaatattaatagagtcaagctccattttcacagagcagacaatgaagagtaaatttggagttcagaggcaataatttgaaatcagtc

SEQ ID NO: 285186 - DNA, 625 bp, Homo sapiens
aactatgtgcattgcagaagtgggaaatctgagtagactgaaaaaagtaagagaaacccctcgcaatgtctctctagtgctttctactacaaagagtaacatcctgctagctggcaaaggacgaatattaatagagtcaagctccattttcacagagcagacaatgaagagtaaatttggagttcagaggcaataatttgaaatcagtccctgtgtagaaagaacagagaatgaaaggaggaagaacagagagaaagttaaagaggatatattcaataactatagaagttatttgttagtttrcttactctataggaatgaaaatgcttaagaaagaaaagaagaagacaaagaaatagaggtaaatttgcataagatggaaggcaaattgtaatgaaataataaatataacagcaggtgaaaatactggcaaaattgtaaatatacatatatatttatctttgtaatataatgattaagtggttttctattaatactaaaaggacaacttttccatagttctgtatctgtatacttcctaaaacataattcttgaaatacaagttttaaagcaggttcagattttagacatagaaaatacggagaagctacatcaatacatgaa

SEQ ID NO: 285187 - DNA, 625 bp, Homo sapiens
aactatgtgcattgcagaagtgggaaatctgagtagactgaaaaaagtaagagaaacccctcgcaatgtctctctagtgctttctactacaaagagtaacatcctgctagctggcaaaggacgaatattaatagagtcaagctccattttcacagagcagacaatgaagagtaaatttggagttcagaggcaataatttgaaatcagtccctgtgtagaaagaacagagaatgaaaggaggaagaacagagagaaagttaaagaggatatattcaataactatagaagttatttgttagtttacttactctataggaatgaaaatgcttaagaaagaaaagaagaagacaaagaaatagaggtaaatttgcataagatggaaggcaaattgtaatgaaataataaatataacagcaggtgaaaatactggcaaaattgtaaatatacatatatatttatctttgtaatataatgattaagtggttttctattaatactaaaaggacaacttttccatagttctgtatctgtatacttcctaaaacataattcttgaaatacaagttttaaagcaggttmagattttagacatagaaaatacggagaagctacatcaatacatgaa

SEQ ID NO: 285188 - DNA, 625 bp, Homo sapiens
aactatgtgcattgcagaagtgggaaatctgagtagactgaaaaaagtaagagaaacccctcgcaatgtctctctagtgctttctactacaaagagtaacatcctgctagctggcaaaggacgaatattaatagagtcaagctccattttcacagagcagacaatgaagagtaaatttggagttcagaggcaataatttgaaatcagtccctgtgtagaaagaacagagaatgaaaggaggaagaacagagagaaagttaaagaggatatattcaataactatagaagttatttgttagtttacttactctataggaatgaaaatgcttaagaaagaaaagaagaagacaaagaaatagaggtaaatttgcataagatggaaggcaaattgtaatgaaataataaatataacagcaggtgaaaatactggcaaaattgtaaatatacatatatatttatctttgtaatataatgattaagtggttttctattaatactaaaaggacaacttttccatagttctgtatctgtatacttcctaaaacataattcttgaaatacaagttttaaagcaggttcagattttagacatagaaaatayggagaagctacatcaatacatgaa

SEQ ID NO: 285189 - DNA, 633 bp, Homo sapiens
ctaaaacataattcttgaaatacaagttttaaagcaggttcagattttagacatagaaaatacggagaagctacatcaatacatgaatagagacatttaaaaattattatgtctaaaattctaaatatatttataaaacatgagctattcaggtgataaaatttacagccaacagcttttgagatgtccaacagtaattagatttcattacctccagacagtgtaaatgatttattaatataattattaattattatagctaaataattagggctgtttgattttcaatattattaccaatttctctgaaatacrtgaggagctatgcactgataaacttgtctttatcgtgggcagatatcaccactatattttaatagatattatatattatttaactgaattcaataggtgttcattcacaaaacaaaattacaaaacatggaaggaatgtattatttaagaatttaacaggaagagttttaaatgttatcaggatttcctttcaaccatgcctaacatataccgtaaagaaataactaaatcttgaaaacccttattaatacagtttatactttctacaaaatggataaagtttttaagtgggaagtgctaggaagtaaagtttcaatc

SEQ ID NO: 285190 - DNA, 636 bp, Homo sapiens
acctgcatgaaataagtcaaataagcatttcaaaaatttatggttagtatacctgttatatgagttaaatgtattataaaaactgaaaatatatatttatagttatacttataaattactggtttttagaatggagcatagttcataatattaactgtattactaataaagtaataatactaataacagttattgttaactaatagatgtaaaggatgttgatttgtttggaataaagtgttcctttggttactgttaagtcattagaataattcacaagcagcaarttgtttagtgaaaatgtaaaattatgttgccgtcattttttataaatccataaatcttaattataagtatgtagactaacagatttaaaggaaatagaacagccatagtaaagtcaaaatagttgtttacattttagtttccttcttttaaatggtttacataaaatggcaaacaaaaaaatggtgtattcattatattcccgcaggagaaatttgggctggaacagaagcctttgctactgatggtgctgggatgttgactctatgtgtcatcatccccaccaactctcagcaatagaaatattttgaatcagaacattgttgttttatccttgcatgacaaaataaa

SEQ ID NO: 285191 - DNA, 448 bp, Homo sapiens
aggaattaacaatatgcaaaattcaaaaaccgtttccatttattatgtgtgattgatttttgtgaaatcttacttggtgcctctctctttttcctcctcaactcttttgaarttttctgactgttataaaatatccttttccgctcttcaatctgtgttatttttctgtttgttagagaagaggttttggaaacatttgccataactaacaatgtgcaggcacggtttccacttacacaagtctgaagagacttcagtattctcttatgatttcatgaaatgtaagtcagccagccagacttagcagtcattgatctgtgagacctcattcagtctagttacccatgatctaggcagttttcagtcaaaaaaaaattttttttagtgcttttcaaaccaccatatcaagaaaaaaagaaagttaaatggatttcgcagacaaatgctc

SEQ ID NO: 285192 - DNA, 571 bp, Homo sapiens
gagcgaggagggatagcattaggaaatgtaatgtaaatgaggagttaatgggtgcagcacaccaacatggcacatgtatacatatgtaacaaacctgtacgttgtgcccatgtaccctagaacttaaagtataataaaaaaaaaaaaacagaaaaaaaaaaaagaaataggctaatgcaattacaaaggctgacaagtctcaagatgtacagggaaattagcaagcaagagatcccagaaagctggtggtgcagttcgtgtctgaaggctggaaggccgagacccaggaaaagctgatattttagtttgaattttaaggccagaaaaaatamataatatttcaattccaaggtagtcaggtaaaataactatcttacagtaaaaaggtcataattttgttctgtttaggtcttcaactaattgaatgaggaccacccacattagggaaggcaatctcctttactaagtgttatggtttggctttgtgtcccccccaaatctcatgtcaaattgtaattcccacatgtcaggggaaagacctgatgggaggtgattggatctttggagtgga

SEQ ID NO: 285193 - DNA, 601 bp, Homo sapiens
tattaaattctttctactttcctcctataaaaatccaaaataatattttctaattataatctgtgttatatctttatcttacacatctttactatgtttccattaacatattttaacactttctacmttgttttctaaaatatgcatttctataaataaagaattttaataaatatatttataacttatttaatatgcatattaaatctatatttccagacatacaaacatatttacatatatttatgggtattgcatgtttgggtatatatctatatgtgtagggcactgcactgtgaaccaccgtcttttcacttttaactgttaacacaatcctagcattaaagtaatatcattctcatttttcagatgcagaaattttgacttgcccaaggttacacagttaattagttaatggcagagggatccactcctcttaggtttagcatgattcagataaaaaattactatgctaaccacaattacctctcctttaaattaactgcattaaaaaaataataatttgaatagcttcctctgcagaaaaagtcaccatggctcgtgttctaaggtagtagagaaattgagttttctattaatt

SEQ ID NO: 285194 - DNA, 536 bp, Homo sapiens
gtaaaaaaaagttagataaaaagatatactgaatagaattatataaaaactactcatattctgtaaccattgtgaatcataggtgggatatatgactataactttatacctaccatcatcatcatgtagttacatagtatcaaagataaagagaagacgttaaataaataggaaaataaagtatttattgatcttcaatrgaactaactttgaactgagcagtcccaataatatatttaaataatattccaaataacattacctagatttgcatggaaatcaaacatggtcaagaacaaaaatgaaataagagcactgaagacaaacaaaagttgtaaagtttattgccaacacatctacagccaataggagttagccaaacaacctaatgagaaaatgggaaaaaatgtaaaaagataaacagaaatggtcaaaaggtagtaaaagagaatgacagtttaatgagtatgaggtttcctttggggtgatgacagtcttctgaaactagatactagtgaaggttatataacattgta

SEQ ID NO: 285195 - DNA, 1687 bp, Homo sapiens
gtaaaaaaaagttagataaaaagatatactgaatagaattatataaaaactactcatattctgtaaccattgtgaatcataggtgggatatatgactataactttatacctaccatcatcatcatgtagttacatagtatcaaagataaagagaagacgttaaataaataggaaaataaagtatttattgatcttcaatagaactaactttgaactgagcagtcccaataatatatttaaataatattccaaataacattacctagatttgcatggaaatcaaacatggtcaagaacaaaaatgaaataagagcactgaagacaaacaaaagttgtaaagtttattgccaacacatctacagccaataggagttagccaaacaacctaatgagaaaatgggamaaaatgtaaaaagataaacagaaatggtcaaaaggtagtaaaagagaatgacagtttaatgagtatgaggtttcctttggggtgatgacagtcttctgaaactagatactagtgaaggttatataacattgtawatgacagtttaatgagtatgaggtttcctttggggtgatgacagtcttctgaaactagatactagtgaaggttatataacattgtaaatctactaaattccactcgagtgtgcacttaaaagtgattaaaatggtatattttawgtgatgtgtattttaccacagtaaaaatgatattcacaaaaatatattaccaaaacagtggtagtatacaactgcttcaagtttaccttataaactgtagtatttcaagagtttctgaatgcacatcctggcctcacaacttattattgtgtatactggtgtcttagtccattcaggctgctctaacaaaatactataaactgaatagcttatagacagcagaaatttatttctcccatttctggaggctcagaagtctaagatcaagctaagatttgatgtcttgtgagggcctattttctggttcctagtcaacaacttcttgtgttttatataatggaaggggtgagggatctgtttgggccccttttataaatgtactaatcctcttcatgaggactttacctcataactaataaactctcaaaggcctcacctcctaatactwagttcacaacttctatcactagaaagtgattggacaattacagcaataagwtaaacttgaaatgaaataaattatacagttgcttattcaaaagcattgtgtaaacggtataaaaatatttagaccagtattttaattaaatgcattcccttatttctttatccttgccccaaactctcacagcccctttctttcttactcatgtatagacacactggcttttatgtcaagtgtttatgtctttaaagaagaattttcttggagactacacatgaacattgaacacttctttccaaacatgctatgttaaaaagttgaattaactgattagctacctggctgcttgcctaaaattttcactactcaatttaatggccgcattcactttatcttatgaaatctgtccaatgtcattaatccatataatttatataagtaattatttctaaatattttatggagagcatagcctttcaagactgtgggttcaacaaatcttccacctccattttcgacattcgtattcagttaaagatactgtggcacagaataagaagc

SEQ ID NO: 285196 - DNA, 596 bp, Homo sapiens
tcttacatttaaatatttaatccatattgagttaatgtttgtgtatgatgaaagatagagggccaatgtcattcctctgcatatagctagctagctatcacagcaccatttattgaataaggagtctttttcccagggttatttttgtcaactttgttgaaggtcagatgacttccggtgtgcaactttttatctggtaatctattctgttctattggtttatgtgtctgttttttcacccataccatgatgttttggtatagctttatagtttaaagtcaggtaatgtgatgtctccagcttcattctttttgcttagagttcctttagctacttgggcttttttggttccatattaaattttagaatacttttttttctaattctgttaaaaatgacattgatagttagatatgaatggggttgaatctgtctatcactttgggaagtatggccattttaatgacattgattcttccaagctgtragcatggaatgtttttttatttgtttgtgtttgtatgatttctttcagcagcattttatagttctccttgttgagacctttcaaatccttgattagatgtattcttaga

SEQ ID NO: 285197 - DNA, 1223 bp, Homo sapiens
tcttcattctcattgtcatcgtgtatagtaggctgaggaggaggagaaagagcagaggctggtcttgctgtctcaggagtggcagagacagaagaaaatctgcattgttcaaacctgtattgttcacaggtcaratgtactattatttccacatttatttattccttttccatagcatgcaaaatctctttagtcagggttgtaaaaactttctgctttatgttcacatttcatacatgcagtattgacacccattttttcatcattcttaacagccaaattctctaaatattttaaaaaatttatttcgaatttatgctcagcatcagttgttaacttttttttcttttttaaacacaggcaacttgaattgagatgcaaagactgaaagcaaaacataaatatccaattatatgcaaacatgccattctgatgtacgctcaatttaccttgacataaatacaaacatcttaccaaattgcatatcttgctccaactgaaagtatagatcaatatttcttaaaagggggtgtttaaaaataataaattatttaccattaaaataagttcagaattaattcaaagtaatattttatgataacatgaatgtgwtcttcattctcattgtcatcgtgtatagtaggctgaggaggaggagaaagagcagaggctggtcttgctgtctcaggagtggcagagacagaagaaaatctgcattgttcaaacctgtattgttcacaggtcagatgtactattatttccacatttatttattccttttccatagcatgcaaaatctctttagtcagggttgtaaaaactttctgctttatgttcacatttcatacatgcagtattgacacccattttttcatcattcttaacagccaaattctctaaatattttaaaaaatttatttcgaatttatgctcagcatcagttgttaacttttttttcttttttaaacacaggcaacttgaattgagatgcaaagactgaaagcaaaacataaatatccaattatatgcaaacatgccattctgatgtacgctcaatttaccttgacataaatacaaacatcttaccaaattgcatatcttgctccaactgaaagtatagatcaatatttcttaaaagggggtgtttaaaaataataaatwatttaccattaaaataagttcagaattaattcaaagtaatattttatgataacatgaatgtg

SEQ ID NO: 285198 - DNA, 636 bp, Homo sapiens
atttattttgtattgtttattttattttattattttattttttgagacaagctctggctctctcacccaagctggaatttagtggcatgaktacggctcactgcaccctcaacctcctgggctcaagccatcttcctgccttagcctcccaagtagctaggactacaggcacatgccaccacgcccggctgatttttttttttttttaatttatttgtaaagacaaggtctcataatgttatgcagactggccaaatgcctttattttttaaggagtaataattctagtcagattagtcaaattttcctacatgtctcctattgaagttatcaaaatgaaccccatttgccatagagtctgggaaatgtatttttcatgcttttaggccttgaaaacagaaaatagtgtagaagaattataaatagtgctaagatatgtaaacaggcaacatttttatacattttatttccttcgtttaaagactcttcattgctgcttttcacaatttgcaattaacttcatataatgctcttatacctatttaagttgttcattcatttgtggccattcctttgtggacataatcttaaacaacctatgactttattcccagaagtcagctattttctcccctg

SEQ ID NO: 285199 - DNA, 636 bp, Homo sapiens
atttattttgtattgtttattttattttattattttattttttgagacaagctctggctctctcacccaagctggaatttagtggcatgattacggctcactgcaccctcaacctcctgggctcaagccatcttcctgccttagcctcccaagtagctaggactacaggcacatgccaccacgcccggctgatttttttttttttttaatttatttgtaaagacaaggtctcataatgttatgcagactggccaaatgcctttattttttaaggagtaataattctagtcagattagtcaaattttcctacatgtctcctattgaagttatcaaaatgaaccccatttgccatagagtctgggaaatgtatttttcatgcttttaggccttgaaaacagaaaatagtgtagaagaattataaatagtgctaagatatgtaaacaggcaacatttttatacattttrtttccttcgtttaaagactcttcattgctgcttttcacaatttgcaattaacttcatataatgctcttatacctatttaagttgttcattcatttgtggccattcctttgtggacataatcttaaacaacctatgactttattcccagaagtcagctattttctcccctg

SEQ ID NO: 285200 - DNA, 521 bp, Homo sapiens
ccttcagtatatgctctggacctggcattaggcactattcagtagaattagtattttaagttaattggtttattcattgtcttttttttatttgtactacgctttattctaaaaagaactttggtagtgytcttggttcatgaattttacttttatgtaattgacacaaaattgtctatattgcattagtctttttcataattaaagtggattctacattactgtagacctattgaactctttagaacgataaaatgtattcttccatgtaacccatcttctatagagcttattgttttacataaatgaatggaatgcaagcatttaatttatagtccaatttgtcataatacttatttttgagagcttcaattattaagaatacttaagaatttaattatacttcatcatgtttcactgtgctataatgacattgacagttttatttttgttttttaaggtaaatctaagcaagagccacttttaagattttctagctcacaaagaagcagagtgaaagc

SEQ ID NO: 285201 - DNA, 604 bp, Homo sapiens
gatattttattagtagcattaagttactttttcaaaccgaatatatatgtagcccttaaatatgtaatagatatgaacagagctagtcagataggtattggggggtctctagtgacctgatcatttccaccatcacccaaataaaccatgtgaattcaaaactttgggttctgtggagcacgatctgaaaacactaatcgaagtaacctcccatattttataagttaaaaatagaggtaagagatcaaaggatttgcccaaatcagcattttaataccagatttaagattagctgacttccaattcttgtgatccctatatattctcctttgtttgacatgatttattttctttcatgtctaatactttttatgttaaaaatagcttacctatgtccatttttctttataaaatttccaggaagataaagaaatatttgatttagtgcttccatatttgaactttttaaataaaagtaagtttattttatttttgtaggttggaagtttcattctagttacttttcttyctaatcattatattattaatatttttaaacattttacttattatatttgcttggtgactggtattttatatgcat

SEQ ID NO: 285202 - DNA, 567 bp, Homo sapiens
tttattttcgttctttatcttatgctatagggacctcatgaatccctatctagtacacaaaaarcctcactttatactagctgaaggtttgtgaacaatgctaccaaatctggcaatagttttcttccccttttattttaatttagactttctcatcttgtttcagaacaaaatagtatcagatgaaatttttcaattacactgctcaaatcatacttccagaaacatggaggagtaaaactggaatgaaatttacgatgcttaaaggccattgttagtacatttgagaactctaacgtacatactaggaaatatggaacttctggaagcatgtatgagggaaataaaattttcatctgtgcatagatcagtcattttgtaaggcaatggaggtaagctttcaccctcatcaattctgtttattcaaggaattacatataagcatatttattgatttctccccaagattattttgaatgttagaaattcactatccacaatcaatagaagagtaactgattactctgaaatatacaacattctacatttcaaatctgtgtaaacatt

SEQ ID NO: 285203 - DNA, 590 bp, Homo sapiens
caaaacctaagtcaacaacctagaaccctctaataatcctttagttataacaaagatgtgcttaaagaatatttgaataaatcttaaatacgaagagatgattctcagttaataaatgaaaataatatgctgtttttcagtagtatggaattgccagacagaaacaaaatagtcaaatagttatttgggtttaaaaataataaggctttaacattattttaatcagcaagtattcactgaccacttacttaaaactaggcaagtacaatcttagaaatcatgkattattatcatacaattaatttattcatattgcctgagaaaatatatatttggaaaaggtaagatatttgttttatggctaatattaagctagattgtatcactctaagcatattcacctaatctttgctgatttaataagtagattcatgcttttagcctcataaactttggatttagtgtatgtaatatggatatactttataaataaggcaaagcatgaatttccacgttaaccaaattgacctcatacctgttaaaatgaggacatcagatggggctttatttgaaaagttaatttgtggcca

SEQ ID NO: 285204 - DNA, 590 bp, Homo sapiens
caaaacctaagtcaacaacctagaaccctctaataatcctttagttataacaaagatgtgcttaaagaatatttgaataaatcttaaatacgaagagatgattctcagttaataaatgaaaataatatgctgtttttcagtagtatggaattgccagacagaaacaaaatagtcaaatagttatttgggtttaaaaataataaggctttaacattattttaatcagcaagtattcactgaccacttacttaaaactaggcaagtacaatcttagaaatcatggattattatcatacaattaatttattcatattkcctgagaaaatatatatttggaaaaggtaagatatttgttttatggctaatattaagctagattgtatcactctaagcatattcacctaatctttgctgatttaataagtagattcatgcttttagcctcataaactttggatttagtgtatgtaatatggatatactttataaataaggcaaagcatgaatttccacgttaaccaaattgacctcatacctgttaaaatgaggacatcagatggggctttatttgaaaagttaatttgtggcca

SEQ ID NO: 285205 - DNA, 616 bp, Homo sapiens
cctttcagtaatttatagttgtattttcattctacttcatgtttaatatctacacagagcttctctcatgctatggaaatacagagagtgagattttagggatatagtatccaatgttaactataataatgataccccaaaattgagtgatatctttgataggcactgacatatatttatttacaagtttcattactattccaagaggcaattaacaatagtccttttcaattaataaacatcatcaggtacttaatattagctatatgctatgaaagtttctgcagaatgaaaacatgaataatgcatagtytctcctgaaagagctttcaatctagcggtggagccaaataataatgccagctcaatggggcagattttataaaagaagtagtagaggaaaacagtatattataaaaacacaaaagtgtagtaagtaattctgattcagcaataaaggaacacaatttagacttaaaaaatttgcacttcaaagtatgtaaaatatacgacccaacgtggaacagactaaaagtaagatgaccatgtttagtacaaaatggaaaaatggttttctaggaggaataaaattaaaagagaaattgtctgaaaatgt

SEQ ID NO: 285206 - DNA, 398 bp, Homo sapiens
tggggcagattttataaaagaagtagtagaggaaaacagtatattataaaaacacaaaagtgtagtaagtaattctgattcagcaataaaggaacacaatttagacttaaaaaatttgcacttcaaagtatgtaaaatatacgacccaacgtggaacagactaaaagtaagatgaccatgtttagtacaaaatggaaaaatggttttctaggaggaataaaattaaaagagaaattgtctgaaaatgtcaccttgatattgaaaccaatagacaagttggaaacagattttatcagttcctcatcttattcttgaggcgaactccactygacaaaatagtttccaaaatagatgtcctaaaacacaaagagtaccaaatacatgtagcaataccccaa

SEQ ID NO: 285207 - DNA, 647 bp, Homo sapiens
aatacctctctagtagctgtaaaactttacatgtaatccaatcttagattgttggtagaaactactggtaaaaaaattaatttgttggtagttagtagctattactggtaaaaatagctgcaactcatgttttatttagttttgtatcttgtgggtaaattccatttctttaatgattatgttaatttttattatacaggtttactatgcttgttttagttttkggaaggtttgaattaattggcataaagttacaatattcatttatttttatattatttctgcatatgtaattatgcctcctttttatgttgaatattgtttgtgatccctttctctgtccttctcaccatctctcctctcttcttgatcactcttgttgaaagcctatattgccagattatatatatatgcacttttctgataaaatgcttagttcaggttcctgtaacaaaataccatagtccaggtagcttacaaacacaagcatttatttttacaggctggaagttccaaaatcaatatttcattgttatctggtgagtgcccacttcttcacagatagtgccttccagctctgtcctcacatggtagaaggggcaaacaagctccctagggtcttttttattggacattagtagcattca

SEQ ID NO: 285208 - DNA, 647 bp, Homo sapiens
aatacctctctagtagctgtaaaactttacatgtaatccaatcttagattgttggtagaaactactggtaaaaaaattaatttgttggtagttagtagctattactggtaaaaatagctgcaactcatgttttatttagttttgtatcttgtgggtaaattccatttctttaatgattatgttaatttttattatacaggtttactatgcttgttttagtttttggaaggtttgaattaattggcataaagttacaatattcatttatttttatattatttctgcatatgtaattatgcctcctttttatgttgaatattgtttgtgatccctttctctgtccttctcaccatctctcctctcttcttgatcactcttgttkaaagcctatattgccagattatatatatatgcacttttctgataaaatgcttagttcaggttcctgtaacaaaataccatagtccaggtagcttacaaacacaagcatttatttttacaggctggaagttccaaaatcaatatttcattgttatctggtgagtgcccacttcttcacagatagtgccttccagctctgtcctcacatggtagaaggggcaaacaagctccctagggtcttttttattggacattagtagcattca

SEQ ID NO: 285209 - DNA, 647 bp, Homo sapiens
aatacctctctagtagctgtaaaactttacatgtaatccaatcttagattgttggtagaaactactggtaaaaaaattaatttgttggtagttagtagctattactggtaaaaatagctgcaactcatgttttatttagttttgtatcttgtgggtaaattccatttctttaatgattatgttaatttttattatacaggtttactatgcttgttttagtttttggaaggtttgaattaattggcataaagttacaatattcatttatttttatattatttctgcatatgtaattatgcctcctttttatgttgaatattgtttgtgatccctttctctgtccttctcaccatctctcctctcttcttgatcactcttgttgaaagcctatattgccagrttatatatatatgcacttttctgataaaatgcttagttcaggttcctgtaacaaaataccatagtccaggtagcttacaaacacaagcatttatttttacaggctggaagttccaaaatcaatatttcattgttatctggtgagtgcccacttcttcacagatagtgccttccagctctgtcctcacatggtagaaggggcaaacaagctccctagggtcttttttattggacattagtagcattca

SEQ ID NO: 285210 - DNA, 647 bp, Homo sapiens
aatacctctctagtagctgtaaaactttacatgtaatccaatcttagattgttggtagaaactactggtaaaaaaattaatttgttggtagttagtagctattactggtaaaaatagctgcaactcatgttttatttagttttgtatcttgtgggtaaattccatttctttaatgattatgttaatttttattatacaggtttactatgcttgttttagtttttggaaggtttgaattaattggcataaagttacaatattcatttatttttatattatttctgcatatgtaattatgcctcctttttatgttgaatattgtttgtgatccctttctctgtccttctcaccatctctcctctcttcttgatcactcttgttgaaagcctatattgccagattatatatatatgcacttttctgataaaatgcttagttcaggttcctgtaacaaaataccatagtccaggtagcttacaaacacaagcatttatttttacaggctggaagktccaaaatcaatatttcattgttatctggtgagtgcccacttcttcacagatagtgccttccagctctgtcctcacatggtagaaggggcaaacaagctccctagggtcttttttattggacattagtagcattca

SEQ ID NO: 285211 - DNA, 563 bp, Homo sapiens
ctatcaccctctaaaattggttaaagtttcattttattctgaggttagtattgctctttccttacagttacttgaattaaatttattttattttaataactttcaagttggataaytacattactcattttcagactttcttttcaaatatcagcatgtgaagatttattttccccttggttttaaatgcattttatatattttgaaatatcgtattatgatgactatagagtatatgtattttctaatttcaaataagactatttattgatgcatggactatctccatgttatattcttttaatttccaaatatacggttatggtttctatatatgtctaatttgattgtagcatgcaagagaaggtaaatgtagtcaaaattaattattctttatgccccatatttctgcacaagcattgatatttgtattatgaccagatattattattattattatcatcatcatttttttttgagacatggtctctctctgctgcccaggctgtagtgttgtggcataatcactgctcactgcagcttcaacctcctgagcttaagtg

SEQ ID NO: 285212 - DNA, 563 bp, Homo sapiens
ctatcaccctctaaaattggttaaagtttcattttattctgaggttagtattgctctttccttacagttacttgaattaaatttattttattttaataactttcaagttggataattacattactcattttcagactttcttttcaaatatcagcatgtgaagatttattttccccttggttttaaatgcattttatatattttgaaatatcgtattatgatgactatagagtatatgtattttctaatttcaaataagactatttattgatgcatggactatctccatgttatattcttttaatttccaaatatayggttatggtttctatatatgtctaatttgattgtagcatgcaagagaaggtaaatgtagtcaaaattaattattctttatgccccatatttctgcacaagcattgatatttgtattatgaccagatattattattattattatcatcatcatttttttttgagacatggtctctctctgctgcccaggctgtagtgttgtggcataatcactgctcactgcagcttcaacctcctgagcttaagtg

SEQ ID NO: 285213 - DNA, 488 bp, Homo sapiens
aggcatgagccaccatgcctggcaatgaccagataagctgtctagttttgtaaatactgtactcctctgtatcttaaagagaatgaatatttacaatggttggatgtaagattcaatatgcatgcattacaccaagctttttatatgtgttctatttgtcttttatttgtactatttttcctcaacaactagatttcttagcagttttctttagaygagaagaacttgctcaatgcagtctgaatgagaatcttgtaacaaagattcacaattcagtaaacacatacattgaattgtctagccactatcaccccccagcaaaatttcacaatataaatcaccaagaaaagttgatggtgggtgaaaatcccagagtatcactgaggattttgccaatttctgtttgaaatgacattagtaattagttcccaatatttagctaagaactaaaaatgtattttggggaaaatgttgctgttgtgttatta

SEQ ID NO: 285214 - DNA, 573 bp, Homo sapiens
gattttcattgtgaaaataaaatataaaaactgttcttggagttatttctaaacagaaataatatcagaatcatcagaattgtctattttggaaaattggattcatcaaatgaatttttggccaacaactgtttgagaacgatgttaacatcatgtgtaggaatgctacattgtctaggatttgacattttcagtgatcaggaattactatattttgcaaatggagatatgaacactaaaaacagaatgctcataaatagaatgatgtcttttgtttccaaagtttatatactggaacgatgcaaaaaaattaataaaagtgagatatttcgtggcaaagttatcttagcataaatgccgcagctgcaagtgccgccagtgagtattcttgaaacaaatgggaaaagggttaagaatatagagtaaaataagaatttcaacagcmtcttgaatctataaaaagtagacaataaaaatataaaattgtaaaataaaatacttgaatttaagagttcagtaaacacattaaaagcagacttgatacagcaaaaaaaaaaaaaaaatatatcatca

SEQ ID NO: 285215 - DNA, 496 bp, Homo sapiens
aacagctttatgaatctacacccaagtgagtatgtagagattgtattcatacctgcagtcacaaattatatttttttgttgttttatattctgcagacatgtataatttatgtatcagttattttttagagtatttataaaactgtttcaataatttacttatcattggtgagtcaagtaaataaaacaaaatcttggttagtgatctctttgctggagtagcccaatgtrgctcagataatgtatccacctaaacctagaagaggtaaagctgtatttaccttgttcctattgttatctggaatctcttctctcagacttgaattaatgggatgataagccctaagaagttgcagcttagtatagctaccttcagaagaggttgtgacacacaattcacagcacgcttggccaaattcctaatcactgcaacattagcgggagtgagtacaggatagaagggttgagagaatggccaagccaatcctgcagatga

SEQ ID NO: 285216 - DNA, 654 bp, Homo sapiens
tgcatctttcagaactagacagtttgctgaattttcacattctgaatacacccgtgtaactagcaccttgaacaagtaacagaatatgaccagcacttgatcaactctgttactgtctccaccaagggtagttatgagcctgatttctaagaggataaataagctctacttgtttttgtaatttatatgaattaaataaaatagaaggcatttgtgactggcttattttgccttttttgcttgatgttatgttttcctgcagttgtagacttttttattgttgaatagtattattttgtgaatataccatgaattatgtattcattcaactgttgattgacagttggctagtttcaagtttggcgttattttgaagagtactgctatgaacattctastgcatgtctttttggagtatacatgtttgcatttctgttgggaatgtcaagtcaaaacgtgcaccagataaagttaaacaggtaaggatgactttattcaaggctattacaataggatagagagagcagagcacagtctaaactcaattccagtgtatggataggagaattattaagagcaggtatgggaggattgtgtgtttgccaactggccataactaattatctgcctttaccataggagatagctgtgtag

SEQ ID NO: 285217 - DNA, 517 bp, Homo sapiens
attctttaaggatttgcaaagtgaagccctaaatgaaaagatgagtcttttcagttctttctaaaggtcaccatgctgaagatcatagtaacctttaatttgtgagtcccaagataccagaaacacccatgtaatataaactgagatttttctttattttgttatctagtgttaatcaataaagttcacgttttcaaaacacacgtattttaaaatcaaagaggctgtgtgtatgttgtacatagttcagtaaaattaatcctccctattttaacttttattcttatgaacaaaaggaaaggaaagaaaacccaaaacggtcaagtgagatttttstattagtcaaaagcccaggatgaaaaacaaaagtttcttttttttatactgaaatacccacatgacagcagaatactagagcataattatttgtttatatttcacttagatacagagtaaattatgtcatatattatataatcatataaaagtatctttaagtactttgacatatcttaat

SEQ ID NO: 285218 - DNA, 599 bp, Homo sapiens
catgattaggttactaatcagtcgactttaacaaaagggaaattttcctgaatgggcttgacccaacttgatgagcttttataaaaaggtaaaacttcagagacattcttctcctagaatccaaaatgaaaaaaaaaaaactaccatgttttggaaaaggaaacatggcagggataatgtatagatcctacaaaatgaggacctgtcttacaattgcagggaactcaattctgccaacaaccagtaagcttgggaggaccctgaatcttagacaagataacagtctctgctggtaccttgatttcatcctgatgataacctgagctaagagctcattgtaggtgtgcctaggattctgacctacagaactgtaagataataaatgtatgttttctttttaagttgctgagtttgtggtaccttgttacacggtaatagaaaactaatatattctatatagaacacacattataaagaactttcaaattcagtggaartgaaataaaaagcgtagagataggctaggagaaaaggcttgcagtcattcttctcagaattacatgatacacacttggaaaaaaatcaacaacccatgtttt

SEQ ID NO: 285219 - DNA, 584 bp, Homo sapiens
agtataaataatttttcatttgattgttttcatctcttggtggattcagtcacctactttcattcacttggttatgttcattcattcttttgaagtatgcagatttagggtttatttgcagaccaggttctgtgcagtggggaacatactttrtcctagcccacacaaatcttaaagcctcacaagttagataaacaatgaacataaacacaaatgcattcttttaattgcaaatttttttgaagtactcttgaagaagtgaacagggtgctgcgatggaaaaaaaaggcatacttcttagaacaatgttgtttctatttgaatggataaaatatgtgcgtgcacaagatttaatatatacaagtaaatttaccctgtttattttaccctgtgaaagtaactctctcaactctttttcaaatcttattttcaaaggcaatcaatatttaattattttctctatatctttatagagataactatgtgtgtctgtgtgtttctgtgtgtgtatgtatgatttttaaaaatgtgaaagtactcaccattcctgatgattttttacttggaaaccattgtcatcagta

SEQ ID NO: 285220 - DNA, 589 bp, Homo sapiens
agtgaagagcatgaaatttcctacttggtgatatgacctggaagttgtgtacattattcctgtttaaatccaattgactggaacttactggattcagtaagtttcataacacattctgatagcagagatatttacatgaatagctaacaactatgtaacaaaaaaaagagttttcatagaatgggtgaaaataacatctaacaaaagctgttcaagcaggaagactcaattcatcttgaggaattaggtaaagcattttagagcatgtctcataaaatgaactaaatgggttatattcaattgatttatagaacatatttagtgaatctcagcaatgtaagtaatgagaagctaggtaatgagaagctaaacaattactacacctttactaattactaattttactatacttttcttgcatgaccgaaatcatataaaatggtgaaacccagggtatttgagacacattttttaaagttcaaagttctatgatatattaaaatagaaatgctacttatcatatgctacactttcaaatcaactgggyaatactgtgcaaaatagcaaacaaatattgagaaaaagtttt

SEQ ID NO: 285221 - DNA, 500 bp, Homo sapiens
tttaattgtttggtagacaattcattaatatttaaatttcttttttcccatataatcatttatagccatatttttttcctaaactttaggtgcattcttcaattagagatacattgtgttttctttatcagtcaatacaaagtattttcttaktctcttggggctttcaccatggaatatttagaagactgttctgtacatctgggatttttcaaacattttcccttactgtttttttttatttcattatgataagtgaatatactttatatattttcaatttttctatattgtttgagacttatgtactgttttagaatatatcttagtaaatgtttcatgtaaagttggaaaacatgagtattctcttacttttgggtatagtattttgaatatgtcaattagatcaagttatattataatgctatctaggtttttataatcttagtaattttctttctacttaaaaaaaattccagagagaaagagagatgtttcaa

SEQ ID NO: 285222 - DNA, 500 bp, Homo sapiens
tttaattgtttggtagacaattcattaatatttaaatttcttttttcccatataatcatttatagccatatttttttcctaaactttaggtgcattcttcaattagagatacattgtgttttctttatcagtcaatacaaagtattttcttagtctcttggggctttcaccatggaatatttagaagactgttctgtamatctgggatttttcaaacattttcccttactgtttttttttatttcattatgataagtgaatatactttatatattttcaatttttctatattgtttgagacttatgtactgttttagaatatatcttagtaaatgtttcatgtaaagttggaaaacatgagtattctcttacttttgggtatagtattttgaatatgtcaattagatcaagttatattataatgctatctaggtttttataatcttagtaattttctttctacttaaaaaaaattccagagagaaagagagatgtttcaa

SEQ ID NO: 285223 - DNA, 565 bp, Homo sapiens
aaagtttggccaagcaaagaatctttgtcaccactttgcttttcaaatttaacatttctcagcaaaatttgataaagagcagaaaggactaaaaaaggtagtgaattctacaaatctttatgtgctattattatatgactatatgaagtccttgtttttttttttttttttaatcctggctaagcaataattgtctatagagctgatccactgaggtttcatcagaatctttttggggagtgggtatgatgtaaaagtatcattgctttgatttaatttttagccaaaatagtttgactatttcaaattaccttagaaggctgggcgcagtggttcatgcctgtaatcccggcactttagaaggtcaaggtgagcagatcatttgagtccagaagtttgagaccagcctggctaacatggtgaaaccctggctctactaaaaatataaaaactagcctagtgtgrtggcaggcgcctgtagtctcagctactggggagggtaaggcataagaattgcttgatcctgggaggtggaggttgcagtgagccgagattgcaccattgc

SEQ ID NO: 285224 - DNA, 498 bp, Homo sapiens
ggaaataaatggaaatatactattgtaaggctcttatatgttagggggggtaacattaattgaaagtttactatgataagtcaaaatattagccaaataaatttaggggtctatatgaaagctagtataacatgactaattgagtttaatcctaraaatgtgaggttttatcatttaaagtggaataattcaccagctccacagattaaaggcaaataatcacaatgtttttcctgttctagaactgtccttttccatcctgacaaggtaaatggaaaactgtattaacaccaggccacttacagatacataagtttgacaaaaaatggcagatacatagcacacattgtcatgtttttgttttctgcacccgtgacagacatgactaaacgatcatgcatggcattctcttttgctgagcccctcttgggccttaacagttttcttaacacagatatcagctattaactagctgatttgcaaaaacgtcagataaaa

SEQ ID NO: 285225 - DNA, 498 bp, Homo sapiens
ggaaataaatggaaatatactattgtaaggctcttatatgttagggggggtaacattaattgaaagtttactatgataagtcaaaatattagccaaataaatttaggggtctatatgaaagctagtataacatgactaattgagtttaatcctaaaaatgtgaggttttatcatttaaagtggaataattcaccagctccacagattaaaggcaaataatcacaatgtttttcctgttctagaactgtccttttccatcctgacaaggtaaatggaaaactgtattaacaccaggccacttacagatacataagtttgacaaaaaatggcagatacatagcacacattgtcatgtttttgttttctgcacccgtgacagacatgactaaacratcatgcatggcattctcttttgctgagcccctcttgggccttaacagttttcttaacacagatatcagctattaactagctgatttgcaaaaacgtcagataaaa

SEQ ID NO: 285226 - DNA, 1092 bp, Homo sapiens
ctatttagaaagtctggagccaactggactcatcttttgaaacaccaggaggcagtgaggactagacttatcacggagcctcactgagaggcagtcagagcaggggtcacatggcaggctccagcagtggtcagtgyatgcatccgcacatctacccatctgtccatctttccatgtgtctgtccacaaatggaccctgtgtcaggttcttggtcaggggctgatgagataactgtggctccaacaccttctctatcttcaaggaactcatagtgacggtgacatcgcccggagcacagcaaccctcagacaggtgactgcaccctcagcaagagggcttcagctagtcagatattcacatagcctctgagcccagaagccagtgtcaggcattgagaagtcactccatgggagaaagtactagtcatgaagccacaggcagggctgggcaggcagtaactgccaaagtaagagtctaggcctggtctcaggaggcatgggtgggcacwtacaatggaagaaaaactacaattattcacagataatataattatatgcccaaagaagtctaaaagaaattatttagagttaataaatgaattgaacaaagtgctactaggtgaatataaaatatcaattgcaccatatatgaaaatatatataacttaaaatgaaattaaaaagatatcatttggattaacatcaaaatattaaatatatgtgataaaaatgtctaagaccttcactcagaatatcattatagaaacaaactaaagacataaatatatgggggaacatgtcatgtctgtggattttaagactcaatwtaaaaaatatataacccccccgactaatctatagttctaatgcaatcctaatcgaaatctcaatgtattatttttaaacatttattttaggttcaggggtacacatgcaggtttgctatataggtgaactgtgtgtcacaggtttggtgtagagattatgaacattaacaatctgattctaaaaagttttatggaaatgcaaaaggccaaagataaccaaaataatcttgaaggagaaaaaagtgggaagacttgtgttattgga

SEQ ID NO: 285227 - DNA, 583 bp, Homo sapiens
tacaatggaagaaaaactacaattattcacagataatataattatatgcccaaagaagtctaaaagaaattatttagagttaataaatgaattgaacaaagtgctactaggtgaatataaaatatcaattgcaccatatatgaaaatatatataacttaaaatgaaattaaaaagatatcatttggattaacatcaaaatattaaatatatgtgataaaaatgtctaagaccttcactcagaatatcattatagaaacaaactaaagacataaatatatgggggaacatgtcatgtctgtggattttaagactcaatttaaaaaatatataacccccccgactaatctatagttcyaatgcaatcctaatcgaaatctcaatgtattatttttaaacatttattttaggttcaggggtacacatgcaggtttgctatataggtgaactgtgtgtcacaggtttggtgtagagattatgaacattaacaatctgattctaaaaagttttatggaaatgcaaaaggccaaagataaccaaaataatcttgaaggagaaaaaagtgggaagacttgtgttattgga

SEQ ID NO: 285228 - DNA, 546 bp, Homo sapiens
ccacgtttttcacataatcttcatcaagtgaatgacattttggttattctccttttatttactaaytgcatgatcttatttttcattcttgtatataacacttcaatgaatatattcacaaatgtaggtttttaaaaattcttttcacttctctaggattaattttcagtaatggaatgactgggtcaaaggagatcaacattgctgtggctctttcaggtgattatcattttgctctgtgtacactgccaccagctttgtgcaaggtaccagttgtagagcaagatcactgacatacactttccatttatctttactaattaaataaatataaaacaggccaggtatggtggctcacacctgtaatcccagcattttgggaggccgaggtgggaggatggcttgagctcaggagtttgagactatcatgggcaacatagtgggaccctgtctctacaaaaagtaaaaaaattagctgggtatggtggcaaatgcctgtggtctcagctacacaggggactgaggcgggagggtcggttgagcccc

SEQ ID NO: 285229 - DNA, 579 bp, Homo sapiens
tataatatgtatatctacatatacatatatgatgtataaatacatacctatacatgtgtgtatatatatctacctacatacacgtataagtattgatttatctgtagtgaacatgtgtatgcatacttatatgtatgtacacacagaaatatttacatattgtgtgcatgtgtacacacacacacacaaacacacacatcagaataaacacaggggaaaaattggaacctcccattgcaggaaaggtggaaaactacaaattgacgctgttcctcttctcccctaccaaattgaaaatgccaagaaaaattgtatctataaagagacttacataatgtcagtctcagaagtgtcatccttgacagattgaatgtagttaagttgtaagaggaaaggaatgacaagcagaagttgattccatccaaaagcatggayggatgctggggtcagtattaaggtgctgcatactaacagaggttttcactttacaccccactccacattgctctgggcaatcctcacagagaactgcaactggtcaggtcccgccccattgccacaattaagttgcccctctcc

SEQ ID NO: 285230 - DNA, 565 bp, Homo sapiens
cctcaataaatttatgaaaatcraaattatatcaagcactctctcagaccacagtggaataaacctggaagtcaactccaaaagcaacctccaaaagcatgcaaataaatggaaattaaataacctgctcctgaatgagtattgggtcacaaacaaaatcaagatgaaaatttaacaattctttgaactgaacaacaatagtgacacaacctatcaaaacctccaagacacagcaaaggcagcgctaagagaaaagttcatagccctaaacacctacatcaaaaagtctgaaagaggccaggcaccaccgtggctcacgtctgtaatcccagcactttgggaggccaaggcgggtggatcacaaggtcaggagatcacaaccatcctggctaacatgctgaaaccccatctctactaaaaaataacaaaaaaattagctgggtgtggtagcgggtgcctgtagtcccagctacttgggaggctgaggcaggagaatggtgtggacccaggaggcagagcttgtagtgagtggagatcgagccactgcactccagcctgggcaatt

SEQ ID NO: 285231 - DNA, 565 bp, Homo sapiens
cctcaataaatttatgaaaatcgaaattatatcaagcactctctcagaccacagtggaataaacctggaagtcaactccaaaagcaacctccaaaagcatgcaaataaatggaaattaaataacctgctcctgaatgagtattgggtcacaaacaaaatcaagatgaaaatttaacaattctttgaactgaacaacaatagtgacacaacctatcaaaacctccaagacacagcaaaggcagcgctaagagaaaagttcatagccctaaacacctacatcaaaaagtctgaaagaggccaggcaccaccgtggctcacrtctgtaatcccagcactttgggaggccaaggcgggtggatcacaaggtcaggagatcacaaccatcctggctaacatgctgaaaccccatctctactaaaaaataacaaaaaaattagctgggtgtggtagcgggtgcctgtagtcccagctacttgggaggctgaggcaggagaatggtgtggacccaggaggcagagcttgtagtgagtggagatcgagccactgcactccagcctgggcaatt

SEQ ID NO: 285232 - DNA, 565 bp, Homo sapiens
cctcaataaatttatgaaaatcgaaattatatcaagcactctctcagaccacagtggaataaacctggaagtcaactccaaaagcaacctccaaaagcatgcaaataaatggaaattaaataacctgctcctgaatgagtattgggtcacaaacaaaatcaagatgaaaatttaacaattctttgaactgaacaacaatagtgacacaacctatcaaaacctccaagacacagcaaaggcagcgctaagagaaaagttcatagccctaaacacctacatcaaaaagtctgaaagaggccaggcaccaccgtggctcacgtctgtaatcccagcactttgggaggccaaggcgggtggatcacaagrtcaggagatcacaaccatcctggctaacatgctgaaaccccatctctactaaaaaataacaaaaaaattagctgggtgtggtagcgggtgcctgtagtcccagctacttgggaggctgaggcaggagaatggtgtggacccaggaggcagagcttgtagtgagtggagatcgagccactgcactccagcctgggcaatt

SEQ ID NO: 285233 - DNA, 565 bp, Homo sapiens
cctcaataaatttatgaaaatcgaaattatatcaagcactctctcagaccacagtggaataaacctggaagtcaactccaaaagcaacctccaaaagcatgcaaataaatggaaattaaataacctgctcctgaatgagtattgggtcacaaacaaaatcaagatgaaaatttaacaattctttgaactgaacaacaatagtgacacaacctatcaaaacctccaagacacagcaaaggcagcgctaagagaaaagttcatagccctaaacacctacatcaaaaagtctgaaagaggccaggcaccaccgtggctcacgtctgtaatcccagcactttgggaggccaaggcgggtggatcacaaggtcaggagatcacaaccatcctggctaacatgstgaaaccccatctctactaaaaaataacaaaaaaattagctgggtgtggtagcgggtgcctgtagtcccagctacttgggaggctgaggcaggagaatggtgtggacccaggaggcagagcttgtagtgagtggagatcgagccactgcactccagcctgggcaatt

SEQ ID NO: 285234 - DNA, 1103 bp, Homo sapiens
cataaacagaattaaaaacaaaaatcacatgacatctcaatagatacagaaaaagcattccacaaaatacagcatcactttgtgattaaaactatcagcaaaattggcatacaagggacatatctcaatataataaaagccatctatgacaaacccacggccaacataatactgaatggggaaaagttgaaagcattccctctgagacttggaccaagacaaggatgcccactgtcaccactcctcaacatagtactggaaattctagccagagcaatcagataaaagaaagaaatacagggcatccaaatcggtaaagaggaagtcaaactgttgctgtttgctgatgatatggtcgtttaccgagaaaaccctaaagactcctccagaaagytcctagaactgataaaataattcagcaaagtttcccaataatatattatctggaaaaatacaaattaataatacaaatggtgtacaaactaatgtacgcaaaccagtagctcttctatagaccaacagtgaccaagctgagaatcaaatcaagaactwcataaacagaattaaaaacaaaaatcacatgacatctcaatagatacagaaaaagcattccacaaaatacagcatcactttgtgattaaaactatcagcaaaattggcatacaagggacatatctcaatataataaaagccatctatgacaaacccacggccaacataatactgaatggggaaaagttgaaagcattccctctgagacttggaccaagacaaggatgcccactgtcaccactcctcaacatagtactggaaattctagccagagcaatcagataaaagaaagaaatacagggcatccaaatcggtaaagaggaagtcaaactgttgctgtttgctgatgatatggtcgtttaccgagaaaaccctaaagactcctccagaaagttcctagaactgataaawtaattcagcaaagtttcccaataatatattatctggaaaaatacaaattaataatacaaatggtgtacaaactaatgtacgcaaaccagtagctcttctatagaccaacagtgaccaagctgagaatcaaatcaagaact

SEQ ID NO: 285235 - DNA, 503 bp, Homo sapiens
cttaaatctaagacctgaaactgtaaaaattctagaaaataacattggaaaagcccttctagacattgacttaggcaaggatttcatgaccaagaacccaaaagcaaatgtaataaaaacaaagataaattgctgggacttaattaaactaaagagctttttcacagcaaaaggaacagtcagcagagtaaacagatgacccaaagagtgggagaaaatcttcacaatctatacatccgacaaaggactaatatccagaatctacaacgaactcaaatcagtaagaaaaaaacaattccatcaaaaagtgggctaaggacatgaatagacaattctcaaaagaagatatacaaatggccaacaaacatgaaraagtgctcaacatcactaatgatcaggggaatgcaaatcaaaaccacaatgtgataccaccttactcctgcaagaatggccataataaaaaaaaaatttaaaaaaacggtagatattggcatggatgcagt

SEQ ID NO: 285236 - DNA, 503 bp, Homo sapiens
cttaaatctaagacctgaaactgtaaaaattctagaaaataacattggaaaagcccttctagacattgacttaggcaaggatttcatgaccaagaacccaaaagcaaatgtaataaaaacaaagataaattgctgggacttaattaaactaaagagctttttcacagcaaaaggaacagtcagcagagtaaacagatgacccaaagagtgggagaaaatcttcacaatctatacatccgacaaaggactaatatccagaatctacaacgaactcaaatcagtaagaaaaaaacaattccatcaaaaagtgggctaaggacatgaatagacaattctcaaaagaagatatacaaatggccaacaaacatgaagaagtgctcaacatcactaatgatcagggraatgcaaatcaaaaccacaatgtgataccaccttactcctgcaagaatggccataataaaaaaaaaatttaaaaaaacggtagatattggcatggatgcagt

SEQ ID NO: 285237 - DNA, 503 bp, Homo sapiens
cttaaatctaagacctgaaactgtaaaaattctagaaaataacattggaaaagcccttctagacattgacttaggcaaggatttcatgaccaagaacccaaaagcaaatgtaataaaaacaaagataaattgctgggacttaattaaactaaagagctttttcacagcaaaaggaacagtcagcagagtaaacagatgacccaaagagtgggagaaaatcttcacaatctatacatccgacaaaggactaatatccagaatctacaacgaactcaaatcagtaagaaaaaaacaattccatcaaaaagtgggctaaggacatgaatagacaattctcaaaagaagatatacaaatggccaacaaacatgaagaagtgctcaacatcactaatgatcaggggaatgcaaatcaaaaccacaatgtrataccaccttactcctgcaagaatggccataataaaaaaaaaatttaaaaaaacggtagatattggcatggatgcagt

SEQ ID NO: 285238 - DNA, 608 bp, Homo sapiens
aaatggttctgagggggttatttgaattaatggactcctgtttatattcataggctgatgaggactggggacattgagtttgttattttcagtctttccacaactgcaccgcaaactttgaggactggaactattctyatacttttgttgttgttgctacctggagcagtgtctgcaccttgcagatgttggatggatggatggatggatggatggatggatggatggatggatgcatggatggatacatggatggatggatagacagataaaaaggctattctgttgattccttgccttgccttgcatccaagggatctggggaggccacagagcactgcatgggtcagtcccaacagcaattagtctctcttgtttctttatgcatgataatagccctctgaaagtgatttggccctcacccaggaaggtgaaaagaaaaataaccactggtgggtgggtgcagcctcccgggcctgtgggtacaagatattcaaagaacactttagaaagaacacattccatgaaaagtaaagctgctcaaaagtacatgtctattgatatgttcaattttcctgataattctgatatctcaagcattggcagtc

SEQ ID NO: 285239 - DNA, 608 bp, Homo sapiens
aaatggttctgagggggttatttgaattaatggactcctgtttatattcataggctgatgaggactggggacattgagtttgttattttcagtctttccacaactgcaccgcaaactttgaggactggaactattctcatacttttgttgttgttgctacctggagcagtgtctgcaccttgcagatgttggatggatggatggatggatggatggatggatggatggatggatgcatggatggatacatggatggatggatagacagataaaaaggctattctgttgattccttgccttgccttgcatccaagggatctggggaggccacagagcactgcatgggtcagtcccaacagcaattagtctctcttgtttctttatgcatgataatagccctctgaaagtgatttggccctcacccaggaaggtgmaaagaaaaataaccactggtgggtgggtgcagcctcccgggcctgtgggtacaagatattcaaagaacactttagaaagaacacattccatgaaaagtaaagctgctcaaaagtacatgtctattgatatgttcaattttcctgataattctgatatctcaagcattggcagtc

SEQ ID NO: 285240 - DNA, 620 bp, Homo sapiens
ttgaaaaacttgaaaaggaagaatgctaagatgatttcagatattgaaaaggcaacgtttgattgaagtttaggatgaactgcttccattagagccacagctgaaacaactacaaacaaaatgtgataaacttaaggagagaaagtmttcccttaggaatgcagcatatttcttatctaatttaaaatggctttatcaagattatcagatgttcaggagaaagaagcaaacataaaggaaacgtataattcaaccagccttccagctctgttatcttaacaattttgggagctgaaaatcacctgcaaaatatcaaccatcaattagagaagctccttgaccagaaagaagaagcgcagcctactaaaatgtgcctatagaaatgttagtttcatgctactgttaccttctgaaactatacttttataaataattttttttgcaaagaagtatggcctagttatcagaacctaatatttgtcattcaaattaaatgactgtgaacaatgttaaatggcatccgtttttcaaatagttttaaaggccatgatcatcttttctggctaatatcttgagtaataaattttaaactgttgacatcatatcttaatcagccccag

SEQ ID NO: 285241 - DNA, 545 bp, Homo sapiens
tcaggttacttcaggctacctttttgtaaggattaaagcagaggggactttcttattttgctgatttgggtagactggaatctcctgttttcaggaaaaaaaaaaaaaaaaagaaaggtctgttttgggagctgttgcttccttaaagtttcagttttattatgtggcatttactacgagtgactccactttgatttggtctggtctgttgggcctagtgcagragctcagtccaaaacaacagcctggatcatttttgtttaacacactgcagctcctgaagagctggaccgtgccttacaagtctttttgtattccgcacagtgtctagcagcaaaaagtgcttcacccgggagtcctcagggaactaacttgttttcctgaacaaggtgggactgcacttcaggggacctagcgggaccccagcgtggctttcactgccacgtggcggcagacccattgtgcaggttttcatgcaaatgaaaaagctgctgggccccaggctagccagccagagcagctgagctaaggtccagttaccgcca

SEQ ID NO: 285242 - DNA, 587 bp, Homo sapiens
gggtgccctggcatccttgaagagctctgtgattgctcttgtctataggccagaccttgtggtgtgcacttcagtcagtgaactgggaagcataaaggcagtgggtgtagctggatcccagggtggcaggcgccaagggggtggcaaagctgtcacacaacccagattattgacattgatgcagagtgggtttaggagatactaagttggttttagacatagtttagagaactgtgcaacattttggtaaacaagtccagaaagcaactggacattcttagggctcagagaaagaggtctgggatagagacataaatttgagaaycactggtataaacctatgttaaaacacacaaataaccaaatcaacctttggtggatgagatcacgtagggaaatgattgagtgcaatgaagccaaggcccaggacagagccctggggaaggtgcacaccttaaagggacagaggaagatcgcccaaagtggtgaccagagacaggaagtagaggcagtgcttctcagacccccgtgtgcctaagcatcacctggagagtgtgttgaaacagattcttggaccccacccacag

SEQ ID NO: 285243 - DNA, 539 bp, Homo sapiens
gcgtcggctcccggccctttcctcggaggccccgccctcgccggctcccgggcccgccttctcgcggccccgcagctgggttcaagactgtcgtgcaggccccagagcccggtgcattgtgggacgccgcagccaatgccgagcctgcgctgcctcctggcgggcgccgctgcaacaacaccagcacccggctgcacacggcggagggctatacggcaccgggcgcctagcgcagagggcgccggtcgctggggtccggtaaaacatgaaaatgagccggatgcttagagtgcggggctacctcccgcttagcgacataaggaaacgcgaaaacagcgttaagactagggcaagctttcgaaactagggaaaatcattacaaaggatcaaacgaaatgacgtcaaggggagggagaaacctgcacgcgtcgtttttatttctggggaaaccacagrtcagctcagtctagagaagaacggggttctgtgtgacaggggctaaaattggaatccagaactcttcccgtacatgccccgag

SEQ ID NO: 285244 - DNA, 575 bp, Homo sapiens
ctgtataatttaagtcccagaaaaagaaaatcaaaacaataggatagaacaactatttaaaactatcccaaatactttctttagacaagcaaaatgacttacatttcaaattgaagggccaaataaaaactggcccagaatgatccacatagagacataacttagaattacaagactccaaagataaagattggctagtaacatgctgcaagggtccagtgaaagaatatgcaaagctaatggttttatatccaatcaagtttacttcaagtataaaggctactgcaaaacggttttgaatatgcaaaaacttaagaaatattgtccaaataaattgtttttgaagaaagcattagagggcaaacttcaagtaatcaacggataaaacttgagcaaagggactcatagttatgggatcttcagaygtctgaaaacatagtaaatgttctggtatatgaacataggtatatattctggttaaaacttttgggtagagagaatgcccatcaatgatagactggataaagaaaatgtggtacatatacaccatggaatactatgcagccataaaaaag

SEQ ID NO: 285245 - DNA, 504 bp, Homo sapiens
gatagggaaagattttttaaacaatctatgaaaaataatcataaaagaaaacactgctaagttcaactatattaaaattaataatttctgttcattaaaagacaaagaaagtaaaatggtactacaaactgtgagaagatatctgcaagaaatacaggcaaaaattgaattttatctcagtacagaaaaagctatcacataaaaaagaagacaaaagacccagtagaaaagtaggctaaaaaattaaaagaaagcattttgtagatgagaaatatgaatggctcataaacataagaaaagaggctcattagcaattattagttgtcaggaaaatgtaaattagaaacacaatttgatatcatttggcacctactacattggcataaatttacaagcctgtattgtaatttacaataacaagtattggccacaatacaaattattsaagagtctgagacactattgatggcaacataaactggcattaccactttggaaagcaat

SEQ ID NO: 285246 - DNA, 580 bp, Homo sapiens
tttccttattcatccattgatgaatgcttaggttgattctatatcttggctcttgtgaaaagtgctgcaacaaacatgagagtgcagatatccctttgatatattgatttcctttcttttggatataaaaccactattggaattgcttgatcatataatagtgcaatttttagttttttgaggaatcttyatgagattctccatagttgctgtacaaatttatattctcaccaacagtgtatgtgttctttttttctccacatcctcactagcatctgttttgttttgtcattttaataataggtattctaacagggatgagatgatatctcattgtggctttgatttgcatttctctgactggtgatgttgagcagtttttcctttatctattgttgtttgtatgtcttcttttgagaaatgtttgttcagatctttcatctatttaaaaaatcagattatttagtgttaattctttttttgaaattttttgctattgagttttttgagttcttctctctatatattctggctattaatcccttatcagatggatagttatactttccattctgtgaat

SEQ ID NO: 285247 - DNA, 587 bp, Homo sapiens
ttgcatagatcttttacttctttagttatattgactcctaagtattttacattttttgtagctgttgtaaatgaaattgctttcttgatttctttttcagattctttgctgtttgcatatatcaatgctrttgatttttatgttgattttttcatcctacaagtttattggattcatttatcagctttaccagttttttggtggcatttttatatttttctaggttctatgttgtctgtgaagaaagctagtttgacttcttcctttccaatttcaatgccctttgttgttttttcatcgcctaatcgctctggctgggacttccagtattatgttgaataacaatggtgggagtgggactccttgttttgttccagtccttacaaaaaaggctttcaatttctgcgtctttagtatgacgtttgctgtgggtttgtcatatatagtctttattattttgagaaatatcaattttttacccattttgatgcaggtttttatcataaagagatgccaaattgtatcaaatgcatttctagcatctattgaaataaatagattttatatttgatttatgtatgttgaaa

SEQ ID NO: 285248 - DNA, 601 bp, Homo sapiens
tatactatgtaattgtagcaagctgagcactcaagagtttaacaaaacattttaactactaaggctctttccctattgaagcagtcttcactttgccacccagtgtaggcttctcatcattatcaagcatccaaagagaaagcctgcaaataaaaactttatttccaatttggagatattgtttttagtagccccatcctctgaggaattgtagatggtgacctctgatagctccagccaatccacacttaaatgttggaggacttaagtatctgggctccaggggtaccattcagatcatatttgttttccctaatgtcaaacactaataaataagttgaacaccagaatattttggtgctttgtagctgatatgttaaatcttaagaatatagtttattgcttaaaatgcagggtgcttaaaragcagtagtaattgtcataaaacacattatctataaagggcaaagggccgagggcattatttagtgtgcaagaatggagagaaaggccagagtaataagggagatgtgagttcttcactgcaagatctttgcctatggatcagggcacataattgatcctcccaaatcaattttta

SEQ ID NO: 285249 - DNA, 463 bp, Homo sapiens
aacaccagtagaagcagtagtagcagcaacaaacaaaaatttttgtgttaggcactaaggatgaagaaaaacacacaggtcagccccttaatgggttcatagttaatttctaagtgacctttccaaaagaatgtgtttgagtacattggatgcaaaacaaaaagattatctacttaggaatggtgccttttaactttcataarttactaaagtattaaatacttttcatcatttagaataacattcgtaaatgtgtcttaataaaaaaaaacctaccaacaacaaaaatctcacatacacagtagctcgattcagctttttcacagactcttacattttttaaaatgctaatactcacagccatgaaaaaagaatgaaatgatatcctttgcaggaacatggatgcagctggaagccattatcctaagagcattaatgcaagaacagataaccaccagttata

SEQ ID NO: 285250 - DNA, 540 bp, Homo sapiens
ataccactgttgtcctatgtatgtccttaattactgtttagataaatccatttcctgagtcagcagctgctatgttgataggcagaggtatggggatatgtgacactagaagccttgaggttttccaggtctggaaagagaggacgtattgaaattgtcctcctggaatagacaayagattgtgcaccagtagcaaagaaccctgaagcaacaagtggggagaatgtttagactaattttggctcatggagactcttgtgactatctctaggggctgtattcaagcctgatggatctgagaagatacagggaatcttattaagtgggctagtgagttttctctaccttgtagatagaatggctagaaaacttgtctttaaaacagaagagtctagaagcagagagatttctttacattgtcagatagaatactggtaacttgctggctgctctgcagctaagctcactgaggtaaaggccactgagattacctctctcaccactcttagaattgacactgcctaaggtagcccagcggct

SEQ ID NO: 285251 - DNA, 604 bp, Homo sapiens
ggtctccctgaccaaactggtcttggcaagtggcgtccatcatgggggctggaatccaggttgaagggtcactggagcaatggttggaatggaaaactagctggaggacacctgagtactcttaaagaaatcctgtggtgagtaagaaggggagctcagaagtgtcagggtaacaatgggacaagtgtggggtctggttcatttcaccttrgaactttttcagactgatgatgaggaggaacaagagtataacaaagtaacagaagaggttacagagcatgtttatttgccagctaaagctaaagtggcaaaggagggagaggttcatcactacctttctacacctcctcattattattttgaagaaaaagaccctccagatctttcttttccagagagcactgggtgaaaagtagtctccccagtgactgtttgagcagtgcctcaagcaaccgctcttagttctattcaggcaggatttcagcaaactagatgagagggtgatttagaggcttggcagttccctgttagaatacacccccagatcaagagggaaatattatagctacacttgagccttttccttttaaattacccaaagaat

SEQ ID NO: 285252 - DNA, 604 bp, Homo sapiens
ggtctccctgaccaaactggtcttggcaagtggcgtccatcatgggggctggaatccaggttgaagggtcactggagcaatggttggaatggaaaactagctggaggacacctgagtactcttaaagaaatcctgtggtgagtaagaaggggagctcagaagtgtcagggtaacaatgggacaagtgtggggtctggttcatttcaccttagaactttttcagactgatgatgaggaggaacaagagtatarcaaagtaacagaagaggttacagagcatgtttatttgccagctaaagctaaagtggcaaaggagggagaggttcatcactacctttctacacctcctcattattattttgaagaaaaagaccctccagatctttcttttccagagagcactgggtgaaaagtagtctccccagtgactgtttgagcagtgcctcaagcaaccgctcttagttctattcaggcaggatttcagcaaactagatgagagggtgatttagaggcttggcagttccctgttagaatacacccccagatcaagagggaaatattatagctacacttgagccttttccttttaaattacccaaagaat

SEQ ID NO: 285253 - DNA, 601 bp, Homo sapiens
aaatggaaaaacaaagttctctccaacaattaggaaataatttttgatggtggccattgttaagcctccagaacctatacctttaaaatggttaacagataagccaatttggatagaacaatggctgccaagtaaagagaaactggaggctttagagaaattagttactgaacaattagaaaatgggcacatagctccaatattttccccttggaattctccagttttcataattaagaaaaaatcaggcaaatggagaatgttatctgacttaagagctatcaattcagttatacaacctatgggggcattayagccaggattgccttcttctgctataattccaaaaaattagcctttaatagtcatagatttaaaagactgtttctttactatccctttagctgagcaagactgtgaacggtttgcatttacaattcctgcagtaaacaacctgcagccttctaagtgttatcattggaaagtgttgccacagagcatgttaaacagtcccacaatttgccagacatatgtggggcaagcaattgaacctacttgtaaaaaattttcagtgttacattattcactatatggatgatat

SEQ ID NO: 285254 - DNA, 628 bp, Homo sapiens
ctatatggatgatatactttgtgctgcccccactcgagaaatattactccagtgttatgatcacttgcaaaattcaatttctcttgctggtttaattatagctcctgacaaaattcagactactactccttactcctacttgaggaacttagtaaatgacactaccattgtgccacagaaagtaactatacatagggatcaactaaaaacattaaatgactttcagaaatyactaggggacattaattggatacgacctgctctaggcattcctacctataccatgagtgatctgttttctatgcttagaggaaatcctagtcttactagcccttgccaactaacaaaggaggctgaggttgagtttcagctgattgaaaagcaagtccataaggctcaaataaatagaatagatccagacaagactctagatttgctaattttttcaactcagcattcacctactggtgttattgtccaagaacaggacttagtagagtggctttttcttccacatactaattcatggactctaactccttatttagatcaaatcactactatgatagggattgggagaactcagattgttaaattacatggatatgatcctggaaaaattattgtc

SEQ ID NO: 285255 - DNA, 628 bp, Homo sapiens
ctatatggatgatatactttgtgctgcccccactcgagaaatattactccagtgttatgatcacttgcaaaattcaatttctcttgctggtttaattatagctcctgacaaaattcagactactactccttactcctacttgaggaacttagtaaatgacactaccattgtgccacagaaagtaactatacatagggatcaactaaaaacattaaatgactttcagaaatcactaggggacattaattggatacgacctgctctaggcattcctacctataccatgagtgatctgttttctatgcttagaggaaatcctagtcttactagcccttgccaactaacaaaggaggctgaggttgagtttcagctgattgaaaagcaagtccataaggctcaaataaatagaatagatccagacaagactctagatttgctaattttttcaactcagcattcacctactggtgttattgtccaagaacaggacttagtagagtggctttttcttccacatactaattcatggactctaactccttatttagatcaaatcactactatgakagggattgggagaactcagattgttaaattacatggatatgatcctggaaaaattattgtc

SEQ ID NO: 285256 - DNA, 512 bp, Homo sapiens
atggaattattattaataagggatactattagttaattgaatgtcaatagaaacaatgmtaatgactggcttgctgttaataaatatgtgggtaaatctctgtttggggctctgagctctgaaggctgtgagacccctgatttcccacttcacacctctatatttctgtgtgtgtctttaatcccctcatgggatgtttagcttgaattgcacctctcagtctgcatgccattgccacactatgttcagatgatctgctcaaaatggtcagatggtagaaatgataagaagtatggcaaaagttcctcttatctggaaccatggtggtgtagtggcacctcaacctcaaatgatatggcccactctaggagcttaacataaggatttaaaattaaaagaacaaatatttaaagcatcccaggcacacccggccttaatgccaggaactggattgtgtaaaggagctgaaaatggataaaaacacttggaagctctgtgatttcaatgacgat

SEQ ID NO: 285257 - DNA, 1263 bp, Homo sapiens
caacaaaagaaaaaatagaataagtttgtctctaccaaaattaaaaacttttgtgcatcacagaacagtttaagtgaaaatacaacacacagaatgaaagaaaatatttgcaaaccatatatttgatattcatgacagtaaaaatgtagaaacagtgtaaatgtccatcaaccaatgaatgtgcaaattttgatatgtatttaaaatgagatgtcattcagtcattaaaaagaataaagtactgatatatgctgcaaggtaggtgagcttcaaaacattaggttaagtgaaagattctggctcaaaagatcacatattgtatgaatccatttatatgaagtatctagaatagataaatccagaggtagaatgcattttggtcattattaggaactgaggggagttttactttgggttgatggaaatgttttgaaactacatagaggtgcttatacaacactgtaaatgtattaattgtctattgttcactatgaaatgcttttaygtgaattttaccttgaaaaattattaaacagacaagcatgataaaagcagagctcttaaggagattccaatacatcatagtaattttattttcccaawggagaccacacacatcatgaggagccacagggccatctcacctaagagtgtgttaggaaggacttataaaatttgcgttgtggctaggtaattctggataaggttcaaggaagtggtctttgtttgtttgctagtgttgttttgctttgctttgatctcatttcttcacagtcacaaagtgaccctgtctgatgttggtgttctaggagaccattatgtccaacagaacatctctacgggcatcagacaagcaacatcaaggcctaactgtaagtgtcaggccagttcttggatgtcaggagctgatttctctttctcaaaatcaatcctacagaaatattaatacaagtgtcaggatcaaggagtatgtgtattttaaattttaaagatattcccaaaaggctgtaccaaacgtgtatcccaccaccaagggaggggtgatgaaaggwtagctgggaagccccagtgggaaatttcttttaatgaataacttcgctcagagctgatacatatagccataatcctttcatttctctcagtaaggagaaagtaagtaggaggaaaacaggagaggtctttattacctagaaccttaatcaaagctttttatctctgtctttggactcaggtcagcatgtcactaaaacatgcaaaaacaag

SEQ ID NO: 285258 - DNA, 565 bp, Homo sapiens
gagaattgcttgaacccaggaagtggaggctgcagggaggtaagatcgcaccagactccacctcaaaaaaaaaaaagaaagaaaaagaaaagaatattttcttaaatattgtcctgatgcactctggtctcttgaaaaatgccattctctttagagttgaggagatttttagtatgaaagtcatcctaaccatgcttttaataacasaagcagagattattttgcttcatgttttggtatgccaacaatttttcttttccttttcttctttctttctctttccttctttttctctttctttttctttttctttctttccttccttcctttctccttccttccttcctcctgttccttcctccctccttctctctctccttccttcattccttcccttcttccttccttctttctttctctttctttcttttttctttctttctttttcttcctttctttctttacttttaaactaatgaatagtcctcatatcactgcagtcatagcaaagcaatcactacactcaaggacttctgaatgtttaagaattatttttttctgctct

SEQ ID NO: 285259 - DNA, 564 bp, Homo sapiens
ctctactacccattctgtattctctttgccttcagtaagcacctcagcaggttgtggttttttgttttgttttgttttgtttttmctggtggactgacccaaaccttcattcctgaggggtctggaccatttgtagttctgcctggattgggctgttgttgcttcccactgaccttaatcacaaggcatagtaatactaagaaactccctaatggatcttctgtattccatgcatactcttccttacctctgttatagagtagtagactgatttcaccttgatagtctgggtcagccaccccagccaacactgtaacacccttcttagactgttgacttaaaggtaggagaagccaaaactgtccaggtggcaatcttaacttccagtttaatggaatcattgttgtgtctcctggtggcagtgttcctccctctggaactaagacctctaggccagctgaacttaatgctgtgggaacaggaagcaaaaattttgctagtggatcactaaggatgatgatgagtgttgccacttccacttccatcccttgatttctagaccca

SEQ ID NO: 285260 - DNA, 564 bp, Homo sapiens
ctctactacccattctgtattctctttgccttcagtaagcacctcagcaggttgtggttttttgttttgttttgttttgtttttcctgrtggactgacccaaaccttcattcctgaggggtctggaccatttgtagttctgcctggattgggctgttgttgcttcccactgaccttaatcacaaggcatagtaatactaagaaactccctaatggatcttctgtattccatgcatactcttccttacctctgttatagagtagtagactgatttcaccttgatagtctgggtcagccaccccagccaacactgtaacacccttcttagactgttgacttaaaggtaggagaagccaaaactgtccaggtggcaatcttaacttccagtttaatggaatcattgttgtgtctcctggtggcagtgttcctccctctggaactaagacctctaggccagctgaacttaatgctgtgggaacaggaagcaaaaattttgctagtggatcactaaggatgatgatgagtgttgccacttccacttccatcccttgatttctagaccca

SEQ ID NO: 285261 - DNA, 629 bp, Homo sapiens
actgaagaacttggagtctgatgtttgagggcaggaagcatccagcatgggagaaagctgtaggctgggaggctaggccagtcttgccttttcacgtttttctgcctgctttatattcactggctgctgattagattgtgtccaccagattaagggtggatttgccttcctcagaacactgactcaaatgttgatctcctttggcaacaccgtcataracacacccaggataaatactttgcatccttcaatccaatcaagttgacactcattcttaaccatcacattagaccattattatactgctatgaagaaatacccgatatgggaaatttataaagaaaaagaggtttaatggactcacagttccacatggctggggaggccttacaatcatggaagaaggcaaattaggagcaaaggcatgtcttacatggcagcaggcaagaatgtgagtgtagggaagctgccctttataaaaccatcagatctcatgaaatttattcactatcatgggaacagcatgggaaaaacctgccccataatttaattaccttccaccaggcctctcccacaacaggtggggattatgggagctacatttaatatgagatttcggtggggacaca

SEQ ID NO: 285262 - DNA, 399 bp, Homo sapiens
gtgaacatatgttttccaagttgtttgcttttttctatcccttccagggatgccaatgattcacagatttggtctctttacataatcccacatttctcagagattttgtttgcttcttttcattctttttttctttatttttggctgattgtcttatttcagacagccagtcttcaagttctgagattctttcctcagcttagtctattctgttgttaatacttgtgattgtattgtgaaattattgtagtgtgtttttcggctttatcagattagttatgttctttttttatactggctatttcatctgccaamtcctgtatgcttttattgtgatacttagtttctttggtttgggttttgccattctcctaaatctcgatgatcttcagtcctgtc

SEQ ID NO: 285263 - DNA, 576 bp, Homo sapiens
atctttattacttcttgtgttttgctaatttggggtttggttttgttcttgcttttctagttcactgaggtacattkttaggttgttaatttgaattctttctactttttggatataattgattacagctataaacttccctcttagtacttcttttgctgtatcccacagaatatggtatgctgtattttcatttgtttcaataaatttttaaattttcttcttaatttattgattgactcattggtcattcagaagcatattatttaatttctgcatgcttgtgtattttctgaagttcctatttttattgatttttagctttattccactgtggtcagaaaagatccttgatataatttccatttttatgaatttgttgagacttatttcgtggtctaagatacagtttattctggagaatgctccatgtgctgatgatgaatataatgtatattctgcaacagttgggtgaaatgttatgtaaatgtcagttaggcatattagatctagtgtgtagtttaactactgtttgttgattttctgtcaggatgatctgttcattactgaaagttg

SEQ ID NO: 285264 - DNA, 491 bp, Homo sapiens
cgtataatgcctgaaaagaccaataacaaatacttaattaaactagtaatcaaaaactttccaacaaacaaaagcccaggaccaggtggctccayaggcgaattctaccaaatatttaaaggagaattagtaccaatcctttttaaactctttcaaaacatagaaaaaaaaagacttccaaactcatgttaggaagccagtattaccctgatactaaaaccagacaaagataccgcaagaagagaacactgcaggccaatatctcagattaatatggaagaaaaattctcaacaaaatattagaaaatcaaattaatcaatacattaaaaggataatacatcatgatcaagtgggatttataataaccctgggatgtaaggatgattcaacatatgcaaatcaatcaatatgacacatattaatagaatgaaggagcaaaatcatataatcatcacaatagatgcagaaagagcatttgacaaaatctaac

SEQ ID NO: 285265 - DNA, 341 bp, Homo sapiens
tttattcatctatttagtgaacaaccacctatatcacaggcatcaagataggctctggagatataacagcgataaagatagtcatgaatccytacttccaaggagcttgttctctaccagaggaagacaggaatgggaaagaaggcagataacaaacaaaataaacaagtaaaatatagagatggttataaatgcaatggaaaaaacaaagcaggagatgtgagtagagagtgtatttgtggagactaaagaaagggtgtagttttaaatacagtggtccagaaaattcttactgataagtttcagttaaacactgcacaaaataagagagtgagtcactg

SEQ ID NO: 285266 - DNA, 600 bp, Homo sapiens
ccatgatctttccatttattcatctatttagtgaacaaccacctatatcacaggcatcaagataggctctggagatataacagcgataaagatagtcatgaatccttacttccaaggagcttgttctctaccagaggaagacaggaatgggaaagaaggcagataacaaacaaaataaacaagtaaaatatagagatggttataaatgcaatggaaaaaacaaagcaggagatgtgagtagagagtgtatttgtggagaytaaagaaagggtgtagttttaaatacagtggtccagaaaattcttactgataagtttcagttaaacactgcacaaaataagagagtgagtcactggcatatcttgaaaagaggactcacaaggggagaaagagaatgcaaattcccagagacagactcctcctggcgtctgtgcctggaacaaagtgagcagagagcagtaagaggtgaattcagagaggtaataggggcaaggagatatgatacagaaggtgcaggtccttgtagacacagataacaattctaaatttaatttttagaaagatggggagcctttgggaatactgacagaattgtgtcat

SEQ ID NO: 285267 - DNA, 600 bp, Homo sapiens
ccatgatctttccatttattcatctatttagtgaacaaccacctatatcacaggcatcaagataggctctggagatataacagcgataaagatagtcatgaatccttacttccaaggagcttgttctctaccagaggaagacaggaatgggaaagaaggcagataacaaacaaaataaacaagtaaaatatagagatggttataaatgcaatggaaaaaacaaagcaggagatgtgagtagagagtgtatttgtggagactaaagaaagggtgtagttttaaatacagtggtccagaaaattcttactgataagtttcagttaaacactgcacaaaataagagagtgagtcactggcatatcttgaaaagaggactcacaaggggagaaagagaatgcaaattcccagagacagactcctcctggcrtctgtgcctggaacaaagtgagcagagagcagtaagaggtgaattcagagaggtaataggggcaaggagatatgatacagaaggtgcaggtccttgtagacacagataacaattctaaatttaatttttagaaagatggggagcctttgggaatactgacagaattgtgtcat

SEQ ID NO: 285268 - DNA, 576 bp, Homo sapiens
aatatagtatttggaaggcaacctcccatctagcatggaacactggagtggtttctggccagcaataatcagctcagactcatcttctgggttaaagtgttcttttgaatcagtcattgtgggctgccagccaaggggaagagttcatttgcatgagatctccacctcctggtcagctctgaaaatcttggcagcttagcactgcaattggcaaaggagtgtttttaaaaaaaattagtaaataagggcttccaaagaaaacattgtcactgaattaagtccaatgcacctgaaatacattgctctgttatcttttaaattgttatgaatatagcaggcattttaaagtcatttctgtttatttccttcctaatgtactgtgtgaaycatttttctcatgtgttaacgtactatatgcaaatggcgtttaatgtgttttattcacagaatgcatttacaaatcattttgtgtggggggaaagcagttgtttcacttttgctgtgaaactgaaaagtaggagtatatatcactacatttctaaaatgagagaaaatttaaatggaatgaggaaagcc

SEQ ID NO: 285269 - DNA, 625 bp, Homo sapiens
gcatatactgcatacttgaggacattgccttagaactgcaagctgttgccatccaactggttcttaactaccttctataagtcactgcattagtctatcaagccaactgctttagagtgtcagtaagaccagtgaataccttaaacatggacacattgctacattttatttgtgataaaatgagtttcttggtcagaattgatgctgtgtataattctatgatggaggataaagcattgtgtaagtccaaagatggtagttttggcagaagtttaaggatagaaaaggcaaatctacagtcatcagtgtctattccagtaagaacaaagcactttcccttccatgatggaaacaatctgtattgctgatatgaagaaatacccaagactgggtaatttataaaggaaagaggtttaattgacaaacagttccatagggctggggaggcctcagaaaacttacaatcatggtggaaggggaagcaagcatgtccttcttcacatgrtggtaggaaggagaagaatgagagccgagcaaagggggaagccctttataaaaccatcagattttgtgagaacttagcatcatgagaataagcatgggagaaactgcccctatgattcaa

SEQ ID NO: 285270 - DNA, 513 bp, Homo sapiens
ccctagcagaggttctccatgagggccttccccattccttcagcaaaattctgcctggacatccaggtgtttccatacatcctctgaaatttaggcagaggttcccaaatctcaattcttgacttttatgcacccacaggcttaacaccacatgaatgctaccaaggccgggggcctgtgccatctgaagcaacagcccaagctgtgccttggccccttttagccatggctgtagagaggctgagatgcagtcctgaggctgcacacagaccaggaaaccatttttccctattagaccttcaaacgtgtgatggggggaactactgtgaaggtctctaacatactttggagacattttcyccgttgtcttggtaattaacatttggctcctcgttatttatgcaaatttcttcagcaagcttgaatttctccccagaaaatgggtttttcttttctatcgcattgtcaggctgaaaattttccaaacttttatgctctgcttccttttgaaca

SEQ ID NO: 285271 - DNA, 587 bp, Homo sapiens
tttccaggcaaatcgaacattgcttacagttggcctcctggaaggatttcccttcttcagtgcctttcaaaccaaccctgggtggggttgaagtgatgcagctatccacttctggatgatgcctgcatgtaatacagtactatctgtaaacagagattgagattttttctttctcagtttgaaaattgtttacttctttaatgcaattcaggttttcttaactgactgttcatatcctttgtccatttttccactggtgatctctgaatagtggttgtcctacatattcatcttgatttttcttgctaatagtttatctaaaaatgtttgatactgtggttttcagagtgtctatgaatgaaataataatttaagttttttttatacttaygtatgttttgtcttcagtagtcattacattttaggagtgggtgagaggaaggcaggtcaactcctagttctaggttacatgcagtgtttcctgtgaatatgtgggacaggcagtctagtggtcttcctaactgctgaagtaaatagtactttattctgggtgtgggtagctttagaacatttgaattctgagtaga

SEQ ID NO: 285272 - DNA, 562 bp, Homo sapiens
tcaccatggacaagaagaaccagagagaagagaaacctgaattcttaaggtttaagtttcagaatctgtggtgtaaatttgagggagacagagaagctattatattctatgatggctgcaaattcctcctgatagaaaggagtgaaatctctctgtgactgaatttttgagaggtgagagccactaaagtggttgttgagtcagagtgagagtccatcctcttcatgagcaagcaccatccttcaccagtgtgarcaatgtggtggccaattagatcttccattcacgtgactactgaactaaatagacggctgattaaggagtctacttagttctaagtagtagttaggagttctccacctggccttcctgatgctatgttgtgaggaaaacatcaactcctctttcagtgatgcaggaccactaacagactggctttcactatcccaccaaagaagtggagccatgtctcctgcatgcatgtttctttagttaatacactacacaaggcagccacatctaaggatgcacagtgcacctgggagattcctttattagttgg

SEQ ID NO: 285273 - DNA, 1226 bp, Homo sapiens
attactctgcctttttgtgatgtcttgcctttctgtgattcacacttacaaaaataattttttctgaaatcaattacataaaacaagattctaattaatttctgccatgacttaggtctttttaatgtggtatttgtgtatgtgtttttgctttgttttttggttttatttcagaaacttcgcttctgaggtattgggtcatttttttctccaagtgcgtttgaaaatcatgctgcgtattttaatgtcaagctacacattttataaaggagtgtgcatacagcctttcttacgctaagaaatatgaataaaatgagaaaaggctttttaaaaaccttaataagtggagtgcagatttatcacagggggaacctgcttcactggaatacagcgatatatgtccattggtcagtttcattcacatgaggcamactccattacttgctgtgagcaagaaaaaggttacctgacccaactgaagagtattagctttttttttcagctatgaaaaaattgctttgccacttaggtcagcatcatgatataaatcttaatgaaagtttctgagatgtgagagtaaatcaagctgtttggccaccttgatgctctwggagtgttggattatggaccacaaaacagataaggaaggaaatccaggcatcaggaagatgtaaggtaaatgacttgggggtctcaagtatagttcaagaaagcctttctgacatataaatgtcttagtatttggctagaaaaataatcatatatacaggtattttacatagcattttaaaaatagaaaacttcatcttcgatcttaatactacacacaaagagttaagaagaggaatggcaatataaaacgagtgggtctaaattaatttatatttaattttgaaatatcatcagataagtgcaatcttttacaagtatagagawatgtttggacatcagataaatcgtcattataaagatgaagaaactgaaatacacagaaatcatatgctgttcttaagttcctgcagcagatttaagacatcagaactatgatgaattttgtgcatcctaacatattataagactatttttatatctatttctctaatagaagtttactttctgccctaggtgggtgttctgatcagcagagcagctcttcctcatacagtaattcaggtcctcaggctccttccatctgtgccttcgccatagcctatgacctcattgtc

SEQ ID NO: 285274 - DNA, 616 bp, Homo sapiens
ggagtgttggattatggaccacaaaacagataaggaaggaaatccaggcatcaggaagatgtaaggtaaatgacttgggggtctcaagtatagttcaagaaagcctttctgacatataaatgtcttagtatttggctagaaaaataatcatatatacaggtattttacatagcattttaaaaatagaaaacttcatcttcgatcttaatactacacacaaagagttaagaagaggaatggcaatataaaacgagtgggtctaaattaatttatatttaattttgaaatatcatcagataagtgcaatcttttacaagtatagagaaatgtttggacatcagataaatcgtcattataaagatgaagaaactgaaatacacagaaatcatatgctgttcttaagttcmtgcagcagatttaagacatcagaactatgatgaattttgtgcatcctaacatattataagactatttttatatctatttctctaatagaagtttactttctgccctaggtgggtgttctgatcagcagagcagctcttcctcatacagtaattcaggtcctcaggctccttccatctgtgccttcgccatagcctatgacctcattgtc

SEQ ID NO: 285275 - DNA, 589 bp, Homo sapiens
ggcttgaatcctaaatactctatgcccacatgtaagccattatggataactgtgcttgaaacttaattccacatctgctcttctgcagcctttggaaatcttatgaatttctctgacaattgtttgcaaaggccataatcacaggcatctgtaactggatccccagctacaggacaaaacaccacataatcctaagaggctttcagtcaaatcttacttggtttcttgtgtcttttgctgtctttaaaattgcactaagccttcaatttacagaaagcgccgattagcattggtctgaaggtggcccaagccctctttatcgtccctaccacacagccagtgcaaatccttatcatctcccttctggctgtggcctccctggcccaccttcagaaagaagccttatggctctggaggaagcaatctgagctaagggcaastgaggtcccagggccagttcatgttctctgcccctccctccggtggttccagaatcgcaggagacatgaggatgtaccctggttccaagtggccaagaaaatagatgcattggtacttttccagttctttcacttgagtcactcagaag

SEQ ID NO: 285276 - DNA, 547 bp, Homo sapiens
gaaagcctgctctagactatgtttctgctatggctgaaattgcattatttaaacttaacttctacccaaactctagaatgcatagtgtaccctctgtgccctcaatttaaaaaagaaacatagagctgggagccatggctcatgcctgtaatcccaacactttgggaggccaaggcaggtagatcacctgagggcaggagtttgagatgagcctggccaacatggtgaaaccctgtctctactaaaaatacaaaaattagcgaggtgtggtggtgcacacttataatcccagctacttgggaggctgaggcaygagaatcacttgaacccggaaggtggaggtttcagtgagccgagatgatgccactgcactccagtcttggtgacagagtgagactctgtctcaaaaaataaataaataagtaaaataaataaataagaaaaataaatgagccttgtgttaagagaattatgcaaagataattccacttcttcattaacttcacaaatctttctcaattttaaatcttctactattccacataga

SEQ ID NO: 285277 - DNA, 603 bp, Homo sapiens
ggtggaacccatattgactctgcaaatataaaaataagagcatcaatacagctcatgtttagaaaaagaaaaaaggactaaaaaatttagaaaaaaaagtgacttcggaccctttcaaattatattttaccaaaaagaagtaactactgaacacttcaaacatggcaggttctgttataacccagttgatcttcacaaaaacctatgagataacactggctccaatttacagatgaggaactgaagcaaagaaacttcaagtaacttcccaaagatcacctagctggtaattgttagggctgattccaaacccaggcagtctggctccaaagcctgggctttttactactctactagcttgttttatcttagccacattttaaaatcaaagttcaagactctctccaccataaactgcagaagagactttgacttccacctacaatgggggcagtatcaacatttcaggagttgatgyctgtacaagcatttaggatccctggtctctattccctgacagcctttgggcaaaccaatccccctcccacagccaaaagcctctggtgtgtggagtgtggggaagggagagaggagacgggagaa

SEQ ID NO: 285278 - DNA, 566 bp, Homo sapiens
aattgagtcatgatatgtgaaccagtcatttgtctataggaaggaagaaggatttttgtagatgagaacaaagcagtgccttctggaagaagtaatgtatgctgttcaccgtatgcatgggctcggtgttgatggcacccagtgtttgggcagggaggaaaagtccatagtaggagatgatagaaaaacaatatataaaaaactacatatttatttttaatgaacactatatacagcttctcaacttctttactgcaaagaattgatgaagtggtaaacccaaatataggagacccaaatttgggctattgggctcccagatgtacytaaaccttgggcatgttatttaatttctctgtttctgtgtctataaaatggtgatgataataattcagctcggataattcccttgaagattaactgattgcttttgtgcaggacttaggatggttcctcacgctaagtgctcagaaagtgttactgatgattatcaggtattccaaatccctaggaaaaagtggtgcctgttaaacagctataatgcagagatacctggttttagagtc

SEQ ID NO: 285279 - DNA, 362 bp, Homo sapiens
atgtgatatgcattctttgtccacacttgttgggaggagcacaagaagaagcacccagatgctcagtcagctcctcagagttttctaagaaatgctcagagaggtgcaagaccatgtctgctaaagagaaagtgagatttgaagacatgtcaaagatggacaagacccattatgaaagagaaatgaaaacctatrtccttcctaaatgggagacaaaaaagaagttcgaggatcccaatgtacccaagaggcctcctctggcctttttcttgttctattctgagtgtcgcccaaaaatcaaagcagaacatcccggcctaccattggtgagttgtaaagaaattggaagagatgtggaaggg

SEQ ID NO: 285280 - DNA, 633 bp, Homo sapiens
tatatgttctccattcaccagtattaatgaaaacaggacatttagcaattgccaaatatatcatttgtcataaaataatactgaaatgtggaaggttttaaacaaacatggtttcaaatgtaacctttttcttaacattatcaagtattgctaatgtgatagttaattattgttaatgcaacactctataaaaggcgctatgttctttctctgctcacttgaaacaacaaaatattcatgacaacagccatttaggcttctcrtaatctatatatttatgaaatgtgagccctatgctatgcacagtataattcactaagcataattgaatagcgaacaatatagagtggggttgacagtttagagtcctccacgttaaggaaatggtgaaaactctctgctggatgcaatggcttccattctctcctttcactttctgtttgtcttcaattttgccggcctccagtgttggagaatgcgatgaggtattatctgctctttttgcttaaaagtcatttggcaattcccagtctaaagagatagcaggtgttactgtgtctgaggcccactcagtcagttttctgggatggtgagctgtctctcgaagtgaaaaagagagaaaaataagtcttg

SEQ ID NO: 285281 - DNA, 633 bp, Homo sapiens
tatatgttctccattcaccagtattaatgaaaacaggacatttagcaattgccaaatatatcatttgtcataaaataatactgaaatgtggaaggttttaaacaaacatggtttcaaatgtaacctttttcttaacattatcaagtattgctaatgtgatagttaattattgttaatgcaacactctataaaaggcgctatgttctttctctgctcacttgaaacaacaaaatattcatgacaacagccatttaggcttctcataatctatrtatttatgaaatgtgagccctatgctatgcacagtataattcactaagcataattgaatagcgaacaatatagagtggggttgacagtttagagtcctccacgttaaggaaatggtgaaaactctctgctggatgcaatggcttccattctctcctttcactttctgtttgtcttcaattttgccggcctccagtgttggagaatgcgatgaggtattatctgctctttttgcttaaaagtcatttggcaattcccagtctaaagagatagcaggtgttactgtgtctgaggcccactcagtcagttttctgggatggtgagctgtctctcgaagtgaaaaagagagaaaaataagtcttg

SEQ ID NO: 285282 - DNA, 394 bp, Homo sapiens
aaaaagggaattggccaataaagacacaggtgcagcaaagaaacaaaaagtgataatgccgtgaatgaaattcaaatcaaacataagtgcagtcatagaagaattagctaattatagaaatattgacacagatgcagtttgagagactctagatatgtaaccagaggaacttagcaaggtaaatgtatcaacataaatgagraaggtggtatggtaacatgtcccagtggatgggacgttagcaacaaacttttcattaaagaatcttccagagatagaaaacataaagaatagaacgttggaagttgattcaaaattaaaaggaagtatgacaatttgcaaaggcatagaaaagatgttggctttgtgtcattatacaaaaagaagcgcaagc

SEQ ID NO: 285283 - DNA, 1164 bp, Homo sapiens
caggtgcagcaaagaaacaaaaagtgataatgccgtgaatgaaattcaaatcaaacataagtgcagtcatagaagaattagctaattatagaaatattgacacagatgcagtttgagagactctagatatgtaaccagaggaacttagcaaggtaaatgtatcaacataaatgagaaaggtggtatggtracatgtcccagtggatgggacgttagcaacaaacttttcattaaagaatcttccagagatagaaaacataaagaatagaacgttggaagttgattcaaaattaaaaggaagtatgacaatttgcaaaggcatagaaaagatgttggctttgtgtcattatacaaaaagaagcgcaagcacatttccaaccattcttgctaagttttttacaaagaaaacccattacttctcaacatttctaatgttttaaattatagtgtattaaaaaaatactagttttactattttttccttacatatctataactgacagtaaaacaacatcttttaaatgttttgataaaaaggtttcaagawcaaatcaaacataagtgcagtcatagaagaattagctaattatagaaatattgacacagatgcagtttgagagactctagatatgtaaccagaggaacttagcaaggtaaatgtatcaacataaatgagaaaggtggtatggtaacatgtcccagtggatgggacgttagcaacaaacttttcattaaagaatcttccagagatagaaaacataaagaatagaacgttggaagttgattcaaawttaaaaggaagtatgacaatttgcaaaggcatagaaaagatgttggctttgtgtcattatacaaaaagaagcgcaagcacatttccaaccattcttgctaagttttttacaaagaaaacccattacttctcaacatttctaatgttttaaattatagtgtattaaaaaaatactagttttactattttttccttacatatctataactgacagtaaaacaacatcttttaaatgttttgataaaaaggtttcaagatcaaggcttcagcttgaagctattttcatgctcctgcatgactgtataaagtggagattgcctgtatggtatatattatatcccactatcttcacaaaatctataatgcatgcagga

SEQ ID NO: 285284 - DNA, 394 bp, Homo sapiens
aaaaagggaattggccaataaagacacaggtgcagcaaagaaacaaaaagtgataatgccgtgaatgaaattcaaatcaaacataagtgcagtcatagaagaattagctaattatagaaatattgacacagatgcagtttgagagactctagatatgtaaccagaggaacttagcaaggtaaatgtatcaacataaatgagaaaggtggtatggtaacatgtcccagtggatgggacgttagcaacaaacttttcattaaagaatcttccagagatagaaaacataaagaatagaacgttggaagttgattcaaaattaraaggaagtatgacaatttgcaaaggcatagaaaagatgttggctttgtgtcattatacaaaaagaagcgcaagc

SEQ ID NO: 285285 - DNA, 587 bp, Homo sapiens
gggacctaaaacctagataatgggttgataggtgcagcaaaccaccatggcacaggtacacctatgtaacaaacctgtactttctgcacatgtatcccagaacttaaaatttttttaaaaaagaaagccagctaaaaaaaaatgtctcttagaagacatactcttcataatttatcatgacttgaatgcacattttggggctcagaaaatgatatcccaaagtatggtggtttgacatgctgagtacttgaacaaaaggatattggaagtcatctgaagcagctttagagccaaggtttctctgracatctcccatctctcacccttcattctcccataaagtgagtcaaagaaataagactttctcttcctcaaggtaggtcatagaaactagaacccttttcccccaaaacaagccataaaacctagaaacattactctaagctttctctgcctttctgtttaggagctagccataaagaaattctctgacttacccttgtctgatagttggtaataagactctcattccaggggtcctaccccatacccaggagaaaggaatgctacaatagagaggctaagaa

SEQ ID NO: 285286 - DNA, 654 bp, Homo sapiens
catgctgagtacttgaacaaaaggatattggaagtcatctgaagcagctttagagccaaggtttctctgaacatctcccatctctcacccttcattctcccataaagtgagtcaaagaaataagactttctcttcctcaaggtaggtcatagaaactagaacccttttcccccaaaacaagccataaaacctagaaacattactctaagctttctctgcctttctgtttaggagctagccataaagaaattctctgacttacccttgtctgatagttggtaataagacyctcattccaggggtcctaccccatacccaggagaaaggaatgctacaatagagaggctaagaagaatctggacaggccttgttgagtttccctccttagtctgttagcatttaggtcatacccatttgtccaaacacatttctacatggttgtccatgtttcatggaaccaaatcataaaaatagacagttttccctgagcctttgtgccttcatttccaaagcctccatgttatgtaaaactttgattaaataaatctgttatgcttttctcttgttatctagtcttttgttctagaaatgtcagttgtgacccttatgataaataaacccataaaagtagaaaataaataaacccatgaaagt

SEQ ID NO: 285287 - DNA, 519 bp, Homo sapiens
aaagagattttgttttcaattatattttcccaacaagagaaaatatatccttctaaaacttgagttttgagcacagagaatgaagaccgtaaagacaatgaacatttcaccaatggaaattttaaaagatgtgtataacttacttgttagaggaattcatagtgaattattctttttggtattaaagaggtgtgctttgtgccttttcagaagaatatcagttcaattttttcataaaacatttgaattgcatgaatggatgtattgatgtggggttatgaagagttacatgtttaaatgcaaaatagtgtaaaaaactggtgattgacaggatatagtaaactagggcagtgttcatgaaagttcgttctctagactcctaacccataggatgttctgttaaaacacatggaggagaggaggcaaagaagttttggagactgcatatcayaccctattttaaaggttcacatttattaacatatttcttgcagtggaggtatttgtctcattttgttt

SEQ ID NO: 285288 - DNA, 596 bp, Homo sapiens
tgtattgatgtggggttatgaagagttacatgtttaaatgcaaaatagtgtaaaaaactggtgattgacaggatatagtaaactagggcagtgttcatgaaagttcgttctctagactcctaacccataggatgttctgttaaaacacatggaggagaggaggcaaagaagttttggagactgcatatcacaccctattttaaaggttmacatttattaacatatttcttgcagtggaggtatttgtctcattttgtttgatctaactttctctaaatttattttacctttgagaacatttgtatgaactattttttaataccccctgatgctaatgttattccatagaacatagctctaggctgtgaggactcactgaaggttttttttaaatattaaaacccactatatcactggaacatatttcgggaagtgccaatgtaagaccagaactgaaagttcagattttcccaatcccatttaagagtgtgaaggaaaaaagcacatttgatcagtttgcctcagagtttagtgtatggcaacagagcaattcaaggtttttggttaatagggattaacaaacacagctggaaagc

SEQ ID NO: 285289 - DNA, 566 bp, Homo sapiens
tttgtatgaactattttttaataccccctgatgctaatgttattccatagaacatagctctaggctgtgaggactcactgaaggttttttttaaatattaaaacccactatatcactggaacatatttcgggaagtgccaatgtaagaccagaactgaaagttcagattttcccaatcccatttaagagtgtgaaggaaaaaagcacatttgatcagtttgcctcagagtttagtgtatggcaacagagcarttcaaggtttttggttaatagggattaacaaacacagctggaaagcctctgttaatcattaagaaaaagagtaatctgtaaaagcagttttaaaagtgcttttctttccctgaatttttgaattgtgaccattctaagggaaatgaatttaacattaatccttggtgagtaaaatttccataatccctttctataattaagtgaattatttttaatcacatctgcagctgatgcaagcattttcccaacctaaatagtaaaacataaattccctttatgccgaggtaagtcgtttccctgaaagtttatagtct

SEQ ID NO: 285290 - DNA, 558 bp, Homo sapiens
tattgtctcattttttatcaggaaatgacatgttcatgaaactgaaacagaacaaattgtatgcctttgacatatctcccaaaagtaactagtgaatacagagaccatttcagctaaacatgcttgccttcctattgaaaaatgtgacagaggctgctggaggtttattaaaatccattgtcttctttcttggcaccaaacaagattatttcactccactcagatttggctgtgtgagttgggttctacccaatgcaatgtgatcagaggttaatcagtcacatccattgaaggctcataaattctcctacataatgtccctgcatgttctcttccccttccagctgataggatggcaataccctgggtgaccttggatgcaacatgtccaagatggcagagaagctgtcagccttttcagtgaataattttatgaaggaaaggctctgacttagatacctgccttgtactgttacargagaaagaaataatcttcttgttctttaaattactaaattttggaggtgtatttttattgtagcttagcctaccctaact

SEQ ID NO: 285291 - DNA, 503 bp, Homo sapiens
tgcgtcacactttagcatgtctttgatagcacattgccaaacattttaatgatatttagtggcaaatacaaaagacatttcttgagttgtacttccttcaatctagccataacattccacttagcaaatgtcgcttatgactcccaagacacttactcagatttatctctttggttgattaaagaaacatgttatctaatgtctgataagcgtatcttcccagcaattgagattttgaactcctcagctctgtcayggtaatttaaccaaggctgcaactctcctcaaaaataaagaaatgaaaataaacatggagattcctttctttacagaaaatgttctcatgaaaagaaaaaaaatagaatattaatataacaggtcttattagtgttattaaaatctcaaactagtcacggcagctttctgttttatgtaaattgtataggcacatacacaagacagatgtccccaaaaatgtatagaatttcaaactactaaaaatg

SEQ ID NO: 285292 - DNA, 546 bp, Homo sapiens
ttgcctgtaatcttaaatatataaatatgctctttatttctaaaacaatatatcttctacctcctccaaagccagaaacaagaaaagagatgagtatagccttctggttaagagttcagttcccaaaataatattcacattacktctaaagtaattaatacaatactgaggttgaaaaactgaaaattttccattataagaataacagttgattactgaaacttaactgggatgtacttctgtgtgtgaaaaggaaaacctcttctgactgtattttggagatttgtcaggtatgatacagttcctacttttgattgcaattcttgatctgggtagcatgagagaaggagatactcaggttagagaggatgaaagaatagaacagctttctagtaatttgtgcctaatattttcctttaacgcttttgaagttttgaatatgtaggatcctcagagtttcgaaaatttactatctcctgtttttccacattaactcttaccaacactctgcactcttttttttttttccttttgtctagggaatgg

SEQ ID NO: 285293 - DNA, 546 bp, Homo sapiens
ttgcctgtaatcttaaatatataaatatgctctttatttctaaaacaatatatcttctacctcctccaaagccagaaacaagaaaagagatgagtatagccttctggttaagagttcagttcccaaaataatattcacattacgtctaaagtaattaatacaatactgaggttgaaaaactgaaaattttccattataagaataacagttgattactgaaacttaactgggatgtacttctgtgtgtgaaaaggaaaacctcttctgactgtattttggagatttgtcaggtatgatacagttcctacttttgattgcaattcttgatctgggtagcatgagagaaggagatactcaggttagagaggatgaaagaatagaacagctttctagtaatttgtgcctaatattttcctttaaygcttttgaagttttgaatatgtaggatcctcagagtttcgaaaatttactatctcctgtttttccacattaactcttaccaacactctgcactcttttttttttttccttttgtctagggaatgg

SEQ ID NO: 285294 - DNA, 520 bp, Homo sapiens
aaaacattattcatttattattaatcttggtttatccagacaaagcagagattggcaaattcaagtgcctactgggataaggagttaccacgagtgcttggatgtcagctataagagggttagaggggcctgtgttaaactggagaatacaagaccacttaaaggcattcaaaattgaaaaacktataaacattttgttggaaaaataaaatataccttcaggctgccacttttgaccccaatttaaagtctatttaaaagcagcaataatttttgttttaactttgcttaaatttttcacttaattttttctcatagtatctaaaagtattcattatagcgtgtacttcacatgaaaacaaaatctaacaggattaccaatacaagtagctatgagggaaaaacttaaatagtagcaattgataagtgtaatttctactgagctgcagcagagaaaacagaacacacaattaccgattactgagtaggtctacactgatttgtgaaaatagatattttt

SEQ ID NO: 285295 - DNA, 594 bp, Homo sapiens
ttagtagtggctgacactgagtccaratagtcttgattcctagaaataaacaaaaggtaaacaatgtcaattttgtgtgtgtgtatggcgtgtgtgtagtcatgtatatatgcggggaaaatgttaaggtattcagtcaggaaacaaaaggtttaaaactcatctttcttaaaacttgttataagcacagggaaagcaaagttgaggtaactaaactgaaccaaaaattctgtataaataaggatataagtaattaacgttttaaaaaacatgtggaccttaaacaaactgtatattaaattcctcttaaatgcccattttaaatatttaagataaatacatttatgaataacaaatctgtgggtgatttaaccatggcaccatatccaagggattaaccttaatgcaattttcctgttaattgtcctaagctttttactaatccattttccctgtgggttagtaatggcaacatgctgcttacagatattcccggggaaaaacatccagacaccagcaaacaaagaaatgttgatttctcttttgtttgctctgaaagtaaaataattatttactttaattaacatggaaaat

SEQ ID NO: 285296 - DNA, 594 bp, Homo sapiens
ttagtagtggctgacactgagtccagatagtcttgattcctagaaataaacaaaaggtaaacaatgtcaattttgtgtgtgtgtatggcgtgtgtgtaktcatgtatatatgcggggaaaatgttaaggtattcagtcaggaaacaaaaggtttaaaactcatctttcttaaaacttgttataagcacagggaaagcaaagttgaggtaactaaactgaaccaaaaattctgtataaataaggatataagtaattaacgttttaaaaaacatgtggaccttaaacaaactgtatattaaattcctcttaaatgcccattttaaatatttaagataaatacatttatgaataacaaatctgtgggtgatttaaccatggcaccatatccaagggattaaccttaatgcaattttcctgttaattgtcctaagctttttactaatccattttccctgtgggttagtaatggcaacatgctgcttacagatattcccggggaaaaacatccagacaccagcaaacaaagaaatgttgatttctcttttgtttgctctgaaagtaaaataattatttactttaattaacatggaaaat

SEQ ID NO: 285297 - DNA, 594 bp, Homo sapiens
ttagtagtggctgacactgagtccagatagtcttgattcctagaaataaacaaaaggtaaacaatgtcaattttgtgtgtgtgtatggcgtgtgtgtagtcatgtatatatgcggggaaaatgttaaggtattcagtcaggaaacaaaaggtttaaaactcatctttcttaaaacttgttataagcacagggaaagcaaagttgaggtaactaaactgaaccaaaaattctgtataaataaggatataagtaattaacrttttaaaaaacatgtggaccttaaacaaactgtatattaaattcctcttaaatgcccattttaaatatttaagataaatacatttatgaataacaaatctgtgggtgatttaaccatggcaccatatccaagggattaaccttaatgcaattttcctgttaattgtcctaagctttttactaatccattttccctgtgggttagtaatggcaacatgctgcttacagatattcccggggaaaaacatccagacaccagcaaacaaagaaatgttgatttctcttttgtttgctctgaaagtaaaataattatttactttaattaacatggaaaat

SEQ ID NO: 285298 - DNA, 537 bp, Homo sapiens
aatagtaaaagaggacatgggattttaaaactatacctaaattcttgcarttaacttttatgggcttggacattgttgaaatgagaaaataatataatatagcttcctggcaggttaaaagtcaacacttgattttgctattcttctgactttttgaaaccctgaagttctgaatttcaagcttttaagaagcttttcagcaatggttgtttgtttatggttcaaacatctgaaataactacctgcatttaaaatctaatgttgattattttctttttacattctgtgtggcaatggaacatttgccctttcaaacaataaaacgatttagctttgtggcagtgcttttttgtagactgactgactatacccttcaaaaagaaaaactgctctacggaatgcaaattttgaggcatgtttacctgctcgtggaagaaataaaatggaattgaaaaaaaaaggactaaaattgaagaatgaaattacagttgtgttaaaaaccttggctctttataatcatgaatcttcagtattaaa

SEQ ID NO: 285299 - DNA, 537 bp, Homo sapiens
aatagtaaaagaggacatgggattttaaaactatacctaaattcttgcaattaacttttatgggcttggacattgttgaaatgagaaaataatataatatagcttcctggcaggttaaaagtcaacacttgattttgctattcttctgactttttgaaaccctgaagttctgaatttcaagcttttaagaagcttttcagcaatggttgtttgtttatggttcaaacatctgaaataactacctgcatttaaaatctaatgttgattattttctttttacattctgtgtggcaatggarcatttgccctttcaaacaataaaacgatttagctttgtggcagtgcttttttgtagactgactgactatacccttcaaaaagaaaaactgctctacggaatgcaaattttgaggcatgtttacctgctcgtggaagaaataaaatggaattgaaaaaaaaaggactaaaattgaagaatgaaattacagttgtgttaaaaaccttggctctttataatcatgaatcttcagtattaaa

SEQ ID NO: 285300 - DNA, 537 bp, Homo sapiens
aatagtaaaagaggacatgggattttaaaactatacctaaattcttgcaattaacttttatgggcttggacattgttgaaatgagaaaataatataatatagcttcctggcaggttaaaagtcaacacttgattttgctattcttctgactttttgaaaccctgaagttctgaatttcaagcttttaagaagcttttcagcaatggttgtttgtttatggttcaaacatctgaaataactacctgcatttaaaatctaatgttgattattttctttttacattctgtgtggcaatggaacatttgccctttcaaacartaaaacgatttagctttgtggcagtgcttttttgtagactgactgactatacccttcaaaaagaaaaactgctctacggaatgcaaattttgaggcatgtttacctgctcgtggaagaaataaaatggaattgaaaaaaaaaggactaaaattgaagaatgaaattacagttgtgttaaaaaccttggctctttataatcatgaatcttcagtattaaa

SEQ ID NO: 285301 - DNA, 430 bp, Homo sapiens
tgaaagcctttctgctgggatctgaaagaagacaaggatgcccactttcactacttttattcaacataktattggatgttctagccagagcacttgggctagggggaagaaaaagaacatcaaaattggaaagaaagaagtcatattagccttgttcacaggcaacatgatcctacatttagaaaaacctaaagactgataaacgaatttagtaaagttgcagatagtaaagaaatacaaacatcaatcacatttctatacaccaacagtaaagaatctgaaaaataaatcaagaaagcaatctcgtttacaatagctattgaaaataataaaatacctaagaaaaaaattaataaaagaagtgaaagatctgtgcaagaaaaactattaagcactgatgaaagaaattaaaagggaaattaaaaaatag

SEQ ID NO: 285302 - DNA, 430 bp, Homo sapiens
tgaaagcctttctgctgggatctgaaagaagacaaggatgcccactttcactacttttattcaacatattattggatgttctagccagagcasttgggctagggggaagaaaaagaacatcaaaattggaaagaaagaagtcatattagccttgttcacaggcaacatgatcctacatttagaaaaacctaaagactgataaacgaatttagtaaagttgcagatagtaaagaaatacaaacatcaatcacatttctatacaccaacagtaaagaatctgaaaaataaatcaagaaagcaatctcgtttacaatagctattgaaaataataaaatacctaagaaaaaaattaataaaagaagtgaaagatctgtgcaagaaaaactattaagcactgatgaaagaaattaaaagggaaattaaaaaatag

SEQ ID NO: 285303 - DNA, 574 bp, Homo sapiens
taattgcagtgttccatgctatrtttaagcaaagctatgcaaaatgtcacatccaactctgaaaaattaaaatgttaataatttttatgaataattgcctaatatacacattcttgggtttaatttgaatactgtactgattatacaagcctttgaataattcatatgtagaccatttgtttttctcatttcaaagttttcctgatggatccctataacaagagaaaaattgttctattggggccccaggtccaagaacaaaggacaaatttaaattaatagtaaatgatggttgggtgcaatgtctcatgcctgtaatcccagcacattgggaggctaaggagaaaggctttcttgagcccaacgtctgaggctgcattgagctgagatggtgccaatgtattctgccttggcaaaagagcaagaccttgtctctaaaataataataataaagaatggtcatgtcatttttatagaaacctagaatcatgtcatttttatagaaacccagaacctagctgaaaaattgaccttttttgcccatatatatctgttactatatagtagacaggat

SEQ ID NO: 285304 - DNA, 1038 bp, Homo sapiens
taattgcagtgttccatgctatgtttaagcaaagctatgcaaaatgtcacatccaactctgaaaaattaaaatgttaataatttttatgaataattgcctaatatacacattcttgggtttaatttgaatactgtactgattatacaagcctttgaataattcatatgtagaccatttgtttttctcatttcaaagttttcctgatggatccctataacaagagaaaaattgttctattggggccccaggtccaagaacaaaggacaaatttaaattaatagtaaatgatggttgggtgcaatgtctcatgcctgtaatcccagcacattgggaggctaaggagaaaggctttcttgagcccaacgtctgaggctgcattgagctgagatggtgccaatgtattctgcctyggcaaaagagcaagaccttgtctctaaaataataataataaagaatggtcatgtcatttttatagaaacctagaatcatgtcatttttatagaaacccagaacctagctgaaaaattgaccttttttgcccatatatatctgttactatatagtagacaggatwtttgccagtcatattcgtaataatttctgagtcttttgttctaacttttatatctacaacaaatatttaaacatgataaattttaatttaattttaaaattatgaatattaacttataatcaagttataattgtaaatacattacaaatttgatgattataatatatwctttgctttttagtaaatctacatttaatttgttaatggatttttttttttaatcagagctgggtaaaagttagtgaaagacttctcactgtaggctgatctccccagaaagatactggtctctaatgaagctccctgaaaatggccaaggtcaagattaataacagtgcttcaatcccaaacatgagttggtcacgtaagtgggcaaggtgttgttctccccatgaggaatgttgaaacggcaaatcatgcaaccaactcactgcagcaaacgtacagatgcagatgtcatact

SEQ ID NO: 285305 - DNA, 463 bp, Homo sapiens
tttgccagtcatattcgtaataatttctgagtcttttgttctaacttttatatctacaacaaatatttaaacatgataaattttaatttaattttaaaattatgaatattaacttataatcaagttataattgtaaatacattacaaatttgatgattataatatattctttgctttttagtaaatctacatttaatttgttaatggatttttttttttaatcagagctgggtaaaagttagtgaaagacttctcactgtaggctgrtctccccagaaagatactggtctctaatgaagctccctgaaaatggccaaggtcaagattaataacagtgcttcaatcccaaacatgagttggtcacgtaagtgggcaaggtgttgttctccccatgaggaatgttgaaacggcaaatcatgcaaccaactcactgcagcaaacgtacagatgcagatgtcatact

SEQ ID NO: 285306 - DNA, 609 bp, Homo sapiens
gtgtccgtgggaacagagcgcttattttggcayaggctttgtaattcatgaaagttttctcgttttaaaaatttctgtctgaatttcagatttgggtctgtatttacctaattattccatattgacataatgacatatattgggaaatttagaaatgtcctagaatcgtctctctacagaatagaaaaaatcaattaaaagtaaacagaggcaaggggatagaacaatgaagtaatcctagactatcgtgaactcacctccctctacgttctgttgcctcattatctctcacctttcactgtctctcggttgcatgctgctgtctcagcttagttcttgatttcttcctgcccagataccttttatcagctctcctttcagttagcaataaacccacccactcatcctcctccagctgcctgctgtgcttagtaaaatgatggaagcacattccctgcttcgtatcttaggaggggactacgttacagttcagggcagtggaaacagttgtgtccactatatccagaatgccttgaggtcaagtttcagctctgctccttcgtaactgtggggccttggacaggttccttagggtctctagacatagct

SEQ ID NO: 285307 - DNA, 581 bp, Homo sapiens
cccatgaattatgctatttttatatttgaaaactcacctgcaaagccaaggccaggtagattttcttctctgtttatttcatgatgttttatattttttcattttaggatgtattttaaactgatttttgtgtaagttcgatttcattggtgcattttctctctctctctctctmtatatatatatccaattattccagtactgtgtgttaaaaatccttctatttctctattgaattgcccttgctcttttgtgaaagaccagttgactacatttatgttggtctgtttcaatttctgtattctcttcaatgatctttttcttttccagtatcacactgtcttgataactgtagccttatagtaattcttgaaattggctaccttaaatcttccaaattagctcttttttagtattgtgctggctacactaggtctttctaccttgagattgagtcgaatctacgtatcaagttaagagaattggcatcttaataatatggagtctttcaatatatggatatgaactctctatttatagaaatctctgcttcttttttaaatcagagttttaagttttca

SEQ ID NO: 285308 - DNA, 581 bp, Homo sapiens
cccatgaattatgctatttttatatttgaaaactcacctgcaaagccaaggccaggtagattttcttctctgtttatttcatgatgttttatattttttcattttaggatgtattttaaactgatttttgtgtaagttcgatttcattggtgcattttctctctctctctctctctatatatatatccaattattccagtactgtgtgttaaaaatccttctatttctctattgaattgcccttgctcttttgtgaaagaccagttgactacatttatgttggtctgtttsaatttctgtattctcttcaatgatctttttcttttccagtatcacactgtcttgataactgtagccttatagtaattcttgaaattggctaccttaaatcttccaaattagctcttttttagtattgtgctggctacactaggtctttctaccttgagattgagtcgaatctacgtatcaagttaagagaattggcatcttaataatatggagtctttcaatatatggatatgaactctctatttatagaaatctctgcttcttttttaaatcagagttttaagttttca

SEQ ID NO: 285309 - DNA, 851 bp, Homo sapiens
gtttggatgcaggacacctgtctytcctgctctttatatatccttgagaccattttctctcccatgtccctaaaactgcccaactttaaaatgtttatcatcacttcatattaccatttatgaagctttattgctgtcacttctcaatacctggaccatttacccttatttccggatgacttcagtttctagttcactgacattttctttacaagaaaccctgtcttaattcttcatgattctagtatacacatagatcatccagcacactaacttctcaaatccttgagtcctctcctttgatgctcttattcttttctccacctaggaaatttactggttttgtcattacaaacaactgcaaaatttttgtaatttcagtttcattcatcccattttctgaccactacttaactaggatttgaaggctctaacagttcttctaccccaaaggggcttcaagtcttactacattttcactgcctgtagctcatttgatgttctctttttctgaaccagcttaaataccatgatcaatgaawgaccatgtgaaaatcagatcattatattgacccccgctttgcccattttttctctcaccgatcttctatcacataactacagttactgctaagcagtatgagtacataaatacawactggctttaaaatgctgttagtggaatattagtagacatattagatcttcttatggcactttctttggctcaatgggcagccaattagcactgtgggacatagaaatatagcatcacaaacaagctatttgtgtattccagtattaaattatttttccttcaactcaataaaagtaatgttaatgacaagatc

SEQ ID NO: 285310 - DNA, 556 bp, Homo sapiens
gcagtggcacaatcctagctcactgcagccttgacttcctggtctcaagcgatccttcaacttcagcctccaaagtagctgggactacaaacatgtgccaccacacctggataattttttacttrttattattttgtgtagagatgcgggggtcttgctatgttgcctaggcaggtcttgaactcctggtctcaaactatccttccaccttggcctcccaaaatgctgggattccagacatgagccactgcacatggcccgtttcaagttttaaacttttcatttttataaataatattgcctgaacctgctcattcataaatttttgtcaacatttccaaatttgtcctttgcctacatttctaaaaatagaattcctggcataaaaagtattaatgcttttcatattgcgctatcaaattgtgttctaataagacaataataacttaaactttctgatcaacatttgttttcttttttaatcttggtcagtttgacagacaaaaacaaggatctttatgttttaatttaatttgctatcaatagaatccatagg

SEQ ID NO: 285311 - DNA, 560 bp, Homo sapiens
aggcctactcatgaaagaaacatcctaacagaaaattaactcagcagcaattaaaggcaaacttctgtaccttaaaamtgaaatgaacatgatacatgggctttaagtttcactagaaatgcacaatttcacaaatcacctattctgttatcctgaagtcttccctttactaagctttccaacagttgggcacttcagtgtctcagcatactgtgtggctgatgtagaaaggactggggcagttgaaacacttgtctcatgtcagaaaaacaggatgtaattgtggctctgttactaccttccccggtgactgtggacaattcacttccctactgtatctcagtgtcctcagtcattaaatgaaggagtaaggcagaagttcccttgggttttcatattcgattatttctgggactctagtctcaaccaacaaatcttccacatcactgctggagtccagggttatgtcaacacaatagtgcttaaataaaaccttcagtgacttgccattgtcctagcagcaatgcccagtcatttggagttcaaaaataagtaaaaca

SEQ ID NO: 285312 - DNA, 560 bp, Homo sapiens
aggcctactcatgaaagaaacatcctaacagaaaattaactcagcagcaattaaaggcaaacttctgtaccttaaaaatgaaatgaacatgatacatgggctttaagtttcactagaaatgcacaatttcacaaatcacctattctgttatcctgaagtcttccctttactaagctttccaacagttgggcacttcagtgtctcagcatactgtgtggctgatgyagaaaggactggggcagttgaaacacttgtctcatgtcagaaaaacaggatgtaattgtggctctgttactaccttccccggtgactgtggacaattcacttccctactgtatctcagtgtcctcagtcattaaatgaaggagtaaggcagaagttcccttgggttttcatattcgattatttctgggactctagtctcaaccaacaaatcttccacatcactgctggagtccagggttatgtcaacacaatagtgcttaaataaaaccttcagtgacttgccattgtcctagcagcaatgcccagtcatttggagttcaaaaataagtaaaaca

SEQ ID NO: 285313 - DNA, 645 bp, Homo sapiens
tgacagcgggcagaagggaagtccaatagaaagtgctggttcacaagccaggtatgaaaaagagaagaggttgtccatttgggttgctggaaaagctatcataaaccccttttaaccccttaagctctgtaatttgggggcaccctgggtgtagaagaaacacacttgggaaattattataataactctatcccctaatagtctcagaacccttctgtccatcctcactgctaaagtactgcttcagatcttcatcattctcaccaagactattgcacacamttctttcaatctcacgtgttccatatgccgtttttacaacttcatctcctaccactgtcttatccacacccttgatctaaataaaggtatgtgtgttattaacagccatctccccagctagactgtaagctatataagggcactgtgactacatgaggctacattttgtctgtactgattcatcattgtacccccataacatagtgcctggcacatggtaggcattcaatatgtacttagtgagtaaataagagaaggaagaaattataagatgagctaacagttattgagtagctcagttattctatattaatcctcacaacaaccctctaaagtagtattaatatacctgttttgcacaga

SEQ ID NO: 285314 - DNA, 539 bp, Homo sapiens
atctcctaccactgtcttatccacacccttgatctaaataaaggtatgtgtgttattaacagccatctccccagctagactgtaagctatataagggcactgtgactacatgaggctacattttgtctgtactgattcatcattgtacccccataacatagtgcctggcacatggtaggcattcaatatgtacttagtgagtaaataagagaaggaagaaattataagatgagctaacagttattgagtagctcagttattctatattaatcctcacaacaaccctctaaagtagtattaatatacctgttttgcacagatgaaactaagggaaattgttttccttgcccaaagtgacatagttcacaactggcatggccaagagtcaaatcaaggggaatgactgcagaatgcgtacattctatctccaatcactttagtcttaaaaatcagccttcaaaatgtcttctggctacaagacttcgcatttgatatttgtgtccaaarttaagctacagtctgtattcgggatattgatc

SEQ ID NO: 285315 - DNA, 549 bp, Homo sapiens
gtaaaagaaacaagccccccataatggaagtaaaaatttaatgtaacattgcagcttttaaactcacattagctaaggagcattcaaaactctggaataatggaacattaggaaaaattttttgtgtccttttgccttcccacatgtttgtctttaaaaggagtcaagaatttggaggtaaggtttcactctgttcacttccatcttacttgcccaggcactaaaatttaagaagcgtccatgggtagaatatgacgcatccggtatgttgatgattaactaaaataatcagcatgttgatgattaactgtatgtattacttaataatattttgcactgctctaagtacaatagatatcacagctgaaaaaatatttgttrttattttaatagtgtagaaacatctgaacaacttgtaccactatggatgtctttaaaagcaaagcttcccccaaattacccccactttttagtgttgttttccctaaagtataatggagcttctgtaattcccaatctaaggaaagactgtgtagaactttgcctgtg

SEQ ID NO: 285316 - DNA, 548 bp, Homo sapiens
aatagaagcagggcacatattgatctatgttttctactctttatcctgaaaggtctgtttgagaacatgaagttatgttccttgccaggargctaaaaaaaccccattgccacacttctgactccaggacatcagaaactctgaggtcatgaggaccaggggaaagcagaagatccttcacctccagcgaggagtaagggtggaggaagagtgggttctggctgctagaaaatggcaaatcagaagccctgatattcccctactacctcagaccaccacagaggtattcacagagaagagagaaggcagtagggtgcccataactaggtaacatccagttctacaaaaggagggagtaagagaaaaaaaaagaaagaaagaaaacctttgtggtcttcttccatttcattggtgtaaccactcccacctggctagtttcaacctacaaaagagagagcaacgaactcagagttgagcaaaattggctttcacaaaccagttcaagctgactcaagccagctccagcctgctccaacacaccagcaaca

SEQ ID NO: 285317 - DNA, 504 bp, Homo sapiens
tcttataaatacattacattatctagacattctgaaaagcataaaggagtgatacaagtttattccactttcctagttggccattacaggatcatgggcatgtagctttacagttttctgatccctttcctaagataagacttgtgtaccgtgtcttaagtgtctgctaygatcttaatatgtctcccaaaattcatgtgttgggaacttaaaccctagggcaacagtgttgagagatgaggcctaatgggaggtgtttaattgataagggctccacctccatgaatggattaatgccactataaataggacttgtgggagcaggttcaccttttcttccaccatgggatggcacatcaagaaggccctcaccagatgctggcaccttgatcctggacttcctggcttccagaaatgtgagaaataaatctcgtttttaaataaactatccagtctcagctatttagttacagcagcacaaacagtctaaggtagtgtttattt

SEQ ID NO: 285318 - DNA, 502 bp, Homo sapiens
cttaacctgtggctgggtcacttctcaaaggttattatcactctctgaagtcagaaggccacacttgggaccctctgacccatgtcacaggaagtagaggggcaattctagtgcagttcacacacgtgggtatttaaacaaattatctcctctttgcactcccttctgtttttagaaggagtatgcagctaacactagagagtgtgctagactgaaacatgcacactttctctctccatgataggctctggctagtcctgccctaaaagacttcagcatgagagaagagagactgttttccaacagsgtttgtgtttcttggatgccattctgatcagctcttaccccccttacttccacacaagagggaggtgaatgaagccagtagctgggctcactactgagttgatctcatgagggtcgataacagaaagaggctattgctagagttgggcagttcctagttctctaaacttggtttcttgaatagaaattaatgtga

SEQ ID NO: 285319 - DNA, 612 bp, Homo sapiens
tcccgcccttactttaaggtaaaattacttaacattattgaacctcagtttcttcttctgtgactggggataatatctgtaataacttgctagatcaaatgacaaaacacataaaaacatgtaatgccttgtatttcttttttcttcctattaaatattttgtaaayaaattgtttttaaaaataatgcccctgttcttttaaaagataatttcacaaacatttcatgaaagaagaattatattccacagagaaaagcaaggaatctgctgggaagggctctgcatcttcacagtctttatgtgatcccaggcagcctttgaggcagacccggcttgactgcatttgccagaaccatggcctatggcactcaggtaatttgagctaaagggaagtaaaagttaaatacctgctccaatccttattcctcacccttccccaccaaatataccaattagtattcctaatacctgggaactttccgtatttatgcagtgttagtagaattagcctagccggctgagcccttgagattaatcagcatccagaactttcctcagaagtggtaaggcccatttcttactcaggaaatccaccatggagtcttggctcc

SEQ ID NO: 285320 - DNA, 612 bp, Homo sapiens
tcccgcccttactttaaggtaaaattacttaacattattgaacctcagtttcttcttctgtgactggggataatatctgtaataacttgctagatcaaatgacaaaacacataaaaacatgtaatgccttgtatttcttttttcttcctattaaatattttgtaaacaaattgtttttaaaaataatgcccctgttcttttaaaagataatttcacaaacatttcatgaragaagaattatattccacagagaaaagcaaggaatctgctgggaagggctctgcatcttcacagtctttatgtgatcccaggcagcctttgaggcagacccggcttgactgcatttgccagaaccatggcctatggcactcaggtaatttgagctaaagggaagtaaaagttaaatacctgctccaatccttattcctcacccttccccaccaaatataccaattagtattcctaatacctgggaactttccgtatttatgcagtgttagtagaattagcctagccggctgagcccttgagattaatcagcatccagaactttcctcagaagtggtaaggcccatttcttactcaggaaatccaccatggagtcttggctcc

SEQ ID NO: 285321 - DNA, 604 bp, Homo sapiens
cagtgataccaactggtagcctaagccaaaatgaaggtccctgatgttccatcaaagaacttaaactacaaacctacaggaccccagtgcagggtagaggtggatgatgcatgacagttgtctctgttgtctaacatgtgctaattgctctttttaatttaattcactgtagtaaagctgctttcagacctcttccatctataatctgtgatttaatatcagcaatgcccttatgttaaccttgtttcagtccatactgaagcatttcccttatttccttacagtttgcagagaactgagttactgagaatatatcattactctgagtcttcactggcattagctctccctccaggggtgagccatatgactcccagctttatgctgggatgctgggaatttactaggctcccacttaccatgttcatattgttggtgttgaatccacccagaagtracatgatattactacaaatctgatcaagaatcacctggccacaaaggtaaataacaagttgtctgagaaatctggtctgatacagaaattcttttttgccaaacaatccctgtgaaaatatgaagtgacatagacatgacagacaga

SEQ ID NO: 285322 - DNA, 601 bp, Homo sapiens
gtcttcactggcattagctctccctccaggggtgagccatatgactcccagctttatgctgggatgctgggaatttactaggctcccacttaccatgttcatattgttggtgttgaatccacccagaagtaacatgatattactacaaatctgatcaagaatcacctggccacaaaggtaaataacaagttgtctgagaaatctggtctgatacagaaattcttttttgccaaacaatccctgtgaaaatatgaagtgacatagacatgacagacagaaaagatgtgactgtaatttaaaagtttatgttttaggaaattgggctggaagatttttctacgtacacaggaagttttctgaggagtctcataccttgatcatcatatctggcagcaacaaaaatttggtcccggggctttttgcatgcttaacagtggctatgggtgctaaagcaaaatacattttgattttctgagccagctctggcatggtggaaaatgcaataaagcctgcaaaagaagaaatatgtcaacatgaataygaaatatttttagaactcataaaatgtatattttgcttttaaatacatatttcaataagt

SEQ ID NO: 285323 - DNA, 444 bp, Homo sapiens
acatttctgttggttctttcagacacagccccagggcctcattctgccagccaaagtcaggctctggtttgccgcctccaacagtcccactctgtgagatcctggttaatttggtttgtacttggcaaaaaaaaaaaaaaaaaaaaaaaaaaaaaaccctacaaaaaagtgccaaraatgtctcctttatttaggaaatacaatatactttcttagtgaaaatgagttctcttctagtttgctattcagaagggacataatggttttgcatactcatagcttctctttctagtctttctggaaatctaagatgctaaatgttcttggccctcaactgagtcctttctatctttaggcaccattcaatgtccatagctttttcatcggacaactctcattttacatcctcttagtgtattactataatttttaattctatacaaa

SEQ ID NO: 285324 - DNA, 594 bp, Homo sapiens
tgtaccctccagaactgcataataccaaatgcttaggaaatgtgtgtgtgtgtgtgtgtatgtgtgtgtgtgtgtgtgtgtgtgcatgctgctcctccccagtgcttctctataaagcaagtaaaatacaaaatgatcatgtatcattcctcaagggcacttggaggtccccagaatgtgtcctggaaattttcttggccagtatcccatctcagtgggatggcttatcctaacatgctatggtttgaatggtggggtttccaccaatattcacgatgaaacttaatcctcaatgcaacagtattaagaagtgtggtctttgggaggtgatgaatcatgagggctccactctagtgaatggtattaagacccttgtgaaagggctcaaggttgaagggagtgctctcttgcccttctgccttccaccctgtgaggacacagcaacaaggtgccatgggtgtgtagtgaaggctgctcatggaagctgagagcagccctcactagacatcaatgctggtgccttgatcttggactttmcagtctccaagaccagacaaaataaatttctgttctttttaaattatcctgtattag

SEQ ID NO: 285325 - DNA, 554 bp, Homo sapiens
tacaaactttctttaaattaggattattctccctgtcgtatagatgaggaaacagaaattaatttactggctcaaaggccacaaaaatgcaaagtggcaaactaagcttcccaggtctatctggttccagagctttttgtcttaaccattggagtaaatagcttcactttctgccaaagtggcttgtgctcatggttccaataatccaagtagagaagaacattttggaycaagagggtacagggtcatcgactcaaccttaattttctaaagatcacacctgatgacctaaaattcaactgtcttggggccaataatggctgtttggttgaacacaggtgcctatcgaattttttttttatatatatactttaagttctgggatacatgtgcagaacgtgcaagtttgttacatagatatacacgtgccatggtggtttgctgcacccaacagcctgtcatctacattaggtatttatcctaatgttatccctccccttgctcccctccccctgtcatgcccccgtgtatgatgttccccttcctgtgcccat

SEQ ID NO: 285326 - DNA, 617 bp, Homo sapiens
ccttttcattcctcaaaagtaaccactactctgattttaacatcatgcattagtttgcctcttctaaaatttatcaaaatggaattacatcttcttttgtatctggcttatttggtcaatattatatttgtgcaatttatctatgcttttgcaggtaataataatttttaaatttttattgctatgtagtattttattatattagtgtatcaaattttatttatctgttccacaattgatggaattgaggttaagctaacatttgtctactgcaaataatgctacttgaacatttttgtatgtcttgatgcaggcatgtttatattttcattgggtagattctaggaaaatttcttggtaataggatgttcatgtgtagaaatttaatacatacttccaaacaatccagagttttgtagcaacttatactcctacctgcactraagttaaatgtggaagaccagcatgcttcacacaaagtacatactcaatacatatttattgacagaattaatacataaaagtaagtaatttgttctacaacaagtggactcaactctgagtttagaccatgtgcttttaatttctacactgtactattgaagagaagtgttcaa

SEQ ID NO: 285327 - DNA, 617 bp, Homo sapiens
ccttttcattcctcaaaagtaaccactactctgattttaacatcatgcattagtttgcctcttctaaaatttatcaaaatggaattacatcttcttttgtatctggcttatttggtcaatattatatttgtgcaatttatctatgcttttgcaggtaataataatttttaaatttttattgctatgtagtattttattatattagtgtatcaaattttatttatctgttccacaattgatggaattgaggttaagctaacatttgtctactgcaaataatgctacttgaacatttttgtatgtcttgatgcaggcatgtttatattttcattgggtagattctaggaaaatttcttggtaataggatgttcatgtgtagaaatttaatacatacttccaaacaatccagagttttgtagcaacttatactcctacctgcactgaagttaaatgtggaagaccagcatgcttcacacaaagtasatactcaatacatatttattgacagaattaatacataaaagtaagtaatttgttctacaacaagtggactcaactctgagtttagaccatgtgcttttaatttctacactgtactattgaagagaagtgttcaa

SEQ ID NO: 285328 - DNA, 617 bp, Homo sapiens
ccttttcattcctcaaaagtaaccactactctgattttaacatcatgcattagtttgcctcttctaaaatttatcaaaatggaattacatcttcttttgtatctggcttatttggtcaatattatatttgtgcaatttatctatgcttttgcaggtaataataatttttaaatttttattgctatgtagtattttattatattagtgtatcaaattttatttatctgttccacaattgatggaattgaggttaagctaacatttgtctactgcaaataatgctacttgaacatttttgtatgtcttgatgcaggcatgtttatattttcattgggtagattctaggaaaatttcttggtaataggatgttcatgtgtagaaatttaatacatacttccaaacaatccagagttttgtagcaacttatactcctacctgcactgaagttaaatgtggaagaccagcatgcttcacacaaagtacatactcaatacatatttattgacagaattaatacmtaaaagtaagtaatttgttctacaacaagtggactcaactctgagtttagaccatgtgcttttaatttctacactgtactattgaagagaagtgttcaa

SEQ ID NO: 285329 - DNA, 623 bp, Homo sapiens
ataagtgggattttcaccaaaaccctatccttccccagactccagtgacagtttaacggtcagctgcatcaaggcttgtgtactgtgcagtcttaaaaggcaccactcctgtccatctcggtgaaattgatggtggagcaaaagggagtttaggtggttccggtctggggagaagacgtgcasggtttcagatgcgaaagtcgcacccaaccgcttcactcgggctctaggccatccgcaggggccctgcttccttccacctgcgagctttttctgcagaatgcgggaagccgccgccgccgccacagaggagggggcggaggcagaggcggaggcggcacccaggggccggggcaggggaggccgggaccatcgcagtgacaatttattttcctgcagcagcggcagcagggacggttgctgcaggttcggggtcggccggcctgcgcgtgggcttgcgaggacgctgttcgtcccctgcgctggggtgtccgacagcgaggaggagaacgacgcacggagcccgcgcgactggaaccagcaaagctccatctgtcggcagaggagaagggggaggaggcacggccgaggcaaacgagcggacgcctcgtcgccgggtgccg

SEQ ID NO: 285330 - DNA, 556 bp, Homo sapiens
aacgaggcaaaatataaaaatgatagttatccatgcataacctgagggctgtttctgtttcagtggctttggtttaaaaaataaagaaataaacaaaataaagcaaatatataaagtaagcaaagttgtttattttttaggtactctttttgayaatggtaatttttagtttattatgtttattgttaatcaactcacaaactctatctgttaaataatttttgaatgctaaatatggatgaataagctatcttcataatgtgtggaacaaatggacttttccctttaatatccactccgtaatcaaagaatgaaaaatggaccattactcacaagaattgctaataatgcaaatatccttgaagttaatcttcaaggagagaatatgagcagtttgaaaatgagaaaagaacatcaataggaaactcagaaagtaattgttaagtccacaaaaatcatgtaaaactatgaacacttcacttattaatacagaaaagtaaattattagaacttcatatacgtatcattttattatctattaatttgcaacattaaa

SEQ ID NO: 285331 - DNA, 556 bp, Homo sapiens
aacgaggcaaaatataaaaatgatagttatccatgcataacctgagggctgtttctgtttcagtggctttggtttaaaaaataaagaaataaacaaaataaagcaaatatataaagtaagcaaagttgtttattttttaggtactctttttgataatggtaatttttagtttattatgtttattgttaatcaactcacaaactctatctgttaaataatttttgaatgctaaatatggatgaataagctatcttcataatgtgtggaacaaatggayttttccctttaatatccactccgtaatcaaagaatgaaaaatggaccattactcacaagaattgctaataatgcaaatatccttgaagttaatcttcaaggagagaatatgagcagtttgaaaatgagaaaagaacatcaataggaaactcagaaagtaattgttaagtccacaaaaatcatgtaaaactatgaacacttcacttattaatacagaaaagtaaattattagaacttcatatacgtatcattttattatctattaatttgcaacattaaa

SEQ ID NO: 285332 - DNA, 596 bp, Homo sapiens
gcacatagtatttgtaatagtagttgacattcattgagtgctttcaatgtggtaggtactcttgtttattttaaaagaagcattttactagaatcatagtagaaacttagtggtcagacttcatgtagcatcacttacaaccttcattgaatattgtgaagaaacttagtggtcagacttcatgtaccatcacttacaaccttcattgaatattgtgaagtgcttgttgaatctgagacttaaaaattttgttcttttagaggaaacatggagaaagccattgacatgttcaacaaagctattaacctggccaaatcggaaatggagatggcccatctgtattcactttgcgatgccgcccatgcccagacagaagttgcaaagaaatayggattaaaaccaccaacattataaaacagggggaaagcagactgaccctctttttaaaagtttaccccctcttcaactgaaccctaaagacactgtcatgaactgtgttgaatggtggaaatcagtatttctgtttgtggtgttgttatttgttacatctgtttcatgtctaggtgttgtgggtgtggctgttgaaggaagtttgc

SEQ ID NO: 285333 - DNA, 615 bp, Homo sapiens
cacacagtcatttaacataataattataattattactgataacatatactaagtcatattagaattataggagttttacataatttcggaacatacgccagtaacacatttacacaaatgttccaaagaaagccaaacatcatttcctatttgacagtgcttcttgtatgagtttcatatgaaataagccaaatgtcatttttggactttacaggatttaatatctaaaagattaggctagaaagagrcataatttataatttgattttggaaagtttgtcaaataacaaaggtttaaaacactggatattataaaatagaatcccaggttaccataagtcatcaatttggctaaaatgataaccataactaattcatttggccaaaatgataacttcaaaaatttttaaaaagaaaaacctttactctgatagaggagacttagctttccaaataagacccaataaagatagcatgaggctaactgaatttgtctcttttctgtcttgcctgccatttacccagagggaaaaacgaaaccctttcattatcttttaacattacatgaaaatcatcttcaaaagagaaaaccaaatttcatgtttgcattagtgc

SEQ ID NO: 285334 - DNA, 612 bp, Homo sapiens
tagaggagacttagctttccaaataagacccaataaagatagcatgaggctaactgaatttgtctcttttctgtcttgcctgccatttacccagagggaaaaacgaaaccctttcattatcttttaacattacatgaaaatcatcttcaaaagagaaaaccaaatttcatgtttgcattagtgcatctttaatgttaaaactactttttaaaataaaattttatatccgtttttaattagtttggtcataaggtaagattttcataaactgtttagaactctttacaattttctatcaaacagatcaattttctaagaaaacctggttattcagacacatggtcccagattctggccccacatgagtatgattttaatgttttaatctatggaaaaaaagctaaataatttcaatcaaatcttagccatcttgtttataccyacagaatgttttttacaagatcaaccctttataagcccttttcactttgcttaacctttagttttgttccattacacttgtaggttaagacaatctttaaaaccctctgaactagacaaaattacattccttttaacaaaagccgtatctccatgccttcttataatctt

SEQ ID NO: 285335 - DNA, 612 bp, Homo sapiens
tagaggagacttagctttccaaataagacccaataaagatagcatgaggctaactgaatttgtctcttttctgtcttgcctgccatttacccagagggaaaaacgaaaccctttcattatcttttaacattacatgaaaatcatcttcaaaagagaaaaccaaatttcatgtttgcattagtgcatctttaatgttaaaactactttttaaaataaaattttatatccgtttttaattagtttggtcataaggtaagattttcataaactgtttagaactctttacaattttctatcaaacagatcaattttctaagaaaacctggttattcagacacatggtcccagattctggccccacatgagtatgattttaatgttttaatctatggaaaaaaagctaaataatttcaatcaaatcttagccatcttgtttatacctacagaatgttttttacaagatcaaccctttataagcccttttcactttgcttaaccttyagttttgttccattacacttgtaggttaagacaatctttaaaaccctctgaactagacaaaattacattccttttaacaaaagccgtatctccatgccttcttataatctt

SEQ ID NO: 285336 - DNA, 567 bp, Homo sapiens
agttgaacaattttcaaaagtcaaggaaacagttggaccttaagcatttaacaaatctgatatctgaccttaatttagaacaagtgtctatatttttaagacattttaccaataatctttaaaactgtctttatttccaaaagattactgaagtcatatgaacaaaaaggcattaaagtttctatttttctgatraaatatttgatttaaatgcttatttttctaagccaattaatcagagctcttttagatataaacatacaacacatataaatagacagcagatggacagatgcttcagcacttgtaatatttttcatttcccagtttcttaattggattactggcttcagggtgaagcccttggaggaagagggccaggaaagcatgcctttctagggccaaataagcagcaaataagcagctgaacgcaaagacagatacccaaaattaagggtcccattttatactggatcctgggtccccaaaaggagggaaatactatgggagaagacagtgcagtgcttctaccctgtatttcattgcaaggcaacccaaagccaatca

SEQ ID NO: 285337 - DNA, 562 bp, Homo sapiens
gatcctgggtccccaaaaggagggaaatactatgggagaagacagtgcagtgcttctaccctgtatttcattgcaaggcaacccaaagccaatcagcccattttgtaatcagcccatctctcttgggagtctcatcttccagtggggggtggggatgtttccttatcttccaggtggmcaatagcatgcttctctgatccaagtgtgcaaaaagtcaagtatccctccataagtgctattagccattccttaaagtatatttcctacctagttattacaaaccaaagctctctcataatgccaagtaatttctgatacccccaaactcaaaactgtcagataacacaatgcaaaacagaacagagtgtttgattttgagagggatccatccacttttaattactagattttaatgaagaaaacagaggtttttttttccaaaacagggtctatggtgcctcctctgtctttcccaaggagtcccaagctatgagaagttatcttagtgcctctcatgtatgcattaagagtggcaagacaaaaaaatggagaaaaataattc

SEQ ID NO: 285338 - DNA, 562 bp, Homo sapiens
gatcctgggtccccaaaaggagggaaatactatgggagaagacagtgcagtgcttctaccctgtatttcattgcaaggcaacccaaagccaatcagcccattttgtaatcagcccatctctcttgggagtctcatcttccagtggggggtggggatgtttccttatcttccaggtggcmaatagcatgcttctctgatccaagtgtgcaaaaagtcaagtatccctccataagtgctattagccattccttaaagtatatttcctacctagttattacaaaccaaagctctctcataatgccaagtaatttctgatacccccaaactcaaaactgtcagataacacaatgcaaaacagaacagagtgtttgattttgagagggatccatccacttttaattactagattttaatgaagaaaacagaggtttttttttccaaaacagggtctatggtgcctcctctgtctttcccaaggagtcccaagctatgagaagttatcttagtgcctctcatgtatgcattaagagtggcaagacaaaaaaatggagaaaaataattc

SEQ ID NO: 285339 - DNA, 1013 bp, Homo sapiens
  misc_feature (1)...(1013): n = A,T,C or G
agatctctttcactatctcagtcatagttttgcaaaggtggcttcatcagtttgctaaggttgcagtaacaaagtaccacaagctaggtggcttaaaatgaaaaatttattctctcacagttttggagcatagaaaactcaaaattaaggtgtcaccagggccatattctctccaaactttctagagagagattatttcttgcctcttccaactttctggtggccccaggcattttttttgcnttgtgtgagcataacttcaatctctacctcctcatggcatttcctctgtgtatatgtctaygcattcttgtaaagccatctgtcatattggattaaggacctgccccactccagtattacattgtcttaaccagttacaactaaaatcaccccatttgcaaataaggtcacattccaatgtactggagattaggctttcaacatattttgggggaggacacaattccactgataacaccaccctttgagcttaatattgttttcttcatttataaagaagatctctagttttctttcattgtctttaaaatagggataacaatagttaacacaggattgttgggagwagtttatggttaggaacagagtgagagttaggccgccagtggataggcatttattgagaggctactataagccaggctctcttctaggctctgtagaaggggaggaatatagaccgtgwccttgacctcaaaaagctgacatccattccattggagaagcttttatttcaggcatgaatccaggaatgagcagagatggaaggaagtgagggatggagtgagaagatggttttacaaattacttgataatcagaaggagtttttaaatttgttttgtttttatgtttggacatcatgccaccaagtgaaagagctgcctctcaacagcctgcatcattctgcctcttctgttggagataggccttggctgccaatgcccccagcaagtctgctttgaacatgaatgagcagtaatggaaggag

SEQ ID NO: 285340 - DNA, 423 bp, Homo sapiens
agtttatggttaggaacagagtgagagttaggccgccagtggataggcatttattgagaggctactataagccaggctctcttctaggctctgtagaaggggaggaatatagaccgtgaccttgacctcaaaaagctgacatccattccaktggagaagcttttatttcaggcatgaatccaggaatgagcagagatggaaggaagtgagggatggagtgagaagatggttttacaaattacttgataatcagaaggagtttttaaatttgttttgtttttatgtttggacatcatgccaccaagtgaaagagctgcctctcaacagcctgcatcattctgcctcttctgttggagataggccttggctgccaatgcccccagcaagtctgctttgaacatgaatgagcagtaatggaaggag

SEQ ID NO: 285341 - DNA, 534 bp, Homo sapiens
ctgtttttatttcttgtttacaccagtgtttcctgaaatttattctataaaacatgaattccaaaggacctttcatacaaaaggggttttatggtcaaagaagtttgcacactactttcatgcatattaatataatcaagatgctgagaaattatacagttaaactttgttttgcctgtgcttctcagtcttacttgaaatagaaagagtttatttctgtatacgtatattttacataatacttatgaacatccatgtttccatgttaagaaatgatagtctacataggggtcagcaaacatgaagggaaagttaataaatgcattagcctttgcaggtggtttgtattgcaactgctcaactctgctgtcatagtgtgaaagcagctacagaaaatacataacaaataggctgtagtttacttacatgtggtctacatgcacaacatttctaggttaccagagggctcccacttctggtacyttacttgagcctcacaacatgcctacgaaataagagtattagagagagcta

SEQ ID NO: 285342 - DNA, 534 bp, Homo sapiens
ctgtttttatttcttgtttacaccagtgtttcctgaaatttattctataaaacatgaattccaaaggacctttcatacaaaaggggttttatggtcaaagaagtttgcacactactttcatgcatattaatataatcaagatgctgagaaattatacagttaaactttgttttgcctgtgcttctcagtcttacttgaaatagaaagagtttatttctgtatacgtatattttacataatacttatgaacatccatgtttccatgttaagaaatgatagtctacataggggtcagcaaacatgaagggaaagttaataaatgcattagcctttgcaggtggtttgtattgcaactgctcaactctgctgtcatagtgtgaaagcagctacagaaaatacataacaaataggctgtagtttacttacatgtggtctacatgcacaacatttctaggttaccagagggctcccacttctggtaccttacttgagcctcacaacatgcytacgaaataagagtattagagagagcta

SEQ ID NO: 285343 - DNA, 576 bp, Homo sapiens
gctagccgccagcctctcacatctgaccacctccacatgctcctctcttgtccaggcttcactaatgttctcaagatcctgaccaaggagagcagtcgggaggagctgctgtccttcatccagcactatggctcccactacatcgcagaggccctctatggctcagagctcacctgcatcatccactttcccagcaagaaggtccagcagcagctgtggctccagtatcagaaaggtaagcccggagtgcctactgtaggaggtggccaggcaggctatagaggcaaggggtctggggagacaactgagctgccttggatctaaatcctggctctgccacgtctaagctgtgtgaccatgggcaagtccctgcctctctctgagcttcagtttcaccatgggcagagtgagggatcgtataatgattttgcaggattctctcaagtcaggcattttctgaggcctcaagttagygttctagactccagaacccttgccttctcttgcaggtactttgcttcccacatcctctctttgaaacaactgccagagatcaggttgggggtcagcaagtgg

SEQ ID NO: 285344 - DNA, 561 bp, Homo sapiens
gggaccctggccacttttatgatctggggaaaccactggaaattactggaaagccaagggagatggggtgaatgtgcctgattaaaatatttcccatgaggagtttactttactctcattcccctaagtgtttctaaaggtacattgtgtgggaaaataaagtcatagttattcattgattgtctgaacatttcccaactgctttttctctgtatttttttttgtgtgtgcgtcagatgttgtggcaccaaataaagaagatataggctctgttcctacgttgttcattaccagcatgccttagtatcccaatatttcatcatttttgttacagacttttaaaaatccactggtagacagctgggaagagggaggaggccracatttccaggctggttggaatacccagtcactatcatattatgctctctagctttcatgtgccaattctgatcaactagggaatggcttgtctagaacactgtgtgtaagttattgggatcattgagatgatcagttggtaatgtctattctagacacagaaaggaagtatagtggtct

SEQ ID NO: 285345 - DNA, 452 bp, Homo sapiens
acacaatgaaaggtatatttttgagccttctcttccaatggtgacattgcaccaaaacaaagttcgggttgagtctagaaaggaacgcaactttcaattattttacagttgagaagattctctaaggaaaagcaaatcagagggaaccactcctcccacctttcaaccataccccactttctattgcagctagacttaatgattcagggatgcaggtactaggagaagcaggaggtggcataaccagctgatgctaattgtgacccagagtgctcacatatgtcaacatatgagctaagctgacctctggttttattcagcaacaattatagtgcctactatgtttcaggtactgtgctagatgctatggatgcagcagtaaattaartattgccttgccttcagagagctcattttagtcttggaaaaagatatttaatgagaaaaatcac

SEQ ID NO: 285346 - DNA, 524 bp, Homo sapiens
gattaggtgttggcaaactattaactgcaggccaaatccagacttctgcctgttttgtatattccatgaattaagaatggtttttacattttttattgcctggaaamaaattaaaaggtaataatattttgtgtgacatgtgaaaattctataatcttcaaaattcagtgtccataaatgaagttttattggaatgcactcacaacacactgagtaaatgggtggagggatggattggcttccatgcaagagttgtctatggctgttttgccagtgcaacagcaaagctgattacttgcaacaaagatcaggtagctggaaagctcaaaatatttactattgaggccttttcagaaagtttgttcacccctacttcagacatattgacttatttgattgttgcaaccctatgacattgggatttgttatttctctccgtttcacagatgatgaaactgaggctcagagaaattggctcattttcccaaagagatacagaataaaaactacttcaattccatgac

SEQ ID NO: 285347 - DNA, 524 bp, Homo sapiens
gattaggtgttggcaaactattaactgcaggccaaatccagacttctgcctgttttgtatattccatgaattaagaatggtttttacattttttattgcctggaaaaaaattaaaaggtaataatattttgtgtgacatgtgaaaattctataatcttcaaaattcagtgtccataaatgaagttttattggaatgcactcacaacacactgagtaaatgggtggmgggatggattggcttccatgcaagagttgtctatggctgttttgccagtgcaacagcaaagctgattacttgcaacaaagatcaggtagctggaaagctcaaaatatttactattgaggccttttcagaaagtttgttcacccctacttcagacatattgacttatttgattgttgcaaccctatgacattgggatttgttatttctctccgtttcacagatgatgaaactgaggctcagagaaattggctcattttcccaaagagatacagaataaaaactacttcaattccatgac

SEQ ID NO: 285348 - DNA, 514 bp, Homo sapiens
tttaaaatcatctatgctctggtgactactaaatgggtaagtttgggactcaactgtgaggtgtatttgcccatcaaatgaaattattatgaccagttggatataccttactttactataaagaaagacccaggctggagatacagatttcaaaaacaacatacatgggatgctctgaaagtctgtagcccagagaaagtgtgtggggagagaagacaaaaatactaagcctaaagccccaagaaggctgggaagtatctaaagaggcaaaagaaaaccagaagtgtactatacagagaagtcagggaatgagttttcaaatgagtaaacaatgrtgctaaataaaagagttgggatgaactgaaaactgaatcacatctattggatataaccataaattggtgcacttttggccttgggagaagcagtgactgtgagtgatgagtgtagaaggcagactgtggtgggcgggagagtaagtgggaagtgaggaagtggagaccatttgcataga

SEQ ID NO: 285349 - DNA, 1068 bp, Homo sapiens
atctcttagaaaccttctcaggtagtctggctacatcaggtactccttgcacttcatgcttcctctatcatcacacaggacttgtagggcacagtgattaagagaggaagctaatggactcaccagtcagactagacaagacctgctacagggcacttaatgattgtgtcactttacccctccatgttcccatttttcagctgtcagtggaggatagtgaatgtctatctcataggtttgttgtgaagaagaaataaggtgatccacataaagcacatggcacataatcaatggtagttattcttataacatgtatcaaatagtactayatttatgcttatctttctcccaccatcccataagtaccaagagggtaggaacagcatccaatttatggttctactcccagcacctcactcagaatctggcacatagtaggagctcatgaatgaatgaatgaatgaatgaatctaattcatctcagtgtgtactgtctttgggatcacattatctgaaattacctacttaatttccattatatttagagtgaagatgaagggtaagatatatctttttcaattaaagggcaawagatggaaccatgcctccttcataagggagaacctcacwcaaagatgggctttaaaaagttgcaataaacacagaactcagaattaaggtgagaaagagagaaaaagaaaacatgctctgaatataccacatactgagcaacacgaaattattaatacacatattatctcatttcatgttcccatcttcccttgcagtaagagccattatcctcattttcacagatgaggaaactctggctcagagaggttaagaatcttgttcaatatcatcaagcaagtgagggatagaaaacccaggattgaatctgctttgtctgattgtaaagacttttttttccctcctacagatacagatatttagcctagattggaccacccatgcacttctaaggcatacattgttcccaaattagccctacatccccatgatacctatctttcatagtttaagagagaggttactgtcttctcttat

SEQ ID NO: 285350 - DNA, 609 bp, Homo sapiens
tcaccctcattttctcatttgtacatgaggactctggagatcagggtcaagaagggcttgcccaaggttactcaatggaagaacaaggacaagaatctgtatctcgtgctttctattctacacagtggccaagaaatattcatcagggtaaaggaaaaggtatcctrgatccatgaaagtaagctatttgggagtgggttgaagatagaagctttcttctggtggaaaataataataatagcacccaacatttattatataccttctgtggtgctaggtacaatgctaggagctttttttgcattattccatttaatcctcttatcagattaggatcccattatgcagataaggaagctaagccttaattcttcagcactaggtgacccagttggtaaatagctttggtggatttgatccctggccatcttgctcgagagcctggctcttagtctgctctactgtcttcctaggaacaggaataataatccagtgaaggctagaagcttgttcatatttaccaacatatccttccctgtcctcctgctaatctcccagcaaatgctctgcaccatcagacatctcattttcctcaccatgactgctaat

SEQ ID NO: 285351 - DNA, 477 bp, Homo sapiens
aggacattaaataacaccatgtgaatgcaatcagcaaaatccaggttgtggggaactctgcagcacaaacaacccagttttatccataaaatatcccaaggaataaaaagagagatagacaggttagaagagactcacttatcagccaactacaacatttggatcttatttagtttctgatttgaaaaaacaagtaccaaagatataagacaatccagtaaacatgaacaataatgggatgtttgatgatatagagaaattatcgttcatttaggaatcctggatagggcattaaggttatcttttgagtgtttatgtttaagagataaggatttyaacatttacacatgaaattatctcatgtttgagatgtgtttcaaaattaccagggcagtgtagaagcagatgtgagaggaggtaacacaggattaatcactactaaaactagaagacgataggtacatggcagttcattat

SEQ ID NO: 285352 - DNA, 593 bp, Homo sapiens
cttccttattttcaaaaagtttctaggatatgtattttgataattctgttgattccacaaaccattgaagaataaattaataaataaggaaaaaatacatgagaaaaagaaatactttgctttgagagtttgtacacaataccatttgtctgtcagtctcaattttctccttcaaacaacaaacagataggaagaggtcatttgtaattaactggaaggagcacaggatttggagtaagaagacscaagtcaaggttctggcttttccaaaatgctcatgtgaccttgattagtgagcttagatgtcccaagcctcaggatcctctgtgacaatgttggaatgaaagtacccatctcacaatgttgctatgaggattaaataaaacatgctctgagctaaacacatagaaggttttatggtgcactctctaaaatcccatctagttttggtattctctataatgtgatgggtgtgttaagggtaacacatccattgccttcagctaaaatgcccggtatgtatctctgcacttattttatatttttcattttggcacatgtataaatagagtttcatgtagatcttggctggt

SEQ ID NO: 285353 - DNA, 634 bp, Homo sapiens
ctcagcatttggactctgttagtctggatccaaaacatacttcgataaacctctacagcatagtgcctttcataaatgcccatgaataacctccaaaagacacgtgcaaaacctttataacaaaaagtcaaaaacttcaccaaatgttttaaaagaacagttgataaatagagatacaaactgtttctcagttagagaactccaaattataaagatgctgtattaggataagataagctttcttcctgtagcaaatgagccccctcccccaaccagaagcttgtgcacaaaagctagtttcttatttgtgcacggtctattgtrattgtggcagtcttcctccatcctgtagaatgcatcgggaacgcatggtctccaagcttgccataacaagggaagaggcagcttgaaaaatcacaggatgttttgaaaagactaattctggcagtgacttgaatcatgtcagcatagattccattattcagaatccagttacatggccccttcagcccaactgcaagacaggcttagacatgtaagtccaggaagaggacccaatgcaatgcaagtccaggaagaggacacagtgtggttaatgcaagatgtctttgtcacacttatcagaagcgcccag

SEQ ID NO: 285354 - DNA, 640 bp, Homo sapiens
tttctatgaataattcattctgcttatacaaaattacaaattaagtaaccaaaatagacttcagcaatttttaaggttttctggatgtgttaaattgtctaagaaatcatccagcaccaattcccagtgtctctctttgattcccagcgactctgctaagtacagaatggcctcayttggcctcagtgtgggaaataccatgtctttgaaagttttatttttaaaggaatcagctgaggagatgcttgtattcctcaccaactctggcggatctgtgatgtaggagagggtagaaactactcacaaaaatttacatgtgctgtggaaaaaaaaaatccctttatttttcatggttgtttgttaatcctaaagctcccattttcactaatgatagaagagacaccaatgttgagttgccagtttatggtaatccactcattttaaagtcccaactccctctcctggcatttgccatggcttcctaactaaggcattttaaagtcctaactccttctcatggcatgaaaataattttctccctaccctttatccttcttagttgggacaaacccctgtaacaaaagacagattaacaaaagaaaaacaatttattaacgtgtatacctcatgtatacccagg

SEQ ID NO: 285355 - DNA, 640 bp, Homo sapiens
tttctatgaataattcattctgcttatacaaaattacaaattaagtaaccaaaatagacttcagcaatttttaaggttttctggatgtgttaaattgtctaagaaatcatccagcaccaattcccagtgtctctctttgattcccagcgactctgctaagtacagaatggcctcatttggcctcagtgtgggaaataccatgtctttgaaagttttatttttaaaggaatcagctgaggagatgcttgtattcctcaccaactctggcggatctgtgatgtaggagagggtagaaactacycacaaaaatttacatgtgctgtggaaaaaaaaaatccctttatttttcatggttgtttgttaatcctaaagctcccattttcactaatgatagaagagacaccaatgttgagttgccagtttatggtaatccactcattttaaagtcccaactccctctcctggcatttgccatggcttcctaactaaggcattttaaagtcctaactccttctcatggcatgaaaataattttctccctaccctttatccttcttagttgggacaaacccctgtaacaaaagacagattaacaaaagaaaaacaatttattaacgtgtatacctcatgtatacccagg

SEQ ID NO: 285356 - DNA, 640 bp, Homo sapiens
tttctatgaataattcattctgcttatacaaaattacaaattaagtaaccaaaatagacttcagcaatttttaaggttttctggatgtgttaaattgtctaagaaatcatccagcaccaattcccagtgtctctctttgattcccagcgactctgctaagtacagaatggcctcatttggcctcagtgtgggaaataccatgtctttgaaagttttatttttaaaggaatcagctgaggagatgcttgtattcctcaccaactctggcggatctgtgatgtaggagagggtagaaactactcacaaaaatttacatgtgctgtggaaaaaaaaaatccctttatttttcatgrttgtttgttaatcctaaagctcccattttcactaatgatagaagagacaccaatgttgagttgccagtttatggtaatccactcattttaaagtcccaactccctctcctggcatttgccatggcttcctaactaaggcattttaaagtcctaactccttctcatggcatgaaaataattttctccctaccctttatccttcttagttgggacaaacccctgtaacaaaagacagattaacaaaagaaaaacaatttattaacgtgtatacctcatgtatacccagg

SEQ ID NO: 285357 - DNA, 620 bp, Homo sapiens
atggcttcctaactaaggcattttaaagtcctaactccttctcatggcatgaaaataattttctccctaccctttatccttcttagttgggacaaacccctgtaacaaaagacagattaacaaaagaaaaacaatttattaacgtgtatacctcatgtatacccaggacatattcaagggaaaaatgactaaatttcaaaaaggtggcttagaatttaggctgaaataccatcttcaactgaaagaaagaaagaaaggtggaggcagggccagttactgggagatgcctaggaaaagctcagtaaaccatggtagggtttgttattgtaaaccccaaaataaagttattttcttgaaatttaagttccttacagatgcaggktattggacgtttgtcagatgcatagtttgcaaaaattttctcccattatttaggttgtctgtgtagtcttctagtaaacagacatagtcatagtcgtagtttcttctgctgtgcagaagctctttagtttaattagatcccatttgtcaatatttgcttttattgcaattgcttttggcgtcttcatcatgaaatctttgctgaagtttttatagttttggattctccttagcaaact

SEQ ID NO: 285358 - DNA, 620 bp, Homo sapiens
atggcttcctaactaaggcattttaaagtcctaactccttctcatggcatgaaaataattttctccctaccctttatccttcttagttgggacaaacccctgtaacaaaagacagattaacaaaagaaaaacaatttattaacgtgtatacctcatgtatacccaggacatattcaagggaaaaatgactaaatttcaaaaaggtggcttagaatttaggctgaaataccatcttcaactgaaagaaagaaagaaaggtggaggcagggccagttactgggagatgcctaggaaaagctcagtaaaccatggtagggtttgttattgtaaaccccaaaataaagttattttcttgaaatttaagttccttacagatgcagggtattggacstttgtcagatgcatagtttgcaaaaattttctcccattatttaggttgtctgtgtagtcttctagtaaacagacatagtcatagtcgtagtttcttctgctgtgcagaagctctttagtttaattagatcccatttgtcaatatttgcttttattgcaattgcttttggcgtcttcatcatgaaatctttgctgaagtttttatagttttggattctccttagcaaact

SEQ ID NO: 285359 - DNA, 620 bp, Homo sapiens
atggcttcctaactaaggcattttaaagtcctaactccttctcatggcatgaaaataattttctccctaccctttatccttcttagttgggacaaacccctgtaacaaaagacagattaacaaaagaaaaacaatttattaacgtgtatacctcatgtatacccaggacatattcaagggaaaaatgactaaatttcaaaaaggtggcttagaatttaggctgaaataccatcttcaactgaaagaaagaaagaaaggtggaggcagggccagttactgggagatgcctaggaaaagctcagtaaaccatggtagggtttgttattgtaaaccccaaaataaagttattttcttgaaatttaagttccttacagatgcagggtattggacgtttgtcagatgcatagtttgcaaaaattttctcccattatttaggttgtctgtgtagtcttctagtaaacagacatagtcatagtcrtagtttcttctgctgtgcagaagctctttagtttaattagatcccatttgtcaatatttgcttttattgcaattgcttttggcgtcttcatcatgaaatctttgctgaagtttttatagttttggattctccttagcaaact

SEQ ID NO: 285360 - DNA, 582 bp, Homo sapiens
tttgcttttattgcaattgcttttggcgtcttcatcatgaaatctttgctgaagtttttatagttttggattctccttagcaaactattgcaggaacagaaaaccaaatactgcatgttctcacttatgacrgggagctaaatgatgagaacacatggacacataaaggggaacaatatacactggggcttatcagaggctgaagggtaggaggagggagaggatcaggaaaaataactaatggtactgggcttaatacctgggtgatgaaataatctgtacaacaaacccccatgacacaagtttgcctatataacaaacctgcacatgtacccctgaacttgaaatgaaagtgaaaaaaaattttctaaaattattcttaattctttaagggatatttccatatcctgcattaatactcataaacattcagtagcaatgtaaaaaaaaatttgaaggcctacatccagtcatctgaatggacccctcctctcagccaagggccttccaaagttaacctaaaaaactagtttcaggccatgatgggaaggcagagccagatatgcctcaggatactcacct

SEQ ID NO: 285361 - DNA, 1142 bp, Homo sapiens
tttgcttttattgcaattgcttttggcgtcttcatcatgaaatctttgctgaagtttttatagttttggattctccttagcaaactattgcaggaacagaaaaccaaatactgcatgttctcacttatgacagggagctaaatgatgagaacacatggacacataaaggggaacaatatacactggggcttatcagaggctgaagggtaggaggagggagaggatcaggaaaaataactaatggtactgggcttaatacctgggtgatgaaataatctgtacaacaaacccccatgacacaagtttgcctatataacaaacctgcacatgtacccctgaacttgaaatgaaagtgaaaaaaaattttctaaaattattctyaattctttaagggatatttccatatcctgcattaatactcataaacattcagtagcaatgtaaaaaaaaatttgaaggcctacatccagtcatctgaatggacccctcctctcagccaagggccttccaaagttaacctaaaaaactagtttcaggccatgatgggaaggcagagccagatatgcctcaggatactcacctwtttgggggtggcatgttctggtctcttacaccagtgtgagtactcatcctcatgggacaggcaaagaggtggggctagccttccctgttggctgttaccaacctgtgtgggaacatgctcagacccccagaattggtataaagattatcwtaaagggaaaagatttgaactgaagaagatgcagaaataaatcttatctcaacttcctttatctgactaaagcagagcctccagaaaatacagtgacattaacccccctcataggggatttcctgtgaattcagctgctgcggggacaggctgctcattttgttagcatcaaaaatgtaactagaactcttaactgtctggcagcttctctttgttcactgcacaaacaaaaccaattcactaagaccatggcattgcaaaggagaaatagcttaactgacataaggccaaccatgccatgtgggagatagagtcattactcaaatcaatctccccacaaaattcagaggctagggtttctcaaggacaatttggcaggcaggggttgggggctgctgatcagctgggg

SEQ ID NO: 285362 - DNA, 618 bp, Homo sapiens
ggtggcatgttctggtctcttacaccagtgtgagtactcatcctcatgggacaggcaaagaggtggggctagccttccctgttggctgttaccaacctgtgtgggaacatgctcagacccccagaattggtataaagattatcataaagggaaaagatttgaactgaagaagatgcagaaataaatcttatctcaacttcctttatctgactaaagcagagcctccagaaaatacagtgacattaacccccctcataggggatttcctgtgaattcagctgctgcggggacaggctgctcattttgttagcatcaaaaatgtaactagaactcttaactgtctggcagcttctctttgttcactgcacaaacaaaaccaattcactaagaccatggcattgcaaaggagaaatagcttaactgacatraggccaaccatgccatgtgggagatagagtcattactcaaatcaatctccccacaaaattcagaggctagggtttctcaaggacaatttggcaggcaggggttgggggctgctgatcagctggggatgcaatcataggcatatggaaaatggttcttgtatgtgctaagtttgcttctgggtgtaaccat

SEQ ID NO: 285363 - DNA, 618 bp, Homo sapiens
tcagatctctttcactgtcataattttctcacttgtataatttttgcaatggtggtttcagaaccttccataccttccctttgaagccctaaccccaccaccaccctgctcatacttgttaaatttgttatataagcttttcatctctggctattgagcaagttgctcttcactgagtactcctgcatgtatgcagtatgggagaaaatgctttctctctactcttaggtcctgtaagtgagtctgtgacaacaggcagattaacaggagaaaaagtatgcaaatttgttacatgcataggggcatcagaggaaaaaaaggggaataccacccaaacccagttagtctagaagcttatgtaccctcttcataggggagggggtatggaggcagcttagaggagagtagctgatgaatggaaaagatgaatgggcctttggaagaataggtgacagtctgtgactaagtttgtctgagtgtggcattgacgcsctgactcccctcctgtgatacaagttaatcttccctggttgatgaaattcctttggaggggactgatgacagctgagttcctttcagaggatctgtttttagacacataaggggagcccagagaaa

SEQ ID NO: 285364 - DNA, 606 bp, Homo sapiens
attcattccttatctatgaaggacatttgaatccctggcccattagttggaaggcaggctgtacagaggattgaggccctttgttagctaggtggaggttgctaaatgaaaatactgtataacctgcacgcttttttttttttttttaacaaatgatagtggttttcctgtctaacctgctactcttgaactgacctgtgtgtaagtcctcaataaaccctaagtgtcatttgctggccctgagtctcttctagggtctctcggacacagtgctgtcccargaaagtcaatagtgatctggaatgacataactcatgttctaataaattcagaaaaaaacaatgcggcaagtcaagatccttggaacatgaagactctgcaatttccaacaatactcactggcaggtgcaggtgaaggatttaagatgagcaactgaactgggaagaggcattggcctcttcaataggaatgagggtaggcagttcatggtaaggtctgcggggcaggagcaatctaatcctatgaattttattttattttattttatttttgaaactgatcagcagagctgccttccaaaataagaactcaatttgaaggaaaac

SEQ ID NO: 285365 - DNA, 606 bp, Homo sapiens
attcattccttatctatgaaggacatttgaatccctggcccattagttggaaggcaggctgtacagaggattgaggccctttgttagctaggtggaggttgctaaatgaaaatactgtataacctgcacgcttttttttttttttttaacaaatgatagtggttttcctgtctaacctgctactcttgaactgacctgtgtgtaagtcctcaataaaccctaagtgtcatttgctggccctgagtctcttctagggtctctcggacacagtgctgtcccaasaaagtcaatagtgatctggaatgacataactcatgttctaataaattcagaaaaaaacaatgcggcaagtcaagatccttggaacatgaagactctgcaatttccaacaatactcactggcaggtgcaggtgaaggatttaagatgagcaactgaactgggaagaggcattggcctcttcaataggaatgagggtaggcagttcatggtaaggtctgcggggcaggagcaatctaatcctatgaattttattttattttattttatttttgaaactgatcagcagagctgccttccaaaataagaactcaatttgaaggaaaac

SEQ ID NO: 285366 - DNA, 563 bp, Homo sapiens
ccattagttggaaggcaggctgtacagaggattgaggccctttgttagctaggtggaggttgctaaatgaaaatactgtataacctgcacgcttttttttttttttttaacaaatgatagtggttttcctgtctaacctgctactcttgaactgacctgtgtgtaagtcctcaataaaccctaagtgtcatttgctggccctgagtctcttctagggtctctcggacacagtgctgtcccaagaaagtcaatagtgatctggaatgacataactcatgttctaataaattcagaaaaaaacaaygcggcaagtcaagatccttggaacatgaagactctgcaatttccaacaatactcactggcaggtgcaggtgaaggatttaagatgagcaactgaactgggaagaggcattggcctcttcaataggaatgagggtaggcagttcatggtaaggtctgcggggcaggagcaatctaatcctatgaattttattttattttattttatttttgaaactgatcagcagagctgccttccaaaataagaactcaatttgaagga

SEQ ID NO: 285367 - DNA, 606 bp, Homo sapiens
attcattccttatctatgaaggacatttgaatccctggcccattagttggaaggcaggctgtacagaggattgaggccctttgttagctaggtggaggttgctaaatgaaaatactgtataacctgcacgcttttttttttttttttaacaaatgatagtggttttcctgtctaacctgctactcttgaactgacctgtgtgtaagtcctcaataaaccctaagtgtcatttgctggccctgagtctcttctagggtctctcggacacagtgctgtcccaagaaagtcaatagtgatctggaatgacataactcatgttctaataaattcagaaaaaaacaatgcggcaagtcaagatccttggaacatgaagactctgcaatttccaacaatactcactggcaggtgcaggtgaaggatttaagatgagcaactgaactgggaagaggcattggcctcttcaataggaatgarggtaggcagttcatggtaaggtctgcggggcaggagcaatctaatcctatgaattttattttattttattttatttttgaaactgatcagcagagctgccttccaaaataagaactcaatttgaaggaaaac

SEQ ID NO: 285368 - DNA, 561 bp, Homo sapiens
catataattgaaataaaatcatatrataagtaaactttcatgattggatttttttttttcactcagcctaaatgcccaagattcatccaggttgtgtgcatcaataatagcccattactttatttcctttttttcctttttgagataggctctcactctgtcacccaagctgaagagcagtggggtgatcatagctcactgtagccgccaactccaaggctcaagccatcctccgcctcagcctcctgagtagctaggactacaagtatgctaccgctctcaattaatttttaaatttttttgtagatatgaggtctcaatatattttgaaggctgtcttgaacttctggcctcaagtggtcctcccaccttggcctcttaaagttcaggcattacaggtgtgaaccaccacaacctgttcagttgtatgttccttttttgtagctaagtcatatttcatcatatggatgtgccatggtttgtttaaccacttatctattgagagatagctaggctgtttccagtttttggctattacaaataaagctactgtaaacattc

SEQ ID NO: 285369 - DNA, 586 bp, Homo sapiens
tggactacatgccctggagtgaaattgcttggttgtattgtagttgtatgtttagtcttataagaaactgacaaatgttttccagagtggctgtaccatttgacactcccaccagcaatgtgtcagtgatgtagtttctccacatccttggcagtatttgatgttgtctttaatgcttttaaactatgcaaacaacagaaaaagaagttctgtgaacttagcttcttttaaatgtttttttccctcaaaaagaggaacattaatttcatgtaaaacrtaaaatgtaacctcacataaaaatgaccaaaagaaaaccatcgaggttaaatttctcacaaagttgctctgagaataaaagagaataagaaactgagtaacagtcctacaaacagcaaaagcataccagaaagtgcccataaaacagataaaaactaaagtttttaaaattaataattaaaaaattttaagaatatgataaaacacaggaaagagaaatataaatgggattagaaaactcagaaataatgtaacagaattcaaggaagaattagaaatacaaaaaaaaattatgaaaaataaataacct

SEQ ID NO: 285370 - DNA, 1173 bp, Homo sapiens
tggactacatgccctggagtgaaattgcttggttgtattgtagttgtatgtttagtcttataagaaactgacaaatgttttccagagtggctgtaccatttgacactcccaccagcaatgtgtcagtgatgtagtttctccacatccttggcagtatttgatgttgtctttaatgcttttaaactatgcaaacaacagaaaaagaagttctgtgaacttagcttcttttaaatgtttttttccctcaaaaagaggaacattaatttcatgtaaaacataaaatgtaacctcacataaaaatgaccaaaagaaaaccatcgaggttaaatttctcacaaagttgctctgagaataaaagagaataagaaactgagtaacagtcctacaaacagcaaaagcataccagaaagtgcccataaaacagataraaactaaagtttttaaaattaataattaaaaaattttaagaatatgataaaacacaggaaagagaaatataaatgggattagaaaactcagaaataatgtaacagaattcaaggaagaattagaaatacaaaaaaaaattatgaaaaataaataacctwtggactacatgccctggagtgaaattgcttggttgtattgtagttgtatgtttagtcttataagaaactgacaaatgttttccagagtggctgtaccatttgacactcccaccagcaatgtgtcagtgatgtagtttctccacatccttggcagtatttgatgttgtctttaatgcttttaaactatgcaaacaacagaaaaagaagttctgtgaacttagcttcttttaaatgtttttttccctcaaaaagaggaacattaatttcatgtaaaacataaaatgtaacctcacataaaaatgaccaaaagaaaaccatcgaggttaaatttctcacaaagttgctctgagaataaaagagaataagaaactgagtaacagtcctacaaacagcaaaagcataccagaaagtgcccataaaacagataaaaactaaagtttttaaaattaataattaaaaaattttaagaatatgataaaacacaggaaagagaaatataaatgggattagaawactcagaaataatgtaacagaattcaaggaagaattagaaatacaaaaaaaaattatgaaaaataaataacct

SEQ ID NO: 285371 - DNA, 471 bp, Homo sapiens
tcttggttttctgattcatcatatgagaatactaacaccatcatctctgtcatagagttgttgaaacgattaagtaagatcatacatgtaaaatgcttggtacatgcgtggtgcaacaagcactaaataagtcttagtgatttattattattattaaaatgctgagtattgagaagttgtaacccagaagacacaatagcataagtaagagtaagttcgagtttgtaaaacacaatcttccatgtaatatagaagcttttttttttgaaaaacrgagtctcattctgtcgcccaggctggagtgtagtggcacaatctcagctcagtgcaagctccacctcccaggttcaagcaattcttctgcctcagcttcccaagtagctagaattacaggcatgcaccactaaacccagctaatttttttgtgtatttttagtagagatgggtttcactatgttggccaggctggtc

SEQ ID NO: 285372 - DNA, 563 bp, Homo sapiens
ctgaccccaaactttcttccagttgatattacaagtctggaaccattaaaaaatggactctgttgaatctcctgacaccttcccacagcctccatttactcctaacttcccattggcaatgtctcttcctcgttatgaatggctctcttatggtgaggttcttttcaactgaacattcctgtcttagtattggctgctgtaacccaatagcataacttgatggcttacacaacaagcatctatttatcacagttctggagtctaagatcaagatcaagatgccagcagattcggtgtctgatgagggtccgcttcatggcttgtaggtgaccagcttctctctgtattctcatgtggcagaaagaggatgagtgagctctctgggggttccttttataacggtgctgatcccattcatgagggctacaccctcatgacctaagcacctttcaaaggccccacctcctaatatcataccttgagggggttagcatttcagcatktaaattctatggggacacaaacattcaggtcatcgcaactactgagaaatttaatacctg

SEQ ID NO: 285373 - DNA, 479 bp, Homo sapiens
gtctgtcctccaccctgactgtaagcgggcttccggtcacaggatcatgcccatgctcttaattcccccaccatctagcgcagagtaggtgtctagtaggtgcatcatagaacttatttcgttgatttttccattccgtaatgggcacaccaaaatctcacaaatcactactaaagaacttactcatgtaaccaaacrccacctgttcccccaataacctatggaaataaataaaatttttttttaaaaaagaacttatttcattgagccatcagtgaggccacaaggactgccttgtaaagccagcccctaaagtattctatactagggacagcctctggaagcaggtagttgaacttctatatctcctccctgcccctcctctggtctctaccaaaaaccctgagcaaatgggcctggggagaggttaaaaggaaaggcagcaggactaaaatagaaccatgatgatgggggaaaaa

SEQ ID NO: 285374 - DNA, 548 bp, Homo sapiens
tatgtaaaatcttctattaataccatccaatcaattttttttgtataaaattttttttgctctaaaattttcacttagttttttattgtggttaccctgatactccttactcttgccacatatatccatctttgtacatttttaaacatattttcatagttattttaaaatgtttgtctgctaattccaacatctgggtcatctgtgggtctattctgcgttatactgttgtgcctaccaagctgtcatctcttctctaggttcttcattgccttggcccagatatgtgtagttcagaagtcagcaagggacttttggtatttatatgtaaatattattaatcatttttcatattatactataacaaactatatattttgaaattaaggttatcttaatttataataagattccaagggttaaaattatattttgggttgaggtactatgataattacataataaatcacatataacacaaatgttaataagtggtaaatataaaraaaaaattttatgagaaaatcacttttaatgagatggatggg

SEQ ID NO: 285375 - DNA, 606 bp, Homo sapiens
gctagttttttaatttttttttgtagagatgaggtctccctattgttgcccaggctggtctcaagctcctggcctcaagtgatcctcctgcctcagtctcccaaagtgctgggattacagctgagagcccctggcacgtgatgcatactgtgtttctgtttagtgatgttggcctttcagagggccacaaaccattataatatgagagattctttttactccctaaaaaacaattattgcccccttggcaatgctgcttctcccattaatcatgcatggtcttgagtgtcagccacacatattctgttggatgtctcgctggccctcagtgttgtcccttgactttaaataagaggtcaytgggaggatccagaaaccgctaagtgctaggaatgtatctttgtgcaagatagtcattgtccttgtctttgaagaaaataaaaatatttttccccaaaatatttttgacatattttgcaatggctgttcggagagtcagcaaacacatgtaaccctacaaagctgtttttattggggagggttagtttttcagggctgggcacattacccaaatcaagccagtgattaccaagtgcatctgtagag

SEQ ID NO: 285376 - DNA, 606 bp, Homo sapiens
gctagttttttaatttttttttgtagagatgaggtctccctattgttgcccaggctggtctcaagctcctggcctcaagtgatcctcctgcctcagtctcccaaagtgctgggattacagctgagagcccctggcacgtgatgcatactgtgtttctgtttagtgatgttggcctttcagagggccacaaaccattataatatgagagattctttttactccctaaaaaacaattattgcccccttggcaatgctgcttctcccattaatcatgcatggtcttgagtgtcagccacacatattctgttggatgtctcgctggccctcagtgttgtcccttgactttaaataagaggtcactgggaggatccagaaaccrctaagtgctaggaatgtatctttgtgcaagatagtcattgtccttgtctttgaagaaaataaaaatatttttccccaaaatatttttgacatattttgcaatggctgttcggagagtcagcaaacacatgtaaccctacaaagctgtttttattggggagggttagtttttcagggctgggcacattacccaaatcaagccagtgattaccaagtgcatctgtagag

SEQ ID NO: 285377 - DNA, 559 bp, Homo sapiens
ctggtctccttctgcggcctctgcatctggtcccaccagagctttttrcattagtatcacatccctagtgaaagaatggaggattcagagtaccagatatttttcatctttggtctttgatttttctatgtaaagtgacaaaatatcaacacgaaaagtgaaaaattcagtcactgattcatgttgtctacatattttgatgcatataaatgtaccaaacaaaattgtacatagtttgatatatgtgaatattcagtgctatttaagtaaaatgtataatttcagcttattatcttaagcacttgatatccccatcactgaacacatcacaggccctcaataaatatttactgatttttttctgtgtaatattcaaatgagtattaaagaaaacagttacaatttgcccttatgtttatgtattctgaaattagttgtggtcaccaggggtcaagaatcaagggtgttatgttattattatcaatattattattattttgttaaggaaaatgagatacatgaacaattactattgaatgctactgagaggagaaggttt

SEQ ID NO: 285378 - DNA, 927 bp, Homo sapiens
gtgaaacctagaccagaacatcataggcatcgaatttgttgctggacaggtcccagctttgcttctcctctcttgtttgctttgccttgcaaaagccctaatgaatataaataatccgaaccctaagttcctagaatgatctcaaccaggagaacagagcgaggaggtttttccttcagagcaagactacactgtattcccaartatgatcttttatttcttaatctcacagattcctgttgggtgcttgtctatctcctaaaactaacacctcattcatcttatgagagagaacttcttgtttttagatctaattgattggaaaggaagaaattaatttttgtctattttactgtttttctctattacaaaatggcattattctttatatatatataacacatatataatatataggcataattctttatatatataatatacattatgtaaattttatatawgtgaaacctagaccagaacatcataggcatcgaatttgttgctggacaggtcccagctttgcttctcctctcttgtttgctttgccttgcaaaagccctaatgaatataaataatccgaaccctaagttcctagaatgatctcaaccaggagaacagagcgaggaggtttttccttcagagcaagactacactgtattcccaaatatgatcttttatttcttaatctcacagattcctgttgggtgcttgtctatctcctaaaactaacacctcattcatcttatgagagagaacttcttgtttttagatctaattgattggaaaggaagaaattaatttttgtctattttactgtttttctctattacaaaatggcattattctttwtatatatataacacatatataatatataggcataattctttatatatataatatacattatgtaaattttatata

SEQ ID NO: 285379 - DNA, 569 bp, Homo sapiens
atatatataatatacattatgtaaattttatatatatatatggattgaggtgagaggtggcgytccctggactgaaccctagaccagaacatcataggcatcaagtttgttgctggacatatatacacacatactctaagttctgggatatatgtgcagaacttgcagatttgttacacatatacacgttataggtgtacacgtgccatggtggtttgctgcacccattaacccatcatctactttaggtacttctcctaatgctatccctcccctagtcctccaccccctgataggccctcatgtgtgatgttcccctccctgtgtccatgtgttctcattgttcaactcccacttatgagtgagaacatgcggtatttggttttctgttcctctgttagtctgctgagattgatggtttccagcttcgtccatgtccctgcaaaggacatgaactcatccttttttatggctacatagtattcccttgtgtatatgtgccacattttctttatccagtctatcattgatgggcatttgggttggttccaagtctctgctattgtgaa

SEQ ID NO: 285380 - DNA, 569 bp, Homo sapiens
atatatataatatacattatgtaaattttatatatatatatggattgaggtgagaggtggcgctccctggactgaaccctagaccagaacatcataggcatcaagtttgttgctggacatatatacacacatactctaagttctgggatatatstgcagaacttgcagatttgttacacatatacacgttataggtgtacacgtgccatggtggtttgctgcacccattaacccatcatctactttaggtacttctcctaatgctatccctcccctagtcctccaccccctgataggccctcatgtgtgatgttcccctccctgtgtccatgtgttctcattgttcaactcccacttatgagtgagaacatgcggtatttggttttctgttcctctgttagtctgctgagattgatggtttccagcttcgtccatgtccctgcaaaggacatgaactcatccttttttatggctacatagtattcccttgtgtatatgtgccacattttctttatccagtctatcattgatgggcatttgggttggttccaagtctctgctattgtgaa

SEQ ID NO: 285381 - DNA, 586 bp, Homo sapiens
gctcttttttcctttgtgtgtgtgtgtgtgtgtgtgtgtgtgtgtgtgattttattgatttttagaaactcacaattactattttttgagacagagtttttgctcctgttgcgtaggctggagtgcaatggcgtgatcttgactcaccacaacctccgcctcctgggttcaagggattctcttccctcagcctcccgagtagctaggattacaggcattcrccaccacgcccagctaattttgtatttttagtagagatggggtttcttcacattggtcaggctggtctcgaactctcgacttcaggtgatctgcccgcctcggcctcccaaagtgctgggattacaggcgtgagctaccgcgttcagccaaaacttactttttactttttatatatcaattttggggggatcaatttgttatcttttgactttgcttatatttcagcttatcttaaatgggttacattttcttccattaatttttctgctgagcttttaggcatgtgacttaggagaaaatgtgagaaacactatagttacgtcaattattttgacaaatcactttttggaaagatattcacacg

SEQ ID NO: 285382 - DNA, 1114 bp, Homo sapiens
ttcagcttatcttaaatgggttacattttcttccattaatttttctgctgagcttttaggcatgtgacttaggagaaaatgtgagaaacactatagttacgtcaattattttgacaaatcactttttggaaagatattcacacgtggtgagccttctaaaaatggtgtgctgatttctgttactttttttcatagaaattatacaatataacttgagcatttcttcttttactggtgtgaataaaatgtaccaccctcacttcctcacaccctacatcctaccctttaatgaaccagtaaacatcaaggagcagcgtgatgctgtttgttgtacatgaagttaaaatgtgcccttggacttgaggtcrccttgaaataatgagtgacctggtctcagaaggctccatacctctgaagggacacttatcattgtcatcttagtcaaatcacawaacagccacaatacctgtatggtattgacatctttgcaggaagaaacagagagaagccaccgggcatctgacagggtgagaacagcaacaccacagaacagccaacagaaawccacagtaaagaacagcagaacaccttgacagtggacactggaagacagttcccatgaaaatacaaaatgatacaaaaagaaacaaacaaaaaaaggcatctttaaaaaatcgctaacagatctaaaagagaagcagtagaagatgactctggaatatcttgttatagcagttgatatggtttggcagtgtccccacccaaatctcatctcgaattgtagctcctataatccccacatgttgtgggagggaactggtgggaggtaattgaatcatggggattgtgtcccccatactgttctcgtggtgatgaataagtctcacgagacctgatggttttataaggggaaacctcttttgcttggttctcattctctcttgcctgccaccatgtaagacgtgcctttcaccttctgccatgattgtgatgtcttcccagcctcatggaactgcaagtccattaagcctctttttctttataaattacccagtcttaggtatgtctttattagcagcatgaaaatggactaatacgtcaggtaaaaaggaag

SEQ ID NO: 285383 - DNA, 1325 bp, Homo sapiens
aacagccacaatacctgtatggtattgacatctttgcaggaagaaacagagagaagccaccgggcatctgacagggtgagaacagcaacaccacagaacagccaacagaaatccacagtaaagaacagcagaacaccttgacagtggacactggaagacagttcccatgaaaatayaaaatgatacaaaaagaaacaaacaaaaaaaggcatctttaaaaaatcgctaacagatctaaaagagaagcagtagaagatgactctggaatatcttgttatagcagttgatatggtttggcagtgtccccacccaaatctcatctcgaattgtagctcctataatccccacatgttgtgggagggaactggtgggaggtaattgaatcatggggattgtgtcccccatactgttctcgtggtgatgaataagtctcacgagacctgatggttttataaggggaaacctcttttgcttggttctcattctctcttgcctgccaccatgtaagacgtgcctttcaccttctgccatgattgtgatgtcttcccagcctcatggaactgcaagtccattaagcctctttttctttataaattacccagtcttaggtatgtctttattagcagcatgaaaatggactaatacgtcaggtaaaaaggaagwaacagccacaatacctgtatggtattgacatctttgcaggaagaaacagagagaagccaccgggcatctgacagggtgagaacagcaacaccacagaacagccaacagaaatccacagtaaagaacagcagaacaccttgacagtggacactggaagacagttcccatgaaaatacaaaatgatacaaaaagaaacaaacaaaaaaaggcatctttaaaaaatcgctaacagatctaaaagagaagcagtagaagatgactctggaatatcttgttatagcagttgatatggtttggcagtgtccccacccaaatctcatctcgaattgtagctcctataatccccacatgttgtgggagggaactggtgggaggtaattgaatcatggggattgtgtcccccatactgttctcgtggtgatgaataagtctcacgagacctgatggttttataaggggaaaccwcttttgcttggttctcattctctcttgcctgccaccatgtaagacgtgcctttcaccttctgccatgattgtgatgtcttcccagcctcatggaactgcaagtccattaagcctctttttctttataaattacccagtcttaggtatgtctttattagcagcatgaaaatggactaatacgtcaggtaaaaaggaag

SEQ ID NO: 285384 - DNA, 662 bp, Homo sapiens
aacagccacaatacctgtatggtattgacatctttgcaggaagaaacagagagaagccaccgggcatctgacagggtgagaacagcaacaccacagaacagccaacagaaatccacagtaaagaacagcagaacaccttgacagtggacactggaagacagttcccatgaaaatacaaaatgatacaaaaagaaacaaacaaaaaaaggcatctttaaaaaatcgctaacagatctaaaagagaagcagtagaagatgactctggaatatcttgttatagcagttgatatggtttggcagtgtccccacccaaatctcatctcgaattgtagctcctataatccccacatgttgtgggagggaactggtgggaggtaattgaatcatggggattgtgtcccccatactgttctcgtggtgatgaataagtctcacgagacctgatggttttataaggggaaacctcttttgcttggttctcattctctcttgcctgccaccatgtaagacgtgcctttcaccttctgccatgattgtgatrtcttcccagcctcatggaactgcaagtccattaagcctctttttctttataaattacccagtcttaggtatgtctttattagcagcatgaaaatggactaatacgtcaggtaaaaaggaag

SEQ ID NO: 285385 - DNA, 575 bp, Homo sapiens
gctaagcacatccaaagaagaagaaaaaaatccttttgaagcaacaggaaacagaaagccattgactatagtatcacgaatagaagaaaaatggtagcgtttcttcaaaatcctggggagatttttttcaactagtgatygtacggccagcaaaatgtcaatcaattgtaatggtggaataattacatattcattcttacaaggactcaaagaaactcacatctcatgtctcacttttttagaagttgtgagaggatatacttcaaagaagacaaaaacgtggttcaggagggaactgcaggaaggtggtcaagaggggtcccaagatgacagataactgagttggcccaagagcaacaggtcccgatttgagcaggtagagggaaggttccagaaggagagaggtctccaggcaataatggaaataacataatatcttctatcattgatagaatatctttttctatcaatgctaaaatatcttttctccaaatatatgtatttggagaaaaactactaacaggactatgatacagcccaatgggaaacattaatatgacgttaacaggaaatta

SEQ ID NO: 285386 - DNA, 572 bp, Homo sapiens
gaccctgtctcaaaataaacaaacaaacaaacataacttaaaaaaaatagctgatactgagtaacttggtattggttaatggcagaggtatttttgcctctgttttaaaaatgagatgtgtaaatgacgagatctgggctaaatatggaccagctgggattagaattagaacgaacagggaagtatgagacaggtgacctcgctgccagctcyactcctcacagatgggtgaccccaaggctcttttaacctcggcttctcaggactcaaaagagacatggtaatatacatttctgaagccacattccttggaccaggggaaatattgatttcctgtctgtttttaagatttgtaattttaacatgtggcttttacaattcccttaaattggcacacaataaagagcttctggaaaaaaagggaacttatttactcagtgattaaaggatcattatatataaatataaggatatcctttgtcccagtagaggaaattgggggaatttggctccatgatatggtgataagaaatagaactttgtgctttctgagacaatgacccaggcattga

SEQ ID NO: 285387 - DNA, 437 bp, Homo sapiens
aggaatgtaaggtttagataatgcatctaagacgctcagcagatgacttggcatctagcatttgctctataaatgatggctaatattaactcatcagtgatagctacaattaaattgttactaacaatagcctaaaggattattgcctagagagtaacatatggagtaatcaggcaggggatgagggaaaagaaggagttagccagcagggaaggggttgactgtggaacaagtgttcaggatcaggaggcagaagacctttgcagaaagaggaggagggcctgtgattaggccagcaatggcagggtggagtcaggccaggaccagagctgatggctaaggcactcaagtagaagccgctagagtatctgtggrgaagcctggggtatagaggtgatacaagactcaccattttaaaaaatgttttttagtgaccg

SEQ ID NO: 285388 - DNA, 583 bp, Homo sapiens
gatttccattcctctaataactattgtgaataagtatctttattataattgtcttggctgtaccagtgtttttatgttaaatgcctcgtcatatctttgtcctgatttcttatagattcataaaagttctttatatattctgaatactaacccttyctgtttgtgtagcaaacatcttctcacagttctggcttgctttttgaatttctttatggtctcttgatgaacacctgtaattcttgaaatgaactactacttaaggcaaggctatgaagacccaacttcttggttacttaatagactttcataataaatgagaacttcaaggatggtagggtgggctgaatacatatgactgtcccgaaaagcttagagaaagaaaatgacaagctcagtcctttaaattctcattcaaggtaatgtcaggaaaccagatgtttctataattgcactaaaatattatctcatctaccatagcaatataaccaaggtacctaaaaattcattgcaaaatttgatcttgtagtttgagaattactacacaaattgaatttatgactgttctaagtttcttatgtaaaag

SEQ ID NO: 285389 - DNA, 592 bp, Homo sapiens
attagagcaaggcctgatggagatcagaggccaccccacacagcatgggtgtagcccatcttacgttgggggtgagatcactcaatgtcttggctttgtgtggaggtctctaactcatctccctcagccccttgcayggatccagatttcgcctcttgcctctgtacaactatggaaatagaggttccaatcactggggattggcagaagcccaagactttagcatagcttcatgactgctgtaggtgaggtctttagctggtctttaagcaaggataagctggtgttttgcgtagaggagaatgggctgcctctgctggcaagtggaattttttagggagggagcatcattgtacttaaattcatccaaattcaccaaactgtcctccttccaattctcagatttgtgttttcacttcattttttacttctagggatttctcttgttctcttgtcaattcagtgcatgcattaaaaaatgtggttacttttctgaattttatcagcacttctagatgctttacaaagagggggaattatattacctactctgagaaaaaatttttttatcatagtaccaacagcacttagc

SEQ ID NO: 285390 - DNA, 581 bp, Homo sapiens
gaaaaactcttataaattctgatcatgtgatctttgtgggatattccacgtgctttggtagtgccaggctttttatttctatattgtttaatagtttataaatcatttccatgtggattatctcatcatatattcaaaactatcccatgaggtagatactatgtatcagccccactatacaggtaagaaagtaaaggcccaaggagctgaaatggctttgttgagtccctcagctagacaatggcagtgccagcatgaggacgcaggaaagggtagatgtaaagtgaggcctctggtacgcttgccacaaagcttaaaatagcaaaaatcataataacaataaaaagcaggatataggtcaactgargctgctctgtgctcatctcagatggctttacctacaggcctaggggctcagctggacctttctgtctctatggtctgtctcggtccatggatctcttgtccttcagatatcctctcatccttcttcagagcatggtggcctcaggttacaggaaggtagagtctgtaaggccccatgatgccttggctctggggcttctgtaacatcacctcca

SEQ ID NO: 285391 - DNA, 581 bp, Homo sapiens
ttattgtggaaatatgagatggatggttagggaaggagagaacaaacaaacttaccttcctcacttgccttaacgtgtttgagttcctacttgtatgcactgaaatatctataatttacttttcagttttgcaatgtttatggcttttatgtcatttgaaggttatttataacaattatataaggaagcaaagtaccataaactgaagtaatttactgtaaaatatctgamatgctaaaatatcaaatggtgcattacagtagtgctagcatcgctcttggaaaaaggaaaagaaaaaaaagtctaaaaatatagcctctaccccatcagccagtctgttacattcatcttgcagatttatacactaaagagcaactggcaagtattaatttaattgctttgagggaggggttgaagttgagagaatatggctcccctatccagtgcttataaacttagatggattatcttggagcaaagggatacaaaggtgaagtcaagcactatgggcgtcaagctggccatgaccctctgctccttctgctaaatcctgacgtcctgaatccatatgacaggcatca

SEQ ID NO: 285392 - DNA, 605 bp, Homo sapiens
ggttgactggtgacacctttatctaggttcccaaagatgtgtcctttgagaacctcatgtgattgtgtctcgttaaaagggtcattaagttaaaggtctcgagatgagattatcctggattagggtgacacctaactgcaatgacaagtctttataggagcagtraagaagaaacagacacagacacacaggttagaggccatgtgaagacacaggatgagatgggagtgattcggccagaagccaaggaatccccggagccacagaaccaggaaaaggcaaggaagggctctgccctagagctcttcctagggcagagggagggagtatggtcctgttaacactttgatttcacatttctggcctccaggactcagagacaatacacttctgcagttttaagccacccagtttgtagtaattggttacagcaaccctagcaagctaatacaccatcaataagcctagaatgagcacccatcctctctgttgggtttccatctgtctcttagatatcagaagatgataacttgtctgagtgggtctgacggggaaagaaaaaaaaggagaatgtattagtcttttttcacactgctatgaagaaa

SEQ ID NO: 285393 - DNA, 605 bp, Homo sapiens
ggttgactggtgacacctttatctaggttcccaaagatgtgtcctttgagaacctcatgtgattgtgtctcgttaaaagggtcattaagttaaaggtctcgagatgagattatcctggattagggtgacacctaactgcaatgacaagtctttataggagcagtaaagaagaaacagacacagacacacaggttagaggccatgtgaagacacaggatgagatgggagtgattcggccagaagccaaggaatccccggagccacagaaccaggaaaaggcaaggaagggctctgccctagagctcttcctagggcagagggagggagtatggtcctgttaacactttgatttcacatttctggcctccagractcagagacaatacacttctgcagttttaagccacccagtttgtagtaattggttacagcaaccctagcaagctaatacaccatcaataagcctagaatgagcacccatcctctctgttgggtttccatctgtctcttagatatcagaagatgataacttgtctgagtgggtctgacggggaaagaaaaaaaaggagaatgtattagtcttttttcacactgctatgaagaaa

SEQ ID NO: 285394 - DNA, 566 bp, Homo sapiens
ttgcatccaataagctgatgtctataaccagaatcccaaatgattgasttacagtagtaagaacagtcacttttcaggggacaccaaattacaatgaggctgaaattgtatccgtttacagtcagaaatatagttgttccagaaactacacctgttagtaaaactgcatgtggagtcaaatcaaaataaaaatgtcttgagagcttagaaccagaggagagaagttcatcaataggatggcccattcggtggctcaggcgaccacaatctgatcactgtcacatgttaagcttaatcaggccagtgccctggggaatacggagaatctattgacctcagctcctggcacccatttccacgttaggatgtccttgccattgggaggggatactcttttggccgagaatcctctgtcccattcacgggactggcagtgccactgctggatttaagggatctgcttcctctgtgactgattttcttcagatccatataatccttcttttgatttgttcaggcctccactagagttataacagtcattagcctatcatcattagggaatt

SEQ ID NO: 285395 - DNA, 577 bp, Homo sapiens
caggcccaggcccacccctgccttcctctctgtgcctgtggtcctccatccctttttctcacctggcccttgtgcagtactccatgcatgacagcaatcaataacctccttattaattaaatgacactttataaaagctctcctccaggggctttgagaaagccagctttggctagctgtaaagttttcartaatcatttaagaaaaaaaagttattcatcatctttatggcagatcacagccgccacattctccccaggagttcaatccatcaagctcctcaatgcaagaatggctaacaaggtccctgtcactttgggtgaaatatacaagcctcaccagaggctcctgacttccaccaggatcaaagtttgtaggcactgctccagcccagcgtcctccacccgagaagccagcaagacagccttgccttccttcctatctttatttgtagaatacaggtggaaaagaaggaatccttcaaagttttgttctttcatgaaaatgggttcctgtgggcaagaaatctgccattatgcacctaaccttttatatctgagattttcaagagaaaatg

SEQ ID NO: 285396 - DNA, 585 bp, Homo sapiens
atactaactcaaaatagctcagaagcaaaaaagataaacattgatccttcaactaaagcttgaaaaggcaggagagattgcagcctcctggctctgcatctgtcctcgcacctgagtccaggttggggctcattctcttgggttcctttgcagggagagctgaagccaccaactgttctggaagccctggttttaggagtggtaaacaaagagaaaaggagataggttgtcagcccagcttcagaatgaagatcttggggaaggactccaagaggctggacatggacmatgtgctttatcctcgaccagcatcacagccaaagaccaggatgagtcaagtatgtgggtccccgccctggtctgcagctgagggaatggggtgttgggtgggcaactttgcaagcaataataatgagagtggaggtggatttatacacaggaggaattgggggtaatagcactcagaaaaacgggaacatgagccccacaaacgtgaaacaatggatgttcactgaagtattggaatgcatcatttcatgtaatcctcaggccaacactaacatttaacaagctcagtgaggcggg

SEQ ID NO: 285397 - DNA, 585 bp, Homo sapiens
atactaactcaaaatagctcagaagcaaaaaagataaacattgatccttcaactaaagcttgaaaaggcaggagagattgcagcctcctggctctgcatctgtcctcgcacctgagtccaggttggggctcattctcttgggttcctttgcagggagagctgaagccaccaactgttctggaagccctggttttaggagtggtaaacaaagagaaaaggagataggttgtcagcccagcttcagaatgaagatcttggggaaggactccaagaggctggacatggacaatgtgctttatcctcgaccagcatcacagccaaagaccaggatgagtcaagtatgtgggtccccgccctggtctgcasctgagggaatggggtgttgggtgggcaactttgcaagcaataataatgagagtggaggtggatttatacacaggaggaattgggggtaatagcactcagaaaaacgggaacatgagccccacaaacgtgaaacaatggatgttcactgaagtattggaatgcatcatttcatgtaatcctcaggccaacactaacatttaacaagctcagtgaggcggg

SEQ ID NO: 285398 - DNA, 585 bp, Homo sapiens
atactaactcaaaatagctcagaagcaaaaaagataaacattgatccttcaactaaagcttgaaaaggcaggagagattgcagcctcctggctctgcatctgtcctcgcacctgagtccaggttggggctcattctcttgggttcctttgcagggagagctgaagccaccaactgttctggaagccctggttttaggagtggtaaacaaagagaaaaggagataggttgtcagcccagcttcagaatgaagatcttggggaaggactccaagaggctggacatggacaatgtgctttatcctcgaccagcatcacagccaaagaccaggatgagtcaagtatgtgggtccccgccctggtctgcagctgagggaatggggtgttgggtgggcaactttgcaagcaataataatgagagtggaggtggatttatacacaggaggaattgggggtaatagcactcagaaaaacgggaacatgagycccacaaacgtgaaacaatggatgttcactgaagtattggaatgcatcatttcatgtaatcctcaggccaacactaacatttaacaagctcagtgaggcggg

SEQ ID NO: 285399 - DNA, 585 bp, Homo sapiens
atactaactcaaaatagctcagaagcaaaaaagataaacattgatccttcaactaaagcttgaaaaggcaggagagattgcagcctcctggctctgcatctgtcctcgcacctgagtccaggttggggctcattctcttgggttcctttgcagggagagctgaagccaccaactgttctggaagccctggttttaggagtggtaaacaaagagaaaaggagataggttgtcagcccagcttcagaatgaagatcttggggaaggactccaagaggctggacatggacaatgtgctttatcctcgaccagcatcacagccaaagaccaggatgagtcaagtatgtgggtccccgccctggtctgcagctgagggaatggggtgttgggtgggcaactttgcaagcaataataatgagagtggaggtggatttatacacaggaggaattgggggtaatagcactcagaaaaacgggaacatgagccccacaaacgtraaacaatggatgttcactgaagtattggaatgcatcatttcatgtaatcctcaggccaacactaacatttaacaagctcagtgaggcggg

SEQ ID NO: 285400 - DNA, 546 bp, Homo sapiens
gacgctggtagctgggaagacctgggtgaaatctgagttggtcatgggcattgtccctgtctgtccatactctgtacagcgtcgcccccagtaaggcccaggatggggctcctccacagcagatgggcagaagaaaagtgcaggggaagcacacagagccagggggctcaggagggagggaagctgtcatttcctcacccattcctttctgtgtggttctagtccaggctgtcgatgctgtcctttgtgtttctggctgagaggaggttgtctgtctcctgttcccgcctttgctttctgcacctaactttcccccagcctcagcttcctccctacctctgccaccttatttattccccatagtgactgaaagctagagatgtttatttcctttttagtattattattatttttaagacaggatctcgctctgtygcccaggctagagtgcagtgacgtgatctcagctgactgtaacctctgtctcccgggttcaagctgtcctcccgcctcagcctccccagtagctgggattacaggcacaca

SEQ ID NO: 285401 - DNA, 532 bp, Homo sapiens
gttacttttctcatgtgaaaagtgaggtggatgaagctggaggggtggtgagttcctcatggtcacatagctaagtgtttagargcatgtcgtgagctcttcccctccaaaccttgcctcattccacggtgctggctgctcccatctcatatgcagatggttacactgggtcctcacgatgactctgcaaggctgctattattacactcattctgcagatgagaaaattgtgactcagagtataaattgctaaaagacactcgatcagaaagtggcagcagtaagacttaaaactcggggactatgctcctatgtgggagagagagtatgagagaagccttcccctgattccttcaccagccctgcttgttgcttttctaatggttttgcacatgcacggagggggttggaaaaggaaaaagtgaatgtgacaatgtagtcactcttttttggagacgaagaagtctcgctctgttgcccagggtggagtgcggtggtgtgatctcagctcactgcagcccctgcctcccag

SEQ ID NO: 285402 - DNA, 527 bp, Homo sapiens
ccttgcctcattccacggtgctggctgctcccatctcatatgcagatggttacactgggtcctcacgatgactctgcaaggctgctattattacactcattctgcagatgagaaaattgtgactcagagtataaattgctaaaagacactcgatcagaaagtggcagcagtaagacttaaaactcggggactatgctcctatgtgggagagagagtatgagagaagccttcccctgattccttcaccagccctgcttgttgcttttctaatggttttgcacatgcacggagggggttggaaaaggaaaaagtgaatgtgacaatgtagtcactcttttttggagacgaagaagtctcgctctgttgcccagggtggagtgcggtggtgtgatctcagctcactgcagcccctgcctcccaggttcaaggaattatcctgcctcagtctcctgagtagctgagactacaggcgtgtgccaccacactyggctaatttttgtatttttagtagagatgaggtttcacca

SEQ ID NO: 285403 - DNA, 1073 bp, Homo sapiens
ttgccatgttttcttgctctgcaaaaacaatgcttacagtcctagcaccctaacagcttccccaaggckagctttcccaggggattcagagaagcaattgcaccaggatgggggaggagagagacggaggtaagacaggcatagagagtcagaaagactgtgcgaaatggaaagacagcagaagaagcggagagatgagaagagacgaggggagaagggggacacaggctggagaaaaatgtgagagagaaaagagagaggatgtgaagaagaaaataggaagagaaagagagaagggaaaggggaggagttaagaggagagagaggcctgagtttaatatagctgtccttaaggacacagagccagccagctagcaaggggggagtgtcagccattcagggaggatcttatggaaggcctgactatcaaacagaggctccagtggaagctgaagcttccaattgcactatatacctgatagcctaatctgaaatgagaatctcgggggaggtgtagccattctcaaaaaggctgcwttgccatgttttcttgctctgcaaaaacaatgcttacagtcctagcaccctaacagcttccccaaggctagctttcccaggggattcagagaagcaattgcaccaggatgggggaggagagagacggaggtaagacaggcatagagagtcagaaagactgwgcgaaatggaaagacagcagaagaagcggagagatgagaagagacgaggggagaagggggacacaggctggagaaaaatgtgagagagaaaagagagaggatgtgaagaagaaaataggaagagaaagagagaagggaaaggggaggagttaagaggagagagaggcctgagtttaatatagctgtccttaaggacacagagccagccagctagcaaggggggagtgtcagccattcagggaggatcttatggaaggcctgactatcaaacagaggctccagtggaagctgaagcttccaattgcactatatacctgatagcctaatctgaaatgagaatctcgggggaggtgtagccattctcaaaaaggctgc

SEQ ID NO: 285404 - DNA, 536 bp, Homo sapiens
ttgccatgttttcttgctctgcaaaaacaatgcttacagtcctagcaccctaacagcttccccaaggctagctttcccaggggattcagagaagcaattgcaccaggatgggggaggagagagacggaggtaagacaggcatagagagtcagaaagactgtgsgaaatggaaagacagcagaagaagcggagagatgagaagagacgaggggagaagggggacacaggctggagaaaaatgtgagagagaaaagagagaggatgtgaagaagaaaataggaagagaaagagagaagggaaaggggaggagttaagaggagagagaggcctgagtttaatatagctgtccttaaggacacagagccagccagctagcaaggggggagtgtcagccattcagggaggatcttatggaaggcctgactatcaaacagaggctccagtggaagctgaagcttccaattgcactatatacctgatagcctaatctgaaatgagaatctcgggggaggtgtagccattctcaaaaaggctgc

SEQ ID NO: 285405 - DNA, 518 bp, Homo sapiens
gacactcctctagcaaatagaatatggcaaacagagtgggatgtcatgtctaaggttagaaaggaccttgacttccatcttgctggcaccagataattctcttgatctcttgtttactcaccctgctggcagcagctgtcctgttgggtgctgccccatagagaggcctacagggccaggagctgagggagktctcaagccagcagctagtgcagaagcgaatcctgccaacagccacttgagtgagcttggagcagataatccccctcacatccatggatgcttgagatgactgcagccctggctgacacctcaattgcagcctccttagagataagagctgggaccagaggcaccagctgaagtgggcctgaattcttgttctacagaggctgtgagatgataaacatttgttgctttaagctaggttttagggcagtttattaagcagtaatagataactaatacactgagttttcaacctcaccttgtactcacttctattatacctgcacacc

SEQ ID NO: 285406 - DNA, 518 bp, Homo sapiens
gacactcctctagcaaatagaatatggcaaacagagtgggatgtcatgtctaaggttagaaaggaccttgacttccatcttgctggcaccagataattctcttgatctcttgtttactcaccctgctggcagcagctgtcctgttgggtgctgccccatagagaggcctacagggccaggagctgagggaggtctcaagccagcagctagtgcagaagcgaatcctgccaacagccacttgagtgagcttggagcagataatccccctcacatccatggatgcttgagatgactgcagccctggctgacacctcaattgcagcctccttagagataagagctggraccagaggcaccagctgaagtgggcctgaattcttgttctacagaggctgtgagatgataaacatttgttgctttaagctaggttttagggcagtttattaagcagtaatagataactaatacactgagttttcaacctcaccttgtactcacttctattatacctgcacacc

SEQ ID NO: 285407 - DNA, 634 bp, Homo sapiens
agtaatttttaaagacgagatttttgcagatgagaactcactgttttgctaacagttaagcaggtgatgaaaagcaaagataagtcttgcttagtagcctcatagtggcctcctgtgcatagcaattgccctcggcaaacattgccctcaactctatcctgagtcacgatacttgatcatttcctagttccagatatgagtactcrtcttggttgagttagttttccgctaagttgagaaatggaaagctattgcttttgaaaccacacagctcttctgtcactgctcatgttagccttcatgctcaacattcctcagaattcttgaagtcttctccccaaaattctctgctccggagtacagctctccaactcccagcccactcttttccttggggccccatgcccaaaggctgtttcctccaaggaagtcttgagtgacctgggccctcaattctaacccattagaagactggccaacgtactgcaaaaatttccagtaagtagctgaaaattttctaatacgtagctgaagtcactcccttctggcttgtgataccatatctaaacccataaaatgaattatttactactgggccttttatgcactattaacaattctttcaatattgaca

SEQ ID NO: 285408 - DNA, 570 bp, Homo sapiens
atggtgatagccatccttaggacgaaggtggtctcaagatatggtgggttatttccacttcatggtgctgagacaccacattaagagatctgaagccactgtttgggaaccagctttgaaacttacaagctatgagacctcaaataatttaactgactgctctaaatctcatcttcaaatttggaaataattatattaccaacctcacaaggtttattttagaatcaaatgagatcatacacgtatcagaggtgacagrtgatttttttcaaattgcagaagtcttgtaaatgataaagtaccaggcaaatgccatcaggataaacattttagcatgaagcttgattcagagtgtctaactgcaaatcaaatggcccagaatttcaaactttaggtggtcttggtgactcttgttttaaacaataaatgaaatacttgtcaaagaagaagagatagaaagaagcaaaacaattcaatgatttctttcatgcccactaagaagcttattttgtatcctgaggtgtatttcaacaccatcaggtttcgttctctgtgtttgtaacacacctg

SEQ ID NO: 285409 - DNA, 554 bp, Homo sapiens
ttatatcttctttagtaaaatgcctagtttacctgtgaattttttattattaagttgtaagagttctttatatagactaggtacaagtctttggttgaatatttgatgggctaaattttcattttttgttttatatttttygaaaatttcactgttgtgaccacatgaaaagacaattgatttttacataacaagtttatctatcaatctgcgtaagtgctggcttcattcattaattcaaagtgttttcataaattctttttgatttttaaaatttatttcatatcatctgtgaagtacaacaatcatgcttttcctctagtctttatatttttaaatttttttcttttcttattgcatttgctaaaaattcttagaatcatattgagtagaaatagtaatatttggcataatttacttatattttcatgtatttttaatttttaccataagtatattttatacatttgttgtaggctattctgtatggtattaagaaacatcacttctattccttgcttaataagagattatgatgaatgtatgttaaactt

SEQ ID NO: 285410 - DNA, 587 bp, Homo sapiens
acttatattttcatgtatttttaatttttaccataagtatattttatacatttgttgtaggctattctgtatggtattaagaaacatcacttctattccttgcttaataagagattatgatgaatgtatgttaaactttgtcaaatgctttttctatgtatgctaagatgatcaaatgactacaaaggggcacggcacaagtatgggatgatgaactatcccataacctgcttgctgtttaaatgactgtatttgtctgtaaaactcccatcattatacactataaaaggtgagttttactgtacrtagttgagtgcaagaaatttcttaaggtcaaccatggatatttttccacttctttgaaaaagggaacctaagttttctcaaacttcacatgatggtgtcacgtcagtaacatcacacatttcactggctcttaccctgtgctgcttgccttataactcagctcccagcaaagtccccagggtcctcttgaaaacactacttctatgaggctttttgtgcaccctctcctcccccgacagtgaagacttcacagtaacgttgccaaatttagcaaataaaaa

SEQ ID NO: 285411 - DNA, 573 bp, Homo sapiens
gtgtaaaggcacaagaaaacattttgagataataaaaatatcctacacttttttaaaatttatttttatttttaatagagacaaggtctcactgtattgctgagtctggcctcaaactcctaggatcaagcaatcctcctacctcgatctcccaaagtgttaggattacagaggtgagccactgtacccagccctgatattttatatatcttgattgtagtggtggatgtaaagatatatacatttatgtgagtatacacatatatacatatatctgaatatatatttgtattatgtactcatcaaaatgaacatytgaagtgtgtgcattttattgtatgtaagctataactcactaaagttgctgtaaaaagacaacatatatcaagtctttctgacctgcttgcttctaactactacagttcccactgcacttaaagcctagacttgtcaccgcattctacagggccctgcatggtctggtgccatctctcaccactgtttccaaggtcattgtcttccaggcacacttgcctgctgttattcccttctgtggccctccccacaggtagc

SEQ ID NO: 285412 - DNA, 565 bp, Homo sapiens
ttaaaatttatttttatttttaatagagacaaggtctcactgtattgctgagtctggcctcaaactcctaggatcaagcaatcctcctacctcgatctcccaaagtgttaggattacagaggtgagccactgtacccagccctgatattttatatatcttgattgtagtggtggatgtaaagatatatacatttatgtgagtatacacatatatacatatatctgaatatatatttgtattatgtactcatcaaaatgaacatctgaagtgtgtgcattttattgtatgtaagctataactcactaaagttgytgtaaaaagacaacatatatcaagtctttctgacctgcttgcttctaactactacagttcccactgcacttaaagcctagacttgtcaccgcattctacagggccctgcatggtctggtgccatctctcaccactgtttccaaggtcattgtcttccaggcacacttgcctgctgttattcccttctgtggccctccccacaggtagcgcccctgcctagactgctctatgctcagctctgtgtcccttgcc

SEQ ID NO: 285413 - DNA, 591 bp, Homo sapiens
tagctgggactacaggcatgcaccatggctcaatttgcagttctcatgcttatagtagagaatgtagatgtttttttagagacagggtytagctctgtccatgacagactacagtcatttcatctagatcactgcagcctcaaactcctaggctccagcgatcatcctgtctcaggcttctgagtagctgggaatacaggagcacaccaccatgcccaggtaattttttttcttttttttgggatacagagttttgctcttgctgcccaggctggagtgaagtagcgcaatctcggctcactgcaacctccaccccctgggttcaagctattctcctgcctcagcttcctgagtagctgggattataggtacccgccaccacatccggctaatttttgtatttttattagagatggggtttcacctgttggccaggctggtcatgaactcctgacctcaggtgatacacccacctcggcctcccaaagtgttaagattacaggcgtgagccaccgcacctgacccattaaatattttcaaaacactaatagcataataattcatcacagtaattgcttcctgtattattgg

SEQ ID NO: 285414 - DNA, 530 bp, Homo sapiens
ttcatttcagtcgtcaagaacttttaagggcagaggccaggtgagactctgtctcaaaaataaaaggaaaggcagaaggtggaccgcagtgtgataagtagtatttcacaaacagtatttttctgtggcttgtcttacaggtacaccaggggttggaaaaaccacactaggcaaagaacttgcgtcaaaatcaggactgaaatacattaatgtgggtgatttagctcgagaaggtaagggacactttggtgttagatttgttttgttttttttttaaggtctggtaagtggagtgttagtgctgggtattgtcatagggtacaaaaaacagagattgccattaaagaatatatactctgttagggaatccmcagaaatattaagtgtctaatgctatgtcctggttattttgaccattttcccttccgccttcaaaatggctggcaattcttgtgaatagttgggaaggctcctataaagagactggatttcggataggtagaatgtgaataaggagaatgtttttaagt

SEQ ID NO: 285415 - DNA, 563 bp, Homo sapiens
tgtttagtgacttggctaaactcatgtaatgaagtctgtcttttgcaacatgaagccttcctccctcttcagagagctyatccttggctgtgcccacagtttacttgggatgatggtggttttagcagagctcactttgtctctttccctgatatgtctgtatagctctttgcttcctttgttatcacactgttggctaccctaattacttttttttttttttttttttttttttgaggaaagagtctcgctctgtcacccagactggagtgcagtggtacgatggctgactgcaacctccgcctcctgggctcaagcaattcttatgcttcagcctcctgagtagctgggactacaggcatgtgccaccatccccagctaatttttctatttttagtagagatggcgtttcaccatgttagccaggttggtcttgaactcctgacctcaagtgatccacccaccttggcctcccaaagtgctgggattacagacgtgagccactgtgcctgactactccctaattactatctaattgctctgttttcagcagtgctctagga

SEQ ID NO: 285416 - DNA, 594 bp, Homo sapiens
ctattagtggaaaacacaggtagcaggagagagtcactgcatcttcctgagcaggggaataacatgatgaaaacagggcttcagaaagatgaaggcaggcctttcttgacacgcaaaattgcaacttcccggttcctttcctttcagaatatgtcactctcttcccttctacacccttccccatccctcgtccccacctccttacccactgcaatagatcctagtaaaaactgagtattgctatttaaattgtgaagatgtatatgaagattcaaatatatgaagatttgggggagtaaatctttggatggtgctatatctcacttctatactacaattaaggggcttctcaatctttttggagtcccagccagaaataagattgagtttgagtttagaaagagccctctatggtattcaagtgcatggggtataggggatgtcacagaaaaaaaagtttcctatacggcgacttcaaaactggagatcaaaacaatgggacccaggccttggacacttaaacccagccactggacttaaaataagaccatcagtcacaaataaggmtgccaagaactccactgccataatcgg

SEQ ID NO: 285417 - DNA, 493 bp, Homo sapiens
cttaccagttgtagtctcctataatactgattgtgttggatgcatcggcagcccacgtaatgggtctctggttgagaacttggcgtagcgtgaagtgatgctcgccagggtcttcaatatttgtaaaatattcaaatacaccagtttgatcagcaaagtttggagcttcactaaaaaatgggtaatctgttcagaatgtaagaaattctctgtttagtatcaaatccttcagaagctctccttgctgatattttatagtatgtctgaaacacttctgaaagcttttaaataaataaataaaatctaaaccaaagtttagggcctaggtctaataaagatacattaatttttgtatcatcattactaaatatcaagatgatgagttcgacatatagatgctgcataatatttaatccagrcatctggtgtagaggaaaggtcatgagttttgaagtaagacctagattcaaattcgagttcagtctgtcgccct

SEQ ID NO: 285418 - DNA, 594 bp, Homo sapiens
aggtacataagccagcacctggcaagggctcaataagggayagctttattatttctaatatctgtcaagcaaggttccaaatcatgcgtcacaatcatctgccaaaagagcataagaaaggtttactatatcaagcataaaatttacaaattttcttctacttctaaactgccgcaaaaaccagttttgggcctaagttatcaatccctttttagttttactaaattaaattatagtcttacaataatgaatgctgtagaggagaaattttatatatcttatagctcttatacctcatgcttttccaagtgtttttgcattcattacctcatttgagacatttagaaccctaacaagtatctccagagcctagcttataatatttaactttagttttaaatttatattgtagctcataaagtattacattttatatttgaaggtttgaaattgcctcttagtcttcagggtcacaaaatattggtcttggtgctggcagaagttcttcaatctcattatctaggccatatcccacacagattcctcacttactgaaggcaaaagtcacttttgctaacagagaaccaagcgagc

SEQ ID NO: 285419 - DNA, 594 bp, Homo sapiens
aggtacataagccagcacctggcaagggctcaataagggatagctttattatttctaatatctgtcaagcaaggttccaaatcatgcgtcacaatcatctgccaaaagagcataagaaaggtttactatatcaagcataaaatttacaaattttcttctacttctaaactgcmgcaaaaaccagttttgggcctaagttatcaatccctttttagttttactaaattaaattatagtcttacaataatgaatgctgtagaggagaaattttatatatcttatagctcttatacctcatgcttttccaagtgtttttgcattcattacctcatttgagacatttagaaccctaacaagtatctccagagcctagcttataatatttaactttagttttaaatttatattgtagctcataaagtattacattttatatttgaaggtttgaaattgcctcttagtcttcagggtcacaaaatattggtcttggtgctggcagaagttcttcaatctcattatctaggccatatcccacacagattcctcacttactgaaggcaaaagtcacttttgctaacagagaaccaagcgagc

SEQ ID NO: 285420 - DNA, 1169 bp, Homo sapiens
gcagaaagacagatatgaatgtgtcttaacctccacacagaaggaagatgtcagtaatggctaatggggcagtagcaaagttacaaagtttaagtttcaccaaaaacaaatcagaactataactttcattctaacaatgaaccctatatttttttctgaaactgaaaaatacagggtcctcaaatttagatttaccataaagtaatgcaaaaaattagccctccttttaccgcatatgagatgtaggaggtaaatgaatgtgcttttgacagccactccatcatgcacccagtttgacaggtagaaatcaacacactactgttaaatatagagaccaagttaagttttagtgaaaaatactcaccaacattgaaatcatccttataggtacttgggaagggctgggattttggaggaagcgggtagctgcctttgcgaccagtggtgagagtggtgagtgtgaacagctcatcttcatgcaggctcagtgtgaaactgccatcrctgtcaaggagctgaaaaagaagacactactgtattcaggaccaggtactatagctcatctcatgtggacaaaatagctttaaaaaaattagcttaaagaaaagtccaaatcatttctgttagaacttcwagctgattcttcgagaagatcaatacagttgaaaaacttctagccagactaataaaaaatcaggttaagagaaaacatacacttcaacaataagaaaggtgacattactagagattagagatttacctagggggagaggcaaggcatgaaatagcttcaaaccttttcttaaaggaattgatatttgacacagagcatagagaggtttaagactaatgttgttctaaaaaataatggaggttttggtgaaaagaaaaaagaaaccagtggcttcactataggcataagctaaaccacaaccctgcctaatatcctgttgagaaccacccagcctagtatcctgttgctccactaaaaatgacagtatcacaacacacagtttctttaatgtccgttgctgacccccggaaaaaaattcagcttttatacagtcaacattctttatatctgaaggatgaaaaacagcacaaawatcttgaaaactatgaagtcccagaatctattggtctccagatcttagtggtcatttcttact

SEQ ID NO: 285421 - DNA, 606 bp, Homo sapiens
ataatgataatgatgtcaccaacaatgataactgtcatttaccaagcacttactcaaagccagacgtggtgcttggtacattctccatttgttcctcctaacaaatctgtgagatgaatattagcattaaccccacacctcagcatggatctccccaaaacacattctgagacatacattcaggtgcaagtagcttattttggagggaatgtcaggagagtacrgcgaggtactaggaagtgacacagaggagggaggaagccaagaaggaataagataatgactaagtactgccctgggcaaccaaggccaagagcacaaatttccccagatgttatggtaaggcaagggcattcctgcttctctttgttggtatgcaaacctgtgtgttctagctactgaggacatggtgccatttaatggtcactgatttagggagaataccacatcttggaggatggcacccacttggcagggtattatctccaatccagtgcttcagctgtacatttaaagagctgtcccattgctctaagtggtgtggtgtatgataggattagtggattctggctcacgtgcttactgctatatatcatttgttgtaag

SEQ ID NO: 285422 - DNA, 606 bp, Homo sapiens
ataatgataatgatgtcaccaacaatgataactgtcatttaccaagcacttactcaaagccagacgtggtgcttggtacattctccatttgttcctcctaacaaatctgtgagatgaatattagcattaaccccacacctcagcatggatctccccaaaacacattctgagacatacattcaggtgcaagtagcttattttggagggaatgtcaggagagtacagcgaggtactaggaagtgacacagaggagggaggaagccaagaaggaataagataatgactaagtactgccctgggcaaccaaggccaagagcacaaatytccccagatgttatggtaaggcaagggcattcctgcttctctttgttggtatgcaaacctgtgtgttctagctactgaggacatggtgccatttaatggtcactgatttagggagaataccacatcttggaggatggcacccacttggcagggtattatctccaatccagtgcttcagctgtacatttaaagagctgtcccattgctctaagtggtgtggtgtatgataggattagtggattctggctcacgtgcttactgctatatatcatttgttgtaag

SEQ ID NO: 285423 - DNA, 606 bp, Homo sapiens
ataatgataatgatgtcaccaacaatgataactgtcatttaccaagcacttactcaaagccagacgtggtgcttggtacattctccatttgttcctcctaacaaatctgtgagatgaatattagcattaaccccacacctcagcatggatctccccaaaacacattctgagacatacattcaggtgcaagtagcttattttggagggaatgtcaggagagtacagcgaggtactaggaagtgacacagaggagggaggaagccaagaaggaataagataatgactaagtactgccctgggcaaccaaggccaagagcacaaatttccccagatgttatggtaaggcaagggcattcctgcttctctttgttggtatgcaaacctgtgtgttctagctactgaggacatggtgccatttaatggtcactgatttagggagaataccrcatcttggaggatggcacccacttggcagggtattatctccaatccagtgcttcagctgtacatttaaagagctgtcccattgctctaagtggtgtggtgtatgataggattagtggattctggctcacgtgcttactgctatatatcatttgttgtaag

SEQ ID NO: 285424 - DNA, 591 bp, Homo sapiens
attctttgaggcctgagttaaagaggacttgttcaaggggggatctgtgtcaacttcttccaggagcctagaatttattttttcatatatagttaacctttatttttggtgaagttattttcataattaggtaaattatttatttattgttttctctcaattacattttatgtatgaggatagaaataaratcagatttcttaaaaaggcatatatgttccatctgtgggtaaaacagatgtttgtttgtcaagatgctctacatgccatctcacacagccttttgattccactttttaatgtttccattgcaatacaatacacatgcagcaaaatgcacatatcctaagtgtacagcttgatgcatttctacaaactgagcatgctcatggaaccagccacccctaccaagagatagaacattgccaaatctcagaagtcctcctcatgccctcttccaacagtactcagcctttccccagaggtagccactacccagactcctaacatcatagattaactttgcctggtttgtatcagataatacatactcttttgtgtctttttttttatcactcagaattacatttg

SEQ ID NO: 285425 - DNA, 467 bp, Homo sapiens
atttcatagtctcaggttttagatttatgtttttaatctattttgattttttttaatatggtgagagatagggtctggtttcattcttctgcatatgggtatccagttttcccagcaycgtttattgaagaggctaccctttccctaatgcatgttcttggcaactttgtcaaaaatgagttcatggtagatgtatggatttatttttgggctctttattccattccactggtctatgtgcctgcttttatgccagtaccatgctgttttggttactatagtctgtagtatgatttgaagtcaggtaatgatattccttcagttttgttatttttgctcgggatgtctttggcaattctgggtcttgcatcgttccatatacgttttaggattttctgtttctacaaagaatgtcattggtattttgattgggattccactgaacctgtaatttctttgagtactac

SEQ ID NO: 285426 - DNA, 467 bp, Homo sapiens
atttcatagtctcaggttttagatttatgtttttaatctattttgattttttttaatatggtgagagatagggtctggtttcattcttctgcatatgggtatccagttttcccagcaccrtttattgaagaggctaccctttccctaatgcatgttcttggcaactttgtcaaaaatgagttcatggtagatgtatggatttatttttgggctctttattccattccactggtctatgtgcctgcttttatgccagtaccatgctgttttggttactatagtctgtagtatgatttgaagtcaggtaatgatattccttcagttttgttatttttgctcgggatgtctttggcaattctgggtcttgcatcgttccatatacgttttaggattttctgtttctacaaagaatgtcattggtattttgattgggattccactgaacctgtaatttctttgagtactac

SEQ ID NO: 285427 - DNA, 578 bp, Homo sapiens
tgcactggaaagtctcagcaatggtatcgaacaaggagaagtaagaacttcagagcttgaagacaaggtttttgaattaacccaatccatcaaagacgaagataaaataattttaaaaatgaacaaagcctctaagaagtttgcaactaggttaagtgtccaaatctaagaataattgatgttcctaagaaagaagagaaatctaaaagtttggaaaacatatttgagggaataattgaggaaaacttccctggccatgctagagatatagacacgcaaatacaagaagctcaaagaacacctgggaaattcatcacaaaaagatcattgcttagtcacatagtcatcaggttatctaaagtcaagatgaaggttatctaaagttaagagctgtcaggmaaaagcatcaggaaacctgtaaaggaaaacctgtcagagtaacagcagatttctcagcagaaaccctacaagctagaaggaattagggtaatatttttagcctccttaaacaaaacaattatctgccacgaattttgtatctagcaaaactaagcttcataaatgaaggaaagatacag

SEQ ID NO: 285428 - DNA, 1184 bp, Homo sapiens
tcaagacataaagtcaacaaagatacaattgatttaaactataccctaggacaaatgtacttaacagataattacataacatcctacccaacaactgcagaatatacattctattcatcagcacatggaacattctccaagatagaccatatgataggccacaaaacatatctcagcaaatataagcaaatcaaaattatatcaagtgctctctctgatcacagtgaaataatattggaaatcaactttaaaaggtaccctcaaaaccatgcaaatacatggaaattaaataacctgctcctgaatgatcattgggtaaacaataagattaagatggaaattaaagattatttgaactgaacaagaatagttatacaacctatcaaacctcggggayacagaaaaagcagtgccaagaggaaagttcacagcattaaatgcctacatcaaaaagtctgaaagatcacaaacagacaatctatggtcacacctcatggaagtggagaagtaagaacaatccaaatccaaacccagcagaagaaaagaaataacaaawatcctccctaaatcattttacgaagtcagcatcaccctaataccaaaaccagggaagaacataacgaaagaagaaaactacaatccactatccctgatgaacacagatgcaaaaatcttcaataaattactagctgactgaatccaacagcatatcaaaaagataatccaccatgatgaagtgtgtttcacaccagggatgcaaggatggcttaacatatgcaagccaataaatgtggtacactacataaacataattaaaaacaaaaatcccatgatcatctcaatggatgcagaaaaacatttaacaaagtgcagcatccctttatgawtaaaaccctcagtgaaattggcatagaagggaaatactttgaggtaataaaatccatctatgacaaacccacagccaacatcatactgcatggagaaaagttgaaaacattccccctgagaactggaacatgacaaggatgcccacttacaccacttctattaaacatggtacttgaaatcctagccggagcaatcagacaagagaaagaaagaaaggacatccatactggtaaagaggaattcaaactgtcacggtttgctgattatataattgcatgtcaagaaaaccctaacga

SEQ ID NO: 285429 - DNA, 400 bp, Homo sapiens
agtaaaacatctccagttggaacaattatgctatctgtgtgatattagactcattttaatgtctcagagacttagatttttctcattttaaaaatgtgaacaattggtacatttcagagttattgtaaggattaatgagaaaatataaataaacacacaaaataattagcacacataaaacataaacacaaataaaataattagcctggtataaagaacaaaatggaatttcaatacatayatttatatggcaagttgggttgctttccctgttctcccttttctggagtctgatgccttttatggtttttgtaatgtaattcaaaaatgagaagcagagaaatattgttttaacatcataaggtatagtcatttttatttcatttttcagacaaagaaa

SEQ ID NO: 285430 - DNA, 478 bp, Homo sapiens
cattcttgcaatgaatttttgccaaatgcttaatttttactagatgctaggagaattgggaagccttaagtctgacacaggatccagagacaaaaattacaaagtagtgagtgctatggtaagagttaagtaagaaggttggataagatgtccactactagctcaatcttgaaagcgtccaggacacttgcctctgagacctaaacgactgagtgggcattgatcaagagtgggaggttgtttcagggtcagcacatgcaaaggacaggctccattttaggaaaatgaaagtagttcagtgttattgaagctgatggtgagggaggaagtggcagaagataaaggctggaaagaaacaagtcaataagaagccacaaaaaagttgtaagtagatgaatgacatgatccaatttgtgctttargaagattacttttgtctcagtgtccaatataggtggagggaggcaaaatgagaagc

SEQ ID NO: 285431 - DNA, 516 bp, Homo sapiens
tacaacatatcccagtgccacatcttctgcctgcacctcactcccagttactctcgggtcaagggcaaaaaattacatggaggtatggggtaggaatgcaggaaaggaaaatggccatatgcaaattgaaaacttaggccttctgaataaattggcctagagatgtattttgtttggcaggctcaacttccagaaaaacttctgaacttaaatatctttaggcagagcatgcgtttttccyatttgccacagttcctaccaatcacgacgatgttactccacatattctccttccctgcctgacttctgagggcatttgggcttagcatctctgggtgtcaggatcacatctggtaagaaagcatagtggatttagctagctgcaaattttcaagaggagttactctcagcagcctccagataggaatgccccatgcctcctgaaaacaagtgagcaaaggcccagattccctgagctcctttgagatttccagcacaggtgagcagggaagcaac

SEQ ID NO: 285432 - DNA, 569 bp, Homo sapiens
taagccaaaacatttttcatttagccatgcatttaatagcatatactgagatcctactctgagccatatactatatgtgagctcacaacagaaccagtgaaataaacttaaaaaccagtgatagtatgaggtgttagcatctgtagttcaagtacacatttatacatgactggattgaatatggaagacaagagagacagaatataaaatttccagccagtctaattggtcacatggtaatagtattaacttagagggagaaaatagtaagttaatttttggaattagtgttatttgaatgcctatgagaaccccaggayaaaatttcaagtaggcggtttaaaacagacaatagggactgcagacacagatttaaattcctagttccagttctgccactaactagctttgagtcattaggccactcaattaacctcactggttctatgttttcgatttcaatatcactgaggtaagttcagattggtaatgctatgaatatgtaactcttgttctaatatccttgctacctacttcctctttaatttttattttatttatggagtcaa

SEQ ID NO: 285433 - DNA, 569 bp, Homo sapiens
taagccaaaacatttttcatttagccatgcatttaatagcatatactgagatcctactctgagccatatactatatgtgagctcacaacagaaccagtgaaataaacttaaaaaccagtgatagtatgaggtgttagcatctgtagttcaagtacacatttatacatgactggattgaatatggaagacaagagagacagaatataaaatttccagccagtctaattggtcacatggtaatagtattaacttagagggagaaaatagtaagttaatttttggaattagtgttatttgaatgcctatgagaaccccaggataaaatttcaagtaggcggtttaaaacagacaatagggactgcagacacagatttaaattcctagttccagttctgccactaactagctttgagtcattaggccactcaattaacctcactggttctatgttttcgatttcaatatcactgaggtaagttcagattggtaatgctatgaatatgtaactcttgttctaatatccttrctacctacttcctctttaatttttattttatttatggagtcaa

SEQ ID NO: 285434 - DNA, 631 bp, Homo sapiens
tatttaatctacaatgcaatagtgttgagagatgggcactagtgaggggtgttcaggtgggtactaatctgttaacccacattaatagattaatgccattataaaagggcttgagattkcacattgaatctcgtgctgtcttgtcgtctcttgctcttccatctttcaccatgggatgacaccacaggaagtcgttcaccacatgtgggtctctcaaccttggacttcccagcctctcgaactgtaagaaatgaatttcctttctctattaggtatccagtctgggacattatagctaaactgaatggactaagaaaagctagtatatctagagtgtttagcactggatctaattcttagtaaagtgtcagtaaatattaactgtcattgttttctatttatttttaaaatgaagtttatgggacaattaatgcttggggaagtgtggtataatagatgaggcactggatttgatccacaaatcatggatcaaattccagctttcctgctgtgtgacttttggcgaattgtttagtctgttatttcatgtcttcttccattagtaaggcctatgaatcactccttacaggctcatttgaagattgaaataatgtatttgaaagttccaagc

SEQ ID NO: 285435 - DNA, 631 bp, Homo sapiens
tatttaatctacaatgcaatagtgttgagagatgggcactagtgaggggtgttcaggtgggtactaatctgttaacccacattaatagattaatgccattataaaagggcttgagattgcacattgaatctcgtgctgtcttgtcgtctcttgctcttccatctttcaccatgggatgacaccacaggaagtcgttcaccacatgtgggtctctcaaccttggacttcccagcctctcgaactgtaagaaatraatttcctttctctattaggtatccagtctgggacattatagctaaactgaatggactaagaaaagctagtatatctagagtgtttagcactggatctaattcttagtaaagtgtcagtaaatattaactgtcattgttttctatttatttttaaaatgaagtttatgggacaattaatgcttggggaagtgtggtataatagatgaggcactggatttgatccacaaatcatggatcaaattccagctttcctgctgtgtgacttttggcgaattgtttagtctgttatttcatgtcttcttccattagtaaggcctatgaatcactccttacaggctcatttgaagattgaaataatgtatttgaaagttccaagc

SEQ ID NO: 285436 - DNA, 389 bp, Homo sapiens
actctctccccacattatctccctttctgggtttttgggtttttctgtgttttcatcttttttttcttaacctgttcagtgctgccaatcaaccgagggtctgtgagtggcaacgtggaatcaggcagcagggctttcttcccccttgccttggtccytcgcaggaatgagccaccaggctgtggaggagaaggggtcaaggccatatcccaatatgtgtatggtgagggtccctgctggcacgtccaggctgccagcagagctgtgccggggagaagagacctgggcttggagggaaccagtacccggaggtttccagttgccttgcctcttcccacttttgtcagccgatcagtttgtggtttctatacccgcaaaagtttcaggat

SEQ ID NO: 285437 - DNA, 389 bp, Homo sapiens
actctctccccacattatctccctttctgggtttttgggtttttctgtgttttcatcttttttttcttaacctgttcagtgctgccaatcaaccgagggtctgtgagtggcaacgtggaatcaggcagcagggctttcttcccccttgccttggtccttcgcaggaatgagccaccaggctgtggaggagaaggggtcamggccatatcccaatatgtgtatggtgagggtccctgctggcacgtccaggctgccagcagagctgtgccggggagaagagacctgggcttggagggaaccagtacccggaggtttccagttgccttgcctcttcccacttttgtcagccgatcagtttgtggtttctatacccgcaaaagtttcaggat

SEQ ID NO: 285438 - DNA, 590 bp, Homo sapiens
ataagtcattcttccataaagacacatgcacttgtatgtttattgcagcactattcacaatagcaagracttggaaccaacccagatgcccatcgatgatagactggataaagaaaatgtggcacatatacaccatggaataccatgcagccataaaaaaggatgagttcatgtcctttacagggacctggatgaagctggaaaccatcattctcagcaaactaacacaaacagaaaaccaaacaccatatgttctcattcataagtgagagttgaacaatgaggatgcatggacacagggaggggaacatcacacaccggggcctgtcgggctaggggagggataacattaggagaaatagctaatgtagatgatgggttgatgggtgcagcaaaccaccatggcacatgtaaaaaacctccactttctgcacatgtatcccagaattcaaagtataattttaaaaaatacagtgctggaagaagatgcctggtacctattaaggaactcactcatgatttcttgctgtggcctagagtggtggccactccttcaaactgagtttgccagaatggaattctggtgtagg

SEQ ID NO: 285439 - DNA, 590 bp, Homo sapiens
ataagtcattcttccataaagacacatgcacttgtatgtttattgcagcactattcacaatagcaaggacttggaaccaacccagatgcccatcgatgatagactggataaagaaaatgtggcacatatacaccatggaataccatgcagccataaaaaaggatgagttcatgtcctttacagggacctggatgaagctggaaaccatcattctcagcaaactaacacaaacagaaaaccaaacaccatatgttctcaytcataagtgagagttgaacaatgaggatgcatggacacagggaggggaacatcacacaccggggcctgtcgggctaggggagggataacattaggagaaatagctaatgtagatgatgggttgatgggtgcagcaaaccaccatggcacatgtaaaaaacctccactttctgcacatgtatcccagaattcaaagtataattttaaaaaatacagtgctggaagaagatgcctggtacctattaaggaactcactcatgatttcttgctgtggcctagagtggtggccactccttcaaactgagtttgccagaatggaattctggtgtagg

SEQ ID NO: 285440 - DNA, 590 bp, Homo sapiens
ataagtcattcttccataaagacacatgcacttgtatgtttattgcagcactattcacaatagcaaggacttggaaccaacccagatgcccatcgatgatagactggataaagaaaatgtggcacatatacaccatggaataccatgcagccataaaaaaggatgagttcatgtcctttacagggacctggatgaagctggaaaccatcattctcagcaaactaacacaaacagaaaaccaaacaccatatgttctcattcataagtgrgagttgaacaatgaggatgcatggacacagggaggggaacatcacacaccggggcctgtcgggctaggggagggataacattaggagaaatagctaatgtagatgatgggttgatgggtgcagcaaaccaccatggcacatgtaaaaaacctccactttctgcacatgtatcccagaattcaaagtataattttaaaaaatacagtgctggaagaagatgcctggtacctattaaggaactcactcatgatttcttgctgtggcctagagtggtggccactccttcaaactgagtttgccagaatggaattctggtgtagg

SEQ ID NO: 285441 - DNA, 623 bp, Homo sapiens
ggattgtgtggtagggcaggaaactgccaaactgttttccaaatcsgttataccatcttacattcctaccagcaatgtttaagactttgaactcctttacatccccaccaacatttgatgtggttagtcttttacattttagccattcaaataggtatatagcattgtctcaatgtggttttaatttccaattctctaccattgagtgtcttttcatttgtgtatttgccacagcatatcttctctggtgaagtatctttaaatctttgcacactttggagacaagcgttgtttgttttcctcattgttgaattatgaaaattgttagtatattctggataaaagtcctttgtgctttgcaaataatttctcccagtgtctcttaaagtttttaattttgatgtccagtttattaacattttcttttatagatcaggcttttggtatggtatctaagaaatctttgcctaacataagatcacaaagactttctcatatgctttttttctagaaattttatagttttgtgttttacatttaggcctatgatctacttcaacttttgtgtatgttgagaggtaaggatccaagtgctagatagatggataatgacaatagttcct

SEQ ID NO: 285442 - DNA, 623 bp, Homo sapiens
ggattgtgtggtagggcaggaaactgccaaactgttttccaaatcggttataccatcttacattcctaccagcaatgtttaagactttgaactcctttacatccccaccaacatttgatgtggttagtcttttacattttagccattcaaataggtatatagcattgtctcaatgtggttttaatttccaattctctaccattgagtgtcttttcatttgtgtatttgccacagcatatcttctctggtgaagtatctttaaatctttgcacactttggagacaagcgttgtttgttttcctcattgttgaattatgaaaattgttagtatattctggataaaagtcctttgtgctttgcaaataatttctcccagtgtctcttaaagtttttaattttgatgtccagtttattaacattttcttttatrgatcaggcttttggtatggtatctaagaaatctttgcctaacataagatcacaaagactttctcatatgctttttttctagaaattttatagttttgtgttttacatttaggcctatgatctacttcaacttttgtgtatgttgagaggtaaggatccaagtgctagatagatggataatgacaatagttcct

SEQ ID NO: 285443 - DNA, 618 bp, Homo sapiens
ttgtagtcggggagacagctattaaacaagcacaatgtgagagttacgtacatagcactgtgagatcagagaaggaacaccaaaccctgtagggagggtagggaaggaaagctaccttctcagaggaggtgaaagagttatctctgtaaaaatgagtttatcaagtaagcaaggggtgaaaaggcactgcaggtagatggagcagcttatgcaaagacacacaggcatgttccagaaagggcaagtggttttgtgtgcctagagtcgtgggtgagtggtggtgggaatggtgggacagaaggctggaaacatagtggttatactggccttcataatctgaatttcacagataaaggtttaaactgctgttaccacttaaaggaactgcttagatgccttggtcctgtttgtttctggtgsaaatctggacagattaatttggcctgttatttctgggtacttcagaaagacaaacacccaatccccatatttttggcatttctattcccaacacagttggaaccaggaagcataacaatgaaaattaagaaaggagaagagggaagaagcagagagtaaatctgtttgggatttatgaaaagatattacaagacacag

SEQ ID NO: 285444 - DNA, 572 bp, Homo sapiens
aagctaagggcaatcaaaaagatctcctctaaggagaaaatggtttaataatggggaaagagcacttttcagttgacgactgaaccagttgttttctagacactaatgagccattttgaatctgtgatgttgtagaatagggggatgagatgaaggcttggtcagtggcatatggttcaacagcagtggtctcagctgctgagcacctgaaggatagtctctctgcctagattcaataaatctgtaacttttcaactgtgcctggtggctggtagaccattttaaataaatccgacttgaccagccctgccagcattttccaaacccacagccccttctctgtttagtcaattccagcccctttctgttgctcgcatgactttcagttaggatgacagcacacgtgggtcagttcggtatgagtagtcctaaagctgggatgattccacttgccagtaggaccttacagaggcttagagmagtaactgagaaaccccatgtctctaggaaggatgccacctaggccattctgcacaggtgtgacgtttctgtttgaaaagctctccaggtaa

SEQ ID NO: 285445 - DNA, 589 bp, Homo sapiens
accttggaaaatctggccaagcctaggggtttccttttccatttgccaagttccattgtgccaggactgccgtgctccactgagctcctctgtcacaccccattcttgcccctcactgggcaggccatggcctacagcttgcagggagtaaagcaggcccgcctccctttcttcccatccacatactcctcttctgctttccagtgactccaccagtttgatgtgggaagtgttagcttcctttccttcttccatcccttcttccatctttccagctgtcaaatccaatccagtctctaacctaratgcagatcatttatttaaaagtaccaaacataacccagagtatgtggaatatgggcaacatatatatagccttctgtatttaacgatcttctgcttcttaaccgtaccagttttctatttataactcttatctatccatgatgttttaaagtctccacttgctgttatttacaaacgacagtgcattcagcagcccagtgccgtgagccctgacagatgccgtatttctgagtgcttccatgtgaatgctgccctcctgtagcatgtgtccaagtggacatag

SEQ ID NO: 285446 - DNA, 584 bp, Homo sapiens
tgctagtcctgtattggcaacattcttggcagggaaggagggaaggggcagccaaaacagaaatgcccactgccacttatatgtatttatatagtcatttatttgtttttagtttttcttttggttgactaataattcagaaatattaaaatcggtcacaagaatgcttaaaaggtaagaacaaaaataaaaacaaagtcccatgaattaaaaatyagagttttaaaaaaatgaagatgggaaactaatgaaatcagaatggggctagaaaaatacatatgacacagtcttaccatgctgcttctgtggccctgctgcctcatgagggaatgctgacactgcatacctggtggtcctaagaaatgaacctcccttccaccctccctctctcccttcttccttccctccctccacaaatgtttattctgctagtcactggcacaggtgctggagatacaaagcaagccacacatggctactacccttgtaaatcacacagtctaaggtcactcataaccaagagtcagcaggttcccttgccatctcactctacctccttcccacgcacagacactggaggtacg

SEQ ID NO: 285447 - DNA, 584 bp, Homo sapiens
tgctagtcctgtattggcaacattcttggcagggaaggagggaaggggcagccaaaacagaaatgcccactgccacttatatgtatttatatagtcatttatttgtttttagtttttcttttggttgactaataattcagaaatattaaaatcggtcacaagaatgcttaaaaggtaagaacaaaaataaaaacaaagtcccatgaattaaaaattagagttttaaaaaaatgaagatgggaaactaatgaaatcagaatggggctagaaaaatacatatgacacagtcttaccatgctgcttctgtggccctgctgcctcatgagggaatgctgacactgcatacctggtggtcctaagaaatgaacctcccttccaccctccctctctcccttcttccttccctccctccacaaatgtttattctgctagtcactggcacaggtgctggrgatacaaagcaagccacacatggctactacccttgtaaatcacacagtctaaggtcactcataaccaagagtcagcaggttcccttgccatctcactctacctccttcccacgcacagacactggaggtacg

SEQ ID NO: 285448 - DNA, 609 bp, Homo sapiens
tctcagttgaggccccaaacattgtggaaacatcatggaacagagacaagccatccttactatgtcttgtttgaattcctgactcacagaatccataagcacagtaaastggttgtcataaacattaaattttggggtggtttgttatgcagtaaaggtaactgaaacattgggttaaaacccaaagtccttatagtagctacaatgtctctatgatctggctctttgttgtgactctgatttcatctcctacaaatctccacttccattccagacatcctggcctgcttgctagttcttaaatacaccacgcaaacactggcttcagggtatttatgtttgtcattctcactgcctagaggtttctgccccagttatcttcaaacacaatctctcatctccatccctggtgtgattgccagtctccaagatggctccaatgatagctgcctcctgacatcatgctagggcatagtaccctcccacactgaacaggattgatatgtgtagccagtgagaagtggcagatacaacagaatatgacttctaatgctcggtcacaaaatatgccattgcttcctctttgccctcttgggtcactaattgtgg

SEQ ID NO: 285449 - DNA, 577 bp, Homo sapiens
cctggcctgcttgctagttcttaaatacaccacgcaaacactggcttcagggtatttatgtttgtcattctcactgcctagaggtttctgccccagttatcttcaaacacaatctctcatctccatccctggtgtgattgccagtctccaagatggctccaatgatagctgcctcctgacatcatgctagggcatagtaccctcccacactgaacaggattgatatgtgtagccagtgagaagtggcagatacaacagaatatgacttctaatgctcggtcacaaaatatgccattgcttcctctttgccctcttgggtcactaattgtgggggaagccagctgccatgttgtgaggagatacacgcagttctatggagaggcccatgtgataaggaactgaggtctcctcccaataaccatgagagtaagatgtcttagaagttgagtctccatccacagtcaggccttcagatgactgtagccccagctgacttcttgactgcagccacaggaaggactcaacccaggaccatccakctaagctgctccttaattcatgatccacagaaattgtg

SEQ ID NO: 285450 - DNA, 668 bp, Homo sapiens
ggacctactctgcattggtgggttgattcaggcctratccaacccttccagagtaggcgctgcccagattcccatttctagcaaaggtactaagagggtgtttttttggagggagcagtgcgggggtggtttccttgattgtaatcttgaaatcgtaagggtttgtatcaaagaatcatagcatctcctaataattatttaagtattacatgtaaattaatctaaacttttcttgaatccagttgtgttttcagcaagtactctatacttctggggtaatatattacatacatttttatcatctacgagtaaagtaatagtttattttacttgcactaatttgtctctttcaagcttcaaaagatattgttaactttagaattttggattcacacatttcatgattttacagactgtttttccctagccttcaactttgcagagttgagaaccaatatttttgtttgttcacatccagcccagcttccttcatcatacgtccttctctgagattgttgttaggatagcgatgacaatgactttataattagctttacagctttcacattattttattatgactcatcttatttgagccccactgtaatcctaagagttaggaagagcatctttctcattgtacagatcagagagaggtgaggtgactt

SEQ ID NO: 285451 - DNA, 668 bp, Homo sapiens
ggacctactctgcattggtgggttgattcaggcctgatccaacmcttccagagtaggcgctgcccagattcccatttctagcaaaggtactaagagggtgtttttttggagggagcagtgcgggggtggtttccttgattgtaatcttgaaatcgtaagggtttgtatcaaagaatcatagcatctcctaataattatttaagtattacatgtaaattaatctaaacttttcttgaatccagttgtgttttcagcaagtactctatacttctggggtaatatattacatacatttttatcatctacgagtaaagtaatagtttattttacttgcactaatttgtctctttcaagcttcaaaagatattgttaactttagaattttggattcacacatttcatgattttacagactgtttttccctagccttcaactttgcagagttgagaaccaatatttttgtttgttcacatccagcccagcttccttcatcatacgtccttctctgagattgttgttaggatagcgatgacaatgactttataattagctttacagctttcacattattttattatgactcatcttatttgagccccactgtaatcctaagagttaggaagagcatctttctcattgtacagatcagagagaggtgaggtgactt

SEQ ID NO: 285452 - DNA, 668 bp, Homo sapiens
ggacctactctgcattggtgggttgattcaggcctgatccaacccttccagagtaggcgctgcccagattcccatttctagcaaaggtactaagagggtgtttttttggagggagcagtgcgggggtggtttccttgattstaatcttgaaatcgtaagggtttgtatcaaagaatcatagcatctcctaataattatttaagtattacatgtaaattaatctaaacttttcttgaatccagttgtgttttcagcaagtactctatacttctggggtaatatattacatacatttttatcatctacgagtaaagtaatagtttattttacttgcactaatttgtctctttcaagcttcaaaagatattgttaactttagaattttggattcacacatttcatgattttacagactgtttttccctagccttcaactttgcagagttgagaaccaatatttttgtttgttcacatccagcccagcttccttcatcatacgtccttctctgagattgttgttaggatagcgatgacaatgactttataattagctttacagctttcacattattttattatgactcatcttatttgagccccactgtaatcctaagagttaggaagagcatctttctcattgtacagatcagagagaggtgaggtgactt

SEQ ID NO: 285453 - DNA, 668 bp, Homo sapiens
ggacctactctgcattggtgggttgattcaggcctgatccaacccttccagagtaggcgctgcccagattcccatttctagcaaaggtactaagagggtgtttttttggagggagcagtgcgggggtggtttccttgattgtaatcttgaaatcgtaagggtttgtatcaaagaatcatagcatctcctaataattatttaagtattacatgtaaattaatctaaacttttcttgaatccagttgtgttttcagcaagtactctatacttctggggtaatatattacatacatttttatcatctacgagtaaagtaatagtttattttacttgcactaatttgtctctttcaagcttcaaaagatattgttaactttagaattttggattcacacatttcatgattttacagactgtttttccctagccttcaactttgcagagttgagaaccaatatttttgtttgttcacatccagcccagcttccttcatcatacgtycttctctgagattgttgttaggatagcgatgacaatgactttataattagctttacagctttcacattattttattatgactcatcttatttgagccccactgtaatcctaagagttaggaagagcatctttctcattgtacagatcagagagaggtgaggtgactt

SEQ ID NO: 285454 - DNA, 624 bp, Homo sapiens
tctcacatgccactctgattgttaatggctgctggaaacgctgtgttaataagaattgcctgaccgtagtgagaagagtgctgcaatcaattagtgatgactgctgtgggtgtggaagaagcagtggcattatgcttgctatgtatttgccttccttgctgtatctctgcatcctttcttcaggcaacagtttatacccagttaccctgtaacaatgataacagagtctatgttttgtcaagggctgcagataaagcaactcaccttacaatttaacattcaaacatttcgggatgtatttatctcctgctgttaattcaaacgccaagattcaatttgtctgttggctcttaattatcttctgaggaggcaaagaatcactggttaccattatctttgaaatggctcctcataaaacacagaaaataarcattaagacatgaaagctacaaggcccacaatgcgggaattttaaccttgaaaactgtccaacagtagaactacgagtttatgtaggagtttgagaagtaatttgccaagtgagcaaaaaagttatacagcccatgagaataacaccatcctggctatgaatctcaagatggaatgtaacatttgtgaacatca

SEQ ID NO: 285455 - DNA, 621 bp, Homo sapiens
ttcttatccccatgttagatgaaggaagggagacccaagaaaagtgaaatcactcactaaagtcacaggactagacccaggttctgtctgtgtttccaaactgcttgaaggtaacttggctgttgtctttgagttgaggcagcactatcagtggasaggattcccgaaacttccccatcacttcaaccaggaaagttctattttttctgtcatatatgagtaattagtaaaaaataattctcttgctttaaaaaattgttgaaaatagctgcaaaatgtttagagatcacttttctaacttttcagatgagtaaacagagattcaaagaggtaagttgatttgcccaagttcagaccgaatacagggccgtggtggggccagaacccatttctcttgcttccaaatcagctctttctttgttacccaaatgtgttgttgagccagagttctgcagtgtgtctctcctccttcctaagccgaaacattgttatccttttttgctagggtctaaaaaggatctcagaatttagagtaggaaggagcccagtccaaagaataaagtcttacatttcaccaaggaacacgaggccagggagaaatgactattcctacattacagg

SEQ ID NO: 285456 - DNA, 624 bp, Homo sapiens
tctcacatgccactctgattgttaatggctgctggaaacgctgtgttaataagaattgcctgaccgtagtgagaagagtgctgcaatcaattagtgatgactgctgtgggtgtggaagaagcagtggcattatgcttgctatgtatttgccttccttgctgtatctctgcatcctttcttcaggcaacagtttatacccagttaccctgtaacaatgataacagagtctatgttttgtcaagggctgcagataaagcaactcaccttacaatttaacattcaaacatttcgggatgtatttatctcctgctgttaattcaaacgccaagattcaatttgtctgttggctcttaattatcttctgaggaggcaaagaatcactggttaccattatctttgaaatggctcctcataaaacacagaaaataagcattaagacatgaaagctacaaggcccacaatgcgggaattttaaccttgaaaactgtccaacagtagaactacgagtttatgtaggagtttgagaagtaatttgccaagtgagcaaaaaagttayacagcccatgagaataacaccatcctggctatgaatctcaagatggaatgtaacatttgtgaacatca

SEQ ID NO: 285457 - DNA, 613 bp, Homo sapiens
ggcactatgaggaacaggttcaaacctccagctgctcagtcccctgggatcatttctgtgcccccaccccccattatttcctatcatagttctctattatttaaaataacacaaaaaaacacaattttaagttaaatattcatgtgattaaattttaaatgtatctctgctattattctgtaagctttatccaatgctcattctgtatgaatagaccttagcacagtattcaccaggcacagattaaatggagatctgttgaatgacttaatggatagatggatgcgtggaagcagtgtttcccaagcttcagcattcccttcaaatggctcatctgccttctaygtgttaatgagcttgttccctcttccctcgcaactaacccctagcccccatccaagcagagcccaaaccactttctctgttcccaagagaaaaacatggatctcttctgcttgctcatctgacttggcattgggactcttcattgattacatggctgctgtcctgagagtctttacctttatgatggaagagttagaaattagcccagtcccgaagattacttgaggccatccatcagccaccaccgaatttctagagtaagtttgct

SEQ ID NO: 285458 - DNA, 631 bp, Homo sapiens
cttagaatatccagtggaaagcactgggactgattttcattcgttgagcattrcccaaggtagtgtgccctaaaaagaagtgtaccttatgaacagaatagtagaaactatccctatcatgttgtcaagcaatttatcttggcactgtgcttggaatgccatttaacgtttgcaaagtaggaggtatcattttctccattttacagatgagaaaactgtatcagtggtaccatacaacttgctgaggattgccaatctaggaagtgagtcaaagagttgactccaaggttggaagcattcttctcccatatagcacttctttgcctagataaggattctgtcctggggcctgcagatctctggtaggaattcatttgaaatacagctggctgctttctgagccatcctcctctcctgtatgggactgatgcagcccctgatcacactgtggtgcaatgagattgaaggactggcaaaaaaaaatgtgaacaagggtgccagagttagcaaataaaaatataggattcctaattatatttgaatttcagaggaacaacagattatttcttagtataagtatatcccaaatagtgcatggaacatacttataccaaaaattgctgttgtttga

SEQ ID NO: 285459 - DNA, 631 bp, Homo sapiens
cttagaatatccagtggaaagcactgggactgattttcattcgttgagcattacccaaggtagtgtgccctaaaaagaagtgtaccytatgaacagaatagtagaaactatccctatcatgttgtcaagcaatttatcttggcactgtgcttggaatgccatttaacgtttgcaaagtaggaggtatcattttctccattttacagatgagaaaactgtatcagtggtaccatacaacttgctgaggattgccaatctaggaagtgagtcaaagagttgactccaaggttggaagcattcttctcccatatagcacttctttgcctagataaggattctgtcctggggcctgcagatctctggtaggaattcatttgaaatacagctggctgctttctgagccatcctcctctcctgtatgggactgatgcagcccctgatcacactgtggtgcaatgagattgaaggactggcaaaaaaaaatgtgaacaagggtgccagagttagcaaataaaaatataggattcctaattatatttgaatttcagaggaacaacagattatttcttagtataagtatatcccaaatagtgcatggaacatacttataccaaaaattgctgttgtttga

SEQ ID NO: 285460 - DNA, 600 bp, Homo sapiens
ttcgttgagcattacccaaggtagtgtgccctaaaaagaagtgtaccttatgaacagaatagtagaaactatccctatcatgttrtcaagcaatttatcttggcactgtgcttggaatgccatttaacgtttgcaaagtaggaggtatcattttctccattttacagatgagaaaactgtatcagtggtaccatacaacttgctgaggattgccaatctaggaagtgagtcaaagagttgactccaaggttggaagcattcttctcccatatagcacttctttgcctagataaggattctgtcctggggcctgcagatctctggtaggaattcatttgaaatacagctggctgctttctgagccatcctcctctcctgtatgggactgatgcagcccctgatcacactgtggtgcaatgagattgaaggactggcaaaaaaaaatgtgaacaagggtgccagagttagcaaataaaaatataggattcctaattatatttgaatttcagaggaacaacagattatttcttagtataagtatatcccaaatagtgcatggaacatacttataccaaaaattgctgttgtttgaaattgaaa

SEQ ID NO: 285461 - DNA, 382 bp, Homo sapiens
gtaacacagttctgtttggtcacccataaaaaaagaacctgaaatagggttttttgttgttaaatttttagatgtaagactgctttacaacattgaattatactccatggttcatccagcataacatctctaacactaaacaaccaaaaagaatgggaagaaataagccattatgtctttcactcattcccatttgggaaggctagggaaaggtatcatgtaattggaagggattttcttttacctcctttctgtggcatcaactttgatctcttattccttcacccatttcttcatacattcatttattcarcagattttttttagcatctgctatgtttcagctcctgtattaggcattgggttacaaaggcaaataact

SEQ ID NO: 285462 - DNA, 608 bp, Homo sapiens
caaactcaattcctcatgaggtccgacttttaagatttttgtctacattttcttccctttcacttttttcggtaacttgtgatattatttaagtaaaacaactaaatgtctaagcatcataaaatgtgtagggggaaatggtttatgaattgccatgcagtgcttgtgtagttgccttgtgagtttttttttctgaaccattccrggttcctacatgtgctgctaaaataaacacgtgtactcttctgttcatcttccaatttttttcctcagccccatttgcactctttcttgacattactctctgattctgtggtctgtgactatccacctgaacccatcaccttaaccaacttagagagttcagttgcagaagattttcttgtaaatgaaactctagcttattgatcagtggtgttgctcctcatgaaaaaccttttcagagatttacaaattgaagaagcatggtaatttgtagtcttgtaaagaatgatatccagaagattctttagttatctgcatacaaagctaaatagttaatttgatgtttaaagtattactcagacttcatactgtcatcctatggacagttgcaacatcttcgctat

SEQ ID NO: 285463 - DNA, 608 bp, Homo sapiens
caaactcaattcctcatgaggtccgacttttaagatttttgtctacattttcttccctttcacttttttcggtaacttgtgatattatttaagtaaaacaactaaatgtctaagcatcataaaatgtgtagggggaaatggtttatgaattgccatgcagtgcttgtgtagttgccttgtgagtttttttttctgaaccattccaggttcctacatgtgctgctaaaataaacacgtgtactcttctgttcatcttccaatttttttcctcagccccatttgcactctttcttgacattactctctgattctgtggtctgtgactatccacctgaacccatcaccttaaccaacttasagagttcagttgcagaagattttcttgtaaatgaaactctagcttattgatcagtggtgttgctcctcatgaaaaaccttttcagagatttacaaattgaagaagcatggtaatttgtagtcttgtaaagaatgatatccagaagattctttagttatctgcatacaaagctaaatagttaatttgatgtttaaagtattactcagacttcatactgtcatcctatggacagttgcaacatcttcgctat

SEQ ID NO: 285464 - DNA, 376 bp, Homo sapiens
aatcagcccatgggatgatggtggctgacaattcccaagatcttcagggtgagctggctggcatgctggataaccatgaaggccaatggtgtcgttccagttcaaaggctagcagactggagctttaaaaacagcccatgtttcagttcaagttgaaaggcagaaaaarctaatgtgccaatttgaaggcaggcaggaataattctttcttaacttgggggcgggtcagcatttttgttctattcagacctttaaatgattgggtgaggcccatccacattaggcccacccacatctgtctaccaatttaaatattaaaaacagcctcacaggaacgctcgggataatgtttgaccagatatctggacagcttgtg

SEQ ID NO: 285465 - DNA, 541 bp, Homo sapiens
ttattaattattgagaacctcaaaaaaagtttatatgttatatgtatcaatatttaccacattagacattaaagctgacttaaaaagttaaaatacttaagtcatttgaagtaataataaatgcagttacataccaacttaataacattttgcgaaaatagctatttttcaaaacctaaagtgagaaaagtggcagttttccatttttgcaaatctctttgctgtctagctgatagaagacagctggattctcctatttgcttttgcattcaattgttgttttgattgaagtatatgaaaaaaaatctggtgtcatacacatatataattgggaaatggaagagtatttacayaggcttttttagatattcttcctttatactacatcaaaacttgataagttgcaatgttgtgaattggcccagggcttggccctctgaagatttgctgaaaatcactgacatgaagtagattaataggataaaaggcatatacatttatttaatgtgtatacacagcggcctttagaatgaagacccaa

SEQ ID NO: 285466 - DNA, 569 bp, Homo sapiens
tcattctgccacttctgaaagccttttttcttgtggtaaaatgattgtttgtgggacaaggatgctgcatttgaatgtcccaggcatcctgggcatgctcagtgtcccatccctccccagggaataaaagcctacatgggctacacaactcagccaacctcagctttcaagcagccacttcaactccccaacaacgactttcattgctcctccagrgaccttgatccatggatccatttgagccaaataaactgatttatggaaatgattattccctggtgctattctcattagctgcaaatagatggtgcttctggataagcccacaagtccagctaaaaacaaacccatccctctaacatgacatctctggagaggtgggcattcgattatccagattatcatagcttttcactgcgcccctctagcttttatttaactggagttggaatctcccaccaagaggctcagcactctgaggaattctcctggaaggaagatgccatgtgctgcacagagcacactgtttcatggagaaagggtggaggcttggtgtgcagagcaaaggg

SEQ ID NO: 285467 - DNA, 547 bp, Homo sapiens
aacctcttttcttcataaatacccagtcccacagagtcccaggccatgtgcaggaccctgggctcagagacaaaaagatcactcacgttcctatgcttgagaggtcatagtcagatggcagaggcaggcctgccagcaacacacaccacccacccgcaaaacaccagacgagaagtcacagcaatggctgccattccatgagcacctgctgtcaacagctgtactcagtcagtgcctactgtrtgccagcccgaggccaggagagtcacaggtgttgtcactaccttcacaacaacccttcctgctacaaggtcagtttaatcattcccattttatagatgaggatacagaggctcagagaagttgggtctcacagccagggagcagctgagccatcgcttgctctgtgggcccagcagcatcaggacagctctgcccaccctcacccctcagatggaggccgggtcagctggggtggactgaaggcaggtatggtcacctgagccaggtagtcagagtgcagaggtggtgccagattgcaggtgca

SEQ ID NO: 285468 - DNA, 506 bp, Homo sapiens
ggggtctatcttggggagacaagtccactaacagagggagactgcagtgtgaccaaaaccattgccttattggtgccgattcctgtgctgaccccctacccatctccatctccagggtcccatgagggaaaacagacacttgagggcaggtgtcatcacgtcttcatctcctgtcatcttccctgagtacaagaagctctaggatgcttccctgggcctaggacattgaggactcatagcagaagctcacaactagtagatagaaggaaaaagggaagkggggtggtgtggggactaaatggccttgcttcagatgcataattagaactggaggcagaggagaaaattggcgattaataggttgtgggagtgaggacatcagaaaagatccagtagtaaaaatggtcacagggtgacctatgacatttgacttaatcaggagtaaattactctgcaccccgagtagaactgagagctttctggtgcacaacatttcttacatgtcc

SEQ ID NO: 285469 - DNA, 537 bp, Homo sapiens
ccccactcattttcaaatactccaattacatgcaccttgaagttttcctatagttcactgacgctgtgttcattttttatattattatttttctctgtgtgtttcattttggataatctgtatttctacttcctcaagttagcaatcttttttccgcagtgtctaatctgctatttcagctatctagtgtagaagtgtagttttcatctcacacattgtaattttcatctctagaagttcagttttggtcttttgtatatcttccttggccctccttattattttcagtctttctcctatatttctgaacatgtgaaataatgttataactsttcttattgtccatgtctgctaaatatgtaatttgtgtcagttctaagttggtttttattgcttcttatacttactataggtcttattttcctgctttctggcttggaaatttctgattgaatgcaagacattgtgaattttgccttttggggcacttgatagctttgtattctcataaatactattaaattttgctttgggggt

SEQ ID NO: 285470 - DNA, 613 bp, Homo sapiens
ctgcaaatctccagtgttgtcatcctgtctagttctctcatctgccgtactctgccctgaaaactrcagctgcctcattttccccatattctagcccagtctcctcaactcatgaagacagatagaagcctggcttccccattcctgccaccagcttgtaatctctgttcaggcaataagctggggaaagcatagagctatttcccatctcttagggatcactgtcttttttcacttactacctgatcttttggaaactgttgtttcatatcttttgtctgctttttagctgtttcaggcacgcaggtaagtgtggcctctgttattccatcttggctgaaagcagaattcttgctatcatttgagtactaagacatgccaggccctattcacagcactttacctcagccccttttaaaccaataacccctgctcacccctttgcttagaatcttcatcctttgcatctctatgctctgagttgggaaatcagggaacggagacaatgaatctcaatgcccctgtctcagagcagattaggaggcccttgttaatggagttggcttaatgctttactaacttctcataaagccacacagcctgtagtaggaac

SEQ ID NO: 285471 - DNA, 1079 bp, Homo sapiens
tctgatggttttataagtgtctggcatttcccctgcttgcacttctctttcctgccaccatgtgcagaaggtctttgcttccccttctccttccgccatgattgtaagtttcctgaggcctccccagccatgcagaactgtgcgtcaattaaatatccttcctttataaattacccattcacrgctgtgtctttacagcagtgtgagaatggactaatacaggaaggagtgggggaaggtcagggcaggtgatgacgctgcagagtttggccaaggccagacttgaaatggcaagctgagtttgaaatctattccagaggctaatcattttcacctaggttcttcctctgtggtggctcaaaagttgagttgccagattaagcaaataaaaatataagatggatagattctcagttacacttgactttcagctaaacaatgaatatttgtttagtgtaagtatgccccatacaatatttgggacatacttatactaaaaaattattgtttatctagaactcaaacataaccaggtgtcctwattttatttgttaaatacatatttaaataacccccaaattagacaaaatatttttctttttaataaaaaacacattttatgtttttcttataattttatatgtattaatacacccaactatatttagtctttttatgaaatttaagaaaccaagaacagatctatgttcagcaatttgtttccatttttwatcttatttttagaaatgacccacttaataagtacctattatttaacataactttaagatttcaaagtacataaaaagtctgtttataaacatttatctcatttacattgacttaatttatttttaataatttactcagactacttattagaactgagatattagacaaagctactcattatttcaagctatttttctattaaccattttcacagcctacgaatatctgatattcacctaagtaagaaccttaaagttaaatatatgggtactttaagggggtggagcaagatgatggaagagaagtctccaccaatcatctccctctcagaaggacactaaaaggca

SEQ ID NO: 285472 - DNA, 544 bp, Homo sapiens
agctctgattttaagtaatagaatagaatagaatacaatagaatagaatagaatagaatagaatagaatagaatagaatagaatagaatagaataggaggatagaatccaatcttcccatcccacaagtaaaaacaaccaacaatattccgagttatttctgctctatttaaaggagcatgagcttttttattctttgctccttcccattgttatctttctgctttttcatccgggtgatttgctgtgtacctactatgtgcccggcatatatggatgcaagggtaaraaataaacaagtcagactaggtgcccgctcttctggggctcacagtcaagagggggatgtgaccttttaaaaaaaaagtcccaacagattagtgcaactcacctgaggatgggccaagtatgccatgcacaggaggatgctgagagggactaactcaactacgggatggttgagtgtcttaggagctgatatttaaattgaggactgaatggcttttgcacttgttccctctgcctggaatgctcctcctcagaca

SEQ ID NO: 285473 - DNA, 519 bp, Homo sapiens
tttaatctagatgtttattgcccatctctgcctattagaagataagttttctgaggccagaaattgttgtttctctctsttctatacccagtacctggcacagagcagggactcattcaatatatgttgaatgactgaatgacatcattagtcatgctttgctttgttctgtttcttaagagacaaggtctcactttgtagcccaggcaggagtcatgctatggagcacagaccttatccttagagcaaagaggggcgatcccaggatcttaaggaggtatgtggccaagctggtttagaaagatcttgctgcatgaattgcaggagacgagaggctaggaggtcccacaggagtgtgctgaaggaggtgtggaccagtgttgtgatgggggagatgcctggaagggaatggaaggaggaataaaaaaaaaagatgataccctggggggtcttagcacccaaagggcgccgtgggttttgagaatgtggttcaggggatccagagttaaagcccaagtt

SEQ ID NO: 285474 - DNA, 519 bp, Homo sapiens
tttaatctagatgtttattgcccatctctgcctattagaagataagttttctgaggccagaaattgttgtttctctctgttctatacccagtacctggcacagagcagggactcattcaatatatgttgaatgactgaatgacatcattagtcatgctttgctttgttytgtttcttaagagacaaggtctcactttgtagcccaggcaggagtcatgctatggagcacagaccttatccttagagcaaagaggggcgatcccaggatcttaaggaggtatgtggccaagctggtttagaaagatcttgctgcatgaattgcaggagacgagaggctaggaggtcccacaggagtgtgctgaaggaggtgtggaccagtgttgtgatgggggagatgcctggaagggaatggaaggaggaataaaaaaaaaagatgataccctggggggtcttagcacccaaagggcgccgtgggttttgagaatgtggttcaggggatccagagttaaagcccaagtt

SEQ ID NO: 285475 - DNA, 519 bp, Homo sapiens
tttaatctagatgtttattgcccatctctgcctattagaagataagttttctgaggccagaaattgttgtttctctctgttctatacccagtacctggcacagagcagggactcattcaatatatgttgaatgactgaatgacatcattagtcatgctttgctttgttctgtttcttaagagacaaggtctcactttgtagcccaggcaggagtcatgctatggagcacagaccttatccttagagcaaagaggggcgatcccaggatcttarggaggtatgtggccaagctggtttagaaagatcttgctgcatgaattgcaggagacgagaggctaggaggtcccacaggagtgtgctgaaggaggtgtggaccagtgttgtgatgggggagatgcctggaagggaatggaaggaggaataaaaaaaaaagatgataccctggggggtcttagcacccaaagggcgccgtgggttttgagaatgtggttcaggggatccagagttaaagcccaagtt

SEQ ID NO: 285476 - DNA, 588 bp, Homo sapiens
aggcttatttgataaattataaggaaaactttgtcaaatgatgagtgatgctagattttctttcagttacgtttatgggtatgttattgatataaattttccaaaattatatacaattcttagaaatmtaatatgtcatcagtcataaatctagatattgtgttgtatgccacaaaataactaaattttcttgtcaatttctaattacaatgaacttctatcagatttttaaccatgacaattctaagtttttgtcatctgtagtttatcattttaaattcctctctaaaggcatttacaataagatttatggaagactgtaacaaatactcttaaaatacaagtttataatacctttaagatcaatggactaaatgaaatgtttttcaaagctctaataaaaaactgatgggtgcatacaactactaatcaagatcaagcagaacaaaaattagctacgtgagaattgataaatataatgtttttatgacttttatttaaaacattattggttctttactgaattattctgttttctagacttaaaaaattttctctcttaagctaactatagtttacagcaatttg

SEQ ID NO: 285477 - DNA, 569 bp, Homo sapiens
ttgtagctctgtgtactgttttcaagtcttcattatgtaactgtggacttgactaaattctgagtttttctagattcctccaacccaactttcttccataaaatgattaaaaacaggaactactttgttcctgaagccttgtaagctacaactaaaaaaatttttttttttttttgagacagagtcttgctctgtcacccaggctggartgcagtggtgagatctcggctcactgcaacttctgcctcccgagttcaagcgattctcctacctcagcctccaaagtagctgggattacaggcacgtgccaccatgctgggctaatttttgtattttgtttttagtagagacagggtttcgccatgttggccaggctggtcttgagctcctgacctcaggtgatccacctgcctctgcctcccaacgtgctgggaatagaggcttgagccactgaacctggcctaaactaaattttaaggaacaagtcttgtgcttgatgtatggaccacataaagaaattcactaaaccacccagtgccataacgagagacattcaaactgtaaaccaa

SEQ ID NO: 285478 - DNA, 549 bp, Homo sapiens
agctaaattttgtatttttaatagggacgaggtttcaccatgttggccaggctggtctcaaactcctgacctcatgatctgcccgccttggcctcccaaagtgctgggattagaggcgtgagccaccacgcctggcctcttttaatttttttgagacagggtctggctctgtcagccaagctggagtgcagtggtgtgatcatgggtcactgcaacmcctgcctcccgggctcaagcaatcctcctgcctcagcctcatgagtagctgggactacatgggagccccaccacacccagctaatttttatatttttgtacagacagggtttcatcatgttgcccgggctggtctcaaactcctgggctcaagtggtccgcctgccttggcctcccaaggcaggtgtgagctgctgtgcctggcacatttctctttctaataaaaccttccaccttctctttcttctttggatgtaccactccagtatgtgtgtagtatgtgtgtataccgcaaatggcaattctgtgattcccaaatgaaatgcttaattt

SEQ ID NO: 285479 - DNA, 572 bp, Homo sapiens
ttcccacgtgttggctgagctttgtaaaacatttgatttctcatctacgtgcacggcagctctgctgtctctccccaggatccatgtcactccccagctctgtcaccaaccctcccctgccttgtctctggccctgctgaccagctgtgtgactttgggtgtgttgcttcacctctctgagcctcagattcctcctattttgaatggggtaagaatgcctgcctcatggatttgtcctgtttatttacacattcctgtagttcttaaacacatatttaatattttggatgagcctcttctgtgccaggccctgaggacacagagatrggcagtggagatgaggtcctgaggacacagaggtgggcagtggagatgaggccctgctcacacagagctcccttgggagggacatcaggtgctacatagaagacctggctgggaaggtgtcggtgaagttgctgagagccatggcaatgcggagtggacgagagactcacccaggggcacatggaaggccaacagcacagcccaggccagcctggccccagagcctgctcatgactctgccctgc

SEQ ID NO: 285480 - DNA, 517 bp, Homo sapiens
tcacaccaccacctcatttaaccctcagctccacagtcacacttcgaggacttgtgccctcctccactgcctcctggctatgtgaccctaggcaagcccttctcttttcctgagccccagtttcctcatctgcaatatggggaaaataatagcaagtccctccaagtcatggtgcagaatcagggagataatccttataaagtgcctggcatggggcccagcacagaagacagaagatgcctgatcaaagcagcgggcatcaccccgagctggggggtgcggagggggctttcagatgtgaatactggacccacaggagaggctgtcattcccatagccatcattcgttttgtttgtcccttccagaatcccacatgaagkccagagctgtcctactcctgttctttgctgcttttttttcctctaccaggcttcgacagtgggagtttagcctcaactaagtctcgggaaaaggattttctgtgtccgtgaaaactgacaattcaccccaagaatc

SEQ ID NO: 285481 - DNA, 587 bp, Homo sapiens
ctttgctttcttcctgcagacatgtgttccctgccacagtcccccccaaaccacccaccccaggaacatggctgccattaactcccaagcttacaaaagctcagtatcctccaccagggcaagaggagactcacccttttcaattctaacttcaaatgcccagaaggttctatttgcttgggtcagaacctcatatttgaaccaatcaactatgtacagagagtgagtcctaattcagtcatggtatattctgaaatgaccaagtgggtggactggaaagaggagaaagggaagtttccagaagtaagctggggaccaggtcttgtagrtgctgcatttaaccttccacaccattttaaggaggttcagagaagttaggtaacttgcctgaggtcagatagccaagaagcagtcaagtcaggactaaactccagacctgctaaccgcaagccccaaactctctatcgactatttcccttgactgatttggtgatgctggacttgggttaaggtttcatttctaaaagaatcttcccaactcagcagtcctaaaatttcaagtagaaatatagacatgtcagagtggg

SEQ ID NO: 285482 - DNA, 587 bp, Homo sapiens
ctttgctttcttcctgcagacatgtgttccctgccacagtcccccccaaaccacccaccccaggaacatggctgccattaactcccaagcttacaaaagctcagtatcctccaccagggcaagaggagactcacccttttcaattctaacttcaaatgcccagaaggttctatttgcttgggtcagaacctcatatttgaaccaatcaactatgtacagagagtgagtcctaattcagtcatggtatattctgaaatgaccaagtgggtggactggaaagaggagaaagggaagtttccagaagtaagctggggaccaggtcttgtagatgctgcatttaaccttccacaccattttaaggaggttcagagaagttaggtaacttgcctgaggtcagatagccaagaagyagtcaagtcaggactaaactccagacctgctaaccgcaagccccaaactctctatcgactatttcccttgactgatttggtgatgctggacttgggttaaggtttcatttctaaaagaatcttcccaactcagcagtcctaaaatttcaagtagaaatatagacatgtcagagtggg

SEQ ID NO: 285483 - DNA, 565 bp, Homo sapiens
agagctaagtgccagcattacactcagagaaatgtgccattctggcagggcacaatggctcacacttgtaatcccagcactttgggaggccaaggcgggagtactgtttaggccaggagttggagaccaacctgggcaacatagcaaaaccccatctctacaaaaaaataaaaattcgccacatgtggtgatgagcacctgaagtcctaactactcgggaggctaaggcaggaggatcccctgagtccaggaggtcaaggctgcagtgagctatggtcatgccactgcactccagtctaagcaacagagcaagatcctatctcttaaaaagaaaaaaagtgatgccattctcatttccattttatgaatatgaaaacagaattagaactgggtaactatctctgaattagtcactgaattagtgagtaatgragccagcctttgatttcaggtttctccatttctagagcccatgcttttgacattttgtactaaagatagaaacctgtcctctccccgcctctcccctgacccccactctttctcattttccttctgtaccttg

SEQ ID NO: 285484 - DNA, 1183 bp, Homo sapiens
gtatagaaataatagtggttttttgtaggttgatactgtatcctgcaactttactgaattcatttatcagatctaagagttttttggtgaagtctttaggtttttcagatataaaactatgtcatctgcaaagggcaattttacttagtctttcccaatttggatgctttttagtttttcctcttgactgattgctctggctaggatttccagttctatgttgaataggactggtgaaagtgaacatcattgtcttatttcagttcttaaagactttcaaccgttctctattcggtatgatattggctgtgagtttataatatatttcagtctttttatgttgaggtrtgttcctcctatgcctggtttttatcatgaatgaatgttgaattttataaaatgggtttttttgcatctattgagataatcatatggtttttgtccttcattgtgtttttataatatatcctatttactgatttacttatgtcgaaccatccttgcatccttgggataaatcctgcttgatcaatggtgtatcatcttttctgatgtactaatggattcaagttgctggtaatttgtcaagaawgtatagaaataatagtggttttttgtaggttgatactgtatcctgcaactttactgaattcatttatcagatctaagagttttttggtgaagtctttaggtttttcagatataaaactatgtcatctgcaaagggcaattttacttagtctttcccaatttggatgctttttagtttttcctcttgactgattgctctggctaggatttccagttctatgttgaataggactggtgaaagtgaacatcattgtcttatttcagttcttaaagactttcaaccgttctctattcggtatgatattggctgtgagtttataatatatttcagtctttttatgttgaggtatgttcctcctatgcctggtttttatcatgaatgaatgttgaattttataaaatgggtttttttgcatctattgagataatcatatggtttttgtccttcattgtgtttttataatatatcctatttactgatttacwtatgtcgaaccatccttgcatccttgggataaatcctgcttgatcaatggtgtatcatcttttctgatgtactaatggattcaagttgctggtaatttgtcaagaa

SEQ ID NO: 285485 - DNA, 1166 bp, Homo sapiens
tttgttattctgataagcacagactcaagagggaacaaaattgcagggctgccatccttgatgcatattaaaaccttctctgtgttaaggagctagaggcgtggtgttaccaaaaaatagaaaatcacattgcacaacttactaagtctaccaaaatcataatgtktctccatggtaagttattgattgcttgctttgagatgaagctatgctgaatctgtagttcagtttgtgacattgactaaaaacaaaactctgcaaaggactgaacactgtttgttccaattgccatttttctctgtatttttaaatgcaaaaacacgaccagacctagtttgcatttgtgctttggaaccactgttcataatttgagtgactcaacacaaatcattgaagctgaatgtgtcatgtcatgcggcaaaattaaaatataccttactgctttatggggacatgcagttcccccaaaatttgggatataaaagaccaatttgtgttttaaacaatgaaatgcttattaagtaactgctgcatgtgaataaaacacattagttcaaggaccaatgaaaagataagcagatggtgctgtcaggwatgttgatttgctgcacccattaactagtcatttaacatcaggtatatctcctaatgctatgcctcccccccgcccccaccccacaacaggccccgcatgttctcactcataggtgggaattgaacaatgagaacacatggacacaggaaggggaacatcaggttttttttwaaatagtaaatgctaaataaatgtcagcccttcttccgttgttgttggtattggttgtttatagcacaagtatgtcgtaaattctgttttcccttcagattaatgccttcttcttctttagtagttgtaatgcatttaatcctgtttgtagcattaagataattttatatctttaacatgactctcctctcttccttgataccttccatttcatagttggttagtgattctatctcctgtatgtccaaacactttagaagaaagcattattacaacacacatttaattgaaaattttagatggctcctaaatggtagcaattgaatgcttttttcttctaatttttatggcgtttgccaccgtaaaagtggtaagaaaagtccaattaaataaaaattct

SEQ ID NO: 285486 - DNA, 1138 bp, Homo sapiens
atgttgatttgctgcacccattaactagtcatttaacatcaggtatatctcctaatgctatgcctcccccccgcccccaccccacaacaggccccgcatgttctcactcataggtgggaattgaacaatgagaacacatggacacaggaaggggaacatcaggttttttttaaaatagtaaatgctaaataaatgtcagcccttcttccgttgttgttggtattggttgtttatagcacaagtatgtcgtaaattctgttttcccttcagattaatgccttcttcttctttagtagttgtaatgcatttaatcctgtttgtagcattaagataattttatatctttaacatgactctcctctcttccttgataccttccatttcatagttggttagtgattctatctcctgtatgtccaaacactttagaagaaagcrttattacaacacacatttaattgaaaattttagatggctcctaaatggtagcaattgaatgcttttttcttctaatttttatggcgtttgccaccgtaaaagtggtaagaaaagtccaattaaataaaaattctwatagtaacagttagtcatgggactggggaatgactggagaagtgtaattgtttagtagctaagggccaatgggaaatatctgcctaccattctcatactcaacaagactatctaactatgtctttgaaaaatcccagggagwgagtggtttcatctccattaagatatgaatatctccgcggtggctcacccctgtaatcccagcactttgggaggccgaggcgggtggatcatgaggtcaggagatcgagaccatcctggctaacaaggtgaaaccctgtctctactaaaaatacaaaaaattagccgggcgcggtggcgggcgcctgtagtcccagctgctcgggaggctgaggcaggagaatggcgtgaacccgggaggcggagcttgcagtgagccgagattgcgccactgcagtccgcagtccggcctgggcgacagagcgagactccgtctcaaaaaaaaaaaaaaaaaaaaaaaaaagatatgaatatctcactgacttccttgcaaatcgtttccatttttctaagactcttttgcttggatcacagcattattcaa

SEQ ID NO: 285487 - DNA, 565 bp, Homo sapiens
atagtaacagttagtcatgggactggggaatgactggagaagtgtaattgtttagtagctaagggccaatgggaaatatctgcctaccattctcatactcaacaagactatctaactatgtctttgaaaaatcccagggagtgagtggtttcatctccattaagatatgaatatctccgcggtggctcacscctgtaatcccagcactttgggaggccgaggcgggtggatcatgaggtcaggagatcgagaccatcctggctaacaaggtgaaaccctgtctctactaaaaatacaaaaaattagccgggcgcggtggcgggcgcctgtagtcccagctgctcgggaggctgaggcaggagaatggcgtgaacccgggaggcggagcttgcagtgagccgagattgcgccactgcagtccgcagtccggcctgggcgacagagcgagactccgtctcaaaaaaaaaaaaaaaaaaaaaaaaaagatatgaatatctcactgacttccttgcaaatcgtttccatttttctaagactcttttgcttggatcacagcattattcaa

SEQ ID NO: 285488 - DNA, 565 bp, Homo sapiens
atagtaacagttagtcatgggactggggaatgactggagaagtgtaattgtttagtagctaagggccaatgggaaatatctgcctaccattctcatactcaacaagactatctaactatgtctttgaaaaatcccagggagtgagtggtttcatctccattaagatatgaatatctccgcggtggctcacccctgtaatcccagcactttgggaggccgaggcgggtggatcatgaggtcaggagatcgagaccatcctggctaacaaggtgaaacccygtctctactaaaaatacaaaaaattagccgggcgcggtggcgggcgcctgtagtcccagctgctcgggaggctgaggcaggagaatggcgtgaacccgggaggcggagcttgcagtgagccgagattgcgccactgcagtccgcagtccggcctgggcgacagagcgagactccgtctcaaaaaaaaaaaaaaaaaaaaaaaaaagatatgaatatctcactgacttccttgcaaatcgtttccatttttctaagactcttttgcttggatcacagcattattcaa

SEQ ID NO: 285489 - DNA, 592 bp, Homo sapiens
atctggttgtcaatcattctggctgcttcatgctgaggaggggctttgtggacagctccataccaaaagtggccacatggtccctcagaatcaaaggctaatctaataccgtagttttctgtgaaaacacaatctttctattccccacttccatcaaagacaaatcacagtaggaccaacctacctgcaaaataagcttcagtcccrtatagttggcctgattacccaaacaccacctgggctctcctaactaggccttgctggaacctctcacaaggccatttcagtcaaagctttgaagaaataactaattcttccaaagagttcccattataaatgaaacaggtacttattagccatatgcaaataaacacattgccatgaattcacaagtagttttaaaattgtggagaaattaggcagagagagagagagaaataagcttcaaattctgtttacaaaagggtagtctactcaatacacttcaagtgcacttaaaggttacaaataagtctaaagaaaaaaattctccagaccctaaaaaacaaaaagaatcagtaatggttcaaaccaaaaaagtcataaaaaatta

SEQ ID NO: 285490 - DNA, 537 bp, Homo sapiens
gcgtttcaattttcaaccttgtctctcacraaacagttcattttgtttgtcaccttctcccaggtcttaagacaaggctttgtgtaggggctcaaggttcaaaatttagcaggggtcagtgcctttttcagaaccaggagtcaaagctctgtaacttaacagcacaaggattagttaataagatatttatactacagaaactcctatcattctctccaacatttcacatattaaaacactgtgatttttgtatctagtagttactgcctgtaacacttcaatccactgtattaaagtagttagtttactgattgcatatgtctaattgctagcattctagtgatagactatgaccaaatgcatcacaaatgtgataagtcctatgccaaacttatcaaagtaagacaactaacttttctctccatcattaaaaaaaaaacgataaatgcaaatttcagttctggaaactcagtatgaaaataaataatcttctttcacttaaattctctactacaaaacaaggacaaagtaagaaaa

SEQ ID NO: 285491 - DNA, 543 bp, Homo sapiens
tcatgtgttcaccattacagtgctatacacaggtttaccaacctaagaagtccctgtgcattaacttttcaaccctgccccgctcctcacaaactcttggcagctagtaatttttttaatgatctctgtcattttgccttttccagaatggttgtataattggaatcagatgctgtgtaggtttttagactagcttcatttacttagcaatatgcatttcggattcatccatgatattttgaggcttgatagctcatttctttttattgctgaataacatgtcattgtattgatgtccatccatcaatgtttatttccaaacaattgtattgatgtccatgcatcagtgtttatttccatgcaaagtgtattactgttacttggccgcttccagtttggggtaattatgaataaaactgctataaacatttgtatcaagggttttgtgtggacacagttttcaaaataattgaataaataatacctagaaacattattgctagattgcatggcctttgytttctttcatttatttttgcccag

SEQ ID NO: 285492 - DNA, 570 bp, Homo sapiens
ccaaatcaagaacacaatcccttttgcaatagccacaagaataaaatacttagtaatacagctaaccagggagatatcagatctctacagcaagaattataaaacgctactcaaagaaatcagagatgacacaaacaaatggaaaaacattccatgctcatggataggaaaaaataatattgttaaaatggccatactgcctaaagcaatgtacagattcaatgctattcttatcaaactatcaaagtcatttttcacatgactaggaaaactattctcaaattcatayggaactacaaaagaacctgaatagcttagcaatcctaagcaggaataataaagccagaggcatcacactacccaacttcaaattaataccactaggctacagtaactgatacagtttggctgtgtccccacccaaatctcatcttgaattgtagctcccataactcacacatgttgtgggaggaacccgattgcagatatttgaatcatgggggcagtttcccccataaagttctcatggtagtgaataagtcttatgagatctgatggttttataagggg

SEQ ID NO: 285493 - DNA, 562 bp, Homo sapiens
agagaatctatttctttgcaccctccagcctctggagactgctggcatcccttggctcatggccccatttctccttttgcaaagccaacaatcctagtactcgggcctctacttctgtggtcacatctccttctstgagctaactcttctgctttccactttttctcgtgagaatccttgtaattacattgggcagcctgataatctatgataatcttaccatctcaaaattcttaattatatttgcaaagtcccttttgccatataaggtaacacagtcacaggttccagagactggtatgtgggcatcttttgagaccattattctgcctattatacttcctcctctcaaatatattctccctgagagaggcatttctgtccacgtgggtcactgctctatcccacgtacctagagcagcgccttttttgttgtttaacaatttgttgaattaatttattaattcagtgacctatgactcctccaaagctgagatgaacccaacaggtgatgagcatcttggagatttttccacctcatcaagttattttatttggctac

SEQ ID NO: 285494 - DNA, 1188 bp, Homo sapiens
taaactctgatgtgtcatatatattactcaaagacaccaaaatacatgacaagccaagatttaaagccaggtctctaggctccatagcagatgtgctggcatagaaattggtttgggaatccaatgtttgctgcccttgaagccatcatgtactttgagcttttgttcctctcgttggtgataatttgtgagttgttctctaaatcttaatcctacttatcatccatggaacacgtttctgagacaatggtggagaccagcgagtgaagaaactaaatggtatatccaatacccaactttgagcattgtattaaacaatggttaaaaagtgagagggggaaaaatgaagaaaaaaagtcctcccctcaaggagtattgaacttaagaacatgcagagagacamctgaataagtaattataacataacgtgataagtattatattagagttatttattcacagtgagctttaagagtaagagacaagtatgaaaagatatctagaggaagtgagatttcccagaagggataatacttaaactgagaagtaaaagaagaacagaaacttgtccattatagaaaagtagaaaaaacaatccagaccagwctcagaggtcaatcccagatccaaatcatttcagagttgtgctaaagtagatctggaagtgcatgtatgcagttattttaatgtgtgtgtggtgtatgtgtgtgtgtagagctgtgaattctgagtatacaatgagtgtcaacattatagtgaataagaaaagcaattccaaggatagtattcttcacagttacaatctacaaactaaagagttttcagagttagtgtgaaccgagagatggggaagaattgactttttgaaataccatatttgggatgtttagaaattctataggaagcccagtggaaattctgtctttgagggtaatctgtgcttatgtgatacagtcatgctctgggattcttctgtgtcttagagcttaggaaatggtggtaaaccccagcatttatcatgatagcatattcatctaatwtgatgacttttattttaaaaatttagagttttgatttaggttagcttgtcacattgacaataactaaaagccagctcagtctttctcaaggaaaaaaaatgttaaagtaatgccattatatctcataaaatgcacagaagagaaaaac

SEQ ID NO: 285495 - DNA, 532 bp, Homo sapiens
tttattttaagataaagagaaatcctttctaggccattgatattaaaataaacaatcattgaatttcaacctttccagcatttgctttcttcccataaataacattaaaggacacaaattcaaatcaatagtatcaaacttacctagataaatctaagtcaaacattatgccctaactaatctccacatctcaaatttacacatttcaagagtcagaattgcagtcttattactactgattttcttcaacaatcaattagggaacaaaggactgtgtttaaaatcatagcagaataaaaacatatacagtcctgcatcacttaacratggggatatgttctgagaaatgtgtcattaggtgatttaattgctgtatgaacatcatagagttacttacataaaccttgatgctgtagcctaccacacacctaggctgtagatatagctctttgttcctaggctacaaatctttacagtatattactgtactgaaaactgtaggcaattataacacaatggtaagtatttgtgt

SEQ ID NO: 285496 - DNA, 532 bp, Homo sapiens
tttattttaagataaagagaaatcctttctaggccattgatattaaaataaacaatcattgaatttcaacctttccagcatttgctttcttcccataaataacattaaaggacacaaattcaaatcaatagtatcaaacttacctagataaatctaagtcaaacattatgccctaactaatctccacatctcaaatttacacatttcaagagtcagaattgcagtcttattactactgattttcttcaacaatcaattagggaacaaaggactgtgtttaaaatcatagcagaataaaaacatatacagtcctgcatcacttaacaatggggatatgttctgagaaatgtgtcattaggtgatttaattgctgtatgaacatcatagagttacttacataaaccttgatgctgtagcctaccacacacctaggctgtagatatagctctttgttcctaggctacaaatctttacagtatattactgtactgaaaacygtaggcaattataacacaatggtaagtatttgtgt

SEQ ID NO: 285497 - DNA, 619 bp, Homo sapiens
acaagctgtattgttgtaggtgccaatcatctgatagtccctgtattagtccgggttccctagagggacagaactaataggagctgagtgtgtgtgtgtgtgtgtgtgtgtgtgtgtgtataaaattaggatatatataaaaccacaataggatatatatataattactatatatatatagtacttactatatttttaatctatctttatagttaattgtttatttcttatgtaaaccgaaacagtatctgagacaggtctcagtcaatttagaagtttattttgccaaggttaaggacatgcctggaaaaaacaaacaaacaaaaaaacaaacacgaggctgggcacagtggctcatgtctttaatcccagcactttgggaggcagaggcggaggcaggtagattgcctgagctcaggagttcgagaccaacttgcatacagcaacatgktgaaaccccgtctctaccaaaaatacaaaaaattagccagatgtggtggcacatgtctgtggtcccagctactcaggaggctgaggtgggaggatcgcttgagtctgggaggccaaggtgagctgagatcacactatgagctgagatcacacagtgaggtgagatcac

SEQ ID NO: 285498 - DNA, 487 bp, Homo sapiens
cctacagttaataatgtgttatacacttaaactttgttgagaggcaaagaactaaaactagatcaactatttgatccagaatcccattactgagtacccaaaagaagtagtcattatatcaaaaagacacctgcatacgtatgtgtatcacagcataattttyggtcccaaagctatggaaccaatctaagtgcccatcacccaaggagtagataaagaaaatgttgtacatatatatcatggaatactactcagccataacaagagtgaaataatgtcttttgcagtgacttagatggagctgggggccattattctaagtgaagtaacttggggatgataaaccaaatgccatgtgttctcacttataagtgggagctaaactatgggtacacaaaggcatacagagtggtataatggaaattggagactcagggaaggaggaaagggtggggtgtgatttttaaaaatcctacgtattgtgtac

SEQ ID NO: 285499 - DNA, 551 bp, Homo sapiens
tgtgtacacacgtatatatacacaaacacacaatttcgttttgtgtggtttttacccatcctgtctttcatatgcctgttttaatggagtattcatttctggtttttattttagtctctgtatttcyccaaaatccaaagaacatttgtttctttctggtttctttcatactatattgtttttagctctttttacattggtttcttagagacttcacattttccattgctttcatggataattaaactttggtctagatacttcattttccttttgcctattttgtgttaattcatttgttcatttattttgctagtaccagtgcataattttccttttaaattttgtgattatttttgaaaagatgctaaagtagagtagattattgttcagccagtatttaacatctaaactcaacaaatgagaggatgttttcattccatatggctgatgtaacaaattaccaaaaatttggaggctcaaaacaataaaaacttattatctcacatttctagaggctctgggagagcatgcattgtttgcctcttcta

SEQ ID NO: 285500 - DNA, 616 bp, Homo sapiens
tctggtgttaatatttctgattgtattacaaaattctttttgtgagtttttcagctttatcagatcagttttgttccttcttaagaaggttatttcatctctcatctcttgaatagttttgctgaattttttagattccttgaaatgggtttcaactttctcctgaatcttgaagatcttcattggcatccaggttctgaattctctgtctgtcatttcagcrattttatgctggtcctccacttgagtactagccataggtcttggcttggcactccccatcccatagccctgtgcaccatagctctggggtgaactcaggcttttctttttctccccagcttgggagcagcagtgttggggaccttggcaatggcaatggcagaaagcctttctgttgtctcttggggtaccacatcagagacgtgcagagctctgccaatcagaatgatcagtcagaaatggagcagctgcattgtgagcccaagctgggacccctgtctagtgaagagcaggggatttggggccaacagggaagagagactgggcttccctccatatggtgcctgtggcctgctggaggtgtgagcaaagcactcaggcactttgtttcttc

SEQ ID NO: 285501 - DNA, 505 bp, Homo sapiens
gatacctatttatttcacttcatctatcagtcataatrtctgagatagaaatattgaggcaagattcatttgacagaatttaaaataggagggaactgatatttgctgagcacagccctgtatacatgcattaatccatcttcaaattttcaagaatttttttaaaaaaacgtctttacataaaacatctacttattggaaactcattcttgtgtgagtcagaccacataatgtaaaattatgagaaaatacttcttctgatctaaaataatacattattaagaatgcatacatatacttagtcactacagttggttaaagaattttcatttatataatcttttaagaaatatttttagtgtctctttgaggttaatagtctcaagatttaatatttgatgataataatccctgaatggctaaaggaactgctcagcgtcacacagttacccaatgatacaacatagaacattttaaaataatagctttgttttcactacagtac

SEQ ID NO: 285502 - DNA, 573 bp, Homo sapiens
tttgtctccaatatagtctataatagagagactgctatttctctgatctgcatttggagtgggaggggggtcaggggaacagcaatattggcaagtttgtgaaagatacctatttgaacttgtagagtttggtggcccctgtaaacgatacctatttatttcacttcatctatcagtcataatgtctgagatagaaatattgaggcaagattcatttgacagaatttaaaataggagggaactgakatttgctgagcacagccctgtatacatgcattaatccatcttcaaattttcaagaatttttttaaaaaaacgtctttacataaaacatctacttattggaaactcattcttgtgtgagtcagaccacataatgtaaaattatgagaaaatacttcttctgatctaaaataatacattattaagaatgcatacatatacttagtcactacagttggttaaagaattttcatttatataatcttttaagaaatatttttagtgtctctttgaggttaatagtctcaagatttaatatttgatgataataatccctgaatggctaaagga

SEQ ID NO: 285503 - DNA, 505 bp, Homo sapiens
gatacctatttatttcacttcatctatcagtcataatgtctgagatagaaatattgaggcaagattcatttgacagaatttaaaataggagggaactgatatttgctgagcacagccctgtatacatgcattaatccatcttcaaattttcaagaatttttttaaaaaaacgtctttacataaaacatctacttattggaaactcattcttgtgtgagtcagaccacataatgtaaaattatgagaaaatacttcttctgatctaaaataatacattaytaagaatgcatacatatacttagtcactacagttggttaaagaattttcatttatataatcttttaagaaatatttttagtgtctctttgaggttaatagtctcaagatttaatatttgatgataataatccctgaatggctaaaggaactgctcagcgtcacacagttacccaatgatacaacatagaacattttaaaataatagctttgttttcactacagtac

SEQ ID NO: 285504 - DNA, 505 bp, Homo sapiens
gatacctatttatttcacttcatctatcagtcataatgtctgagatagaaatattgaggcaagattcatttgacagaatttaaaataggagggaactgatatttgctgagcacagccctgtatacatgcattaatccatcttcaaattttcaagaatttttttaaaaaaacgtctttacataaaacatctacttattggaaactcattcttgtgtgagtcagaccacataatgtaaaattatgagaaaatacttcttctgatctaaaataatacattattaagaatgcatacatatacttagtcastacagttggttaaagaattttcatttatataatcttttaagaaatatttttagtgtctctttgaggttaatagtctcaagatttaatatttgatgataataatccctgaatggctaaaggaactgctcagcgtcacacagttacccaatgatacaacatagaacattttaaaataatagctttgttttcactacagtac

SEQ ID NO: 285505 - DNA, 547 bp, Homo sapiens
aaaaagaatgatatcatgtcctttgcagcaacatagatgaagctaaaggccattatcctaagcaaagacacacagaaacagaaacaaaaaaccaaataccacatgtagtcactcataagtgggagctaaacattgagtaggaatggacacgaaaaagaaaacaatagacactggggcctactacagagagaagggtggcagaagggggaaaatccaaaaaccacctattgagtactatgcttattacctgggtaacagagtaatctgtataacaaacatctgtgacatataatttacctataaaacaaacttgcacatatacccctgaaataaaaataaaagttaaacaaaagactatatattgaaatcttgtattggtraagaaaaaagaaacatgctagtgaaacacattagagattctgggaataaaaagaaagtatatagtcacctgatctatgagaaataggataatgaagagaagaaacaaaaatatgatgcttggcaattatgctcctaccttgaacaaacaactacaaaaaagcttggc

SEQ ID NO: 285506 - DNA, 621 bp, Homo sapiens
agacatagtagaatgtactgttcaggaaattgttaaaaatagaaccataaaattaaagcatgaagtaagacatttcatctaataaaagccctaaagctggagaataaataacctctaccggggaatttctggtagaagagctcatctggggggaatcagctaagccctgaactgtgccctcaaagccttactcatggagcctacttaaaatttctggataaatacagcacgtcagattagccattcttcaacttgttccacgtgccagtatctgaatatggctctcacatttgcagtacccttgactcctcctcagactgcagtttaggtgactcactttagaggccttgtcaycaaagaaggaagatgaatcagaggtacaaagagaagaaattggaggtagaatgagaggaaaaatggatgcattcaaataaatagttagctattaataaattcacaattttgattccccttttttctcatccactactccatacaatccactaaatagtcctcttattttaaaaatatatattgacttaatttatgtctcttcatctctgctgccatctccctagacaaggcagttgtctaggctactaagacaatggctagccagtt

SEQ ID NO: 285507 - DNA, 621 bp, Homo sapiens
agacatagtagaatgtactgttcaggaaattgttaaaaatagaaccataaaattaaagcatgaagtaagacatttcatctaataaaagccctaaagctggagaataaataacctctaccggggaatttctggtagaagagctcatctggggggaatcagctaagccctgaactgtgccctcaaagccttactcatggagcctacttaaaatttctggataaatacagcacgtcagattagccattcttcaacttgttccacgtgccagtatctgaatatggctctcacatttgcagtacccttgactcctcctcagactgcagtttaggtgactcactttagaggccttgtcaccaaagaaggaagatgaatcagaggtacaaagagaagaaattggaggtagaatgagaggaaaaatggatgcaktcaaataaatagttagctattaataaattcacaattttgattccccttttttctcatccactactccatacaatccactaaatagtcctcttattttaaaaatatatattgacttaatttatgtctcttcatctctgctgccatctccctagacaaggcagttgtctaggctactaagacaatggctagccagtt

SEQ ID NO: 285508 - DNA, 621 bp, Homo sapiens
agacatagtagaatgtactgttcaggaaattgttaaaaatagaaccataaaattaaagcatgaagtaagacatttcatctaataaaagccctaaagctggagaataaataacctctaccggggaatttctggtagaagagctcatctggggggaatcagctaagccctgaactgtgccctcaaagccttactcatggagcctacttaaaatttctggataaatacagcacgtcagattagccattcttcaacttgttccacgtgccagtatctgaatatggctctcacatttgcagtacccttgactcctcctcagactgcagtttaggtgactcactttagaggccttgtcaccaaagaaggaagatgaatcagaggtacaaagagaagaaattggaggtagaatgagaggaaaaatggatgcattcaaataaatagttagctattaataaattcacaattttgattccccttttttctcatccactactccatacaatccactaaatagtcctcytattttaaaaatatatattgacttaatttatgtctcttcatctctgctgccatctccctagacaaggcagttgtctaggctactaagacaatggctagccagtt

SEQ ID NO: 285509 - DNA, 590 bp, Homo sapiens
ctgcaactattagtaggctgacaacataagtgtctatgcaggctaacttcgacgctagaggaaggtcacagaaaaaaactatctaccttattaggaccacaaaatggcagattaacgtgaatgccaactggctggtggtatggatgaagcccacaaaccaggaaatgaggacgagcacaacacatacacagcagctcatgattgtcatgtagtggggaggtttgcatatagcaacataacggtcataggccatggaaactaggagcaccatttcactgccagtgaagagatgaacaaagaaaatctkggccaggtgggcatcaaaagaaatagtcttgtgctcaaccagaaagtctgcaatcattttaggggtagcagaagaggcaacacatacgtctataaatgacaggtttgcaagcagaaagtacatgggggtgtgaaggcgggaatctgaggtcacagtgaggatgatgagaaagttgcccaacagaattgctagataaagtagtgaaaatataagaaacaagaaaggttggagctcccttgaactagacagtcccagcaacacaaattctgtcacccaagaatga

SEQ ID NO: 285510 - DNA, 590 bp, Homo sapiens
ctgcaactattagtaggctgacaacataagtgtctatgcaggctaacttcgacgctagaggaaggtcacagaaaaaaactatctaccttattaggaccacaaaatggcagattaacgtgaatgccaactggctggtggtatggatgaagcccacaaaccaggaaatgaggacgagcacaacacatacacagcagctcatgattgtcatgtagtggggaggtttgcatatagcaacataacggtcataggccatggaaactaggagcaccatttcactgccagtgaagagatgaacaaagaaaatctgggccaggtgggcatcaaaagaaatagtcttgtgctcaaccagaaagtctgcmatcattttaggggtagcagaagaggcaacacatacgtctataaatgacaggtttgcaagcagaaagtacatgggggtgtgaaggcgggaatctgaggtcacagtgaggatgatgagaaagttgcccaacagaattgctagataaagtagtgaaaatataagaaacaagaaaggttggagctcccttgaactagacagtcccagcaacacaaattctgtcacccaagaatga

SEQ ID NO: 285511 - DNA, 563 bp, Homo sapiens
aatgaggctgggtggagagaacttcctcttcttactgacaaaatagatcacagggcatcacgtaatatgtaaaagtctttataatacagcatattattttctttggaaaaccttttctaatattttggtatcagtaaaaaccctcagatgaatttcaaacactataaaaatacaatacatamacagaaaatattaactgtcagtaagcatatagagaaattggaaactttatgcattgctgtttggaatgtcagccccctgtgggaaatggtttggcatttcctcaaaatactaagcgtagacttatcatatgatccaacaacaccctttaagggtatatgcccaaaaaaactgacagcagagactcaaacaggtatttgtacacctgtttaatagcagcattattcacagtggccaaaaggtaaaaccaacccagcccatcagtaggtgaatgaataaagaaaatgtaatatatacatacacagaatattattcagccataaaaagaaaaaaaatctggccaggtttggtggcttacacttgtaatcccagcgctttgggag

SEQ ID NO: 285512 - DNA, 371 bp, Homo sapiens
aggaaggtgtctggatccagactccaagagagggttcttggatctcatgcaagagagaattcagagtgagtacacagagtaaagagaaagcaagtttattaataaagtagaggaataaaagaatgggtactccatagacagagtcgtccctayggatgctggttgcccattttttatggttatttcttgagtatatgctaaacaaggagtggattattcatgcctcccctttttagaccatataaggtaacctcctgatgttgccatggcatttgtaaagtgtcatggcgctggcagaagtgtagtagtgaggacaaccagaggtcactcttgtcaccatcttgattttagtgggttttggctgacttctt

SEQ ID NO: 285513 - DNA, 371 bp, Homo sapiens
aggaaggtgtctggatccagactccaagagagggttcttggatctcatgcaagagagaattcagagtgagtacacagagtaaagagaaagcaagtttattaataaagtagaggaataaaagaatgggtactccatagacagagtcgtccctacggatgctggttgcccattttttatggttatttcttgagtatatgctaaacaaggagtggattattcatgcctcccctttttagaccatataaggtaacctcctgatgttgccatggcatttgtaaagtgtcatggcgctrgcagaagtgtagtagtgaggacaaccagaggtcactcttgtcaccatcttgattttagtgggttttggctgacttctt

SEQ ID NO: 285514 - DNA, 371 bp, Homo sapiens
aggaaggtgtctggatccagactccaagagagggttcttggatctcatgcaagagagaattcagagtgagtacacagagtaaagagaaagcaagtttattaataaagtagaggaataaaagaatgggtactccatagacagagtcgtccctacggatgctggttgcccattttttatggttatttcttgagtatatgctaaacaaggagtggattattcatgcctcccctttttagaccatataaggtaacctcctgatgttgccatggcatttgtaaagtgtcatggcgctggcagaagtgyagtagtgaggacaaccagaggtcactcttgtcaccatcttgattttagtgggttttggctgacttctt

SEQ ID NO: 285515 - DNA, 615 bp, Homo sapiens
ggcagaagtgtagtagtgaggacaaccagaggtcactcttgtcaccatcttgattttrgtgggttttggctgacttctttgctgcaacctgtttcatcagggacttgtatcttgtgccgacttcctatctcatcctgtgacttagaatgccttaaccttctagaaatgcagtccagtagatctcagccttattttacctagctcctgtttaagatggagttgctctggttcaaacacctctgacatttccccctcacttttataagagaatccttaataccaagggctgcaaagggatgaagatccatcttctgaaacttcttcaggctgaataggggtaatgatattcctgcctaattattagggtccccctgtatttggggtagagaggagctcagtcagaaagcatcagtatggtgaaggccattcctaactctgagttctgacaaaaggtgatatctgggagattattagtaagtgtttaatttaaggaaacattgaataagtttatcctatgttcctacacagagagtacaacagcaatatattccacaagagtagagcaaaataagtaaaaatatctgaagtaaactaaattagaaggctttccgtgag

SEQ ID NO: 285516 - DNA, 615 bp, Homo sapiens
ggcagaagtgtagtagtgaggacaaccagaggtcactcttgtcaccatcttgattttagtgggttttggctgacttctttgctgcaacctgtttcrtcagggacttgtatcttgtgccgacttcctatctcatcctgtgacttagaatgccttaaccttctagaaatgcagtccagtagatctcagccttattttacctagctcctgtttaagatggagttgctctggttcaaacacctctgacatttccccctcacttttataagagaatccttaataccaagggctgcaaagggatgaagatccatcttctgaaacttcttcaggctgaataggggtaatgatattcctgcctaattattagggtccccctgtatttggggtagagaggagctcagtcagaaagcatcagtatggtgaaggccattcctaactctgagttctgacaaaaggtgatatctgggagattattagtaagtgtttaatttaaggaaacattgaataagtttatcctatgttcctacacagagagtacaacagcaatatattccacaagagtagagcaaaataagtaaaaatatctgaagtaaactaaattagaaggctttccgtgag

SEQ ID NO: 285517 - DNA, 1231 bp, Homo sapiens
ggcagaagtgtagtagtgaggacaaccagaggtcactcttgtcaccatcttgattttagtgggttttggctgacttctttgctgcaacctgtttcatcagggacttgtatcttgtgccgacttcctatctcatcctgtgacttagaatgccttaaccttctagaaatgcagtccagtagatctcagccttattttacctagctcctgtttaagatggagttgctctggttcaaacacctctgacatttccccctcacttttataagagaatccttaataccaagggctgcaaagggatgaagatccatcttctgaaacttcttcaggctgaataggggtaatgatattcctgcctaattattagggtccccctgtatttggggtagagaggagctcagtcagaaagcatcagtatggtgaaggccattcctaactctgagttctgacaaaaggtgatatctgggagattattagtaagtgtttaatttaaggaaacattgaataagtttatcctatgttcctacacagagagtacaacagcratatattccacaagagtagagcaaaataagtaaaaatatctgaagtaaactaaattagaaggctttccgtgagwggcagaagtgtagtagtgaggacaaccagaggtcactcttgtcaccatcttgattttagtgggttttggctgacttctttgctgcaacctgtttcatcagggacttgtatcttgtgccgacttcctatctcatcctgtgacttagaatgccttaaccttctagaaatgcagtccagtagatctcagccttattttacctagctcctgtttaagatggagttgctctggttcaaacacctctgacatttccccctcacttttataagagaatccttaataccaagggctgcaaagggatgaagatccatcttctgaaacttcttcaggctgaataggggtaatgatattcctgcctaattattagggtccccctgtatttggggtagagaggagctcagtcagaaagcatcagtatggtgaaggccattcctaactctgagttctgacaaaaggtgatatctgggagattattagtaagtgtttaatttaaggaaacattgaataagtttatcctatgttcctacacagagagtacaacagcaatatawtccacaagagtagagcaaaataagtaaaaatatctgaagtaaactaaattagaaggctttccgtgag

SEQ ID NO: 285518 - DNA, 523 bp, Homo sapiens
ctgtctccagggggaaaaaaatagccaggcatagtggagcatgcctgtgttcctagctactcaggaggccaaggaaggagaatcacttgagcccaggaggttgacactgccgtgagttatgactgtgacactgcactccagcctgggtgacacagggagatcctctctctaaataataaatacataacatacaaaaaataaattcaagaaagcaagacaagcagacaacagaagttaagaattttcatcagccttggaaatcttggaaaccctgtggtaccactctctcacttaacaaacaaaagaaaccagctttctttggggaggaaaggtattccagaaatctcttctcctaccatgtgtaagcctctatgggaaagaataastaagtacttaggatctattaaggcactgaggattccctgtgcctcaatagtacatgtactgttctctctacagatcagatcagtattttacagtcaaggagtcaaaaaggcagaaataaatattgaattcttcaagt

SEQ ID NO: 285519 - DNA, 488 bp, Homo sapiens
ccttataactcagaagtgataaaaacaacagtaatatttgaatatagtcccttatcgtccctcatgataggacaaacaattagtaatattctgtgaaatttggaaccacatttatatcttattttgcctaamtgacaggtggggtacactggtgcagagtaagggacaatgggattttccaatggaatagcccacacctaaccattggccaatacaggagccaacagccacatgtagctattgagcatatgaaatgaggctcctccaaattaagatctgctgtaaataaaaataagcactgtattttgtggagatcttataaaaaatgatgtaaattatctcttcaataccatcttatattattagctttgaattgataatattttggagacattgggttaagtaagctatattgttataactaatttcagcagtttcttttcactttttaaatgtagctctcattatatttctgttgtacagtgttg

SEQ ID NO: 285520 - DNA, 465 bp, Homo sapiens
tactgaggcctgaaaagctgtaggcattgctcaaaaaacactagcaacccacagatgcatggagcaaaagattaggtggagacatgcaataggccatgtaaggccctgaaggaacagtgaggtagagtttctttgaaaaatctgtgcattcaaaagcaggttgtataagagaaactttaraaagccatgcacatgctcagagatgccctgagaagaacctcagctttcagatcacactcatccctcagctcaatgcacaactcctaagtgttgaaagaattctctagcacagggatgatctgcaaagattgagagtgatgtttgtttgtttgtttcttgtgtgtgtgttctgttttgtgctctctcagtctctctctctctctctctctttatttctctctctggctctctcctgttgaaggaaatctgctaaaactagctgaacagcagttagggaacagagat

SEQ ID NO: 285521 - DNA, 628 bp, Homo sapiens
acttgtgtatgtaatatacaaaatgataaaaggggaaggattctcagatttagggtttgagaaatttggaagatgatgatctattttattgtctgagtagtagtactaggagatgatgggtgagtttatggagacaaggcatgagcttgagaggcttgctataacatccagatctcagaagggaagcctgagatgaagacacacatcagggaatggccagcatacgtgggcacactttgagcctaggaataaatacagagtacatgtagagatgagaacaagggaagcaacaaaccacgggaactcctgaatgtaggtgctgggtacaggaaaaggatctggcaaaggaggcttcgaaggagaatcttgtgagttagaaagaaaaccaggaatgtgatgaaaggagaagtgagtagtcaaccatattcaaggtattactcagtgaggaaagtctgggtgataaatacctataaccgatgtaccttgccagtaaagggttgcatcacatacttccatagacaagaaagaatgaatagaagcaaaaygatatctgtcctgcccaccatgaacacatgacattaggggtcattcctgtagggtcactttggaagtggaaagaaatgaaatt

SEQ ID NO: 285522 - DNA, 627 bp, Homo sapiens
aatgactattgaggtaccatttggttttgacttgaaattttagccagttcttacaacttgtaaatgaactttagatctaatcatgcgtgttccttaaagttgtgtgcttttaactttcttttttagggcagyggtcttaattctttttatgatcaacgagaatacatagggagaagtgttcattattggaagaaagttttgccattgttgaagataataaaaaagaagaacagtattcctgaacctattgatcctctgtttaaacattttcatagtgtagacattcaggtaacagagttcctttatgaatttattggagatgggaatttccagtttataaacaaagacatggagctatacactgcttaaattaattgccttgttatttaacggtaatcttgttttctaaattcactagctctcacagataagatatgacagagaagaataatgagatgtttgtctcttaagatcatataaaatctttggaaaatcatttgggttttatattctgagtataaacaatttgactaaaaactattctgtgtgtttaggcatcagaaattgttgaatatgaagaagacgcacacgtaacttttgctatattggatgcagtaaatggaaata

SEQ ID NO: 285523 - DNA, 615 bp, Homo sapiens
accactcacatacattcatttacataggttgtgtatgcaggtgcacgtgtgtgtgtgtgtgtgtgtgcatgcctttttgctctttggctctcaaattggtataacaaacattgttgtggtggttctttatactccaatctcctgaaagacaggaactgttgcaaacctctcctatctccatctccagtacagagttgtgcacttattgcactggccacccttttcatagctacacaatacatttytacagactgacttgtttaccagaattctcagtacatgtttcagatatcctgtctgttctggttcccaaatccatcacttacttgatctgtgacttctgtttgagatgggtgagacaaaatgtggcaacctgtttactttttactctaaatacagttcatagcaaatgaaaagatcaaagtatgtgctctgaatacaaaaaaaaaaaaaaacctaccagaggtttgctatccacatttttgtcttgttgtttgcacttttaaaggaataaatgcaggtataataaataaaactctaaaataagtgaaaaaatattctatgtcagagaattgtctttatcctggtctgggacatagaaagactaggttctag

SEQ ID NO: 285524 - DNA, 450 bp, Homo sapiens
ttttgtttcattttttattggtcaaaaatttccccactgcttctccagttttggctaccactcattcccaaagcaaaggccacatgttttcaatttttgactcattaacattctacttctaggtactaaattttgtaatcattattttttgctatgtatcgaccaccccagaacttaggatgttaaaacaacaaccatttgtttcctccaaaactctcagatttgcagtttgggcccagctgagccacggktggggttctctttcatgcacgtggagtcagttggcaatcctgctgagggttagttcttaaaagagagcctcgcttacatgtctgacagctggctaggctgtgaacagaagtgcctctgtcctcttttccatggcctttacagcagactaggctttctcacatggcagctgggttccaagagggcaaaatggaaacttca

SEQ ID NO: 285525 - DNA, 640 bp, Homo sapiens
aatttatgctttattatgagaccgagagtttaaaaagtcctcttacctagtgttttctaaattcataaaatatattaatttgagagatatttatcttcaggatttgggaataagccatcagaattccctggaatgttcaggagctcctaaaatcattttgcactgtatttttcataagacaatttccatattttacagtgataattgtttacaatattaataaacaacaaatatttttaaaactaaaatgttggtggcttttctattataaagacgtgatcaaaataaatggtttatcattattatgaaccattatattattttgataacatgtaaaaataacttcaattttacayagacatttgaaaatagaaagcattaaaagaaaaaatattaacacaaaacaaatatcaataaaaatcatttaaaattgaaagatagtagaaaaacattcattgtttaaaggtaattcttaaaataaagttttaaaataaaacctgagttgttctatctaataattttgaccttgctttgtgataaatattctagaacaaaaagaggtttgttttctattttgttttattcgtttatttttcaaagatgaaaatatttttgttttcttgccctagttttggttctg

SEQ ID NO: 285526 - DNA, 651 bp, Homo sapiens
gatttttttaaaaggctaatgtaactatgcttaaatctagccttgcttaaaatctttcaacggttccttgttaatctgataaaatcccaaattcaaagcccacccttccagcctcattttgttcagcacttctctgtcttctctattctctagccacacagaatgttttctgtgcttcacatgtgctcttgcattatcaacaacctttcacatgttgtgttcttggcctagaaagctgtcttttatttttgattgggtaatactcatctcataagtctctgtttaaacattatttcctaaataatgtctttactaaccctggagtgaattacattcccttgcaatatgctcttcttctttgttaagactcatcacatttgtcattagttattatttttcccatgtgcatcctcyctgctggaccataagcaactggaaagctggaatgacgtctgtagtattataattatatcttccactttataggcagtgcctcagatctattatatattaaattaaaattgaataattgatggttaattgcttggtcatggtatcttgctttcaatgatttctgtattgtatcatacttccccaatataaaatacattttacaaatatattgctctataaatgtttacagtttgttgt

SEQ ID NO: 285527 - DNA, 609 bp, Homo sapiens
ttttacagtgacctgtgattctgttttgatcaagtatttcaaactttttgacatctttgacaggtttccccaggatcaaaattctaaattaagtcttactgacctaaagttaactttgggattttccagttgggcccctggagactctcaaaggatgtatttcttatcttgtagagatgctaaatgattaagctgatgtggtsattgtcaaatgatagtgaaactagatcttctttcagttatatttattggtgtattattgatgtaaatgttccaaaaattatataaaatcacaaaatctgattttatcagtcataattttggttacattaaattttttctaaagtgatgtttgtatggatgtgttattaatgggagtattctaaagactacatgaaatttatagaagtctgatgcttctgatgtgatactatcatagtcaggattctggttctctcacctgtggagaaagggccaagtggaagctcctaaaacttctgccacagccaagatagtaaaacagagcaggccgggcatggtgactcatgcctgtcatcccagtaatttgggaggcagaggtgggcggatcacctgacgtgaagagtattg

SEQ ID NO: 285528 - DNA, 662 bp, Homo sapiens
ttttttttctcttttcccttacttttcaagagaagaatggttgtcacatcatttacagtcaatgtaatataagaggttaacctctctggagaaaatattgacacttttatactttaataagaatatctgatatagttgtaggaagaatggcatcataataggctgtggaagaaaaggtagaatggagagatttttgaagacctcaacttacatctaactcacagttgaacaactatttatgatctgtctctttttaactttaacttttatcttatcccaagacaattatatatagctcaaattataaaactgaccctaatcttaactctacctgcaaattcaactccaactctaaccatgaacactatattaatgtacactgatgtgcgttcatttatttctgactgatatatatygatataatcaattgatgattgattagaatgaatcatactttgctgatggggtataatttgaattttaacaaacaatttttctggaaaactagttgaaatacatattcatgtttttatattatagaaactatggtatatttacagccttttaatcatgtatataaagaatttttattgattaaagtaatcaataaatgtaatacatcataaatactaaatcataaatattatcttgaaaaactcaag

SEQ ID NO: 285529 - DNA, 593 bp, Homo sapiens
aaatcagtcatgttatcatgcaaactattctcttactaaaaatgactgaaattttctataaactttcttaattttttttcattataaaagatacataattcccaagtaagattagggacactaagtctaatatctttttcatcaygtactcagcttatgtaattttagtaatctaatacatgtaaatataagtaatatgcctttatgctgccttaaaaatattcaaagttgtgcacttatttaagagcaagaatcacatcatctttctagagccttctttggacacaatgcaacacactgaataatattgaatgactatgtcttgtataattactagaaattaggttcacactaaatatactgctccaagatttgtttgaaattttattctttctttttttaatctgctttctacttgtatctttattaaaactctaagattattcattagaaactttgtccataataaattataaaatcacctttgaaattaggtggtgaccttctcattgcaaatccgagtgaatcaataggaaacttcgaagaaatattttaatgcagatactataataaacaataagaaaaacctatta

SEQ ID NO: 285530 - DNA, 550 bp, Homo sapiens
atgtaaatacaatatccatatgtagcacaacatgaagattttcagcttttctttcttttcatcagcctctgaagtctctgaataaatcaagaactgtttacattttcttcactgttcagcttcrtttccatctagtttaacatgtgtggtgaacgtaatgtattcatttttttcaagaaaattctctatttttctgacaccatgcatgattcagcaagacaccatcagagtcaataatagctcgggtgaactgccttcttatctcagttagacttcctgaatacactcttataaagtagcctgcacgttttctctctcatgacaatgatcaattatataatggttccatacagcttttatctcaaatcatcccatcctaggtaacataatcttcttttggaaagaatttgaagatatatatatatatatatatatatatatatatatatatatatatgcatatatatatcagaagctatcattctgtacatttgaccttaatataattcctcctaagcctccgtttaacctacttctggaaccactaaag

SEQ ID NO: 285531 - DNA, 624 bp, Homo sapiens
tgaagccagttcatattgatataaatatctaaattatgaggatacatttctgagctagaaaatacatatcatgaaaatcaatgtggcaataataaagctttggaaaatatgcagtttgcagttttagtattatagtgggagagaggaaccatcaggaagccaaggaaagaaaaatcccagaggttacatttgtcttgaaaccaagaggaaatgacttcatcttaaaattaacaaaataaaagaatcatctaagagatttctgtttttgtttttttgttgytgtttgtttgtttgtttttcccagatgagaatgtataccagagaagtcttttataaacctcattttcctcaccttccatatttcatcagtcaccttcaatggtaccatatttctttcaggctccattttaatctcaacctggacttcacacccttttatctgttgtccagggccaagcttatagggtttcgctgtgtgcccacccagaatctcatcttgaattttaataatccccatgtgtcaagggcgggaccaggtggagataattctatcatgggaacagtttctcccatactgttctcatagtgcgtgagttctcatgagatctgatggctttataaagg

SEQ ID NO: 285532 - DNA, 558 bp, Homo sapiens
ctgcaactctggcaaagtagaaggttaaactcacatacatacccctagggttgaatccagggggctgcacagtgacgtctataggccccacttccacaacacctcgcaggataagacacactggcttggaactccagccagccatgggtgactacattacagctccctgaggtggagctcccagagggacaggtgggccaccatctttgctgtttaactgacttagtcrttgttgccttggggctctggggaatctgagacaactagggactgaagtggtcccctgtcacagtacagcagctctgtggagagatggccagactctagtcctagatcttggttctcttcactaggtgcagtctccagactgaggtgaggtctacaaccaccctcatcaattttttccagccagcagcagttccaaaccaccttggaatggagctcccagagagagtggccaagctccatctttgctgtttctcagccttaggtgctgttgctttcaggctttggagagtccgaagcaactaggggctggagtggaccctcagcacagca

SEQ ID NO: 285533 - DNA, 496 bp, Homo sapiens
gtcctaaacccttaaaaaaattttagaattaaagaatttccccatttctaggaatctaacctaagaaaatgaacaaatgtacagtcaaagtcttgaggatgtgaaattcaatgtcttcataataataaagaaaattgtgaatttattacatatctaacaataagaaagttatggtagtgccatgtgatgaaatattacrcagattttgaaaagcatgttctaaaaatatacatctgacaaacttggaaacttttcaaaacatgcaaatttaaaaaagcaaaatacaaaataatgtttctggtatgagtctaggtaatacataaaaataataatcatttcagaatagtgaatgattgttttacttctaaaaatacttttaaaactttccattcataaaatgaaatactaagatatacaatttttagtacacatctgtttaaaggaaatatatactcagaacttgaaaatcattctcagagcaaacagatctccccac

SEQ ID NO: 285534 - DNA, 636 bp, Homo sapiens
aatatgttatctcagttatcccactggaggagcaaagaagccagctcttgttagtcgttttttaggctgttcctgcaaagggtattcgctgggggatatagggattaattgcctggcatttctggcctgcccaaaactcaggtgcagcaggtttcagtggatacacacacacacacacacacacacacacacacacacacacacacagcactcatggaaagagtcacagatactagcaattgcaagtcatacctgcattcctaaaaaacttaagtggccaragaccaaggatgagacattgagagctaactgacagtataattttgcactgcgctaatctattaataacttacttaattctaagatagtggcttgtcgtagcctctaaatacacaaatacaacaggagccattgctataattgattctaatgctgaaattgttacttataatctccttcctaccactgtttgtatattccctttaaaactggttagcatttatgttgatctaagttagagttattcaacctcagtactattaacattttgggtcatataattatttattattagggatgtcctgtgccttttagaacattaagcagcatctttgacttcaacccactgatgtgagt

SEQ ID NO: 285535 - DNA, 537 bp, Homo sapiens
caatttctagtaactatagaagccattctggttgaggaggctggggaaggtacacagggtctgaaagcacttgaagaagttccaagaatccctgatctatgcagctgtccttttcatttttccaggtcaatgaagcaagatgaatgttttacatttagcaagaacacaaaaatagaacaaactaaacactaaccatagaaaaaaaccaaatactaaattttaatggaaaatatccaaaagacatggtctttatttatatctgtgtttcttcttatgggggtcacaatgcccactttttcttcatatggacacctgttaagtcacccagtgaggcagccagtgagcttgcatttcatctcctgtaaacttttaatccttagaacctattagaactagtaaacaaatacasagtttatatctagatgatgtgaaaataatatgtcagtatttctcgggtacacatgcttatacacaaacatttgtaacatcacctttaaaatatcagcaataatagtgcttaatgttatgcagatagaa

SEQ ID NO: 285536 - DNA, 590 bp, Homo sapiens
ctctctgacctggactaagaacactctacagggtgcaggtgagggctttcttctcgacttgcattctggcacaatttgatctgcaggtgaaaacacgcaagaacagaggaaagagcatgtactaattctaagagaacactccaagatacataccatattatgggtataaaatatgccacagatagcttaagtgaataattgtgaattgactgcgtgtgttcgtagctctctcttctttgatatagtaggagaacgtatgaagcttatcaaattgagggtaatcttttgccattgaaaacacaaacaagtcaacagaactgatggtaaaaatgtgaaataatctttttcaacagtggatttccatgaatatctgtcttcaaggaatcaattgtaacytaaagttgactagaatccaagagtatattaagcatattttatgtagaggtcataaagtaaacttccaaagtttgatttttatttttaaacaggatacatttttccctccaaaagctaaagaaaaggaacaaaaaaaaaaagtacctagctgggatttgattttctaaataaatcacttgatttgggcccaggag

SEQ ID NO: 285537 - DNA, 599 bp, Homo sapiens
tttgtctaaataccacattccttctcaggccaagggtccacaaactaactgtagactttaaaacagacatggaataaatatccaattctgccatttcacagctatatgacattgggtatgtaccctctgagaagtagttatttcgttggtaaaataagtatacactacatataataatagatattttgagaattaaataatgcagtttatggaggttccctagtatattaccttgcttagactaggaactcagtaaatggtagctatgtctaagtccttgcatttttaaaagkcactgctgtcatttccaaaatataaaagaggcttaagttggatccaggaagctttcatgctccttgctgtggggaaaacttaggaatagcagtccaggtgatcagaactctttagatacatatcactgctctcactgctttctgcctcctcaaatccctaaactcagtaatgatcctaacttagaatcagaataaacattggtactatgagagctccttctcctgctcctagacctaattactactcctatcatttgcatttgtcctctgtgtgagtatcatacacacgatcatgcatcagcacac

SEQ ID NO: 285538 - DNA, 599 bp, Homo sapiens
tttgtctaaataccacattccttctcaggccaagggtccacaaactaactgtagactttaaaacagacatggaataaatatccaattctgccatttcacagctatatgacattgggtatgtaccctctgagaagtagttatttcgttggtaaaataagtatacactacatataataatagatattttgagaattaaataatgcagtttatggaggttccctagtatattaccttgcttagactaggaactcagtaaatggtagctatgtctaagtccttgcatttttaaaagtcactgctgtcatttccaaaatataaaagaggcttaagttggatccaggaagstttcatgctccttgctgtggggaaaacttaggaatagcagtccaggtgatcagaactctttagatacatatcactgctctcactgctttctgcctcctcaaatccctaaactcagtaatgatcctaacttagaatcagaataaacattggtactatgagagctccttctcctgctcctagacctaattactactcctatcatttgcatttgtcctctgtgtgagtatcatacacacgatcatgcatcagcacac

SEQ ID NO: 285539 - DNA, 599 bp, Homo sapiens
tttgtctaaataccacattccttctcaggccaagggtccacaaactaactgtagactttaaaacagacatggaataaatatccaattctgccatttcacagctatatgacattgggtatgtaccctctgagaagtagttatttcgttggtaaaataagtatacactacatataataatagatattttgagaattaaataatgcagtttatggaggttccctagtatattaccttgcttagactaggaactcagtaaatggtagctatgtctaagtccttgcatttttaaaagtcactgctgtcatttccaaaatataaaagaggcttaagttggatccaggaagctttcatgctccttgctgtggggaaaayttaggaatagcagtccaggtgatcagaactctttagatacatatcactgctctcactgctttctgcctcctcaaatccctaaactcagtaatgatcctaacttagaatcagaataaacattggtactatgagagctccttctcctgctcctagacctaattactactcctatcatttgcatttgtcctctgtgtgagtatcatacacacgatcatgcatcagcacac

SEQ ID NO: 285540 - DNA, 599 bp, Homo sapiens
tttgtctaaataccacattccttctcaggccaagggtccacaaactaactgtagactttaaaacagacatggaataaatatccaattctgccatttcacagctatatgacattgggtatgtaccctctgagaagtagttatttcgttggtaaaataagtatacactacatataataatagatattttgagaattaaataatgcagtttatggaggttccctagtatattaccttgcttagactaggaactcagtaaatggtagctatgtctaagtccttgcatttttaaaagtcactgctgtcatttccaaaatataaaagaggcttaagttggatccaggaagctttcatgctccttgctgtggggaaaacttaggaatagcagtccaggtgatcagaactctttagatacatatcactgctctcactgctttctgcctcctcaaatccctaaactcagtaatgatcctaacttagaatcagaataaacattggtactatgagagctccttctcctgctcctagacctaattactactsctatcatttgcatttgtcctctgtgtgagtatcatacacacgatcatgcatcagcacac

SEQ ID NO: 285541 - DNA, 1179 bp, Homo sapiens
catgctccttgctgtggggaaaacttaggaatagcagtccaggtgatcagaactctttagatacatatcactgctctcactgctttctgcctcctcaaatccctaaactcagtaatgatcctaacttagaatcagaataaacattggtactatgagagctccttctcctgctcctagacctaattactactcctatcatttgcatttgtcctctgtgtgagtatcatacacacgatcatgcatcagcacacatatgcacacagattcccacttaaagtgtaagccccagggacttttgtcacgttggtcatagaaatatccctaatagatagaatggagtgcctcccacttartgagagcccgataaatagcatgggtcatcatatagttctatatttttgtctcctatataaccactttgtagttaggaagtgattgcttctctctgtggagaagactggcttcccaacaaccacctgctgacccttccataagctttgcatatggatagaagtcaactgatttggtcctaaatagtaaaagaggatagaagtcaactgatttggtcctaaatagtaaaagaggatagwcatgctccttgctgtggggaaaacttaggaatagcagtccaggtgatcagaactctttagatacatatcactgctctcactgctttctgcctcctcaaatccctaaactcagtaatgatcctaacttagaatcagaataaacattggtactatgagagctccttctcctgctcctagacctaattactactcctatcatttgcatttgtcctctgtgtgagtatcatacacacgatcatgcatcagcacacatatgcacacagattcccacttaaagtgtaagccccagggacttttgtcacgttggtcatagaaatatccctaatagatagaatggagtgcctcccacttagtgagagcccgataaatagcatgggtcatcatatagttctatatttttgtctcctatataaccactttgtagttaggaagtgawtgcttctctctgtggagaagactggcttcccaacaaccacctgctgacccttccataagctttgcatatggatagaagtcaactgatttggtcctaaatagtaaaagaggatagaagtcaactgatttggtcctaaatagtaaaagaggatag

SEQ ID NO: 285542 - DNA, 591 bp, Homo sapiens
attctctgtgttccctcctattatagaggcagttttaaattaacataatagatcttcatrtatttcacttcttactacatatcctgctctaagactcatacctggcacataagtcttactctgaaagttggtctcaatgaataagttatgggcatgattattttccccatttggctaatgaggaaactggaagcaagagttatatagtttgctcaggatcacatacctaaaaaaattaaaatcctgtatttaaacactggcagtccaacatcagttctcaatcctttaatcaccaagtttcagatatatcaagaagaggtatgtgattttcaagaaaaagttttaaaaaatatatatgtggaagtgcagaatattcctatgtgaataaatatgcaaagatttttctataactcgtctgacctctgtaaaaacaaaagatcatgacctttgatctaagtggttaaagcagaaatgaaatcaatgattttttacgaatgctttggccctgttgcttctctcacagctgcctacttggttctcctgccccattttccctggatttgggttagattatgtgatacagattttttt

SEQ ID NO: 285543 - DNA, 1237 bp, Homo sapiens
attctctgtgttccctcctattatagaggcagttttaaattaacataatagatcttcatgtatttcacttcttactacatatcctgctctaagactcatacctggcacataagtcttactctgaaagttggtctcaatgaataagttatgggcatgattattttccccatttggctaatgaggaaactggaagcaagagttatatagtttgctcaggatcacatacctaaaaaaattaaaatcctgtatttaaacrctggcagtccaacatcagttctcaatcctttaatcaccaagtttcagatatatcaagaagaggtatgtgattttcaagaaaaagttttaaaaaatatatatgtggaagtgcagaatattcctatgtgaataaatatgcaaagatttttctataactcgtctgacctctgtaaaaacaaaagatcatgacctttgatctaagtggttaaagcagaaatgaaatcaatgattttttacgaatgctttggccctgttgcttctctcacagctgcctacttggttctcctgccccattttccctggatttgggttagattatgtgatacagatttttttwtttttgcagctgtctactctccatatctctgcctttcaaactgtaccaccatgccctccctgaacttcttcttctgtctcctctattcagggaggctgctgggttctaatgcagagagaactcctggttcaatcccctcaactcagggagacacctaggttatccttccctatattcttatggccacaaactggggcaattacaggaattatcttgtttgtttcccctttctcagaatcattgtattccattgaccaataatcattatctgaaaagtgttgtttcatacattttttagaagtagaattttaattctttttattctgttttgctgcgtcatwgctgctccttgctaggcaagaatacaatattgaattctgttcattatcgagtattagaggtacaaaagcagacattatagtcttatttctattctctaagggaaaactaggtatttcactattcagtatgttgtttggtaggattttatctttcagtttaagatagtttcttctattcctagttttatcattaaaatgttttaacttttctcaaatgtgttttttgcatgtattgaaatgataatgtggtttttactctcttattgttagttttgtaagttacattgttgagtattaaaacttc

SEQ ID NO: 285544 - DNA, 591 bp, Homo sapiens
tttatgacttcttgagacagaatcttagagactgattttcagcctaacactaccaagtgaacacctttgaaggcttgtgtaaattcccttgtatcccttttaccatgctatgtgctcaattccctgttcctgtgttctttgctactaacagtgagcaacttcaaacttcttcagagaattacccacagggcactaaaactgcgtcaccaatakgaaaatctgtaagtgattggaagcttaaatcccaccagtatggcacacggattcccccaaatacttgttttacagtgtctttggcccatcctacagcttctggcttgtagttgagactttttcagagaattgtcttgggaatacttgaatggccttgattatttagaaagagcttgaagtacctgaacatttccatctcccgggaacagaccatagtcaattactgacttattcagagttccataagccagctctcttgcctcaagatggaactcaaattgagatgcaattttagttctagagcgctccatgggatcaaactgtagctgaacctttaggtaaaatcccatattttttgtactttcacacttcaccaac

SEQ ID NO: 285545 - DNA, 609 bp, Homo sapiens
gtcttatttttattaccacttaactcaaaatattttctaatttctgttataattacattttttttttactcctgggttatttagatgtgtgttatttaatttccaaatatctaggaattttcatgttgtctctttgcaattgattccaaacttactcccaatttgattaattaactctgtatgagtttttttctggttttgttttaraatttgttgagacattgcaatatgttatatttccactcttttttaccttagggtgaaatattatgtactgtgtgtgtgtgtgtgtgtgcgcatgagcacatatatttgtcaaactgttattcaaatcttctatattctgaatgactttgtctcttatataagttactgaaagatttgtattcagaatcttttattactgcccgtagttttgtctacttactcaaatctcgtaattctttctatataatttgaagagaaggtaatattagatgcattaaaattataatttttatataatatatcctgataaacagacccctttgtcattgtgaaaggtgttctttgtcatgaataatgttgtttatcctagaaatctgcttttttctatattaatttgacttt

SEQ ID NO: 285546 - DNA, 500 bp, Homo sapiens
acagcaccagcgaccaatcctggagaaacagaattatgtgacctattgtataggtaattcaagatacttgtgttgaggaaacttaaagaaattcaagacaacaaagaaggaattcaggattctaccagattaaggaggagattgaaataattaacaggaaacaagcagaaattcgggagctaaaaaatgcaactggcatactgaagaatgcattagagtcctttaatagtagaaatgataaagcagtagaaagaattaatgagcttgaagacaggttatttgaaaatacacaaaggagttcaaaggaaaaataataaaaagcaatgaaacatgcctataagatctagaaaatagcctcaaaaggcaaatctaagagttattggccttaaagaggagacagagaaagagatacaggtacaaagtttattccaatrtataataacagagaacttcccaaacctagagaaagatatcaatatcctaggacaagaaggttatag

SEQ ID NO: 285547 - DNA, 583 bp, Homo sapiens
ttgcctacagtaaatacactttacataaaaagacacaagtagactaaaagtaaagggatggaaaaagatattccatgccaatagaaactaaaaaaggacagaagtagctattcttatgtcagacatagtagatttcaagacaaaaactgtaagaagagaraaaggtcactatataatgataatagcatcaatagagcaaaaatatataacaatttttaatacatatgcacccaacatgagagcacatagatatataaagcaaatattactagaactaaagagagagataggccccagtacaataatagttggagacttcaacaccccacactcagcattggatagatcttccaaacagaacatcagaaaaagagaaaaaaaaaacaaaacaaaacatgagacttaaactgcattagagaccaaatggatctaatagatatttacagaacatatcatccaacagctgcacaatatgcattcttttcctcagcacatggctcattctcaaggacagatcatatgttaggtcacaaaagaagtcttaaaacacacaaaaaattgaaataatatcaggcattttctc

SEQ ID NO: 285548 - DNA, 537 bp, Homo sapiens
cgtggcatcagaaataactttgtaaacttgagaaatctgtttaaacttctctccatttggatttttatcagggtggtacttcaaggccagtttcctataagcctttttcagttcttccttagtggtactttgtttgaccctccaaaaatcatggaaactggtttatttcaccattttctacagctactgagtaggatgaggccagtgtgagaaagcggaaaggactgtagtaactttttgaagctcgggcagtttccacttctctacatctcactgagtattctggaaagttcggcccggtgaactgaagcccttgtcttttgtcttctgcttgtgttttatatayattttttcttcctctattgccatcatcatttgtgacttaatggttgtctgtagtgaattgtttatatttatattttaaaaatctagtacagatatttgcctttttgttataagacttgcataaaacatacttataacaaactattttaagctgataacaatttaactttgattgcatttgcttttgtagag

SEQ ID NO: 285549 - DNA, 1131 bp, Homo sapiens
cttttaatataattatttctcttcttttaggtgcatacacactcataggtttgctgggtcaaataggagttatatttttagttctacaaaaaatccctgtactgttttccatagaagttgaacttatttacatacccacgaacagtatgtgaatgttccctttactccacatccataacaacatatgctgtctttttacagtttagcaatagccattttgaatggctttacatgatatttcmttgtggacttaatttgcatttatctgatcattactgatgttgagcatatttttatatgtttgttagccacttgtatgtcttcctttgaaaatagtgtagttcatgttctttgctcactttttaatgttttttttttttccccctgtttagttgtttgagttccttgtggattctggatattagttccttgtcaaatgcatagtttgcaaatattttctctgattatttaagtggtctgtttactctgttgataatttcttatgctgtgcagacactttttggtttaattaaatcccatttgtctatttttgtttttgttgcatwcttttaatataattatttctcttcttttaggtgcatacacactcataggtttgctgggtcaaataggagttatatttttagttctacaaaaaatccctgtactgttttccatagaagttgaacttatttacatacccacgaacagtatgtgaatgttccctttactccacatccataacaacatatgctgtctttttacagtttagcaatagccattttgaatggctttacatgatatttcattgtggacttaatttgcatttatctgatcattactgatgttgagcatatttttatatgtttgttagccacttgtatgtcttcctttgaaaatagtgtagttcatgttctttgctcactttttaatgttttttttttttccccctgtttagttgtttgagttccttgtggattctggatattagttccttgtcaaatgcatagtttgcaaatattttctctgattatwtaagtggtctgtttactctgttgataatttcttatgctgtgcagacactttttggtttaattaaatcccatttgtctatttttgtttttgttgcat

SEQ ID NO: 285550 - DNA, 577 bp, Homo sapiens
gttaataaaactcgtgctctttctctatggaaaaatgaccttgatttaactttctatatyggtttccctggaaacctagtaaaggtggaatgtcagctatgttaccaagcaacatttcctatggtaaaaatgacttctaaactatacctgctctgggagaactgtcaatgaattataaatacctggtgggaatccatagtttgaacttctctgaatgcagtgcattcttgacactgtgatgcaccttgctaggacccgtggaagctaatcctatgggatgaaaaacagatattaccttatatggagaataaggcagttaagccagatggctcccatactcattctcttaggccaagttctgcaagaaacagactgtgtgagagagatttgcacccaggtttactggggagtgtttttggggaatgaggccaacaggactggacagattactggggagtgctcttggggaatgtgctgaacaggactggacataggaaaaagctaaactgtaatatagttacagctgtaaaccttagccaattcctcaaggacctcctcactagcgtgggcggccctt

SEQ ID NO: 285551 - DNA, 577 bp, Homo sapiens
gttaataaaactcgtgctctttctctatggaaaaatgaccttgatttaactttctatattggtttccctggaaacctagtaaaggtggaatgtcagctatgttaccaagcaacatttcctatggtaaaaatgacttctaaactatacctgctctgggagaactgtcaatgaattataaatrcctggtgggaatccatagtttgaacttctctgaatgcagtgcattcttgacactgtgatgcaccttgctaggacccgtggaagctaatcctatgggatgaaaaacagatattaccttatatggagaataaggcagttaagccagatggctcccatactcattctcttaggccaagttctgcaagaaacagactgtgtgagagagatttgcacccaggtttactggggagtgtttttggggaatgaggccaacaggactggacagattactggggagtgctcttggggaatgtgctgaacaggactggacataggaaaaagctaaactgtaatatagttacagctgtaaaccttagccaattcctcaaggacctcctcactagcgtgggcggccctt

SEQ ID NO: 285552 - DNA, 577 bp, Homo sapiens
gttaataaaactcgtgctctttctctatggaaaaatgaccttgatttaactttctatattggtttccctggaaacctagtaaaggtggaatgtcagctatgttaccaagcaacatttcctatggtaaaaatgacttctaaactatacctgctctgggagaactgtcaatgaattataaatacctggtgggaatccatagtttgaacttctctgaatgcagtgcattcttgacactgtgatgcaccttgctaggacccstggaagctaatcctatgggatgaaaaacagatattaccttatatggagaataaggcagttaagccagatggctcccatactcattctcttaggccaagttctgcaagaaacagactgtgtgagagagatttgcacccaggtttactggggagtgtttttggggaatgaggccaacaggactggacagattactggggagtgctcttggggaatgtgctgaacaggactggacataggaaaaagctaaactgtaatatagttacagctgtaaaccttagccaattcctcaaggacctcctcactagcgtgggcggccctt

SEQ ID NO: 285553 - DNA, 577 bp, Homo sapiens
gttaataaaactcgtgctctttctctatggaaaaatgaccttgatttaactttctatattggtttccctggaaacctagtaaaggtggaatgtcagctatgttaccaagcaacatttcctatggtaaaaatgacttctaaactatacctgctctgggagaactgtcaatgaattataaatacctggtgggaatccatagtttgaacttctctgaatgcagtgcattcttgacactgtgatgcaccttgctaggacccgtggaagctaatcctatgggatgaaaaacagatattaccttatatggagaataaggcagttaagccagatggctcccatactcattctcttaggccaagttctgcaagaaacagactgtgtgagagagatttgcacccargtttactggggagtgtttttggggaatgaggccaacaggactggacagattactggggagtgctcttggggaatgtgctgaacaggactggacataggaaaaagctaaactgtaatatagttacagctgtaaaccttagccaattcctcaaggacctcctcactagcgtgggcggccctt

SEQ ID NO: 285554 - DNA, 520 bp, Homo sapiens
aattttttattggtctttctactttgttagtggggttggtattcttgtgggtgttttttttctttttttctttttgctggctctgtcctttaaaaaattgttgttstaattatcagtttttcattatcaatctttttcctttattgcttttgtattttgtgtcataattagaaagtttttccccaatcccaggtaataaagcaattaacacaagctttcttctattacttataagattttttttaaccacatttaaatctctgatcctttcagaattttccctggtggatagtatgagaaatggatccaattttgtttttatacataagtctatccagtcctcctaaccccatatgttaaatactccttttccatcactgatttgaaaagatatcattatcagacattaaatttccatttgcaatttggtctatttgaatttttttattctagcagtcagtctattattttaccactaccaatactgtttgaaatgaaaagttattgtgttttaatattt

SEQ ID NO: 285555 - DNA, 311 bp, Homo sapiens
tggctagatttaaaagagagataacaatcactacagcttggctctcaggaagccacatccctaggaaaatgggcagagtactacatcaagggaacaccgtgtgggacaaaagaatttgaacaacagccttgagccctagacattccctctgacagagcccrcccaaataagaaggaacagaaaaccaactctggtaatatgacaaaacaaggctcattaacaccccccaaaaatcacactagctcactggcaacggatccaaaccaagaaaaaaatccctgatttacctgaaaaagaattgagaagggcag
